United States Patent Application Publication US 2026/0240958 A1 - sequence listing, part 4

SEQ ID NO: 3910 - RNA, 5419 nt, synthetic construct
  source 1..5419: mol_type = other RNA
aggaaataagagagaaaagaagagtaagaagaaatataagagccaccatggcccctaagaagaagcgtaaagtgagccgggtgaacggcagcggcagcggcggcggcatgaaccacgaccaggagttcgacccccctaaggtgtaccctcccgtccccgccgagaagagaaagcccatccgggtcctgagcctgttcgatggcatcgccaccggtctgctggtgctgaaggacctgggcatccaggtggataggtacattgcctccgaggtgtgcgaggactccatcaccgtgggaatggtgcgtcatcagggcaagatcatgtacgtgggcgacgtgcggagcgtgacacagaagcatatccaggagtggggccctttcgacctggtgatcggcggcagcccttgcaatgacctgagcatcgtgaacccagcccggaagggcctgtacgagggaaccggcagactgttcttcgagttttacagactgctgcacgacgcccggcctaaggaaggcgacgaccggcccttcttttggctgttcgagaatgtggtggccatgggagtcagcgacaagcgggatattagccggttcctggagagcaaccccgtgatgatcgatgccaaggaagtgagcgccgcccaccgggccagatacttctggggcaatctgcctggcatgaacagacccctggccagcaccgtgaacgacaagctggagctgcaggagtgcctggagcacggccggatcgccaagttcagcaaggtgagaaccatcaccacccgaagcaacagcatcaaacaaggcaaggaccagcactttcctgtgttcatgaacgagaaggaggacatcctgtggtgtaccgagatggagagagtgttcgggttcccagtccactacacagatgtcagcaacatgtctagactggccagacagagactgctgggaagaagctggtccgtccctgtgatcagacacctgttcgcccctctgaaggagtacttcgcctgcgtgagcagcggcaacagcaacgccaacagccggggccccagcttctctagcggcctggtgccactgtccctgagagggagccacatgggccccatggagatctacaaaaccgtgagcgcctggaagcggcagcctgtgcgcgtgctgagcctgtttcggaatatcgataaagtcctgaaaagcctgggattcctggagagcggctctggctccggcggtggcaccctgaagtacgtggaggatgtgacaaacgtggtcagacgggatgtggagaagtggggccccttcgatctggtgtacggcagcacccaacccctgggcagctcttgtgaccggtgccctggctggtacatgtttcagttccaccggatcctgcagtacgccctgccgagacaggagtcccagcggccattcttttggattttcatggacaacttgctgctgaccgaggatgaccaggaaactaccactcggttcctgcagaccgaagccgtgaccctgcaggacgtgagaggccgggactaccagaacgccatgcgggtgtggtccaacatccctggactgaaaagcaagcacgcacctctgacccctaaagaagaggagtacctgcaggcccaggtgcggagcagaagcaagctggacgcccctaaggtggatctgctggtgaagaattgcctcctgcccctgagagagtacttcaagtatttcagccagaatagtctgcccctgggcggcccaagcagcggcgcccctcctcccagcggcggcagcccagccggctccccaacctctaccgaggagggcacctctgagtccgccacccccgagagcggccctggcacctccaccgagcccagcgagggcagcgcacccggcagccctgccggcagccccacctccacagaggagggaaccagcaccgagcccagcgaaggcagcgccccaggcaccagcaccgagcctagtgagggcggctctggcggcggcagcgcccaggagattaaacggatcaacaagatcagaagaagacttgtgaaagacagcaacaccaagaaggccggcaagacaggccccatgaaaaccctgctggttagagtgatgacacccgatctgagagagcggctggaaaacctgagaaagaagcctgaaaatatcccccagcccatcagcaatacatctagagccaacctgaataagctgctgaccgattacaccgaaatgaagaaggcgatcctgcatgtgtactgggaagagttccagaaggaccctgtgggcctgatgagccgggtggcccagcctgccagcaagaagatcgatcagaacaagctgaaacctgagatggacgagaagggcaacctgaccaccgccggctttgcctgctctcagtgtggccagcccctgttcgtgtacaagctggagcaggtgtctgagaagggcaaggcttacaccaactacttcggacggtgcaatgtggccgagcacgaaaagctgatcctgctggcccagctgaagcccgagaaggatagcgacgaagccgtgacatatagcctgggaaagtttgggcagagggccctggatttctacagcattcatgtgaccaaggagtccacccaccccgtgaagcccctggcccagatcgccggaaacagatacgcctccggacctgtgggaaaggccctgagcgacgcatgtatgggcacaatcgcctccttcctgtctaagtaccaggacatcatcatcgaacaccagaaggtggtgaagggcaaccagaagagactggagagcctgcgggagctggccggcaaggaaaacctggaataccctagcgtgaccctgccacctcagcctcacaccaaggagggcgttgatgcctacaacgaagtgatcgcccgggtgcgaatgtgggtgaacctgaacctgtggcagaagctgaagctaagcagagatgatgccaagcctctgctgagactgaagggattcccttcctttcctctggtcgagagacaggccaacgaagtggactggtgggacatggtgtgtaacgtgaagaagctgatcaacgagaaaaaggaggatggcaaggtgttttggcagaatctggctggctacaagagacaggaagccctgagaccatacctgagcagcgaggaagatcggaagaagggaaagaaattcgctcggtaccagctgggcgacctgctgctgcacctggaaaagaagcacggcgaggactggggaaaggtgtacgacgaggcctgggagcggattgacaagaaagtggaaggcctgagcaagcacatcaagctggaagaggaacggagaagcgaggacgcccagagcaaggccgccctgaccgactggctgcgggctaaggccagcttcgtgatcgagggcctgaaggaggccgacaaggacgagttctgcagatgcgagctgaagctgcagaagtggtacggggacctgcggggaaagcccttcgccatcgaagccgagaacagcatcctggacatcagcggcttcagcaagcagtacaactgtgccttcatctggcagaaggacggcgtgaagaagctgaacctgtacctgatcatcaactacttcaagggcggcaagctgcggttcaagaagatcaaacctgaagccttcgaagccaacagattctacaccgtgatcaacaaaaagagcggcgagatcgtgcccatggaggtgaacttcaacttcgacgaccccaacctgatcatcctgcctctggcctttggcaagagacagggcagagaattcatctggaacgacctgctgtccctggaaaccggcagcctgaagctggccaacggaagagtgatcgagaagacactgtacaacagaagaacccggcaggatgagcctgccctgttcgtggccctgaccttcgagcggcgggaggtcctggactcctccaatatcaaaccaatgaacctgatcggcgtggcaagaggcgaaaacatccccgccgtgatcgccctgaccgaccccgagggctgcccactgagccggtttaaggatagcctgggaaacccaacccacatcctgagaatcggcgagagctataaggagaagcagcggaccatccaggccaagaaggaggtggagcagcggagagccggcggctacagccggaagtacgccagcaaagccaagaatctggcagacgatatggtgagaaacaccgctagagatctgctgtactacgccgtgacccaggatgccatgctgatcttcgccaacctgagccggggcttcggccggcagggcaagcggaccttcatggccgagagacagtacacacggatggaggactggctgaccgccaagctggcctacgagggcctgagcaagacctacctgtccaagacactggcccagtacacctccaagacatgcagcaactgtgggtttaccatcaccagcgccgactacgacagggtgctggagaagctgaagaagacagcaacaggctggatgaccacaattaacggcaaggagctgaaggtggagggccagattacctactacaacagatacaagagacagaacgtagtcaaggacctgtccgtcgagctggatagactgagcgaagaatctgtgaacaacgacatctcctcctggacaaagggcagaagcggagaagctctgagcctcctgaagaaaagattctcccatagacccgtgcaggagaagttcgtgtgcctgaactgcggcttcgagacacacgcagccgagcaagccgccctgaacatcgccagatcctggctgttcctgcggagccaggagtacaagaaataccagacaaacaagacaaccggcaacaccgataagagagccttcgtcgagacctggcagtccttttaccggaagaagcttaaggaggtgtggaaacctgccgtgcggtctggcggatctggcggaggctccacaagccagctgcaggagaccatgaccttcaaggacgtggaggtgaccttcagccaggacgagtggggcctgctggacagcgcccagaggaacctgtacagggacgtgatgctggagaactacaggaacatggccttcctggtgggccccttcaccaagcccgccctgatcagctggctggaggccagggagccctggggcctgaacgtgcaggtggcccagcccaagaggaaccccggcgccgcccccaccagccccaagaaaaagagaaaagtctaagctgccttctgcggggcttgccttctggccatgcccttcttctctcccttgcacctgtacctcttggtctttgaataaagcctgagtaggaaggctagcaaaaaaaaaaaaaaaaaaaaaaaaaaaaaaaaaaaaaaaaaaaaaaaaaaaaaaaaaaaaaaaaaaaaaaaaaaaaaaaa

SEQ ID NO: 3911 - RNA, 5419 nt, synthetic construct
  source 1..5419: mol_type = other RNA
aggaaataagagagaaaagaagagtaagaagaaatataagagccaccatggcccctaagaagaagcgtaaagtgagccgggtgaacggcagcggcagcggcggcggcatgaaccacgaccaggagttcgacccccctaaggtgtaccctcccgtccccgccgagaagagaaagcccatccgggtcctgagcctgttcgatggcatcgccaccggtctgctggtgctgaaggacctgggcatccaggtggataggtacattgcctccgaggtgtgcgaggactccatcaccgtgggaatggtgcgtcatcagggcaagatcatgtacgtgggcgacgtgcggagcgtgacacagaagcatatccaggagtggggccctttcgacctggtgatcggcggcagcccttgcaatgacctgagcatcgtgaacccagcccggaagggcctgtacgagggaaccggcagactgttcttcgagttttacagactgctgcacgacgcccggcctaaggaaggcgacgaccggcccttcttttggctgttcgagaatgtggtggccatgggagtcagcgacaagcgggatattagccggttcctggagagcaaccccgtgatgatcgatgccaaggaagtgagcgccgcccaccgggccagatacttctggggcaatctgcctggcatgaacagacccctggccagcaccgtgaacgacaagctggagctgcaggagtgcctggagcacggccggatcgccaagttcagcaaggtgagaaccatcaccacccgaagcaacagcatcaaacaaggcaaggaccagcactttcctgtgttcatgaacgagaaggaggacatcctgtggtgtaccgagatggagagagtgttcgggttcccagtccactacacagatgtcagcaacatgtctagactggccagacagagactgctgggaagaagctggtccgtccctgtgatcagacacctgttcgcccctctgaaggagtacttcgcctgcgtgagcagcggcaacagcaacgccaacagccggggccccagcttctctagcggcctggtgccactgtccctgagagggagccacatgggccccatggagatctacaaaaccgtgagcgcctggaagcggcagcctgtgcgcgtgctgagcctgtttcggaatatcgataaagtcctgaaaagcctgggattcctggagagcggctctggctccggcggtggcaccctgaagtacgtggaggatgtgacaaacgtggtcagacgggatgtggagaagtggggccccttcgatctggtgtacggcagcacccaacccctgggcagctcttgtgaccggtgccctggctggtacatgtttcagttccaccggatcctgcagtacgccctgccgagacaggagtcccagcggccattcttttggattttcatggacaacttgctgctgaccgaggatgaccaggaaactaccactcggttcctgcagaccgaagccgtgaccctgcaggacgtgagaggccgggactaccagaacgccatgcgggtgtggtccaacatccctggactgaaaagcaagcacgcacctctgacccctaaagaagaggagtacctgcaggcccaggtgcggagcagaagcaagctggacgcccctaaggtggatctgctggtgaagaattgcctcctgcccctgagagagtacttcaagtatttcagccagaatagtctgcccctgggcggcccaagcagcggcgcccctcctcccagcggcggcagcccagccggctccccaacctctaccgaggagggcacctctgagtccgccacccccgagagcggccctggcacctccaccgagcccagcgagggcagcgcacccggcagccctgccggcagccccacctccacagaggagggaaccagcaccgagcccagcgaaggcagcgccccaggcaccagcaccgagcctagtgagggcggctctggcggcggcagcgcccaggagattaaacggatcaacaagatcagaagaagacttgtgaaagacagcaacaccaagaaggccggcaagacaggccccatgaaaaccctgctggttagagtgatgacacccgatctgagagagcggctggaaaacctgagaaagaagcctgaaaatatcccccagcccatcagcaatacatctagagccaacctgaataagctgctgaccgattacaccgaaatgaagaaggcgatcctgcatgtgtactgggaagagttccagaaggaccctgtgggcctgatgagccgggtggcccagcctgccagcaagaagatcgatcagaacaagctgaaacctgagatggacgagaagggcaacctgaccaccgccggctttgcctgctctcagtgtggccagcccctgttcgtgtacaagctggagcaggtgtctgagaagggcaaggcttacaccaactacttcggacggtgcaatgtggccgagcacgaaaagctgatcctgctggcccagctgaagcccgagaaggatagcgacgaagccgtgacatatagcctgggaaagtttgggcagagggccctggatttctacagcattcatgtgaccaaggagtccacccaccccgtgaagcccctggcccagatcgccggaaacagatacgcctccggacctgtgggaaaggccctgagcgacgcatgtatgggcacaatcgcctccttcctgtctaagtaccaggacatcatcatcgaacaccagaaggtggtgaagggcaaccagaagagactggagagcctgcgggagctggccggcaaggaaaacctggaataccctagcgtgaccctgccacctcagcctcacaccaaggagggcgttgatgcctacaacgaagtgatcgcccgggtgcgaatgtgggtgaacctgaacctgtggcagaagctgaagctaagcagagatgatgccaagcctctgctgagactgaagggattcccttcctttcctctggtcgagagacaggccaacgaagtggactggtgggacatggtgtgtaacgtgaagaagctgatcaacgagaaaaaggaggatggcaaggtgttttggcagaatctggctggctacaagagacaggaagccctgagaccatacctgagcagcgaggaagatcggaagaagggaaagaaattcgctcggtaccagctgggcgacctgctgctgcacctggaaaagaagcacggcgaggactggggaaaggtgtacgacgaggcctgggagcggattgacaagaaagtggaaggcctgagcaagcacatcaagctggaagaggaacggagaagcgaggacgcccagagcaaggccgccctgaccgactggctgcgggctaaggccagcttcgtgatcgagggcctgaaggaggccgacaaggacgagttctgcagatgcgagctgaagctgcagaagtggtacggggacctgcggggaaagcccttcgccatcgaagccgagaacagcatcctggacatcagcggcttcagcaagcagtacaactgtgccttcatctggcagaaggacggcgtgaagaagctgaacctgtacctgatcatcaactacttcaagggcggcaagctgcggttcaagaagatcaaacctgaagccttcgaagccaacagattctacaccgtgatcaacaaaaagagcggcgagatcgtgcccatggaggtgaacttcaacttcgacgaccccaacctgatcatcctgcctctggcctttggcaagagacagggcagagaattcatctggaacgacctgctgtccctggaaaccggcagcctgaagctggccaacggaagagtgatcgagaagacactgtacaacagaagaacccggcaggatgagcctgccctgttcgtggccctgaccttcgagcggcgggaggtcctggactcctccaatatcaaaccaatgaacctgatcggcgtggcaagaggcgaaaacatccccgccgtgatcgccctgaccgaccccgagggctgcccactgagccggtttaaggatagcctgggaaacccaacccacatcctgagaatcggcgagagctataaggagaagcagcggaccatccaggccaagaaggaggtggagcagcggagagccggcggctacagccggaagtacgccagcaaagccaagaatctggcagacgatatggtgagaaacaccgctagagatctgctgtactacgccgtgacccaggatgccatgctgatcttcgccaacctgagccggggcttcggccggcagggcaagcggaccttcatggccgagagacagtacacacggatggaggactggctgaccgccaagctggcctacgagggcctgagcaagacctacctgtccaagacactggcccagtacacctccaagacatgcagcaactgtgggtttaccatcaccagcgccgactacgacagggtgctggagaagctgaagaagacagcaacaggctggatgaccacaattaacggcaaggagctgaaggtggagggccagattacctactacaacagatacaagagacagaacgtagtcaaggacctgtccgtcgagctggatagactgagcgaagaatctgtgaacaacgacatctcctcctggacaaagggcagaagcggagaagctctgagcctcctgaagaaaagattctcccatagacccgtgcaggagaagttcgtgtgcctgaactgcggcttcgagacacacgcagccgagcaagccgccctgaacatcgccagatcctggctgttcctgcggagccaggagtacaagaaataccagacaaacaagacaaccggcaacaccgataagagagccttcgtcgagacctggcagtccttttaccggaagaagcttaaggaggtgtggaaacctgccgtgcggtctggcggatctggcggaggctccacaagccagatcctggagagcctgaccttccaggacgtggccgtggacttcaccagggaggagtgggaccagctgtaccccgcccagaagaacctgtacagggacgtgatgctggagaactacaggaacctggtggccctgggccaccagctgtacaagcccgaggtgatcacccagctggagcaggaggagaggtggatgatgggcagggtgagcccccccgacacccaccccgacggcgagaacaggaccagccccaagaaaaagagaaaagtctaagctgccttctgcggggcttgccttctggccatgcccttcttctctcccttgcacctgtacctcttggtctttgaataaagcctgagtaggaaggctagcaaaaaaaaaaaaaaaaaaaaaaaaaaaaaaaaaaaaaaaaaaaaaaaaaaaaaaaaaaaaaaaaaaaaaaaaaaaaaaaa

SEQ ID NO: 3912 - RNA, 5419 nt, synthetic construct
  source 1..5419: mol_type = other RNA
aggaaataagagagaaaagaagagtaagaagaaatataagagccaccatggcccctaagaagaagcgtaaagtgagccgggtgaacggcagcggcagcggcggcggcatgaaccacgaccaggagttcgacccccctaaggtgtaccctcccgtccccgccgagaagagaaagcccatccgggtcctgagcctgttcgatggcatcgccaccggtctgctggtgctgaaggacctgggcatccaggtggataggtacattgcctccgaggtgtgcgaggactccatcaccgtgggaatggtgcgtcatcagggcaagatcatgtacgtgggcgacgtgcggagcgtgacacagaagcatatccaggagtggggccctttcgacctggtgatcggcggcagcccttgcaatgacctgagcatcgtgaacccagcccggaagggcctgtacgagggaaccggcagactgttcttcgagttttacagactgctgcacgacgcccggcctaaggaaggcgacgaccggcccttcttttggctgttcgagaatgtggtggccatgggagtcagcgacaagcgggatattagccggttcctggagagcaaccccgtgatgatcgatgccaaggaagtgagcgccgcccaccgggccagatacttctggggcaatctgcctggcatgaacagacccctggccagcaccgtgaacgacaagctggagctgcaggagtgcctggagcacggccggatcgccaagttcagcaaggtgagaaccatcaccacccgaagcaacagcatcaaacaaggcaaggaccagcactttcctgtgttcatgaacgagaaggaggacatcctgtggtgtaccgagatggagagagtgttcgggttcccagtccactacacagatgtcagcaacatgtctagactggccagacagagactgctgggaagaagctggtccgtccctgtgatcagacacctgttcgcccctctgaaggagtacttcgcctgcgtgagcagcggcaacagcaacgccaacagccggggccccagcttctctagcggcctggtgccactgtccctgagagggagccacatgggccccatggagatctacaaaaccgtgagcgcctggaagcggcagcctgtgcgcgtgctgagcctgtttcggaatatcgataaagtcctgaaaagcctgggattcctggagagcggctctggctccggcggtggcaccctgaagtacgtggaggatgtgacaaacgtggtcagacgggatgtggagaagtggggccccttcgatctggtgtacggcagcacccaacccctgggcagctcttgtgaccggtgccctggctggtacatgtttcagttccaccggatcctgcagtacgccctgccgagacaggagtcccagcggccattcttttggattttcatggacaacttgctgctgaccgaggatgaccaggaaactaccactcggttcctgcagaccgaagccgtgaccctgcaggacgtgagaggccgggactaccagaacgccatgcgggtgtggtccaacatccctggactgaaaagcaagcacgcacctctgacccctaaagaagaggagtacctgcaggcccaggtgcggagcagaagcaagctggacgcccctaaggtggatctgctggtgaagaattgcctcctgcccctgagagagtacttcaagtatttcagccagaatagtctgcccctgggcggcccaagcagcggcgcccctcctcccagcggcggcagcccagccggctccccaacctctaccgaggagggcacctctgagtccgccacccccgagagcggccctggcacctccaccgagcccagcgagggcagcgcacccggcagccctgccggcagccccacctccacagaggagggaaccagcaccgagcccagcgaaggcagcgccccaggcaccagcaccgagcctagtgagggcggctctggcggcggcagcgcccaggagattaaacggatcaacaagatcagaagaagacttgtgaaagacagcaacaccaagaaggccggcaagacaggccccatgaaaaccctgctggttagagtgatgacacccgatctgagagagcggctggaaaacctgagaaagaagcctgaaaatatcccccagcccatcagcaatacatctagagccaacctgaataagctgctgaccgattacaccgaaatgaagaaggcgatcctgcatgtgtactgggaagagttccagaaggaccctgtgggcctgatgagccgggtggcccagcctgccagcaagaagatcgatcagaacaagctgaaacctgagatggacgagaagggcaacctgaccaccgccggctttgcctgctctcagtgtggccagcccctgttcgtgtacaagctggagcaggtgtctgagaagggcaaggcttacaccaactacttcggacggtgcaatgtggccgagcacgaaaagctgatcctgctggcccagctgaagcccgagaaggatagcgacgaagccgtgacatatagcctgggaaagtttgggcagagggccctggatttctacagcattcatgtgaccaaggagtccacccaccccgtgaagcccctggcccagatcgccggaaacagatacgcctccggacctgtgggaaaggccctgagcgacgcatgtatgggcacaatcgcctccttcctgtctaagtaccaggacatcatcatcgaacaccagaaggtggtgaagggcaaccagaagagactggagagcctgcgggagctggccggcaaggaaaacctggaataccctagcgtgaccctgccacctcagcctcacaccaaggagggcgttgatgcctacaacgaagtgatcgcccgggtgcgaatgtgggtgaacctgaacctgtggcagaagctgaagctaagcagagatgatgccaagcctctgctgagactgaagggattcccttcctttcctctggtcgagagacaggccaacgaagtggactggtgggacatggtgtgtaacgtgaagaagctgatcaacgagaaaaaggaggatggcaaggtgttttggcagaatctggctggctacaagagacaggaagccctgagaccatacctgagcagcgaggaagatcggaagaagggaaagaaattcgctcggtaccagctgggcgacctgctgctgcacctggaaaagaagcacggcgaggactggggaaaggtgtacgacgaggcctgggagcggattgacaagaaagtggaaggcctgagcaagcacatcaagctggaagaggaacggagaagcgaggacgcccagagcaaggccgccctgaccgactggctgcgggctaaggccagcttcgtgatcgagggcctgaaggaggccgacaaggacgagttctgcagatgcgagctgaagctgcagaagtggtacggggacctgcggggaaagcccttcgccatcgaagccgagaacagcatcctggacatcagcggcttcagcaagcagtacaactgtgccttcatctggcagaaggacggcgtgaagaagctgaacctgtacctgatcatcaactacttcaagggcggcaagctgcggttcaagaagatcaaacctgaagccttcgaagccaacagattctacaccgtgatcaacaaaaagagcggcgagatcgtgcccatggaggtgaacttcaacttcgacgaccccaacctgatcatcctgcctctggcctttggcaagagacagggcagagaattcatctggaacgacctgctgtccctggaaaccggcagcctgaagctggccaacggaagagtgatcgagaagacactgtacaacagaagaacccggcaggatgagcctgccctgttcgtggccctgaccttcgagcggcgggaggtcctggactcctccaatatcaaaccaatgaacctgatcggcgtggcaagaggcgaaaacatccccgccgtgatcgccctgaccgaccccgagggctgcccactgagccggtttaaggatagcctgggaaacccaacccacatcctgagaatcggcgagagctataaggagaagcagcggaccatccaggccaagaaggaggtggagcagcggagagccggcggctacagccggaagtacgccagcaaagccaagaatctggcagacgatatggtgagaaacaccgctagagatctgctgtactacgccgtgacccaggatgccatgctgatcttcgccaacctgagccggggcttcggccggcagggcaagcggaccttcatggccgagagacagtacacacggatggaggactggctgaccgccaagctggcctacgagggcctgagcaagacctacctgtccaagacactggcccagtacacctccaagacatgcagcaactgtgggtttaccatcaccagcgccgactacgacagggtgctggagaagctgaagaagacagcaacaggctggatgaccacaattaacggcaaggagctgaaggtggagggccagattacctactacaacagatacaagagacagaacgtagtcaaggacctgtccgtcgagctggatagactgagcgaagaatctgtgaacaacgacatctcctcctggacaaagggcagaagcggagaagctctgagcctcctgaagaaaagattctcccatagacccgtgcaggagaagttcgtgtgcctgaactgcggcttcgagacacacgcagccgagcaagccgccctgaacatcgccagatcctggctgttcctgcggagccaggagtacaagaaataccagacaaacaagacaaccggcaacaccgataagagagccttcgtcgagacctggcagtccttttaccggaagaagcttaaggaggtgtggaaacctgccgtgcggtctggcggatctggcggaggctccacaagcatggccttcatggacgtggccgtggacttcacccaggaggagtggaggctgctgagccccgcccagaggaccctgtacagggaggtgatgctggagaactacagcaacctggtgagcctgggcatccccttcagcaagcccaagctgatcaccctgctggagcaggagaaggtgacctggagggagaagaggaagtgccccctggccacctgccccgccgagcccgagcccgagcccgagctgaccagccccaagaaaaagagaaaagtctaagctgccttctgcggggcttgccttctggccatgcccttcttctctcccttgcacctgtacctcttggtctttgaataaagcctgagtaggaaggctagcaaaaaaaaaaaaaaaaaaaaaaaaaaaaaaaaaaaaaaaaaaaaaaaaaaaaaaaaaaaaaaaaaaaaaaaaaaaaaaaa

SEQ ID NO: 3913 - RNA, 5419 nt, synthetic construct
  source 1..5419: mol_type = other RNA
aggaaataagagagaaaagaagagtaagaagaaatataagagccaccatggcccctaagaagaagcgtaaagtgagccgggtgaacggcagcggcagcggcggcggcatgaaccacgaccaggagttcgacccccctaaggtgtaccctcccgtccccgccgagaagagaaagcccatccgggtcctgagcctgttcgatggcatcgccaccggtctgctggtgctgaaggacctgggcatccaggtggataggtacattgcctccgaggtgtgcgaggactccatcaccgtgggaatggtgcgtcatcagggcaagatcatgtacgtgggcgacgtgcggagcgtgacacagaagcatatccaggagtggggccctttcgacctggtgatcggcggcagcccttgcaatgacctgagcatcgtgaacccagcccggaagggcctgtacgagggaaccggcagactgttcttcgagttttacagactgctgcacgacgcccggcctaaggaaggcgacgaccggcccttcttttggctgttcgagaatgtggtggccatgggagtcagcgacaagcgggatattagccggttcctggagagcaaccccgtgatgatcgatgccaaggaagtgagcgccgcccaccgggccagatacttctggggcaatctgcctggcatgaacagacccctggccagcaccgtgaacgacaagctggagctgcaggagtgcctggagcacggccggatcgccaagttcagcaaggtgagaaccatcaccacccgaagcaacagcatcaaacaaggcaaggaccagcactttcctgtgttcatgaacgagaaggaggacatcctgtggtgtaccgagatggagagagtgttcgggttcccagtccactacacagatgtcagcaacatgtctagactggccagacagagactgctgggaagaagctggtccgtccctgtgatcagacacctgttcgcccctctgaaggagtacttcgcctgcgtgagcagcggcaacagcaacgccaacagccggggccccagcttctctagcggcctggtgccactgtccctgagagggagccacatgggccccatggagatctacaaaaccgtgagcgcctggaagcggcagcctgtgcgcgtgctgagcctgtttcggaatatcgataaagtcctgaaaagcctgggattcctggagagcggctctggctccggcggtggcaccctgaagtacgtggaggatgtgacaaacgtggtcagacgggatgtggagaagtggggccccttcgatctggtgtacggcagcacccaacccctgggcagctcttgtgaccggtgccctggctggtacatgtttcagttccaccggatcctgcagtacgccctgccgagacaggagtcccagcggccattcttttggattttcatggacaacttgctgctgaccgaggatgaccaggaaactaccactcggttcctgcagaccgaagccgtgaccctgcaggacgtgagaggccgggactaccagaacgccatgcgggtgtggtccaacatccctggactgaaaagcaagcacgcacctctgacccctaaagaagaggagtacctgcaggcccaggtgcggagcagaagcaagctggacgcccctaaggtggatctgctggtgaagaattgcctcctgcccctgagagagtacttcaagtatttcagccagaatagtctgcccctgggcggcccaagcagcggcgcccctcctcccagcggcggcagcccagccggctccccaacctctaccgaggagggcacctctgagtccgccacccccgagagcggccctggcacctccaccgagcccagcgagggcagcgcacccggcagccctgccggcagccccacctccacagaggagggaaccagcaccgagcccagcgaaggcagcgccccaggcaccagcaccgagcctagtgagggcggctctggcggcggcagcgcccaggagattaaacggatcaacaagatcagaagaagacttgtgaaagacagcaacaccaagaaggccggcaagacaggccccatgaaaaccctgctggttagagtgatgacacccgatctgagagagcggctggaaaacctgagaaagaagcctgaaaatatcccccagcccatcagcaatacatctagagccaacctgaataagctgctgaccgattacaccgaaatgaagaaggcgatcctgcatgtgtactgggaagagttccagaaggaccctgtgggcctgatgagccgggtggcccagcctgccagcaagaagatcgatcagaacaagctgaaacctgagatggacgagaagggcaacctgaccaccgccggctttgcctgctctcagtgtggccagcccctgttcgtgtacaagctggagcaggtgtctgagaagggcaaggcttacaccaactacttcggacggtgcaatgtggccgagcacgaaaagctgatcctgctggcccagctgaagcccgagaaggatagcgacgaagccgtgacatatagcctgggaaagtttgggcagagggccctggatttctacagcattcatgtgaccaaggagtccacccaccccgtgaagcccctggcccagatcgccggaaacagatacgcctccggacctgtgggaaaggccctgagcgacgcatgtatgggcacaatcgcctccttcctgtctaagtaccaggacatcatcatcgaacaccagaaggtggtgaagggcaaccagaagagactggagagcctgcgggagctggccggcaaggaaaacctggaataccctagcgtgaccctgccacctcagcctcacaccaaggagggcgttgatgcctacaacgaagtgatcgcccgggtgcgaatgtgggtgaacctgaacctgtggcagaagctgaagctaagcagagatgatgccaagcctctgctgagactgaagggattcccttcctttcctctggtcgagagacaggccaacgaagtggactggtgggacatggtgtgtaacgtgaagaagctgatcaacgagaaaaaggaggatggcaaggtgttttggcagaatctggctggctacaagagacaggaagccctgagaccatacctgagcagcgaggaagatcggaagaagggaaagaaattcgctcggtaccagctgggcgacctgctgctgcacctggaaaagaagcacggcgaggactggggaaaggtgtacgacgaggcctgggagcggattgacaagaaagtggaaggcctgagcaagcacatcaagctggaagaggaacggagaagcgaggacgcccagagcaaggccgccctgaccgactggctgcgggctaaggccagcttcgtgatcgagggcctgaaggaggccgacaaggacgagttctgcagatgcgagctgaagctgcagaagtggtacggggacctgcggggaaagcccttcgccatcgaagccgagaacagcatcctggacatcagcggcttcagcaagcagtacaactgtgccttcatctggcagaaggacggcgtgaagaagctgaacctgtacctgatcatcaactacttcaagggcggcaagctgcggttcaagaagatcaaacctgaagccttcgaagccaacagattctacaccgtgatcaacaaaaagagcggcgagatcgtgcccatggaggtgaacttcaacttcgacgaccccaacctgatcatcctgcctctggcctttggcaagagacagggcagagaattcatctggaacgacctgctgtccctggaaaccggcagcctgaagctggccaacggaagagtgatcgagaagacactgtacaacagaagaacccggcaggatgagcctgccctgttcgtggccctgaccttcgagcggcgggaggtcctggactcctccaatatcaaaccaatgaacctgatcggcgtggcaagaggcgaaaacatccccgccgtgatcgccctgaccgaccccgagggctgcccactgagccggtttaaggatagcctgggaaacccaacccacatcctgagaatcggcgagagctataaggagaagcagcggaccatccaggccaagaaggaggtggagcagcggagagccggcggctacagccggaagtacgccagcaaagccaagaatctggcagacgatatggtgagaaacaccgctagagatctgctgtactacgccgtgacccaggatgccatgctgatcttcgccaacctgagccggggcttcggccggcagggcaagcggaccttcatggccgagagacagtacacacggatggaggactggctgaccgccaagctggcctacgagggcctgagcaagacctacctgtccaagacactggcccagtacacctccaagacatgcagcaactgtgggtttaccatcaccagcgccgactacgacagggtgctggagaagctgaagaagacagcaacaggctggatgaccacaattaacggcaaggagctgaaggtggagggccagattacctactacaacagatacaagagacagaacgtagtcaaggacctgtccgtcgagctggatagactgagcgaagaatctgtgaacaacgacatctcctcctggacaaagggcagaagcggagaagctctgagcctcctgaagaaaagattctcccatagacccgtgcaggagaagttcgtgtgcctgaactgcggcttcgagacacacgcagccgagcaagccgccctgaacatcgccagatcctggctgttcctgcggagccaggagtacaagaaataccagacaaacaagacaaccggcaacaccgataagagagccttcgtcgagacctggcagtccttttaccggaagaagcttaaggaggtgtggaaacctgccgtgcggtctggcggatctggcggaggctccacaagcaggcccggcgccgtgagcttcgccgacgtggccgtgtacttcagccccgaggagtgggagtgcctgaggcccgcccagagggccctgtacagggacgtgatgagggagaccttcggccacctgggcgccctgggcttcagcggccccaagcccgccttcatcagctgggtggagggcgaggtggaggcctggagccccgagagccaggaccccgacggcgagagcagcgccgccttcagcaggaccagccccaagaaaaagagaaaagtctaagctgccttctgcggggcttgccttctggccatgcccttcttctctcccttgcacctgtacctcttggtctttgaataaagcctgagtaggaaggctagcaaaaaaaaaaaaaaaaaaaaaaaaaaaaaaaaaaaaaaaaaaaaaaaaaaaaaaaaaaaaaaaaaaaaaaaaaaaaaaaa

SEQ ID NO: 3914 - RNA, 5419 nt, synthetic construct
  source 1..5419: mol_type = other RNA
aggaaataagagagaaaagaagagtaagaagaaatataagagccaccatggcccctaagaagaagcgtaaagtgagccgggtgaacggcagcggcagcggcggcggcatgaaccacgaccaggagttcgacccccctaaggtgtaccctcccgtccccgccgagaagagaaagcccatccgggtcctgagcctgttcgatggcatcgccaccggtctgctggtgctgaaggacctgggcatccaggtggataggtacattgcctccgaggtgtgcgaggactccatcaccgtgggaatggtgcgtcatcagggcaagatcatgtacgtgggcgacgtgcggagcgtgacacagaagcatatccaggagtggggccctttcgacctggtgatcggcggcagcccttgcaatgacctgagcatcgtgaacccagcccggaagggcctgtacgagggaaccggcagactgttcttcgagttttacagactgctgcacgacgcccggcctaaggaaggcgacgaccggcccttcttttggctgttcgagaatgtggtggccatgggagtcagcgacaagcgggatattagccggttcctggagagcaaccccgtgatgatcgatgccaaggaagtgagcgccgcccaccgggccagatacttctggggcaatctgcctggcatgaacagacccctggccagcaccgtgaacgacaagctggagctgcaggagtgcctggagcacggccggatcgccaagttcagcaaggtgagaaccatcaccacccgaagcaacagcatcaaacaaggcaaggaccagcactttcctgtgttcatgaacgagaaggaggacatcctgtggtgtaccgagatggagagagtgttcgggttcccagtccactacacagatgtcagcaacatgtctagactggccagacagagactgctgggaagaagctggtccgtccctgtgatcagacacctgttcgcccctctgaaggagtacttcgcctgcgtgagcagcggcaacagcaacgccaacagccggggccccagcttctctagcggcctggtgccactgtccctgagagggagccacatgggccccatggagatctacaaaaccgtgagcgcctggaagcggcagcctgtgcgcgtgctgagcctgtttcggaatatcgataaagtcctgaaaagcctgggattcctggagagcggctctggctccggcggtggcaccctgaagtacgtggaggatgtgacaaacgtggtcagacgggatgtggagaagtggggccccttcgatctggtgtacggcagcacccaacccctgggcagctcttgtgaccggtgccctggctggtacatgtttcagttccaccggatcctgcagtacgccctgccgagacaggagtcccagcggccattcttttggattttcatggacaacttgctgctgaccgaggatgaccaggaaactaccactcggttcctgcagaccgaagccgtgaccctgcaggacgtgagaggccgggactaccagaacgccatgcgggtgtggtccaacatccctggactgaaaagcaagcacgcacctctgacccctaaagaagaggagtacctgcaggcccaggtgcggagcagaagcaagctggacgcccctaaggtggatctgctggtgaagaattgcctcctgcccctgagagagtacttcaagtatttcagccagaatagtctgcccctgggcggcccaagcagcggcgcccctcctcccagcggcggcagcccagccggctccccaacctctaccgaggagggcacctctgagtccgccacccccgagagcggccctggcacctccaccgagcccagcgagggcagcgcacccggcagccctgccggcagccccacctccacagaggagggaaccagcaccgagcccagcgaaggcagcgccccaggcaccagcaccgagcctagtgagggcggctctggcggcggcagcgcccaggagattaaacggatcaacaagatcagaagaagacttgtgaaagacagcaacaccaagaaggccggcaagacaggccccatgaaaaccctgctggttagagtgatgacacccgatctgagagagcggctggaaaacctgagaaagaagcctgaaaatatcccccagcccatcagcaatacatctagagccaacctgaataagctgctgaccgattacaccgaaatgaagaaggcgatcctgcatgtgtactgggaagagttccagaaggaccctgtgggcctgatgagccgggtggcccagcctgccagcaagaagatcgatcagaacaagctgaaacctgagatggacgagaagggcaacctgaccaccgccggctttgcctgctctcagtgtggccagcccctgttcgtgtacaagctggagcaggtgtctgagaagggcaaggcttacaccaactacttcggacggtgcaatgtggccgagcacgaaaagctgatcctgctggcccagctgaagcccgagaaggatagcgacgaagccgtgacatatagcctgggaaagtttgggcagagggccctggatttctacagcattcatgtgaccaaggagtccacccaccccgtgaagcccctggcccagatcgccggaaacagatacgcctccggacctgtgggaaaggccctgagcgacgcatgtatgggcacaatcgcctccttcctgtctaagtaccaggacatcatcatcgaacaccagaaggtggtgaagggcaaccagaagagactggagagcctgcgggagctggccggcaaggaaaacctggaataccctagcgtgaccctgccacctcagcctcacaccaaggagggcgttgatgcctacaacgaagtgatcgcccgggtgcgaatgtgggtgaacctgaacctgtggcagaagctgaagctaagcagagatgatgccaagcctctgctgagactgaagggattcccttcctttcctctggtcgagagacaggccaacgaagtggactggtgggacatggtgtgtaacgtgaagaagctgatcaacgagaaaaaggaggatggcaaggtgttttggcagaatctggctggctacaagagacaggaagccctgagaccatacctgagcagcgaggaagatcggaagaagggaaagaaattcgctcggtaccagctgggcgacctgctgctgcacctggaaaagaagcacggcgaggactggggaaaggtgtacgacgaggcctgggagcggattgacaagaaagtggaaggcctgagcaagcacatcaagctggaagaggaacggagaagcgaggacgcccagagcaaggccgccctgaccgactggctgcgggctaaggccagcttcgtgatcgagggcctgaaggaggccgacaaggacgagttctgcagatgcgagctgaagctgcagaagtggtacggggacctgcggggaaagcccttcgccatcgaagccgagaacagcatcctggacatcagcggcttcagcaagcagtacaactgtgccttcatctggcagaaggacggcgtgaagaagctgaacctgtacctgatcatcaactacttcaagggcggcaagctgcggttcaagaagatcaaacctgaagccttcgaagccaacagattctacaccgtgatcaacaaaaagagcggcgagatcgtgcccatggaggtgaacttcaacttcgacgaccccaacctgatcatcctgcctctggcctttggcaagagacagggcagagaattcatctggaacgacctgctgtccctggaaaccggcagcctgaagctggccaacggaagagtgatcgagaagacactgtacaacagaagaacccggcaggatgagcctgccctgttcgtggccctgaccttcgagcggcgggaggtcctggactcctccaatatcaaaccaatgaacctgatcggcgtggcaagaggcgaaaacatccccgccgtgatcgccctgaccgaccccgagggctgcccactgagccggtttaaggatagcctgggaaacccaacccacatcctgagaatcggcgagagctataaggagaagcagcggaccatccaggccaagaaggaggtggagcagcggagagccggcggctacagccggaagtacgccagcaaagccaagaatctggcagacgatatggtgagaaacaccgctagagatctgctgtactacgccgtgacccaggatgccatgctgatcttcgccaacctgagccggggcttcggccggcagggcaagcggaccttcatggccgagagacagtacacacggatggaggactggctgaccgccaagctggcctacgagggcctgagcaagacctacctgtccaagacactggcccagtacacctccaagacatgcagcaactgtgggtttaccatcaccagcgccgactacgacagggtgctggagaagctgaagaagacagcaacaggctggatgaccacaattaacggcaaggagctgaaggtggagggccagattacctactacaacagatacaagagacagaacgtagtcaaggacctgtccgtcgagctggatagactgagcgaagaatctgtgaacaacgacatctcctcctggacaaagggcagaagcggagaagctctgagcctcctgaagaaaagattctcccatagacccgtgcaggagaagttcgtgtgcctgaactgcggcttcgagacacacgcagccgagcaagccgccctgaacatcgccagatcctggctgttcctgcggagccaggagtacaagaaataccagacaaacaagacaaccggcaacaccgataagagagccttcgtcgagacctggcagtccttttaccggaagaagcttaaggaggtgtggaaacctgccgtgcggtctggcggatctggcggaggctccacaagcgcccacgccctggtgaccttcagggacgtggccatcgacttcagccagaaggagtgggagtgcctggacaccacccagaggaagctgtacagggacgtgatgctggagaactacagcaacctggtgagcctgggctacagcggcagcaagcccgacgtgatcaccctgctggagcagggcaaggagccctgcgtggccgtgagggacgtgaccggcacccagtaccccggcctgctgagcaggaccagccccaagaaaaagagaaaagtctaagctgccttctgcggggcttgccttctggccatgcccttcttctctcccttgcacctgtacctcttggtctttgaataaagcctgagtaggaaggctagcaaaaaaaaaaaaaaaaaaaaaaaaaaaaaaaaaaaaaaaaaaaaaaaaaaaaaaaaaaaaaaaaaaaaaaaaaaaaaaaa

SEQ ID NO: 3915 - RNA, 5419 nt, synthetic construct
  source 1..5419: mol_type = other RNA
aggaaataagagagaaaagaagagtaagaagaaatataagagccaccatggcccctaagaagaagcgtaaagtgagccgggtgaacggcagcggcagcggcggcggcatgaaccacgaccaggagttcgacccccctaaggtgtaccctcccgtccccgccgagaagagaaagcccatccgggtcctgagcctgttcgatggcatcgccaccggtctgctggtgctgaaggacctgggcatccaggtggataggtacattgcctccgaggtgtgcgaggactccatcaccgtgggaatggtgcgtcatcagggcaagatcatgtacgtgggcgacgtgcggagcgtgacacagaagcatatccaggagtggggccctttcgacctggtgatcggcggcagcccttgcaatgacctgagcatcgtgaacccagcccggaagggcctgtacgagggaaccggcagactgttcttcgagttttacagactgctgcacgacgcccggcctaaggaaggcgacgaccggcccttcttttggctgttcgagaatgtggtggccatgggagtcagcgacaagcgggatattagccggttcctggagagcaaccccgtgatgatcgatgccaaggaagtgagcgccgcccaccgggccagatacttctggggcaatctgcctggcatgaacagacccctggccagcaccgtgaacgacaagctggagctgcaggagtgcctggagcacggccggatcgccaagttcagcaaggtgagaaccatcaccacccgaagcaacagcatcaaacaaggcaaggaccagcactttcctgtgttcatgaacgagaaggaggacatcctgtggtgtaccgagatggagagagtgttcgggttcccagtccactacacagatgtcagcaacatgtctagactggccagacagagactgctgggaagaagctggtccgtccctgtgatcagacacctgttcgcccctctgaaggagtacttcgcctgcgtgagcagcggcaacagcaacgccaacagccggggccccagcttctctagcggcctggtgccactgtccctgagagggagccacatgggccccatggagatctacaaaaccgtgagcgcctggaagcggcagcctgtgcgcgtgctgagcctgtttcggaatatcgataaagtcctgaaaagcctgggattcctggagagcggctctggctccggcggtggcaccctgaagtacgtggaggatgtgacaaacgtggtcagacgggatgtggagaagtggggccccttcgatctggtgtacggcagcacccaacccctgggcagctcttgtgaccggtgccctggctggtacatgtttcagttccaccggatcctgcagtacgccctgccgagacaggagtcccagcggccattcttttggattttcatggacaacttgctgctgaccgaggatgaccaggaaactaccactcggttcctgcagaccgaagccgtgaccctgcaggacgtgagaggccgggactaccagaacgccatgcgggtgtggtccaacatccctggactgaaaagcaagcacgcacctctgacccctaaagaagaggagtacctgcaggcccaggtgcggagcagaagcaagctggacgcccctaaggtggatctgctggtgaagaattgcctcctgcccctgagagagtacttcaagtatttcagccagaatagtctgcccctgggcggcccaagcagcggcgcccctcctcccagcggcggcagcccagccggctccccaacctctaccgaggagggcacctctgagtccgccacccccgagagcggccctggcacctccaccgagcccagcgagggcagcgcacccggcagccctgccggcagccccacctccacagaggagggaaccagcaccgagcccagcgaaggcagcgccccaggcaccagcaccgagcctagtgagggcggctctggcggcggcagcgcccaggagattaaacggatcaacaagatcagaagaagacttgtgaaagacagcaacaccaagaaggccggcaagacaggccccatgaaaaccctgctggttagagtgatgacacccgatctgagagagcggctggaaaacctgagaaagaagcctgaaaatatcccccagcccatcagcaatacatctagagccaacctgaataagctgctgaccgattacaccgaaatgaagaaggcgatcctgcatgtgtactgggaagagttccagaaggaccctgtgggcctgatgagccgggtggcccagcctgccagcaagaagatcgatcagaacaagctgaaacctgagatggacgagaagggcaacctgaccaccgccggctttgcctgctctcagtgtggccagcccctgttcgtgtacaagctggagcaggtgtctgagaagggcaaggcttacaccaactacttcggacggtgcaatgtggccgagcacgaaaagctgatcctgctggcccagctgaagcccgagaaggatagcgacgaagccgtgacatatagcctgggaaagtttgggcagagggccctggatttctacagcattcatgtgaccaaggagtccacccaccccgtgaagcccctggcccagatcgccggaaacagatacgcctccggacctgtgggaaaggccctgagcgacgcatgtatgggcacaatcgcctccttcctgtctaagtaccaggacatcatcatcgaacaccagaaggtggtgaagggcaaccagaagagactggagagcctgcgggagctggccggcaaggaaaacctggaataccctagcgtgaccctgccacctcagcctcacaccaaggagggcgttgatgcctacaacgaagtgatcgcccgggtgcgaatgtgggtgaacctgaacctgtggcagaagctgaagctaagcagagatgatgccaagcctctgctgagactgaagggattcccttcctttcctctggtcgagagacaggccaacgaagtggactggtgggacatggtgtgtaacgtgaagaagctgatcaacgagaaaaaggaggatggcaaggtgttttggcagaatctggctggctacaagagacaggaagccctgagaccatacctgagcagcgaggaagatcggaagaagggaaagaaattcgctcggtaccagctgggcgacctgctgctgcacctggaaaagaagcacggcgaggactggggaaaggtgtacgacgaggcctgggagcggattgacaagaaagtggaaggcctgagcaagcacatcaagctggaagaggaacggagaagcgaggacgcccagagcaaggccgccctgaccgactggctgcgggctaaggccagcttcgtgatcgagggcctgaaggaggccgacaaggacgagttctgcagatgcgagctgaagctgcagaagtggtacggggacctgcggggaaagcccttcgccatcgaagccgagaacagcatcctggacatcagcggcttcagcaagcagtacaactgtgccttcatctggcagaaggacggcgtgaagaagctgaacctgtacctgatcatcaactacttcaagggcggcaagctgcggttcaagaagatcaaacctgaagccttcgaagccaacagattctacaccgtgatcaacaaaaagagcggcgagatcgtgcccatggaggtgaacttcaacttcgacgaccccaacctgatcatcctgcctctggcctttggcaagagacagggcagagaattcatctggaacgacctgctgtccctggaaaccggcagcctgaagctggccaacggaagagtgatcgagaagacactgtacaacagaagaacccggcaggatgagcctgccctgttcgtggccctgaccttcgagcggcgggaggtcctggactcctccaatatcaaaccaatgaacctgatcggcgtggcaagaggcgaaaacatccccgccgtgatcgccctgaccgaccccgagggctgcccactgagccggtttaaggatagcctgggaaacccaacccacatcctgagaatcggcgagagctataaggagaagcagcggaccatccaggccaagaaggaggtggagcagcggagagccggcggctacagccggaagtacgccagcaaagccaagaatctggcagacgatatggtgagaaacaccgctagagatctgctgtactacgccgtgacccaggatgccatgctgatcttcgccaacctgagccggggcttcggccggcagggcaagcggaccttcatggccgagagacagtacacacggatggaggactggctgaccgccaagctggcctacgagggcctgagcaagacctacctgtccaagacactggcccagtacacctccaagacatgcagcaactgtgggtttaccatcaccagcgccgactacgacagggtgctggagaagctgaagaagacagcaacaggctggatgaccacaattaacggcaaggagctgaaggtggagggccagattacctactacaacagatacaagagacagaacgtagtcaaggacctgtccgtcgagctggatagactgagcgaagaatctgtgaacaacgacatctcctcctggacaaagggcagaagcggagaagctctgagcctcctgaagaaaagattctcccatagacccgtgcaggagaagttcgtgtgcctgaactgcggcttcgagacacacgcagccgagcaagccgccctgaacatcgccagatcctggctgttcctgcggagccaggagtacaagaaataccagacaaacaagacaaccggcaacaccgataagagagccttcgtcgagacctggcagtccttttaccggaagaagcttaaggaggtgtggaaacctgccgtgcggtctggcggatctggcggaggctccacaagcttccagggcagcgtgaccttcagggacgtggccatcgacttcagccaggaggagtgggagtggctgcagcccgcccagagggacctgtacaggcacgtgatgctggagaactacggccacctggtgagcctggccggcttcaacatcagcaagccctacgtggtgagcctgctggagcagggcagggagccctggctggtgaagggcgacgtgaggagggaccccttcagcgagagcaacggcaccagccccaagaaaaagagaaaagtctaagctgccttctgcggggcttgccttctggccatgcccttcttctctcccttgcacctgtacctcttggtctttgaataaagcctgagtaggaaggctagcaaaaaaaaaaaaaaaaaaaaaaaaaaaaaaaaaaaaaaaaaaaaaaaaaaaaaaaaaaaaaaaaaaaaaaaaaaaaaaaa

SEQ ID NO: 3916 - RNA, 5419 nt, synthetic construct
  source 1..5419: mol_type = other RNA
aggaaataagagagaaaagaagagtaagaagaaatataagagccaccatggcccctaagaagaagcgtaaagtgagccgggtgaacggcagcggcagcggcggcggcatgaaccacgaccaggagttcgacccccctaaggtgtaccctcccgtccccgccgagaagagaaagcccatccgggtcctgagcctgttcgatggcatcgccaccggtctgctggtgctgaaggacctgggcatccaggtggataggtacattgcctccgaggtgtgcgaggactccatcaccgtgggaatggtgcgtcatcagggcaagatcatgtacgtgggcgacgtgcggagcgtgacacagaagcatatccaggagtggggccctttcgacctggtgatcggcggcagcccttgcaatgacctgagcatcgtgaacccagcccggaagggcctgtacgagggaaccggcagactgttcttcgagttttacagactgctgcacgacgcccggcctaaggaaggcgacgaccggcccttcttttggctgttcgagaatgtggtggccatgggagtcagcgacaagcgggatattagccggttcctggagagcaaccccgtgatgatcgatgccaaggaagtgagcgccgcccaccgggccagatacttctggggcaatctgcctggcatgaacagacccctggccagcaccgtgaacgacaagctggagctgcaggagtgcctggagcacggccggatcgccaagttcagcaaggtgagaaccatcaccacccgaagcaacagcatcaaacaaggcaaggaccagcactttcctgtgttcatgaacgagaaggaggacatcctgtggtgtaccgagatggagagagtgttcgggttcccagtccactacacagatgtcagcaacatgtctagactggccagacagagactgctgggaagaagctggtccgtccctgtgatcagacacctgttcgcccctctgaaggagtacttcgcctgcgtgagcagcggcaacagcaacgccaacagccggggccccagcttctctagcggcctggtgccactgtccctgagagggagccacatgggccccatggagatctacaaaaccgtgagcgcctggaagcggcagcctgtgcgcgtgctgagcctgtttcggaatatcgataaagtcctgaaaagcctgggattcctggagagcggctctggctccggcggtggcaccctgaagtacgtggaggatgtgacaaacgtggtcagacgggatgtggagaagtggggccccttcgatctggtgtacggcagcacccaacccctgggcagctcttgtgaccggtgccctggctggtacatgtttcagttccaccggatcctgcagtacgccctgccgagacaggagtcccagcggccattcttttggattttcatggacaacttgctgctgaccgaggatgaccaggaaactaccactcggttcctgcagaccgaagccgtgaccctgcaggacgtgagaggccgggactaccagaacgccatgcgggtgtggtccaacatccctggactgaaaagcaagcacgcacctctgacccctaaagaagaggagtacctgcaggcccaggtgcggagcagaagcaagctggacgcccctaaggtggatctgctggtgaagaattgcctcctgcccctgagagagtacttcaagtatttcagccagaatagtctgcccctgggcggcccaagcagcggcgcccctcctcccagcggcggcagcccagccggctccccaacctctaccgaggagggcacctctgagtccgccacccccgagagcggccctggcacctccaccgagcccagcgagggcagcgcacccggcagccctgccggcagccccacctccacagaggagggaaccagcaccgagcccagcgaaggcagcgccccaggcaccagcaccgagcctagtgagggcggctctggcggcggcagcgcccaggagattaaacggatcaacaagatcagaagaagacttgtgaaagacagcaacaccaagaaggccggcaagacaggccccatgaaaaccctgctggttagagtgatgacacccgatctgagagagcggctggaaaacctgagaaagaagcctgaaaatatcccccagcccatcagcaatacatctagagccaacctgaataagctgctgaccgattacaccgaaatgaagaaggcgatcctgcatgtgtactgggaagagttccagaaggaccctgtgggcctgatgagccgggtggcccagcctgccagcaagaagatcgatcagaacaagctgaaacctgagatggacgagaagggcaacctgaccaccgccggctttgcctgctctcagtgtggccagcccctgttcgtgtacaagctggagcaggtgtctgagaagggcaaggcttacaccaactacttcggacggtgcaatgtggccgagcacgaaaagctgatcctgctggcccagctgaagcccgagaaggatagcgacgaagccgtgacatatagcctgggaaagtttgggcagagggccctggatttctacagcattcatgtgaccaaggagtccacccaccccgtgaagcccctggcccagatcgccggaaacagatacgcctccggacctgtgggaaaggccctgagcgacgcatgtatgggcacaatcgcctccttcctgtctaagtaccaggacatcatcatcgaacaccagaaggtggtgaagggcaaccagaagagactggagagcctgcgggagctggccggcaaggaaaacctggaataccctagcgtgaccctgccacctcagcctcacaccaaggagggcgttgatgcctacaacgaagtgatcgcccgggtgcgaatgtgggtgaacctgaacctgtggcagaagctgaagctaagcagagatgatgccaagcctctgctgagactgaagggattcccttcctttcctctggtcgagagacaggccaacgaagtggactggtgggacatggtgtgtaacgtgaagaagctgatcaacgagaaaaaggaggatggcaaggtgttttggcagaatctggctggctacaagagacaggaagccctgagaccatacctgagcagcgaggaagatcggaagaagggaaagaaattcgctcggtaccagctgggcgacctgctgctgcacctggaaaagaagcacggcgaggactggggaaaggtgtacgacgaggcctgggagcggattgacaagaaagtggaaggcctgagcaagcacatcaagctggaagaggaacggagaagcgaggacgcccagagcaaggccgccctgaccgactggctgcgggctaaggccagcttcgtgatcgagggcctgaaggaggccgacaaggacgagttctgcagatgcgagctgaagctgcagaagtggtacggggacctgcggggaaagcccttcgccatcgaagccgagaacagcatcctggacatcagcggcttcagcaagcagtacaactgtgccttcatctggcagaaggacggcgtgaagaagctgaacctgtacctgatcatcaactacttcaagggcggcaagctgcggttcaagaagatcaaacctgaagccttcgaagccaacagattctacaccgtgatcaacaaaaagagcggcgagatcgtgcccatggaggtgaacttcaacttcgacgaccccaacctgatcatcctgcctctggcctttggcaagagacagggcagagaattcatctggaacgacctgctgtccctggaaaccggcagcctgaagctggccaacggaagagtgatcgagaagacactgtacaacagaagaacccggcaggatgagcctgccctgttcgtggccctgaccttcgagcggcgggaggtcctggactcctccaatatcaaaccaatgaacctgatcggcgtggcaagaggcgaaaacatccccgccgtgatcgccctgaccgaccccgagggctgcccactgagccggtttaaggatagcctgggaaacccaacccacatcctgagaatcggcgagagctataaggagaagcagcggaccatccaggccaagaaggaggtggagcagcggagagccggcggctacagccggaagtacgccagcaaagccaagaatctggcagacgatatggtgagaaacaccgctagagatctgctgtactacgccgtgacccaggatgccatgctgatcttcgccaacctgagccggggcttcggccggcagggcaagcggaccttcatggccgagagacagtacacacggatggaggactggctgaccgccaagctggcctacgagggcctgagcaagacctacctgtccaagacactggcccagtacacctccaagacatgcagcaactgtgggtttaccatcaccagcgccgactacgacagggtgctggagaagctgaagaagacagcaacaggctggatgaccacaattaacggcaaggagctgaaggtggagggccagattacctactacaacagatacaagagacagaacgtagtcaaggacctgtccgtcgagctggatagactgagcgaagaatctgtgaacaacgacatctcctcctggacaaagggcagaagcggagaagctctgagcctcctgaagaaaagattctcccatagacccgtgcaggagaagttcgtgtgcctgaactgcggcttcgagacacacgcagccgagcaagccgccctgaacatcgccagatcctggctgttcctgcggagccaggagtacaagaaataccagacaaacaagacaaccggcaacaccgataagagagccttcgtcgagacctggcagtccttttaccggaagaagcttaaggaggtgtggaaacctgccgtgcggtctggcggatctggcggaggctccacaagcgtggtggagctgctgaccttcgaggaggtggccgtgtacttcagcaaggaggagtgggccctgctggaccccggccagagggccctgtacagggacgtgatgcaggagaactacgaggccgtgagctggctgggcttccccgtgagcaagaccgacgtgatcagctgggtggagagggaggaggagttctgggtgcccgaccccaggagctgcgaggagggcgtgatcatcagcaacacccacaccagccccaagaaaaagagaaaagtctaagctgccttctgcggggcttgccttctggccatgcccttcttctctcccttgcacctgtacctcttggtctttgaataaagcctgagtaggaaggctagcaaaaaaaaaaaaaaaaaaaaaaaaaaaaaaaaaaaaaaaaaaaaaaaaaaaaaaaaaaaaaaaaaaaaaaaaaaaaaaaa

SEQ ID NO: 3917 - RNA, 5419 nt, synthetic construct
  source 1..5419: mol_type = other RNA
aggaaataagagagaaaagaagagtaagaagaaatataagagccaccatggcccctaagaagaagcgtaaagtgagccgggtgaacggcagcggcagcggcggcggcatgaaccacgaccaggagttcgacccccctaaggtgtaccctcccgtccccgccgagaagagaaagcccatccgggtcctgagcctgttcgatggcatcgccaccggtctgctggtgctgaaggacctgggcatccaggtggataggtacattgcctccgaggtgtgcgaggactccatcaccgtgggaatggtgcgtcatcagggcaagatcatgtacgtgggcgacgtgcggagcgtgacacagaagcatatccaggagtggggccctttcgacctggtgatcggcggcagcccttgcaatgacctgagcatcgtgaacccagcccggaagggcctgtacgagggaaccggcagactgttcttcgagttttacagactgctgcacgacgcccggcctaaggaaggcgacgaccggcccttcttttggctgttcgagaatgtggtggccatgggagtcagcgacaagcgggatattagccggttcctggagagcaaccccgtgatgatcgatgccaaggaagtgagcgccgcccaccgggccagatacttctggggcaatctgcctggcatgaacagacccctggccagcaccgtgaacgacaagctggagctgcaggagtgcctggagcacggccggatcgccaagttcagcaaggtgagaaccatcaccacccgaagcaacagcatcaaacaaggcaaggaccagcactttcctgtgttcatgaacgagaaggaggacatcctgtggtgtaccgagatggagagagtgttcgggttcccagtccactacacagatgtcagcaacatgtctagactggccagacagagactgctgggaagaagctggtccgtccctgtgatcagacacctgttcgcccctctgaaggagtacttcgcctgcgtgagcagcggcaacagcaacgccaacagccggggccccagcttctctagcggcctggtgccactgtccctgagagggagccacatgggccccatggagatctacaaaaccgtgagcgcctggaagcggcagcctgtgcgcgtgctgagcctgtttcggaatatcgataaagtcctgaaaagcctgggattcctggagagcggctctggctccggcggtggcaccctgaagtacgtggaggatgtgacaaacgtggtcagacgggatgtggagaagtggggccccttcgatctggtgtacggcagcacccaacccctgggcagctcttgtgaccggtgccctggctggtacatgtttcagttccaccggatcctgcagtacgccctgccgagacaggagtcccagcggccattcttttggattttcatggacaacttgctgctgaccgaggatgaccaggaaactaccactcggttcctgcagaccgaagccgtgaccctgcaggacgtgagaggccgggactaccagaacgccatgcgggtgtggtccaacatccctggactgaaaagcaagcacgcacctctgacccctaaagaagaggagtacctgcaggcccaggtgcggagcagaagcaagctggacgcccctaaggtggatctgctggtgaagaattgcctcctgcccctgagagagtacttcaagtatttcagccagaatagtctgcccctgggcggcccaagcagcggcgcccctcctcccagcggcggcagcccagccggctccccaacctctaccgaggagggcacctctgagtccgccacccccgagagcggccctggcacctccaccgagcccagcgagggcagcgcacccggcagccctgccggcagccccacctccacagaggagggaaccagcaccgagcccagcgaaggcagcgccccaggcaccagcaccgagcctagtgagggcggctctggcggcggcagcgcccaggagattaaacggatcaacaagatcagaagaagacttgtgaaagacagcaacaccaagaaggccggcaagacaggccccatgaaaaccctgctggttagagtgatgacacccgatctgagagagcggctggaaaacctgagaaagaagcctgaaaatatcccccagcccatcagcaatacatctagagccaacctgaataagctgctgaccgattacaccgaaatgaagaaggcgatcctgcatgtgtactgggaagagttccagaaggaccctgtgggcctgatgagccgggtggcccagcctgccagcaagaagatcgatcagaacaagctgaaacctgagatggacgagaagggcaacctgaccaccgccggctttgcctgctctcagtgtggccagcccctgttcgtgtacaagctggagcaggtgtctgagaagggcaaggcttacaccaactacttcggacggtgcaatgtggccgagcacgaaaagctgatcctgctggcccagctgaagcccgagaaggatagcgacgaagccgtgacatatagcctgggaaagtttgggcagagggccctggatttctacagcattcatgtgaccaaggagtccacccaccccgtgaagcccctggcccagatcgccggaaacagatacgcctccggacctgtgggaaaggccctgagcgacgcatgtatgggcacaatcgcctccttcctgtctaagtaccaggacatcatcatcgaacaccagaaggtggtgaagggcaaccagaagagactggagagcctgcgggagctggccggcaaggaaaacctggaataccctagcgtgaccctgccacctcagcctcacaccaaggagggcgttgatgcctacaacgaagtgatcgcccgggtgcgaatgtgggtgaacctgaacctgtggcagaagctgaagctaagcagagatgatgccaagcctctgctgagactgaagggattcccttcctttcctctggtcgagagacaggccaacgaagtggactggtgggacatggtgtgtaacgtgaagaagctgatcaacgagaaaaaggaggatggcaaggtgttttggcagaatctggctggctacaagagacaggaagccctgagaccatacctgagcagcgaggaagatcggaagaagggaaagaaattcgctcggtaccagctgggcgacctgctgctgcacctggaaaagaagcacggcgaggactggggaaaggtgtacgacgaggcctgggagcggattgacaagaaagtggaaggcctgagcaagcacatcaagctggaagaggaacggagaagcgaggacgcccagagcaaggccgccctgaccgactggctgcgggctaaggccagcttcgtgatcgagggcctgaaggaggccgacaaggacgagttctgcagatgcgagctgaagctgcagaagtggtacggggacctgcggggaaagcccttcgccatcgaagccgagaacagcatcctggacatcagcggcttcagcaagcagtacaactgtgccttcatctggcagaaggacggcgtgaagaagctgaacctgtacctgatcatcaactacttcaagggcggcaagctgcggttcaagaagatcaaacctgaagccttcgaagccaacagattctacaccgtgatcaacaaaaagagcggcgagatcgtgcccatggaggtgaacttcaacttcgacgaccccaacctgatcatcctgcctctggcctttggcaagagacagggcagagaattcatctggaacgacctgctgtccctggaaaccggcagcctgaagctggccaacggaagagtgatcgagaagacactgtacaacagaagaacccggcaggatgagcctgccctgttcgtggccctgaccttcgagcggcgggaggtcctggactcctccaatatcaaaccaatgaacctgatcggcgtggcaagaggcgaaaacatccccgccgtgatcgccctgaccgaccccgagggctgcccactgagccggtttaaggatagcctgggaaacccaacccacatcctgagaatcggcgagagctataaggagaagcagcggaccatccaggccaagaaggaggtggagcagcggagagccggcggctacagccggaagtacgccagcaaagccaagaatctggcagacgatatggtgagaaacaccgctagagatctgctgtactacgccgtgacccaggatgccatgctgatcttcgccaacctgagccggggcttcggccggcagggcaagcggaccttcatggccgagagacagtacacacggatggaggactggctgaccgccaagctggcctacgagggcctgagcaagacctacctgtccaagacactggcccagtacacctccaagacatgcagcaactgtgggtttaccatcaccagcgccgactacgacagggtgctggagaagctgaagaagacagcaacaggctggatgaccacaattaacggcaaggagctgaaggtggagggccagattacctactacaacagatacaagagacagaacgtagtcaaggacctgtccgtcgagctggatagactgagcgaagaatctgtgaacaacgacatctcctcctggacaaagggcagaagcggagaagctctgagcctcctgaagaaaagattctcccatagacccgtgcaggagaagttcgtgtgcctgaactgcggcttcgagacacacgcagccgagcaagccgccctgaacatcgccagatcctggctgttcctgcggagccaggagtacaagaaataccagacaaacaagacaaccggcaacaccgataagagagccttcgtcgagacctggcagtccttttaccggaagaagcttaaggaggtgtggaaacctgccgtgcggtctggcggatctggcggaggctccacaagcagcaaggtgcccgtgaccttcggcgacctggccatctacttcagccaggaggagtgggagtggctgcaccccgcccagagggacctgtacaggcacgtgatgctggagaactacggccacctggtgagcctgggcctgaacatcagcaagccctacgtggtgagcctgctggagcagggcagggacccctggctggacaacagggacgtgaggagggacctgttcagcgagagcaagggcgagaccagccccaagaaaaagagaaaagtctaagctgccttctgcggggcttgccttctggccatgcccttcttctctcccttgcacctgtacctcttggtctttgaataaagcctgagtaggaaggctagcaaaaaaaaaaaaaaaaaaaaaaaaaaaaaaaaaaaaaaaaaaaaaaaaaaaaaaaaaaaaaaaaaaaaaaaaaaaaaaaa

SEQ ID NO: 3918 - RNA, 5419 nt, synthetic construct
  source 1..5419: mol_type = other RNA
aggaaataagagagaaaagaagagtaagaagaaatataagagccaccatggcccctaagaagaagcgtaaagtgagccgggtgaacggcagcggcagcggcggcggcatgaaccacgaccaggagttcgacccccctaaggtgtaccctcccgtccccgccgagaagagaaagcccatccgggtcctgagcctgttcgatggcatcgccaccggtctgctggtgctgaaggacctgggcatccaggtggataggtacattgcctccgaggtgtgcgaggactccatcaccgtgggaatggtgcgtcatcagggcaagatcatgtacgtgggcgacgtgcggagcgtgacacagaagcatatccaggagtggggccctttcgacctggtgatcggcggcagcccttgcaatgacctgagcatcgtgaacccagcccggaagggcctgtacgagggaaccggcagactgttcttcgagttttacagactgctgcacgacgcccggcctaaggaaggcgacgaccggcccttcttttggctgttcgagaatgtggtggccatgggagtcagcgacaagcgggatattagccggttcctggagagcaaccccgtgatgatcgatgccaaggaagtgagcgccgcccaccgggccagatacttctggggcaatctgcctggcatgaacagacccctggccagcaccgtgaacgacaagctggagctgcaggagtgcctggagcacggccggatcgccaagttcagcaaggtgagaaccatcaccacccgaagcaacagcatcaaacaaggcaaggaccagcactttcctgtgttcatgaacgagaaggaggacatcctgtggtgtaccgagatggagagagtgttcgggttcccagtccactacacagatgtcagcaacatgtctagactggccagacagagactgctgggaagaagctggtccgtccctgtgatcagacacctgttcgcccctctgaaggagtacttcgcctgcgtgagcagcggcaacagcaacgccaacagccggggccccagcttctctagcggcctggtgccactgtccctgagagggagccacatgggccccatggagatctacaaaaccgtgagcgcctggaagcggcagcctgtgcgcgtgctgagcctgtttcggaatatcgataaagtcctgaaaagcctgggattcctggagagcggctctggctccggcggtggcaccctgaagtacgtggaggatgtgacaaacgtggtcagacgggatgtggagaagtggggccccttcgatctggtgtacggcagcacccaacccctgggcagctcttgtgaccggtgccctggctggtacatgtttcagttccaccggatcctgcagtacgccctgccgagacaggagtcccagcggccattcttttggattttcatggacaacttgctgctgaccgaggatgaccaggaaactaccactcggttcctgcagaccgaagccgtgaccctgcaggacgtgagaggccgggactaccagaacgccatgcgggtgtggtccaacatccctggactgaaaagcaagcacgcacctctgacccctaaagaagaggagtacctgcaggcccaggtgcggagcagaagcaagctggacgcccctaaggtggatctgctggtgaagaattgcctcctgcccctgagagagtacttcaagtatttcagccagaatagtctgcccctgggcggcccaagcagcggcgcccctcctcccagcggcggcagcccagccggctccccaacctctaccgaggagggcacctctgagtccgccacccccgagagcggccctggcacctccaccgagcccagcgagggcagcgcacccggcagccctgccggcagccccacctccacagaggagggaaccagcaccgagcccagcgaaggcagcgccccaggcaccagcaccgagcctagtgagggcggctctggcggcggcagcgcccaggagattaaacggatcaacaagatcagaagaagacttgtgaaagacagcaacaccaagaaggccggcaagacaggccccatgaaaaccctgctggttagagtgatgacacccgatctgagagagcggctggaaaacctgagaaagaagcctgaaaatatcccccagcccatcagcaatacatctagagccaacctgaataagctgctgaccgattacaccgaaatgaagaaggcgatcctgcatgtgtactgggaagagttccagaaggaccctgtgggcctgatgagccgggtggcccagcctgccagcaagaagatcgatcagaacaagctgaaacctgagatggacgagaagggcaacctgaccaccgccggctttgcctgctctcagtgtggccagcccctgttcgtgtacaagctggagcaggtgtctgagaagggcaaggcttacaccaactacttcggacggtgcaatgtggccgagcacgaaaagctgatcctgctggcccagctgaagcccgagaaggatagcgacgaagccgtgacatatagcctgggaaagtttgggcagagggccctggatttctacagcattcatgtgaccaaggagtccacccaccccgtgaagcccctggcccagatcgccggaaacagatacgcctccggacctgtgggaaaggccctgagcgacgcatgtatgggcacaatcgcctccttcctgtctaagtaccaggacatcatcatcgaacaccagaaggtggtgaagggcaaccagaagagactggagagcctgcgggagctggccggcaaggaaaacctggaataccctagcgtgaccctgccacctcagcctcacaccaaggagggcgttgatgcctacaacgaagtgatcgcccgggtgcgaatgtgggtgaacctgaacctgtggcagaagctgaagctaagcagagatgatgccaagcctctgctgagactgaagggattcccttcctttcctctggtcgagagacaggccaacgaagtggactggtgggacatggtgtgtaacgtgaagaagctgatcaacgagaaaaaggaggatggcaaggtgttttggcagaatctggctggctacaagagacaggaagccctgagaccatacctgagcagcgaggaagatcggaagaagggaaagaaattcgctcggtaccagctgggcgacctgctgctgcacctggaaaagaagcacggcgaggactggggaaaggtgtacgacgaggcctgggagcggattgacaagaaagtggaaggcctgagcaagcacatcaagctggaagaggaacggagaagcgaggacgcccagagcaaggccgccctgaccgactggctgcgggctaaggccagcttcgtgatcgagggcctgaaggaggccgacaaggacgagttctgcagatgcgagctgaagctgcagaagtggtacggggacctgcggggaaagcccttcgccatcgaagccgagaacagcatcctggacatcagcggcttcagcaagcagtacaactgtgccttcatctggcagaaggacggcgtgaagaagctgaacctgtacctgatcatcaactacttcaagggcggcaagctgcggttcaagaagatcaaacctgaagccttcgaagccaacagattctacaccgtgatcaacaaaaagagcggcgagatcgtgcccatggaggtgaacttcaacttcgacgaccccaacctgatcatcctgcctctggcctttggcaagagacagggcagagaattcatctggaacgacctgctgtccctggaaaccggcagcctgaagctggccaacggaagagtgatcgagaagacactgtacaacagaagaacccggcaggatgagcctgccctgttcgtggccctgaccttcgagcggcgggaggtcctggactcctccaatatcaaaccaatgaacctgatcggcgtggcaagaggcgaaaacatccccgccgtgatcgccctgaccgaccccgagggctgcccactgagccggtttaaggatagcctgggaaacccaacccacatcctgagaatcggcgagagctataaggagaagcagcggaccatccaggccaagaaggaggtggagcagcggagagccggcggctacagccggaagtacgccagcaaagccaagaatctggcagacgatatggtgagaaacaccgctagagatctgctgtactacgccgtgacccaggatgccatgctgatcttcgccaacctgagccggggcttcggccggcagggcaagcggaccttcatggccgagagacagtacacacggatggaggactggctgaccgccaagctggcctacgagggcctgagcaagacctacctgtccaagacactggcccagtacacctccaagacatgcagcaactgtgggtttaccatcaccagcgccgactacgacagggtgctggagaagctgaagaagacagcaacaggctggatgaccacaattaacggcaaggagctgaaggtggagggccagattacctactacaacagatacaagagacagaacgtagtcaaggacctgtccgtcgagctggatagactgagcgaagaatctgtgaacaacgacatctcctcctggacaaagggcagaagcggagaagctctgagcctcctgaagaaaagattctcccatagacccgtgcaggagaagttcgtgtgcctgaactgcggcttcgagacacacgcagccgagcaagccgccctgaacatcgccagatcctggctgttcctgcggagccaggagtacaagaaataccagacaaacaagacaaccggcaacaccgataagagagccttcgtcgagacctggcagtccttttaccggaagaagcttaaggaggtgtggaaacctgccgtgcggtctggcggatctggcggaggctccacaagcttccaggagctggtgaccttcagggacgtggccatcgacttcagcaggcaggagtgggagtacctggaccccaaccagagggacctgtacagggacgtgatgctggagaactacagcaacctggtgagcctgggccacagcatcagcaagcccgacgtggtggacctgctggagcagggcaaggagccctggatgctgctgggcgaggagacccagtacagcggcagcaaccccgagcccgtgaccagccccaagaaaaagagaaaagtctaagctgccttctgcggggcttgccttctggccatgcccttcttctctcccttgcacctgtacctcttggtctttgaataaagcctgagtaggaaggctagcaaaaaaaaaaaaaaaaaaaaaaaaaaaaaaaaaaaaaaaaaaaaaaaaaaaaaaaaaaaaaaaaaaaaaaaaaaaaaaaa

SEQ ID NO: 3919 - RNA, 5419 nt, synthetic construct
  source 1..5419: mol_type = other RNA
aggaaataagagagaaaagaagagtaagaagaaatataagagccaccatggcccctaagaagaagcgtaaagtgagccgggtgaacggcagcggcagcggcggcggcatgaaccacgaccaggagttcgacccccctaaggtgtaccctcccgtccccgccgagaagagaaagcccatccgggtcctgagcctgttcgatggcatcgccaccggtctgctggtgctgaaggacctgggcatccaggtggataggtacattgcctccgaggtgtgcgaggactccatcaccgtgggaatggtgcgtcatcagggcaagatcatgtacgtgggcgacgtgcggagcgtgacacagaagcatatccaggagtggggccctttcgacctggtgatcggcggcagcccttgcaatgacctgagcatcgtgaacccagcccggaagggcctgtacgagggaaccggcagactgttcttcgagttttacagactgctgcacgacgcccggcctaaggaaggcgacgaccggcccttcttttggctgttcgagaatgtggtggccatgggagtcagcgacaagcgggatattagccggttcctggagagcaaccccgtgatgatcgatgccaaggaagtgagcgccgcccaccgggccagatacttctggggcaatctgcctggcatgaacagacccctggccagcaccgtgaacgacaagctggagctgcaggagtgcctggagcacggccggatcgccaagttcagcaaggtgagaaccatcaccacccgaagcaacagcatcaaacaaggcaaggaccagcactttcctgtgttcatgaacgagaaggaggacatcctgtggtgtaccgagatggagagagtgttcgggttcccagtccactacacagatgtcagcaacatgtctagactggccagacagagactgctgggaagaagctggtccgtccctgtgatcagacacctgttcgcccctctgaaggagtacttcgcctgcgtgagcagcggcaacagcaacgccaacagccggggccccagcttctctagcggcctggtgccactgtccctgagagggagccacatgggccccatggagatctacaaaaccgtgagcgcctggaagcggcagcctgtgcgcgtgctgagcctgtttcggaatatcgataaagtcctgaaaagcctgggattcctggagagcggctctggctccggcggtggcaccctgaagtacgtggaggatgtgacaaacgtggtcagacgggatgtggagaagtggggccccttcgatctggtgtacggcagcacccaacccctgggcagctcttgtgaccggtgccctggctggtacatgtttcagttccaccggatcctgcagtacgccctgccgagacaggagtcccagcggccattcttttggattttcatggacaacttgctgctgaccgaggatgaccaggaaactaccactcggttcctgcagaccgaagccgtgaccctgcaggacgtgagaggccgggactaccagaacgccatgcgggtgtggtccaacatccctggactgaaaagcaagcacgcacctctgacccctaaagaagaggagtacctgcaggcccaggtgcggagcagaagcaagctggacgcccctaaggtggatctgctggtgaagaattgcctcctgcccctgagagagtacttcaagtatttcagccagaatagtctgcccctgggcggcccaagcagcggcgcccctcctcccagcggcggcagcccagccggctccccaacctctaccgaggagggcacctctgagtccgccacccccgagagcggccctggcacctccaccgagcccagcgagggcagcgcacccggcagccctgccggcagccccacctccacagaggagggaaccagcaccgagcccagcgaaggcagcgccccaggcaccagcaccgagcctagtgagggcggctctggcggcggcagcgcccaggagattaaacggatcaacaagatcagaagaagacttgtgaaagacagcaacaccaagaaggccggcaagacaggccccatgaaaaccctgctggttagagtgatgacacccgatctgagagagcggctggaaaacctgagaaagaagcctgaaaatatcccccagcccatcagcaatacatctagagccaacctgaataagctgctgaccgattacaccgaaatgaagaaggcgatcctgcatgtgtactgggaagagttccagaaggaccctgtgggcctgatgagccgggtggcccagcctgccagcaagaagatcgatcagaacaagctgaaacctgagatggacgagaagggcaacctgaccaccgccggctttgcctgctctcagtgtggccagcccctgttcgtgtacaagctggagcaggtgtctgagaagggcaaggcttacaccaactacttcggacggtgcaatgtggccgagcacgaaaagctgatcctgctggcccagctgaagcccgagaaggatagcgacgaagccgtgacatatagcctgggaaagtttgggcagagggccctggatttctacagcattcatgtgaccaaggagtccacccaccccgtgaagcccctggcccagatcgccggaaacagatacgcctccggacctgtgggaaaggccctgagcgacgcatgtatgggcacaatcgcctccttcctgtctaagtaccaggacatcatcatcgaacaccagaaggtggtgaagggcaaccagaagagactggagagcctgcgggagctggccggcaaggaaaacctggaataccctagcgtgaccctgccacctcagcctcacaccaaggagggcgttgatgcctacaacgaagtgatcgcccgggtgcgaatgtgggtgaacctgaacctgtggcagaagctgaagctaagcagagatgatgccaagcctctgctgagactgaagggattcccttcctttcctctggtcgagagacaggccaacgaagtggactggtgggacatggtgtgtaacgtgaagaagctgatcaacgagaaaaaggaggatggcaaggtgttttggcagaatctggctggctacaagagacaggaagccctgagaccatacctgagcagcgaggaagatcggaagaagggaaagaaattcgctcggtaccagctgggcgacctgctgctgcacctggaaaagaagcacggcgaggactggggaaaggtgtacgacgaggcctgggagcggattgacaagaaagtggaaggcctgagcaagcacatcaagctggaagaggaacggagaagcgaggacgcccagagcaaggccgccctgaccgactggctgcgggctaaggccagcttcgtgatcgagggcctgaaggaggccgacaaggacgagttctgcagatgcgagctgaagctgcagaagtggtacggggacctgcggggaaagcccttcgccatcgaagccgagaacagcatcctggacatcagcggcttcagcaagcagtacaactgtgccttcatctggcagaaggacggcgtgaagaagctgaacctgtacctgatcatcaactacttcaagggcggcaagctgcggttcaagaagatcaaacctgaagccttcgaagccaacagattctacaccgtgatcaacaaaaagagcggcgagatcgtgcccatggaggtgaacttcaacttcgacgaccccaacctgatcatcctgcctctggcctttggcaagagacagggcagagaattcatctggaacgacctgctgtccctggaaaccggcagcctgaagctggccaacggaagagtgatcgagaagacactgtacaacagaagaacccggcaggatgagcctgccctgttcgtggccctgaccttcgagcggcgggaggtcctggactcctccaatatcaaaccaatgaacctgatcggcgtggcaagaggcgaaaacatccccgccgtgatcgccctgaccgaccccgagggctgcccactgagccggtttaaggatagcctgggaaacccaacccacatcctgagaatcggcgagagctataaggagaagcagcggaccatccaggccaagaaggaggtggagcagcggagagccggcggctacagccggaagtacgccagcaaagccaagaatctggcagacgatatggtgagaaacaccgctagagatctgctgtactacgccgtgacccaggatgccatgctgatcttcgccaacctgagccggggcttcggccggcagggcaagcggaccttcatggccgagagacagtacacacggatggaggactggctgaccgccaagctggcctacgagggcctgagcaagacctacctgtccaagacactggcccagtacacctccaagacatgcagcaactgtgggtttaccatcaccagcgccgactacgacagggtgctggagaagctgaagaagacagcaacaggctggatgaccacaattaacggcaaggagctgaaggtggagggccagattacctactacaacagatacaagagacagaacgtagtcaaggacctgtccgtcgagctggatagactgagcgaagaatctgtgaacaacgacatctcctcctggacaaagggcagaagcggagaagctctgagcctcctgaagaaaagattctcccatagacccgtgcaggagaagttcgtgtgcctgaactgcggcttcgagacacacgcagccgagcaagccgccctgaacatcgccagatcctggctgttcctgcggagccaggagtacaagaaataccagacaaacaagacaaccggcaacaccgataagagagccttcgtcgagacctggcagtccttttaccggaagaagcttaaggaggtgtggaaacctgccgtgcggtctggcggatctggcggaggctccacaagcgccaggggccccgtgagcttcgccgacgtggccgtgtacttcagccccgaggagtggggcaggctgaggcccgcccagagggccctgtacagggacgtgatgagggagacctacggccacctgggcgccctgggcttccccggccccaagcccgccctgatgtgctggatggacgaggagaccgaggtgtggggccccgacgccagggaccccgaggaggccggcgagaagggcaccgagaacaccagccccaagaaaaagagaaaagtctaagctgccttctgcggggcttgccttctggccatgcccttcttctctcccttgcacctgtacctcttggtctttgaataaagcctgagtaggaaggctagcaaaaaaaaaaaaaaaaaaaaaaaaaaaaaaaaaaaaaaaaaaaaaaaaaaaaaaaaaaaaaaaaaaaaaaaaaaaaaaaa

SEQ ID NO: 3920 - RNA, 5419 nt, synthetic construct
  source 1..5419: mol_type = other RNA
aggaaataagagagaaaagaagagtaagaagaaatataagagccaccatggcccctaagaagaagcgtaaagtgagccgggtgaacggcagcggcagcggcggcggcatgaaccacgaccaggagttcgacccccctaaggtgtaccctcccgtccccgccgagaagagaaagcccatccgggtcctgagcctgttcgatggcatcgccaccggtctgctggtgctgaaggacctgggcatccaggtggataggtacattgcctccgaggtgtgcgaggactccatcaccgtgggaatggtgcgtcatcagggcaagatcatgtacgtgggcgacgtgcggagcgtgacacagaagcatatccaggagtggggccctttcgacctggtgatcggcggcagcccttgcaatgacctgagcatcgtgaacccagcccggaagggcctgtacgagggaaccggcagactgttcttcgagttttacagactgctgcacgacgcccggcctaaggaaggcgacgaccggcccttcttttggctgttcgagaatgtggtggccatgggagtcagcgacaagcgggatattagccggttcctggagagcaaccccgtgatgatcgatgccaaggaagtgagcgccgcccaccgggccagatacttctggggcaatctgcctggcatgaacagacccctggccagcaccgtgaacgacaagctggagctgcaggagtgcctggagcacggccggatcgccaagttcagcaaggtgagaaccatcaccacccgaagcaacagcatcaaacaaggcaaggaccagcactttcctgtgttcatgaacgagaaggaggacatcctgtggtgtaccgagatggagagagtgttcgggttcccagtccactacacagatgtcagcaacatgtctagactggccagacagagactgctgggaagaagctggtccgtccctgtgatcagacacctgttcgcccctctgaaggagtacttcgcctgcgtgagcagcggcaacagcaacgccaacagccggggccccagcttctctagcggcctggtgccactgtccctgagagggagccacatgggccccatggagatctacaaaaccgtgagcgcctggaagcggcagcctgtgcgcgtgctgagcctgtttcggaatatcgataaagtcctgaaaagcctgggattcctggagagcggctctggctccggcggtggcaccctgaagtacgtggaggatgtgacaaacgtggtcagacgggatgtggagaagtggggccccttcgatctggtgtacggcagcacccaacccctgggcagctcttgtgaccggtgccctggctggtacatgtttcagttccaccggatcctgcagtacgccctgccgagacaggagtcccagcggccattcttttggattttcatggacaacttgctgctgaccgaggatgaccaggaaactaccactcggttcctgcagaccgaagccgtgaccctgcaggacgtgagaggccgggactaccagaacgccatgcgggtgtggtccaacatccctggactgaaaagcaagcacgcacctctgacccctaaagaagaggagtacctgcaggcccaggtgcggagcagaagcaagctggacgcccctaaggtggatctgctggtgaagaattgcctcctgcccctgagagagtacttcaagtatttcagccagaatagtctgcccctgggcggcccaagcagcggcgcccctcctcccagcggcggcagcccagccggctccccaacctctaccgaggagggcacctctgagtccgccacccccgagagcggccctggcacctccaccgagcccagcgagggcagcgcacccggcagccctgccggcagccccacctccacagaggagggaaccagcaccgagcccagcgaaggcagcgccccaggcaccagcaccgagcctagtgagggcggctctggcggcggcagcgcccaggagattaaacggatcaacaagatcagaagaagacttgtgaaagacagcaacaccaagaaggccggcaagacaggccccatgaaaaccctgctggttagagtgatgacacccgatctgagagagcggctggaaaacctgagaaagaagcctgaaaatatcccccagcccatcagcaatacatctagagccaacctgaataagctgctgaccgattacaccgaaatgaagaaggcgatcctgcatgtgtactgggaagagttccagaaggaccctgtgggcctgatgagccgggtggcccagcctgccagcaagaagatcgatcagaacaagctgaaacctgagatggacgagaagggcaacctgaccaccgccggctttgcctgctctcagtgtggccagcccctgttcgtgtacaagctggagcaggtgtctgagaagggcaaggcttacaccaactacttcggacggtgcaatgtggccgagcacgaaaagctgatcctgctggcccagctgaagcccgagaaggatagcgacgaagccgtgacatatagcctgggaaagtttgggcagagggccctggatttctacagcattcatgtgaccaaggagtccacccaccccgtgaagcccctggcccagatcgccggaaacagatacgcctccggacctgtgggaaaggccctgagcgacgcatgtatgggcacaatcgcctccttcctgtctaagtaccaggacatcatcatcgaacaccagaaggtggtgaagggcaaccagaagagactggagagcctgcgggagctggccggcaaggaaaacctggaataccctagcgtgaccctgccacctcagcctcacaccaaggagggcgttgatgcctacaacgaagtgatcgcccgggtgcgaatgtgggtgaacctgaacctgtggcagaagctgaagctaagcagagatgatgccaagcctctgctgagactgaagggattcccttcctttcctctggtcgagagacaggccaacgaagtggactggtgggacatggtgtgtaacgtgaagaagctgatcaacgagaaaaaggaggatggcaaggtgttttggcagaatctggctggctacaagagacaggaagccctgagaccatacctgagcagcgaggaagatcggaagaagggaaagaaattcgctcggtaccagctgggcgacctgctgctgcacctggaaaagaagcacggcgaggactggggaaaggtgtacgacgaggcctgggagcggattgacaagaaagtggaaggcctgagcaagcacatcaagctggaagaggaacggagaagcgaggacgcccagagcaaggccgccctgaccgactggctgcgggctaaggccagcttcgtgatcgagggcctgaaggaggccgacaaggacgagttctgcagatgcgagctgaagctgcagaagtggtacggggacctgcggggaaagcccttcgccatcgaagccgagaacagcatcctggacatcagcggcttcagcaagcagtacaactgtgccttcatctggcagaaggacggcgtgaagaagctgaacctgtacctgatcatcaactacttcaagggcggcaagctgcggttcaagaagatcaaacctgaagccttcgaagccaacagattctacaccgtgatcaacaaaaagagcggcgagatcgtgcccatggaggtgaacttcaacttcgacgaccccaacctgatcatcctgcctctggcctttggcaagagacagggcagagaattcatctggaacgacctgctgtccctggaaaccggcagcctgaagctggccaacggaagagtgatcgagaagacactgtacaacagaagaacccggcaggatgagcctgccctgttcgtggccctgaccttcgagcggcgggaggtcctggactcctccaatatcaaaccaatgaacctgatcggcgtggcaagaggcgaaaacatccccgccgtgatcgccctgaccgaccccgagggctgcccactgagccggtttaaggatagcctgggaaacccaacccacatcctgagaatcggcgagagctataaggagaagcagcggaccatccaggccaagaaggaggtggagcagcggagagccggcggctacagccggaagtacgccagcaaagccaagaatctggcagacgatatggtgagaaacaccgctagagatctgctgtactacgccgtgacccaggatgccatgctgatcttcgccaacctgagccggggcttcggccggcagggcaagcggaccttcatggccgagagacagtacacacggatggaggactggctgaccgccaagctggcctacgagggcctgagcaagacctacctgtccaagacactggcccagtacacctccaagacatgcagcaactgtgggtttaccatcaccagcgccgactacgacagggtgctggagaagctgaagaagacagcaacaggctggatgaccacaattaacggcaaggagctgaaggtggagggccagattacctactacaacagatacaagagacagaacgtagtcaaggacctgtccgtcgagctggatagactgagcgaagaatctgtgaacaacgacatctcctcctggacaaagggcagaagcggagaagctctgagcctcctgaagaaaagattctcccatagacccgtgcaggagaagttcgtgtgcctgaactgcggcttcgagacacacgcagccgagcaagccgccctgaacatcgccagatcctggctgttcctgcggagccaggagtacaagaaataccagacaaacaagacaaccggcaacaccgataagagagccttcgtcgagacctggcagtccttttaccggaagaagcttaaggaggtgtggaaacctgccgtgcggtctggcggatctggcggaggctccacaagccagatgctggtgaccttcgaggacatcgccgtgagcttcagcaaggaggagtgggagtacctggacgagggccagaaggagctgtacagggaggtgatgaaggagaactaccagaccctgatcagcctgggcaccggcttccccaccgtgatccccgagatcatcagccacatcgagcagggcgacgagcccggcagcgaggagagggagaacggcaagagcagctgcagcggcgagagcggcaccagccccaagaaaaagagaaaagtctaagctgccttctgcggggcttgccttctggccatgcccttcttctctcccttgcacctgtacctcttggtctttgaataaagcctgagtaggaaggctagcaaaaaaaaaaaaaaaaaaaaaaaaaaaaaaaaaaaaaaaaaaaaaaaaaaaaaaaaaaaaaaaaaaaaaaaaaaaaaaaa

SEQ ID NO: 3921 - RNA, 5419 nt, synthetic construct
  source 1..5419: mol_type = other RNA
aggaaataagagagaaaagaagagtaagaagaaatataagagccaccatggcccctaagaagaagcgtaaagtgagccgggtgaacggcagcggcagcggcggcggcatgaaccacgaccaggagttcgacccccctaaggtgtaccctcccgtccccgccgagaagagaaagcccatccgggtcctgagcctgttcgatggcatcgccaccggtctgctggtgctgaaggacctgggcatccaggtggataggtacattgcctccgaggtgtgcgaggactccatcaccgtgggaatggtgcgtcatcagggcaagatcatgtacgtgggcgacgtgcggagcgtgacacagaagcatatccaggagtggggccctttcgacctggtgatcggcggcagcccttgcaatgacctgagcatcgtgaacccagcccggaagggcctgtacgagggaaccggcagactgttcttcgagttttacagactgctgcacgacgcccggcctaaggaaggcgacgaccggcccttcttttggctgttcgagaatgtggtggccatgggagtcagcgacaagcgggatattagccggttcctggagagcaaccccgtgatgatcgatgccaaggaagtgagcgccgcccaccgggccagatacttctggggcaatctgcctggcatgaacagacccctggccagcaccgtgaacgacaagctggagctgcaggagtgcctggagcacggccggatcgccaagttcagcaaggtgagaaccatcaccacccgaagcaacagcatcaaacaaggcaaggaccagcactttcctgtgttcatgaacgagaaggaggacatcctgtggtgtaccgagatggagagagtgttcgggttcccagtccactacacagatgtcagcaacatgtctagactggccagacagagactgctgggaagaagctggtccgtccctgtgatcagacacctgttcgcccctctgaaggagtacttcgcctgcgtgagcagcggcaacagcaacgccaacagccggggccccagcttctctagcggcctggtgccactgtccctgagagggagccacatgggccccatggagatctacaaaaccgtgagcgcctggaagcggcagcctgtgcgcgtgctgagcctgtttcggaatatcgataaagtcctgaaaagcctgggattcctggagagcggctctggctccggcggtggcaccctgaagtacgtggaggatgtgacaaacgtggtcagacgggatgtggagaagtggggccccttcgatctggtgtacggcagcacccaacccctgggcagctcttgtgaccggtgccctggctggtacatgtttcagttccaccggatcctgcagtacgccctgccgagacaggagtcccagcggccattcttttggattttcatggacaacttgctgctgaccgaggatgaccaggaaactaccactcggttcctgcagaccgaagccgtgaccctgcaggacgtgagaggccgggactaccagaacgccatgcgggtgtggtccaacatccctggactgaaaagcaagcacgcacctctgacccctaaagaagaggagtacctgcaggcccaggtgcggagcagaagcaagctggacgcccctaaggtggatctgctggtgaagaattgcctcctgcccctgagagagtacttcaagtatttcagccagaatagtctgcccctgggcggcccaagcagcggcgcccctcctcccagcggcggcagcccagccggctccccaacctctaccgaggagggcacctctgagtccgccacccccgagagcggccctggcacctccaccgagcccagcgagggcagcgcacccggcagccctgccggcagccccacctccacagaggagggaaccagcaccgagcccagcgaaggcagcgccccaggcaccagcaccgagcctagtgagggcggctctggcggcggcagcgcccaggagattaaacggatcaacaagatcagaagaagacttgtgaaagacagcaacaccaagaaggccggcaagacaggccccatgaaaaccctgctggttagagtgatgacacccgatctgagagagcggctggaaaacctgagaaagaagcctgaaaatatcccccagcccatcagcaatacatctagagccaacctgaataagctgctgaccgattacaccgaaatgaagaaggcgatcctgcatgtgtactgggaagagttccagaaggaccctgtgggcctgatgagccgggtggcccagcctgccagcaagaagatcgatcagaacaagctgaaacctgagatggacgagaagggcaacctgaccaccgccggctttgcctgctctcagtgtggccagcccctgttcgtgtacaagctggagcaggtgtctgagaagggcaaggcttacaccaactacttcggacggtgcaatgtggccgagcacgaaaagctgatcctgctggcccagctgaagcccgagaaggatagcgacgaagccgtgacatatagcctgggaaagtttgggcagagggccctggatttctacagcattcatgtgaccaaggagtccacccaccccgtgaagcccctggcccagatcgccggaaacagatacgcctccggacctgtgggaaaggccctgagcgacgcatgtatgggcacaatcgcctccttcctgtctaagtaccaggacatcatcatcgaacaccagaaggtggtgaagggcaaccagaagagactggagagcctgcgggagctggccggcaaggaaaacctggaataccctagcgtgaccctgccacctcagcctcacaccaaggagggcgttgatgcctacaacgaagtgatcgcccgggtgcgaatgtgggtgaacctgaacctgtggcagaagctgaagctaagcagagatgatgccaagcctctgctgagactgaagggattcccttcctttcctctggtcgagagacaggccaacgaagtggactggtgggacatggtgtgtaacgtgaagaagctgatcaacgagaaaaaggaggatggcaaggtgttttggcagaatctggctggctacaagagacaggaagccctgagaccatacctgagcagcgaggaagatcggaagaagggaaagaaattcgctcggtaccagctgggcgacctgctgctgcacctggaaaagaagcacggcgaggactggggaaaggtgtacgacgaggcctgggagcggattgacaagaaagtggaaggcctgagcaagcacatcaagctggaagaggaacggagaagcgaggacgcccagagcaaggccgccctgaccgactggctgcgggctaaggccagcttcgtgatcgagggcctgaaggaggccgacaaggacgagttctgcagatgcgagctgaagctgcagaagtggtacggggacctgcggggaaagcccttcgccatcgaagccgagaacagcatcctggacatcagcggcttcagcaagcagtacaactgtgccttcatctggcagaaggacggcgtgaagaagctgaacctgtacctgatcatcaactacttcaagggcggcaagctgcggttcaagaagatcaaacctgaagccttcgaagccaacagattctacaccgtgatcaacaaaaagagcggcgagatcgtgcccatggaggtgaacttcaacttcgacgaccccaacctgatcatcctgcctctggcctttggcaagagacagggcagagaattcatctggaacgacctgctgtccctggaaaccggcagcctgaagctggccaacggaagagtgatcgagaagacactgtacaacagaagaacccggcaggatgagcctgccctgttcgtggccctgaccttcgagcggcgggaggtcctggactcctccaatatcaaaccaatgaacctgatcggcgtggcaagaggcgaaaacatccccgccgtgatcgccctgaccgaccccgagggctgcccactgagccggtttaaggatagcctgggaaacccaacccacatcctgagaatcggcgagagctataaggagaagcagcggaccatccaggccaagaaggaggtggagcagcggagagccggcggctacagccggaagtacgccagcaaagccaagaatctggcagacgatatggtgagaaacaccgctagagatctgctgtactacgccgtgacccaggatgccatgctgatcttcgccaacctgagccggggcttcggccggcagggcaagcggaccttcatggccgagagacagtacacacggatggaggactggctgaccgccaagctggcctacgagggcctgagcaagacctacctgtccaagacactggcccagtacacctccaagacatgcagcaactgtgggtttaccatcaccagcgccgactacgacagggtgctggagaagctgaagaagacagcaacaggctggatgaccacaattaacggcaaggagctgaaggtggagggccagattacctactacaacagatacaagagacagaacgtagtcaaggacctgtccgtcgagctggatagactgagcgaagaatctgtgaacaacgacatctcctcctggacaaagggcagaagcggagaagctctgagcctcctgaagaaaagattctcccatagacccgtgcaggagaagttcgtgtgcctgaactgcggcttcgagacacacgcagccgagcaagccgccctgaacatcgccagatcctggctgttcctgcggagccaggagtacaagaaataccagacaaacaagacaaccggcaacaccgataagagagccttcgtcgagacctggcagtccttttaccggaagaagcttaaggaggtgtggaaacctgccgtgcggtctggcggatctggcggaggctccacaagcgagcccggcgccgtgagcttcgccgacgtggccgtgtacttcagcctggaggagtggggctgcctgaggcccagccagagggccctgtacagggacgtgatgagggagacctacctgcacctgagcgccctgggcggcggcggcaccaagcccgccctgatcagctgggtggaggaggaggccgagctgtggcaccccgacgcccaggaccccgaggtggccaagtgccccaccgaggccgacaccagccccaagaaaaagagaaaagtctaagctgccttctgcggggcttgccttctggccatgcccttcttctctcccttgcacctgtacctcttggtctttgaataaagcctgagtaggaaggctagcaaaaaaaaaaaaaaaaaaaaaaaaaaaaaaaaaaaaaaaaaaaaaaaaaaaaaaaaaaaaaaaaaaaaaaaaaaaaaaaa

SEQ ID NO: 3922 - RNA, 5419 nt, synthetic construct
  source 1..5419: mol_type = other RNA
aggaaataagagagaaaagaagagtaagaagaaatataagagccaccatggcccctaagaagaagcgtaaagtgagccgggtgaacggcagcggcagcggcggcggcatgaaccacgaccaggagttcgacccccctaaggtgtaccctcccgtccccgccgagaagagaaagcccatccgggtcctgagcctgttcgatggcatcgccaccggtctgctggtgctgaaggacctgggcatccaggtggataggtacattgcctccgaggtgtgcgaggactccatcaccgtgggaatggtgcgtcatcagggcaagatcatgtacgtgggcgacgtgcggagcgtgacacagaagcatatccaggagtggggccctttcgacctggtgatcggcggcagcccttgcaatgacctgagcatcgtgaacccagcccggaagggcctgtacgagggaaccggcagactgttcttcgagttttacagactgctgcacgacgcccggcctaaggaaggcgacgaccggcccttcttttggctgttcgagaatgtggtggccatgggagtcagcgacaagcgggatattagccggttcctggagagcaaccccgtgatgatcgatgccaaggaagtgagcgccgcccaccgggccagatacttctggggcaatctgcctggcatgaacagacccctggccagcaccgtgaacgacaagctggagctgcaggagtgcctggagcacggccggatcgccaagttcagcaaggtgagaaccatcaccacccgaagcaacagcatcaaacaaggcaaggaccagcactttcctgtgttcatgaacgagaaggaggacatcctgtggtgtaccgagatggagagagtgttcgggttcccagtccactacacagatgtcagcaacatgtctagactggccagacagagactgctgggaagaagctggtccgtccctgtgatcagacacctgttcgcccctctgaaggagtacttcgcctgcgtgagcagcggcaacagcaacgccaacagccggggccccagcttctctagcggcctggtgccactgtccctgagagggagccacatgggccccatggagatctacaaaaccgtgagcgcctggaagcggcagcctgtgcgcgtgctgagcctgtttcggaatatcgataaagtcctgaaaagcctgggattcctggagagcggctctggctccggcggtggcaccctgaagtacgtggaggatgtgacaaacgtggtcagacgggatgtggagaagtggggccccttcgatctggtgtacggcagcacccaacccctgggcagctcttgtgaccggtgccctggctggtacatgtttcagttccaccggatcctgcagtacgccctgccgagacaggagtcccagcggccattcttttggattttcatggacaacttgctgctgaccgaggatgaccaggaaactaccactcggttcctgcagaccgaagccgtgaccctgcaggacgtgagaggccgggactaccagaacgccatgcgggtgtggtccaacatccctggactgaaaagcaagcacgcacctctgacccctaaagaagaggagtacctgcaggcccaggtgcggagcagaagcaagctggacgcccctaaggtggatctgctggtgaagaattgcctcctgcccctgagagagtacttcaagtatttcagccagaatagtctgcccctgggcggcccaagcagcggcgcccctcctcccagcggcggcagcccagccggctccccaacctctaccgaggagggcacctctgagtccgccacccccgagagcggccctggcacctccaccgagcccagcgagggcagcgcacccggcagccctgccggcagccccacctccacagaggagggaaccagcaccgagcccagcgaaggcagcgccccaggcaccagcaccgagcctagtgagggcggctctggcggcggcagcgcccaggagattaaacggatcaacaagatcagaagaagacttgtgaaagacagcaacaccaagaaggccggcaagacaggccccatgaaaaccctgctggttagagtgatgacacccgatctgagagagcggctggaaaacctgagaaagaagcctgaaaatatcccccagcccatcagcaatacatctagagccaacctgaataagctgctgaccgattacaccgaaatgaagaaggcgatcctgcatgtgtactgggaagagttccagaaggaccctgtgggcctgatgagccgggtggcccagcctgccagcaagaagatcgatcagaacaagctgaaacctgagatggacgagaagggcaacctgaccaccgccggctttgcctgctctcagtgtggccagcccctgttcgtgtacaagctggagcaggtgtctgagaagggcaaggcttacaccaactacttcggacggtgcaatgtggccgagcacgaaaagctgatcctgctggcccagctgaagcccgagaaggatagcgacgaagccgtgacatatagcctgggaaagtttgggcagagggccctggatttctacagcattcatgtgaccaaggagtccacccaccccgtgaagcccctggcccagatcgccggaaacagatacgcctccggacctgtgggaaaggccctgagcgacgcatgtatgggcacaatcgcctccttcctgtctaagtaccaggacatcatcatcgaacaccagaaggtggtgaagggcaaccagaagagactggagagcctgcgggagctggccggcaaggaaaacctggaataccctagcgtgaccctgccacctcagcctcacaccaaggagggcgttgatgcctacaacgaagtgatcgcccgggtgcgaatgtgggtgaacctgaacctgtggcagaagctgaagctaagcagagatgatgccaagcctctgctgagactgaagggattcccttcctttcctctggtcgagagacaggccaacgaagtggactggtgggacatggtgtgtaacgtgaagaagctgatcaacgagaaaaaggaggatggcaaggtgttttggcagaatctggctggctacaagagacaggaagccctgagaccatacctgagcagcgaggaagatcggaagaagggaaagaaattcgctcggtaccagctgggcgacctgctgctgcacctggaaaagaagcacggcgaggactggggaaaggtgtacgacgaggcctgggagcggattgacaagaaagtggaaggcctgagcaagcacatcaagctggaagaggaacggagaagcgaggacgcccagagcaaggccgccctgaccgactggctgcgggctaaggccagcttcgtgatcgagggcctgaaggaggccgacaaggacgagttctgcagatgcgagctgaagctgcagaagtggtacggggacctgcggggaaagcccttcgccatcgaagccgagaacagcatcctggacatcagcggcttcagcaagcagtacaactgtgccttcatctggcagaaggacggcgtgaagaagctgaacctgtacctgatcatcaactacttcaagggcggcaagctgcggttcaagaagatcaaacctgaagccttcgaagccaacagattctacaccgtgatcaacaaaaagagcggcgagatcgtgcccatggaggtgaacttcaacttcgacgaccccaacctgatcatcctgcctctggcctttggcaagagacagggcagagaattcatctggaacgacctgctgtccctggaaaccggcagcctgaagctggccaacggaagagtgatcgagaagacactgtacaacagaagaacccggcaggatgagcctgccctgttcgtggccctgaccttcgagcggcgggaggtcctggactcctccaatatcaaaccaatgaacctgatcggcgtggcaagaggcgaaaacatccccgccgtgatcgccctgaccgaccccgagggctgcccactgagccggtttaaggatagcctgggaaacccaacccacatcctgagaatcggcgagagctataaggagaagcagcggaccatccaggccaagaaggaggtggagcagcggagagccggcggctacagccggaagtacgccagcaaagccaagaatctggcagacgatatggtgagaaacaccgctagagatctgctgtactacgccgtgacccaggatgccatgctgatcttcgccaacctgagccggggcttcggccggcagggcaagcggaccttcatggccgagagacagtacacacggatggaggactggctgaccgccaagctggcctacgagggcctgagcaagacctacctgtccaagacactggcccagtacacctccaagacatgcagcaactgtgggtttaccatcaccagcgccgactacgacagggtgctggagaagctgaagaagacagcaacaggctggatgaccacaattaacggcaaggagctgaaggtggagggccagattacctactacaacagatacaagagacagaacgtagtcaaggacctgtccgtcgagctggatagactgagcgaagaatctgtgaacaacgacatctcctcctggacaaagggcagaagcggagaagctctgagcctcctgaagaaaagattctcccatagacccgtgcaggagaagttcgtgtgcctgaactgcggcttcgagacacacgcagccgagcaagccgccctgaacatcgccagatcctggctgttcctgcggagccaggagtacaagaaataccagacaaacaagacaaccggcaacaccgataagagagccttcgtcgagacctggcagtccttttaccggaagaagcttaaggaggtgtggaaacctgccgtgcggtctggcggatctggcggaggctccacaagcccccagaagctggtgaccttcgaggacgtggccgtgtacttcacccaggccgagtgggacggcctgagccccgcccagaggatcctgtacagggacgtgatgctggagaactacggcaacgtggccagcctgggcttccccctgctgaagcccgccgtgatcagccagctggagggcggcggcgagctgggcgcccccagccccctggccgccggcaccggcctgcacggcctgaggaccgtgaccagccccaagaaaaagagaaaagtctaagctgccttctgcggggcttgccttctggccatgcccttcttctctcccttgcacctgtacctcttggtctttgaataaagcctgagtaggaaggctagcaaaaaaaaaaaaaaaaaaaaaaaaaaaaaaaaaaaaaaaaaaaaaaaaaaaaaaaaaaaaaaaaaaaaaaaaaaaaaaaa

SEQ ID NO: 3923 - RNA, 5419 nt, synthetic construct
  source 1..5419: mol_type = other RNA
aggaaataagagagaaaagaagagtaagaagaaatataagagccaccatggcccctaagaagaagcgtaaagtgagccgggtgaacggcagcggcagcggcggcggcatgaaccacgaccaggagttcgacccccctaaggtgtaccctcccgtccccgccgagaagagaaagcccatccgggtcctgagcctgttcgatggcatcgccaccggtctgctggtgctgaaggacctgggcatccaggtggataggtacattgcctccgaggtgtgcgaggactccatcaccgtgggaatggtgcgtcatcagggcaagatcatgtacgtgggcgacgtgcggagcgtgacacagaagcatatccaggagtggggccctttcgacctggtgatcggcggcagcccttgcaatgacctgagcatcgtgaacccagcccggaagggcctgtacgagggaaccggcagactgttcttcgagttttacagactgctgcacgacgcccggcctaaggaaggcgacgaccggcccttcttttggctgttcgagaatgtggtggccatgggagtcagcgacaagcgggatattagccggttcctggagagcaaccccgtgatgatcgatgccaaggaagtgagcgccgcccaccgggccagatacttctggggcaatctgcctggcatgaacagacccctggccagcaccgtgaacgacaagctggagctgcaggagtgcctggagcacggccggatcgccaagttcagcaaggtgagaaccatcaccacccgaagcaacagcatcaaacaaggcaaggaccagcactttcctgtgttcatgaacgagaaggaggacatcctgtggtgtaccgagatggagagagtgttcgggttcccagtccactacacagatgtcagcaacatgtctagactggccagacagagactgctgggaagaagctggtccgtccctgtgatcagacacctgttcgcccctctgaaggagtacttcgcctgcgtgagcagcggcaacagcaacgccaacagccggggccccagcttctctagcggcctggtgccactgtccctgagagggagccacatgggccccatggagatctacaaaaccgtgagcgcctggaagcggcagcctgtgcgcgtgctgagcctgtttcggaatatcgataaagtcctgaaaagcctgggattcctggagagcggctctggctccggcggtggcaccctgaagtacgtggaggatgtgacaaacgtggtcagacgggatgtggagaagtggggccccttcgatctggtgtacggcagcacccaacccctgggcagctcttgtgaccggtgccctggctggtacatgtttcagttccaccggatcctgcagtacgccctgccgagacaggagtcccagcggccattcttttggattttcatggacaacttgctgctgaccgaggatgaccaggaaactaccactcggttcctgcagaccgaagccgtgaccctgcaggacgtgagaggccgggactaccagaacgccatgcgggtgtggtccaacatccctggactgaaaagcaagcacgcacctctgacccctaaagaagaggagtacctgcaggcccaggtgcggagcagaagcaagctggacgcccctaaggtggatctgctggtgaagaattgcctcctgcccctgagagagtacttcaagtatttcagccagaatagtctgcccctgggcggcccaagcagcggcgcccctcctcccagcggcggcagcccagccggctccccaacctctaccgaggagggcacctctgagtccgccacccccgagagcggccctggcacctccaccgagcccagcgagggcagcgcacccggcagccctgccggcagccccacctccacagaggagggaaccagcaccgagcccagcgaaggcagcgccccaggcaccagcaccgagcctagtgagggcggctctggcggcggcagcgcccaggagattaaacggatcaacaagatcagaagaagacttgtgaaagacagcaacaccaagaaggccggcaagacaggccccatgaaaaccctgctggttagagtgatgacacccgatctgagagagcggctggaaaacctgagaaagaagcctgaaaatatcccccagcccatcagcaatacatctagagccaacctgaataagctgctgaccgattacaccgaaatgaagaaggcgatcctgcatgtgtactgggaagagttccagaaggaccctgtgggcctgatgagccgggtggcccagcctgccagcaagaagatcgatcagaacaagctgaaacctgagatggacgagaagggcaacctgaccaccgccggctttgcctgctctcagtgtggccagcccctgttcgtgtacaagctggagcaggtgtctgagaagggcaaggcttacaccaactacttcggacggtgcaatgtggccgagcacgaaaagctgatcctgctggcccagctgaagcccgagaaggatagcgacgaagccgtgacatatagcctgggaaagtttgggcagagggccctggatttctacagcattcatgtgaccaaggagtccacccaccccgtgaagcccctggcccagatcgccggaaacagatacgcctccggacctgtgggaaaggccctgagcgacgcatgtatgggcacaatcgcctccttcctgtctaagtaccaggacatcatcatcgaacaccagaaggtggtgaagggcaaccagaagagactggagagcctgcgggagctggccggcaaggaaaacctggaataccctagcgtgaccctgccacctcagcctcacaccaaggagggcgttgatgcctacaacgaagtgatcgcccgggtgcgaatgtgggtgaacctgaacctgtggcagaagctgaagctaagcagagatgatgccaagcctctgctgagactgaagggattcccttcctttcctctggtcgagagacaggccaacgaagtggactggtgggacatggtgtgtaacgtgaagaagctgatcaacgagaaaaaggaggatggcaaggtgttttggcagaatctggctggctacaagagacaggaagccctgagaccatacctgagcagcgaggaagatcggaagaagggaaagaaattcgctcggtaccagctgggcgacctgctgctgcacctggaaaagaagcacggcgaggactggggaaaggtgtacgacgaggcctgggagcggattgacaagaaagtggaaggcctgagcaagcacatcaagctggaagaggaacggagaagcgaggacgcccagagcaaggccgccctgaccgactggctgcgggctaaggccagcttcgtgatcgagggcctgaaggaggccgacaaggacgagttctgcagatgcgagctgaagctgcagaagtggtacggggacctgcggggaaagcccttcgccatcgaagccgagaacagcatcctggacatcagcggcttcagcaagcagtacaactgtgccttcatctggcagaaggacggcgtgaagaagctgaacctgtacctgatcatcaactacttcaagggcggcaagctgcggttcaagaagatcaaacctgaagccttcgaagccaacagattctacaccgtgatcaacaaaaagagcggcgagatcgtgcccatggaggtgaacttcaacttcgacgaccccaacctgatcatcctgcctctggcctttggcaagagacagggcagagaattcatctggaacgacctgctgtccctggaaaccggcagcctgaagctggccaacggaagagtgatcgagaagacactgtacaacagaagaacccggcaggatgagcctgccctgttcgtggccctgaccttcgagcggcgggaggtcctggactcctccaatatcaaaccaatgaacctgatcggcgtggcaagaggcgaaaacatccccgccgtgatcgccctgaccgaccccgagggctgcccactgagccggtttaaggatagcctgggaaacccaacccacatcctgagaatcggcgagagctataaggagaagcagcggaccatccaggccaagaaggaggtggagcagcggagagccggcggctacagccggaagtacgccagcaaagccaagaatctggcagacgatatggtgagaaacaccgctagagatctgctgtactacgccgtgacccaggatgccatgctgatcttcgccaacctgagccggggcttcggccggcagggcaagcggaccttcatggccgagagacagtacacacggatggaggactggctgaccgccaagctggcctacgagggcctgagcaagacctacctgtccaagacactggcccagtacacctccaagacatgcagcaactgtgggtttaccatcaccagcgccgactacgacagggtgctggagaagctgaagaagacagcaacaggctggatgaccacaattaacggcaaggagctgaaggtggagggccagattacctactacaacagatacaagagacagaacgtagtcaaggacctgtccgtcgagctggatagactgagcgaagaatctgtgaacaacgacatctcctcctggacaaagggcagaagcggagaagctctgagcctcctgaagaaaagattctcccatagacccgtgcaggagaagttcgtgtgcctgaactgcggcttcgagacacacgcagccgagcaagccgccctgaacatcgccagatcctggctgttcctgcggagccaggagtacaagaaataccagacaaacaagacaaccggcaacaccgataagagagccttcgtcgagacctggcagtccttttaccggaagaagcttaaggaggtgtggaaacctgccgtgcggtctggcggatctggcggaggctccacaagcagctacgagggcagcgtgagcttcagggacgtggccatcaacttcagcagggaggagtggcagcacctggacctgagccagaggaacctgtacagggacgtgatgctggagacctgcagccacctgctgagcgtgggctaccaggtgcccaagcccgaggtggtgatgctggagcagggcaaggagccctgggccctgcagggcgagaggcccaggcagagctgccccggcgagaagctgtggaccagccccaagaaaaagagaaaagtctaagctgccttctgcggggcttgccttctggccatgcccttcttctctcccttgcacctgtacctcttggtctttgaataaagcctgagtaggaaggctagcaaaaaaaaaaaaaaaaaaaaaaaaaaaaaaaaaaaaaaaaaaaaaaaaaaaaaaaaaaaaaaaaaaaaaaaaaaaaaaaa

SEQ ID NO: 3924 - RNA, 5419 nt, synthetic construct
  source 1..5419: mol_type = other RNA
aggaaataagagagaaaagaagagtaagaagaaatataagagccaccatggcccctaagaagaagcgtaaagtgagccgggtgaacggcagcggcagcggcggcggcatgaaccacgaccaggagttcgacccccctaaggtgtaccctcccgtccccgccgagaagagaaagcccatccgggtcctgagcctgttcgatggcatcgccaccggtctgctggtgctgaaggacctgggcatccaggtggataggtacattgcctccgaggtgtgcgaggactccatcaccgtgggaatggtgcgtcatcagggcaagatcatgtacgtgggcgacgtgcggagcgtgacacagaagcatatccaggagtggggccctttcgacctggtgatcggcggcagcccttgcaatgacctgagcatcgtgaacccagcccggaagggcctgtacgagggaaccggcagactgttcttcgagttttacagactgctgcacgacgcccggcctaaggaaggcgacgaccggcccttcttttggctgttcgagaatgtggtggccatgggagtcagcgacaagcgggatattagccggttcctggagagcaaccccgtgatgatcgatgccaaggaagtgagcgccgcccaccgggccagatacttctggggcaatctgcctggcatgaacagacccctggccagcaccgtgaacgacaagctggagctgcaggagtgcctggagcacggccggatcgccaagttcagcaaggtgagaaccatcaccacccgaagcaacagcatcaaacaaggcaaggaccagcactttcctgtgttcatgaacgagaaggaggacatcctgtggtgtaccgagatggagagagtgttcgggttcccagtccactacacagatgtcagcaacatgtctagactggccagacagagactgctgggaagaagctggtccgtccctgtgatcagacacctgttcgcccctctgaaggagtacttcgcctgcgtgagcagcggcaacagcaacgccaacagccggggccccagcttctctagcggcctggtgccactgtccctgagagggagccacatgggccccatggagatctacaaaaccgtgagcgcctggaagcggcagcctgtgcgcgtgctgagcctgtttcggaatatcgataaagtcctgaaaagcctgggattcctggagagcggctctggctccggcggtggcaccctgaagtacgtggaggatgtgacaaacgtggtcagacgggatgtggagaagtggggccccttcgatctggtgtacggcagcacccaacccctgggcagctcttgtgaccggtgccctggctggtacatgtttcagttccaccggatcctgcagtacgccctgccgagacaggagtcccagcggccattcttttggattttcatggacaacttgctgctgaccgaggatgaccaggaaactaccactcggttcctgcagaccgaagccgtgaccctgcaggacgtgagaggccgggactaccagaacgccatgcgggtgtggtccaacatccctggactgaaaagcaagcacgcacctctgacccctaaagaagaggagtacctgcaggcccaggtgcggagcagaagcaagctggacgcccctaaggtggatctgctggtgaagaattgcctcctgcccctgagagagtacttcaagtatttcagccagaatagtctgcccctgggcggcccaagcagcggcgcccctcctcccagcggcggcagcccagccggctccccaacctctaccgaggagggcacctctgagtccgccacccccgagagcggccctggcacctccaccgagcccagcgagggcagcgcacccggcagccctgccggcagccccacctccacagaggagggaaccagcaccgagcccagcgaaggcagcgccccaggcaccagcaccgagcctagtgagggcggctctggcggcggcagcgcccaggagattaaacggatcaacaagatcagaagaagacttgtgaaagacagcaacaccaagaaggccggcaagacaggccccatgaaaaccctgctggttagagtgatgacacccgatctgagagagcggctggaaaacctgagaaagaagcctgaaaatatcccccagcccatcagcaatacatctagagccaacctgaataagctgctgaccgattacaccgaaatgaagaaggcgatcctgcatgtgtactgggaagagttccagaaggaccctgtgggcctgatgagccgggtggcccagcctgccagcaagaagatcgatcagaacaagctgaaacctgagatggacgagaagggcaacctgaccaccgccggctttgcctgctctcagtgtggccagcccctgttcgtgtacaagctggagcaggtgtctgagaagggcaaggcttacaccaactacttcggacggtgcaatgtggccgagcacgaaaagctgatcctgctggcccagctgaagcccgagaaggatagcgacgaagccgtgacatatagcctgggaaagtttgggcagagggccctggatttctacagcattcatgtgaccaaggagtccacccaccccgtgaagcccctggcccagatcgccggaaacagatacgcctccggacctgtgggaaaggccctgagcgacgcatgtatgggcacaatcgcctccttcctgtctaagtaccaggacatcatcatcgaacaccagaaggtggtgaagggcaaccagaagagactggagagcctgcgggagctggccggcaaggaaaacctggaataccctagcgtgaccctgccacctcagcctcacaccaaggagggcgttgatgcctacaacgaagtgatcgcccgggtgcgaatgtgggtgaacctgaacctgtggcagaagctgaagctaagcagagatgatgccaagcctctgctgagactgaagggattcccttcctttcctctggtcgagagacaggccaacgaagtggactggtgggacatggtgtgtaacgtgaagaagctgatcaacgagaaaaaggaggatggcaaggtgttttggcagaatctggctggctacaagagacaggaagccctgagaccatacctgagcagcgaggaagatcggaagaagggaaagaaattcgctcggtaccagctgggcgacctgctgctgcacctggaaaagaagcacggcgaggactggggaaaggtgtacgacgaggcctgggagcggattgacaagaaagtggaaggcctgagcaagcacatcaagctggaagaggaacggagaagcgaggacgcccagagcaaggccgccctgaccgactggctgcgggctaaggccagcttcgtgatcgagggcctgaaggaggccgacaaggacgagttctgcagatgcgagctgaagctgcagaagtggtacggggacctgcggggaaagcccttcgccatcgaagccgagaacagcatcctggacatcagcggcttcagcaagcagtacaactgtgccttcatctggcagaaggacggcgtgaagaagctgaacctgtacctgatcatcaactacttcaagggcggcaagctgcggttcaagaagatcaaacctgaagccttcgaagccaacagattctacaccgtgatcaacaaaaagagcggcgagatcgtgcccatggaggtgaacttcaacttcgacgaccccaacctgatcatcctgcctctggcctttggcaagagacagggcagagaattcatctggaacgacctgctgtccctggaaaccggcagcctgaagctggccaacggaagagtgatcgagaagacactgtacaacagaagaacccggcaggatgagcctgccctgttcgtggccctgaccttcgagcggcgggaggtcctggactcctccaatatcaaaccaatgaacctgatcggcgtggcaagaggcgaaaacatccccgccgtgatcgccctgaccgaccccgagggctgcccactgagccggtttaaggatagcctgggaaacccaacccacatcctgagaatcggcgagagctataaggagaagcagcggaccatccaggccaagaaggaggtggagcagcggagagccggcggctacagccggaagtacgccagcaaagccaagaatctggcagacgatatggtgagaaacaccgctagagatctgctgtactacgccgtgacccaggatgccatgctgatcttcgccaacctgagccggggcttcggccggcagggcaagcggaccttcatggccgagagacagtacacacggatggaggactggctgaccgccaagctggcctacgagggcctgagcaagacctacctgtccaagacactggcccagtacacctccaagacatgcagcaactgtgggtttaccatcaccagcgccgactacgacagggtgctggagaagctgaagaagacagcaacaggctggatgaccacaattaacggcaaggagctgaaggtggagggccagattacctactacaacagatacaagagacagaacgtagtcaaggacctgtccgtcgagctggatagactgagcgaagaatctgtgaacaacgacatctcctcctggacaaagggcagaagcggagaagctctgagcctcctgaagaaaagattctcccatagacccgtgcaggagaagttcgtgtgcctgaactgcggcttcgagacacacgcagccgagcaagccgccctgaacatcgccagatcctggctgttcctgcggagccaggagtacaagaaataccagacaaacaagacaaccggcaacaccgataagagagccttcgtcgagacctggcagtccttttaccggaagaagcttaaggaggtgtggaaacctgccgtgcggtctggcggatctggcggaggctccacaagcttccaggacagcgtgaccttccaggacgtggccgtgaccttcacccccgaggagtggggcaggctggccgccccccagaaggagctgtacagggaggtgatgctggagaacttcggccacctggcctgcctgggcctggccctgagcaagcccgacgtgatctgccagctggagaggggcgaggccccctggatgcccaggggcgacgtgccccagaggcccagcgccgcccccagcggcgacaccagccccaagaaaaagagaaaagtctaagctgccttctgcggggcttgccttctggccatgcccttcttctctcccttgcacctgtacctcttggtctttgaataaagcctgagtaggaaggctagcaaaaaaaaaaaaaaaaaaaaaaaaaaaaaaaaaaaaaaaaaaaaaaaaaaaaaaaaaaaaaaaaaaaaaaaaaaaaaaaa

SEQ ID NO: 3925 - RNA, 5419 nt, synthetic construct
  source 1..5419: mol_type = other RNA
aggaaataagagagaaaagaagagtaagaagaaatataagagccaccatggcccctaagaagaagcgtaaagtgagccgggtgaacggcagcggcagcggcggcggcatgaaccacgaccaggagttcgacccccctaaggtgtaccctcccgtccccgccgagaagagaaagcccatccgggtcctgagcctgttcgatggcatcgccaccggtctgctggtgctgaaggacctgggcatccaggtggataggtacattgcctccgaggtgtgcgaggactccatcaccgtgggaatggtgcgtcatcagggcaagatcatgtacgtgggcgacgtgcggagcgtgacacagaagcatatccaggagtggggccctttcgacctggtgatcggcggcagcccttgcaatgacctgagcatcgtgaacccagcccggaagggcctgtacgagggaaccggcagactgttcttcgagttttacagactgctgcacgacgcccggcctaaggaaggcgacgaccggcccttcttttggctgttcgagaatgtggtggccatgggagtcagcgacaagcgggatattagccggttcctggagagcaaccccgtgatgatcgatgccaaggaagtgagcgccgcccaccgggccagatacttctggggcaatctgcctggcatgaacagacccctggccagcaccgtgaacgacaagctggagctgcaggagtgcctggagcacggccggatcgccaagttcagcaaggtgagaaccatcaccacccgaagcaacagcatcaaacaaggcaaggaccagcactttcctgtgttcatgaacgagaaggaggacatcctgtggtgtaccgagatggagagagtgttcgggttcccagtccactacacagatgtcagcaacatgtctagactggccagacagagactgctgggaagaagctggtccgtccctgtgatcagacacctgttcgcccctctgaaggagtacttcgcctgcgtgagcagcggcaacagcaacgccaacagccggggccccagcttctctagcggcctggtgccactgtccctgagagggagccacatgggccccatggagatctacaaaaccgtgagcgcctggaagcggcagcctgtgcgcgtgctgagcctgtttcggaatatcgataaagtcctgaaaagcctgggattcctggagagcggctctggctccggcggtggcaccctgaagtacgtggaggatgtgacaaacgtggtcagacgggatgtggagaagtggggccccttcgatctggtgtacggcagcacccaacccctgggcagctcttgtgaccggtgccctggctggtacatgtttcagttccaccggatcctgcagtacgccctgccgagacaggagtcccagcggccattcttttggattttcatggacaacttgctgctgaccgaggatgaccaggaaactaccactcggttcctgcagaccgaagccgtgaccctgcaggacgtgagaggccgggactaccagaacgccatgcgggtgtggtccaacatccctggactgaaaagcaagcacgcacctctgacccctaaagaagaggagtacctgcaggcccaggtgcggagcagaagcaagctggacgcccctaaggtggatctgctggtgaagaattgcctcctgcccctgagagagtacttcaagtatttcagccagaatagtctgcccctgggcggcccaagcagcggcgcccctcctcccagcggcggcagcccagccggctccccaacctctaccgaggagggcacctctgagtccgccacccccgagagcggccctggcacctccaccgagcccagcgagggcagcgcacccggcagccctgccggcagccccacctccacagaggagggaaccagcaccgagcccagcgaaggcagcgccccaggcaccagcaccgagcctagtgagggcggctctggcggcggcagcgcccaggagattaaacggatcaacaagatcagaagaagacttgtgaaagacagcaacaccaagaaggccggcaagacaggccccatgaaaaccctgctggttagagtgatgacacccgatctgagagagcggctggaaaacctgagaaagaagcctgaaaatatcccccagcccatcagcaatacatctagagccaacctgaataagctgctgaccgattacaccgaaatgaagaaggcgatcctgcatgtgtactgggaagagttccagaaggaccctgtgggcctgatgagccgggtggcccagcctgccagcaagaagatcgatcagaacaagctgaaacctgagatggacgagaagggcaacctgaccaccgccggctttgcctgctctcagtgtggccagcccctgttcgtgtacaagctggagcaggtgtctgagaagggcaaggcttacaccaactacttcggacggtgcaatgtggccgagcacgaaaagctgatcctgctggcccagctgaagcccgagaaggatagcgacgaagccgtgacatatagcctgggaaagtttgggcagagggccctggatttctacagcattcatgtgaccaaggagtccacccaccccgtgaagcccctggcccagatcgccggaaacagatacgcctccggacctgtgggaaaggccctgagcgacgcatgtatgggcacaatcgcctccttcctgtctaagtaccaggacatcatcatcgaacaccagaaggtggtgaagggcaaccagaagagactggagagcctgcgggagctggccggcaaggaaaacctggaataccctagcgtgaccctgccacctcagcctcacaccaaggagggcgttgatgcctacaacgaagtgatcgcccgggtgcgaatgtgggtgaacctgaacctgtggcagaagctgaagctaagcagagatgatgccaagcctctgctgagactgaagggattcccttcctttcctctggtcgagagacaggccaacgaagtggactggtgggacatggtgtgtaacgtgaagaagctgatcaacgagaaaaaggaggatggcaaggtgttttggcagaatctggctggctacaagagacaggaagccctgagaccatacctgagcagcgaggaagatcggaagaagggaaagaaattcgctcggtaccagctgggcgacctgctgctgcacctggaaaagaagcacggcgaggactggggaaaggtgtacgacgaggcctgggagcggattgacaagaaagtggaaggcctgagcaagcacatcaagctggaagaggaacggagaagcgaggacgcccagagcaaggccgccctgaccgactggctgcgggctaaggccagcttcgtgatcgagggcctgaaggaggccgacaaggacgagttctgcagatgcgagctgaagctgcagaagtggtacggggacctgcggggaaagcccttcgccatcgaagccgagaacagcatcctggacatcagcggcttcagcaagcagtacaactgtgccttcatctggcagaaggacggcgtgaagaagctgaacctgtacctgatcatcaactacttcaagggcggcaagctgcggttcaagaagatcaaacctgaagccttcgaagccaacagattctacaccgtgatcaacaaaaagagcggcgagatcgtgcccatggaggtgaacttcaacttcgacgaccccaacctgatcatcctgcctctggcctttggcaagagacagggcagagaattcatctggaacgacctgctgtccctggaaaccggcagcctgaagctggccaacggaagagtgatcgagaagacactgtacaacagaagaacccggcaggatgagcctgccctgttcgtggccctgaccttcgagcggcgggaggtcctggactcctccaatatcaaaccaatgaacctgatcggcgtggcaagaggcgaaaacatccccgccgtgatcgccctgaccgaccccgagggctgcccactgagccggtttaaggatagcctgggaaacccaacccacatcctgagaatcggcgagagctataaggagaagcagcggaccatccaggccaagaaggaggtggagcagcggagagccggcggctacagccggaagtacgccagcaaagccaagaatctggcagacgatatggtgagaaacaccgctagagatctgctgtactacgccgtgacccaggatgccatgctgatcttcgccaacctgagccggggcttcggccggcagggcaagcggaccttcatggccgagagacagtacacacggatggaggactggctgaccgccaagctggcctacgagggcctgagcaagacctacctgtccaagacactggcccagtacacctccaagacatgcagcaactgtgggtttaccatcaccagcgccgactacgacagggtgctggagaagctgaagaagacagcaacaggctggatgaccacaattaacggcaaggagctgaaggtggagggccagattacctactacaacagatacaagagacagaacgtagtcaaggacctgtccgtcgagctggatagactgagcgaagaatctgtgaacaacgacatctcctcctggacaaagggcagaagcggagaagctctgagcctcctgaagaaaagattctcccatagacccgtgcaggagaagttcgtgtgcctgaactgcggcttcgagacacacgcagccgagcaagccgccctgaacatcgccagatcctggctgttcctgcggagccaggagtacaagaaataccagacaaacaagacaaccggcaacaccgataagagagccttcgtcgagacctggcagtccttttaccggaagaagcttaaggaggtgtggaaacctgccgtgcggtctggcggatctggcggaggctccacaagcagcctgggcagcgagctgttcagggacgtggccatcgtgttcagccaggaggagtggcagtggctggcccccgcccagagggacctgtacagggacgtgatgctggagacctacagcaacctggtgagcctgggcctggccatcagcaagcccgacgtgatcagcttcctggagcagggcaaggagccctggatggtggagagggtggtgagcaggggcctgtgccccgtgctggagagcaggaccagccccaagaaaaagagaaaagtctaagctgccttctgcggggcttgccttctggccatgcccttcttctctcccttgcacctgtacctcttggtctttgaataaagcctgagtaggaaggctagcaaaaaaaaaaaaaaaaaaaaaaaaaaaaaaaaaaaaaaaaaaaaaaaaaaaaaaaaaaaaaaaaaaaaaaaaaaaaaaaa

SEQ ID NO: 3926 - RNA, 5419 nt, synthetic construct
  source 1..5419: mol_type = other RNA
aggaaataagagagaaaagaagagtaagaagaaatataagagccaccatggcccctaagaagaagcgtaaagtgagccgggtgaacggcagcggcagcggcggcggcatgaaccacgaccaggagttcgacccccctaaggtgtaccctcccgtccccgccgagaagagaaagcccatccgggtcctgagcctgttcgatggcatcgccaccggtctgctggtgctgaaggacctgggcatccaggtggataggtacattgcctccgaggtgtgcgaggactccatcaccgtgggaatggtgcgtcatcagggcaagatcatgtacgtgggcgacgtgcggagcgtgacacagaagcatatccaggagtggggccctttcgacctggtgatcggcggcagcccttgcaatgacctgagcatcgtgaacccagcccggaagggcctgtacgagggaaccggcagactgttcttcgagttttacagactgctgcacgacgcccggcctaaggaaggcgacgaccggcccttcttttggctgttcgagaatgtggtggccatgggagtcagcgacaagcgggatattagccggttcctggagagcaaccccgtgatgatcgatgccaaggaagtgagcgccgcccaccgggccagatacttctggggcaatctgcctggcatgaacagacccctggccagcaccgtgaacgacaagctggagctgcaggagtgcctggagcacggccggatcgccaagttcagcaaggtgagaaccatcaccacccgaagcaacagcatcaaacaaggcaaggaccagcactttcctgtgttcatgaacgagaaggaggacatcctgtggtgtaccgagatggagagagtgttcgggttcccagtccactacacagatgtcagcaacatgtctagactggccagacagagactgctgggaagaagctggtccgtccctgtgatcagacacctgttcgcccctctgaaggagtacttcgcctgcgtgagcagcggcaacagcaacgccaacagccggggccccagcttctctagcggcctggtgccactgtccctgagagggagccacatgggccccatggagatctacaaaaccgtgagcgcctggaagcggcagcctgtgcgcgtgctgagcctgtttcggaatatcgataaagtcctgaaaagcctgggattcctggagagcggctctggctccggcggtggcaccctgaagtacgtggaggatgtgacaaacgtggtcagacgggatgtggagaagtggggccccttcgatctggtgtacggcagcacccaacccctgggcagctcttgtgaccggtgccctggctggtacatgtttcagttccaccggatcctgcagtacgccctgccgagacaggagtcccagcggccattcttttggattttcatggacaacttgctgctgaccgaggatgaccaggaaactaccactcggttcctgcagaccgaagccgtgaccctgcaggacgtgagaggccgggactaccagaacgccatgcgggtgtggtccaacatccctggactgaaaagcaagcacgcacctctgacccctaaagaagaggagtacctgcaggcccaggtgcggagcagaagcaagctggacgcccctaaggtggatctgctggtgaagaattgcctcctgcccctgagagagtacttcaagtatttcagccagaatagtctgcccctgggcggcccaagcagcggcgcccctcctcccagcggcggcagcccagccggctccccaacctctaccgaggagggcacctctgagtccgccacccccgagagcggccctggcacctccaccgagcccagcgagggcagcgcacccggcagccctgccggcagccccacctccacagaggagggaaccagcaccgagcccagcgaaggcagcgccccaggcaccagcaccgagcctagtgagggcggctctggcggcggcagcgcccaggagattaaacggatcaacaagatcagaagaagacttgtgaaagacagcaacaccaagaaggccggcaagacaggccccatgaaaaccctgctggttagagtgatgacacccgatctgagagagcggctggaaaacctgagaaagaagcctgaaaatatcccccagcccatcagcaatacatctagagccaacctgaataagctgctgaccgattacaccgaaatgaagaaggcgatcctgcatgtgtactgggaagagttccagaaggaccctgtgggcctgatgagccgggtggcccagcctgccagcaagaagatcgatcagaacaagctgaaacctgagatggacgagaagggcaacctgaccaccgccggctttgcctgctctcagtgtggccagcccctgttcgtgtacaagctggagcaggtgtctgagaagggcaaggcttacaccaactacttcggacggtgcaatgtggccgagcacgaaaagctgatcctgctggcccagctgaagcccgagaaggatagcgacgaagccgtgacatatagcctgggaaagtttgggcagagggccctggatttctacagcattcatgtgaccaaggagtccacccaccccgtgaagcccctggcccagatcgccggaaacagatacgcctccggacctgtgggaaaggccctgagcgacgcatgtatgggcacaatcgcctccttcctgtctaagtaccaggacatcatcatcgaacaccagaaggtggtgaagggcaaccagaagagactggagagcctgcgggagctggccggcaaggaaaacctggaataccctagcgtgaccctgccacctcagcctcacaccaaggagggcgttgatgcctacaacgaagtgatcgcccgggtgcgaatgtgggtgaacctgaacctgtggcagaagctgaagctaagcagagatgatgccaagcctctgctgagactgaagggattcccttcctttcctctggtcgagagacaggccaacgaagtggactggtgggacatggtgtgtaacgtgaagaagctgatcaacgagaaaaaggaggatggcaaggtgttttggcagaatctggctggctacaagagacaggaagccctgagaccatacctgagcagcgaggaagatcggaagaagggaaagaaattcgctcggtaccagctgggcgacctgctgctgcacctggaaaagaagcacggcgaggactggggaaaggtgtacgacgaggcctgggagcggattgacaagaaagtggaaggcctgagcaagcacatcaagctggaagaggaacggagaagcgaggacgcccagagcaaggccgccctgaccgactggctgcgggctaaggccagcttcgtgatcgagggcctgaaggaggccgacaaggacgagttctgcagatgcgagctgaagctgcagaagtggtacggggacctgcggggaaagcccttcgccatcgaagccgagaacagcatcctggacatcagcggcttcagcaagcagtacaactgtgccttcatctggcagaaggacggcgtgaagaagctgaacctgtacctgatcatcaactacttcaagggcggcaagctgcggttcaagaagatcaaacctgaagccttcgaagccaacagattctacaccgtgatcaacaaaaagagcggcgagatcgtgcccatggaggtgaacttcaacttcgacgaccccaacctgatcatcctgcctctggcctttggcaagagacagggcagagaattcatctggaacgacctgctgtccctggaaaccggcagcctgaagctggccaacggaagagtgatcgagaagacactgtacaacagaagaacccggcaggatgagcctgccctgttcgtggccctgaccttcgagcggcgggaggtcctggactcctccaatatcaaaccaatgaacctgatcggcgtggcaagaggcgaaaacatccccgccgtgatcgccctgaccgaccccgagggctgcccactgagccggtttaaggatagcctgggaaacccaacccacatcctgagaatcggcgagagctataaggagaagcagcggaccatccaggccaagaaggaggtggagcagcggagagccggcggctacagccggaagtacgccagcaaagccaagaatctggcagacgatatggtgagaaacaccgctagagatctgctgtactacgccgtgacccaggatgccatgctgatcttcgccaacctgagccggggcttcggccggcagggcaagcggaccttcatggccgagagacagtacacacggatggaggactggctgaccgccaagctggcctacgagggcctgagcaagacctacctgtccaagacactggcccagtacacctccaagacatgcagcaactgtgggtttaccatcaccagcgccgactacgacagggtgctggagaagctgaagaagacagcaacaggctggatgaccacaattaacggcaaggagctgaaggtggagggccagattacctactacaacagatacaagagacagaacgtagtcaaggacctgtccgtcgagctggatagactgagcgaagaatctgtgaacaacgacatctcctcctggacaaagggcagaagcggagaagctctgagcctcctgaagaaaagattctcccatagacccgtgcaggagaagttcgtgtgcctgaactgcggcttcgagacacacgcagccgagcaagccgccctgaacatcgccagatcctggctgttcctgcggagccaggagtacaagaaataccagacaaacaagacaaccggcaacaccgataagagagccttcgtcgagacctggcagtccttttaccggaagaagcttaaggaggtgtggaaacctgccgtgcggtctggcggatctggcggaggctccacaagcggcgaggaggccgtgaccttcagggacgtggccctggacttcacctgggaggagtggggctgcctgagcgccgcccagagggagctgtacaaggacgtgatgctggagaactacaggaacctggtgagcctggccggcctgcccggccccaagcccggcctgatcagctggctggagggcgaggaggagccccacccctgggacagcctggtgcacgccgccaggagcaccagcctgagcaagaccagccccaagaaaaagagaaaagtctaagctgccttctgcggggcttgccttctggccatgcccttcttctctcccttgcacctgtacctcttggtctttgaataaagcctgagtaggaaggctagcaaaaaaaaaaaaaaaaaaaaaaaaaaaaaaaaaaaaaaaaaaaaaaaaaaaaaaaaaaaaaaaaaaaaaaaaaaaaaaaa

SEQ ID NO: 3927 - RNA, 5419 nt, synthetic construct
  source 1..5419: mol_type = other RNA
aggaaataagagagaaaagaagagtaagaagaaatataagagccaccatggcccctaagaagaagcgtaaagtgagccgggtgaacggcagcggcagcggcggcggcatgaaccacgaccaggagttcgacccccctaaggtgtaccctcccgtccccgccgagaagagaaagcccatccgggtcctgagcctgttcgatggcatcgccaccggtctgctggtgctgaaggacctgggcatccaggtggataggtacattgcctccgaggtgtgcgaggactccatcaccgtgggaatggtgcgtcatcagggcaagatcatgtacgtgggcgacgtgcggagcgtgacacagaagcatatccaggagtggggccctttcgacctggtgatcggcggcagcccttgcaatgacctgagcatcgtgaacccagcccggaagggcctgtacgagggaaccggcagactgttcttcgagttttacagactgctgcacgacgcccggcctaaggaaggcgacgaccggcccttcttttggctgttcgagaatgtggtggccatgggagtcagcgacaagcgggatattagccggttcctggagagcaaccccgtgatgatcgatgccaaggaagtgagcgccgcccaccgggccagatacttctggggcaatctgcctggcatgaacagacccctggccagcaccgtgaacgacaagctggagctgcaggagtgcctggagcacggccggatcgccaagttcagcaaggtgagaaccatcaccacccgaagcaacagcatcaaacaaggcaaggaccagcactttcctgtgttcatgaacgagaaggaggacatcctgtggtgtaccgagatggagagagtgttcgggttcccagtccactacacagatgtcagcaacatgtctagactggccagacagagactgctgggaagaagctggtccgtccctgtgatcagacacctgttcgcccctctgaaggagtacttcgcctgcgtgagcagcggcaacagcaacgccaacagccggggccccagcttctctagcggcctggtgccactgtccctgagagggagccacatgggccccatggagatctacaaaaccgtgagcgcctggaagcggcagcctgtgcgcgtgctgagcctgtttcggaatatcgataaagtcctgaaaagcctgggattcctggagagcggctctggctccggcggtggcaccctgaagtacgtggaggatgtgacaaacgtggtcagacgggatgtggagaagtggggccccttcgatctggtgtacggcagcacccaacccctgggcagctcttgtgaccggtgccctggctggtacatgtttcagttccaccggatcctgcagtacgccctgccgagacaggagtcccagcggccattcttttggattttcatggacaacttgctgctgaccgaggatgaccaggaaactaccactcggttcctgcagaccgaagccgtgaccctgcaggacgtgagaggccgggactaccagaacgccatgcgggtgtggtccaacatccctggactgaaaagcaagcacgcacctctgacccctaaagaagaggagtacctgcaggcccaggtgcggagcagaagcaagctggacgcccctaaggtggatctgctggtgaagaattgcctcctgcccctgagagagtacttcaagtatttcagccagaatagtctgcccctgggcggcccaagcagcggcgcccctcctcccagcggcggcagcccagccggctccccaacctctaccgaggagggcacctctgagtccgccacccccgagagcggccctggcacctccaccgagcccagcgagggcagcgcacccggcagccctgccggcagccccacctccacagaggagggaaccagcaccgagcccagcgaaggcagcgccccaggcaccagcaccgagcctagtgagggcggctctggcggcggcagcgcccaggagattaaacggatcaacaagatcagaagaagacttgtgaaagacagcaacaccaagaaggccggcaagacaggccccatgaaaaccctgctggttagagtgatgacacccgatctgagagagcggctggaaaacctgagaaagaagcctgaaaatatcccccagcccatcagcaatacatctagagccaacctgaataagctgctgaccgattacaccgaaatgaagaaggcgatcctgcatgtgtactgggaagagttccagaaggaccctgtgggcctgatgagccgggtggcccagcctgccagcaagaagatcgatcagaacaagctgaaacctgagatggacgagaagggcaacctgaccaccgccggctttgcctgctctcagtgtggccagcccctgttcgtgtacaagctggagcaggtgtctgagaagggcaaggcttacaccaactacttcggacggtgcaatgtggccgagcacgaaaagctgatcctgctggcccagctgaagcccgagaaggatagcgacgaagccgtgacatatagcctgggaaagtttgggcagagggccctggatttctacagcattcatgtgaccaaggagtccacccaccccgtgaagcccctggcccagatcgccggaaacagatacgcctccggacctgtgggaaaggccctgagcgacgcatgtatgggcacaatcgcctccttcctgtctaagtaccaggacatcatcatcgaacaccagaaggtggtgaagggcaaccagaagagactggagagcctgcgggagctggccggcaaggaaaacctggaataccctagcgtgaccctgccacctcagcctcacaccaaggagggcgttgatgcctacaacgaagtgatcgcccgggtgcgaatgtgggtgaacctgaacctgtggcagaagctgaagctaagcagagatgatgccaagcctctgctgagactgaagggattcccttcctttcctctggtcgagagacaggccaacgaagtggactggtgggacatggtgtgtaacgtgaagaagctgatcaacgagaaaaaggaggatggcaaggtgttttggcagaatctggctggctacaagagacaggaagccctgagaccatacctgagcagcgaggaagatcggaagaagggaaagaaattcgctcggtaccagctgggcgacctgctgctgcacctggaaaagaagcacggcgaggactggggaaaggtgtacgacgaggcctgggagcggattgacaagaaagtggaaggcctgagcaagcacatcaagctggaagaggaacggagaagcgaggacgcccagagcaaggccgccctgaccgactggctgcgggctaaggccagcttcgtgatcgagggcctgaaggaggccgacaaggacgagttctgcagatgcgagctgaagctgcagaagtggtacggggacctgcggggaaagcccttcgccatcgaagccgagaacagcatcctggacatcagcggcttcagcaagcagtacaactgtgccttcatctggcagaaggacggcgtgaagaagctgaacctgtacctgatcatcaactacttcaagggcggcaagctgcggttcaagaagatcaaacctgaagccttcgaagccaacagattctacaccgtgatcaacaaaaagagcggcgagatcgtgcccatggaggtgaacttcaacttcgacgaccccaacctgatcatcctgcctctggcctttggcaagagacagggcagagaattcatctggaacgacctgctgtccctggaaaccggcagcctgaagctggccaacggaagagtgatcgagaagacactgtacaacagaagaacccggcaggatgagcctgccctgttcgtggccctgaccttcgagcggcgggaggtcctggactcctccaatatcaaaccaatgaacctgatcggcgtggcaagaggcgaaaacatccccgccgtgatcgccctgaccgaccccgagggctgcccactgagccggtttaaggatagcctgggaaacccaacccacatcctgagaatcggcgagagctataaggagaagcagcggaccatccaggccaagaaggaggtggagcagcggagagccggcggctacagccggaagtacgccagcaaagccaagaatctggcagacgatatggtgagaaacaccgctagagatctgctgtactacgccgtgacccaggatgccatgctgatcttcgccaacctgagccggggcttcggccggcagggcaagcggaccttcatggccgagagacagtacacacggatggaggactggctgaccgccaagctggcctacgagggcctgagcaagacctacctgtccaagacactggcccagtacacctccaagacatgcagcaactgtgggtttaccatcaccagcgccgactacgacagggtgctggagaagctgaagaagacagcaacaggctggatgaccacaattaacggcaaggagctgaaggtggagggccagattacctactacaacagatacaagagacagaacgtagtcaaggacctgtccgtcgagctggatagactgagcgaagaatctgtgaacaacgacatctcctcctggacaaagggcagaagcggagaagctctgagcctcctgaagaaaagattctcccatagacccgtgcaggagaagttcgtgtgcctgaactgcggcttcgagacacacgcagccgagcaagccgccctgaacatcgccagatcctggctgttcctgcggagccaggagtacaagaaataccagacaaacaagacaaccggcaacaccgataagagagccttcgtcgagacctggcagtccttttaccggaagaagcttaaggaggtgtggaaacctgccgtgcggtctggcggatctggcggaggctccacaagcctgcagaggctgctgaccttcagggacgtggccatcgagttcagccaggaggagtggacctgcctgaaccacacccagaggaagctgtacagggacgtgatgctggagaactacggccacctgctgttcctgggcctgatcgtgagcaagcccgacctggtgagcttcctggagcagaagaaggagccctggagcgtgaagaggaagaagagggtgaccatccaccccggcaaggtggcccagaccagccccaagaaaaagagaaaagtctaagctgccttctgcggggcttgccttctggccatgcccttcttctctcccttgcacctgtacctcttggtctttgaataaagcctgagtaggaaggctagcaaaaaaaaaaaaaaaaaaaaaaaaaaaaaaaaaaaaaaaaaaaaaaaaaaaaaaaaaaaaaaaaaaaaaaaaaaaaaaaa

SEQ ID NO: 3928 - RNA, 5419 nt, synthetic construct
  source 1..5419: mol_type = other RNA
aggaaataagagagaaaagaagagtaagaagaaatataagagccaccatggcccctaagaagaagcgtaaagtgagccgggtgaacggcagcggcagcggcggcggcatgaaccacgaccaggagttcgacccccctaaggtgtaccctcccgtccccgccgagaagagaaagcccatccgggtcctgagcctgttcgatggcatcgccaccggtctgctggtgctgaaggacctgggcatccaggtggataggtacattgcctccgaggtgtgcgaggactccatcaccgtgggaatggtgcgtcatcagggcaagatcatgtacgtgggcgacgtgcggagcgtgacacagaagcatatccaggagtggggccctttcgacctggtgatcggcggcagcccttgcaatgacctgagcatcgtgaacccagcccggaagggcctgtacgagggaaccggcagactgttcttcgagttttacagactgctgcacgacgcccggcctaaggaaggcgacgaccggcccttcttttggctgttcgagaatgtggtggccatgggagtcagcgacaagcgggatattagccggttcctggagagcaaccccgtgatgatcgatgccaaggaagtgagcgccgcccaccgggccagatacttctggggcaatctgcctggcatgaacagacccctggccagcaccgtgaacgacaagctggagctgcaggagtgcctggagcacggccggatcgccaagttcagcaaggtgagaaccatcaccacccgaagcaacagcatcaaacaaggcaaggaccagcactttcctgtgttcatgaacgagaaggaggacatcctgtggtgtaccgagatggagagagtgttcgggttcccagtccactacacagatgtcagcaacatgtctagactggccagacagagactgctgggaagaagctggtccgtccctgtgatcagacacctgttcgcccctctgaaggagtacttcgcctgcgtgagcagcggcaacagcaacgccaacagccggggccccagcttctctagcggcctggtgccactgtccctgagagggagccacatgggccccatggagatctacaaaaccgtgagcgcctggaagcggcagcctgtgcgcgtgctgagcctgtttcggaatatcgataaagtcctgaaaagcctgggattcctggagagcggctctggctccggcggtggcaccctgaagtacgtggaggatgtgacaaacgtggtcagacgggatgtggagaagtggggccccttcgatctggtgtacggcagcacccaacccctgggcagctcttgtgaccggtgccctggctggtacatgtttcagttccaccggatcctgcagtacgccctgccgagacaggagtcccagcggccattcttttggattttcatggacaacttgctgctgaccgaggatgaccaggaaactaccactcggttcctgcagaccgaagccgtgaccctgcaggacgtgagaggccgggactaccagaacgccatgcgggtgtggtccaacatccctggactgaaaagcaagcacgcacctctgacccctaaagaagaggagtacctgcaggcccaggtgcggagcagaagcaagctggacgcccctaaggtggatctgctggtgaagaattgcctcctgcccctgagagagtacttcaagtatttcagccagaatagtctgcccctgggcggcccaagcagcggcgcccctcctcccagcggcggcagcccagccggctccccaacctctaccgaggagggcacctctgagtccgccacccccgagagcggccctggcacctccaccgagcccagcgagggcagcgcacccggcagccctgccggcagccccacctccacagaggagggaaccagcaccgagcccagcgaaggcagcgccccaggcaccagcaccgagcctagtgagggcggctctggcggcggcagcgcccaggagattaaacggatcaacaagatcagaagaagacttgtgaaagacagcaacaccaagaaggccggcaagacaggccccatgaaaaccctgctggttagagtgatgacacccgatctgagagagcggctggaaaacctgagaaagaagcctgaaaatatcccccagcccatcagcaatacatctagagccaacctgaataagctgctgaccgattacaccgaaatgaagaaggcgatcctgcatgtgtactgggaagagttccagaaggaccctgtgggcctgatgagccgggtggcccagcctgccagcaagaagatcgatcagaacaagctgaaacctgagatggacgagaagggcaacctgaccaccgccggctttgcctgctctcagtgtggccagcccctgttcgtgtacaagctggagcaggtgtctgagaagggcaaggcttacaccaactacttcggacggtgcaatgtggccgagcacgaaaagctgatcctgctggcccagctgaagcccgagaaggatagcgacgaagccgtgacatatagcctgggaaagtttgggcagagggccctggatttctacagcattcatgtgaccaaggagtccacccaccccgtgaagcccctggcccagatcgccggaaacagatacgcctccggacctgtgggaaaggccctgagcgacgcatgtatgggcacaatcgcctccttcctgtctaagtaccaggacatcatcatcgaacaccagaaggtggtgaagggcaaccagaagagactggagagcctgcgggagctggccggcaaggaaaacctggaataccctagcgtgaccctgccacctcagcctcacaccaaggagggcgttgatgcctacaacgaagtgatcgcccgggtgcgaatgtgggtgaacctgaacctgtggcagaagctgaagctaagcagagatgatgccaagcctctgctgagactgaagggattcccttcctttcctctggtcgagagacaggccaacgaagtggactggtgggacatggtgtgtaacgtgaagaagctgatcaacgagaaaaaggaggatggcaaggtgttttggcagaatctggctggctacaagagacaggaagccctgagaccatacctgagcagcgaggaagatcggaagaagggaaagaaattcgctcggtaccagctgggcgacctgctgctgcacctggaaaagaagcacggcgaggactggggaaaggtgtacgacgaggcctgggagcggattgacaagaaagtggaaggcctgagcaagcacatcaagctggaagaggaacggagaagcgaggacgcccagagcaaggccgccctgaccgactggctgcgggctaaggccagcttcgtgatcgagggcctgaaggaggccgacaaggacgagttctgcagatgcgagctgaagctgcagaagtggtacggggacctgcggggaaagcccttcgccatcgaagccgagaacagcatcctggacatcagcggcttcagcaagcagtacaactgtgccttcatctggcagaaggacggcgtgaagaagctgaacctgtacctgatcatcaactacttcaagggcggcaagctgcggttcaagaagatcaaacctgaagccttcgaagccaacagattctacaccgtgatcaacaaaaagagcggcgagatcgtgcccatggaggtgaacttcaacttcgacgaccccaacctgatcatcctgcctctggcctttggcaagagacagggcagagaattcatctggaacgacctgctgtccctggaaaccggcagcctgaagctggccaacggaagagtgatcgagaagacactgtacaacagaagaacccggcaggatgagcctgccctgttcgtggccctgaccttcgagcggcgggaggtcctggactcctccaatatcaaaccaatgaacctgatcggcgtggcaagaggcgaaaacatccccgccgtgatcgccctgaccgaccccgagggctgcccactgagccggtttaaggatagcctgggaaacccaacccacatcctgagaatcggcgagagctataaggagaagcagcggaccatccaggccaagaaggaggtggagcagcggagagccggcggctacagccggaagtacgccagcaaagccaagaatctggcagacgatatggtgagaaacaccgctagagatctgctgtactacgccgtgacccaggatgccatgctgatcttcgccaacctgagccggggcttcggccggcagggcaagcggaccttcatggccgagagacagtacacacggatggaggactggctgaccgccaagctggcctacgagggcctgagcaagacctacctgtccaagacactggcccagtacacctccaagacatgcagcaactgtgggtttaccatcaccagcgccgactacgacagggtgctggagaagctgaagaagacagcaacaggctggatgaccacaattaacggcaaggagctgaaggtggagggccagattacctactacaacagatacaagagacagaacgtagtcaaggacctgtccgtcgagctggatagactgagcgaagaatctgtgaacaacgacatctcctcctggacaaagggcagaagcggagaagctctgagcctcctgaagaaaagattctcccatagacccgtgcaggagaagttcgtgtgcctgaactgcggcttcgagacacacgcagccgagcaagccgccctgaacatcgccagatcctggctgttcctgcggagccaggagtacaagaaataccagacaaacaagacaaccggcaacaccgataagagagccttcgtcgagacctggcagtccttttaccggaagaagcttaaggaggtgtggaaacctgccgtgcggtctggcggatctggcggaggctccacaagcggcaagcccggcgccctgagcttcgccgacgtggccgtgtacttcagcagcgaggagtggggctgcctgaggcccgcccagagggccctgtacagggacgtgatgagggagacctacggccacctgggcgccctgggcgaggccaggccccccgccctgatcagctggatggagaggaagaaggaggcctggagccccgaggccgaggaccccgaggacagggccaggcaccccggctacggcaccagccccaagaaaaagagaaaagtctaagctgccttctgcggggcttgccttctggccatgcccttcttctctcccttgcacctgtacctcttggtctttgaataaagcctgagtaggaaggctagcaaaaaaaaaaaaaaaaaaaaaaaaaaaaaaaaaaaaaaaaaaaaaaaaaaaaaaaaaaaaaaaaaaaaaaaaaaaaaaaa

SEQ ID NO: 3929 - RNA, 5419 nt, synthetic construct
  source 1..5419: mol_type = other RNA
aggaaataagagagaaaagaagagtaagaagaaatataagagccaccatggcccctaagaagaagcgtaaagtgagccgggtgaacggcagcggcagcggcggcggcatgaaccacgaccaggagttcgacccccctaaggtgtaccctcccgtccccgccgagaagagaaagcccatccgggtcctgagcctgttcgatggcatcgccaccggtctgctggtgctgaaggacctgggcatccaggtggataggtacattgcctccgaggtgtgcgaggactccatcaccgtgggaatggtgcgtcatcagggcaagatcatgtacgtgggcgacgtgcggagcgtgacacagaagcatatccaggagtggggccctttcgacctggtgatcggcggcagcccttgcaatgacctgagcatcgtgaacccagcccggaagggcctgtacgagggaaccggcagactgttcttcgagttttacagactgctgcacgacgcccggcctaaggaaggcgacgaccggcccttcttttggctgttcgagaatgtggtggccatgggagtcagcgacaagcgggatattagccggttcctggagagcaaccccgtgatgatcgatgccaaggaagtgagcgccgcccaccgggccagatacttctggggcaatctgcctggcatgaacagacccctggccagcaccgtgaacgacaagctggagctgcaggagtgcctggagcacggccggatcgccaagttcagcaaggtgagaaccatcaccacccgaagcaacagcatcaaacaaggcaaggaccagcactttcctgtgttcatgaacgagaaggaggacatcctgtggtgtaccgagatggagagagtgttcgggttcccagtccactacacagatgtcagcaacatgtctagactggccagacagagactgctgggaagaagctggtccgtccctgtgatcagacacctgttcgcccctctgaaggagtacttcgcctgcgtgagcagcggcaacagcaacgccaacagccggggccccagcttctctagcggcctggtgccactgtccctgagagggagccacatgggccccatggagatctacaaaaccgtgagcgcctggaagcggcagcctgtgcgcgtgctgagcctgtttcggaatatcgataaagtcctgaaaagcctgggattcctggagagcggctctggctccggcggtggcaccctgaagtacgtggaggatgtgacaaacgtggtcagacgggatgtggagaagtggggccccttcgatctggtgtacggcagcacccaacccctgggcagctcttgtgaccggtgccctggctggtacatgtttcagttccaccggatcctgcagtacgccctgccgagacaggagtcccagcggccattcttttggattttcatggacaacttgctgctgaccgaggatgaccaggaaactaccactcggttcctgcagaccgaagccgtgaccctgcaggacgtgagaggccgggactaccagaacgccatgcgggtgtggtccaacatccctggactgaaaagcaagcacgcacctctgacccctaaagaagaggagtacctgcaggcccaggtgcggagcagaagcaagctggacgcccctaaggtggatctgctggtgaagaattgcctcctgcccctgagagagtacttcaagtatttcagccagaatagtctgcccctgggcggcccaagcagcggcgcccctcctcccagcggcggcagcccagccggctccccaacctctaccgaggagggcacctctgagtccgccacccccgagagcggccctggcacctccaccgagcccagcgagggcagcgcacccggcagccctgccggcagccccacctccacagaggagggaaccagcaccgagcccagcgaaggcagcgccccaggcaccagcaccgagcctagtgagggcggctctggcggcggcagcgcccaggagattaaacggatcaacaagatcagaagaagacttgtgaaagacagcaacaccaagaaggccggcaagacaggccccatgaaaaccctgctggttagagtgatgacacccgatctgagagagcggctggaaaacctgagaaagaagcctgaaaatatcccccagcccatcagcaatacatctagagccaacctgaataagctgctgaccgattacaccgaaatgaagaaggcgatcctgcatgtgtactgggaagagttccagaaggaccctgtgggcctgatgagccgggtggcccagcctgccagcaagaagatcgatcagaacaagctgaaacctgagatggacgagaagggcaacctgaccaccgccggctttgcctgctctcagtgtggccagcccctgttcgtgtacaagctggagcaggtgtctgagaagggcaaggcttacaccaactacttcggacggtgcaatgtggccgagcacgaaaagctgatcctgctggcccagctgaagcccgagaaggatagcgacgaagccgtgacatatagcctgggaaagtttgggcagagggccctggatttctacagcattcatgtgaccaaggagtccacccaccccgtgaagcccctggcccagatcgccggaaacagatacgcctccggacctgtgggaaaggccctgagcgacgcatgtatgggcacaatcgcctccttcctgtctaagtaccaggacatcatcatcgaacaccagaaggtggtgaagggcaaccagaagagactggagagcctgcgggagctggccggcaaggaaaacctggaataccctagcgtgaccctgccacctcagcctcacaccaaggagggcgttgatgcctacaacgaagtgatcgcccgggtgcgaatgtgggtgaacctgaacctgtggcagaagctgaagctaagcagagatgatgccaagcctctgctgagactgaagggattcccttcctttcctctggtcgagagacaggccaacgaagtggactggtgggacatggtgtgtaacgtgaagaagctgatcaacgagaaaaaggaggatggcaaggtgttttggcagaatctggctggctacaagagacaggaagccctgagaccatacctgagcagcgaggaagatcggaagaagggaaagaaattcgctcggtaccagctgggcgacctgctgctgcacctggaaaagaagcacggcgaggactggggaaaggtgtacgacgaggcctgggagcggattgacaagaaagtggaaggcctgagcaagcacatcaagctggaagaggaacggagaagcgaggacgcccagagcaaggccgccctgaccgactggctgcgggctaaggccagcttcgtgatcgagggcctgaaggaggccgacaaggacgagttctgcagatgcgagctgaagctgcagaagtggtacggggacctgcggggaaagcccttcgccatcgaagccgagaacagcatcctggacatcagcggcttcagcaagcagtacaactgtgccttcatctggcagaaggacggcgtgaagaagctgaacctgtacctgatcatcaactacttcaagggcggcaagctgcggttcaagaagatcaaacctgaagccttcgaagccaacagattctacaccgtgatcaacaaaaagagcggcgagatcgtgcccatggaggtgaacttcaacttcgacgaccccaacctgatcatcctgcctctggcctttggcaagagacagggcagagaattcatctggaacgacctgctgtccctggaaaccggcagcctgaagctggccaacggaagagtgatcgagaagacactgtacaacagaagaacccggcaggatgagcctgccctgttcgtggccctgaccttcgagcggcgggaggtcctggactcctccaatatcaaaccaatgaacctgatcggcgtggcaagaggcgaaaacatccccgccgtgatcgccctgaccgaccccgagggctgcccactgagccggtttaaggatagcctgggaaacccaacccacatcctgagaatcggcgagagctataaggagaagcagcggaccatccaggccaagaaggaggtggagcagcggagagccggcggctacagccggaagtacgccagcaaagccaagaatctggcagacgatatggtgagaaacaccgctagagatctgctgtactacgccgtgacccaggatgccatgctgatcttcgccaacctgagccggggcttcggccggcagggcaagcggaccttcatggccgagagacagtacacacggatggaggactggctgaccgccaagctggcctacgagggcctgagcaagacctacctgtccaagacactggcccagtacacctccaagacatgcagcaactgtgggtttaccatcaccagcgccgactacgacagggtgctggagaagctgaagaagacagcaacaggctggatgaccacaattaacggcaaggagctgaaggtggagggccagattacctactacaacagatacaagagacagaacgtagtcaaggacctgtccgtcgagctggatagactgagcgaagaatctgtgaacaacgacatctcctcctggacaaagggcagaagcggagaagctctgagcctcctgaagaaaagattctcccatagacccgtgcaggagaagttcgtgtgcctgaactgcggcttcgagacacacgcagccgagcaagccgccctgaacatcgccagatcctggctgttcctgcggagccaggagtacaagaaataccagacaaacaagacaaccggcaacaccgataagagagccttcgtcgagacctggcagtccttttaccggaagaagcttaaggaggtgtggaaacctgccgtgcggtctggcggatctggcggaggctccacaagccaccaggacctggtgaccttcaaggacgtggccgtggacttcacccccgaggagtggggccagctggtgcccagccagaaggagctgtacagggacgtgatgctggagaactaccagaacctggtgtggctgggcctggccgtgagcaagcccgacgtgatctaccagctggagcaggtgggcggcacctgggtgcccgagggcgagaccctgaccgtgagctgcagcgacttcgtgaccaggaccagccccaagaaaaagagaaaagtctaagctgccttctgcggggcttgccttctggccatgcccttcttctctcccttgcacctgtacctcttggtctttgaataaagcctgagtaggaaggctagcaaaaaaaaaaaaaaaaaaaaaaaaaaaaaaaaaaaaaaaaaaaaaaaaaaaaaaaaaaaaaaaaaaaaaaaaaaaaaaaa

SEQ ID NO: 3930 - RNA, 5437 nt, synthetic construct
  source 1..5437: mol_type = other RNA
aggaaataagagagaaaagaagagtaagaagaaatataagagccaccatggcccctaagaagaagcgtaaagtgagccgggtgaacggcagcggcagcggcggcggcatgaaccacgaccaggagttcgacccccctaaggtgtaccctcccgtccccgccgagaagagaaagcccatccgggtcctgagcctgttcgatggcatcgccaccggtctgctggtgctgaaggacctgggcatccaggtggataggtacattgcctccgaggtgtgcgaggactccatcaccgtgggaatggtgcgtcatcagggcaagatcatgtacgtgggcgacgtgcggagcgtgacacagaagcatatccaggagtggggccctttcgacctggtgatcggcggcagcccttgcaatgacctgagcatcgtgaacccagcccggaagggcctgtacgagggaaccggcagactgttcttcgagttttacagactgctgcacgacgcccggcctaaggaaggcgacgaccggcccttcttttggctgttcgagaatgtggtggccatgggagtcagcgacaagcgggatattagccggttcctggagagcaaccccgtgatgatcgatgccaaggaagtgagcgccgcccaccgggccagatacttctggggcaatctgcctggcatgaacagacccctggccagcaccgtgaacgacaagctggagctgcaggagtgcctggagcacggccggatcgccaagttcagcaaggtgagaaccatcaccacccgaagcaacagcatcaaacaaggcaaggaccagcactttcctgtgttcatgaacgagaaggaggacatcctgtggtgtaccgagatggagagagtgttcgggttcccagtccactacacagatgtcagcaacatgtctagactggccagacagagactgctgggaagaagctggtccgtccctgtgatcagacacctgttcgcccctctgaaggagtacttcgcctgcgtgagcagcggcaacagcaacgccaacagccggggccccagcttctctagcggcctggtgccactgtccctgagagggagccacatgggccccatggagatctacaaaaccgtgagcgcctggaagcggcagcctgtgcgcgtgctgagcctgtttcggaatatcgataaagtcctgaaaagcctgggattcctggagagcggctctggctccggcggtggcaccctgaagtacgtggaggatgtgacaaacgtggtcagacgggatgtggagaagtggggccccttcgatctggtgtacggcagcacccaacccctgggcagctcttgtgaccggtgccctggctggtacatgtttcagttccaccggatcctgcagtacgccctgccgagacaggagtcccagcggccattcttttggattttcatggacaacttgctgctgaccgaggatgaccaggaaactaccactcggttcctgcagaccgaagccgtgaccctgcaggacgtgagaggccgggactaccagaacgccatgcgggtgtggtccaacatccctggactgaaaagcaagcacgcacctctgacccctaaagaagaggagtacctgcaggcccaggtgcggagcagaagcaagctggacgcccctaaggtggatctgctggtgaagaattgcctcctgcccctgagagagtacttcaagtatttcagccagaatagtctgcccctgggcggcccaagcagcggcgcccctcctcccagcggcggcagcccagccggctccccaacctctaccgaggagggcacctctgagtccgccacccccgagagcggccctggcacctccaccgagcccagcgagggcagcgcacccggcagccctgccggcagccccacctccacagaggagggaaccagcaccgagcccagcgaaggcagcgccccaggcaccagcaccgagcctagtgagggcggctctggcggcggcagcgcccaggagattaaacggatcaacaagatcagaagaagacttgtgaaagacagcaacaccaagaaggccggcaagacaggccccatgaaaaccctgctggttagagtgatgacacccgatctgagagagcggctggaaaacctgagaaagaagcctgaaaatatcccccagcccatcagcaatacatctagagccaacctgaataagctgctgaccgattacaccgaaatgaagaaggcgatcctgcatgtgtactgggaagagttccagaaggaccctgtgggcctgatgagccgggtggcccagcctgccagcaagaagatcgatcagaacaagctgaaacctgagatggacgagaagggcaacctgaccaccgccggctttgcctgctctcagtgtggccagcccctgttcgtgtacaagctggagcaggtgtctgagaagggcaaggcttacaccaactacttcggacggtgcaatgtggccgagcacgaaaagctgatcctgctggcccagctgaagcccgagaaggatagcgacgaagccgtgacatatagcctgggaaagtttgggcagagggccctggatttctacagcattcatgtgaccaaggagtccacccaccccgtgaagcccctggcccagatcgccggaaacagatacgcctccggacctgtgggaaaggccctgagcgacgcatgtatgggcacaatcgcctccttcctgtctaagtaccaggacatcatcatcgaacaccagaaggtggtgaagggcaaccagaagagactggagagcctgcgggagctggccggcaaggaaaacctggaataccctagcgtgaccctgccacctcagcctcacaccaaggagggcgttgatgcctacaacgaagtgatcgcccgggtgcgaatgtgggtgaacctgaacctgtggcagaagctgaagctaagcagagatgatgccaagcctctgctgagactgaagggattcccttcctttcctctggtcgagagacaggccaacgaagtggactggtgggacatggtgtgtaacgtgaagaagctgatcaacgagaaaaaggaggatggcaaggtgttttggcagaatctggctggctacaagagacaggaagccctgagaccatacctgagcagcgaggaagatcggaagaagggaaagaaattcgctcggtaccagctgggcgacctgctgctgcacctggaaaagaagcacggcgaggactggggaaaggtgtacgacgaggcctgggagcggattgacaagaaagtggaaggcctgagcaagcacatcaagctggaagaggaacggagaagcgaggacgcccagagcaaggccgccctgaccgactggctgcgggctaaggccagcttcgtgatcgagggcctgaaggaggccgacaaggacgagttctgcagatgcgagctgaagctgcagaagtggtacggggacctgcggggaaagcccttcgccatcgaagccgagaacagcatcctggacatcagcggcttcagcaagcagtacaactgtgccttcatctggcagaaggacggcgtgaagaagctgaacctgtacctgatcatcaactacttcaagggcggcaagctgcggttcaagaagatcaaacctgaagccttcgaagccaacagattctacaccgtgatcaacaaaaagagcggcgagatcgtgcccatggaggtgaacttcaacttcgacgaccccaacctgatcatcctgcctctggcctttggcaagagacagggcagagaattcatctggaacgacctgctgtccctggaaaccggcagcctgaagctggccaacggaagagtgatcgagaagacactgtacaacagaagaacccggcaggatgagcctgccctgttcgtggccctgaccttcgagcggcgggaggtcctggactcctccaatatcaaaccaatgaacctgatcggcgtggcaagaggcgaaaacatccccgccgtgatcgccctgaccgaccccgagggctgcccactgagccggtttaaggatagcctgggaaacccaacccacatcctgagaatcggcgagagctataaggagaagcagcggaccatccaggccaagaaggaggtggagcagcggagagccggcggctacagccggaagtacgccagcaaagccaagaatctggcagacgatatggtgagaaacaccgctagagatctgctgtactacgccgtgacccaggatgccatgctgatcttcgccaacctgagccggggcttcggccggcagggcaagcggaccttcatggccgagagacagtacacacggatggaggactggctgaccgccaagctggcctacgagggcctgagcaagacctacctgtccaagacactggcccagtacacctccaagacatgcagcaactgtgggtttaccatcaccagcgccgactacgacagggtgctggagaagctgaagaagacagcaacaggctggatgaccacaattaacggcaaggagctgaaggtggagggccagattacctactacaacagatacaagagacagaacgtagtcaaggacctgtccgtcgagctggatagactgagcgaagaatctgtgaacaacgacatctcctcctggacaaagggcagaagcggagaagctctgagcctcctgaagaaaagattctcccatagacccgtgcaggagaagttcgtgtgcctgaactgcggcttcgagacacacgcagccgagcaagccgccctgaacatcgccagatcctggctgttcctgcggagccaggagtacaagaaataccagacaaacaagacaaccggcaacaccgataagagagccttcgtcgagacctggcagtccttttaccggaagaagcttaaggaggtgtggaaacctgccgtgcggtctggcggatctggcggaggctccacaagcgtgaccttcgaggacgtggccgtgaacttcagcctggaggagtgggccctgctggacctgagccagaagaagctgtacagggacgtgatgcaggagaccttcaggaacctggccagcgtgggcgagaagtgggacaaccacaacatcgaggactggaacaagacccagggcaggaagctgaggagccacatggtggagaagctgagcgagagcaaggagggcggccagcacggcgagaccgccagccagatccccaacctgaccagccccaagaaaaagagaaaagtctaagctgccttctgcggggcttgccttctggccatgcccttcttctctcccttgcacctgtacctcttggtctttgaataaagcctgagtaggaaggctagcaaaaaaaaaaaaaaaaaaaaaaaaaaaaaaaaaaaaaaaaaaaaaaaaaaaaaaaaaaaaaaaaaaaaaaaaaaaaaaaa

SEQ ID NO: 3931 - RNA, 5419 nt, synthetic construct
  source 1..5419: mol_type = other RNA
aggaaataagagagaaaagaagagtaagaagaaatataagagccaccatggcccctaagaagaagcgtaaagtgagccgggtgaacggcagcggcagcggcggcggcatgaaccacgaccaggagttcgacccccctaaggtgtaccctcccgtccccgccgagaagagaaagcccatccgggtcctgagcctgttcgatggcatcgccaccggtctgctggtgctgaaggacctgggcatccaggtggataggtacattgcctccgaggtgtgcgaggactccatcaccgtgggaatggtgcgtcatcagggcaagatcatgtacgtgggcgacgtgcggagcgtgacacagaagcatatccaggagtggggccctttcgacctggtgatcggcggcagcccttgcaatgacctgagcatcgtgaacccagcccggaagggcctgtacgagggaaccggcagactgttcttcgagttttacagactgctgcacgacgcccggcctaaggaaggcgacgaccggcccttcttttggctgttcgagaatgtggtggccatgggagtcagcgacaagcgggatattagccggttcctggagagcaaccccgtgatgatcgatgccaaggaagtgagcgccgcccaccgggccagatacttctggggcaatctgcctggcatgaacagacccctggccagcaccgtgaacgacaagctggagctgcaggagtgcctggagcacggccggatcgccaagttcagcaaggtgagaaccatcaccacccgaagcaacagcatcaaacaaggcaaggaccagcactttcctgtgttcatgaacgagaaggaggacatcctgtggtgtaccgagatggagagagtgttcgggttcccagtccactacacagatgtcagcaacatgtctagactggccagacagagactgctgggaagaagctggtccgtccctgtgatcagacacctgttcgcccctctgaaggagtacttcgcctgcgtgagcagcggcaacagcaacgccaacagccggggccccagcttctctagcggcctggtgccactgtccctgagagggagccacatgggccccatggagatctacaaaaccgtgagcgcctggaagcggcagcctgtgcgcgtgctgagcctgtttcggaatatcgataaagtcctgaaaagcctgggattcctggagagcggctctggctccggcggtggcaccctgaagtacgtggaggatgtgacaaacgtggtcagacgggatgtggagaagtggggccccttcgatctggtgtacggcagcacccaacccctgggcagctcttgtgaccggtgccctggctggtacatgtttcagttccaccggatcctgcagtacgccctgccgagacaggagtcccagcggccattcttttggattttcatggacaacttgctgctgaccgaggatgaccaggaaactaccactcggttcctgcagaccgaagccgtgaccctgcaggacgtgagaggccgggactaccagaacgccatgcgggtgtggtccaacatccctggactgaaaagcaagcacgcacctctgacccctaaagaagaggagtacctgcaggcccaggtgcggagcagaagcaagctggacgcccctaaggtggatctgctggtgaagaattgcctcctgcccctgagagagtacttcaagtatttcagccagaatagtctgcccctgggcggcccaagcagcggcgcccctcctcccagcggcggcagcccagccggctccccaacctctaccgaggagggcacctctgagtccgccacccccgagagcggccctggcacctccaccgagcccagcgagggcagcgcacccggcagccctgccggcagccccacctccacagaggagggaaccagcaccgagcccagcgaaggcagcgccccaggcaccagcaccgagcctagtgagggcggctctggcggcggcagcgcccaggagattaaacggatcaacaagatcagaagaagacttgtgaaagacagcaacaccaagaaggccggcaagacaggccccatgaaaaccctgctggttagagtgatgacacccgatctgagagagcggctggaaaacctgagaaagaagcctgaaaatatcccccagcccatcagcaatacatctagagccaacctgaataagctgctgaccgattacaccgaaatgaagaaggcgatcctgcatgtgtactgggaagagttccagaaggaccctgtgggcctgatgagccgggtggcccagcctgccagcaagaagatcgatcagaacaagctgaaacctgagatggacgagaagggcaacctgaccaccgccggctttgcctgctctcagtgtggccagcccctgttcgtgtacaagctggagcaggtgtctgagaagggcaaggcttacaccaactacttcggacggtgcaatgtggccgagcacgaaaagctgatcctgctggcccagctgaagcccgagaaggatagcgacgaagccgtgacatatagcctgggaaagtttgggcagagggccctggatttctacagcattcatgtgaccaaggagtccacccaccccgtgaagcccctggcccagatcgccggaaacagatacgcctccggacctgtgggaaaggccctgagcgacgcatgtatgggcacaatcgcctccttcctgtctaagtaccaggacatcatcatcgaacaccagaaggtggtgaagggcaaccagaagagactggagagcctgcgggagctggccggcaaggaaaacctggaataccctagcgtgaccctgccacctcagcctcacaccaaggagggcgttgatgcctacaacgaagtgatcgcccgggtgcgaatgtgggtgaacctgaacctgtggcagaagctgaagctaagcagagatgatgccaagcctctgctgagactgaagggattcccttcctttcctctggtcgagagacaggccaacgaagtggactggtgggacatggtgtgtaacgtgaagaagctgatcaacgagaaaaaggaggatggcaaggtgttttggcagaatctggctggctacaagagacaggaagccctgagaccatacctgagcagcgaggaagatcggaagaagggaaagaaattcgctcggtaccagctgggcgacctgctgctgcacctggaaaagaagcacggcgaggactggggaaaggtgtacgacgaggcctgggagcggattgacaagaaagtggaaggcctgagcaagcacatcaagctggaagaggaacggagaagcgaggacgcccagagcaaggccgccctgaccgactggctgcgggctaaggccagcttcgtgatcgagggcctgaaggaggccgacaaggacgagttctgcagatgcgagctgaagctgcagaagtggtacggggacctgcggggaaagcccttcgccatcgaagccgagaacagcatcctggacatcagcggcttcagcaagcagtacaactgtgccttcatctggcagaaggacggcgtgaagaagctgaacctgtacctgatcatcaactacttcaagggcggcaagctgcggttcaagaagatcaaacctgaagccttcgaagccaacagattctacaccgtgatcaacaaaaagagcggcgagatcgtgcccatggaggtgaacttcaacttcgacgaccccaacctgatcatcctgcctctggcctttggcaagagacagggcagagaattcatctggaacgacctgctgtccctggaaaccggcagcctgaagctggccaacggaagagtgatcgagaagacactgtacaacagaagaacccggcaggatgagcctgccctgttcgtggccctgaccttcgagcggcgggaggtcctggactcctccaatatcaaaccaatgaacctgatcggcgtggcaagaggcgaaaacatccccgccgtgatcgccctgaccgaccccgagggctgcccactgagccggtttaaggatagcctgggaaacccaacccacatcctgagaatcggcgagagctataaggagaagcagcggaccatccaggccaagaaggaggtggagcagcggagagccggcggctacagccggaagtacgccagcaaagccaagaatctggcagacgatatggtgagaaacaccgctagagatctgctgtactacgccgtgacccaggatgccatgctgatcttcgccaacctgagccggggcttcggccggcagggcaagcggaccttcatggccgagagacagtacacacggatggaggactggctgaccgccaagctggcctacgagggcctgagcaagacctacctgtccaagacactggcccagtacacctccaagacatgcagcaactgtgggtttaccatcaccagcgccgactacgacagggtgctggagaagctgaagaagacagcaacaggctggatgaccacaattaacggcaaggagctgaaggtggagggccagattacctactacaacagatacaagagacagaacgtagtcaaggacctgtccgtcgagctggatagactgagcgaagaatctgtgaacaacgacatctcctcctggacaaagggcagaagcggagaagctctgagcctcctgaagaaaagattctcccatagacccgtgcaggagaagttcgtgtgcctgaactgcggcttcgagacacacgcagccgagcaagccgccctgaacatcgccagatcctggctgttcctgcggagccaggagtacaagaaataccagacaaacaagacaaccggcaacaccgataagagagccttcgtcgagacctggcagtccttttaccggaagaagcttaaggaggtgtggaaacctgccgtgcggtctggcggatctggcggaggctccacaagcagccaggtgagcctgaccttcgaggacgtggccgtgctgttcaccagggacgagtggaagaagctggtgcccagccagaggagcctgtacagggaggtgatgctggagaactacagcaacctggccagcctggccggcttccccttcaccaagcccaaggtgatcagcctgctgcagcagggcgaggacccctggaaggtggaggaggagggccccggcggcttcagcctgggcctgaagtgcaccagccccaagaaaaagagaaaagtctaagctgccttctgcggggcttgccttctggccatgcccttcttctctcccttgcacctgtacctcttggtctttgaataaagcctgagtaggaaggctagcaaaaaaaaaaaaaaaaaaaaaaaaaaaaaaaaaaaaaaaaaaaaaaaaaaaaaaaaaaaaaaaaaaaaaaaaaaaaaaaa

SEQ ID NO: 3932 - RNA, 5419 nt, synthetic construct
  source 1..5419: mol_type = other RNA
aggaaataagagagaaaagaagagtaagaagaaatataagagccaccatggcccctaagaagaagcgtaaagtgagccgggtgaacggcagcggcagcggcggcggcatgaaccacgaccaggagttcgacccccctaaggtgtaccctcccgtccccgccgagaagagaaagcccatccgggtcctgagcctgttcgatggcatcgccaccggtctgctggtgctgaaggacctgggcatccaggtggataggtacattgcctccgaggtgtgcgaggactccatcaccgtgggaatggtgcgtcatcagggcaagatcatgtacgtgggcgacgtgcggagcgtgacacagaagcatatccaggagtggggccctttcgacctggtgatcggcggcagcccttgcaatgacctgagcatcgtgaacccagcccggaagggcctgtacgagggaaccggcagactgttcttcgagttttacagactgctgcacgacgcccggcctaaggaaggcgacgaccggcccttcttttggctgttcgagaatgtggtggccatgggagtcagcgacaagcgggatattagccggttcctggagagcaaccccgtgatgatcgatgccaaggaagtgagcgccgcccaccgggccagatacttctggggcaatctgcctggcatgaacagacccctggccagcaccgtgaacgacaagctggagctgcaggagtgcctggagcacggccggatcgccaagttcagcaaggtgagaaccatcaccacccgaagcaacagcatcaaacaaggcaaggaccagcactttcctgtgttcatgaacgagaaggaggacatcctgtggtgtaccgagatggagagagtgttcgggttcccagtccactacacagatgtcagcaacatgtctagactggccagacagagactgctgggaagaagctggtccgtccctgtgatcagacacctgttcgcccctctgaaggagtacttcgcctgcgtgagcagcggcaacagcaacgccaacagccggggccccagcttctctagcggcctggtgccactgtccctgagagggagccacatgggccccatggagatctacaaaaccgtgagcgcctggaagcggcagcctgtgcgcgtgctgagcctgtttcggaatatcgataaagtcctgaaaagcctgggattcctggagagcggctctggctccggcggtggcaccctgaagtacgtggaggatgtgacaaacgtggtcagacgggatgtggagaagtggggccccttcgatctggtgtacggcagcacccaacccctgggcagctcttgtgaccggtgccctggctggtacatgtttcagttccaccggatcctgcagtacgccctgccgagacaggagtcccagcggccattcttttggattttcatggacaacttgctgctgaccgaggatgaccaggaaactaccactcggttcctgcagaccgaagccgtgaccctgcaggacgtgagaggccgggactaccagaacgccatgcgggtgtggtccaacatccctggactgaaaagcaagcacgcacctctgacccctaaagaagaggagtacctgcaggcccaggtgcggagcagaagcaagctggacgcccctaaggtggatctgctggtgaagaattgcctcctgcccctgagagagtacttcaagtatttcagccagaatagtctgcccctgggcggcccaagcagcggcgcccctcctcccagcggcggcagcccagccggctccccaacctctaccgaggagggcacctctgagtccgccacccccgagagcggccctggcacctccaccgagcccagcgagggcagcgcacccggcagccctgccggcagccccacctccacagaggagggaaccagcaccgagcccagcgaaggcagcgccccaggcaccagcaccgagcctagtgagggcggctctggcggcggcagcgcccaggagattaaacggatcaacaagatcagaagaagacttgtgaaagacagcaacaccaagaaggccggcaagacaggccccatgaaaaccctgctggttagagtgatgacacccgatctgagagagcggctggaaaacctgagaaagaagcctgaaaatatcccccagcccatcagcaatacatctagagccaacctgaataagctgctgaccgattacaccgaaatgaagaaggcgatcctgcatgtgtactgggaagagttccagaaggaccctgtgggcctgatgagccgggtggcccagcctgccagcaagaagatcgatcagaacaagctgaaacctgagatggacgagaagggcaacctgaccaccgccggctttgcctgctctcagtgtggccagcccctgttcgtgtacaagctggagcaggtgtctgagaagggcaaggcttacaccaactacttcggacggtgcaatgtggccgagcacgaaaagctgatcctgctggcccagctgaagcccgagaaggatagcgacgaagccgtgacatatagcctgggaaagtttgggcagagggccctggatttctacagcattcatgtgaccaaggagtccacccaccccgtgaagcccctggcccagatcgccggaaacagatacgcctccggacctgtgggaaaggccctgagcgacgcatgtatgggcacaatcgcctccttcctgtctaagtaccaggacatcatcatcgaacaccagaaggtggtgaagggcaaccagaagagactggagagcctgcgggagctggccggcaaggaaaacctggaataccctagcgtgaccctgccacctcagcctcacaccaaggagggcgttgatgcctacaacgaagtgatcgcccgggtgcgaatgtgggtgaacctgaacctgtggcagaagctgaagctaagcagagatgatgccaagcctctgctgagactgaagggattcccttcctttcctctggtcgagagacaggccaacgaagtggactggtgggacatggtgtgtaacgtgaagaagctgatcaacgagaaaaaggaggatggcaaggtgttttggcagaatctggctggctacaagagacaggaagccctgagaccatacctgagcagcgaggaagatcggaagaagggaaagaaattcgctcggtaccagctgggcgacctgctgctgcacctggaaaagaagcacggcgaggactggggaaaggtgtacgacgaggcctgggagcggattgacaagaaagtggaaggcctgagcaagcacatcaagctggaagaggaacggagaagcgaggacgcccagagcaaggccgccctgaccgactggctgcgggctaaggccagcttcgtgatcgagggcctgaaggaggccgacaaggacgagttctgcagatgcgagctgaagctgcagaagtggtacggggacctgcggggaaagcccttcgccatcgaagccgagaacagcatcctggacatcagcggcttcagcaagcagtacaactgtgccttcatctggcagaaggacggcgtgaagaagctgaacctgtacctgatcatcaactacttcaagggcggcaagctgcggttcaagaagatcaaacctgaagccttcgaagccaacagattctacaccgtgatcaacaaaaagagcggcgagatcgtgcccatggaggtgaacttcaacttcgacgaccccaacctgatcatcctgcctctggcctttggcaagagacagggcagagaattcatctggaacgacctgctgtccctggaaaccggcagcctgaagctggccaacggaagagtgatcgagaagacactgtacaacagaagaacccggcaggatgagcctgccctgttcgtggccctgaccttcgagcggcgggaggtcctggactcctccaatatcaaaccaatgaacctgatcggcgtggcaagaggcgaaaacatccccgccgtgatcgccctgaccgaccccgagggctgcccactgagccggtttaaggatagcctgggaaacccaacccacatcctgagaatcggcgagagctataaggagaagcagcggaccatccaggccaagaaggaggtggagcagcggagagccggcggctacagccggaagtacgccagcaaagccaagaatctggcagacgatatggtgagaaacaccgctagagatctgctgtactacgccgtgacccaggatgccatgctgatcttcgccaacctgagccggggcttcggccggcagggcaagcggaccttcatggccgagagacagtacacacggatggaggactggctgaccgccaagctggcctacgagggcctgagcaagacctacctgtccaagacactggcccagtacacctccaagacatgcagcaactgtgggtttaccatcaccagcgccgactacgacagggtgctggagaagctgaagaagacagcaacaggctggatgaccacaattaacggcaaggagctgaaggtggagggccagattacctactacaacagatacaagagacagaacgtagtcaaggacctgtccgtcgagctggatagactgagcgaagaatctgtgaacaacgacatctcctcctggacaaagggcagaagcggagaagctctgagcctcctgaagaaaagattctcccatagacccgtgcaggagaagttcgtgtgcctgaactgcggcttcgagacacacgcagccgagcaagccgccctgaacatcgccagatcctggctgttcctgcggagccaggagtacaagaaataccagacaaacaagacaaccggcaacaccgataagagagccttcgtcgagacctggcagtccttttaccggaagaagcttaaggaggtgtggaaacctgccgtgcggtctggcggatctggcggaggctccacaagcccccaggagcccgtgaccttcgccgacgtggccgtgctgttcacccccgaggagtggctgttcctggacagcgcccagaagagcctgtacagggacgtgatgctggagaactacaggaacctggccagcgtgggcgaccagctgtgcaagaccaggatgagcagccacatggagcagagggaggagctgtgcgtgaccgagaggggcgtgttccccggcgcccagctgggcccccacctgcagaccagccccaagaaaaagagaaaagtctaagctgccttctgcggggcttgccttctggccatgcccttcttctctcccttgcacctgtacctcttggtctttgaataaagcctgagtaggaaggctagcaaaaaaaaaaaaaaaaaaaaaaaaaaaaaaaaaaaaaaaaaaaaaaaaaaaaaaaaaaaaaaaaaaaaaaaaaaaaaaaa

SEQ ID NO: 3933 - RNA, 5419 nt, synthetic construct
  source 1..5419: mol_type = other RNA
aggaaataagagagaaaagaagagtaagaagaaatataagagccaccatggcccctaagaagaagcgtaaagtgagccgggtgaacggcagcggcagcggcggcggcatgaaccacgaccaggagttcgacccccctaaggtgtaccctcccgtccccgccgagaagagaaagcccatccgggtcctgagcctgttcgatggcatcgccaccggtctgctggtgctgaaggacctgggcatccaggtggataggtacattgcctccgaggtgtgcgaggactccatcaccgtgggaatggtgcgtcatcagggcaagatcatgtacgtgggcgacgtgcggagcgtgacacagaagcatatccaggagtggggccctttcgacctggtgatcggcggcagcccttgcaatgacctgagcatcgtgaacccagcccggaagggcctgtacgagggaaccggcagactgttcttcgagttttacagactgctgcacgacgcccggcctaaggaaggcgacgaccggcccttcttttggctgttcgagaatgtggtggccatgggagtcagcgacaagcgggatattagccggttcctggagagcaaccccgtgatgatcgatgccaaggaagtgagcgccgcccaccgggccagatacttctggggcaatctgcctggcatgaacagacccctggccagcaccgtgaacgacaagctggagctgcaggagtgcctggagcacggccggatcgccaagttcagcaaggtgagaaccatcaccacccgaagcaacagcatcaaacaaggcaaggaccagcactttcctgtgttcatgaacgagaaggaggacatcctgtggtgtaccgagatggagagagtgttcgggttcccagtccactacacagatgtcagcaacatgtctagactggccagacagagactgctgggaagaagctggtccgtccctgtgatcagacacctgttcgcccctctgaaggagtacttcgcctgcgtgagcagcggcaacagcaacgccaacagccggggccccagcttctctagcggcctggtgccactgtccctgagagggagccacatgggccccatggagatctacaaaaccgtgagcgcctggaagcggcagcctgtgcgcgtgctgagcctgtttcggaatatcgataaagtcctgaaaagcctgggattcctggagagcggctctggctccggcggtggcaccctgaagtacgtggaggatgtgacaaacgtggtcagacgggatgtggagaagtggggccccttcgatctggtgtacggcagcacccaacccctgggcagctcttgtgaccggtgccctggctggtacatgtttcagttccaccggatcctgcagtacgccctgccgagacaggagtcccagcggccattcttttggattttcatggacaacttgctgctgaccgaggatgaccaggaaactaccactcggttcctgcagaccgaagccgtgaccctgcaggacgtgagaggccgggactaccagaacgccatgcgggtgtggtccaacatccctggactgaaaagcaagcacgcacctctgacccctaaagaagaggagtacctgcaggcccaggtgcggagcagaagcaagctggacgcccctaaggtggatctgctggtgaagaattgcctcctgcccctgagagagtacttcaagtatttcagccagaatagtctgcccctgggcggcccaagcagcggcgcccctcctcccagcggcggcagcccagccggctccccaacctctaccgaggagggcacctctgagtccgccacccccgagagcggccctggcacctccaccgagcccagcgagggcagcgcacccggcagccctgccggcagccccacctccacagaggagggaaccagcaccgagcccagcgaaggcagcgccccaggcaccagcaccgagcctagtgagggcggctctggcggcggcagcgcccaggagattaaacggatcaacaagatcagaagaagacttgtgaaagacagcaacaccaagaaggccggcaagacaggccccatgaaaaccctgctggttagagtgatgacacccgatctgagagagcggctggaaaacctgagaaagaagcctgaaaatatcccccagcccatcagcaatacatctagagccaacctgaataagctgctgaccgattacaccgaaatgaagaaggcgatcctgcatgtgtactgggaagagttccagaaggaccctgtgggcctgatgagccgggtggcccagcctgccagcaagaagatcgatcagaacaagctgaaacctgagatggacgagaagggcaacctgaccaccgccggctttgcctgctctcagtgtggccagcccctgttcgtgtacaagctggagcaggtgtctgagaagggcaaggcttacaccaactacttcggacggtgcaatgtggccgagcacgaaaagctgatcctgctggcccagctgaagcccgagaaggatagcgacgaagccgtgacatatagcctgggaaagtttgggcagagggccctggatttctacagcattcatgtgaccaaggagtccacccaccccgtgaagcccctggcccagatcgccggaaacagatacgcctccggacctgtgggaaaggccctgagcgacgcatgtatgggcacaatcgcctccttcctgtctaagtaccaggacatcatcatcgaacaccagaaggtggtgaagggcaaccagaagagactggagagcctgcgggagctggccggcaaggaaaacctggaataccctagcgtgaccctgccacctcagcctcacaccaaggagggcgttgatgcctacaacgaagtgatcgcccgggtgcgaatgtgggtgaacctgaacctgtggcagaagctgaagctaagcagagatgatgccaagcctctgctgagactgaagggattcccttcctttcctctggtcgagagacaggccaacgaagtggactggtgggacatggtgtgtaacgtgaagaagctgatcaacgagaaaaaggaggatggcaaggtgttttggcagaatctggctggctacaagagacaggaagccctgagaccatacctgagcagcgaggaagatcggaagaagggaaagaaattcgctcggtaccagctgggcgacctgctgctgcacctggaaaagaagcacggcgaggactggggaaaggtgtacgacgaggcctgggagcggattgacaagaaagtggaaggcctgagcaagcacatcaagctggaagaggaacggagaagcgaggacgcccagagcaaggccgccctgaccgactggctgcgggctaaggccagcttcgtgatcgagggcctgaaggaggccgacaaggacgagttctgcagatgcgagctgaagctgcagaagtggtacggggacctgcggggaaagcccttcgccatcgaagccgagaacagcatcctggacatcagcggcttcagcaagcagtacaactgtgccttcatctggcagaaggacggcgtgaagaagctgaacctgtacctgatcatcaactacttcaagggcggcaagctgcggttcaagaagatcaaacctgaagccttcgaagccaacagattctacaccgtgatcaacaaaaagagcggcgagatcgtgcccatggaggtgaacttcaacttcgacgaccccaacctgatcatcctgcctctggcctttggcaagagacagggcagagaattcatctggaacgacctgctgtccctggaaaccggcagcctgaagctggccaacggaagagtgatcgagaagacactgtacaacagaagaacccggcaggatgagcctgccctgttcgtggccctgaccttcgagcggcgggaggtcctggactcctccaatatcaaaccaatgaacctgatcggcgtggcaagaggcgaaaacatccccgccgtgatcgccctgaccgaccccgagggctgcccactgagccggtttaaggatagcctgggaaacccaacccacatcctgagaatcggcgagagctataaggagaagcagcggaccatccaggccaagaaggaggtggagcagcggagagccggcggctacagccggaagtacgccagcaaagccaagaatctggcagacgatatggtgagaaacaccgctagagatctgctgtactacgccgtgacccaggatgccatgctgatcttcgccaacctgagccggggcttcggccggcagggcaagcggaccttcatggccgagagacagtacacacggatggaggactggctgaccgccaagctggcctacgagggcctgagcaagacctacctgtccaagacactggcccagtacacctccaagacatgcagcaactgtgggtttaccatcaccagcgccgactacgacagggtgctggagaagctgaagaagacagcaacaggctggatgaccacaattaacggcaaggagctgaaggtggagggccagattacctactacaacagatacaagagacagaacgtagtcaaggacctgtccgtcgagctggatagactgagcgaagaatctgtgaacaacgacatctcctcctggacaaagggcagaagcggagaagctctgagcctcctgaagaaaagattctcccatagacccgtgcaggagaagttcgtgtgcctgaactgcggcttcgagacacacgcagccgagcaagccgccctgaacatcgccagatcctggctgttcctgcggagccaggagtacaagaaataccagacaaacaagacaaccggcaacaccgataagagagccttcgtcgagacctggcagtccttttaccggaagaagcttaaggaggtgtggaaacctgccgtgcggtctggcggatctggcggaggctccacaagccaggaccccagcgccgagaggctgatggaggaggtgcccgtggtgttcgaggagctgcccgtggtgttcgaggacgtggccgtgtacttcaccagggaggagtggggcatgctggacaagaggcagaaggagctgtacagggacgtgatgaggatgaactacgagctgctggccagcctgggccccgccgccgccaagcccgacctgatcagcaagctggagaggagggccgccccctggatcaccagccccaagaaaaagagaaaagtctaagctgccttctgcggggcttgccttctggccatgcccttcttctctcccttgcacctgtacctcttggtctttgaataaagcctgagtaggaaggctagcaaaaaaaaaaaaaaaaaaaaaaaaaaaaaaaaaaaaaaaaaaaaaaaaaaaaaaaaaaaaaaaaaaaaaaaaaaaaaaaa

SEQ ID NO: 3934 - RNA, 5419 nt, synthetic construct
  source 1..5419: mol_type = other RNA
aggaaataagagagaaaagaagagtaagaagaaatataagagccaccatggcccctaagaagaagcgtaaagtgagccgggtgaacggcagcggcagcggcggcggcatgaaccacgaccaggagttcgacccccctaaggtgtaccctcccgtccccgccgagaagagaaagcccatccgggtcctgagcctgttcgatggcatcgccaccggtctgctggtgctgaaggacctgggcatccaggtggataggtacattgcctccgaggtgtgcgaggactccatcaccgtgggaatggtgcgtcatcagggcaagatcatgtacgtgggcgacgtgcggagcgtgacacagaagcatatccaggagtggggccctttcgacctggtgatcggcggcagcccttgcaatgacctgagcatcgtgaacccagcccggaagggcctgtacgagggaaccggcagactgttcttcgagttttacagactgctgcacgacgcccggcctaaggaaggcgacgaccggcccttcttttggctgttcgagaatgtggtggccatgggagtcagcgacaagcgggatattagccggttcctggagagcaaccccgtgatgatcgatgccaaggaagtgagcgccgcccaccgggccagatacttctggggcaatctgcctggcatgaacagacccctggccagcaccgtgaacgacaagctggagctgcaggagtgcctggagcacggccggatcgccaagttcagcaaggtgagaaccatcaccacccgaagcaacagcatcaaacaaggcaaggaccagcactttcctgtgttcatgaacgagaaggaggacatcctgtggtgtaccgagatggagagagtgttcgggttcccagtccactacacagatgtcagcaacatgtctagactggccagacagagactgctgggaagaagctggtccgtccctgtgatcagacacctgttcgcccctctgaaggagtacttcgcctgcgtgagcagcggcaacagcaacgccaacagccggggccccagcttctctagcggcctggtgccactgtccctgagagggagccacatgggccccatggagatctacaaaaccgtgagcgcctggaagcggcagcctgtgcgcgtgctgagcctgtttcggaatatcgataaagtcctgaaaagcctgggattcctggagagcggctctggctccggcggtggcaccctgaagtacgtggaggatgtgacaaacgtggtcagacgggatgtggagaagtggggccccttcgatctggtgtacggcagcacccaacccctgggcagctcttgtgaccggtgccctggctggtacatgtttcagttccaccggatcctgcagtacgccctgccgagacaggagtcccagcggccattcttttggattttcatggacaacttgctgctgaccgaggatgaccaggaaactaccactcggttcctgcagaccgaagccgtgaccctgcaggacgtgagaggccgggactaccagaacgccatgcgggtgtggtccaacatccctggactgaaaagcaagcacgcacctctgacccctaaagaagaggagtacctgcaggcccaggtgcggagcagaagcaagctggacgcccctaaggtggatctgctggtgaagaattgcctcctgcccctgagagagtacttcaagtatttcagccagaatagtctgcccctgggcggcccaagcagcggcgcccctcctcccagcggcggcagcccagccggctccccaacctctaccgaggagggcacctctgagtccgccacccccgagagcggccctggcacctccaccgagcccagcgagggcagcgcacccggcagccctgccggcagccccacctccacagaggagggaaccagcaccgagcccagcgaaggcagcgccccaggcaccagcaccgagcctagtgagggcggctctggcggcggcagcgcccaggagattaaacggatcaacaagatcagaagaagacttgtgaaagacagcaacaccaagaaggccggcaagacaggccccatgaaaaccctgctggttagagtgatgacacccgatctgagagagcggctggaaaacctgagaaagaagcctgaaaatatcccccagcccatcagcaatacatctagagccaacctgaataagctgctgaccgattacaccgaaatgaagaaggcgatcctgcatgtgtactgggaagagttccagaaggaccctgtgggcctgatgagccgggtggcccagcctgccagcaagaagatcgatcagaacaagctgaaacctgagatggacgagaagggcaacctgaccaccgccggctttgcctgctctcagtgtggccagcccctgttcgtgtacaagctggagcaggtgtctgagaagggcaaggcttacaccaactacttcggacggtgcaatgtggccgagcacgaaaagctgatcctgctggcccagctgaagcccgagaaggatagcgacgaagccgtgacatatagcctgggaaagtttgggcagagggccctggatttctacagcattcatgtgaccaaggagtccacccaccccgtgaagcccctggcccagatcgccggaaacagatacgcctccggacctgtgggaaaggccctgagcgacgcatgtatgggcacaatcgcctccttcctgtctaagtaccaggacatcatcatcgaacaccagaaggtggtgaagggcaaccagaagagactggagagcctgcgggagctggccggcaaggaaaacctggaataccctagcgtgaccctgccacctcagcctcacaccaaggagggcgttgatgcctacaacgaagtgatcgcccgggtgcgaatgtgggtgaacctgaacctgtggcagaagctgaagctaagcagagatgatgccaagcctctgctgagactgaagggattcccttcctttcctctggtcgagagacaggccaacgaagtggactggtgggacatggtgtgtaacgtgaagaagctgatcaacgagaaaaaggaggatggcaaggtgttttggcagaatctggctggctacaagagacaggaagccctgagaccatacctgagcagcgaggaagatcggaagaagggaaagaaattcgctcggtaccagctgggcgacctgctgctgcacctggaaaagaagcacggcgaggactggggaaaggtgtacgacgaggcctgggagcggattgacaagaaagtggaaggcctgagcaagcacatcaagctggaagaggaacggagaagcgaggacgcccagagcaaggccgccctgaccgactggctgcgggctaaggccagcttcgtgatcgagggcctgaaggaggccgacaaggacgagttctgcagatgcgagctgaagctgcagaagtggtacggggacctgcggggaaagcccttcgccatcgaagccgagaacagcatcctggacatcagcggcttcagcaagcagtacaactgtgccttcatctggcagaaggacggcgtgaagaagctgaacctgtacctgatcatcaactacttcaagggcggcaagctgcggttcaagaagatcaaacctgaagccttcgaagccaacagattctacaccgtgatcaacaaaaagagcggcgagatcgtgcccatggaggtgaacttcaacttcgacgaccccaacctgatcatcctgcctctggcctttggcaagagacagggcagagaattcatctggaacgacctgctgtccctggaaaccggcagcctgaagctggccaacggaagagtgatcgagaagacactgtacaacagaagaacccggcaggatgagcctgccctgttcgtggccctgaccttcgagcggcgggaggtcctggactcctccaatatcaaaccaatgaacctgatcggcgtggcaagaggcgaaaacatccccgccgtgatcgccctgaccgaccccgagggctgcccactgagccggtttaaggatagcctgggaaacccaacccacatcctgagaatcggcgagagctataaggagaagcagcggaccatccaggccaagaaggaggtggagcagcggagagccggcggctacagccggaagtacgccagcaaagccaagaatctggcagacgatatggtgagaaacaccgctagagatctgctgtactacgccgtgacccaggatgccatgctgatcttcgccaacctgagccggggcttcggccggcagggcaagcggaccttcatggccgagagacagtacacacggatggaggactggctgaccgccaagctggcctacgagggcctgagcaagacctacctgtccaagacactggcccagtacacctccaagacatgcagcaactgtgggtttaccatcaccagcgccgactacgacagggtgctggagaagctgaagaagacagcaacaggctggatgaccacaattaacggcaaggagctgaaggtggagggccagattacctactacaacagatacaagagacagaacgtagtcaaggacctgtccgtcgagctggatagactgagcgaagaatctgtgaacaacgacatctcctcctggacaaagggcagaagcggagaagctctgagcctcctgaagaaaagattctcccatagacccgtgcaggagaagttcgtgtgcctgaactgcggcttcgagacacacgcagccgagcaagccgccctgaacatcgccagatcctggctgttcctgcggagccaggagtacaagaaataccagacaaacaagacaaccggcaacaccgataagagagccttcgtcgagacctggcagtccttttaccggaagaagcttaaggaggtgtggaaacctgccgtgcggtctggcggatctggcggaggctccacaagcgcccagatgcccgtgaagttcgaggacatcgccgtgagcttcagccaggaggagtgggagtacctgaacgaggagcagaaggagctgtacagggaggtgatggaggagaactaccagaccctgatcagcctgggcagcccccccgtgacccccgacatcatcagccacatcgagaggggcgaggagccctacatcagggaggagcccggcagcgaggagagggagcccggcaggagcagctgcaccagccccaagaaaaagagaaaagtctaagctgccttctgcggggcttgccttctggccatgcccttcttctctcccttgcacctgtacctcttggtctttgaataaagcctgagtaggaaggctagcaaaaaaaaaaaaaaaaaaaaaaaaaaaaaaaaaaaaaaaaaaaaaaaaaaaaaaaaaaaaaaaaaaaaaaaaaaaaaaaa

SEQ ID NO: 3935 - RNA, 5419 nt, synthetic construct
  source 1..5419: mol_type = other RNA
aggaaataagagagaaaagaagagtaagaagaaatataagagccaccatggcccctaagaagaagcgtaaagtgagccgggtgaacggcagcggcagcggcggcggcatgaaccacgaccaggagttcgacccccctaaggtgtaccctcccgtccccgccgagaagagaaagcccatccgggtcctgagcctgttcgatggcatcgccaccggtctgctggtgctgaaggacctgggcatccaggtggataggtacattgcctccgaggtgtgcgaggactccatcaccgtgggaatggtgcgtcatcagggcaagatcatgtacgtgggcgacgtgcggagcgtgacacagaagcatatccaggagtggggccctttcgacctggtgatcggcggcagcccttgcaatgacctgagcatcgtgaacccagcccggaagggcctgtacgagggaaccggcagactgttcttcgagttttacagactgctgcacgacgcccggcctaaggaaggcgacgaccggcccttcttttggctgttcgagaatgtggtggccatgggagtcagcgacaagcgggatattagccggttcctggagagcaaccccgtgatgatcgatgccaaggaagtgagcgccgcccaccgggccagatacttctggggcaatctgcctggcatgaacagacccctggccagcaccgtgaacgacaagctggagctgcaggagtgcctggagcacggccggatcgccaagttcagcaaggtgagaaccatcaccacccgaagcaacagcatcaaacaaggcaaggaccagcactttcctgtgttcatgaacgagaaggaggacatcctgtggtgtaccgagatggagagagtgttcgggttcccagtccactacacagatgtcagcaacatgtctagactggccagacagagactgctgggaagaagctggtccgtccctgtgatcagacacctgttcgcccctctgaaggagtacttcgcctgcgtgagcagcggcaacagcaacgccaacagccggggccccagcttctctagcggcctggtgccactgtccctgagagggagccacatgggccccatggagatctacaaaaccgtgagcgcctggaagcggcagcctgtgcgcgtgctgagcctgtttcggaatatcgataaagtcctgaaaagcctgggattcctggagagcggctctggctccggcggtggcaccctgaagtacgtggaggatgtgacaaacgtggtcagacgggatgtggagaagtggggccccttcgatctggtgtacggcagcacccaacccctgggcagctcttgtgaccggtgccctggctggtacatgtttcagttccaccggatcctgcagtacgccctgccgagacaggagtcccagcggccattcttttggattttcatggacaacttgctgctgaccgaggatgaccaggaaactaccactcggttcctgcagaccgaagccgtgaccctgcaggacgtgagaggccgggactaccagaacgccatgcgggtgtggtccaacatccctggactgaaaagcaagcacgcacctctgacccctaaagaagaggagtacctgcaggcccaggtgcggagcagaagcaagctggacgcccctaaggtggatctgctggtgaagaattgcctcctgcccctgagagagtacttcaagtatttcagccagaatagtctgcccctgggcggcccaagcagcggcgcccctcctcccagcggcggcagcccagccggctccccaacctctaccgaggagggcacctctgagtccgccacccccgagagcggccctggcacctccaccgagcccagcgagggcagcgcacccggcagccctgccggcagccccacctccacagaggagggaaccagcaccgagcccagcgaaggcagcgccccaggcaccagcaccgagcctagtgagggcggctctggcggcggcagcgcccaggagattaaacggatcaacaagatcagaagaagacttgtgaaagacagcaacaccaagaaggccggcaagacaggccccatgaaaaccctgctggttagagtgatgacacccgatctgagagagcggctggaaaacctgagaaagaagcctgaaaatatcccccagcccatcagcaatacatctagagccaacctgaataagctgctgaccgattacaccgaaatgaagaaggcgatcctgcatgtgtactgggaagagttccagaaggaccctgtgggcctgatgagccgggtggcccagcctgccagcaagaagatcgatcagaacaagctgaaacctgagatggacgagaagggcaacctgaccaccgccggctttgcctgctctcagtgtggccagcccctgttcgtgtacaagctggagcaggtgtctgagaagggcaaggcttacaccaactacttcggacggtgcaatgtggccgagcacgaaaagctgatcctgctggcccagctgaagcccgagaaggatagcgacgaagccgtgacatatagcctgggaaagtttgggcagagggccctggatttctacagcattcatgtgaccaaggagtccacccaccccgtgaagcccctggcccagatcgccggaaacagatacgcctccggacctgtgggaaaggccctgagcgacgcatgtatgggcacaatcgcctccttcctgtctaagtaccaggacatcatcatcgaacaccagaaggtggtgaagggcaaccagaagagactggagagcctgcgggagctggccggcaaggaaaacctggaataccctagcgtgaccctgccacctcagcctcacaccaaggagggcgttgatgcctacaacgaagtgatcgcccgggtgcgaatgtgggtgaacctgaacctgtggcagaagctgaagctaagcagagatgatgccaagcctctgctgagactgaagggattcccttcctttcctctggtcgagagacaggccaacgaagtggactggtgggacatggtgtgtaacgtgaagaagctgatcaacgagaaaaaggaggatggcaaggtgttttggcagaatctggctggctacaagagacaggaagccctgagaccatacctgagcagcgaggaagatcggaagaagggaaagaaattcgctcggtaccagctgggcgacctgctgctgcacctggaaaagaagcacggcgaggactggggaaaggtgtacgacgaggcctgggagcggattgacaagaaagtggaaggcctgagcaagcacatcaagctggaagaggaacggagaagcgaggacgcccagagcaaggccgccctgaccgactggctgcgggctaaggccagcttcgtgatcgagggcctgaaggaggccgacaaggacgagttctgcagatgcgagctgaagctgcagaagtggtacggggacctgcggggaaagcccttcgccatcgaagccgagaacagcatcctggacatcagcggcttcagcaagcagtacaactgtgccttcatctggcagaaggacggcgtgaagaagctgaacctgtacctgatcatcaactacttcaagggcggcaagctgcggttcaagaagatcaaacctgaagccttcgaagccaacagattctacaccgtgatcaacaaaaagagcggcgagatcgtgcccatggaggtgaacttcaacttcgacgaccccaacctgatcatcctgcctctggcctttggcaagagacagggcagagaattcatctggaacgacctgctgtccctggaaaccggcagcctgaagctggccaacggaagagtgatcgagaagacactgtacaacagaagaacccggcaggatgagcctgccctgttcgtggccctgaccttcgagcggcgggaggtcctggactcctccaatatcaaaccaatgaacctgatcggcgtggcaagaggcgaaaacatccccgccgtgatcgccctgaccgaccccgagggctgcccactgagccggtttaaggatagcctgggaaacccaacccacatcctgagaatcggcgagagctataaggagaagcagcggaccatccaggccaagaaggaggtggagcagcggagagccggcggctacagccggaagtacgccagcaaagccaagaatctggcagacgatatggtgagaaacaccgctagagatctgctgtactacgccgtgacccaggatgccatgctgatcttcgccaacctgagccggggcttcggccggcagggcaagcggaccttcatggccgagagacagtacacacggatggaggactggctgaccgccaagctggcctacgagggcctgagcaagacctacctgtccaagacactggcccagtacacctccaagacatgcagcaactgtgggtttaccatcaccagcgccgactacgacagggtgctggagaagctgaagaagacagcaacaggctggatgaccacaattaacggcaaggagctgaaggtggagggccagattacctactacaacagatacaagagacagaacgtagtcaaggacctgtccgtcgagctggatagactgagcgaagaatctgtgaacaacgacatctcctcctggacaaagggcagaagcggagaagctctgagcctcctgaagaaaagattctcccatagacccgtgcaggagaagttcgtgtgcctgaactgcggcttcgagacacacgcagccgagcaagccgccctgaacatcgccagatcctggctgttcctgcggagccaggagtacaagaaataccagacaaacaagacaaccggcaacaccgataagagagccttcgtcgagacctggcagtccttttaccggaagaagcttaaggaggtgtggaaacctgccgtgcggtctggcggatctggcggaggctccacaagcaaggaccagggcagcctgaccctggaggacgtggccgtggacttcacctgggaggagtggcagctgctggcccccgcccagaaggacctgtacagggacgtgatgctggagaactacagcaacctgctgagcatcggctaccaggccagcaagcccgacgccctgagcaggctggagaggggcgagccctggcccgtggaggacgagatccacagccagatctgccccgagatgaggaaggacaccagccccaagaaaaagagaaaagtctaagctgccttctgcggggcttgccttctggccatgcccttcttctctcccttgcacctgtacctcttggtctttgaataaagcctgagtaggaaggctagcaaaaaaaaaaaaaaaaaaaaaaaaaaaaaaaaaaaaaaaaaaaaaaaaaaaaaaaaaaaaaaaaaaaaaaaaaaaaaaaa

SEQ ID NO: 3936 - RNA, 5419 nt, synthetic construct
  source 1..5419: mol_type = other RNA
aggaaataagagagaaaagaagagtaagaagaaatataagagccaccatggcccctaagaagaagcgtaaagtgagccgggtgaacggcagcggcagcggcggcggcatgaaccacgaccaggagttcgacccccctaaggtgtaccctcccgtccccgccgagaagagaaagcccatccgggtcctgagcctgttcgatggcatcgccaccggtctgctggtgctgaaggacctgggcatccaggtggataggtacattgcctccgaggtgtgcgaggactccatcaccgtgggaatggtgcgtcatcagggcaagatcatgtacgtgggcgacgtgcggagcgtgacacagaagcatatccaggagtggggccctttcgacctggtgatcggcggcagcccttgcaatgacctgagcatcgtgaacccagcccggaagggcctgtacgagggaaccggcagactgttcttcgagttttacagactgctgcacgacgcccggcctaaggaaggcgacgaccggcccttcttttggctgttcgagaatgtggtggccatgggagtcagcgacaagcgggatattagccggttcctggagagcaaccccgtgatgatcgatgccaaggaagtgagcgccgcccaccgggccagatacttctggggcaatctgcctggcatgaacagacccctggccagcaccgtgaacgacaagctggagctgcaggagtgcctggagcacggccggatcgccaagttcagcaaggtgagaaccatcaccacccgaagcaacagcatcaaacaaggcaaggaccagcactttcctgtgttcatgaacgagaaggaggacatcctgtggtgtaccgagatggagagagtgttcgggttcccagtccactacacagatgtcagcaacatgtctagactggccagacagagactgctgggaagaagctggtccgtccctgtgatcagacacctgttcgcccctctgaaggagtacttcgcctgcgtgagcagcggcaacagcaacgccaacagccggggccccagcttctctagcggcctggtgccactgtccctgagagggagccacatgggccccatggagatctacaaaaccgtgagcgcctggaagcggcagcctgtgcgcgtgctgagcctgtttcggaatatcgataaagtcctgaaaagcctgggattcctggagagcggctctggctccggcggtggcaccctgaagtacgtggaggatgtgacaaacgtggtcagacgggatgtggagaagtggggccccttcgatctggtgtacggcagcacccaacccctgggcagctcttgtgaccggtgccctggctggtacatgtttcagttccaccggatcctgcagtacgccctgccgagacaggagtcccagcggccattcttttggattttcatggacaacttgctgctgaccgaggatgaccaggaaactaccactcggttcctgcagaccgaagccgtgaccctgcaggacgtgagaggccgggactaccagaacgccatgcgggtgtggtccaacatccctggactgaaaagcaagcacgcacctctgacccctaaagaagaggagtacctgcaggcccaggtgcggagcagaagcaagctggacgcccctaaggtggatctgctggtgaagaattgcctcctgcccctgagagagtacttcaagtatttcagccagaatagtctgcccctgggcggcccaagcagcggcgcccctcctcccagcggcggcagcccagccggctccccaacctctaccgaggagggcacctctgagtccgccacccccgagagcggccctggcacctccaccgagcccagcgagggcagcgcacccggcagccctgccggcagccccacctccacagaggagggaaccagcaccgagcccagcgaaggcagcgccccaggcaccagcaccgagcctagtgagggcggctctggcggcggcagcgcccaggagattaaacggatcaacaagatcagaagaagacttgtgaaagacagcaacaccaagaaggccggcaagacaggccccatgaaaaccctgctggttagagtgatgacacccgatctgagagagcggctggaaaacctgagaaagaagcctgaaaatatcccccagcccatcagcaatacatctagagccaacctgaataagctgctgaccgattacaccgaaatgaagaaggcgatcctgcatgtgtactgggaagagttccagaaggaccctgtgggcctgatgagccgggtggcccagcctgccagcaagaagatcgatcagaacaagctgaaacctgagatggacgagaagggcaacctgaccaccgccggctttgcctgctctcagtgtggccagcccctgttcgtgtacaagctggagcaggtgtctgagaagggcaaggcttacaccaactacttcggacggtgcaatgtggccgagcacgaaaagctgatcctgctggcccagctgaagcccgagaaggatagcgacgaagccgtgacatatagcctgggaaagtttgggcagagggccctggatttctacagcattcatgtgaccaaggagtccacccaccccgtgaagcccctggcccagatcgccggaaacagatacgcctccggacctgtgggaaaggccctgagcgacgcatgtatgggcacaatcgcctccttcctgtctaagtaccaggacatcatcatcgaacaccagaaggtggtgaagggcaaccagaagagactggagagcctgcgggagctggccggcaaggaaaacctggaataccctagcgtgaccctgccacctcagcctcacaccaaggagggcgttgatgcctacaacgaagtgatcgcccgggtgcgaatgtgggtgaacctgaacctgtggcagaagctgaagctaagcagagatgatgccaagcctctgctgagactgaagggattcccttcctttcctctggtcgagagacaggccaacgaagtggactggtgggacatggtgtgtaacgtgaagaagctgatcaacgagaaaaaggaggatggcaaggtgttttggcagaatctggctggctacaagagacaggaagccctgagaccatacctgagcagcgaggaagatcggaagaagggaaagaaattcgctcggtaccagctgggcgacctgctgctgcacctggaaaagaagcacggcgaggactggggaaaggtgtacgacgaggcctgggagcggattgacaagaaagtggaaggcctgagcaagcacatcaagctggaagaggaacggagaagcgaggacgcccagagcaaggccgccctgaccgactggctgcgggctaaggccagcttcgtgatcgagggcctgaaggaggccgacaaggacgagttctgcagatgcgagctgaagctgcagaagtggtacggggacctgcggggaaagcccttcgccatcgaagccgagaacagcatcctggacatcagcggcttcagcaagcagtacaactgtgccttcatctggcagaaggacggcgtgaagaagctgaacctgtacctgatcatcaactacttcaagggcggcaagctgcggttcaagaagatcaaacctgaagccttcgaagccaacagattctacaccgtgatcaacaaaaagagcggcgagatcgtgcccatggaggtgaacttcaacttcgacgaccccaacctgatcatcctgcctctggcctttggcaagagacagggcagagaattcatctggaacgacctgctgtccctggaaaccggcagcctgaagctggccaacggaagagtgatcgagaagacactgtacaacagaagaacccggcaggatgagcctgccctgttcgtggccctgaccttcgagcggcgggaggtcctggactcctccaatatcaaaccaatgaacctgatcggcgtggcaagaggcgaaaacatccccgccgtgatcgccctgaccgaccccgagggctgcccactgagccggtttaaggatagcctgggaaacccaacccacatcctgagaatcggcgagagctataaggagaagcagcggaccatccaggccaagaaggaggtggagcagcggagagccggcggctacagccggaagtacgccagcaaagccaagaatctggcagacgatatggtgagaaacaccgctagagatctgctgtactacgccgtgacccaggatgccatgctgatcttcgccaacctgagccggggcttcggccggcagggcaagcggaccttcatggccgagagacagtacacacggatggaggactggctgaccgccaagctggcctacgagggcctgagcaagacctacctgtccaagacactggcccagtacacctccaagacatgcagcaactgtgggtttaccatcaccagcgccgactacgacagggtgctggagaagctgaagaagacagcaacaggctggatgaccacaattaacggcaaggagctgaaggtggagggccagattacctactacaacagatacaagagacagaacgtagtcaaggacctgtccgtcgagctggatagactgagcgaagaatctgtgaacaacgacatctcctcctggacaaagggcagaagcggagaagctctgagcctcctgaagaaaagattctcccatagacccgtgcaggagaagttcgtgtgcctgaactgcggcttcgagacacacgcagccgagcaagccgccctgaacatcgccagatcctggctgttcctgcggagccaggagtacaagaaataccagacaaacaagacaaccggcaacaccgataagagagccttcgtcgagacctggcagtccttttaccggaagaagcttaaggaggtgtggaaacctgccgtgcggtctggcggatctggcggaggctccacaagccagatgaggctgaggttcgaggacatcagcgtgagcttcagccaggaggagtgggcctacctggacgaggagcagaaggagctgtacagggaggtgatgagggacaactaccagaccctgatcagcctgggcatcggcagcccccccgtgacccccgacatcatcagctgcatcgagcagggcgaggagccctacatcagggacgagcccggcagcgaggagaggaagaccggcaggagcagcaccagccccaagaaaaagagaaaagtctaagctgccttctgcggggcttgccttctggccatgcccttcttctctcccttgcacctgtacctcttggtctttgaataaagcctgagtaggaaggctagcaaaaaaaaaaaaaaaaaaaaaaaaaaaaaaaaaaaaaaaaaaaaaaaaaaaaaaaaaaaaaaaaaaaaaaaaaaaaaaaa

SEQ ID NO: 3937 - RNA, 5416 nt, synthetic construct
  source 1..5416: mol_type = other RNA
aggaaataagagagaaaagaagagtaagaagaaatataagagccaccatggcccctaagaagaagcgtaaagtgagccgggtgaacggcagcggcagcggcggcggcatgaaccacgaccaggagttcgacccccctaaggtgtaccctcccgtccccgccgagaagagaaagcccatccgggtcctgagcctgttcgatggcatcgccaccggtctgctggtgctgaaggacctgggcatccaggtggataggtacattgcctccgaggtgtgcgaggactccatcaccgtgggaatggtgcgtcatcagggcaagatcatgtacgtgggcgacgtgcggagcgtgacacagaagcatatccaggagtggggccctttcgacctggtgatcggcggcagcccttgcaatgacctgagcatcgtgaacccagcccggaagggcctgtacgagggaaccggcagactgttcttcgagttttacagactgctgcacgacgcccggcctaaggaaggcgacgaccggcccttcttttggctgttcgagaatgtggtggccatgggagtcagcgacaagcgggatattagccggttcctggagagcaaccccgtgatgatcgatgccaaggaagtgagcgccgcccaccgggccagatacttctggggcaatctgcctggcatgaacagacccctggccagcaccgtgaacgacaagctggagctgcaggagtgcctggagcacggccggatcgccaagttcagcaaggtgagaaccatcaccacccgaagcaacagcatcaaacaaggcaaggaccagcactttcctgtgttcatgaacgagaaggaggacatcctgtggtgtaccgagatggagagagtgttcgggttcccagtccactacacagatgtcagcaacatgtctagactggccagacagagactgctgggaagaagctggtccgtccctgtgatcagacacctgttcgcccctctgaaggagtacttcgcctgcgtgagcagcggcaacagcaacgccaacagccggggccccagcttctctagcggcctggtgccactgtccctgagagggagccacatgggccccatggagatctacaaaaccgtgagcgcctggaagcggcagcctgtgcgcgtgctgagcctgtttcggaatatcgataaagtcctgaaaagcctgggattcctggagagcggctctggctccggcggtggcaccctgaagtacgtggaggatgtgacaaacgtggtcagacgggatgtggagaagtggggccccttcgatctggtgtacggcagcacccaacccctgggcagctcttgtgaccggtgccctggctggtacatgtttcagttccaccggatcctgcagtacgccctgccgagacaggagtcccagcggccattcttttggattttcatggacaacttgctgctgaccgaggatgaccaggaaactaccactcggttcctgcagaccgaagccgtgaccctgcaggacgtgagaggccgggactaccagaacgccatgcgggtgtggtccaacatccctggactgaaaagcaagcacgcacctctgacccctaaagaagaggagtacctgcaggcccaggtgcggagcagaagcaagctggacgcccctaaggtggatctgctggtgaagaattgcctcctgcccctgagagagtacttcaagtatttcagccagaatagtctgcccctgggcggcccaagcagcggcgcccctcctcccagcggcggcagcccagccggctccccaacctctaccgaggagggcacctctgagtccgccacccccgagagcggccctggcacctccaccgagcccagcgagggcagcgcacccggcagccctgccggcagccccacctccacagaggagggaaccagcaccgagcccagcgaaggcagcgccccaggcaccagcaccgagcctagtgagggcggctctggcggcggcagcgcccaggagattaaacggatcaacaagatcagaagaagacttgtgaaagacagcaacaccaagaaggccggcaagacaggccccatgaaaaccctgctggttagagtgatgacacccgatctgagagagcggctggaaaacctgagaaagaagcctgaaaatatcccccagcccatcagcaatacatctagagccaacctgaataagctgctgaccgattacaccgaaatgaagaaggcgatcctgcatgtgtactgggaagagttccagaaggaccctgtgggcctgatgagccgggtggcccagcctgccagcaagaagatcgatcagaacaagctgaaacctgagatggacgagaagggcaacctgaccaccgccggctttgcctgctctcagtgtggccagcccctgttcgtgtacaagctggagcaggtgtctgagaagggcaaggcttacaccaactacttcggacggtgcaatgtggccgagcacgaaaagctgatcctgctggcccagctgaagcccgagaaggatagcgacgaagccgtgacatatagcctgggaaagtttgggcagagggccctggatttctacagcattcatgtgaccaaggagtccacccaccccgtgaagcccctggcccagatcgccggaaacagatacgcctccggacctgtgggaaaggccctgagcgacgcatgtatgggcacaatcgcctccttcctgtctaagtaccaggacatcatcatcgaacaccagaaggtggtgaagggcaaccagaagagactggagagcctgcgggagctggccggcaaggaaaacctggaataccctagcgtgaccctgccacctcagcctcacaccaaggagggcgttgatgcctacaacgaagtgatcgcccgggtgcgaatgtgggtgaacctgaacctgtggcagaagctgaagctaagcagagatgatgccaagcctctgctgagactgaagggattcccttcctttcctctggtcgagagacaggccaacgaagtggactggtgggacatggtgtgtaacgtgaagaagctgatcaacgagaaaaaggaggatggcaaggtgttttggcagaatctggctggctacaagagacaggaagccctgagaccatacctgagcagcgaggaagatcggaagaagggaaagaaattcgctcggtaccagctgggcgacctgctgctgcacctggaaaagaagcacggcgaggactggggaaaggtgtacgacgaggcctgggagcggattgacaagaaagtggaaggcctgagcaagcacatcaagctggaagaggaacggagaagcgaggacgcccagagcaaggccgccctgaccgactggctgcgggctaaggccagcttcgtgatcgagggcctgaaggaggccgacaaggacgagttctgcagatgcgagctgaagctgcagaagtggtacggggacctgcggggaaagcccttcgccatcgaagccgagaacagcatcctggacatcagcggcttcagcaagcagtacaactgtgccttcatctggcagaaggacggcgtgaagaagctgaacctgtacctgatcatcaactacttcaagggcggcaagctgcggttcaagaagatcaaacctgaagccttcgaagccaacagattctacaccgtgatcaacaaaaagagcggcgagatcgtgcccatggaggtgaacttcaacttcgacgaccccaacctgatcatcctgcctctggcctttggcaagagacagggcagagaattcatctggaacgacctgctgtccctggaaaccggcagcctgaagctggccaacggaagagtgatcgagaagacactgtacaacagaagaacccggcaggatgagcctgccctgttcgtggccctgaccttcgagcggcgggaggtcctggactcctccaatatcaaaccaatgaacctgatcggcgtggcaagaggcgaaaacatccccgccgtgatcgccctgaccgaccccgagggctgcccactgagccggtttaaggatagcctgggaaacccaacccacatcctgagaatcggcgagagctataaggagaagcagcggaccatccaggccaagaaggaggtggagcagcggagagccggcggctacagccggaagtacgccagcaaagccaagaatctggcagacgatatggtgagaaacaccgctagagatctgctgtactacgccgtgacccaggatgccatgctgatcttcgccaacctgagccggggcttcggccggcagggcaagcggaccttcatggccgagagacagtacacacggatggaggactggctgaccgccaagctggcctacgagggcctgagcaagacctacctgtccaagacactggcccagtacacctccaagacatgcagcaactgtgggtttaccatcaccagcgccgactacgacagggtgctggagaagctgaagaagacagcaacaggctggatgaccacaattaacggcaaggagctgaaggtggagggccagattacctactacaacagatacaagagacagaacgtagtcaaggacctgtccgtcgagctggatagactgagcgaagaatctgtgaacaacgacatctcctcctggacaaagggcagaagcggagaagctctgagcctcctgaagaaaagattctcccatagacccgtgcaggagaagttcgtgtgcctgaactgcggcttcgagacacacgcagccgagcaagccgccctgaacatcgccagatcctggctgttcctgcggagccaggagtacaagaaataccagacaaacaagacaaccggcaacaccgataagagagccttcgtcgagacctggcagtccttttaccggaagaagcttaaggaggtgtggaaacctgccgtgcggtctggcggatctggcggaggctccacaagcggcccccagggcgccagaagacaggccttcctggccttcggcgacgtgaccgtggacttcacccagaaggagtggagactgctgagccccgcccagagagccctgtacagagaggtgaccctggagaactacagccacctggtgagcctgggcatcctgcacagcaagcccgagctgatcagaagactggagcagggcgaggtgccctggggcgaggagagaagaagaagacccggccccaccagccccaagaaaaagagaaaagtctaagctgccttctgcggggcttgccttctggccatgcccttcttctctcccttgcacctgtacctcttggtctttgaataaagcctgagtaggaaggctagcaaaaaaaaaaaaaaaaaaaaaaaaaaaaaaaaaaaaaaaaaaaaaaaaaaaaaaaaaaaaaaaaaaaaaaaaaaaaaaaa

SEQ ID NO: 3938 - RNA, 5419 nt, synthetic construct
  source 1..5419: mol_type = other RNA
aggaaataagagagaaaagaagagtaagaagaaatataagagccaccatggcccctaagaagaagcgtaaagtgagccgggtgaacggcagcggcagcggcggcggcatgaaccacgaccaggagttcgacccccctaaggtgtaccctcccgtccccgccgagaagagaaagcccatccgggtcctgagcctgttcgatggcatcgccaccggtctgctggtgctgaaggacctgggcatccaggtggataggtacattgcctccgaggtgtgcgaggactccatcaccgtgggaatggtgcgtcatcagggcaagatcatgtacgtgggcgacgtgcggagcgtgacacagaagcatatccaggagtggggccctttcgacctggtgatcggcggcagcccttgcaatgacctgagcatcgtgaacccagcccggaagggcctgtacgagggaaccggcagactgttcttcgagttttacagactgctgcacgacgcccggcctaaggaaggcgacgaccggcccttcttttggctgttcgagaatgtggtggccatgggagtcagcgacaagcgggatattagccggttcctggagagcaaccccgtgatgatcgatgccaaggaagtgagcgccgcccaccgggccagatacttctggggcaatctgcctggcatgaacagacccctggccagcaccgtgaacgacaagctggagctgcaggagtgcctggagcacggccggatcgccaagttcagcaaggtgagaaccatcaccacccgaagcaacagcatcaaacaaggcaaggaccagcactttcctgtgttcatgaacgagaaggaggacatcctgtggtgtaccgagatggagagagtgttcgggttcccagtccactacacagatgtcagcaacatgtctagactggccagacagagactgctgggaagaagctggtccgtccctgtgatcagacacctgttcgcccctctgaaggagtacttcgcctgcgtgagcagcggcaacagcaacgccaacagccggggccccagcttctctagcggcctggtgccactgtccctgagagggagccacatgggccccatggagatctacaaaaccgtgagcgcctggaagcggcagcctgtgcgcgtgctgagcctgtttcggaatatcgataaagtcctgaaaagcctgggattcctggagagcggctctggctccggcggtggcaccctgaagtacgtggaggatgtgacaaacgtggtcagacgggatgtggagaagtggggccccttcgatctggtgtacggcagcacccaacccctgggcagctcttgtgaccggtgccctggctggtacatgtttcagttccaccggatcctgcagtacgccctgccgagacaggagtcccagcggccattcttttggattttcatggacaacttgctgctgaccgaggatgaccaggaaactaccactcggttcctgcagaccgaagccgtgaccctgcaggacgtgagaggccgggactaccagaacgccatgcgggtgtggtccaacatccctggactgaaaagcaagcacgcacctctgacccctaaagaagaggagtacctgcaggcccaggtgcggagcagaagcaagctggacgcccctaaggtggatctgctggtgaagaattgcctcctgcccctgagagagtacttcaagtatttcagccagaatagtctgcccctgggcggcccaagcagcggcgcccctcctcccagcggcggcagcccagccggctccccaacctctaccgaggagggcacctctgagtccgccacccccgagagcggccctggcacctccaccgagcccagcgagggcagcgcacccggcagccctgccggcagccccacctccacagaggagggaaccagcaccgagcccagcgaaggcagcgccccaggcaccagcaccgagcctagtgagggcggctctggcggcggcagcgcccaggagattaaacggatcaacaagatcagaagaagacttgtgaaagacagcaacaccaagaaggccggcaagacaggccccatgaaaaccctgctggttagagtgatgacacccgatctgagagagcggctggaaaacctgagaaagaagcctgaaaatatcccccagcccatcagcaatacatctagagccaacctgaataagctgctgaccgattacaccgaaatgaagaaggcgatcctgcatgtgtactgggaagagttccagaaggaccctgtgggcctgatgagccgggtggcccagcctgccagcaagaagatcgatcagaacaagctgaaacctgagatggacgagaagggcaacctgaccaccgccggctttgcctgctctcagtgtggccagcccctgttcgtgtacaagctggagcaggtgtctgagaagggcaaggcttacaccaactacttcggacggtgcaatgtggccgagcacgaaaagctgatcctgctggcccagctgaagcccgagaaggatagcgacgaagccgtgacatatagcctgggaaagtttgggcagagggccctggatttctacagcattcatgtgaccaaggagtccacccaccccgtgaagcccctggcccagatcgccggaaacagatacgcctccggacctgtgggaaaggccctgagcgacgcatgtatgggcacaatcgcctccttcctgtctaagtaccaggacatcatcatcgaacaccagaaggtggtgaagggcaaccagaagagactggagagcctgcgggagctggccggcaaggaaaacctggaataccctagcgtgaccctgccacctcagcctcacaccaaggagggcgttgatgcctacaacgaagtgatcgcccgggtgcgaatgtgggtgaacctgaacctgtggcagaagctgaagctaagcagagatgatgccaagcctctgctgagactgaagggattcccttcctttcctctggtcgagagacaggccaacgaagtggactggtgggacatggtgtgtaacgtgaagaagctgatcaacgagaaaaaggaggatggcaaggtgttttggcagaatctggctggctacaagagacaggaagccctgagaccatacctgagcagcgaggaagatcggaagaagggaaagaaattcgctcggtaccagctgggcgacctgctgctgcacctggaaaagaagcacggcgaggactggggaaaggtgtacgacgaggcctgggagcggattgacaagaaagtggaaggcctgagcaagcacatcaagctggaagaggaacggagaagcgaggacgcccagagcaaggccgccctgaccgactggctgcgggctaaggccagcttcgtgatcgagggcctgaaggaggccgacaaggacgagttctgcagatgcgagctgaagctgcagaagtggtacggggacctgcggggaaagcccttcgccatcgaagccgagaacagcatcctggacatcagcggcttcagcaagcagtacaactgtgccttcatctggcagaaggacggcgtgaagaagctgaacctgtacctgatcatcaactacttcaagggcggcaagctgcggttcaagaagatcaaacctgaagccttcgaagccaacagattctacaccgtgatcaacaaaaagagcggcgagatcgtgcccatggaggtgaacttcaacttcgacgaccccaacctgatcatcctgcctctggcctttggcaagagacagggcagagaattcatctggaacgacctgctgtccctggaaaccggcagcctgaagctggccaacggaagagtgatcgagaagacactgtacaacagaagaacccggcaggatgagcctgccctgttcgtggccctgaccttcgagcggcgggaggtcctggactcctccaatatcaaaccaatgaacctgatcggcgtggcaagaggcgaaaacatccccgccgtgatcgccctgaccgaccccgagggctgcccactgagccggtttaaggatagcctgggaaacccaacccacatcctgagaatcggcgagagctataaggagaagcagcggaccatccaggccaagaaggaggtggagcagcggagagccggcggctacagccggaagtacgccagcaaagccaagaatctggcagacgatatggtgagaaacaccgctagagatctgctgtactacgccgtgacccaggatgccatgctgatcttcgccaacctgagccggggcttcggccggcagggcaagcggaccttcatggccgagagacagtacacacggatggaggactggctgaccgccaagctggcctacgagggcctgagcaagacctacctgtccaagacactggcccagtacacctccaagacatgcagcaactgtgggtttaccatcaccagcgccgactacgacagggtgctggagaagctgaagaagacagcaacaggctggatgaccacaattaacggcaaggagctgaaggtggagggccagattacctactacaacagatacaagagacagaacgtagtcaaggacctgtccgtcgagctggatagactgagcgaagaatctgtgaacaacgacatctcctcctggacaaagggcagaagcggagaagctctgagcctcctgaagaaaagattctcccatagacccgtgcaggagaagttcgtgtgcctgaactgcggcttcgagacacacgcagccgagcaagccgccctgaacatcgccagatcctggctgttcctgcggagccaggagtacaagaaataccagacaaacaagacaaccggcaacaccgataagagagccttcgtcgagacctggcagtccttttaccggaagaagcttaaggaggtgtggaaacctgccgtgcggtctggcggatctggcggaggctccacaagctgctaccaggacagcgtgaccttcgacgacgtggccgtggacttcacccaggaggagtggaccctgctggaccccacccagaggagcctgtacagcgacgtgatgctggagaactacaagaacctggccaccgtgggcggccagatcatcaagcccagcctgatcagctggctggagcaggaggagagcaggaccgtgaggggcggcgtgctgcagggcaggaagacccagtggaggggcaccaccagccccaagaaaaagagaaaagtctaagctgccttctgcggggcttgccttctggccatgcccttcttctctcccttgcacctgtacctcttggtctttgaataaagcctgagtaggaaggctagcaaaaaaaaaaaaaaaaaaaaaaaaaaaaaaaaaaaaaaaaaaaaaaaaaaaaaaaaaaaaaaaaaaaaaaaaaaaaaaaa

SEQ ID NO: 3939 - RNA, 5419 nt, synthetic construct
  source 1..5419: mol_type = other RNA
aggaaataagagagaaaagaagagtaagaagaaatataagagccaccatggcccctaagaagaagcgtaaagtgagccgggtgaacggcagcggcagcggcggcggcatgaaccacgaccaggagttcgacccccctaaggtgtaccctcccgtccccgccgagaagagaaagcccatccgggtcctgagcctgttcgatggcatcgccaccggtctgctggtgctgaaggacctgggcatccaggtggataggtacattgcctccgaggtgtgcgaggactccatcaccgtgggaatggtgcgtcatcagggcaagatcatgtacgtgggcgacgtgcggagcgtgacacagaagcatatccaggagtggggccctttcgacctggtgatcggcggcagcccttgcaatgacctgagcatcgtgaacccagcccggaagggcctgtacgagggaaccggcagactgttcttcgagttttacagactgctgcacgacgcccggcctaaggaaggcgacgaccggcccttcttttggctgttcgagaatgtggtggccatgggagtcagcgacaagcgggatattagccggttcctggagagcaaccccgtgatgatcgatgccaaggaagtgagcgccgcccaccgggccagatacttctggggcaatctgcctggcatgaacagacccctggccagcaccgtgaacgacaagctggagctgcaggagtgcctggagcacggccggatcgccaagttcagcaaggtgagaaccatcaccacccgaagcaacagcatcaaacaaggcaaggaccagcactttcctgtgttcatgaacgagaaggaggacatcctgtggtgtaccgagatggagagagtgttcgggttcccagtccactacacagatgtcagcaacatgtctagactggccagacagagactgctgggaagaagctggtccgtccctgtgatcagacacctgttcgcccctctgaaggagtacttcgcctgcgtgagcagcggcaacagcaacgccaacagccggggccccagcttctctagcggcctggtgccactgtccctgagagggagccacatgggccccatggagatctacaaaaccgtgagcgcctggaagcggcagcctgtgcgcgtgctgagcctgtttcggaatatcgataaagtcctgaaaagcctgggattcctggagagcggctctggctccggcggtggcaccctgaagtacgtggaggatgtgacaaacgtggtcagacgggatgtggagaagtggggccccttcgatctggtgtacggcagcacccaacccctgggcagctcttgtgaccggtgccctggctggtacatgtttcagttccaccggatcctgcagtacgccctgccgagacaggagtcccagcggccattcttttggattttcatggacaacttgctgctgaccgaggatgaccaggaaactaccactcggttcctgcagaccgaagccgtgaccctgcaggacgtgagaggccgggactaccagaacgccatgcgggtgtggtccaacatccctggactgaaaagcaagcacgcacctctgacccctaaagaagaggagtacctgcaggcccaggtgcggagcagaagcaagctggacgcccctaaggtggatctgctggtgaagaattgcctcctgcccctgagagagtacttcaagtatttcagccagaatagtctgcccctgggcggcccaagcagcggcgcccctcctcccagcggcggcagcccagccggctccccaacctctaccgaggagggcacctctgagtccgccacccccgagagcggccctggcacctccaccgagcccagcgagggcagcgcacccggcagccctgccggcagccccacctccacagaggagggaaccagcaccgagcccagcgaaggcagcgccccaggcaccagcaccgagcctagtgagggcggctctggcggcggcagcgcccaggagattaaacggatcaacaagatcagaagaagacttgtgaaagacagcaacaccaagaaggccggcaagacaggccccatgaaaaccctgctggttagagtgatgacacccgatctgagagagcggctggaaaacctgagaaagaagcctgaaaatatcccccagcccatcagcaatacatctagagccaacctgaataagctgctgaccgattacaccgaaatgaagaaggcgatcctgcatgtgtactgggaagagttccagaaggaccctgtgggcctgatgagccgggtggcccagcctgccagcaagaagatcgatcagaacaagctgaaacctgagatggacgagaagggcaacctgaccaccgccggctttgcctgctctcagtgtggccagcccctgttcgtgtacaagctggagcaggtgtctgagaagggcaaggcttacaccaactacttcggacggtgcaatgtggccgagcacgaaaagctgatcctgctggcccagctgaagcccgagaaggatagcgacgaagccgtgacatatagcctgggaaagtttgggcagagggccctggatttctacagcattcatgtgaccaaggagtccacccaccccgtgaagcccctggcccagatcgccggaaacagatacgcctccggacctgtgggaaaggccctgagcgacgcatgtatgggcacaatcgcctccttcctgtctaagtaccaggacatcatcatcgaacaccagaaggtggtgaagggcaaccagaagagactggagagcctgcgggagctggccggcaaggaaaacctggaataccctagcgtgaccctgccacctcagcctcacaccaaggagggcgttgatgcctacaacgaagtgatcgcccgggtgcgaatgtgggtgaacctgaacctgtggcagaagctgaagctaagcagagatgatgccaagcctctgctgagactgaagggattcccttcctttcctctggtcgagagacaggccaacgaagtggactggtgggacatggtgtgtaacgtgaagaagctgatcaacgagaaaaaggaggatggcaaggtgttttggcagaatctggctggctacaagagacaggaagccctgagaccatacctgagcagcgaggaagatcggaagaagggaaagaaattcgctcggtaccagctgggcgacctgctgctgcacctggaaaagaagcacggcgaggactggggaaaggtgtacgacgaggcctgggagcggattgacaagaaagtggaaggcctgagcaagcacatcaagctggaagaggaacggagaagcgaggacgcccagagcaaggccgccctgaccgactggctgcgggctaaggccagcttcgtgatcgagggcctgaaggaggccgacaaggacgagttctgcagatgcgagctgaagctgcagaagtggtacggggacctgcggggaaagcccttcgccatcgaagccgagaacagcatcctggacatcagcggcttcagcaagcagtacaactgtgccttcatctggcagaaggacggcgtgaagaagctgaacctgtacctgatcatcaactacttcaagggcggcaagctgcggttcaagaagatcaaacctgaagccttcgaagccaacagattctacaccgtgatcaacaaaaagagcggcgagatcgtgcccatggaggtgaacttcaacttcgacgaccccaacctgatcatcctgcctctggcctttggcaagagacagggcagagaattcatctggaacgacctgctgtccctggaaaccggcagcctgaagctggccaacggaagagtgatcgagaagacactgtacaacagaagaacccggcaggatgagcctgccctgttcgtggccctgaccttcgagcggcgggaggtcctggactcctccaatatcaaaccaatgaacctgatcggcgtggcaagaggcgaaaacatccccgccgtgatcgccctgaccgaccccgagggctgcccactgagccggtttaaggatagcctgggaaacccaacccacatcctgagaatcggcgagagctataaggagaagcagcggaccatccaggccaagaaggaggtggagcagcggagagccggcggctacagccggaagtacgccagcaaagccaagaatctggcagacgatatggtgagaaacaccgctagagatctgctgtactacgccgtgacccaggatgccatgctgatcttcgccaacctgagccggggcttcggccggcagggcaagcggaccttcatggccgagagacagtacacacggatggaggactggctgaccgccaagctggcctacgagggcctgagcaagacctacctgtccaagacactggcccagtacacctccaagacatgcagcaactgtgggtttaccatcaccagcgccgactacgacagggtgctggagaagctgaagaagacagcaacaggctggatgaccacaattaacggcaaggagctgaaggtggagggccagattacctactacaacagatacaagagacagaacgtagtcaaggacctgtccgtcgagctggatagactgagcgaagaatctgtgaacaacgacatctcctcctggacaaagggcagaagcggagaagctctgagcctcctgaagaaaagattctcccatagacccgtgcaggagaagttcgtgtgcctgaactgcggcttcgagacacacgcagccgagcaagccgccctgaacatcgccagatcctggctgttcctgcggagccaggagtacaagaaataccagacaaacaagacaaccggcaacaccgataagagagccttcgtcgagacctggcagtccttttaccggaagaagcttaaggaggtgtggaaacctgccgtgcggtctggcggatctggcggaggctccacaagcttccaggccagcgtgaccttcaaggacgtggccgtggacttcacctgggaggagtggaggctgctggaccccccccagaaggagctgttctgggaggtgatgctggagaactacaggaacctggtgtgcctgggcctggccgacagcaacaaggacgtgatgatcagcgagctggagagcggcgagccccactggatccccaccggcggcgtgctgaggagctgctggcccggctgggagagcaccagccccaagaaaaagagaaaagtctaagctgccttctgcggggcttgccttctggccatgcccttcttctctcccttgcacctgtacctcttggtctttgaataaagcctgagtaggaaggctagcaaaaaaaaaaaaaaaaaaaaaaaaaaaaaaaaaaaaaaaaaaaaaaaaaaaaaaaaaaaaaaaaaaaaaaaaaaaaaaaa

SEQ ID NO: 3940 - RNA, 5419 nt, synthetic construct
  source 1..5419: mol_type = other RNA
aggaaataagagagaaaagaagagtaagaagaaatataagagccaccatggcccctaagaagaagcgtaaagtgagccgggtgaacggcagcggcagcggcggcggcatgaaccacgaccaggagttcgacccccctaaggtgtaccctcccgtccccgccgagaagagaaagcccatccgggtcctgagcctgttcgatggcatcgccaccggtctgctggtgctgaaggacctgggcatccaggtggataggtacattgcctccgaggtgtgcgaggactccatcaccgtgggaatggtgcgtcatcagggcaagatcatgtacgtgggcgacgtgcggagcgtgacacagaagcatatccaggagtggggccctttcgacctggtgatcggcggcagcccttgcaatgacctgagcatcgtgaacccagcccggaagggcctgtacgagggaaccggcagactgttcttcgagttttacagactgctgcacgacgcccggcctaaggaaggcgacgaccggcccttcttttggctgttcgagaatgtggtggccatgggagtcagcgacaagcgggatattagccggttcctggagagcaaccccgtgatgatcgatgccaaggaagtgagcgccgcccaccgggccagatacttctggggcaatctgcctggcatgaacagacccctggccagcaccgtgaacgacaagctggagctgcaggagtgcctggagcacggccggatcgccaagttcagcaaggtgagaaccatcaccacccgaagcaacagcatcaaacaaggcaaggaccagcactttcctgtgttcatgaacgagaaggaggacatcctgtggtgtaccgagatggagagagtgttcgggttcccagtccactacacagatgtcagcaacatgtctagactggccagacagagactgctgggaagaagctggtccgtccctgtgatcagacacctgttcgcccctctgaaggagtacttcgcctgcgtgagcagcggcaacagcaacgccaacagccggggccccagcttctctagcggcctggtgccactgtccctgagagggagccacatgggccccatggagatctacaaaaccgtgagcgcctggaagcggcagcctgtgcgcgtgctgagcctgtttcggaatatcgataaagtcctgaaaagcctgggattcctggagagcggctctggctccggcggtggcaccctgaagtacgtggaggatgtgacaaacgtggtcagacgggatgtggagaagtggggccccttcgatctggtgtacggcagcacccaacccctgggcagctcttgtgaccggtgccctggctggtacatgtttcagttccaccggatcctgcagtacgccctgccgagacaggagtcccagcggccattcttttggattttcatggacaacttgctgctgaccgaggatgaccaggaaactaccactcggttcctgcagaccgaagccgtgaccctgcaggacgtgagaggccgggactaccagaacgccatgcgggtgtggtccaacatccctggactgaaaagcaagcacgcacctctgacccctaaagaagaggagtacctgcaggcccaggtgcggagcagaagcaagctggacgcccctaaggtggatctgctggtgaagaattgcctcctgcccctgagagagtacttcaagtatttcagccagaatagtctgcccctgggcggcccaagcagcggcgcccctcctcccagcggcggcagcccagccggctccccaacctctaccgaggagggcacctctgagtccgccacccccgagagcggccctggcacctccaccgagcccagcgagggcagcgcacccggcagccctgccggcagccccacctccacagaggagggaaccagcaccgagcccagcgaaggcagcgccccaggcaccagcaccgagcctagtgagggcggctctggcggcggcagcgcccaggagattaaacggatcaacaagatcagaagaagacttgtgaaagacagcaacaccaagaaggccggcaagacaggccccatgaaaaccctgctggttagagtgatgacacccgatctgagagagcggctggaaaacctgagaaagaagcctgaaaatatcccccagcccatcagcaatacatctagagccaacctgaataagctgctgaccgattacaccgaaatgaagaaggcgatcctgcatgtgtactgggaagagttccagaaggaccctgtgggcctgatgagccgggtggcccagcctgccagcaagaagatcgatcagaacaagctgaaacctgagatggacgagaagggcaacctgaccaccgccggctttgcctgctctcagtgtggccagcccctgttcgtgtacaagctggagcaggtgtctgagaagggcaaggcttacaccaactacttcggacggtgcaatgtggccgagcacgaaaagctgatcctgctggcccagctgaagcccgagaaggatagcgacgaagccgtgacatatagcctgggaaagtttgggcagagggccctggatttctacagcattcatgtgaccaaggagtccacccaccccgtgaagcccctggcccagatcgccggaaacagatacgcctccggacctgtgggaaaggccctgagcgacgcatgtatgggcacaatcgcctccttcctgtctaagtaccaggacatcatcatcgaacaccagaaggtggtgaagggcaaccagaagagactggagagcctgcgggagctggccggcaaggaaaacctggaataccctagcgtgaccctgccacctcagcctcacaccaaggagggcgttgatgcctacaacgaagtgatcgcccgggtgcgaatgtgggtgaacctgaacctgtggcagaagctgaagctaagcagagatgatgccaagcctctgctgagactgaagggattcccttcctttcctctggtcgagagacaggccaacgaagtggactggtgggacatggtgtgtaacgtgaagaagctgatcaacgagaaaaaggaggatggcaaggtgttttggcagaatctggctggctacaagagacaggaagccctgagaccatacctgagcagcgaggaagatcggaagaagggaaagaaattcgctcggtaccagctgggcgacctgctgctgcacctggaaaagaagcacggcgaggactggggaaaggtgtacgacgaggcctgggagcggattgacaagaaagtggaaggcctgagcaagcacatcaagctggaagaggaacggagaagcgaggacgcccagagcaaggccgccctgaccgactggctgcgggctaaggccagcttcgtgatcgagggcctgaaggaggccgacaaggacgagttctgcagatgcgagctgaagctgcagaagtggtacggggacctgcggggaaagcccttcgccatcgaagccgagaacagcatcctggacatcagcggcttcagcaagcagtacaactgtgccttcatctggcagaaggacggcgtgaagaagctgaacctgtacctgatcatcaactacttcaagggcggcaagctgcggttcaagaagatcaaacctgaagccttcgaagccaacagattctacaccgtgatcaacaaaaagagcggcgagatcgtgcccatggaggtgaacttcaacttcgacgaccccaacctgatcatcctgcctctggcctttggcaagagacagggcagagaattcatctggaacgacctgctgtccctggaaaccggcagcctgaagctggccaacggaagagtgatcgagaagacactgtacaacagaagaacccggcaggatgagcctgccctgttcgtggccctgaccttcgagcggcgggaggtcctggactcctccaatatcaaaccaatgaacctgatcggcgtggcaagaggcgaaaacatccccgccgtgatcgccctgaccgaccccgagggctgcccactgagccggtttaaggatagcctgggaaacccaacccacatcctgagaatcggcgagagctataaggagaagcagcggaccatccaggccaagaaggaggtggagcagcggagagccggcggctacagccggaagtacgccagcaaagccaagaatctggcagacgatatggtgagaaacaccgctagagatctgctgtactacgccgtgacccaggatgccatgctgatcttcgccaacctgagccggggcttcggccggcagggcaagcggaccttcatggccgagagacagtacacacggatggaggactggctgaccgccaagctggcctacgagggcctgagcaagacctacctgtccaagacactggcccagtacacctccaagacatgcagcaactgtgggtttaccatcaccagcgccgactacgacagggtgctggagaagctgaagaagacagcaacaggctggatgaccacaattaacggcaaggagctgaaggtggagggccagattacctactacaacagatacaagagacagaacgtagtcaaggacctgtccgtcgagctggatagactgagcgaagaatctgtgaacaacgacatctcctcctggacaaagggcagaagcggagaagctctgagcctcctgaagaaaagattctcccatagacccgtgcaggagaagttcgtgtgcctgaactgcggcttcgagacacacgcagccgagcaagccgccctgaacatcgccagatcctggctgttcctgcggagccaggagtacaagaaataccagacaaacaagacaaccggcaacaccgataagagagccttcgtcgagacctggcagtccttttaccggaagaagcttaaggaggtgtggaaacctgccgtgcggtctggcggatctggcggaggctccacaagcatgatcaactaccagacccccgtgagcttcaaggacgtggtggtgggcttcacccaggaggagtggcacaggctgaaccccacccagagggccctgtacagggacgtgatgctggagacctacagcaacctggtgagcgtgggctacgagggcaccaagcccgacgtgatcctgaggctggagcaggaggaggccccctggatcggcgaggccgcctgcctgggctgccactgctgggaggacaccagccccaagaaaaagagaaaagtctaagctgccttctgcggggcttgccttctggccatgcccttcttctctcccttgcacctgtacctcttggtctttgaataaagcctgagtaggaaggctagcaaaaaaaaaaaaaaaaaaaaaaaaaaaaaaaaaaaaaaaaaaaaaaaaaaaaaaaaaaaaaaaaaaaaaaaaaaaaaaaa

SEQ ID NO: 3941 - RNA, 5419 nt, synthetic construct
  source 1..5419: mol_type = other RNA
aggaaataagagagaaaagaagagtaagaagaaatataagagccaccatggcccctaagaagaagcgtaaagtgagccgggtgaacggcagcggcagcggcggcggcatgaaccacgaccaggagttcgacccccctaaggtgtaccctcccgtccccgccgagaagagaaagcccatccgggtcctgagcctgttcgatggcatcgccaccggtctgctggtgctgaaggacctgggcatccaggtggataggtacattgcctccgaggtgtgcgaggactccatcaccgtgggaatggtgcgtcatcagggcaagatcatgtacgtgggcgacgtgcggagcgtgacacagaagcatatccaggagtggggccctttcgacctggtgatcggcggcagcccttgcaatgacctgagcatcgtgaacccagcccggaagggcctgtacgagggaaccggcagactgttcttcgagttttacagactgctgcacgacgcccggcctaaggaaggcgacgaccggcccttcttttggctgttcgagaatgtggtggccatgggagtcagcgacaagcgggatattagccggttcctggagagcaaccccgtgatgatcgatgccaaggaagtgagcgccgcccaccgggccagatacttctggggcaatctgcctggcatgaacagacccctggccagcaccgtgaacgacaagctggagctgcaggagtgcctggagcacggccggatcgccaagttcagcaaggtgagaaccatcaccacccgaagcaacagcatcaaacaaggcaaggaccagcactttcctgtgttcatgaacgagaaggaggacatcctgtggtgtaccgagatggagagagtgttcgggttcccagtccactacacagatgtcagcaacatgtctagactggccagacagagactgctgggaagaagctggtccgtccctgtgatcagacacctgttcgcccctctgaaggagtacttcgcctgcgtgagcagcggcaacagcaacgccaacagccggggccccagcttctctagcggcctggtgccactgtccctgagagggagccacatgggccccatggagatctacaaaaccgtgagcgcctggaagcggcagcctgtgcgcgtgctgagcctgtttcggaatatcgataaagtcctgaaaagcctgggattcctggagagcggctctggctccggcggtggcaccctgaagtacgtggaggatgtgacaaacgtggtcagacgggatgtggagaagtggggccccttcgatctggtgtacggcagcacccaacccctgggcagctcttgtgaccggtgccctggctggtacatgtttcagttccaccggatcctgcagtacgccctgccgagacaggagtcccagcggccattcttttggattttcatggacaacttgctgctgaccgaggatgaccaggaaactaccactcggttcctgcagaccgaagccgtgaccctgcaggacgtgagaggccgggactaccagaacgccatgcgggtgtggtccaacatccctggactgaaaagcaagcacgcacctctgacccctaaagaagaggagtacctgcaggcccaggtgcggagcagaagcaagctggacgcccctaaggtggatctgctggtgaagaattgcctcctgcccctgagagagtacttcaagtatttcagccagaatagtctgcccctgggcggcccaagcagcggcgcccctcctcccagcggcggcagcccagccggctccccaacctctaccgaggagggcacctctgagtccgccacccccgagagcggccctggcacctccaccgagcccagcgagggcagcgcacccggcagccctgccggcagccccacctccacagaggagggaaccagcaccgagcccagcgaaggcagcgccccaggcaccagcaccgagcctagtgagggcggctctggcggcggcagcgcccaggagattaaacggatcaacaagatcagaagaagacttgtgaaagacagcaacaccaagaaggccggcaagacaggccccatgaaaaccctgctggttagagtgatgacacccgatctgagagagcggctggaaaacctgagaaagaagcctgaaaatatcccccagcccatcagcaatacatctagagccaacctgaataagctgctgaccgattacaccgaaatgaagaaggcgatcctgcatgtgtactgggaagagttccagaaggaccctgtgggcctgatgagccgggtggcccagcctgccagcaagaagatcgatcagaacaagctgaaacctgagatggacgagaagggcaacctgaccaccgccggctttgcctgctctcagtgtggccagcccctgttcgtgtacaagctggagcaggtgtctgagaagggcaaggcttacaccaactacttcggacggtgcaatgtggccgagcacgaaaagctgatcctgctggcccagctgaagcccgagaaggatagcgacgaagccgtgacatatagcctgggaaagtttgggcagagggccctggatttctacagcattcatgtgaccaaggagtccacccaccccgtgaagcccctggcccagatcgccggaaacagatacgcctccggacctgtgggaaaggccctgagcgacgcatgtatgggcacaatcgcctccttcctgtctaagtaccaggacatcatcatcgaacaccagaaggtggtgaagggcaaccagaagagactggagagcctgcgggagctggccggcaaggaaaacctggaataccctagcgtgaccctgccacctcagcctcacaccaaggagggcgttgatgcctacaacgaagtgatcgcccgggtgcgaatgtgggtgaacctgaacctgtggcagaagctgaagctaagcagagatgatgccaagcctctgctgagactgaagggattcccttcctttcctctggtcgagagacaggccaacgaagtggactggtgggacatggtgtgtaacgtgaagaagctgatcaacgagaaaaaggaggatggcaaggtgttttggcagaatctggctggctacaagagacaggaagccctgagaccatacctgagcagcgaggaagatcggaagaagggaaagaaattcgctcggtaccagctgggcgacctgctgctgcacctggaaaagaagcacggcgaggactggggaaaggtgtacgacgaggcctgggagcggattgacaagaaagtggaaggcctgagcaagcacatcaagctggaagaggaacggagaagcgaggacgcccagagcaaggccgccctgaccgactggctgcgggctaaggccagcttcgtgatcgagggcctgaaggaggccgacaaggacgagttctgcagatgcgagctgaagctgcagaagtggtacggggacctgcggggaaagcccttcgccatcgaagccgagaacagcatcctggacatcagcggcttcagcaagcagtacaactgtgccttcatctggcagaaggacggcgtgaagaagctgaacctgtacctgatcatcaactacttcaagggcggcaagctgcggttcaagaagatcaaacctgaagccttcgaagccaacagattctacaccgtgatcaacaaaaagagcggcgagatcgtgcccatggaggtgaacttcaacttcgacgaccccaacctgatcatcctgcctctggcctttggcaagagacagggcagagaattcatctggaacgacctgctgtccctggaaaccggcagcctgaagctggccaacggaagagtgatcgagaagacactgtacaacagaagaacccggcaggatgagcctgccctgttcgtggccctgaccttcgagcggcgggaggtcctggactcctccaatatcaaaccaatgaacctgatcggcgtggcaagaggcgaaaacatccccgccgtgatcgccctgaccgaccccgagggctgcccactgagccggtttaaggatagcctgggaaacccaacccacatcctgagaatcggcgagagctataaggagaagcagcggaccatccaggccaagaaggaggtggagcagcggagagccggcggctacagccggaagtacgccagcaaagccaagaatctggcagacgatatggtgagaaacaccgctagagatctgctgtactacgccgtgacccaggatgccatgctgatcttcgccaacctgagccggggcttcggccggcagggcaagcggaccttcatggccgagagacagtacacacggatggaggactggctgaccgccaagctggcctacgagggcctgagcaagacctacctgtccaagacactggcccagtacacctccaagacatgcagcaactgtgggtttaccatcaccagcgccgactacgacagggtgctggagaagctgaagaagacagcaacaggctggatgaccacaattaacggcaaggagctgaaggtggagggccagattacctactacaacagatacaagagacagaacgtagtcaaggacctgtccgtcgagctggatagactgagcgaagaatctgtgaacaacgacatctcctcctggacaaagggcagaagcggagaagctctgagcctcctgaagaaaagattctcccatagacccgtgcaggagaagttcgtgtgcctgaactgcggcttcgagacacacgcagccgagcaagccgccctgaacatcgccagatcctggctgttcctgcggagccaggagtacaagaaataccagacaaacaagacaaccggcaacaccgataagagagccttcgtcgagacctggcagtccttttaccggaagaagcttaaggaggtgtggaaacctgccgtgcggtctggcggatctggcggaggctccacaagcaccgagggcctggtgatgttcgaggacgtggccgtgtacttcagcagggaggagtggggcctgctgaacgtgacccagaagggcctgtaccaggacgtgatgctggagaacttcgccctggtgagcagcctgggcctggcccccctgaggagccccgtgttcagccagctggagaacgacgagcagctgtgggtgcccagctgggtggacgagacccccgtgagcagggccgaggccaggaggaccagccccaagaaaaagagaaaagtctaagctgccttctgcggggcttgccttctggccatgcccttcttctctcccttgcacctgtacctcttggtctttgaataaagcctgagtaggaaggctagcaaaaaaaaaaaaaaaaaaaaaaaaaaaaaaaaaaaaaaaaaaaaaaaaaaaaaaaaaaaaaaaaaaaaaaaaaaaaaaaa

SEQ ID NO: 3942 - RNA, 5419 nt, synthetic construct
  source 1..5419: mol_type = other RNA
aggaaataagagagaaaagaagagtaagaagaaatataagagccaccatggcccctaagaagaagcgtaaagtgagccgggtgaacggcagcggcagcggcggcggcatgaaccacgaccaggagttcgacccccctaaggtgtaccctcccgtccccgccgagaagagaaagcccatccgggtcctgagcctgttcgatggcatcgccaccggtctgctggtgctgaaggacctgggcatccaggtggataggtacattgcctccgaggtgtgcgaggactccatcaccgtgggaatggtgcgtcatcagggcaagatcatgtacgtgggcgacgtgcggagcgtgacacagaagcatatccaggagtggggccctttcgacctggtgatcggcggcagcccttgcaatgacctgagcatcgtgaacccagcccggaagggcctgtacgagggaaccggcagactgttcttcgagttttacagactgctgcacgacgcccggcctaaggaaggcgacgaccggcccttcttttggctgttcgagaatgtggtggccatgggagtcagcgacaagcgggatattagccggttcctggagagcaaccccgtgatgatcgatgccaaggaagtgagcgccgcccaccgggccagatacttctggggcaatctgcctggcatgaacagacccctggccagcaccgtgaacgacaagctggagctgcaggagtgcctggagcacggccggatcgccaagttcagcaaggtgagaaccatcaccacccgaagcaacagcatcaaacaaggcaaggaccagcactttcctgtgttcatgaacgagaaggaggacatcctgtggtgtaccgagatggagagagtgttcgggttcccagtccactacacagatgtcagcaacatgtctagactggccagacagagactgctgggaagaagctggtccgtccctgtgatcagacacctgttcgcccctctgaaggagtacttcgcctgcgtgagcagcggcaacagcaacgccaacagccggggccccagcttctctagcggcctggtgccactgtccctgagagggagccacatgggccccatggagatctacaaaaccgtgagcgcctggaagcggcagcctgtgcgcgtgctgagcctgtttcggaatatcgataaagtcctgaaaagcctgggattcctggagagcggctctggctccggcggtggcaccctgaagtacgtggaggatgtgacaaacgtggtcagacgggatgtggagaagtggggccccttcgatctggtgtacggcagcacccaacccctgggcagctcttgtgaccggtgccctggctggtacatgtttcagttccaccggatcctgcagtacgccctgccgagacaggagtcccagcggccattcttttggattttcatggacaacttgctgctgaccgaggatgaccaggaaactaccactcggttcctgcagaccgaagccgtgaccctgcaggacgtgagaggccgggactaccagaacgccatgcgggtgtggtccaacatccctggactgaaaagcaagcacgcacctctgacccctaaagaagaggagtacctgcaggcccaggtgcggagcagaagcaagctggacgcccctaaggtggatctgctggtgaagaattgcctcctgcccctgagagagtacttcaagtatttcagccagaatagtctgcccctgggcggcccaagcagcggcgcccctcctcccagcggcggcagcccagccggctccccaacctctaccgaggagggcacctctgagtccgccacccccgagagcggccctggcacctccaccgagcccagcgagggcagcgcacccggcagccctgccggcagccccacctccacagaggagggaaccagcaccgagcccagcgaaggcagcgccccaggcaccagcaccgagcctagtgagggcggctctggcggcggcagcgcccaggagattaaacggatcaacaagatcagaagaagacttgtgaaagacagcaacaccaagaaggccggcaagacaggccccatgaaaaccctgctggttagagtgatgacacccgatctgagagagcggctggaaaacctgagaaagaagcctgaaaatatcccccagcccatcagcaatacatctagagccaacctgaataagctgctgaccgattacaccgaaatgaagaaggcgatcctgcatgtgtactgggaagagttccagaaggaccctgtgggcctgatgagccgggtggcccagcctgccagcaagaagatcgatcagaacaagctgaaacctgagatggacgagaagggcaacctgaccaccgccggctttgcctgctctcagtgtggccagcccctgttcgtgtacaagctggagcaggtgtctgagaagggcaaggcttacaccaactacttcggacggtgcaatgtggccgagcacgaaaagctgatcctgctggcccagctgaagcccgagaaggatagcgacgaagccgtgacatatagcctgggaaagtttgggcagagggccctggatttctacagcattcatgtgaccaaggagtccacccaccccgtgaagcccctggcccagatcgccggaaacagatacgcctccggacctgtgggaaaggccctgagcgacgcatgtatgggcacaatcgcctccttcctgtctaagtaccaggacatcatcatcgaacaccagaaggtggtgaagggcaaccagaagagactggagagcctgcgggagctggccggcaaggaaaacctggaataccctagcgtgaccctgccacctcagcctcacaccaaggagggcgttgatgcctacaacgaagtgatcgcccgggtgcgaatgtgggtgaacctgaacctgtggcagaagctgaagctaagcagagatgatgccaagcctctgctgagactgaagggattcccttcctttcctctggtcgagagacaggccaacgaagtggactggtgggacatggtgtgtaacgtgaagaagctgatcaacgagaaaaaggaggatggcaaggtgttttggcagaatctggctggctacaagagacaggaagccctgagaccatacctgagcagcgaggaagatcggaagaagggaaagaaattcgctcggtaccagctgggcgacctgctgctgcacctggaaaagaagcacggcgaggactggggaaaggtgtacgacgaggcctgggagcggattgacaagaaagtggaaggcctgagcaagcacatcaagctggaagaggaacggagaagcgaggacgcccagagcaaggccgccctgaccgactggctgcgggctaaggccagcttcgtgatcgagggcctgaaggaggccgacaaggacgagttctgcagatgcgagctgaagctgcagaagtggtacggggacctgcggggaaagcccttcgccatcgaagccgagaacagcatcctggacatcagcggcttcagcaagcagtacaactgtgccttcatctggcagaaggacggcgtgaagaagctgaacctgtacctgatcatcaactacttcaagggcggcaagctgcggttcaagaagatcaaacctgaagccttcgaagccaacagattctacaccgtgatcaacaaaaagagcggcgagatcgtgcccatggaggtgaacttcaacttcgacgaccccaacctgatcatcctgcctctggcctttggcaagagacagggcagagaattcatctggaacgacctgctgtccctggaaaccggcagcctgaagctggccaacggaagagtgatcgagaagacactgtacaacagaagaacccggcaggatgagcctgccctgttcgtggccctgaccttcgagcggcgggaggtcctggactcctccaatatcaaaccaatgaacctgatcggcgtggcaagaggcgaaaacatccccgccgtgatcgccctgaccgaccccgagggctgcccactgagccggtttaaggatagcctgggaaacccaacccacatcctgagaatcggcgagagctataaggagaagcagcggaccatccaggccaagaaggaggtggagcagcggagagccggcggctacagccggaagtacgccagcaaagccaagaatctggcagacgatatggtgagaaacaccgctagagatctgctgtactacgccgtgacccaggatgccatgctgatcttcgccaacctgagccggggcttcggccggcagggcaagcggaccttcatggccgagagacagtacacacggatggaggactggctgaccgccaagctggcctacgagggcctgagcaagacctacctgtccaagacactggcccagtacacctccaagacatgcagcaactgtgggtttaccatcaccagcgccgactacgacagggtgctggagaagctgaagaagacagcaacaggctggatgaccacaattaacggcaaggagctgaaggtggagggccagattacctactacaacagatacaagagacagaacgtagtcaaggacctgtccgtcgagctggatagactgagcgaagaatctgtgaacaacgacatctcctcctggacaaagggcagaagcggagaagctctgagcctcctgaagaaaagattctcccatagacccgtgcaggagaagttcgtgtgcctgaactgcggcttcgagacacacgcagccgagcaagccgccctgaacatcgccagatcctggctgttcctgcggagccaggagtacaagaaataccagacaaacaagacaaccggcaacaccgataagagagccttcgtcgagacctggcagtccttttaccggaagaagcttaaggaggtgtggaaacctgccgtgcggtctggcggatctggcggaggctccacaagcttccaggagagcgtgaccttcaaggacgtgagcgtggacttcacccagggcgagtggggccagctggaccccgcccagaagaacctgtacagggacgtgatgctggagaactacaggaccctggtgagcctgggcctgcaggtgttcaagcccgaggtgatctacaggctggagaggggcgaggccccctggatcctggagagggagatcagcaggggcccctgccccgactggcccgagaccaccagccccaagaaaaagagaaaagtctaagctgccttctgcggggcttgccttctggccatgcccttcttctctcccttgcacctgtacctcttggtctttgaataaagcctgagtaggaaggctagcaaaaaaaaaaaaaaaaaaaaaaaaaaaaaaaaaaaaaaaaaaaaaaaaaaaaaaaaaaaaaaaaaaaaaaaaaaaaaaaa

SEQ ID NO: 3943 - RNA, 5419 nt, synthetic construct
  source 1..5419: mol_type = other RNA
aggaaataagagagaaaagaagagtaagaagaaatataagagccaccatggcccctaagaagaagcgtaaagtgagccgggtgaacggcagcggcagcggcggcggcatgaaccacgaccaggagttcgacccccctaaggtgtaccctcccgtccccgccgagaagagaaagcccatccgggtcctgagcctgttcgatggcatcgccaccggtctgctggtgctgaaggacctgggcatccaggtggataggtacattgcctccgaggtgtgcgaggactccatcaccgtgggaatggtgcgtcatcagggcaagatcatgtacgtgggcgacgtgcggagcgtgacacagaagcatatccaggagtggggccctttcgacctggtgatcggcggcagcccttgcaatgacctgagcatcgtgaacccagcccggaagggcctgtacgagggaaccggcagactgttcttcgagttttacagactgctgcacgacgcccggcctaaggaaggcgacgaccggcccttcttttggctgttcgagaatgtggtggccatgggagtcagcgacaagcgggatattagccggttcctggagagcaaccccgtgatgatcgatgccaaggaagtgagcgccgcccaccgggccagatacttctggggcaatctgcctggcatgaacagacccctggccagcaccgtgaacgacaagctggagctgcaggagtgcctggagcacggccggatcgccaagttcagcaaggtgagaaccatcaccacccgaagcaacagcatcaaacaaggcaaggaccagcactttcctgtgttcatgaacgagaaggaggacatcctgtggtgtaccgagatggagagagtgttcgggttcccagtccactacacagatgtcagcaacatgtctagactggccagacagagactgctgggaagaagctggtccgtccctgtgatcagacacctgttcgcccctctgaaggagtacttcgcctgcgtgagcagcggcaacagcaacgccaacagccggggccccagcttctctagcggcctggtgccactgtccctgagagggagccacatgggccccatggagatctacaaaaccgtgagcgcctggaagcggcagcctgtgcgcgtgctgagcctgtttcggaatatcgataaagtcctgaaaagcctgggattcctggagagcggctctggctccggcggtggcaccctgaagtacgtggaggatgtgacaaacgtggtcagacgggatgtggagaagtggggccccttcgatctggtgtacggcagcacccaacccctgggcagctcttgtgaccggtgccctggctggtacatgtttcagttccaccggatcctgcagtacgccctgccgagacaggagtcccagcggccattcttttggattttcatggacaacttgctgctgaccgaggatgaccaggaaactaccactcggttcctgcagaccgaagccgtgaccctgcaggacgtgagaggccgggactaccagaacgccatgcgggtgtggtccaacatccctggactgaaaagcaagcacgcacctctgacccctaaagaagaggagtacctgcaggcccaggtgcggagcagaagcaagctggacgcccctaaggtggatctgctggtgaagaattgcctcctgcccctgagagagtacttcaagtatttcagccagaatagtctgcccctgggcggcccaagcagcggcgcccctcctcccagcggcggcagcccagccggctccccaacctctaccgaggagggcacctctgagtccgccacccccgagagcggccctggcacctccaccgagcccagcgagggcagcgcacccggcagccctgccggcagccccacctccacagaggagggaaccagcaccgagcccagcgaaggcagcgccccaggcaccagcaccgagcctagtgagggcggctctggcggcggcagcgcccaggagattaaacggatcaacaagatcagaagaagacttgtgaaagacagcaacaccaagaaggccggcaagacaggccccatgaaaaccctgctggttagagtgatgacacccgatctgagagagcggctggaaaacctgagaaagaagcctgaaaatatcccccagcccatcagcaatacatctagagccaacctgaataagctgctgaccgattacaccgaaatgaagaaggcgatcctgcatgtgtactgggaagagttccagaaggaccctgtgggcctgatgagccgggtggcccagcctgccagcaagaagatcgatcagaacaagctgaaacctgagatggacgagaagggcaacctgaccaccgccggctttgcctgctctcagtgtggccagcccctgttcgtgtacaagctggagcaggtgtctgagaagggcaaggcttacaccaactacttcggacggtgcaatgtggccgagcacgaaaagctgatcctgctggcccagctgaagcccgagaaggatagcgacgaagccgtgacatatagcctgggaaagtttgggcagagggccctggatttctacagcattcatgtgaccaaggagtccacccaccccgtgaagcccctggcccagatcgccggaaacagatacgcctccggacctgtgggaaaggccctgagcgacgcatgtatgggcacaatcgcctccttcctgtctaagtaccaggacatcatcatcgaacaccagaaggtggtgaagggcaaccagaagagactggagagcctgcgggagctggccggcaaggaaaacctggaataccctagcgtgaccctgccacctcagcctcacaccaaggagggcgttgatgcctacaacgaagtgatcgcccgggtgcgaatgtgggtgaacctgaacctgtggcagaagctgaagctaagcagagatgatgccaagcctctgctgagactgaagggattcccttcctttcctctggtcgagagacaggccaacgaagtggactggtgggacatggtgtgtaacgtgaagaagctgatcaacgagaaaaaggaggatggcaaggtgttttggcagaatctggctggctacaagagacaggaagccctgagaccatacctgagcagcgaggaagatcggaagaagggaaagaaattcgctcggtaccagctgggcgacctgctgctgcacctggaaaagaagcacggcgaggactggggaaaggtgtacgacgaggcctgggagcggattgacaagaaagtggaaggcctgagcaagcacatcaagctggaagaggaacggagaagcgaggacgcccagagcaaggccgccctgaccgactggctgcgggctaaggccagcttcgtgatcgagggcctgaaggaggccgacaaggacgagttctgcagatgcgagctgaagctgcagaagtggtacggggacctgcggggaaagcccttcgccatcgaagccgagaacagcatcctggacatcagcggcttcagcaagcagtacaactgtgccttcatctggcagaaggacggcgtgaagaagctgaacctgtacctgatcatcaactacttcaagggcggcaagctgcggttcaagaagatcaaacctgaagccttcgaagccaacagattctacaccgtgatcaacaaaaagagcggcgagatcgtgcccatggaggtgaacttcaacttcgacgaccccaacctgatcatcctgcctctggcctttggcaagagacagggcagagaattcatctggaacgacctgctgtccctggaaaccggcagcctgaagctggccaacggaagagtgatcgagaagacactgtacaacagaagaacccggcaggatgagcctgccctgttcgtggccctgaccttcgagcggcgggaggtcctggactcctccaatatcaaaccaatgaacctgatcggcgtggcaagaggcgaaaacatccccgccgtgatcgccctgaccgaccccgagggctgcccactgagccggtttaaggatagcctgggaaacccaacccacatcctgagaatcggcgagagctataaggagaagcagcggaccatccaggccaagaaggaggtggagcagcggagagccggcggctacagccggaagtacgccagcaaagccaagaatctggcagacgatatggtgagaaacaccgctagagatctgctgtactacgccgtgacccaggatgccatgctgatcttcgccaacctgagccggggcttcggccggcagggcaagcggaccttcatggccgagagacagtacacacggatggaggactggctgaccgccaagctggcctacgagggcctgagcaagacctacctgtccaagacactggcccagtacacctccaagacatgcagcaactgtgggtttaccatcaccagcgccgactacgacagggtgctggagaagctgaagaagacagcaacaggctggatgaccacaattaacggcaaggagctgaaggtggagggccagattacctactacaacagatacaagagacagaacgtagtcaaggacctgtccgtcgagctggatagactgagcgaagaatctgtgaacaacgacatctcctcctggacaaagggcagaagcggagaagctctgagcctcctgaagaaaagattctcccatagacccgtgcaggagaagttcgtgtgcctgaactgcggcttcgagacacacgcagccgagcaagccgccctgaacatcgccagatcctggctgttcctgcggagccaggagtacaagaaataccagacaaacaagacaaccggcaacaccgataagagagccttcgtcgagacctggcagtccttttaccggaagaagcttaaggaggtgtggaaacctgccgtgcggtctggcggatctggcggaggctccacaagcatctgggacctggtgatgttcagggacgtggccgtggacttcagccaggaggagtgggagtgcctgaacagctaccagaggaacctgtacagggacgtgatcctggagaactacagcaacctggtgagcctgggctgcagcatcagcaagcccgacgtgatcaccctgctggagcagggcaaggagccctggatggtgatgagggacgagaagaggaggtggaccctggacctggagagcaggaccagccccaagaaaaagagaaaagtctaagctgccttctgcggggcttgccttctggccatgcccttcttctctcccttgcacctgtacctcttggtctttgaataaagcctgagtaggaaggctagcaaaaaaaaaaaaaaaaaaaaaaaaaaaaaaaaaaaaaaaaaaaaaaaaaaaaaaaaaaaaaaaaaaaaaaaaaaaaaaaa

SEQ ID NO: 3944 - RNA, 5419 nt, synthetic construct
  source 1..5419: mol_type = other RNA
aggaaataagagagaaaagaagagtaagaagaaatataagagccaccatggcccctaagaagaagcgtaaagtgagccgggtgaacggcagcggcagcggcggcggcatgaaccacgaccaggagttcgacccccctaaggtgtaccctcccgtccccgccgagaagagaaagcccatccgggtcctgagcctgttcgatggcatcgccaccggtctgctggtgctgaaggacctgggcatccaggtggataggtacattgcctccgaggtgtgcgaggactccatcaccgtgggaatggtgcgtcatcagggcaagatcatgtacgtgggcgacgtgcggagcgtgacacagaagcatatccaggagtggggccctttcgacctggtgatcggcggcagcccttgcaatgacctgagcatcgtgaacccagcccggaagggcctgtacgagggaaccggcagactgttcttcgagttttacagactgctgcacgacgcccggcctaaggaaggcgacgaccggcccttcttttggctgttcgagaatgtggtggccatgggagtcagcgacaagcgggatattagccggttcctggagagcaaccccgtgatgatcgatgccaaggaagtgagcgccgcccaccgggccagatacttctggggcaatctgcctggcatgaacagacccctggccagcaccgtgaacgacaagctggagctgcaggagtgcctggagcacggccggatcgccaagttcagcaaggtgagaaccatcaccacccgaagcaacagcatcaaacaaggcaaggaccagcactttcctgtgttcatgaacgagaaggaggacatcctgtggtgtaccgagatggagagagtgttcgggttcccagtccactacacagatgtcagcaacatgtctagactggccagacagagactgctgggaagaagctggtccgtccctgtgatcagacacctgttcgcccctctgaaggagtacttcgcctgcgtgagcagcggcaacagcaacgccaacagccggggccccagcttctctagcggcctggtgccactgtccctgagagggagccacatgggccccatggagatctacaaaaccgtgagcgcctggaagcggcagcctgtgcgcgtgctgagcctgtttcggaatatcgataaagtcctgaaaagcctgggattcctggagagcggctctggctccggcggtggcaccctgaagtacgtggaggatgtgacaaacgtggtcagacgggatgtggagaagtggggccccttcgatctggtgtacggcagcacccaacccctgggcagctcttgtgaccggtgccctggctggtacatgtttcagttccaccggatcctgcagtacgccctgccgagacaggagtcccagcggccattcttttggattttcatggacaacttgctgctgaccgaggatgaccaggaaactaccactcggttcctgcagaccgaagccgtgaccctgcaggacgtgagaggccgggactaccagaacgccatgcgggtgtggtccaacatccctggactgaaaagcaagcacgcacctctgacccctaaagaagaggagtacctgcaggcccaggtgcggagcagaagcaagctggacgcccctaaggtggatctgctggtgaagaattgcctcctgcccctgagagagtacttcaagtatttcagccagaatagtctgcccctgggcggcccaagcagcggcgcccctcctcccagcggcggcagcccagccggctccccaacctctaccgaggagggcacctctgagtccgccacccccgagagcggccctggcacctccaccgagcccagcgagggcagcgcacccggcagccctgccggcagccccacctccacagaggagggaaccagcaccgagcccagcgaaggcagcgccccaggcaccagcaccgagcctagtgagggcggctctggcggcggcagcgcccaggagattaaacggatcaacaagatcagaagaagacttgtgaaagacagcaacaccaagaaggccggcaagacaggccccatgaaaaccctgctggttagagtgatgacacccgatctgagagagcggctggaaaacctgagaaagaagcctgaaaatatcccccagcccatcagcaatacatctagagccaacctgaataagctgctgaccgattacaccgaaatgaagaaggcgatcctgcatgtgtactgggaagagttccagaaggaccctgtgggcctgatgagccgggtggcccagcctgccagcaagaagatcgatcagaacaagctgaaacctgagatggacgagaagggcaacctgaccaccgccggctttgcctgctctcagtgtggccagcccctgttcgtgtacaagctggagcaggtgtctgagaagggcaaggcttacaccaactacttcggacggtgcaatgtggccgagcacgaaaagctgatcctgctggcccagctgaagcccgagaaggatagcgacgaagccgtgacatatagcctgggaaagtttgggcagagggccctggatttctacagcattcatgtgaccaaggagtccacccaccccgtgaagcccctggcccagatcgccggaaacagatacgcctccggacctgtgggaaaggccctgagcgacgcatgtatgggcacaatcgcctccttcctgtctaagtaccaggacatcatcatcgaacaccagaaggtggtgaagggcaaccagaagagactggagagcctgcgggagctggccggcaaggaaaacctggaataccctagcgtgaccctgccacctcagcctcacaccaaggagggcgttgatgcctacaacgaagtgatcgcccgggtgcgaatgtgggtgaacctgaacctgtggcagaagctgaagctaagcagagatgatgccaagcctctgctgagactgaagggattcccttcctttcctctggtcgagagacaggccaacgaagtggactggtgggacatggtgtgtaacgtgaagaagctgatcaacgagaaaaaggaggatggcaaggtgttttggcagaatctggctggctacaagagacaggaagccctgagaccatacctgagcagcgaggaagatcggaagaagggaaagaaattcgctcggtaccagctgggcgacctgctgctgcacctggaaaagaagcacggcgaggactggggaaaggtgtacgacgaggcctgggagcggattgacaagaaagtggaaggcctgagcaagcacatcaagctggaagaggaacggagaagcgaggacgcccagagcaaggccgccctgaccgactggctgcgggctaaggccagcttcgtgatcgagggcctgaaggaggccgacaaggacgagttctgcagatgcgagctgaagctgcagaagtggtacggggacctgcggggaaagcccttcgccatcgaagccgagaacagcatcctggacatcagcggcttcagcaagcagtacaactgtgccttcatctggcagaaggacggcgtgaagaagctgaacctgtacctgatcatcaactacttcaagggcggcaagctgcggttcaagaagatcaaacctgaagccttcgaagccaacagattctacaccgtgatcaacaaaaagagcggcgagatcgtgcccatggaggtgaacttcaacttcgacgaccccaacctgatcatcctgcctctggcctttggcaagagacagggcagagaattcatctggaacgacctgctgtccctggaaaccggcagcctgaagctggccaacggaagagtgatcgagaagacactgtacaacagaagaacccggcaggatgagcctgccctgttcgtggccctgaccttcgagcggcgggaggtcctggactcctccaatatcaaaccaatgaacctgatcggcgtggcaagaggcgaaaacatccccgccgtgatcgccctgaccgaccccgagggctgcccactgagccggtttaaggatagcctgggaaacccaacccacatcctgagaatcggcgagagctataaggagaagcagcggaccatccaggccaagaaggaggtggagcagcggagagccggcggctacagccggaagtacgccagcaaagccaagaatctggcagacgatatggtgagaaacaccgctagagatctgctgtactacgccgtgacccaggatgccatgctgatcttcgccaacctgagccggggcttcggccggcagggcaagcggaccttcatggccgagagacagtacacacggatggaggactggctgaccgccaagctggcctacgagggcctgagcaagacctacctgtccaagacactggcccagtacacctccaagacatgcagcaactgtgggtttaccatcaccagcgccgactacgacagggtgctggagaagctgaagaagacagcaacaggctggatgaccacaattaacggcaaggagctgaaggtggagggccagattacctactacaacagatacaagagacagaacgtagtcaaggacctgtccgtcgagctggatagactgagcgaagaatctgtgaacaacgacatctcctcctggacaaagggcagaagcggagaagctctgagcctcctgaagaaaagattctcccatagacccgtgcaggagaagttcgtgtgcctgaactgcggcttcgagacacacgcagccgagcaagccgccctgaacatcgccagatcctggctgttcctgcggagccaggagtacaagaaataccagacaaacaagacaaccggcaacaccgataagagagccttcgtcgagacctggcagtccttttaccggaagaagcttaaggaggtgtggaaacctgccgtgcggtctggcggatctggcggaggctccacaagcaggcccagggccgtgaagttcggcgacgtggccctgtacttcagcagggaggagtggggctgcctgaggcccgcccagagggccctgtacagggacgtgatgcaggagacctacggccacctgggcgccctgggctgcgccggccccaagcccgccctgatcagctggctggagaggaacaccgacgactgggagcccgccgccctggacccccagcagtgccccaagggcgtggccgtgcagaccagccccaagaaaaagagaaaagtctaagctgccttctgcggggcttgccttctggccatgcccttcttctctcccttgcacctgtacctcttggtctttgaataaagcctgagtaggaaggctagcaaaaaaaaaaaaaaaaaaaaaaaaaaaaaaaaaaaaaaaaaaaaaaaaaaaaaaaaaaaaaaaaaaaaaaaaaaaaaaaa

SEQ ID NO: 3945 - RNA, 5419 nt, synthetic construct
  source 1..5419: mol_type = other RNA
aggaaataagagagaaaagaagagtaagaagaaatataagagccaccatggcccctaagaagaagcgtaaagtgagccgggtgaacggcagcggcagcggcggcggcatgaaccacgaccaggagttcgacccccctaaggtgtaccctcccgtccccgccgagaagagaaagcccatccgggtcctgagcctgttcgatggcatcgccaccggtctgctggtgctgaaggacctgggcatccaggtggataggtacattgcctccgaggtgtgcgaggactccatcaccgtgggaatggtgcgtcatcagggcaagatcatgtacgtgggcgacgtgcggagcgtgacacagaagcatatccaggagtggggccctttcgacctggtgatcggcggcagcccttgcaatgacctgagcatcgtgaacccagcccggaagggcctgtacgagggaaccggcagactgttcttcgagttttacagactgctgcacgacgcccggcctaaggaaggcgacgaccggcccttcttttggctgttcgagaatgtggtggccatgggagtcagcgacaagcgggatattagccggttcctggagagcaaccccgtgatgatcgatgccaaggaagtgagcgccgcccaccgggccagatacttctggggcaatctgcctggcatgaacagacccctggccagcaccgtgaacgacaagctggagctgcaggagtgcctggagcacggccggatcgccaagttcagcaaggtgagaaccatcaccacccgaagcaacagcatcaaacaaggcaaggaccagcactttcctgtgttcatgaacgagaaggaggacatcctgtggtgtaccgagatggagagagtgttcgggttcccagtccactacacagatgtcagcaacatgtctagactggccagacagagactgctgggaagaagctggtccgtccctgtgatcagacacctgttcgcccctctgaaggagtacttcgcctgcgtgagcagcggcaacagcaacgccaacagccggggccccagcttctctagcggcctggtgccactgtccctgagagggagccacatgggccccatggagatctacaaaaccgtgagcgcctggaagcggcagcctgtgcgcgtgctgagcctgtttcggaatatcgataaagtcctgaaaagcctgggattcctggagagcggctctggctccggcggtggcaccctgaagtacgtggaggatgtgacaaacgtggtcagacgggatgtggagaagtggggccccttcgatctggtgtacggcagcacccaacccctgggcagctcttgtgaccggtgccctggctggtacatgtttcagttccaccggatcctgcagtacgccctgccgagacaggagtcccagcggccattcttttggattttcatggacaacttgctgctgaccgaggatgaccaggaaactaccactcggttcctgcagaccgaagccgtgaccctgcaggacgtgagaggccgggactaccagaacgccatgcgggtgtggtccaacatccctggactgaaaagcaagcacgcacctctgacccctaaagaagaggagtacctgcaggcccaggtgcggagcagaagcaagctggacgcccctaaggtggatctgctggtgaagaattgcctcctgcccctgagagagtacttcaagtatttcagccagaatagtctgcccctgggcggcccaagcagcggcgcccctcctcccagcggcggcagcccagccggctccccaacctctaccgaggagggcacctctgagtccgccacccccgagagcggccctggcacctccaccgagcccagcgagggcagcgcacccggcagccctgccggcagccccacctccacagaggagggaaccagcaccgagcccagcgaaggcagcgccccaggcaccagcaccgagcctagtgagggcggctctggcggcggcagcgcccaggagattaaacggatcaacaagatcagaagaagacttgtgaaagacagcaacaccaagaaggccggcaagacaggccccatgaaaaccctgctggttagagtgatgacacccgatctgagagagcggctggaaaacctgagaaagaagcctgaaaatatcccccagcccatcagcaatacatctagagccaacctgaataagctgctgaccgattacaccgaaatgaagaaggcgatcctgcatgtgtactgggaagagttccagaaggaccctgtgggcctgatgagccgggtggcccagcctgccagcaagaagatcgatcagaacaagctgaaacctgagatggacgagaagggcaacctgaccaccgccggctttgcctgctctcagtgtggccagcccctgttcgtgtacaagctggagcaggtgtctgagaagggcaaggcttacaccaactacttcggacggtgcaatgtggccgagcacgaaaagctgatcctgctggcccagctgaagcccgagaaggatagcgacgaagccgtgacatatagcctgggaaagtttgggcagagggccctggatttctacagcattcatgtgaccaaggagtccacccaccccgtgaagcccctggcccagatcgccggaaacagatacgcctccggacctgtgggaaaggccctgagcgacgcatgtatgggcacaatcgcctccttcctgtctaagtaccaggacatcatcatcgaacaccagaaggtggtgaagggcaaccagaagagactggagagcctgcgggagctggccggcaaggaaaacctggaataccctagcgtgaccctgccacctcagcctcacaccaaggagggcgttgatgcctacaacgaagtgatcgcccgggtgcgaatgtgggtgaacctgaacctgtggcagaagctgaagctaagcagagatgatgccaagcctctgctgagactgaagggattcccttcctttcctctggtcgagagacaggccaacgaagtggactggtgggacatggtgtgtaacgtgaagaagctgatcaacgagaaaaaggaggatggcaaggtgttttggcagaatctggctggctacaagagacaggaagccctgagaccatacctgagcagcgaggaagatcggaagaagggaaagaaattcgctcggtaccagctgggcgacctgctgctgcacctggaaaagaagcacggcgaggactggggaaaggtgtacgacgaggcctgggagcggattgacaagaaagtggaaggcctgagcaagcacatcaagctggaagaggaacggagaagcgaggacgcccagagcaaggccgccctgaccgactggctgcgggctaaggccagcttcgtgatcgagggcctgaaggaggccgacaaggacgagttctgcagatgcgagctgaagctgcagaagtggtacggggacctgcggggaaagcccttcgccatcgaagccgagaacagcatcctggacatcagcggcttcagcaagcagtacaactgtgccttcatctggcagaaggacggcgtgaagaagctgaacctgtacctgatcatcaactacttcaagggcggcaagctgcggttcaagaagatcaaacctgaagccttcgaagccaacagattctacaccgtgatcaacaaaaagagcggcgagatcgtgcccatggaggtgaacttcaacttcgacgaccccaacctgatcatcctgcctctggcctttggcaagagacagggcagagaattcatctggaacgacctgctgtccctggaaaccggcagcctgaagctggccaacggaagagtgatcgagaagacactgtacaacagaagaacccggcaggatgagcctgccctgttcgtggccctgaccttcgagcggcgggaggtcctggactcctccaatatcaaaccaatgaacctgatcggcgtggcaagaggcgaaaacatccccgccgtgatcgccctgaccgaccccgagggctgcccactgagccggtttaaggatagcctgggaaacccaacccacatcctgagaatcggcgagagctataaggagaagcagcggaccatccaggccaagaaggaggtggagcagcggagagccggcggctacagccggaagtacgccagcaaagccaagaatctggcagacgatatggtgagaaacaccgctagagatctgctgtactacgccgtgacccaggatgccatgctgatcttcgccaacctgagccggggcttcggccggcagggcaagcggaccttcatggccgagagacagtacacacggatggaggactggctgaccgccaagctggcctacgagggcctgagcaagacctacctgtccaagacactggcccagtacacctccaagacatgcagcaactgtgggtttaccatcaccagcgccgactacgacagggtgctggagaagctgaagaagacagcaacaggctggatgaccacaattaacggcaaggagctgaaggtggagggccagattacctactacaacagatacaagagacagaacgtagtcaaggacctgtccgtcgagctggatagactgagcgaagaatctgtgaacaacgacatctcctcctggacaaagggcagaagcggagaagctctgagcctcctgaagaaaagattctcccatagacccgtgcaggagaagttcgtgtgcctgaactgcggcttcgagacacacgcagccgagcaagccgccctgaacatcgccagatcctggctgttcctgcggagccaggagtacaagaaataccagacaaacaagacaaccggcaacaccgataagagagccttcgtcgagacctggcagtccttttaccggaagaagcttaaggaggtgtggaaacctgccgtgcggtctggcggatctggcggaggctccacaagcgtgcacggcagcgtgaccttcagggacgtggccatcgacttcagccaggaggagtgggagtgcctgcagcccgcccagaagaccctgtacagggacgtgatgctggagaactacagccacctgatcagcctgggcagcagcatcagcaagcccgacgtgatcaccctgctggagcaggagaaggagccctggatggtgaggaggaaggagaccaacaggtggtaccccgacctggagagcaagaccagccccaagaaaaagagaaaagtctaagctgccttctgcggggcttgccttctggccatgcccttcttctctcccttgcacctgtacctcttggtctttgaataaagcctgagtaggaaggctagcaaaaaaaaaaaaaaaaaaaaaaaaaaaaaaaaaaaaaaaaaaaaaaaaaaaaaaaaaaaaaaaaaaaaaaaaaaaaaaaa

SEQ ID NO: 3946 - RNA, 5416 nt, synthetic construct
  source 1..5416: mol_type = other RNA
aggaaataagagagaaaagaagagtaagaagaaatataagagccaccatggcccctaagaagaagcgtaaagtgagccgggtgaacggcagcggcagcggcggcggcatgaaccacgaccaggagttcgacccccctaaggtgtaccctcccgtccccgccgagaagagaaagcccatccgggtcctgagcctgttcgatggcatcgccaccggtctgctggtgctgaaggacctgggcatccaggtggataggtacattgcctccgaggtgtgcgaggactccatcaccgtgggaatggtgcgtcatcagggcaagatcatgtacgtgggcgacgtgcggagcgtgacacagaagcatatccaggagtggggccctttcgacctggtgatcggcggcagcccttgcaatgacctgagcatcgtgaacccagcccggaagggcctgtacgagggaaccggcagactgttcttcgagttttacagactgctgcacgacgcccggcctaaggaaggcgacgaccggcccttcttttggctgttcgagaatgtggtggccatgggagtcagcgacaagcgggatattagccggttcctggagagcaaccccgtgatgatcgatgccaaggaagtgagcgccgcccaccgggccagatacttctggggcaatctgcctggcatgaacagacccctggccagcaccgtgaacgacaagctggagctgcaggagtgcctggagcacggccggatcgccaagttcagcaaggtgagaaccatcaccacccgaagcaacagcatcaaacaaggcaaggaccagcactttcctgtgttcatgaacgagaaggaggacatcctgtggtgtaccgagatggagagagtgttcgggttcccagtccactacacagatgtcagcaacatgtctagactggccagacagagactgctgggaagaagctggtccgtccctgtgatcagacacctgttcgcccctctgaaggagtacttcgcctgcgtgagcagcggcaacagcaacgccaacagccggggccccagcttctctagcggcctggtgccactgtccctgagagggagccacatgggccccatggagatctacaaaaccgtgagcgcctggaagcggcagcctgtgcgcgtgctgagcctgtttcggaatatcgataaagtcctgaaaagcctgggattcctggagagcggctctggctccggcggtggcaccctgaagtacgtggaggatgtgacaaacgtggtcagacgggatgtggagaagtggggccccttcgatctggtgtacggcagcacccaacccctgggcagctcttgtgaccggtgccctggctggtacatgtttcagttccaccggatcctgcagtacgccctgccgagacaggagtcccagcggccattcttttggattttcatggacaacttgctgctgaccgaggatgaccaggaaactaccactcggttcctgcagaccgaagccgtgaccctgcaggacgtgagaggccgggactaccagaacgccatgcgggtgtggtccaacatccctggactgaaaagcaagcacgcacctctgacccctaaagaagaggagtacctgcaggcccaggtgcggagcagaagcaagctggacgcccctaaggtggatctgctggtgaagaattgcctcctgcccctgagagagtacttcaagtatttcagccagaatagtctgcccctgggcggcccaagcagcggcgcccctcctcccagcggcggcagcccagccggctccccaacctctaccgaggagggcacctctgagtccgccacccccgagagcggccctggcacctccaccgagcccagcgagggcagcgcacccggcagccctgccggcagccccacctccacagaggagggaaccagcaccgagcccagcgaaggcagcgccccaggcaccagcaccgagcctagtgagggcggctctggcggcggcagcgcccaggagattaaacggatcaacaagatcagaagaagacttgtgaaagacagcaacaccaagaaggccggcaagacaggccccatgaaaaccctgctggttagagtgatgacacccgatctgagagagcggctggaaaacctgagaaagaagcctgaaaatatcccccagcccatcagcaatacatctagagccaacctgaataagctgctgaccgattacaccgaaatgaagaaggcgatcctgcatgtgtactgggaagagttccagaaggaccctgtgggcctgatgagccgggtggcccagcctgccagcaagaagatcgatcagaacaagctgaaacctgagatggacgagaagggcaacctgaccaccgccggctttgcctgctctcagtgtggccagcccctgttcgtgtacaagctggagcaggtgtctgagaagggcaaggcttacaccaactacttcggacggtgcaatgtggccgagcacgaaaagctgatcctgctggcccagctgaagcccgagaaggatagcgacgaagccgtgacatatagcctgggaaagtttgggcagagggccctggatttctacagcattcatgtgaccaaggagtccacccaccccgtgaagcccctggcccagatcgccggaaacagatacgcctccggacctgtgggaaaggccctgagcgacgcatgtatgggcacaatcgcctccttcctgtctaagtaccaggacatcatcatcgaacaccagaaggtggtgaagggcaaccagaagagactggagagcctgcgggagctggccggcaaggaaaacctggaataccctagcgtgaccctgccacctcagcctcacaccaaggagggcgttgatgcctacaacgaagtgatcgcccgggtgcgaatgtgggtgaacctgaacctgtggcagaagctgaagctaagcagagatgatgccaagcctctgctgagactgaagggattcccttcctttcctctggtcgagagacaggccaacgaagtggactggtgggacatggtgtgtaacgtgaagaagctgatcaacgagaaaaaggaggatggcaaggtgttttggcagaatctggctggctacaagagacaggaagccctgagaccatacctgagcagcgaggaagatcggaagaagggaaagaaattcgctcggtaccagctgggcgacctgctgctgcacctggaaaagaagcacggcgaggactggggaaaggtgtacgacgaggcctgggagcggattgacaagaaagtggaaggcctgagcaagcacatcaagctggaagaggaacggagaagcgaggacgcccagagcaaggccgccctgaccgactggctgcgggctaaggccagcttcgtgatcgagggcctgaaggaggccgacaaggacgagttctgcagatgcgagctgaagctgcagaagtggtacggggacctgcggggaaagcccttcgccatcgaagccgagaacagcatcctggacatcagcggcttcagcaagcagtacaactgtgccttcatctggcagaaggacggcgtgaagaagctgaacctgtacctgatcatcaactacttcaagggcggcaagctgcggttcaagaagatcaaacctgaagccttcgaagccaacagattctacaccgtgatcaacaaaaagagcggcgagatcgtgcccatggaggtgaacttcaacttcgacgaccccaacctgatcatcctgcctctggcctttggcaagagacagggcagagaattcatctggaacgacctgctgtccctggaaaccggcagcctgaagctggccaacggaagagtgatcgagaagacactgtacaacagaagaacccggcaggatgagcctgccctgttcgtggccctgaccttcgagcggcgggaggtcctggactcctccaatatcaaaccaatgaacctgatcggcgtggcaagaggcgaaaacatccccgccgtgatcgccctgaccgaccccgagggctgcccactgagccggtttaaggatagcctgggaaacccaacccacatcctgagaatcggcgagagctataaggagaagcagcggaccatccaggccaagaaggaggtggagcagcggagagccggcggctacagccggaagtacgccagcaaagccaagaatctggcagacgatatggtgagaaacaccgctagagatctgctgtactacgccgtgacccaggatgccatgctgatcttcgccaacctgagccggggcttcggccggcagggcaagcggaccttcatggccgagagacagtacacacggatggaggactggctgaccgccaagctggcctacgagggcctgagcaagacctacctgtccaagacactggcccagtacacctccaagacatgcagcaactgtgggtttaccatcaccagcgccgactacgacagggtgctggagaagctgaagaagacagcaacaggctggatgaccacaattaacggcaaggagctgaaggtggagggccagattacctactacaacagatacaagagacagaacgtagtcaaggacctgtccgtcgagctggatagactgagcgaagaatctgtgaacaacgacatctcctcctggacaaagggcagaagcggagaagctctgagcctcctgaagaaaagattctcccatagacccgtgcaggagaagttcgtgtgcctgaactgcggcttcgagacacacgcagccgagcaagccgccctgaacatcgccagatcctggctgttcctgcggagccaggagtacaagaaataccagacaaacaagacaaccggcaacaccgataagagagccttcgtcgagacctggcagtccttttaccggaagaagcttaaggaggtgtggaaacctgccgtgcggtctggcggatctggcggaggctccacaagcatggtgctggtgagcttcgaggacgtggccgtggacttcacctgggaggagtggcaggccctggacgccgcccagaggaccctgtacagggacgtgatgctggagacctacagcagcctggtgagcctgggccactgcatggccaagcccgagctgatcttcaacctggagcagggcctgggccccaggagcaccgccggcgccagcgtgtggaacctgagcggcaggaccgaggacagcaccagccccaagaaaaagagaaaagtctaagctgccttctgcggggcttgccttctggccatgcccttcttctctcccttgcacctgtacctcttggtctttgaataaagcctgagtaggaaggctagcaaaaaaaaaaaaaaaaaaaaaaaaaaaaaaaaaaaaaaaaaaaaaaaaaaaaaaaaaaaaaaaaaaaaaaaaaaaaaaaa

SEQ ID NO: 3947 - RNA, 5419 nt, synthetic construct
  source 1..5419: mol_type = other RNA
aggaaataagagagaaaagaagagtaagaagaaatataagagccaccatggcccctaagaagaagcgtaaagtgagccgggtgaacggcagcggcagcggcggcggcatgaaccacgaccaggagttcgacccccctaaggtgtaccctcccgtccccgccgagaagagaaagcccatccgggtcctgagcctgttcgatggcatcgccaccggtctgctggtgctgaaggacctgggcatccaggtggataggtacattgcctccgaggtgtgcgaggactccatcaccgtgggaatggtgcgtcatcagggcaagatcatgtacgtgggcgacgtgcggagcgtgacacagaagcatatccaggagtggggccctttcgacctggtgatcggcggcagcccttgcaatgacctgagcatcgtgaacccagcccggaagggcctgtacgagggaaccggcagactgttcttcgagttttacagactgctgcacgacgcccggcctaaggaaggcgacgaccggcccttcttttggctgttcgagaatgtggtggccatgggagtcagcgacaagcgggatattagccggttcctggagagcaaccccgtgatgatcgatgccaaggaagtgagcgccgcccaccgggccagatacttctggggcaatctgcctggcatgaacagacccctggccagcaccgtgaacgacaagctggagctgcaggagtgcctggagcacggccggatcgccaagttcagcaaggtgagaaccatcaccacccgaagcaacagcatcaaacaaggcaaggaccagcactttcctgtgttcatgaacgagaaggaggacatcctgtggtgtaccgagatggagagagtgttcgggttcccagtccactacacagatgtcagcaacatgtctagactggccagacagagactgctgggaagaagctggtccgtccctgtgatcagacacctgttcgcccctctgaaggagtacttcgcctgcgtgagcagcggcaacagcaacgccaacagccggggccccagcttctctagcggcctggtgccactgtccctgagagggagccacatgggccccatggagatctacaaaaccgtgagcgcctggaagcggcagcctgtgcgcgtgctgagcctgtttcggaatatcgataaagtcctgaaaagcctgggattcctggagagcggctctggctccggcggtggcaccctgaagtacgtggaggatgtgacaaacgtggtcagacgggatgtggagaagtggggccccttcgatctggtgtacggcagcacccaacccctgggcagctcttgtgaccggtgccctggctggtacatgtttcagttccaccggatcctgcagtacgccctgccgagacaggagtcccagcggccattcttttggattttcatggacaacttgctgctgaccgaggatgaccaggaaactaccactcggttcctgcagaccgaagccgtgaccctgcaggacgtgagaggccgggactaccagaacgccatgcgggtgtggtccaacatccctggactgaaaagcaagcacgcacctctgacccctaaagaagaggagtacctgcaggcccaggtgcggagcagaagcaagctggacgcccctaaggtggatctgctggtgaagaattgcctcctgcccctgagagagtacttcaagtatttcagccagaatagtctgcccctgggcggcccaagcagcggcgcccctcctcccagcggcggcagcccagccggctccccaacctctaccgaggagggcacctctgagtccgccacccccgagagcggccctggcacctccaccgagcccagcgagggcagcgcacccggcagccctgccggcagccccacctccacagaggagggaaccagcaccgagcccagcgaaggcagcgccccaggcaccagcaccgagcctagtgagggcggctctggcggcggcagcgcccaggagattaaacggatcaacaagatcagaagaagacttgtgaaagacagcaacaccaagaaggccggcaagacaggccccatgaaaaccctgctggttagagtgatgacacccgatctgagagagcggctggaaaacctgagaaagaagcctgaaaatatcccccagcccatcagcaatacatctagagccaacctgaataagctgctgaccgattacaccgaaatgaagaaggcgatcctgcatgtgtactgggaagagttccagaaggaccctgtgggcctgatgagccgggtggcccagcctgccagcaagaagatcgatcagaacaagctgaaacctgagatggacgagaagggcaacctgaccaccgccggctttgcctgctctcagtgtggccagcccctgttcgtgtacaagctggagcaggtgtctgagaagggcaaggcttacaccaactacttcggacggtgcaatgtggccgagcacgaaaagctgatcctgctggcccagctgaagcccgagaaggatagcgacgaagccgtgacatatagcctgggaaagtttgggcagagggccctggatttctacagcattcatgtgaccaaggagtccacccaccccgtgaagcccctggcccagatcgccggaaacagatacgcctccggacctgtgggaaaggccctgagcgacgcatgtatgggcacaatcgcctccttcctgtctaagtaccaggacatcatcatcgaacaccagaaggtggtgaagggcaaccagaagagactggagagcctgcgggagctggccggcaaggaaaacctggaataccctagcgtgaccctgccacctcagcctcacaccaaggagggcgttgatgcctacaacgaagtgatcgcccgggtgcgaatgtgggtgaacctgaacctgtggcagaagctgaagctaagcagagatgatgccaagcctctgctgagactgaagggattcccttcctttcctctggtcgagagacaggccaacgaagtggactggtgggacatggtgtgtaacgtgaagaagctgatcaacgagaaaaaggaggatggcaaggtgttttggcagaatctggctggctacaagagacaggaagccctgagaccatacctgagcagcgaggaagatcggaagaagggaaagaaattcgctcggtaccagctgggcgacctgctgctgcacctggaaaagaagcacggcgaggactggggaaaggtgtacgacgaggcctgggagcggattgacaagaaagtggaaggcctgagcaagcacatcaagctggaagaggaacggagaagcgaggacgcccagagcaaggccgccctgaccgactggctgcgggctaaggccagcttcgtgatcgagggcctgaaggaggccgacaaggacgagttctgcagatgcgagctgaagctgcagaagtggtacggggacctgcggggaaagcccttcgccatcgaagccgagaacagcatcctggacatcagcggcttcagcaagcagtacaactgtgccttcatctggcagaaggacggcgtgaagaagctgaacctgtacctgatcatcaactacttcaagggcggcaagctgcggttcaagaagatcaaacctgaagccttcgaagccaacagattctacaccgtgatcaacaaaaagagcggcgagatcgtgcccatggaggtgaacttcaacttcgacgaccccaacctgatcatcctgcctctggcctttggcaagagacagggcagagaattcatctggaacgacctgctgtccctggaaaccggcagcctgaagctggccaacggaagagtgatcgagaagacactgtacaacagaagaacccggcaggatgagcctgccctgttcgtggccctgaccttcgagcggcgggaggtcctggactcctccaatatcaaaccaatgaacctgatcggcgtggcaagaggcgaaaacatccccgccgtgatcgccctgaccgaccccgagggctgcccactgagccggtttaaggatagcctgggaaacccaacccacatcctgagaatcggcgagagctataaggagaagcagcggaccatccaggccaagaaggaggtggagcagcggagagccggcggctacagccggaagtacgccagcaaagccaagaatctggcagacgatatggtgagaaacaccgctagagatctgctgtactacgccgtgacccaggatgccatgctgatcttcgccaacctgagccggggcttcggccggcagggcaagcggaccttcatggccgagagacagtacacacggatggaggactggctgaccgccaagctggcctacgagggcctgagcaagacctacctgtccaagacactggcccagtacacctccaagacatgcagcaactgtgggtttaccatcaccagcgccgactacgacagggtgctggagaagctgaagaagacagcaacaggctggatgaccacaattaacggcaaggagctgaaggtggagggccagattacctactacaacagatacaagagacagaacgtagtcaaggacctgtccgtcgagctggatagactgagcgaagaatctgtgaacaacgacatctcctcctggacaaagggcagaagcggagaagctctgagcctcctgaagaaaagattctcccatagacccgtgcaggagaagttcgtgtgcctgaactgcggcttcgagacacacgcagccgagcaagccgccctgaacatcgccagatcctggctgttcctgcggagccaggagtacaagaaataccagacaaacaagacaaccggcaacaccgataagagagccttcgtcgagacctggcagtccttttaccggaagaagcttaaggaggtgtggaaacctgccgtgcggtctggcggatctggcggaggctccacaagcatggacaccgtggccctggaggacgtggccgtgaacttcacccaggaggagtgggccctgctgggccccagccagaagaagctgtacagggacgtgatgcaggagaccatcaggaacctggactgcatcaagatgatcagcgaggaccagaacatcgaggaccagtacaagaaccccaagaagaacctgaggtgcaggatggccgagaggctgagcgagagcaaggacaacagccagtgcggcaccagccccaagaaaaagagaaaagtctaagctgccttctgcggggcttgccttctggccatgcccttcttctctcccttgcacctgtacctcttggtctttgaataaagcctgagtaggaaggctagcaaaaaaaaaaaaaaaaaaaaaaaaaaaaaaaaaaaaaaaaaaaaaaaaaaaaaaaaaaaaaaaaaaaaaaaaaaaaaaaa

SEQ ID NO: 3948 - RNA, 5419 nt, synthetic construct
  source 1..5419: mol_type = other RNA
aggaaataagagagaaaagaagagtaagaagaaatataagagccaccatggcccctaagaagaagcgtaaagtgagccgggtgaacggcagcggcagcggcggcggcatgaaccacgaccaggagttcgacccccctaaggtgtaccctcccgtccccgccgagaagagaaagcccatccgggtcctgagcctgttcgatggcatcgccaccggtctgctggtgctgaaggacctgggcatccaggtggataggtacattgcctccgaggtgtgcgaggactccatcaccgtgggaatggtgcgtcatcagggcaagatcatgtacgtgggcgacgtgcggagcgtgacacagaagcatatccaggagtggggccctttcgacctggtgatcggcggcagcccttgcaatgacctgagcatcgtgaacccagcccggaagggcctgtacgagggaaccggcagactgttcttcgagttttacagactgctgcacgacgcccggcctaaggaaggcgacgaccggcccttcttttggctgttcgagaatgtggtggccatgggagtcagcgacaagcgggatattagccggttcctggagagcaaccccgtgatgatcgatgccaaggaagtgagcgccgcccaccgggccagatacttctggggcaatctgcctggcatgaacagacccctggccagcaccgtgaacgacaagctggagctgcaggagtgcctggagcacggccggatcgccaagttcagcaaggtgagaaccatcaccacccgaagcaacagcatcaaacaaggcaaggaccagcactttcctgtgttcatgaacgagaaggaggacatcctgtggtgtaccgagatggagagagtgttcgggttcccagtccactacacagatgtcagcaacatgtctagactggccagacagagactgctgggaagaagctggtccgtccctgtgatcagacacctgttcgcccctctgaaggagtacttcgcctgcgtgagcagcggcaacagcaacgccaacagccggggccccagcttctctagcggcctggtgccactgtccctgagagggagccacatgggccccatggagatctacaaaaccgtgagcgcctggaagcggcagcctgtgcgcgtgctgagcctgtttcggaatatcgataaagtcctgaaaagcctgggattcctggagagcggctctggctccggcggtggcaccctgaagtacgtggaggatgtgacaaacgtggtcagacgggatgtggagaagtggggccccttcgatctggtgtacggcagcacccaacccctgggcagctcttgtgaccggtgccctggctggtacatgtttcagttccaccggatcctgcagtacgccctgccgagacaggagtcccagcggccattcttttggattttcatggacaacttgctgctgaccgaggatgaccaggaaactaccactcggttcctgcagaccgaagccgtgaccctgcaggacgtgagaggccgggactaccagaacgccatgcgggtgtggtccaacatccctggactgaaaagcaagcacgcacctctgacccctaaagaagaggagtacctgcaggcccaggtgcggagcagaagcaagctggacgcccctaaggtggatctgctggtgaagaattgcctcctgcccctgagagagtacttcaagtatttcagccagaatagtctgcccctgggcggcccaagcagcggcgcccctcctcccagcggcggcagcccagccggctccccaacctctaccgaggagggcacctctgagtccgccacccccgagagcggccctggcacctccaccgagcccagcgagggcagcgcacccggcagccctgccggcagccccacctccacagaggagggaaccagcaccgagcccagcgaaggcagcgccccaggcaccagcaccgagcctagtgagggcggctctggcggcggcagcgcccaggagattaaacggatcaacaagatcagaagaagacttgtgaaagacagcaacaccaagaaggccggcaagacaggccccatgaaaaccctgctggttagagtgatgacacccgatctgagagagcggctggaaaacctgagaaagaagcctgaaaatatcccccagcccatcagcaatacatctagagccaacctgaataagctgctgaccgattacaccgaaatgaagaaggcgatcctgcatgtgtactgggaagagttccagaaggaccctgtgggcctgatgagccgggtggcccagcctgccagcaagaagatcgatcagaacaagctgaaacctgagatggacgagaagggcaacctgaccaccgccggctttgcctgctctcagtgtggccagcccctgttcgtgtacaagctggagcaggtgtctgagaagggcaaggcttacaccaactacttcggacggtgcaatgtggccgagcacgaaaagctgatcctgctggcccagctgaagcccgagaaggatagcgacgaagccgtgacatatagcctgggaaagtttgggcagagggccctggatttctacagcattcatgtgaccaaggagtccacccaccccgtgaagcccctggcccagatcgccggaaacagatacgcctccggacctgtgggaaaggccctgagcgacgcatgtatgggcacaatcgcctccttcctgtctaagtaccaggacatcatcatcgaacaccagaaggtggtgaagggcaaccagaagagactggagagcctgcgggagctggccggcaaggaaaacctggaataccctagcgtgaccctgccacctcagcctcacaccaaggagggcgttgatgcctacaacgaagtgatcgcccgggtgcgaatgtgggtgaacctgaacctgtggcagaagctgaagctaagcagagatgatgccaagcctctgctgagactgaagggattcccttcctttcctctggtcgagagacaggccaacgaagtggactggtgggacatggtgtgtaacgtgaagaagctgatcaacgagaaaaaggaggatggcaaggtgttttggcagaatctggctggctacaagagacaggaagccctgagaccatacctgagcagcgaggaagatcggaagaagggaaagaaattcgctcggtaccagctgggcgacctgctgctgcacctggaaaagaagcacggcgaggactggggaaaggtgtacgacgaggcctgggagcggattgacaagaaagtggaaggcctgagcaagcacatcaagctggaagaggaacggagaagcgaggacgcccagagcaaggccgccctgaccgactggctgcgggctaaggccagcttcgtgatcgagggcctgaaggaggccgacaaggacgagttctgcagatgcgagctgaagctgcagaagtggtacggggacctgcggggaaagcccttcgccatcgaagccgagaacagcatcctggacatcagcggcttcagcaagcagtacaactgtgccttcatctggcagaaggacggcgtgaagaagctgaacctgtacctgatcatcaactacttcaagggcggcaagctgcggttcaagaagatcaaacctgaagccttcgaagccaacagattctacaccgtgatcaacaaaaagagcggcgagatcgtgcccatggaggtgaacttcaacttcgacgaccccaacctgatcatcctgcctctggcctttggcaagagacagggcagagaattcatctggaacgacctgctgtccctggaaaccggcagcctgaagctggccaacggaagagtgatcgagaagacactgtacaacagaagaacccggcaggatgagcctgccctgttcgtggccctgaccttcgagcggcgggaggtcctggactcctccaatatcaaaccaatgaacctgatcggcgtggcaagaggcgaaaacatccccgccgtgatcgccctgaccgaccccgagggctgcccactgagccggtttaaggatagcctgggaaacccaacccacatcctgagaatcggcgagagctataaggagaagcagcggaccatccaggccaagaaggaggtggagcagcggagagccggcggctacagccggaagtacgccagcaaagccaagaatctggcagacgatatggtgagaaacaccgctagagatctgctgtactacgccgtgacccaggatgccatgctgatcttcgccaacctgagccggggcttcggccggcagggcaagcggaccttcatggccgagagacagtacacacggatggaggactggctgaccgccaagctggcctacgagggcctgagcaagacctacctgtccaagacactggcccagtacacctccaagacatgcagcaactgtgggtttaccatcaccagcgccgactacgacagggtgctggagaagctgaagaagacagcaacaggctggatgaccacaattaacggcaaggagctgaaggtggagggccagattacctactacaacagatacaagagacagaacgtagtcaaggacctgtccgtcgagctggatagactgagcgaagaatctgtgaacaacgacatctcctcctggacaaagggcagaagcggagaagctctgagcctcctgaagaaaagattctcccatagacccgtgcaggagaagttcgtgtgcctgaactgcggcttcgagacacacgcagccgagcaagccgccctgaacatcgccagatcctggctgttcctgcggagccaggagtacaagaaataccagacaaacaagacaaccggcaacaccgataagagagccttcgtcgagacctggcagtccttttaccggaagaagcttaaggaggtgtggaaacctgccgtgcggtctggcggatctggcggaggctccacaagcgcccaggtgtgcgtgaccttcgacgacgtggccgtgaccttcacccaggaggagtggggccacctggaccccgcccagaggaccctgtaccaggaggtgatgctggagacctgcggcctgctgatgagcctgggctgccccgtgcccaggcccgagctgatctaccagctggagcacggccaggagctgtggaccgtgaagagggacctgagcggcagcacctgccccgtggacaagggcaagaccagccccaagaaaaagagaaaagtctaagctgccttctgcggggcttgccttctggccatgcccttcttctctcccttgcacctgtacctcttggtctttgaataaagcctgagtaggaaggctagcaaaaaaaaaaaaaaaaaaaaaaaaaaaaaaaaaaaaaaaaaaaaaaaaaaaaaaaaaaaaaaaaaaaaaaaaaaaaaaaa

SEQ ID NO: 3949 - RNA, 5428 nt, synthetic construct
  source 1..5428: mol_type = other RNA
aggaaataagagagaaaagaagagtaagaagaaatataagagccaccatggcccctaagaagaagcgtaaagtgagccgggtgaacggcagcggcagcggcggcggcatgaaccacgaccaggagttcgacccccctaaggtgtaccctcccgtccccgccgagaagagaaagcccatccgggtcctgagcctgttcgatggcatcgccaccggtctgctggtgctgaaggacctgggcatccaggtggataggtacattgcctccgaggtgtgcgaggactccatcaccgtgggaatggtgcgtcatcagggcaagatcatgtacgtgggcgacgtgcggagcgtgacacagaagcatatccaggagtggggccctttcgacctggtgatcggcggcagcccttgcaatgacctgagcatcgtgaacccagcccggaagggcctgtacgagggaaccggcagactgttcttcgagttttacagactgctgcacgacgcccggcctaaggaaggcgacgaccggcccttcttttggctgttcgagaatgtggtggccatgggagtcagcgacaagcgggatattagccggttcctggagagcaaccccgtgatgatcgatgccaaggaagtgagcgccgcccaccgggccagatacttctggggcaatctgcctggcatgaacagacccctggccagcaccgtgaacgacaagctggagctgcaggagtgcctggagcacggccggatcgccaagttcagcaaggtgagaaccatcaccacccgaagcaacagcatcaaacaaggcaaggaccagcactttcctgtgttcatgaacgagaaggaggacatcctgtggtgtaccgagatggagagagtgttcgggttcccagtccactacacagatgtcagcaacatgtctagactggccagacagagactgctgggaagaagctggtccgtccctgtgatcagacacctgttcgcccctctgaaggagtacttcgcctgcgtgagcagcggcaacagcaacgccaacagccggggccccagcttctctagcggcctggtgccactgtccctgagagggagccacatgggccccatggagatctacaaaaccgtgagcgcctggaagcggcagcctgtgcgcgtgctgagcctgtttcggaatatcgataaagtcctgaaaagcctgggattcctggagagcggctctggctccggcggtggcaccctgaagtacgtggaggatgtgacaaacgtggtcagacgggatgtggagaagtggggccccttcgatctggtgtacggcagcacccaacccctgggcagctcttgtgaccggtgccctggctggtacatgtttcagttccaccggatcctgcagtacgccctgccgagacaggagtcccagcggccattcttttggattttcatggacaacttgctgctgaccgaggatgaccaggaaactaccactcggttcctgcagaccgaagccgtgaccctgcaggacgtgagaggccgggactaccagaacgccatgcgggtgtggtccaacatccctggactgaaaagcaagcacgcacctctgacccctaaagaagaggagtacctgcaggcccaggtgcggagcagaagcaagctggacgcccctaaggtggatctgctggtgaagaattgcctcctgcccctgagagagtacttcaagtatttcagccagaatagtctgcccctgggcggcccaagcagcggcgcccctcctcccagcggcggcagcccagccggctccccaacctctaccgaggagggcacctctgagtccgccacccccgagagcggccctggcacctccaccgagcccagcgagggcagcgcacccggcagccctgccggcagccccacctccacagaggagggaaccagcaccgagcccagcgaaggcagcgccccaggcaccagcaccgagcctagtgagggcggctctggcggcggcagcgcccaggagattaaacggatcaacaagatcagaagaagacttgtgaaagacagcaacaccaagaaggccggcaagacaggccccatgaaaaccctgctggttagagtgatgacacccgatctgagagagcggctggaaaacctgagaaagaagcctgaaaatatcccccagcccatcagcaatacatctagagccaacctgaataagctgctgaccgattacaccgaaatgaagaaggcgatcctgcatgtgtactgggaagagttccagaaggaccctgtgggcctgatgagccgggtggcccagcctgccagcaagaagatcgatcagaacaagctgaaacctgagatggacgagaagggcaacctgaccaccgccggctttgcctgctctcagtgtggccagcccctgttcgtgtacaagctggagcaggtgtctgagaagggcaaggcttacaccaactacttcggacggtgcaatgtggccgagcacgaaaagctgatcctgctggcccagctgaagcccgagaaggatagcgacgaagccgtgacatatagcctgggaaagtttgggcagagggccctggatttctacagcattcatgtgaccaaggagtccacccaccccgtgaagcccctggcccagatcgccggaaacagatacgcctccggacctgtgggaaaggccctgagcgacgcatgtatgggcacaatcgcctccttcctgtctaagtaccaggacatcatcatcgaacaccagaaggtggtgaagggcaaccagaagagactggagagcctgcgggagctggccggcaaggaaaacctggaataccctagcgtgaccctgccacctcagcctcacaccaaggagggcgttgatgcctacaacgaagtgatcgcccgggtgcgaatgtgggtgaacctgaacctgtggcagaagctgaagctaagcagagatgatgccaagcctctgctgagactgaagggattcccttcctttcctctggtcgagagacaggccaacgaagtggactggtgggacatggtgtgtaacgtgaagaagctgatcaacgagaaaaaggaggatggcaaggtgttttggcagaatctggctggctacaagagacaggaagccctgagaccatacctgagcagcgaggaagatcggaagaagggaaagaaattcgctcggtaccagctgggcgacctgctgctgcacctggaaaagaagcacggcgaggactggggaaaggtgtacgacgaggcctgggagcggattgacaagaaagtggaaggcctgagcaagcacatcaagctggaagaggaacggagaagcgaggacgcccagagcaaggccgccctgaccgactggctgcgggctaaggccagcttcgtgatcgagggcctgaaggaggccgacaaggacgagttctgcagatgcgagctgaagctgcagaagtggtacggggacctgcggggaaagcccttcgccatcgaagccgagaacagcatcctggacatcagcggcttcagcaagcagtacaactgtgccttcatctggcagaaggacggcgtgaagaagctgaacctgtacctgatcatcaactacttcaagggcggcaagctgcggttcaagaagatcaaacctgaagccttcgaagccaacagattctacaccgtgatcaacaaaaagagcggcgagatcgtgcccatggaggtgaacttcaacttcgacgaccccaacctgatcatcctgcctctggcctttggcaagagacagggcagagaattcatctggaacgacctgctgtccctggaaaccggcagcctgaagctggccaacggaagagtgatcgagaagacactgtacaacagaagaacccggcaggatgagcctgccctgttcgtggccctgaccttcgagcggcgggaggtcctggactcctccaatatcaaaccaatgaacctgatcggcgtggcaagaggcgaaaacatccccgccgtgatcgccctgaccgaccccgagggctgcccactgagccggtttaaggatagcctgggaaacccaacccacatcctgagaatcggcgagagctataaggagaagcagcggaccatccaggccaagaaggaggtggagcagcggagagccggcggctacagccggaagtacgccagcaaagccaagaatctggcagacgatatggtgagaaacaccgctagagatctgctgtactacgccgtgacccaggatgccatgctgatcttcgccaacctgagccggggcttcggccggcagggcaagcggaccttcatggccgagagacagtacacacggatggaggactggctgaccgccaagctggcctacgagggcctgagcaagacctacctgtccaagacactggcccagtacacctccaagacatgcagcaactgtgggtttaccatcaccagcgccgactacgacagggtgctggagaagctgaagaagacagcaacaggctggatgaccacaattaacggcaaggagctgaaggtggagggccagattacctactacaacagatacaagagacagaacgtagtcaaggacctgtccgtcgagctggatagactgagcgaagaatctgtgaacaacgacatctcctcctggacaaagggcagaagcggagaagctctgagcctcctgaagaaaagattctcccatagacccgtgcaggagaagttcgtgtgcctgaactgcggcttcgagacacacgcagccgagcaagccgccctgaacatcgccagatcctggctgttcctgcggagccaggagtacaagaaataccagacaaacaagacaaccggcaacaccgataagagagccttcgtcgagacctggcagtccttttaccggaagaagcttaaggaggtgtggaaacctgccgtgcggtctggcggatctggcggaggctccacaagcgtgagcttcgaggacgtggccgtgcacttcacccaggaggagtgggccctgctggaccccagccagaagagcctgtacagggacgtgatgctggagacctgcaggaacctggccgccatcggctacatctgggaggagcagaccatcgaggacgactgcaagaacttcggcaggtaccagaggcacaccatcagccacagcgagtacaccccctacgagcacgaggagtgcggcaacatgccctgcgaccccaccagccccaagaaaaagagaaaagtctaagctgccttctgcggggcttgccttctggccatgcccttcttctctcccttgcacctgtacctcttggtctttgaataaagcctgagtaggaaggctagcaaaaaaaaaaaaaaaaaaaaaaaaaaaaaaaaaaaaaaaaaaaaaaaaaaaaaaaaaaaaaaaaaaaaaaaaaaaaaaaa

SEQ ID NO: 3950 - RNA, 5419 nt, synthetic construct
  source 1..5419: mol_type = other RNA
aggaaataagagagaaaagaagagtaagaagaaatataagagccaccatggcccctaagaagaagcgtaaagtgagccgggtgaacggcagcggcagcggcggcggcatgaaccacgaccaggagttcgacccccctaaggtgtaccctcccgtccccgccgagaagagaaagcccatccgggtcctgagcctgttcgatggcatcgccaccggtctgctggtgctgaaggacctgggcatccaggtggataggtacattgcctccgaggtgtgcgaggactccatcaccgtgggaatggtgcgtcatcagggcaagatcatgtacgtgggcgacgtgcggagcgtgacacagaagcatatccaggagtggggccctttcgacctggtgatcggcggcagcccttgcaatgacctgagcatcgtgaacccagcccggaagggcctgtacgagggaaccggcagactgttcttcgagttttacagactgctgcacgacgcccggcctaaggaaggcgacgaccggcccttcttttggctgttcgagaatgtggtggccatgggagtcagcgacaagcgggatattagccggttcctggagagcaaccccgtgatgatcgatgccaaggaagtgagcgccgcccaccgggccagatacttctggggcaatctgcctggcatgaacagacccctggccagcaccgtgaacgacaagctggagctgcaggagtgcctggagcacggccggatcgccaagttcagcaaggtgagaaccatcaccacccgaagcaacagcatcaaacaaggcaaggaccagcactttcctgtgttcatgaacgagaaggaggacatcctgtggtgtaccgagatggagagagtgttcgggttcccagtccactacacagatgtcagcaacatgtctagactggccagacagagactgctgggaagaagctggtccgtccctgtgatcagacacctgttcgcccctctgaaggagtacttcgcctgcgtgagcagcggcaacagcaacgccaacagccggggccccagcttctctagcggcctggtgccactgtccctgagagggagccacatgggccccatggagatctacaaaaccgtgagcgcctggaagcggcagcctgtgcgcgtgctgagcctgtttcggaatatcgataaagtcctgaaaagcctgggattcctggagagcggctctggctccggcggtggcaccctgaagtacgtggaggatgtgacaaacgtggtcagacgggatgtggagaagtggggccccttcgatctggtgtacggcagcacccaacccctgggcagctcttgtgaccggtgccctggctggtacatgtttcagttccaccggatcctgcagtacgccctgccgagacaggagtcccagcggccattcttttggattttcatggacaacttgctgctgaccgaggatgaccaggaaactaccactcggttcctgcagaccgaagccgtgaccctgcaggacgtgagaggccgggactaccagaacgccatgcgggtgtggtccaacatccctggactgaaaagcaagcacgcacctctgacccctaaagaagaggagtacctgcaggcccaggtgcggagcagaagcaagctggacgcccctaaggtggatctgctggtgaagaattgcctcctgcccctgagagagtacttcaagtatttcagccagaatagtctgcccctgggcggcccaagcagcggcgcccctcctcccagcggcggcagcccagccggctccccaacctctaccgaggagggcacctctgagtccgccacccccgagagcggccctggcacctccaccgagcccagcgagggcagcgcacccggcagccctgccggcagccccacctccacagaggagggaaccagcaccgagcccagcgaaggcagcgccccaggcaccagcaccgagcctagtgagggcggctctggcggcggcagcgcccaggagattaaacggatcaacaagatcagaagaagacttgtgaaagacagcaacaccaagaaggccggcaagacaggccccatgaaaaccctgctggttagagtgatgacacccgatctgagagagcggctggaaaacctgagaaagaagcctgaaaatatcccccagcccatcagcaatacatctagagccaacctgaataagctgctgaccgattacaccgaaatgaagaaggcgatcctgcatgtgtactgggaagagttccagaaggaccctgtgggcctgatgagccgggtggcccagcctgccagcaagaagatcgatcagaacaagctgaaacctgagatggacgagaagggcaacctgaccaccgccggctttgcctgctctcagtgtggccagcccctgttcgtgtacaagctggagcaggtgtctgagaagggcaaggcttacaccaactacttcggacggtgcaatgtggccgagcacgaaaagctgatcctgctggcccagctgaagcccgagaaggatagcgacgaagccgtgacatatagcctgggaaagtttgggcagagggccctggatttctacagcattcatgtgaccaaggagtccacccaccccgtgaagcccctggcccagatcgccggaaacagatacgcctccggacctgtgggaaaggccctgagcgacgcatgtatgggcacaatcgcctccttcctgtctaagtaccaggacatcatcatcgaacaccagaaggtggtgaagggcaaccagaagagactggagagcctgcgggagctggccggcaaggaaaacctggaataccctagcgtgaccctgccacctcagcctcacaccaaggagggcgttgatgcctacaacgaagtgatcgcccgggtgcgaatgtgggtgaacctgaacctgtggcagaagctgaagctaagcagagatgatgccaagcctctgctgagactgaagggattcccttcctttcctctggtcgagagacaggccaacgaagtggactggtgggacatggtgtgtaacgtgaagaagctgatcaacgagaaaaaggaggatggcaaggtgttttggcagaatctggctggctacaagagacaggaagccctgagaccatacctgagcagcgaggaagatcggaagaagggaaagaaattcgctcggtaccagctgggcgacctgctgctgcacctggaaaagaagcacggcgaggactggggaaaggtgtacgacgaggcctgggagcggattgacaagaaagtggaaggcctgagcaagcacatcaagctggaagaggaacggagaagcgaggacgcccagagcaaggccgccctgaccgactggctgcgggctaaggccagcttcgtgatcgagggcctgaaggaggccgacaaggacgagttctgcagatgcgagctgaagctgcagaagtggtacggggacctgcggggaaagcccttcgccatcgaagccgagaacagcatcctggacatcagcggcttcagcaagcagtacaactgtgccttcatctggcagaaggacggcgtgaagaagctgaacctgtacctgatcatcaactacttcaagggcggcaagctgcggttcaagaagatcaaacctgaagccttcgaagccaacagattctacaccgtgatcaacaaaaagagcggcgagatcgtgcccatggaggtgaacttcaacttcgacgaccccaacctgatcatcctgcctctggcctttggcaagagacagggcagagaattcatctggaacgacctgctgtccctggaaaccggcagcctgaagctggccaacggaagagtgatcgagaagacactgtacaacagaagaacccggcaggatgagcctgccctgttcgtggccctgaccttcgagcggcgggaggtcctggactcctccaatatcaaaccaatgaacctgatcggcgtggcaagaggcgaaaacatccccgccgtgatcgccctgaccgaccccgagggctgcccactgagccggtttaaggatagcctgggaaacccaacccacatcctgagaatcggcgagagctataaggagaagcagcggaccatccaggccaagaaggaggtggagcagcggagagccggcggctacagccggaagtacgccagcaaagccaagaatctggcagacgatatggtgagaaacaccgctagagatctgctgtactacgccgtgacccaggatgccatgctgatcttcgccaacctgagccggggcttcggccggcagggcaagcggaccttcatggccgagagacagtacacacggatggaggactggctgaccgccaagctggcctacgagggcctgagcaagacctacctgtccaagacactggcccagtacacctccaagacatgcagcaactgtgggtttaccatcaccagcgccgactacgacagggtgctggagaagctgaagaagacagcaacaggctggatgaccacaattaacggcaaggagctgaaggtggagggccagattacctactacaacagatacaagagacagaacgtagtcaaggacctgtccgtcgagctggatagactgagcgaagaatctgtgaacaacgacatctcctcctggacaaagggcagaagcggagaagctctgagcctcctgaagaaaagattctcccatagacccgtgcaggagaagttcgtgtgcctgaactgcggcttcgagacacacgcagccgagcaagccgccctgaacatcgccagatcctggctgttcctgcggagccaggagtacaagaaataccagacaaacaagacaaccggcaacaccgataagagagccttcgtcgagacctggcagtccttttaccggaagaagcttaaggaggtgtggaaacctgccgtgcggtctggcggatctggcggaggctccacaagcgccgaggagctggtgaccttcgaggacgtggccgtgcacttcagccccgaggagctgccctacctgagcgccagccagaggaacctgtacagggaggtgatgctggagaactacaggaacctggtgagcctgggctaccagttccccaagcccgacatcatcagccagctggaggaggaggagagccacgccagggaggaggacggcagcaccgtgacctgccaggactgggaggagcagagcaccagccccaagaaaaagagaaaagtctaagctgccttctgcggggcttgccttctggccatgcccttcttctctcccttgcacctgtacctcttggtctttgaataaagcctgagtaggaaggctagcaaaaaaaaaaaaaaaaaaaaaaaaaaaaaaaaaaaaaaaaaaaaaaaaaaaaaaaaaaaaaaaaaaaaaaaaaaaaaaaa

SEQ ID NO: 3951 - RNA, 5416 nt, synthetic construct
  source 1..5416: mol_type = other RNA
aggaaataagagagaaaagaagagtaagaagaaatataagagccaccatggcccctaagaagaagcgtaaagtgagccgggtgaacggcagcggcagcggcggcggcatgaaccacgaccaggagttcgacccccctaaggtgtaccctcccgtccccgccgagaagagaaagcccatccgggtcctgagcctgttcgatggcatcgccaccggtctgctggtgctgaaggacctgggcatccaggtggataggtacattgcctccgaggtgtgcgaggactccatcaccgtgggaatggtgcgtcatcagggcaagatcatgtacgtgggcgacgtgcggagcgtgacacagaagcatatccaggagtggggccctttcgacctggtgatcggcggcagcccttgcaatgacctgagcatcgtgaacccagcccggaagggcctgtacgagggaaccggcagactgttcttcgagttttacagactgctgcacgacgcccggcctaaggaaggcgacgaccggcccttcttttggctgttcgagaatgtggtggccatgggagtcagcgacaagcgggatattagccggttcctggagagcaaccccgtgatgatcgatgccaaggaagtgagcgccgcccaccgggccagatacttctggggcaatctgcctggcatgaacagacccctggccagcaccgtgaacgacaagctggagctgcaggagtgcctggagcacggccggatcgccaagttcagcaaggtgagaaccatcaccacccgaagcaacagcatcaaacaaggcaaggaccagcactttcctgtgttcatgaacgagaaggaggacatcctgtggtgtaccgagatggagagagtgttcgggttcccagtccactacacagatgtcagcaacatgtctagactggccagacagagactgctgggaagaagctggtccgtccctgtgatcagacacctgttcgcccctctgaaggagtacttcgcctgcgtgagcagcggcaacagcaacgccaacagccggggccccagcttctctagcggcctggtgccactgtccctgagagggagccacatgggccccatggagatctacaaaaccgtgagcgcctggaagcggcagcctgtgcgcgtgctgagcctgtttcggaatatcgataaagtcctgaaaagcctgggattcctggagagcggctctggctccggcggtggcaccctgaagtacgtggaggatgtgacaaacgtggtcagacgggatgtggagaagtggggccccttcgatctggtgtacggcagcacccaacccctgggcagctcttgtgaccggtgccctggctggtacatgtttcagttccaccggatcctgcagtacgccctgccgagacaggagtcccagcggccattcttttggattttcatggacaacttgctgctgaccgaggatgaccaggaaactaccactcggttcctgcagaccgaagccgtgaccctgcaggacgtgagaggccgggactaccagaacgccatgcgggtgtggtccaacatccctggactgaaaagcaagcacgcacctctgacccctaaagaagaggagtacctgcaggcccaggtgcggagcagaagcaagctggacgcccctaaggtggatctgctggtgaagaattgcctcctgcccctgagagagtacttcaagtatttcagccagaatagtctgcccctgggcggcccaagcagcggcgcccctcctcccagcggcggcagcccagccggctccccaacctctaccgaggagggcacctctgagtccgccacccccgagagcggccctggcacctccaccgagcccagcgagggcagcgcacccggcagccctgccggcagccccacctccacagaggagggaaccagcaccgagcccagcgaaggcagcgccccaggcaccagcaccgagcctagtgagggcggctctggcggcggcagcgcccaggagattaaacggatcaacaagatcagaagaagacttgtgaaagacagcaacaccaagaaggccggcaagacaggccccatgaaaaccctgctggttagagtgatgacacccgatctgagagagcggctggaaaacctgagaaagaagcctgaaaatatcccccagcccatcagcaatacatctagagccaacctgaataagctgctgaccgattacaccgaaatgaagaaggcgatcctgcatgtgtactgggaagagttccagaaggaccctgtgggcctgatgagccgggtggcccagcctgccagcaagaagatcgatcagaacaagctgaaacctgagatggacgagaagggcaacctgaccaccgccggctttgcctgctctcagtgtggccagcccctgttcgtgtacaagctggagcaggtgtctgagaagggcaaggcttacaccaactacttcggacggtgcaatgtggccgagcacgaaaagctgatcctgctggcccagctgaagcccgagaaggatagcgacgaagccgtgacatatagcctgggaaagtttgggcagagggccctggatttctacagcattcatgtgaccaaggagtccacccaccccgtgaagcccctggcccagatcgccggaaacagatacgcctccggacctgtgggaaaggccctgagcgacgcatgtatgggcacaatcgcctccttcctgtctaagtaccaggacatcatcatcgaacaccagaaggtggtgaagggcaaccagaagagactggagagcctgcgggagctggccggcaaggaaaacctggaataccctagcgtgaccctgccacctcagcctcacaccaaggagggcgttgatgcctacaacgaagtgatcgcccgggtgcgaatgtgggtgaacctgaacctgtggcagaagctgaagctaagcagagatgatgccaagcctctgctgagactgaagggattcccttcctttcctctggtcgagagacaggccaacgaagtggactggtgggacatggtgtgtaacgtgaagaagctgatcaacgagaaaaaggaggatggcaaggtgttttggcagaatctggctggctacaagagacaggaagccctgagaccatacctgagcagcgaggaagatcggaagaagggaaagaaattcgctcggtaccagctgggcgacctgctgctgcacctggaaaagaagcacggcgaggactggggaaaggtgtacgacgaggcctgggagcggattgacaagaaagtggaaggcctgagcaagcacatcaagctggaagaggaacggagaagcgaggacgcccagagcaaggccgccctgaccgactggctgcgggctaaggccagcttcgtgatcgagggcctgaaggaggccgacaaggacgagttctgcagatgcgagctgaagctgcagaagtggtacggggacctgcggggaaagcccttcgccatcgaagccgagaacagcatcctggacatcagcggcttcagcaagcagtacaactgtgccttcatctggcagaaggacggcgtgaagaagctgaacctgtacctgatcatcaactacttcaagggcggcaagctgcggttcaagaagatcaaacctgaagccttcgaagccaacagattctacaccgtgatcaacaaaaagagcggcgagatcgtgcccatggaggtgaacttcaacttcgacgaccccaacctgatcatcctgcctctggcctttggcaagagacagggcagagaattcatctggaacgacctgctgtccctggaaaccggcagcctgaagctggccaacggaagagtgatcgagaagacactgtacaacagaagaacccggcaggatgagcctgccctgttcgtggccctgaccttcgagcggcgggaggtcctggactcctccaatatcaaaccaatgaacctgatcggcgtggcaagaggcgaaaacatccccgccgtgatcgccctgaccgaccccgagggctgcccactgagccggtttaaggatagcctgggaaacccaacccacatcctgagaatcggcgagagctataaggagaagcagcggaccatccaggccaagaaggaggtggagcagcggagagccggcggctacagccggaagtacgccagcaaagccaagaatctggcagacgatatggtgagaaacaccgctagagatctgctgtactacgccgtgacccaggatgccatgctgatcttcgccaacctgagccggggcttcggccggcagggcaagcggaccttcatggccgagagacagtacacacggatggaggactggctgaccgccaagctggcctacgagggcctgagcaagacctacctgtccaagacactggcccagtacacctccaagacatgcagcaactgtgggtttaccatcaccagcgccgactacgacagggtgctggagaagctgaagaagacagcaacaggctggatgaccacaattaacggcaaggagctgaaggtggagggccagattacctactacaacagatacaagagacagaacgtagtcaaggacctgtccgtcgagctggatagactgagcgaagaatctgtgaacaacgacatctcctcctggacaaagggcagaagcggagaagctctgagcctcctgaagaaaagattctcccatagacccgtgcaggagaagttcgtgtgcctgaactgcggcttcgagacacacgcagccgagcaagccgccctgaacatcgccagatcctggctgttcctgcggagccaggagtacaagaaataccagacaaacaagacaaccggcaacaccgataagagagccttcgtcgagacctggcagtccttttaccggaagaagcttaaggaggtgtggaaacctgccgtgcggtctggcggatctggcggaggctccacaagcgacaccgtggtgttcgaggacgtggtggtggacttcaccctggaggagtgggccctgctgaaccccgcccagagaaagctgtacagagacgtgatgctggagaccttcaagcacctggccagcgtggacaacgaggcccagctgaaggccagcggcagcatcagccagcaggacaccagcggcgagaagctgagcctgaagcagaagatcgagaagttcaccagaaagaacatctgggccaccagccccaagaaaaagagaaaagtctaagctgccttctgcggggcttgccttctggccatgcccttcttctctcccttgcacctgtacctcttggtctttgaataaagcctgagtaggaaggctagcaaaaaaaaaaaaaaaaaaaaaaaaaaaaaaaaaaaaaaaaaaaaaaaaaaaaaaaaaaaaaaaaaaaaaaaaaaaaaaaa

SEQ ID NO: 3952 - RNA, 5419 nt, synthetic construct
  source 1..5419: mol_type = other RNA
aggaaataagagagaaaagaagagtaagaagaaatataagagccaccatggcccctaagaagaagcgtaaagtgagccgggtgaacggcagcggcagcggcggcggcatgaaccacgaccaggagttcgacccccctaaggtgtaccctcccgtccccgccgagaagagaaagcccatccgggtcctgagcctgttcgatggcatcgccaccggtctgctggtgctgaaggacctgggcatccaggtggataggtacattgcctccgaggtgtgcgaggactccatcaccgtgggaatggtgcgtcatcagggcaagatcatgtacgtgggcgacgtgcggagcgtgacacagaagcatatccaggagtggggccctttcgacctggtgatcggcggcagcccttgcaatgacctgagcatcgtgaacccagcccggaagggcctgtacgagggaaccggcagactgttcttcgagttttacagactgctgcacgacgcccggcctaaggaaggcgacgaccggcccttcttttggctgttcgagaatgtggtggccatgggagtcagcgacaagcgggatattagccggttcctggagagcaaccccgtgatgatcgatgccaaggaagtgagcgccgcccaccgggccagatacttctggggcaatctgcctggcatgaacagacccctggccagcaccgtgaacgacaagctggagctgcaggagtgcctggagcacggccggatcgccaagttcagcaaggtgagaaccatcaccacccgaagcaacagcatcaaacaaggcaaggaccagcactttcctgtgttcatgaacgagaaggaggacatcctgtggtgtaccgagatggagagagtgttcgggttcccagtccactacacagatgtcagcaacatgtctagactggccagacagagactgctgggaagaagctggtccgtccctgtgatcagacacctgttcgcccctctgaaggagtacttcgcctgcgtgagcagcggcaacagcaacgccaacagccggggccccagcttctctagcggcctggtgccactgtccctgagagggagccacatgggccccatggagatctacaaaaccgtgagcgcctggaagcggcagcctgtgcgcgtgctgagcctgtttcggaatatcgataaagtcctgaaaagcctgggattcctggagagcggctctggctccggcggtggcaccctgaagtacgtggaggatgtgacaaacgtggtcagacgggatgtggagaagtggggccccttcgatctggtgtacggcagcacccaacccctgggcagctcttgtgaccggtgccctggctggtacatgtttcagttccaccggatcctgcagtacgccctgccgagacaggagtcccagcggccattcttttggattttcatggacaacttgctgctgaccgaggatgaccaggaaactaccactcggttcctgcagaccgaagccgtgaccctgcaggacgtgagaggccgggactaccagaacgccatgcgggtgtggtccaacatccctggactgaaaagcaagcacgcacctctgacccctaaagaagaggagtacctgcaggcccaggtgcggagcagaagcaagctggacgcccctaaggtggatctgctggtgaagaattgcctcctgcccctgagagagtacttcaagtatttcagccagaatagtctgcccctgggcggcccaagcagcggcgcccctcctcccagcggcggcagcccagccggctccccaacctctaccgaggagggcacctctgagtccgccacccccgagagcggccctggcacctccaccgagcccagcgagggcagcgcacccggcagccctgccggcagccccacctccacagaggagggaaccagcaccgagcccagcgaaggcagcgccccaggcaccagcaccgagcctagtgagggcggctctggcggcggcagcgcccaggagattaaacggatcaacaagatcagaagaagacttgtgaaagacagcaacaccaagaaggccggcaagacaggccccatgaaaaccctgctggttagagtgatgacacccgatctgagagagcggctggaaaacctgagaaagaagcctgaaaatatcccccagcccatcagcaatacatctagagccaacctgaataagctgctgaccgattacaccgaaatgaagaaggcgatcctgcatgtgtactgggaagagttccagaaggaccctgtgggcctgatgagccgggtggcccagcctgccagcaagaagatcgatcagaacaagctgaaacctgagatggacgagaagggcaacctgaccaccgccggctttgcctgctctcagtgtggccagcccctgttcgtgtacaagctggagcaggtgtctgagaagggcaaggcttacaccaactacttcggacggtgcaatgtggccgagcacgaaaagctgatcctgctggcccagctgaagcccgagaaggatagcgacgaagccgtgacatatagcctgggaaagtttgggcagagggccctggatttctacagcattcatgtgaccaaggagtccacccaccccgtgaagcccctggcccagatcgccggaaacagatacgcctccggacctgtgggaaaggccctgagcgacgcatgtatgggcacaatcgcctccttcctgtctaagtaccaggacatcatcatcgaacaccagaaggtggtgaagggcaaccagaagagactggagagcctgcgggagctggccggcaaggaaaacctggaataccctagcgtgaccctgccacctcagcctcacaccaaggagggcgttgatgcctacaacgaagtgatcgcccgggtgcgaatgtgggtgaacctgaacctgtggcagaagctgaagctaagcagagatgatgccaagcctctgctgagactgaagggattcccttcctttcctctggtcgagagacaggccaacgaagtggactggtgggacatggtgtgtaacgtgaagaagctgatcaacgagaaaaaggaggatggcaaggtgttttggcagaatctggctggctacaagagacaggaagccctgagaccatacctgagcagcgaggaagatcggaagaagggaaagaaattcgctcggtaccagctgggcgacctgctgctgcacctggaaaagaagcacggcgaggactggggaaaggtgtacgacgaggcctgggagcggattgacaagaaagtggaaggcctgagcaagcacatcaagctggaagaggaacggagaagcgaggacgcccagagcaaggccgccctgaccgactggctgcgggctaaggccagcttcgtgatcgagggcctgaaggaggccgacaaggacgagttctgcagatgcgagctgaagctgcagaagtggtacggggacctgcggggaaagcccttcgccatcgaagccgagaacagcatcctggacatcagcggcttcagcaagcagtacaactgtgccttcatctggcagaaggacggcgtgaagaagctgaacctgtacctgatcatcaactacttcaagggcggcaagctgcggttcaagaagatcaaacctgaagccttcgaagccaacagattctacaccgtgatcaacaaaaagagcggcgagatcgtgcccatggaggtgaacttcaacttcgacgaccccaacctgatcatcctgcctctggcctttggcaagagacagggcagagaattcatctggaacgacctgctgtccctggaaaccggcagcctgaagctggccaacggaagagtgatcgagaagacactgtacaacagaagaacccggcaggatgagcctgccctgttcgtggccctgaccttcgagcggcgggaggtcctggactcctccaatatcaaaccaatgaacctgatcggcgtggcaagaggcgaaaacatccccgccgtgatcgccctgaccgaccccgagggctgcccactgagccggtttaaggatagcctgggaaacccaacccacatcctgagaatcggcgagagctataaggagaagcagcggaccatccaggccaagaaggaggtggagcagcggagagccggcggctacagccggaagtacgccagcaaagccaagaatctggcagacgatatggtgagaaacaccgctagagatctgctgtactacgccgtgacccaggatgccatgctgatcttcgccaacctgagccggggcttcggccggcagggcaagcggaccttcatggccgagagacagtacacacggatggaggactggctgaccgccaagctggcctacgagggcctgagcaagacctacctgtccaagacactggcccagtacacctccaagacatgcagcaactgtgggtttaccatcaccagcgccgactacgacagggtgctggagaagctgaagaagacagcaacaggctggatgaccacaattaacggcaaggagctgaaggtggagggccagattacctactacaacagatacaagagacagaacgtagtcaaggacctgtccgtcgagctggatagactgagcgaagaatctgtgaacaacgacatctcctcctggacaaagggcagaagcggagaagctctgagcctcctgaagaaaagattctcccatagacccgtgcaggagaagttcgtgtgcctgaactgcggcttcgagacacacgcagccgagcaagccgccctgaacatcgccagatcctggctgttcctgcggagccaggagtacaagaaataccagacaaacaagacaaccggcaacaccgataagagagccttcgtcgagacctggcagtccttttaccggaagaagcttaaggaggtgtggaaacctgccgtgcggtctggcggatctggcggaggctccacaagccagcagaggcccgtgagcttcaaggacgtggtggtgggcttcacccaggaggagtggcacaggctgaaccccgcccagagggccctgtacagggacgtgatgctggagacctacagcaacctggtgagcgtgggctacgagggcaccaagccctacgtgatcctgaagctggagcaggaggaggccccctggatctgcgaggccgcctgcagcggctgccactgccaggagaacatctgccagaccagccccaagaaaaagagaaaagtctaagctgccttctgcggggcttgccttctggccatgcccttcttctctcccttgcacctgtacctcttggtctttgaataaagcctgagtaggaaggctagcaaaaaaaaaaaaaaaaaaaaaaaaaaaaaaaaaaaaaaaaaaaaaaaaaaaaaaaaaaaaaaaaaaaaaaaaaaaaaaaa

SEQ ID NO: 3953 - RNA, 5419 nt, synthetic construct
  source 1..5419: mol_type = other RNA
aggaaataagagagaaaagaagagtaagaagaaatataagagccaccatggcccctaagaagaagcgtaaagtgagccgggtgaacggcagcggcagcggcggcggcatgaaccacgaccaggagttcgacccccctaaggtgtaccctcccgtccccgccgagaagagaaagcccatccgggtcctgagcctgttcgatggcatcgccaccggtctgctggtgctgaaggacctgggcatccaggtggataggtacattgcctccgaggtgtgcgaggactccatcaccgtgggaatggtgcgtcatcagggcaagatcatgtacgtgggcgacgtgcggagcgtgacacagaagcatatccaggagtggggccctttcgacctggtgatcggcggcagcccttgcaatgacctgagcatcgtgaacccagcccggaagggcctgtacgagggaaccggcagactgttcttcgagttttacagactgctgcacgacgcccggcctaaggaaggcgacgaccggcccttcttttggctgttcgagaatgtggtggccatgggagtcagcgacaagcgggatattagccggttcctggagagcaaccccgtgatgatcgatgccaaggaagtgagcgccgcccaccgggccagatacttctggggcaatctgcctggcatgaacagacccctggccagcaccgtgaacgacaagctggagctgcaggagtgcctggagcacggccggatcgccaagttcagcaaggtgagaaccatcaccacccgaagcaacagcatcaaacaaggcaaggaccagcactttcctgtgttcatgaacgagaaggaggacatcctgtggtgtaccgagatggagagagtgttcgggttcccagtccactacacagatgtcagcaacatgtctagactggccagacagagactgctgggaagaagctggtccgtccctgtgatcagacacctgttcgcccctctgaaggagtacttcgcctgcgtgagcagcggcaacagcaacgccaacagccggggccccagcttctctagcggcctggtgccactgtccctgagagggagccacatgggccccatggagatctacaaaaccgtgagcgcctggaagcggcagcctgtgcgcgtgctgagcctgtttcggaatatcgataaagtcctgaaaagcctgggattcctggagagcggctctggctccggcggtggcaccctgaagtacgtggaggatgtgacaaacgtggtcagacgggatgtggagaagtggggccccttcgatctggtgtacggcagcacccaacccctgggcagctcttgtgaccggtgccctggctggtacatgtttcagttccaccggatcctgcagtacgccctgccgagacaggagtcccagcggccattcttttggattttcatggacaacttgctgctgaccgaggatgaccaggaaactaccactcggttcctgcagaccgaagccgtgaccctgcaggacgtgagaggccgggactaccagaacgccatgcgggtgtggtccaacatccctggactgaaaagcaagcacgcacctctgacccctaaagaagaggagtacctgcaggcccaggtgcggagcagaagcaagctggacgcccctaaggtggatctgctggtgaagaattgcctcctgcccctgagagagtacttcaagtatttcagccagaatagtctgcccctgggcggcccaagcagcggcgcccctcctcccagcggcggcagcccagccggctccccaacctctaccgaggagggcacctctgagtccgccacccccgagagcggccctggcacctccaccgagcccagcgagggcagcgcacccggcagccctgccggcagccccacctccacagaggagggaaccagcaccgagcccagcgaaggcagcgccccaggcaccagcaccgagcctagtgagggcggctctggcggcggcagcgcccaggagattaaacggatcaacaagatcagaagaagacttgtgaaagacagcaacaccaagaaggccggcaagacaggccccatgaaaaccctgctggttagagtgatgacacccgatctgagagagcggctggaaaacctgagaaagaagcctgaaaatatcccccagcccatcagcaatacatctagagccaacctgaataagctgctgaccgattacaccgaaatgaagaaggcgatcctgcatgtgtactgggaagagttccagaaggaccctgtgggcctgatgagccgggtggcccagcctgccagcaagaagatcgatcagaacaagctgaaacctgagatggacgagaagggcaacctgaccaccgccggctttgcctgctctcagtgtggccagcccctgttcgtgtacaagctggagcaggtgtctgagaagggcaaggcttacaccaactacttcggacggtgcaatgtggccgagcacgaaaagctgatcctgctggcccagctgaagcccgagaaggatagcgacgaagccgtgacatatagcctgggaaagtttgggcagagggccctggatttctacagcattcatgtgaccaaggagtccacccaccccgtgaagcccctggcccagatcgccggaaacagatacgcctccggacctgtgggaaaggccctgagcgacgcatgtatgggcacaatcgcctccttcctgtctaagtaccaggacatcatcatcgaacaccagaaggtggtgaagggcaaccagaagagactggagagcctgcgggagctggccggcaaggaaaacctggaataccctagcgtgaccctgccacctcagcctcacaccaaggagggcgttgatgcctacaacgaagtgatcgcccgggtgcgaatgtgggtgaacctgaacctgtggcagaagctgaagctaagcagagatgatgccaagcctctgctgagactgaagggattcccttcctttcctctggtcgagagacaggccaacgaagtggactggtgggacatggtgtgtaacgtgaagaagctgatcaacgagaaaaaggaggatggcaaggtgttttggcagaatctggctggctacaagagacaggaagccctgagaccatacctgagcagcgaggaagatcggaagaagggaaagaaattcgctcggtaccagctgggcgacctgctgctgcacctggaaaagaagcacggcgaggactggggaaaggtgtacgacgaggcctgggagcggattgacaagaaagtggaaggcctgagcaagcacatcaagctggaagaggaacggagaagcgaggacgcccagagcaaggccgccctgaccgactggctgcgggctaaggccagcttcgtgatcgagggcctgaaggaggccgacaaggacgagttctgcagatgcgagctgaagctgcagaagtggtacggggacctgcggggaaagcccttcgccatcgaagccgagaacagcatcctggacatcagcggcttcagcaagcagtacaactgtgccttcatctggcagaaggacggcgtgaagaagctgaacctgtacctgatcatcaactacttcaagggcggcaagctgcggttcaagaagatcaaacctgaagccttcgaagccaacagattctacaccgtgatcaacaaaaagagcggcgagatcgtgcccatggaggtgaacttcaacttcgacgaccccaacctgatcatcctgcctctggcctttggcaagagacagggcagagaattcatctggaacgacctgctgtccctggaaaccggcagcctgaagctggccaacggaagagtgatcgagaagacactgtacaacagaagaacccggcaggatgagcctgccctgttcgtggccctgaccttcgagcggcgggaggtcctggactcctccaatatcaaaccaatgaacctgatcggcgtggcaagaggcgaaaacatccccgccgtgatcgccctgaccgaccccgagggctgcccactgagccggtttaaggatagcctgggaaacccaacccacatcctgagaatcggcgagagctataaggagaagcagcggaccatccaggccaagaaggaggtggagcagcggagagccggcggctacagccggaagtacgccagcaaagccaagaatctggcagacgatatggtgagaaacaccgctagagatctgctgtactacgccgtgacccaggatgccatgctgatcttcgccaacctgagccggggcttcggccggcagggcaagcggaccttcatggccgagagacagtacacacggatggaggactggctgaccgccaagctggcctacgagggcctgagcaagacctacctgtccaagacactggcccagtacacctccaagacatgcagcaactgtgggtttaccatcaccagcgccgactacgacagggtgctggagaagctgaagaagacagcaacaggctggatgaccacaattaacggcaaggagctgaaggtggagggccagattacctactacaacagatacaagagacagaacgtagtcaaggacctgtccgtcgagctggatagactgagcgaagaatctgtgaacaacgacatctcctcctggacaaagggcagaagcggagaagctctgagcctcctgaagaaaagattctcccatagacccgtgcaggagaagttcgtgtgcctgaactgcggcttcgagacacacgcagccgagcaagccgccctgaacatcgccagatcctggctgttcctgcggagccaggagtacaagaaataccagacaaacaagacaaccggcaacaccgataagagagccttcgtcgagacctggcagtccttttaccggaagaagcttaaggaggtgtggaaacctgccgtgcggtctggcggatctggcggaggctccacaagcctgcaggaggccgtgaccttcgaggacgtggccgtgaacttcagcaacgaggagtggcagtgcctgacccacgcccagaggcacctgtacaaggacgtgatgctggagaactacggcaacgtggtgagcctgggcttccccttccccaagccccccctgatcagccacctggagcaggaggccgagctgtgcgcccaggacaggcaggacagggagttcctgagctgcagctaccccgtgagcaccagccccaagaaaaagagaaaagtctaagctgccttctgcggggcttgccttctggccatgcccttcttctctcccttgcacctgtacctcttggtctttgaataaagcctgagtaggaaggctagcaaaaaaaaaaaaaaaaaaaaaaaaaaaaaaaaaaaaaaaaaaaaaaaaaaaaaaaaaaaaaaaaaaaaaaaaaaaaaaaa

SEQ ID NO: 3954 - RNA, 5419 nt, synthetic construct
  source 1..5419: mol_type = other RNA
aggaaataagagagaaaagaagagtaagaagaaatataagagccaccatggcccctaagaagaagcgtaaagtgagccgggtgaacggcagcggcagcggcggcggcatgaaccacgaccaggagttcgacccccctaaggtgtaccctcccgtccccgccgagaagagaaagcccatccgggtcctgagcctgttcgatggcatcgccaccggtctgctggtgctgaaggacctgggcatccaggtggataggtacattgcctccgaggtgtgcgaggactccatcaccgtgggaatggtgcgtcatcagggcaagatcatgtacgtgggcgacgtgcggagcgtgacacagaagcatatccaggagtggggccctttcgacctggtgatcggcggcagcccttgcaatgacctgagcatcgtgaacccagcccggaagggcctgtacgagggaaccggcagactgttcttcgagttttacagactgctgcacgacgcccggcctaaggaaggcgacgaccggcccttcttttggctgttcgagaatgtggtggccatgggagtcagcgacaagcgggatattagccggttcctggagagcaaccccgtgatgatcgatgccaaggaagtgagcgccgcccaccgggccagatacttctggggcaatctgcctggcatgaacagacccctggccagcaccgtgaacgacaagctggagctgcaggagtgcctggagcacggccggatcgccaagttcagcaaggtgagaaccatcaccacccgaagcaacagcatcaaacaaggcaaggaccagcactttcctgtgttcatgaacgagaaggaggacatcctgtggtgtaccgagatggagagagtgttcgggttcccagtccactacacagatgtcagcaacatgtctagactggccagacagagactgctgggaagaagctggtccgtccctgtgatcagacacctgttcgcccctctgaaggagtacttcgcctgcgtgagcagcggcaacagcaacgccaacagccggggccccagcttctctagcggcctggtgccactgtccctgagagggagccacatgggccccatggagatctacaaaaccgtgagcgcctggaagcggcagcctgtgcgcgtgctgagcctgtttcggaatatcgataaagtcctgaaaagcctgggattcctggagagcggctctggctccggcggtggcaccctgaagtacgtggaggatgtgacaaacgtggtcagacgggatgtggagaagtggggccccttcgatctggtgtacggcagcacccaacccctgggcagctcttgtgaccggtgccctggctggtacatgtttcagttccaccggatcctgcagtacgccctgccgagacaggagtcccagcggccattcttttggattttcatggacaacttgctgctgaccgaggatgaccaggaaactaccactcggttcctgcagaccgaagccgtgaccctgcaggacgtgagaggccgggactaccagaacgccatgcgggtgtggtccaacatccctggactgaaaagcaagcacgcacctctgacccctaaagaagaggagtacctgcaggcccaggtgcggagcagaagcaagctggacgcccctaaggtggatctgctggtgaagaattgcctcctgcccctgagagagtacttcaagtatttcagccagaatagtctgcccctgggcggcccaagcagcggcgcccctcctcccagcggcggcagcccagccggctccccaacctctaccgaggagggcacctctgagtccgccacccccgagagcggccctggcacctccaccgagcccagcgagggcagcgcacccggcagccctgccggcagccccacctccacagaggagggaaccagcaccgagcccagcgaaggcagcgccccaggcaccagcaccgagcctagtgagggcggctctggcggcggcagcgcccaggagattaaacggatcaacaagatcagaagaagacttgtgaaagacagcaacaccaagaaggccggcaagacaggccccatgaaaaccctgctggttagagtgatgacacccgatctgagagagcggctggaaaacctgagaaagaagcctgaaaatatcccccagcccatcagcaatacatctagagccaacctgaataagctgctgaccgattacaccgaaatgaagaaggcgatcctgcatgtgtactgggaagagttccagaaggaccctgtgggcctgatgagccgggtggcccagcctgccagcaagaagatcgatcagaacaagctgaaacctgagatggacgagaagggcaacctgaccaccgccggctttgcctgctctcagtgtggccagcccctgttcgtgtacaagctggagcaggtgtctgagaagggcaaggcttacaccaactacttcggacggtgcaatgtggccgagcacgaaaagctgatcctgctggcccagctgaagcccgagaaggatagcgacgaagccgtgacatatagcctgggaaagtttgggcagagggccctggatttctacagcattcatgtgaccaaggagtccacccaccccgtgaagcccctggcccagatcgccggaaacagatacgcctccggacctgtgggaaaggccctgagcgacgcatgtatgggcacaatcgcctccttcctgtctaagtaccaggacatcatcatcgaacaccagaaggtggtgaagggcaaccagaagagactggagagcctgcgggagctggccggcaaggaaaacctggaataccctagcgtgaccctgccacctcagcctcacaccaaggagggcgttgatgcctacaacgaagtgatcgcccgggtgcgaatgtgggtgaacctgaacctgtggcagaagctgaagctaagcagagatgatgccaagcctctgctgagactgaagggattcccttcctttcctctggtcgagagacaggccaacgaagtggactggtgggacatggtgtgtaacgtgaagaagctgatcaacgagaaaaaggaggatggcaaggtgttttggcagaatctggctggctacaagagacaggaagccctgagaccatacctgagcagcgaggaagatcggaagaagggaaagaaattcgctcggtaccagctgggcgacctgctgctgcacctggaaaagaagcacggcgaggactggggaaaggtgtacgacgaggcctgggagcggattgacaagaaagtggaaggcctgagcaagcacatcaagctggaagaggaacggagaagcgaggacgcccagagcaaggccgccctgaccgactggctgcgggctaaggccagcttcgtgatcgagggcctgaaggaggccgacaaggacgagttctgcagatgcgagctgaagctgcagaagtggtacggggacctgcggggaaagcccttcgccatcgaagccgagaacagcatcctggacatcagcggcttcagcaagcagtacaactgtgccttcatctggcagaaggacggcgtgaagaagctgaacctgtacctgatcatcaactacttcaagggcggcaagctgcggttcaagaagatcaaacctgaagccttcgaagccaacagattctacaccgtgatcaacaaaaagagcggcgagatcgtgcccatggaggtgaacttcaacttcgacgaccccaacctgatcatcctgcctctggcctttggcaagagacagggcagagaattcatctggaacgacctgctgtccctggaaaccggcagcctgaagctggccaacggaagagtgatcgagaagacactgtacaacagaagaacccggcaggatgagcctgccctgttcgtggccctgaccttcgagcggcgggaggtcctggactcctccaatatcaaaccaatgaacctgatcggcgtggcaagaggcgaaaacatccccgccgtgatcgccctgaccgaccccgagggctgcccactgagccggtttaaggatagcctgggaaacccaacccacatcctgagaatcggcgagagctataaggagaagcagcggaccatccaggccaagaaggaggtggagcagcggagagccggcggctacagccggaagtacgccagcaaagccaagaatctggcagacgatatggtgagaaacaccgctagagatctgctgtactacgccgtgacccaggatgccatgctgatcttcgccaacctgagccggggcttcggccggcagggcaagcggaccttcatggccgagagacagtacacacggatggaggactggctgaccgccaagctggcctacgagggcctgagcaagacctacctgtccaagacactggcccagtacacctccaagacatgcagcaactgtgggtttaccatcaccagcgccgactacgacagggtgctggagaagctgaagaagacagcaacaggctggatgaccacaattaacggcaaggagctgaaggtggagggccagattacctactacaacagatacaagagacagaacgtagtcaaggacctgtccgtcgagctggatagactgagcgaagaatctgtgaacaacgacatctcctcctggacaaagggcagaagcggagaagctctgagcctcctgaagaaaagattctcccatagacccgtgcaggagaagttcgtgtgcctgaactgcggcttcgagacacacgcagccgagcaagccgccctgaacatcgccagatcctggctgttcctgcggagccaggagtacaagaaataccagacaaacaagacaaccggcaacaccgataagagagccttcgtcgagacctggcagtccttttaccggaagaagcttaaggaggtgtggaaacctgccgtgcggtctggcggatctggcggaggctccacaagctgctaccaggacagcgtgaccttcgacgacgtggccgtggacttcacccaggaggagtggaccctgctggacagcacccagaggagcctgtacagcgacgtgatgctggagaactacaagaacctggccaccgtgggcggccagatcatcaagcccagcctgatcagctggctggagcaggaggagagcaagaccgtgcagggcggcgtgctgcagggcaggaagacccagtggaggggcaccaccagccccaagaaaaagagaaaagtctaagctgccttctgcggggcttgccttctggccatgcccttcttctctcccttgcacctgtacctcttggtctttgaataaagcctgagtaggaaggctagcaaaaaaaaaaaaaaaaaaaaaaaaaaaaaaaaaaaaaaaaaaaaaaaaaaaaaaaaaaaaaaaaaaaaaaaaaaaaaaaa

SEQ ID NO: 3955 - RNA, 5419 nt, synthetic construct
  source 1..5419: mol_type = other RNA
aggaaataagagagaaaagaagagtaagaagaaatataagagccaccatggcccctaagaagaagcgtaaagtgagccgggtgaacggcagcggcagcggcggcggcatgaaccacgaccaggagttcgacccccctaaggtgtaccctcccgtccccgccgagaagagaaagcccatccgggtcctgagcctgttcgatggcatcgccaccggtctgctggtgctgaaggacctgggcatccaggtggataggtacattgcctccgaggtgtgcgaggactccatcaccgtgggaatggtgcgtcatcagggcaagatcatgtacgtgggcgacgtgcggagcgtgacacagaagcatatccaggagtggggccctttcgacctggtgatcggcggcagcccttgcaatgacctgagcatcgtgaacccagcccggaagggcctgtacgagggaaccggcagactgttcttcgagttttacagactgctgcacgacgcccggcctaaggaaggcgacgaccggcccttcttttggctgttcgagaatgtggtggccatgggagtcagcgacaagcgggatattagccggttcctggagagcaaccccgtgatgatcgatgccaaggaagtgagcgccgcccaccgggccagatacttctggggcaatctgcctggcatgaacagacccctggccagcaccgtgaacgacaagctggagctgcaggagtgcctggagcacggccggatcgccaagttcagcaaggtgagaaccatcaccacccgaagcaacagcatcaaacaaggcaaggaccagcactttcctgtgttcatgaacgagaaggaggacatcctgtggtgtaccgagatggagagagtgttcgggttcccagtccactacacagatgtcagcaacatgtctagactggccagacagagactgctgggaagaagctggtccgtccctgtgatcagacacctgttcgcccctctgaaggagtacttcgcctgcgtgagcagcggcaacagcaacgccaacagccggggccccagcttctctagcggcctggtgccactgtccctgagagggagccacatgggccccatggagatctacaaaaccgtgagcgcctggaagcggcagcctgtgcgcgtgctgagcctgtttcggaatatcgataaagtcctgaaaagcctgggattcctggagagcggctctggctccggcggtggcaccctgaagtacgtggaggatgtgacaaacgtggtcagacgggatgtggagaagtggggccccttcgatctggtgtacggcagcacccaacccctgggcagctcttgtgaccggtgccctggctggtacatgtttcagttccaccggatcctgcagtacgccctgccgagacaggagtcccagcggccattcttttggattttcatggacaacttgctgctgaccgaggatgaccaggaaactaccactcggttcctgcagaccgaagccgtgaccctgcaggacgtgagaggccgggactaccagaacgccatgcgggtgtggtccaacatccctggactgaaaagcaagcacgcacctctgacccctaaagaagaggagtacctgcaggcccaggtgcggagcagaagcaagctggacgcccctaaggtggatctgctggtgaagaattgcctcctgcccctgagagagtacttcaagtatttcagccagaatagtctgcccctgggcggcccaagcagcggcgcccctcctcccagcggcggcagcccagccggctccccaacctctaccgaggagggcacctctgagtccgccacccccgagagcggccctggcacctccaccgagcccagcgagggcagcgcacccggcagccctgccggcagccccacctccacagaggagggaaccagcaccgagcccagcgaaggcagcgccccaggcaccagcaccgagcctagtgagggcggctctggcggcggcagcgcccaggagattaaacggatcaacaagatcagaagaagacttgtgaaagacagcaacaccaagaaggccggcaagacaggccccatgaaaaccctgctggttagagtgatgacacccgatctgagagagcggctggaaaacctgagaaagaagcctgaaaatatcccccagcccatcagcaatacatctagagccaacctgaataagctgctgaccgattacaccgaaatgaagaaggcgatcctgcatgtgtactgggaagagttccagaaggaccctgtgggcctgatgagccgggtggcccagcctgccagcaagaagatcgatcagaacaagctgaaacctgagatggacgagaagggcaacctgaccaccgccggctttgcctgctctcagtgtggccagcccctgttcgtgtacaagctggagcaggtgtctgagaagggcaaggcttacaccaactacttcggacggtgcaatgtggccgagcacgaaaagctgatcctgctggcccagctgaagcccgagaaggatagcgacgaagccgtgacatatagcctgggaaagtttgggcagagggccctggatttctacagcattcatgtgaccaaggagtccacccaccccgtgaagcccctggcccagatcgccggaaacagatacgcctccggacctgtgggaaaggccctgagcgacgcatgtatgggcacaatcgcctccttcctgtctaagtaccaggacatcatcatcgaacaccagaaggtggtgaagggcaaccagaagagactggagagcctgcgggagctggccggcaaggaaaacctggaataccctagcgtgaccctgccacctcagcctcacaccaaggagggcgttgatgcctacaacgaagtgatcgcccgggtgcgaatgtgggtgaacctgaacctgtggcagaagctgaagctaagcagagatgatgccaagcctctgctgagactgaagggattcccttcctttcctctggtcgagagacaggccaacgaagtggactggtgggacatggtgtgtaacgtgaagaagctgatcaacgagaaaaaggaggatggcaaggtgttttggcagaatctggctggctacaagagacaggaagccctgagaccatacctgagcagcgaggaagatcggaagaagggaaagaaattcgctcggtaccagctgggcgacctgctgctgcacctggaaaagaagcacggcgaggactggggaaaggtgtacgacgaggcctgggagcggattgacaagaaagtggaaggcctgagcaagcacatcaagctggaagaggaacggagaagcgaggacgcccagagcaaggccgccctgaccgactggctgcgggctaaggccagcttcgtgatcgagggcctgaaggaggccgacaaggacgagttctgcagatgcgagctgaagctgcagaagtggtacggggacctgcggggaaagcccttcgccatcgaagccgagaacagcatcctggacatcagcggcttcagcaagcagtacaactgtgccttcatctggcagaaggacggcgtgaagaagctgaacctgtacctgatcatcaactacttcaagggcggcaagctgcggttcaagaagatcaaacctgaagccttcgaagccaacagattctacaccgtgatcaacaaaaagagcggcgagatcgtgcccatggaggtgaacttcaacttcgacgaccccaacctgatcatcctgcctctggcctttggcaagagacagggcagagaattcatctggaacgacctgctgtccctggaaaccggcagcctgaagctggccaacggaagagtgatcgagaagacactgtacaacagaagaacccggcaggatgagcctgccctgttcgtggccctgaccttcgagcggcgggaggtcctggactcctccaatatcaaaccaatgaacctgatcggcgtggcaagaggcgaaaacatccccgccgtgatcgccctgaccgaccccgagggctgcccactgagccggtttaaggatagcctgggaaacccaacccacatcctgagaatcggcgagagctataaggagaagcagcggaccatccaggccaagaaggaggtggagcagcggagagccggcggctacagccggaagtacgccagcaaagccaagaatctggcagacgatatggtgagaaacaccgctagagatctgctgtactacgccgtgacccaggatgccatgctgatcttcgccaacctgagccggggcttcggccggcagggcaagcggaccttcatggccgagagacagtacacacggatggaggactggctgaccgccaagctggcctacgagggcctgagcaagacctacctgtccaagacactggcccagtacacctccaagacatgcagcaactgtgggtttaccatcaccagcgccgactacgacagggtgctggagaagctgaagaagacagcaacaggctggatgaccacaattaacggcaaggagctgaaggtggagggccagattacctactacaacagatacaagagacagaacgtagtcaaggacctgtccgtcgagctggatagactgagcgaagaatctgtgaacaacgacatctcctcctggacaaagggcagaagcggagaagctctgagcctcctgaagaaaagattctcccatagacccgtgcaggagaagttcgtgtgcctgaactgcggcttcgagacacacgcagccgagcaagccgccctgaacatcgccagatcctggctgttcctgcggagccaggagtacaagaaataccagacaaacaagacaaccggcaacaccgataagagagccttcgtcgagacctggcagtccttttaccggaagaagcttaaggaggtgtggaaacctgccgtgcggtctggcggatctggcggaggctccacaagcagccaggagctggtgaccttcgaggacgtggccatctacttcaccgaggaggagtggggcctgctggaccccgcccagaggaagctgtacagggacgtgatgctggagaacttcggcaacgtgctgctgctgggcttccccgtgagcaagcccgacatcatcagcaagctggagaggggcgagatcccctgcgtgcccttcctgcccaggaagaagatcctggtgatcaggctgggcggcggcaccagccccaagaaaaagagaaaagtctaagctgccttctgcggggcttgccttctggccatgcccttcttctctcccttgcacctgtacctcttggtctttgaataaagcctgagtaggaaggctagcaaaaaaaaaaaaaaaaaaaaaaaaaaaaaaaaaaaaaaaaaaaaaaaaaaaaaaaaaaaaaaaaaaaaaaaaaaaaaaaa

SEQ ID NO: 3956 - RNA, 5419 nt, synthetic construct
  source 1..5419: mol_type = other RNA
aggaaataagagagaaaagaagagtaagaagaaatataagagccaccatggcccctaagaagaagcgtaaagtgagccgggtgaacggcagcggcagcggcggcggcatgaaccacgaccaggagttcgacccccctaaggtgtaccctcccgtccccgccgagaagagaaagcccatccgggtcctgagcctgttcgatggcatcgccaccggtctgctggtgctgaaggacctgggcatccaggtggataggtacattgcctccgaggtgtgcgaggactccatcaccgtgggaatggtgcgtcatcagggcaagatcatgtacgtgggcgacgtgcggagcgtgacacagaagcatatccaggagtggggccctttcgacctggtgatcggcggcagcccttgcaatgacctgagcatcgtgaacccagcccggaagggcctgtacgagggaaccggcagactgttcttcgagttttacagactgctgcacgacgcccggcctaaggaaggcgacgaccggcccttcttttggctgttcgagaatgtggtggccatgggagtcagcgacaagcgggatattagccggttcctggagagcaaccccgtgatgatcgatgccaaggaagtgagcgccgcccaccgggccagatacttctggggcaatctgcctggcatgaacagacccctggccagcaccgtgaacgacaagctggagctgcaggagtgcctggagcacggccggatcgccaagttcagcaaggtgagaaccatcaccacccgaagcaacagcatcaaacaaggcaaggaccagcactttcctgtgttcatgaacgagaaggaggacatcctgtggtgtaccgagatggagagagtgttcgggttcccagtccactacacagatgtcagcaacatgtctagactggccagacagagactgctgggaagaagctggtccgtccctgtgatcagacacctgttcgcccctctgaaggagtacttcgcctgcgtgagcagcggcaacagcaacgccaacagccggggccccagcttctctagcggcctggtgccactgtccctgagagggagccacatgggccccatggagatctacaaaaccgtgagcgcctggaagcggcagcctgtgcgcgtgctgagcctgtttcggaatatcgataaagtcctgaaaagcctgggattcctggagagcggctctggctccggcggtggcaccctgaagtacgtggaggatgtgacaaacgtggtcagacgggatgtggagaagtggggccccttcgatctggtgtacggcagcacccaacccctgggcagctcttgtgaccggtgccctggctggtacatgtttcagttccaccggatcctgcagtacgccctgccgagacaggagtcccagcggccattcttttggattttcatggacaacttgctgctgaccgaggatgaccaggaaactaccactcggttcctgcagaccgaagccgtgaccctgcaggacgtgagaggccgggactaccagaacgccatgcgggtgtggtccaacatccctggactgaaaagcaagcacgcacctctgacccctaaagaagaggagtacctgcaggcccaggtgcggagcagaagcaagctggacgcccctaaggtggatctgctggtgaagaattgcctcctgcccctgagagagtacttcaagtatttcagccagaatagtctgcccctgggcggcccaagcagcggcgcccctcctcccagcggcggcagcccagccggctccccaacctctaccgaggagggcacctctgagtccgccacccccgagagcggccctggcacctccaccgagcccagcgagggcagcgcacccggcagccctgccggcagccccacctccacagaggagggaaccagcaccgagcccagcgaaggcagcgccccaggcaccagcaccgagcctagtgagggcggctctggcggcggcagcgcccaggagattaaacggatcaacaagatcagaagaagacttgtgaaagacagcaacaccaagaaggccggcaagacaggccccatgaaaaccctgctggttagagtgatgacacccgatctgagagagcggctggaaaacctgagaaagaagcctgaaaatatcccccagcccatcagcaatacatctagagccaacctgaataagctgctgaccgattacaccgaaatgaagaaggcgatcctgcatgtgtactgggaagagttccagaaggaccctgtgggcctgatgagccgggtggcccagcctgccagcaagaagatcgatcagaacaagctgaaacctgagatggacgagaagggcaacctgaccaccgccggctttgcctgctctcagtgtggccagcccctgttcgtgtacaagctggagcaggtgtctgagaagggcaaggcttacaccaactacttcggacggtgcaatgtggccgagcacgaaaagctgatcctgctggcccagctgaagcccgagaaggatagcgacgaagccgtgacatatagcctgggaaagtttgggcagagggccctggatttctacagcattcatgtgaccaaggagtccacccaccccgtgaagcccctggcccagatcgccggaaacagatacgcctccggacctgtgggaaaggccctgagcgacgcatgtatgggcacaatcgcctccttcctgtctaagtaccaggacatcatcatcgaacaccagaaggtggtgaagggcaaccagaagagactggagagcctgcgggagctggccggcaaggaaaacctggaataccctagcgtgaccctgccacctcagcctcacaccaaggagggcgttgatgcctacaacgaagtgatcgcccgggtgcgaatgtgggtgaacctgaacctgtggcagaagctgaagctaagcagagatgatgccaagcctctgctgagactgaagggattcccttcctttcctctggtcgagagacaggccaacgaagtggactggtgggacatggtgtgtaacgtgaagaagctgatcaacgagaaaaaggaggatggcaaggtgttttggcagaatctggctggctacaagagacaggaagccctgagaccatacctgagcagcgaggaagatcggaagaagggaaagaaattcgctcggtaccagctgggcgacctgctgctgcacctggaaaagaagcacggcgaggactggggaaaggtgtacgacgaggcctgggagcggattgacaagaaagtggaaggcctgagcaagcacatcaagctggaagaggaacggagaagcgaggacgcccagagcaaggccgccctgaccgactggctgcgggctaaggccagcttcgtgatcgagggcctgaaggaggccgacaaggacgagttctgcagatgcgagctgaagctgcagaagtggtacggggacctgcggggaaagcccttcgccatcgaagccgagaacagcatcctggacatcagcggcttcagcaagcagtacaactgtgccttcatctggcagaaggacggcgtgaagaagctgaacctgtacctgatcatcaactacttcaagggcggcaagctgcggttcaagaagatcaaacctgaagccttcgaagccaacagattctacaccgtgatcaacaaaaagagcggcgagatcgtgcccatggaggtgaacttcaacttcgacgaccccaacctgatcatcctgcctctggcctttggcaagagacagggcagagaattcatctggaacgacctgctgtccctggaaaccggcagcctgaagctggccaacggaagagtgatcgagaagacactgtacaacagaagaacccggcaggatgagcctgccctgttcgtggccctgaccttcgagcggcgggaggtcctggactcctccaatatcaaaccaatgaacctgatcggcgtggcaagaggcgaaaacatccccgccgtgatcgccctgaccgaccccgagggctgcccactgagccggtttaaggatagcctgggaaacccaacccacatcctgagaatcggcgagagctataaggagaagcagcggaccatccaggccaagaaggaggtggagcagcggagagccggcggctacagccggaagtacgccagcaaagccaagaatctggcagacgatatggtgagaaacaccgctagagatctgctgtactacgccgtgacccaggatgccatgctgatcttcgccaacctgagccggggcttcggccggcagggcaagcggaccttcatggccgagagacagtacacacggatggaggactggctgaccgccaagctggcctacgagggcctgagcaagacctacctgtccaagacactggcccagtacacctccaagacatgcagcaactgtgggtttaccatcaccagcgccgactacgacagggtgctggagaagctgaagaagacagcaacaggctggatgaccacaattaacggcaaggagctgaaggtggagggccagattacctactacaacagatacaagagacagaacgtagtcaaggacctgtccgtcgagctggatagactgagcgaagaatctgtgaacaacgacatctcctcctggacaaagggcagaagcggagaagctctgagcctcctgaagaaaagattctcccatagacccgtgcaggagaagttcgtgtgcctgaactgcggcttcgagacacacgcagccgagcaagccgccctgaacatcgccagatcctggctgttcctgcggagccaggagtacaagaaataccagacaaacaagacaaccggcaacaccgataagagagccttcgtcgagacctggcagtccttttaccggaagaagcttaaggaggtgtggaaacctgccgtgcggtctggcggatctggcggaggctccacaagcctgttcgagagcgtgagcttcaaggacgtgaccatcgacttcagctgggaggagtggcagcagctggacttcgcccagaagagcctgtacagggacgtgatgctggagaactacttcaacctgatcagcgtgggctgccaggtgcccaagcccgaggtgatcttcaacctggagcaggtggagaacccctgcatgctgcacaggaagatcagcaggcagagctgcctggacggcgacatcggcaccagccccaagaaaaagagaaaagtctaagctgccttctgcggggcttgccttctggccatgcccttcttctctcccttgcacctgtacctcttggtctttgaataaagcctgagtaggaaggctagcaaaaaaaaaaaaaaaaaaaaaaaaaaaaaaaaaaaaaaaaaaaaaaaaaaaaaaaaaaaaaaaaaaaaaaaaaaaaaaaa

SEQ ID NO: 3957 - RNA, 5419 nt, synthetic construct
  source 1..5419: mol_type = other RNA
aggaaataagagagaaaagaagagtaagaagaaatataagagccaccatggcccctaagaagaagcgtaaagtgagccgggtgaacggcagcggcagcggcggcggcatgaaccacgaccaggagttcgacccccctaaggtgtaccctcccgtccccgccgagaagagaaagcccatccgggtcctgagcctgttcgatggcatcgccaccggtctgctggtgctgaaggacctgggcatccaggtggataggtacattgcctccgaggtgtgcgaggactccatcaccgtgggaatggtgcgtcatcagggcaagatcatgtacgtgggcgacgtgcggagcgtgacacagaagcatatccaggagtggggccctttcgacctggtgatcggcggcagcccttgcaatgacctgagcatcgtgaacccagcccggaagggcctgtacgagggaaccggcagactgttcttcgagttttacagactgctgcacgacgcccggcctaaggaaggcgacgaccggcccttcttttggctgttcgagaatgtggtggccatgggagtcagcgacaagcgggatattagccggttcctggagagcaaccccgtgatgatcgatgccaaggaagtgagcgccgcccaccgggccagatacttctggggcaatctgcctggcatgaacagacccctggccagcaccgtgaacgacaagctggagctgcaggagtgcctggagcacggccggatcgccaagttcagcaaggtgagaaccatcaccacccgaagcaacagcatcaaacaaggcaaggaccagcactttcctgtgttcatgaacgagaaggaggacatcctgtggtgtaccgagatggagagagtgttcgggttcccagtccactacacagatgtcagcaacatgtctagactggccagacagagactgctgggaagaagctggtccgtccctgtgatcagacacctgttcgcccctctgaaggagtacttcgcctgcgtgagcagcggcaacagcaacgccaacagccggggccccagcttctctagcggcctggtgccactgtccctgagagggagccacatgggccccatggagatctacaaaaccgtgagcgcctggaagcggcagcctgtgcgcgtgctgagcctgtttcggaatatcgataaagtcctgaaaagcctgggattcctggagagcggctctggctccggcggtggcaccctgaagtacgtggaggatgtgacaaacgtggtcagacgggatgtggagaagtggggccccttcgatctggtgtacggcagcacccaacccctgggcagctcttgtgaccggtgccctggctggtacatgtttcagttccaccggatcctgcagtacgccctgccgagacaggagtcccagcggccattcttttggattttcatggacaacttgctgctgaccgaggatgaccaggaaactaccactcggttcctgcagaccgaagccgtgaccctgcaggacgtgagaggccgggactaccagaacgccatgcgggtgtggtccaacatccctggactgaaaagcaagcacgcacctctgacccctaaagaagaggagtacctgcaggcccaggtgcggagcagaagcaagctggacgcccctaaggtggatctgctggtgaagaattgcctcctgcccctgagagagtacttcaagtatttcagccagaatagtctgcccctgggcggcccaagcagcggcgcccctcctcccagcggcggcagcccagccggctccccaacctctaccgaggagggcacctctgagtccgccacccccgagagcggccctggcacctccaccgagcccagcgagggcagcgcacccggcagccctgccggcagccccacctccacagaggagggaaccagcaccgagcccagcgaaggcagcgccccaggcaccagcaccgagcctagtgagggcggctctggcggcggcagcgcccaggagattaaacggatcaacaagatcagaagaagacttgtgaaagacagcaacaccaagaaggccggcaagacaggccccatgaaaaccctgctggttagagtgatgacacccgatctgagagagcggctggaaaacctgagaaagaagcctgaaaatatcccccagcccatcagcaatacatctagagccaacctgaataagctgctgaccgattacaccgaaatgaagaaggcgatcctgcatgtgtactgggaagagttccagaaggaccctgtgggcctgatgagccgggtggcccagcctgccagcaagaagatcgatcagaacaagctgaaacctgagatggacgagaagggcaacctgaccaccgccggctttgcctgctctcagtgtggccagcccctgttcgtgtacaagctggagcaggtgtctgagaagggcaaggcttacaccaactacttcggacggtgcaatgtggccgagcacgaaaagctgatcctgctggcccagctgaagcccgagaaggatagcgacgaagccgtgacatatagcctgggaaagtttgggcagagggccctggatttctacagcattcatgtgaccaaggagtccacccaccccgtgaagcccctggcccagatcgccggaaacagatacgcctccggacctgtgggaaaggccctgagcgacgcatgtatgggcacaatcgcctccttcctgtctaagtaccaggacatcatcatcgaacaccagaaggtggtgaagggcaaccagaagagactggagagcctgcgggagctggccggcaaggaaaacctggaataccctagcgtgaccctgccacctcagcctcacaccaaggagggcgttgatgcctacaacgaagtgatcgcccgggtgcgaatgtgggtgaacctgaacctgtggcagaagctgaagctaagcagagatgatgccaagcctctgctgagactgaagggattcccttcctttcctctggtcgagagacaggccaacgaagtggactggtgggacatggtgtgtaacgtgaagaagctgatcaacgagaaaaaggaggatggcaaggtgttttggcagaatctggctggctacaagagacaggaagccctgagaccatacctgagcagcgaggaagatcggaagaagggaaagaaattcgctcggtaccagctgggcgacctgctgctgcacctggaaaagaagcacggcgaggactggggaaaggtgtacgacgaggcctgggagcggattgacaagaaagtggaaggcctgagcaagcacatcaagctggaagaggaacggagaagcgaggacgcccagagcaaggccgccctgaccgactggctgcgggctaaggccagcttcgtgatcgagggcctgaaggaggccgacaaggacgagttctgcagatgcgagctgaagctgcagaagtggtacggggacctgcggggaaagcccttcgccatcgaagccgagaacagcatcctggacatcagcggcttcagcaagcagtacaactgtgccttcatctggcagaaggacggcgtgaagaagctgaacctgtacctgatcatcaactacttcaagggcggcaagctgcggttcaagaagatcaaacctgaagccttcgaagccaacagattctacaccgtgatcaacaaaaagagcggcgagatcgtgcccatggaggtgaacttcaacttcgacgaccccaacctgatcatcctgcctctggcctttggcaagagacagggcagagaattcatctggaacgacctgctgtccctggaaaccggcagcctgaagctggccaacggaagagtgatcgagaagacactgtacaacagaagaacccggcaggatgagcctgccctgttcgtggccctgaccttcgagcggcgggaggtcctggactcctccaatatcaaaccaatgaacctgatcggcgtggcaagaggcgaaaacatccccgccgtgatcgccctgaccgaccccgagggctgcccactgagccggtttaaggatagcctgggaaacccaacccacatcctgagaatcggcgagagctataaggagaagcagcggaccatccaggccaagaaggaggtggagcagcggagagccggcggctacagccggaagtacgccagcaaagccaagaatctggcagacgatatggtgagaaacaccgctagagatctgctgtactacgccgtgacccaggatgccatgctgatcttcgccaacctgagccggggcttcggccggcagggcaagcggaccttcatggccgagagacagtacacacggatggaggactggctgaccgccaagctggcctacgagggcctgagcaagacctacctgtccaagacactggcccagtacacctccaagacatgcagcaactgtgggtttaccatcaccagcgccgactacgacagggtgctggagaagctgaagaagacagcaacaggctggatgaccacaattaacggcaaggagctgaaggtggagggccagattacctactacaacagatacaagagacagaacgtagtcaaggacctgtccgtcgagctggatagactgagcgaagaatctgtgaacaacgacatctcctcctggacaaagggcagaagcggagaagctctgagcctcctgaagaaaagattctcccatagacccgtgcaggagaagttcgtgtgcctgaactgcggcttcgagacacacgcagccgagcaagccgccctgaacatcgccagatcctggctgttcctgcggagccaggagtacaagaaataccagacaaacaagacaaccggcaacaccgataagagagccttcgtcgagacctggcagtccttttaccggaagaagcttaaggaggtgtggaaacctgccgtgcggtctggcggatctggcggaggctccacaagcgcccagggcctggtgctgttcgaggacgtgagcgtggacttcacccagaaggagtggcagctgctggacaggacccagaggctgctgtacagggacgtgatgctggagaactacggccacctggtgagcctgggccactgcgtgagcaagcccgagctgatcctgaagctggagcaggaggaggagccctggatcctgaagggccagctggccagcgagagccaccccgaggtgcagaggaccaccagccccaagaaaaagagaaaagtctaagctgccttctgcggggcttgccttctggccatgcccttcttctctcccttgcacctgtacctcttggtctttgaataaagcctgagtaggaaggctagcaaaaaaaaaaaaaaaaaaaaaaaaaaaaaaaaaaaaaaaaaaaaaaaaaaaaaaaaaaaaaaaaaaaaaaaaaaaaaaaa

SEQ ID NO: 3958 - RNA, 5419 nt, synthetic construct
  source 1..5419: mol_type = other RNA
aggaaataagagagaaaagaagagtaagaagaaatataagagccaccatggcccctaagaagaagcgtaaagtgagccgggtgaacggcagcggcagcggcggcggcatgaaccacgaccaggagttcgacccccctaaggtgtaccctcccgtccccgccgagaagagaaagcccatccgggtcctgagcctgttcgatggcatcgccaccggtctgctggtgctgaaggacctgggcatccaggtggataggtacattgcctccgaggtgtgcgaggactccatcaccgtgggaatggtgcgtcatcagggcaagatcatgtacgtgggcgacgtgcggagcgtgacacagaagcatatccaggagtggggccctttcgacctggtgatcggcggcagcccttgcaatgacctgagcatcgtgaacccagcccggaagggcctgtacgagggaaccggcagactgttcttcgagttttacagactgctgcacgacgcccggcctaaggaaggcgacgaccggcccttcttttggctgttcgagaatgtggtggccatgggagtcagcgacaagcgggatattagccggttcctggagagcaaccccgtgatgatcgatgccaaggaagtgagcgccgcccaccgggccagatacttctggggcaatctgcctggcatgaacagacccctggccagcaccgtgaacgacaagctggagctgcaggagtgcctggagcacggccggatcgccaagttcagcaaggtgagaaccatcaccacccgaagcaacagcatcaaacaaggcaaggaccagcactttcctgtgttcatgaacgagaaggaggacatcctgtggtgtaccgagatggagagagtgttcgggttcccagtccactacacagatgtcagcaacatgtctagactggccagacagagactgctgggaagaagctggtccgtccctgtgatcagacacctgttcgcccctctgaaggagtacttcgcctgcgtgagcagcggcaacagcaacgccaacagccggggccccagcttctctagcggcctggtgccactgtccctgagagggagccacatgggccccatggagatctacaaaaccgtgagcgcctggaagcggcagcctgtgcgcgtgctgagcctgtttcggaatatcgataaagtcctgaaaagcctgggattcctggagagcggctctggctccggcggtggcaccctgaagtacgtggaggatgtgacaaacgtggtcagacgggatgtggagaagtggggccccttcgatctggtgtacggcagcacccaacccctgggcagctcttgtgaccggtgccctggctggtacatgtttcagttccaccggatcctgcagtacgccctgccgagacaggagtcccagcggccattcttttggattttcatggacaacttgctgctgaccgaggatgaccaggaaactaccactcggttcctgcagaccgaagccgtgaccctgcaggacgtgagaggccgggactaccagaacgccatgcgggtgtggtccaacatccctggactgaaaagcaagcacgcacctctgacccctaaagaagaggagtacctgcaggcccaggtgcggagcagaagcaagctggacgcccctaaggtggatctgctggtgaagaattgcctcctgcccctgagagagtacttcaagtatttcagccagaatagtctgcccctgggcggcccaagcagcggcgcccctcctcccagcggcggcagcccagccggctccccaacctctaccgaggagggcacctctgagtccgccacccccgagagcggccctggcacctccaccgagcccagcgagggcagcgcacccggcagccctgccggcagccccacctccacagaggagggaaccagcaccgagcccagcgaaggcagcgccccaggcaccagcaccgagcctagtgagggcggctctggcggcggcagcgcccaggagattaaacggatcaacaagatcagaagaagacttgtgaaagacagcaacaccaagaaggccggcaagacaggccccatgaaaaccctgctggttagagtgatgacacccgatctgagagagcggctggaaaacctgagaaagaagcctgaaaatatcccccagcccatcagcaatacatctagagccaacctgaataagctgctgaccgattacaccgaaatgaagaaggcgatcctgcatgtgtactgggaagagttccagaaggaccctgtgggcctgatgagccgggtggcccagcctgccagcaagaagatcgatcagaacaagctgaaacctgagatggacgagaagggcaacctgaccaccgccggctttgcctgctctcagtgtggccagcccctgttcgtgtacaagctggagcaggtgtctgagaagggcaaggcttacaccaactacttcggacggtgcaatgtggccgagcacgaaaagctgatcctgctggcccagctgaagcccgagaaggatagcgacgaagccgtgacatatagcctgggaaagtttgggcagagggccctggatttctacagcattcatgtgaccaaggagtccacccaccccgtgaagcccctggcccagatcgccggaaacagatacgcctccggacctgtgggaaaggccctgagcgacgcatgtatgggcacaatcgcctccttcctgtctaagtaccaggacatcatcatcgaacaccagaaggtggtgaagggcaaccagaagagactggagagcctgcgggagctggccggcaaggaaaacctggaataccctagcgtgaccctgccacctcagcctcacaccaaggagggcgttgatgcctacaacgaagtgatcgcccgggtgcgaatgtgggtgaacctgaacctgtggcagaagctgaagctaagcagagatgatgccaagcctctgctgagactgaagggattcccttcctttcctctggtcgagagacaggccaacgaagtggactggtgggacatggtgtgtaacgtgaagaagctgatcaacgagaaaaaggaggatggcaaggtgttttggcagaatctggctggctacaagagacaggaagccctgagaccatacctgagcagcgaggaagatcggaagaagggaaagaaattcgctcggtaccagctgggcgacctgctgctgcacctggaaaagaagcacggcgaggactggggaaaggtgtacgacgaggcctgggagcggattgacaagaaagtggaaggcctgagcaagcacatcaagctggaagaggaacggagaagcgaggacgcccagagcaaggccgccctgaccgactggctgcgggctaaggccagcttcgtgatcgagggcctgaaggaggccgacaaggacgagttctgcagatgcgagctgaagctgcagaagtggtacggggacctgcggggaaagcccttcgccatcgaagccgagaacagcatcctggacatcagcggcttcagcaagcagtacaactgtgccttcatctggcagaaggacggcgtgaagaagctgaacctgtacctgatcatcaactacttcaagggcggcaagctgcggttcaagaagatcaaacctgaagccttcgaagccaacagattctacaccgtgatcaacaaaaagagcggcgagatcgtgcccatggaggtgaacttcaacttcgacgaccccaacctgatcatcctgcctctggcctttggcaagagacagggcagagaattcatctggaacgacctgctgtccctggaaaccggcagcctgaagctggccaacggaagagtgatcgagaagacactgtacaacagaagaacccggcaggatgagcctgccctgttcgtggccctgaccttcgagcggcgggaggtcctggactcctccaatatcaaaccaatgaacctgatcggcgtggcaagaggcgaaaacatccccgccgtgatcgccctgaccgaccccgagggctgcccactgagccggtttaaggatagcctgggaaacccaacccacatcctgagaatcggcgagagctataaggagaagcagcggaccatccaggccaagaaggaggtggagcagcggagagccggcggctacagccggaagtacgccagcaaagccaagaatctggcagacgatatggtgagaaacaccgctagagatctgctgtactacgccgtgacccaggatgccatgctgatcttcgccaacctgagccggggcttcggccggcagggcaagcggaccttcatggccgagagacagtacacacggatggaggactggctgaccgccaagctggcctacgagggcctgagcaagacctacctgtccaagacactggcccagtacacctccaagacatgcagcaactgtgggtttaccatcaccagcgccgactacgacagggtgctggagaagctgaagaagacagcaacaggctggatgaccacaattaacggcaaggagctgaaggtggagggccagattacctactacaacagatacaagagacagaacgtagtcaaggacctgtccgtcgagctggatagactgagcgaagaatctgtgaacaacgacatctcctcctggacaaagggcagaagcggagaagctctgagcctcctgaagaaaagattctcccatagacccgtgcaggagaagttcgtgtgcctgaactgcggcttcgagacacacgcagccgagcaagccgccctgaacatcgccagatcctggctgttcctgcggagccaggagtacaagaaataccagacaaacaagacaaccggcaacaccgataagagagccttcgtcgagacctggcagtccttttaccggaagaagcttaaggaggtgtggaaacctgccgtgcggtctggcggatctggcggaggctccacaagcacccagggcagcctgagcttcagggacgtgaccgtgggcttcacccaggaggagtggcagcacctggaccccgcccagaggagcctgtacagggacgtgatgctggagaactacagccacctggtgagcctgggctacagcatcagcaagcccgaggtgatcctgaagctggagcagggcgaggagccctggatcctggaggaggagttccccagccagagcgacctggagctgatcaagagcaccagccccaagaaaaagagaaaagtctaagctgccttctgcggggcttgccttctggccatgcccttcttctctcccttgcacctgtacctcttggtctttgaataaagcctgagtaggaaggctagcaaaaaaaaaaaaaaaaaaaaaaaaaaaaaaaaaaaaaaaaaaaaaaaaaaaaaaaaaaaaaaaaaaaaaaaaaaaaaaaa

SEQ ID NO: 3959 - RNA, 5419 nt, synthetic construct
  source 1..5419: mol_type = other RNA
aggaaataagagagaaaagaagagtaagaagaaatataagagccaccatggcccctaagaagaagcgtaaagtgagccgggtgaacggcagcggcagcggcggcggcatgaaccacgaccaggagttcgacccccctaaggtgtaccctcccgtccccgccgagaagagaaagcccatccgggtcctgagcctgttcgatggcatcgccaccggtctgctggtgctgaaggacctgggcatccaggtggataggtacattgcctccgaggtgtgcgaggactccatcaccgtgggaatggtgcgtcatcagggcaagatcatgtacgtgggcgacgtgcggagcgtgacacagaagcatatccaggagtggggccctttcgacctggtgatcggcggcagcccttgcaatgacctgagcatcgtgaacccagcccggaagggcctgtacgagggaaccggcagactgttcttcgagttttacagactgctgcacgacgcccggcctaaggaaggcgacgaccggcccttcttttggctgttcgagaatgtggtggccatgggagtcagcgacaagcgggatattagccggttcctggagagcaaccccgtgatgatcgatgccaaggaagtgagcgccgcccaccgggccagatacttctggggcaatctgcctggcatgaacagacccctggccagcaccgtgaacgacaagctggagctgcaggagtgcctggagcacggccggatcgccaagttcagcaaggtgagaaccatcaccacccgaagcaacagcatcaaacaaggcaaggaccagcactttcctgtgttcatgaacgagaaggaggacatcctgtggtgtaccgagatggagagagtgttcgggttcccagtccactacacagatgtcagcaacatgtctagactggccagacagagactgctgggaagaagctggtccgtccctgtgatcagacacctgttcgcccctctgaaggagtacttcgcctgcgtgagcagcggcaacagcaacgccaacagccggggccccagcttctctagcggcctggtgccactgtccctgagagggagccacatgggccccatggagatctacaaaaccgtgagcgcctggaagcggcagcctgtgcgcgtgctgagcctgtttcggaatatcgataaagtcctgaaaagcctgggattcctggagagcggctctggctccggcggtggcaccctgaagtacgtggaggatgtgacaaacgtggtcagacgggatgtggagaagtggggccccttcgatctggtgtacggcagcacccaacccctgggcagctcttgtgaccggtgccctggctggtacatgtttcagttccaccggatcctgcagtacgccctgccgagacaggagtcccagcggccattcttttggattttcatggacaacttgctgctgaccgaggatgaccaggaaactaccactcggttcctgcagaccgaagccgtgaccctgcaggacgtgagaggccgggactaccagaacgccatgcgggtgtggtccaacatccctggactgaaaagcaagcacgcacctctgacccctaaagaagaggagtacctgcaggcccaggtgcggagcagaagcaagctggacgcccctaaggtggatctgctggtgaagaattgcctcctgcccctgagagagtacttcaagtatttcagccagaatagtctgcccctgggcggcccaagcagcggcgcccctcctcccagcggcggcagcccagccggctccccaacctctaccgaggagggcacctctgagtccgccacccccgagagcggccctggcacctccaccgagcccagcgagggcagcgcacccggcagccctgccggcagccccacctccacagaggagggaaccagcaccgagcccagcgaaggcagcgccccaggcaccagcaccgagcctagtgagggcggctctggcggcggcagcgcccaggagattaaacggatcaacaagatcagaagaagacttgtgaaagacagcaacaccaagaaggccggcaagacaggccccatgaaaaccctgctggttagagtgatgacacccgatctgagagagcggctggaaaacctgagaaagaagcctgaaaatatcccccagcccatcagcaatacatctagagccaacctgaataagctgctgaccgattacaccgaaatgaagaaggcgatcctgcatgtgtactgggaagagttccagaaggaccctgtgggcctgatgagccgggtggcccagcctgccagcaagaagatcgatcagaacaagctgaaacctgagatggacgagaagggcaacctgaccaccgccggctttgcctgctctcagtgtggccagcccctgttcgtgtacaagctggagcaggtgtctgagaagggcaaggcttacaccaactacttcggacggtgcaatgtggccgagcacgaaaagctgatcctgctggcccagctgaagcccgagaaggatagcgacgaagccgtgacatatagcctgggaaagtttgggcagagggccctggatttctacagcattcatgtgaccaaggagtccacccaccccgtgaagcccctggcccagatcgccggaaacagatacgcctccggacctgtgggaaaggccctgagcgacgcatgtatgggcacaatcgcctccttcctgtctaagtaccaggacatcatcatcgaacaccagaaggtggtgaagggcaaccagaagagactggagagcctgcgggagctggccggcaaggaaaacctggaataccctagcgtgaccctgccacctcagcctcacaccaaggagggcgttgatgcctacaacgaagtgatcgcccgggtgcgaatgtgggtgaacctgaacctgtggcagaagctgaagctaagcagagatgatgccaagcctctgctgagactgaagggattcccttcctttcctctggtcgagagacaggccaacgaagtggactggtgggacatggtgtgtaacgtgaagaagctgatcaacgagaaaaaggaggatggcaaggtgttttggcagaatctggctggctacaagagacaggaagccctgagaccatacctgagcagcgaggaagatcggaagaagggaaagaaattcgctcggtaccagctgggcgacctgctgctgcacctggaaaagaagcacggcgaggactggggaaaggtgtacgacgaggcctgggagcggattgacaagaaagtggaaggcctgagcaagcacatcaagctggaagaggaacggagaagcgaggacgcccagagcaaggccgccctgaccgactggctgcgggctaaggccagcttcgtgatcgagggcctgaaggaggccgacaaggacgagttctgcagatgcgagctgaagctgcagaagtggtacggggacctgcggggaaagcccttcgccatcgaagccgagaacagcatcctggacatcagcggcttcagcaagcagtacaactgtgccttcatctggcagaaggacggcgtgaagaagctgaacctgtacctgatcatcaactacttcaagggcggcaagctgcggttcaagaagatcaaacctgaagccttcgaagccaacagattctacaccgtgatcaacaaaaagagcggcgagatcgtgcccatggaggtgaacttcaacttcgacgaccccaacctgatcatcctgcctctggcctttggcaagagacagggcagagaattcatctggaacgacctgctgtccctggaaaccggcagcctgaagctggccaacggaagagtgatcgagaagacactgtacaacagaagaacccggcaggatgagcctgccctgttcgtggccctgaccttcgagcggcgggaggtcctggactcctccaatatcaaaccaatgaacctgatcggcgtggcaagaggcgaaaacatccccgccgtgatcgccctgaccgaccccgagggctgcccactgagccggtttaaggatagcctgggaaacccaacccacatcctgagaatcggcgagagctataaggagaagcagcggaccatccaggccaagaaggaggtggagcagcggagagccggcggctacagccggaagtacgccagcaaagccaagaatctggcagacgatatggtgagaaacaccgctagagatctgctgtactacgccgtgacccaggatgccatgctgatcttcgccaacctgagccggggcttcggccggcagggcaagcggaccttcatggccgagagacagtacacacggatggaggactggctgaccgccaagctggcctacgagggcctgagcaagacctacctgtccaagacactggcccagtacacctccaagacatgcagcaactgtgggtttaccatcaccagcgccgactacgacagggtgctggagaagctgaagaagacagcaacaggctggatgaccacaattaacggcaaggagctgaaggtggagggccagattacctactacaacagatacaagagacagaacgtagtcaaggacctgtccgtcgagctggatagactgagcgaagaatctgtgaacaacgacatctcctcctggacaaagggcagaagcggagaagctctgagcctcctgaagaaaagattctcccatagacccgtgcaggagaagttcgtgtgcctgaactgcggcttcgagacacacgcagccgagcaagccgccctgaacatcgccagatcctggctgttcctgcggagccaggagtacaagaaataccagacaaacaagacaaccggcaacaccgataagagagccttcgtcgagacctggcagtccttttaccggaagaagcttaaggaggtgtggaaacctgccgtgcggtctggcggatctggcggaggctccacaagccaggccgagctgaccttcgaggacgtggccgtgttcctgagccaggaggagtggggcaggctggaccccgcccagaggggcctgtacagggacgtgatgctggagacctacaggaacctggtgagcctgggcgccggccccgccggccccaagcccggcgtgatcacccagctggagaggggcgacgagccctgggtgctggacacccagggcgtggagggcagggagaggcagaaggtggacaccagccccaagaaaaagagaaaagtctaagctgccttctgcggggcttgccttctggccatgcccttcttctctcccttgcacctgtacctcttggtctttgaataaagcctgagtaggaaggctagcaaaaaaaaaaaaaaaaaaaaaaaaaaaaaaaaaaaaaaaaaaaaaaaaaaaaaaaaaaaaaaaaaaaaaaaaaaaaaaaa

SEQ ID NO: 3960 - RNA, 5419 nt, synthetic construct
  source 1..5419: mol_type = other RNA
aggaaataagagagaaaagaagagtaagaagaaatataagagccaccatggcccctaagaagaagcgtaaagtgagccgggtgaacggcagcggcagcggcggcggcatgaaccacgaccaggagttcgacccccctaaggtgtaccctcccgtccccgccgagaagagaaagcccatccgggtcctgagcctgttcgatggcatcgccaccggtctgctggtgctgaaggacctgggcatccaggtggataggtacattgcctccgaggtgtgcgaggactccatcaccgtgggaatggtgcgtcatcagggcaagatcatgtacgtgggcgacgtgcggagcgtgacacagaagcatatccaggagtggggccctttcgacctggtgatcggcggcagcccttgcaatgacctgagcatcgtgaacccagcccggaagggcctgtacgagggaaccggcagactgttcttcgagttttacagactgctgcacgacgcccggcctaaggaaggcgacgaccggcccttcttttggctgttcgagaatgtggtggccatgggagtcagcgacaagcgggatattagccggttcctggagagcaaccccgtgatgatcgatgccaaggaagtgagcgccgcccaccgggccagatacttctggggcaatctgcctggcatgaacagacccctggccagcaccgtgaacgacaagctggagctgcaggagtgcctggagcacggccggatcgccaagttcagcaaggtgagaaccatcaccacccgaagcaacagcatcaaacaaggcaaggaccagcactttcctgtgttcatgaacgagaaggaggacatcctgtggtgtaccgagatggagagagtgttcgggttcccagtccactacacagatgtcagcaacatgtctagactggccagacagagactgctgggaagaagctggtccgtccctgtgatcagacacctgttcgcccctctgaaggagtacttcgcctgcgtgagcagcggcaacagcaacgccaacagccggggccccagcttctctagcggcctggtgccactgtccctgagagggagccacatgggccccatggagatctacaaaaccgtgagcgcctggaagcggcagcctgtgcgcgtgctgagcctgtttcggaatatcgataaagtcctgaaaagcctgggattcctggagagcggctctggctccggcggtggcaccctgaagtacgtggaggatgtgacaaacgtggtcagacgggatgtggagaagtggggccccttcgatctggtgtacggcagcacccaacccctgggcagctcttgtgaccggtgccctggctggtacatgtttcagttccaccggatcctgcagtacgccctgccgagacaggagtcccagcggccattcttttggattttcatggacaacttgctgctgaccgaggatgaccaggaaactaccactcggttcctgcagaccgaagccgtgaccctgcaggacgtgagaggccgggactaccagaacgccatgcgggtgtggtccaacatccctggactgaaaagcaagcacgcacctctgacccctaaagaagaggagtacctgcaggcccaggtgcggagcagaagcaagctggacgcccctaaggtggatctgctggtgaagaattgcctcctgcccctgagagagtacttcaagtatttcagccagaatagtctgcccctgggcggcccaagcagcggcgcccctcctcccagcggcggcagcccagccggctccccaacctctaccgaggagggcacctctgagtccgccacccccgagagcggccctggcacctccaccgagcccagcgagggcagcgcacccggcagccctgccggcagccccacctccacagaggagggaaccagcaccgagcccagcgaaggcagcgccccaggcaccagcaccgagcctagtgagggcggctctggcggcggcagcgcccaggagattaaacggatcaacaagatcagaagaagacttgtgaaagacagcaacaccaagaaggccggcaagacaggccccatgaaaaccctgctggttagagtgatgacacccgatctgagagagcggctggaaaacctgagaaagaagcctgaaaatatcccccagcccatcagcaatacatctagagccaacctgaataagctgctgaccgattacaccgaaatgaagaaggcgatcctgcatgtgtactgggaagagttccagaaggaccctgtgggcctgatgagccgggtggcccagcctgccagcaagaagatcgatcagaacaagctgaaacctgagatggacgagaagggcaacctgaccaccgccggctttgcctgctctcagtgtggccagcccctgttcgtgtacaagctggagcaggtgtctgagaagggcaaggcttacaccaactacttcggacggtgcaatgtggccgagcacgaaaagctgatcctgctggcccagctgaagcccgagaaggatagcgacgaagccgtgacatatagcctgggaaagtttgggcagagggccctggatttctacagcattcatgtgaccaaggagtccacccaccccgtgaagcccctggcccagatcgccggaaacagatacgcctccggacctgtgggaaaggccctgagcgacgcatgtatgggcacaatcgcctccttcctgtctaagtaccaggacatcatcatcgaacaccagaaggtggtgaagggcaaccagaagagactggagagcctgcgggagctggccggcaaggaaaacctggaataccctagcgtgaccctgccacctcagcctcacaccaaggagggcgttgatgcctacaacgaagtgatcgcccgggtgcgaatgtgggtgaacctgaacctgtggcagaagctgaagctaagcagagatgatgccaagcctctgctgagactgaagggattcccttcctttcctctggtcgagagacaggccaacgaagtggactggtgggacatggtgtgtaacgtgaagaagctgatcaacgagaaaaaggaggatggcaaggtgttttggcagaatctggctggctacaagagacaggaagccctgagaccatacctgagcagcgaggaagatcggaagaagggaaagaaattcgctcggtaccagctgggcgacctgctgctgcacctggaaaagaagcacggcgaggactggggaaaggtgtacgacgaggcctgggagcggattgacaagaaagtggaaggcctgagcaagcacatcaagctggaagaggaacggagaagcgaggacgcccagagcaaggccgccctgaccgactggctgcgggctaaggccagcttcgtgatcgagggcctgaaggaggccgacaaggacgagttctgcagatgcgagctgaagctgcagaagtggtacggggacctgcggggaaagcccttcgccatcgaagccgagaacagcatcctggacatcagcggcttcagcaagcagtacaactgtgccttcatctggcagaaggacggcgtgaagaagctgaacctgtacctgatcatcaactacttcaagggcggcaagctgcggttcaagaagatcaaacctgaagccttcgaagccaacagattctacaccgtgatcaacaaaaagagcggcgagatcgtgcccatggaggtgaacttcaacttcgacgaccccaacctgatcatcctgcctctggcctttggcaagagacagggcagagaattcatctggaacgacctgctgtccctggaaaccggcagcctgaagctggccaacggaagagtgatcgagaagacactgtacaacagaagaacccggcaggatgagcctgccctgttcgtggccctgaccttcgagcggcgggaggtcctggactcctccaatatcaaaccaatgaacctgatcggcgtggcaagaggcgaaaacatccccgccgtgatcgccctgaccgaccccgagggctgcccactgagccggtttaaggatagcctgggaaacccaacccacatcctgagaatcggcgagagctataaggagaagcagcggaccatccaggccaagaaggaggtggagcagcggagagccggcggctacagccggaagtacgccagcaaagccaagaatctggcagacgatatggtgagaaacaccgctagagatctgctgtactacgccgtgacccaggatgccatgctgatcttcgccaacctgagccggggcttcggccggcagggcaagcggaccttcatggccgagagacagtacacacggatggaggactggctgaccgccaagctggcctacgagggcctgagcaagacctacctgtccaagacactggcccagtacacctccaagacatgcagcaactgtgggtttaccatcaccagcgccgactacgacagggtgctggagaagctgaagaagacagcaacaggctggatgaccacaattaacggcaaggagctgaaggtggagggccagattacctactacaacagatacaagagacagaacgtagtcaaggacctgtccgtcgagctggatagactgagcgaagaatctgtgaacaacgacatctcctcctggacaaagggcagaagcggagaagctctgagcctcctgaagaaaagattctcccatagacccgtgcaggagaagttcgtgtgcctgaactgcggcttcgagacacacgcagccgagcaagccgccctgaacatcgccagatcctggctgttcctgcggagccaggagtacaagaaataccagacaaacaagacaaccggcaacaccgataagagagccttcgtcgagacctggcagtccttttaccggaagaagcttaaggaggtgtggaaacctgccgtgcggtctggcggatctggcggaggctccacaagcgcccaggtgcccgtgaccttcgaggacatcgccatctacttcagccaggaggagtgggagtacctggacgagggccagaaggccctgtacagggaggtgatgaaggagaactacgagaccctgctgctgctgggctgccccggcctgaagcccgtgatcatcagcagcatcgagcagggcgaggagccctgcgtgaggaagctgcaggagagggccgagctgtaccccaccgccggcgacgagaccagccccaagaaaaagagaaaagtctaagctgccttctgcggggcttgccttctggccatgcccttcttctctcccttgcacctgtacctcttggtctttgaataaagcctgagtaggaaggctagcaaaaaaaaaaaaaaaaaaaaaaaaaaaaaaaaaaaaaaaaaaaaaaaaaaaaaaaaaaaaaaaaaaaaaaaaaaaaaaaa

SEQ ID NO: 3961 - RNA, 5419 nt, synthetic construct
  source 1..5419: mol_type = other RNA
aggaaataagagagaaaagaagagtaagaagaaatataagagccaccatggcccctaagaagaagcgtaaagtgagccgggtgaacggcagcggcagcggcggcggcatgaaccacgaccaggagttcgacccccctaaggtgtaccctcccgtccccgccgagaagagaaagcccatccgggtcctgagcctgttcgatggcatcgccaccggtctgctggtgctgaaggacctgggcatccaggtggataggtacattgcctccgaggtgtgcgaggactccatcaccgtgggaatggtgcgtcatcagggcaagatcatgtacgtgggcgacgtgcggagcgtgacacagaagcatatccaggagtggggccctttcgacctggtgatcggcggcagcccttgcaatgacctgagcatcgtgaacccagcccggaagggcctgtacgagggaaccggcagactgttcttcgagttttacagactgctgcacgacgcccggcctaaggaaggcgacgaccggcccttcttttggctgttcgagaatgtggtggccatgggagtcagcgacaagcgggatattagccggttcctggagagcaaccccgtgatgatcgatgccaaggaagtgagcgccgcccaccgggccagatacttctggggcaatctgcctggcatgaacagacccctggccagcaccgtgaacgacaagctggagctgcaggagtgcctggagcacggccggatcgccaagttcagcaaggtgagaaccatcaccacccgaagcaacagcatcaaacaaggcaaggaccagcactttcctgtgttcatgaacgagaaggaggacatcctgtggtgtaccgagatggagagagtgttcgggttcccagtccactacacagatgtcagcaacatgtctagactggccagacagagactgctgggaagaagctggtccgtccctgtgatcagacacctgttcgcccctctgaaggagtacttcgcctgcgtgagcagcggcaacagcaacgccaacagccggggccccagcttctctagcggcctggtgccactgtccctgagagggagccacatgggccccatggagatctacaaaaccgtgagcgcctggaagcggcagcctgtgcgcgtgctgagcctgtttcggaatatcgataaagtcctgaaaagcctgggattcctggagagcggctctggctccggcggtggcaccctgaagtacgtggaggatgtgacaaacgtggtcagacgggatgtggagaagtggggccccttcgatctggtgtacggcagcacccaacccctgggcagctcttgtgaccggtgccctggctggtacatgtttcagttccaccggatcctgcagtacgccctgccgagacaggagtcccagcggccattcttttggattttcatggacaacttgctgctgaccgaggatgaccaggaaactaccactcggttcctgcagaccgaagccgtgaccctgcaggacgtgagaggccgggactaccagaacgccatgcgggtgtggtccaacatccctggactgaaaagcaagcacgcacctctgacccctaaagaagaggagtacctgcaggcccaggtgcggagcagaagcaagctggacgcccctaaggtggatctgctggtgaagaattgcctcctgcccctgagagagtacttcaagtatttcagccagaatagtctgcccctgggcggcccaagcagcggcgcccctcctcccagcggcggcagcccagccggctccccaacctctaccgaggagggcacctctgagtccgccacccccgagagcggccctggcacctccaccgagcccagcgagggcagcgcacccggcagccctgccggcagccccacctccacagaggagggaaccagcaccgagcccagcgaaggcagcgccccaggcaccagcaccgagcctagtgagggcggctctggcggcggcagcgcccaggagattaaacggatcaacaagatcagaagaagacttgtgaaagacagcaacaccaagaaggccggcaagacaggccccatgaaaaccctgctggttagagtgatgacacccgatctgagagagcggctggaaaacctgagaaagaagcctgaaaatatcccccagcccatcagcaatacatctagagccaacctgaataagctgctgaccgattacaccgaaatgaagaaggcgatcctgcatgtgtactgggaagagttccagaaggaccctgtgggcctgatgagccgggtggcccagcctgccagcaagaagatcgatcagaacaagctgaaacctgagatggacgagaagggcaacctgaccaccgccggctttgcctgctctcagtgtggccagcccctgttcgtgtacaagctggagcaggtgtctgagaagggcaaggcttacaccaactacttcggacggtgcaatgtggccgagcacgaaaagctgatcctgctggcccagctgaagcccgagaaggatagcgacgaagccgtgacatatagcctgggaaagtttgggcagagggccctggatttctacagcattcatgtgaccaaggagtccacccaccccgtgaagcccctggcccagatcgccggaaacagatacgcctccggacctgtgggaaaggccctgagcgacgcatgtatgggcacaatcgcctccttcctgtctaagtaccaggacatcatcatcgaacaccagaaggtggtgaagggcaaccagaagagactggagagcctgcgggagctggccggcaaggaaaacctggaataccctagcgtgaccctgccacctcagcctcacaccaaggagggcgttgatgcctacaacgaagtgatcgcccgggtgcgaatgtgggtgaacctgaacctgtggcagaagctgaagctaagcagagatgatgccaagcctctgctgagactgaagggattcccttcctttcctctggtcgagagacaggccaacgaagtggactggtgggacatggtgtgtaacgtgaagaagctgatcaacgagaaaaaggaggatggcaaggtgttttggcagaatctggctggctacaagagacaggaagccctgagaccatacctgagcagcgaggaagatcggaagaagggaaagaaattcgctcggtaccagctgggcgacctgctgctgcacctggaaaagaagcacggcgaggactggggaaaggtgtacgacgaggcctgggagcggattgacaagaaagtggaaggcctgagcaagcacatcaagctggaagaggaacggagaagcgaggacgcccagagcaaggccgccctgaccgactggctgcgggctaaggccagcttcgtgatcgagggcctgaaggaggccgacaaggacgagttctgcagatgcgagctgaagctgcagaagtggtacggggacctgcggggaaagcccttcgccatcgaagccgagaacagcatcctggacatcagcggcttcagcaagcagtacaactgtgccttcatctggcagaaggacggcgtgaagaagctgaacctgtacctgatcatcaactacttcaagggcggcaagctgcggttcaagaagatcaaacctgaagccttcgaagccaacagattctacaccgtgatcaacaaaaagagcggcgagatcgtgcccatggaggtgaacttcaacttcgacgaccccaacctgatcatcctgcctctggcctttggcaagagacagggcagagaattcatctggaacgacctgctgtccctggaaaccggcagcctgaagctggccaacggaagagtgatcgagaagacactgtacaacagaagaacccggcaggatgagcctgccctgttcgtggccctgaccttcgagcggcgggaggtcctggactcctccaatatcaaaccaatgaacctgatcggcgtggcaagaggcgaaaacatccccgccgtgatcgccctgaccgaccccgagggctgcccactgagccggtttaaggatagcctgggaaacccaacccacatcctgagaatcggcgagagctataaggagaagcagcggaccatccaggccaagaaggaggtggagcagcggagagccggcggctacagccggaagtacgccagcaaagccaagaatctggcagacgatatggtgagaaacaccgctagagatctgctgtactacgccgtgacccaggatgccatgctgatcttcgccaacctgagccggggcttcggccggcagggcaagcggaccttcatggccgagagacagtacacacggatggaggactggctgaccgccaagctggcctacgagggcctgagcaagacctacctgtccaagacactggcccagtacacctccaagacatgcagcaactgtgggtttaccatcaccagcgccgactacgacagggtgctggagaagctgaagaagacagcaacaggctggatgaccacaattaacggcaaggagctgaaggtggagggccagattacctactacaacagatacaagagacagaacgtagtcaaggacctgtccgtcgagctggatagactgagcgaagaatctgtgaacaacgacatctcctcctggacaaagggcagaagcggagaagctctgagcctcctgaagaaaagattctcccatagacccgtgcaggagaagttcgtgtgcctgaactgcggcttcgagacacacgcagccgagcaagccgccctgaacatcgccagatcctggctgttcctgcggagccaggagtacaagaaataccagacaaacaagacaaccggcaacaccgataagagagccttcgtcgagacctggcagtccttttaccggaagaagcttaaggaggtgtggaaacctgccgtgcggtctggcggatctggcggaggctccacaagccccaaggtgcccgtgagcttcgaggacgtgagcgtgtacttcaccaagaccgagtggaagctgctggacgtgcagcagaggatcctgtacaagaccgtgatgctggagaactaccaccacctggtgagcctgggctgcctgagcaccaagccccacctggtgagctggctggagcagggcgagggcccctggaccaccgacatctggaggacccccgccaccgccaagacccagaccgagggcaccagccccaagaaaaagagaaaagtctaagctgccttctgcggggcttgccttctggccatgcccttcttctctcccttgcacctgtacctcttggtctttgaataaagcctgagtaggaaggctagcaaaaaaaaaaaaaaaaaaaaaaaaaaaaaaaaaaaaaaaaaaaaaaaaaaaaaaaaaaaaaaaaaaaaaaaaaaaaaaaa

SEQ ID NO: 3962 - RNA, 5419 nt, synthetic construct
  source 1..5419: mol_type = other RNA
aggaaataagagagaaaagaagagtaagaagaaatataagagccaccatggcccctaagaagaagcgtaaagtgagccgggtgaacggcagcggcagcggcggcggcatgaaccacgaccaggagttcgacccccctaaggtgtaccctcccgtccccgccgagaagagaaagcccatccgggtcctgagcctgttcgatggcatcgccaccggtctgctggtgctgaaggacctgggcatccaggtggataggtacattgcctccgaggtgtgcgaggactccatcaccgtgggaatggtgcgtcatcagggcaagatcatgtacgtgggcgacgtgcggagcgtgacacagaagcatatccaggagtggggccctttcgacctggtgatcggcggcagcccttgcaatgacctgagcatcgtgaacccagcccggaagggcctgtacgagggaaccggcagactgttcttcgagttttacagactgctgcacgacgcccggcctaaggaaggcgacgaccggcccttcttttggctgttcgagaatgtggtggccatgggagtcagcgacaagcgggatattagccggttcctggagagcaaccccgtgatgatcgatgccaaggaagtgagcgccgcccaccgggccagatacttctggggcaatctgcctggcatgaacagacccctggccagcaccgtgaacgacaagctggagctgcaggagtgcctggagcacggccggatcgccaagttcagcaaggtgagaaccatcaccacccgaagcaacagcatcaaacaaggcaaggaccagcactttcctgtgttcatgaacgagaaggaggacatcctgtggtgtaccgagatggagagagtgttcgggttcccagtccactacacagatgtcagcaacatgtctagactggccagacagagactgctgggaagaagctggtccgtccctgtgatcagacacctgttcgcccctctgaaggagtacttcgcctgcgtgagcagcggcaacagcaacgccaacagccggggccccagcttctctagcggcctggtgccactgtccctgagagggagccacatgggccccatggagatctacaaaaccgtgagcgcctggaagcggcagcctgtgcgcgtgctgagcctgtttcggaatatcgataaagtcctgaaaagcctgggattcctggagagcggctctggctccggcggtggcaccctgaagtacgtggaggatgtgacaaacgtggtcagacgggatgtggagaagtggggccccttcgatctggtgtacggcagcacccaacccctgggcagctcttgtgaccggtgccctggctggtacatgtttcagttccaccggatcctgcagtacgccctgccgagacaggagtcccagcggccattcttttggattttcatggacaacttgctgctgaccgaggatgaccaggaaactaccactcggttcctgcagaccgaagccgtgaccctgcaggacgtgagaggccgggactaccagaacgccatgcgggtgtggtccaacatccctggactgaaaagcaagcacgcacctctgacccctaaagaagaggagtacctgcaggcccaggtgcggagcagaagcaagctggacgcccctaaggtggatctgctggtgaagaattgcctcctgcccctgagagagtacttcaagtatttcagccagaatagtctgcccctgggcggcccaagcagcggcgcccctcctcccagcggcggcagcccagccggctccccaacctctaccgaggagggcacctctgagtccgccacccccgagagcggccctggcacctccaccgagcccagcgagggcagcgcacccggcagccctgccggcagccccacctccacagaggagggaaccagcaccgagcccagcgaaggcagcgccccaggcaccagcaccgagcctagtgagggcggctctggcggcggcagcgcccaggagattaaacggatcaacaagatcagaagaagacttgtgaaagacagcaacaccaagaaggccggcaagacaggccccatgaaaaccctgctggttagagtgatgacacccgatctgagagagcggctggaaaacctgagaaagaagcctgaaaatatcccccagcccatcagcaatacatctagagccaacctgaataagctgctgaccgattacaccgaaatgaagaaggcgatcctgcatgtgtactgggaagagttccagaaggaccctgtgggcctgatgagccgggtggcccagcctgccagcaagaagatcgatcagaacaagctgaaacctgagatggacgagaagggcaacctgaccaccgccggctttgcctgctctcagtgtggccagcccctgttcgtgtacaagctggagcaggtgtctgagaagggcaaggcttacaccaactacttcggacggtgcaatgtggccgagcacgaaaagctgatcctgctggcccagctgaagcccgagaaggatagcgacgaagccgtgacatatagcctgggaaagtttgggcagagggccctggatttctacagcattcatgtgaccaaggagtccacccaccccgtgaagcccctggcccagatcgccggaaacagatacgcctccggacctgtgggaaaggccctgagcgacgcatgtatgggcacaatcgcctccttcctgtctaagtaccaggacatcatcatcgaacaccagaaggtggtgaagggcaaccagaagagactggagagcctgcgggagctggccggcaaggaaaacctggaataccctagcgtgaccctgccacctcagcctcacaccaaggagggcgttgatgcctacaacgaagtgatcgcccgggtgcgaatgtgggtgaacctgaacctgtggcagaagctgaagctaagcagagatgatgccaagcctctgctgagactgaagggattcccttcctttcctctggtcgagagacaggccaacgaagtggactggtgggacatggtgtgtaacgtgaagaagctgatcaacgagaaaaaggaggatggcaaggtgttttggcagaatctggctggctacaagagacaggaagccctgagaccatacctgagcagcgaggaagatcggaagaagggaaagaaattcgctcggtaccagctgggcgacctgctgctgcacctggaaaagaagcacggcgaggactggggaaaggtgtacgacgaggcctgggagcggattgacaagaaagtggaaggcctgagcaagcacatcaagctggaagaggaacggagaagcgaggacgcccagagcaaggccgccctgaccgactggctgcgggctaaggccagcttcgtgatcgagggcctgaaggaggccgacaaggacgagttctgcagatgcgagctgaagctgcagaagtggtacggggacctgcggggaaagcccttcgccatcgaagccgagaacagcatcctggacatcagcggcttcagcaagcagtacaactgtgccttcatctggcagaaggacggcgtgaagaagctgaacctgtacctgatcatcaactacttcaagggcggcaagctgcggttcaagaagatcaaacctgaagccttcgaagccaacagattctacaccgtgatcaacaaaaagagcggcgagatcgtgcccatggaggtgaacttcaacttcgacgaccccaacctgatcatcctgcctctggcctttggcaagagacagggcagagaattcatctggaacgacctgctgtccctggaaaccggcagcctgaagctggccaacggaagagtgatcgagaagacactgtacaacagaagaacccggcaggatgagcctgccctgttcgtggccctgaccttcgagcggcgggaggtcctggactcctccaatatcaaaccaatgaacctgatcggcgtggcaagaggcgaaaacatccccgccgtgatcgccctgaccgaccccgagggctgcccactgagccggtttaaggatagcctgggaaacccaacccacatcctgagaatcggcgagagctataaggagaagcagcggaccatccaggccaagaaggaggtggagcagcggagagccggcggctacagccggaagtacgccagcaaagccaagaatctggcagacgatatggtgagaaacaccgctagagatctgctgtactacgccgtgacccaggatgccatgctgatcttcgccaacctgagccggggcttcggccggcagggcaagcggaccttcatggccgagagacagtacacacggatggaggactggctgaccgccaagctggcctacgagggcctgagcaagacctacctgtccaagacactggcccagtacacctccaagacatgcagcaactgtgggtttaccatcaccagcgccgactacgacagggtgctggagaagctgaagaagacagcaacaggctggatgaccacaattaacggcaaggagctgaaggtggagggccagattacctactacaacagatacaagagacagaacgtagtcaaggacctgtccgtcgagctggatagactgagcgaagaatctgtgaacaacgacatctcctcctggacaaagggcagaagcggagaagctctgagcctcctgaagaaaagattctcccatagacccgtgcaggagaagttcgtgtgcctgaactgcggcttcgagacacacgcagccgagcaagccgccctgaacatcgccagatcctggctgttcctgcggagccaggagtacaagaaataccagacaaacaagacaaccggcaacaccgataagagagccttcgtcgagacctggcagtccttttaccggaagaagcttaaggaggtgtggaaacctgccgtgcggtctggcggatctggcggaggctccacaagcacccaggtgagcgtgaccttcgacgacgtggccgtgaccttcacccaggaggagtggaggcagctggaccccgcccagaggaccctgtaccaggaggtgatgctggagaactgcaggctgctggtgagcctgggctgccccgtgcccaggctggagctgatcttccagctggagcagggccagaagctgtggaccgtgaagaaggacctgagcaggagcacctgccccggcaagaggtgcaggaccagccccaagaaaaagagaaaagtctaagctgccttctgcggggcttgccttctggccatgcccttcttctctcccttgcacctgtacctcttggtctttgaataaagcctgagtaggaaggctagcaaaaaaaaaaaaaaaaaaaaaaaaaaaaaaaaaaaaaaaaaaaaaaaaaaaaaaaaaaaaaaaaaaaaaaaaaaaaaaaa

SEQ ID NO: 3963 - RNA, 5419 nt, synthetic construct
  source 1..5419: mol_type = other RNA
aggaaataagagagaaaagaagagtaagaagaaatataagagccaccatggcccctaagaagaagcgtaaagtgagccgggtgaacggcagcggcagcggcggcggcatgaaccacgaccaggagttcgacccccctaaggtgtaccctcccgtccccgccgagaagagaaagcccatccgggtcctgagcctgttcgatggcatcgccaccggtctgctggtgctgaaggacctgggcatccaggtggataggtacattgcctccgaggtgtgcgaggactccatcaccgtgggaatggtgcgtcatcagggcaagatcatgtacgtgggcgacgtgcggagcgtgacacagaagcatatccaggagtggggccctttcgacctggtgatcggcggcagcccttgcaatgacctgagcatcgtgaacccagcccggaagggcctgtacgagggaaccggcagactgttcttcgagttttacagactgctgcacgacgcccggcctaaggaaggcgacgaccggcccttcttttggctgttcgagaatgtggtggccatgggagtcagcgacaagcgggatattagccggttcctggagagcaaccccgtgatgatcgatgccaaggaagtgagcgccgcccaccgggccagatacttctggggcaatctgcctggcatgaacagacccctggccagcaccgtgaacgacaagctggagctgcaggagtgcctggagcacggccggatcgccaagttcagcaaggtgagaaccatcaccacccgaagcaacagcatcaaacaaggcaaggaccagcactttcctgtgttcatgaacgagaaggaggacatcctgtggtgtaccgagatggagagagtgttcgggttcccagtccactacacagatgtcagcaacatgtctagactggccagacagagactgctgggaagaagctggtccgtccctgtgatcagacacctgttcgcccctctgaaggagtacttcgcctgcgtgagcagcggcaacagcaacgccaacagccggggccccagcttctctagcggcctggtgccactgtccctgagagggagccacatgggccccatggagatctacaaaaccgtgagcgcctggaagcggcagcctgtgcgcgtgctgagcctgtttcggaatatcgataaagtcctgaaaagcctgggattcctggagagcggctctggctccggcggtggcaccctgaagtacgtggaggatgtgacaaacgtggtcagacgggatgtggagaagtggggccccttcgatctggtgtacggcagcacccaacccctgggcagctcttgtgaccggtgccctggctggtacatgtttcagttccaccggatcctgcagtacgccctgccgagacaggagtcccagcggccattcttttggattttcatggacaacttgctgctgaccgaggatgaccaggaaactaccactcggttcctgcagaccgaagccgtgaccctgcaggacgtgagaggccgggactaccagaacgccatgcgggtgtggtccaacatccctggactgaaaagcaagcacgcacctctgacccctaaagaagaggagtacctgcaggcccaggtgcggagcagaagcaagctggacgcccctaaggtggatctgctggtgaagaattgcctcctgcccctgagagagtacttcaagtatttcagccagaatagtctgcccctgggcggcccaagcagcggcgcccctcctcccagcggcggcagcccagccggctccccaacctctaccgaggagggcacctctgagtccgccacccccgagagcggccctggcacctccaccgagcccagcgagggcagcgcacccggcagccctgccggcagccccacctccacagaggagggaaccagcaccgagcccagcgaaggcagcgccccaggcaccagcaccgagcctagtgagggcggctctggcggcggcagcgcccaggagattaaacggatcaacaagatcagaagaagacttgtgaaagacagcaacaccaagaaggccggcaagacaggccccatgaaaaccctgctggttagagtgatgacacccgatctgagagagcggctggaaaacctgagaaagaagcctgaaaatatcccccagcccatcagcaatacatctagagccaacctgaataagctgctgaccgattacaccgaaatgaagaaggcgatcctgcatgtgtactgggaagagttccagaaggaccctgtgggcctgatgagccgggtggcccagcctgccagcaagaagatcgatcagaacaagctgaaacctgagatggacgagaagggcaacctgaccaccgccggctttgcctgctctcagtgtggccagcccctgttcgtgtacaagctggagcaggtgtctgagaagggcaaggcttacaccaactacttcggacggtgcaatgtggccgagcacgaaaagctgatcctgctggcccagctgaagcccgagaaggatagcgacgaagccgtgacatatagcctgggaaagtttgggcagagggccctggatttctacagcattcatgtgaccaaggagtccacccaccccgtgaagcccctggcccagatcgccggaaacagatacgcctccggacctgtgggaaaggccctgagcgacgcatgtatgggcacaatcgcctccttcctgtctaagtaccaggacatcatcatcgaacaccagaaggtggtgaagggcaaccagaagagactggagagcctgcgggagctggccggcaaggaaaacctggaataccctagcgtgaccctgccacctcagcctcacaccaaggagggcgttgatgcctacaacgaagtgatcgcccgggtgcgaatgtgggtgaacctgaacctgtggcagaagctgaagctaagcagagatgatgccaagcctctgctgagactgaagggattcccttcctttcctctggtcgagagacaggccaacgaagtggactggtgggacatggtgtgtaacgtgaagaagctgatcaacgagaaaaaggaggatggcaaggtgttttggcagaatctggctggctacaagagacaggaagccctgagaccatacctgagcagcgaggaagatcggaagaagggaaagaaattcgctcggtaccagctgggcgacctgctgctgcacctggaaaagaagcacggcgaggactggggaaaggtgtacgacgaggcctgggagcggattgacaagaaagtggaaggcctgagcaagcacatcaagctggaagaggaacggagaagcgaggacgcccagagcaaggccgccctgaccgactggctgcgggctaaggccagcttcgtgatcgagggcctgaaggaggccgacaaggacgagttctgcagatgcgagctgaagctgcagaagtggtacggggacctgcggggaaagcccttcgccatcgaagccgagaacagcatcctggacatcagcggcttcagcaagcagtacaactgtgccttcatctggcagaaggacggcgtgaagaagctgaacctgtacctgatcatcaactacttcaagggcggcaagctgcggttcaagaagatcaaacctgaagccttcgaagccaacagattctacaccgtgatcaacaaaaagagcggcgagatcgtgcccatggaggtgaacttcaacttcgacgaccccaacctgatcatcctgcctctggcctttggcaagagacagggcagagaattcatctggaacgacctgctgtccctggaaaccggcagcctgaagctggccaacggaagagtgatcgagaagacactgtacaacagaagaacccggcaggatgagcctgccctgttcgtggccctgaccttcgagcggcgggaggtcctggactcctccaatatcaaaccaatgaacctgatcggcgtggcaagaggcgaaaacatccccgccgtgatcgccctgaccgaccccgagggctgcccactgagccggtttaaggatagcctgggaaacccaacccacatcctgagaatcggcgagagctataaggagaagcagcggaccatccaggccaagaaggaggtggagcagcggagagccggcggctacagccggaagtacgccagcaaagccaagaatctggcagacgatatggtgagaaacaccgctagagatctgctgtactacgccgtgacccaggatgccatgctgatcttcgccaacctgagccggggcttcggccggcagggcaagcggaccttcatggccgagagacagtacacacggatggaggactggctgaccgccaagctggcctacgagggcctgagcaagacctacctgtccaagacactggcccagtacacctccaagacatgcagcaactgtgggtttaccatcaccagcgccgactacgacagggtgctggagaagctgaagaagacagcaacaggctggatgaccacaattaacggcaaggagctgaaggtggagggccagattacctactacaacagatacaagagacagaacgtagtcaaggacctgtccgtcgagctggatagactgagcgaagaatctgtgaacaacgacatctcctcctggacaaagggcagaagcggagaagctctgagcctcctgaagaaaagattctcccatagacccgtgcaggagaagttcgtgtgcctgaactgcggcttcgagacacacgcagccgagcaagccgccctgaacatcgccagatcctggctgttcctgcggagccaggagtacaagaaataccagacaaacaagacaaccggcaacaccgataagagagccttcgtcgagacctggcagtccttttaccggaagaagcttaaggaggtgtggaaacctgccgtgcggtctggcggatctggcggaggctccacaagccaggcccaggagaccctgaccttcgaggacgtggccgtggacttcacctgggaggagtggcagctgctggcccccccccagaaggacctgtacagggacgtgatgctggagaactacagcaacctgctgagcgtgggcttccaggccagcaagcccaacgtgctgagcaagctgggccagggcgagccctggaccatggaggacgagatccactgccagaccaggagcgagatctggaaggtgaccagccccaagaaaaagagaaaagtctaagctgccttctgcggggcttgccttctggccatgcccttcttctctcccttgcacctgtacctcttggtctttgaataaagcctgagtaggaaggctagcaaaaaaaaaaaaaaaaaaaaaaaaaaaaaaaaaaaaaaaaaaaaaaaaaaaaaaaaaaaaaaaaaaaaaaaaaaaaaaaa

SEQ ID NO: 3964 - RNA, 5419 nt, synthetic construct
  source 1..5419: mol_type = other RNA
aggaaataagagagaaaagaagagtaagaagaaatataagagccaccatggcccctaagaagaagcgtaaagtgagccgggtgaacggcagcggcagcggcggcggcatgaaccacgaccaggagttcgacccccctaaggtgtaccctcccgtccccgccgagaagagaaagcccatccgggtcctgagcctgttcgatggcatcgccaccggtctgctggtgctgaaggacctgggcatccaggtggataggtacattgcctccgaggtgtgcgaggactccatcaccgtgggaatggtgcgtcatcagggcaagatcatgtacgtgggcgacgtgcggagcgtgacacagaagcatatccaggagtggggccctttcgacctggtgatcggcggcagcccttgcaatgacctgagcatcgtgaacccagcccggaagggcctgtacgagggaaccggcagactgttcttcgagttttacagactgctgcacgacgcccggcctaaggaaggcgacgaccggcccttcttttggctgttcgagaatgtggtggccatgggagtcagcgacaagcgggatattagccggttcctggagagcaaccccgtgatgatcgatgccaaggaagtgagcgccgcccaccgggccagatacttctggggcaatctgcctggcatgaacagacccctggccagcaccgtgaacgacaagctggagctgcaggagtgcctggagcacggccggatcgccaagttcagcaaggtgagaaccatcaccacccgaagcaacagcatcaaacaaggcaaggaccagcactttcctgtgttcatgaacgagaaggaggacatcctgtggtgtaccgagatggagagagtgttcgggttcccagtccactacacagatgtcagcaacatgtctagactggccagacagagactgctgggaagaagctggtccgtccctgtgatcagacacctgttcgcccctctgaaggagtacttcgcctgcgtgagcagcggcaacagcaacgccaacagccggggccccagcttctctagcggcctggtgccactgtccctgagagggagccacatgggccccatggagatctacaaaaccgtgagcgcctggaagcggcagcctgtgcgcgtgctgagcctgtttcggaatatcgataaagtcctgaaaagcctgggattcctggagagcggctctggctccggcggtggcaccctgaagtacgtggaggatgtgacaaacgtggtcagacgggatgtggagaagtggggccccttcgatctggtgtacggcagcacccaacccctgggcagctcttgtgaccggtgccctggctggtacatgtttcagttccaccggatcctgcagtacgccctgccgagacaggagtcccagcggccattcttttggattttcatggacaacttgctgctgaccgaggatgaccaggaaactaccactcggttcctgcagaccgaagccgtgaccctgcaggacgtgagaggccgggactaccagaacgccatgcgggtgtggtccaacatccctggactgaaaagcaagcacgcacctctgacccctaaagaagaggagtacctgcaggcccaggtgcggagcagaagcaagctggacgcccctaaggtggatctgctggtgaagaattgcctcctgcccctgagagagtacttcaagtatttcagccagaatagtctgcccctgggcggcccaagcagcggcgcccctcctcccagcggcggcagcccagccggctccccaacctctaccgaggagggcacctctgagtccgccacccccgagagcggccctggcacctccaccgagcccagcgagggcagcgcacccggcagccctgccggcagccccacctccacagaggagggaaccagcaccgagcccagcgaaggcagcgccccaggcaccagcaccgagcctagtgagggcggctctggcggcggcagcgcccaggagattaaacggatcaacaagatcagaagaagacttgtgaaagacagcaacaccaagaaggccggcaagacaggccccatgaaaaccctgctggttagagtgatgacacccgatctgagagagcggctggaaaacctgagaaagaagcctgaaaatatcccccagcccatcagcaatacatctagagccaacctgaataagctgctgaccgattacaccgaaatgaagaaggcgatcctgcatgtgtactgggaagagttccagaaggaccctgtgggcctgatgagccgggtggcccagcctgccagcaagaagatcgatcagaacaagctgaaacctgagatggacgagaagggcaacctgaccaccgccggctttgcctgctctcagtgtggccagcccctgttcgtgtacaagctggagcaggtgtctgagaagggcaaggcttacaccaactacttcggacggtgcaatgtggccgagcacgaaaagctgatcctgctggcccagctgaagcccgagaaggatagcgacgaagccgtgacatatagcctgggaaagtttgggcagagggccctggatttctacagcattcatgtgaccaaggagtccacccaccccgtgaagcccctggcccagatcgccggaaacagatacgcctccggacctgtgggaaaggccctgagcgacgcatgtatgggcacaatcgcctccttcctgtctaagtaccaggacatcatcatcgaacaccagaaggtggtgaagggcaaccagaagagactggagagcctgcgggagctggccggcaaggaaaacctggaataccctagcgtgaccctgccacctcagcctcacaccaaggagggcgttgatgcctacaacgaagtgatcgcccgggtgcgaatgtgggtgaacctgaacctgtggcagaagctgaagctaagcagagatgatgccaagcctctgctgagactgaagggattcccttcctttcctctggtcgagagacaggccaacgaagtggactggtgggacatggtgtgtaacgtgaagaagctgatcaacgagaaaaaggaggatggcaaggtgttttggcagaatctggctggctacaagagacaggaagccctgagaccatacctgagcagcgaggaagatcggaagaagggaaagaaattcgctcggtaccagctgggcgacctgctgctgcacctggaaaagaagcacggcgaggactggggaaaggtgtacgacgaggcctgggagcggattgacaagaaagtggaaggcctgagcaagcacatcaagctggaagaggaacggagaagcgaggacgcccagagcaaggccgccctgaccgactggctgcgggctaaggccagcttcgtgatcgagggcctgaaggaggccgacaaggacgagttctgcagatgcgagctgaagctgcagaagtggtacggggacctgcggggaaagcccttcgccatcgaagccgagaacagcatcctggacatcagcggcttcagcaagcagtacaactgtgccttcatctggcagaaggacggcgtgaagaagctgaacctgtacctgatcatcaactacttcaagggcggcaagctgcggttcaagaagatcaaacctgaagccttcgaagccaacagattctacaccgtgatcaacaaaaagagcggcgagatcgtgcccatggaggtgaacttcaacttcgacgaccccaacctgatcatcctgcctctggcctttggcaagagacagggcagagaattcatctggaacgacctgctgtccctggaaaccggcagcctgaagctggccaacggaagagtgatcgagaagacactgtacaacagaagaacccggcaggatgagcctgccctgttcgtggccctgaccttcgagcggcgggaggtcctggactcctccaatatcaaaccaatgaacctgatcggcgtggcaagaggcgaaaacatccccgccgtgatcgccctgaccgaccccgagggctgcccactgagccggtttaaggatagcctgggaaacccaacccacatcctgagaatcggcgagagctataaggagaagcagcggaccatccaggccaagaaggaggtggagcagcggagagccggcggctacagccggaagtacgccagcaaagccaagaatctggcagacgatatggtgagaaacaccgctagagatctgctgtactacgccgtgacccaggatgccatgctgatcttcgccaacctgagccggggcttcggccggcagggcaagcggaccttcatggccgagagacagtacacacggatggaggactggctgaccgccaagctggcctacgagggcctgagcaagacctacctgtccaagacactggcccagtacacctccaagacatgcagcaactgtgggtttaccatcaccagcgccgactacgacagggtgctggagaagctgaagaagacagcaacaggctggatgaccacaattaacggcaaggagctgaaggtggagggccagattacctactacaacagatacaagagacagaacgtagtcaaggacctgtccgtcgagctggatagactgagcgaagaatctgtgaacaacgacatctcctcctggacaaagggcagaagcggagaagctctgagcctcctgaagaaaagattctcccatagacccgtgcaggagaagttcgtgtgcctgaactgcggcttcgagacacacgcagccgagcaagccgccctgaacatcgccagatcctggctgttcctgcggagccaggagtacaagaaataccagacaaacaagacaaccggcaacaccgataagagagccttcgtcgagacctggcagtccttttaccggaagaagcttaaggaggtgtggaaacctgccgtgcggtctggcggatctggcggaggctccacaagcccccagggcagcctgaccttcagggacgtggccatcgagttcagccaggaggagtggaagtgcctggaccccatccagaaggccctgtacagggacgtgatgctggagaactacaggaacctgggcttcctgggcctgtgcctgcccgacctgaacatcatcagcatgctggaggagggcaaggagccctggaccgtggtgagccaggtgaagatcgccaggaaccccaactggggcgagtgcaccagccccaagaaaaagagaaaagtctaagctgccttctgcggggcttgccttctggccatgcccttcttctctcccttgcacctgtacctcttggtctttgaataaagcctgagtaggaaggctagcaaaaaaaaaaaaaaaaaaaaaaaaaaaaaaaaaaaaaaaaaaaaaaaaaaaaaaaaaaaaaaaaaaaaaaaaaaaaaaaa

SEQ ID NO: 3965 - RNA, 5428 nt, synthetic construct
  source 1..5428: mol_type = other RNA
aggaaataagagagaaaagaagagtaagaagaaatataagagccaccatggcccctaagaagaagcgtaaagtgagccgggtgaacggcagcggcagcggcggcggcatgaaccacgaccaggagttcgacccccctaaggtgtaccctcccgtccccgccgagaagagaaagcccatccgggtcctgagcctgttcgatggcatcgccaccggtctgctggtgctgaaggacctgggcatccaggtggataggtacattgcctccgaggtgtgcgaggactccatcaccgtgggaatggtgcgtcatcagggcaagatcatgtacgtgggcgacgtgcggagcgtgacacagaagcatatccaggagtggggccctttcgacctggtgatcggcggcagcccttgcaatgacctgagcatcgtgaacccagcccggaagggcctgtacgagggaaccggcagactgttcttcgagttttacagactgctgcacgacgcccggcctaaggaaggcgacgaccggcccttcttttggctgttcgagaatgtggtggccatgggagtcagcgacaagcgggatattagccggttcctggagagcaaccccgtgatgatcgatgccaaggaagtgagcgccgcccaccgggccagatacttctggggcaatctgcctggcatgaacagacccctggccagcaccgtgaacgacaagctggagctgcaggagtgcctggagcacggccggatcgccaagttcagcaaggtgagaaccatcaccacccgaagcaacagcatcaaacaaggcaaggaccagcactttcctgtgttcatgaacgagaaggaggacatcctgtggtgtaccgagatggagagagtgttcgggttcccagtccactacacagatgtcagcaacatgtctagactggccagacagagactgctgggaagaagctggtccgtccctgtgatcagacacctgttcgcccctctgaaggagtacttcgcctgcgtgagcagcggcaacagcaacgccaacagccggggccccagcttctctagcggcctggtgccactgtccctgagagggagccacatgggccccatggagatctacaaaaccgtgagcgcctggaagcggcagcctgtgcgcgtgctgagcctgtttcggaatatcgataaagtcctgaaaagcctgggattcctggagagcggctctggctccggcggtggcaccctgaagtacgtggaggatgtgacaaacgtggtcagacgggatgtggagaagtggggccccttcgatctggtgtacggcagcacccaacccctgggcagctcttgtgaccggtgccctggctggtacatgtttcagttccaccggatcctgcagtacgccctgccgagacaggagtcccagcggccattcttttggattttcatggacaacttgctgctgaccgaggatgaccaggaaactaccactcggttcctgcagaccgaagccgtgaccctgcaggacgtgagaggccgggactaccagaacgccatgcgggtgtggtccaacatccctggactgaaaagcaagcacgcacctctgacccctaaagaagaggagtacctgcaggcccaggtgcggagcagaagcaagctggacgcccctaaggtggatctgctggtgaagaattgcctcctgcccctgagagagtacttcaagtatttcagccagaatagtctgcccctgggcggcccaagcagcggcgcccctcctcccagcggcggcagcccagccggctccccaacctctaccgaggagggcacctctgagtccgccacccccgagagcggccctggcacctccaccgagcccagcgagggcagcgcacccggcagccctgccggcagccccacctccacagaggagggaaccagcaccgagcccagcgaaggcagcgccccaggcaccagcaccgagcctagtgagggcggctctggcggcggcagcgcccaggagattaaacggatcaacaagatcagaagaagacttgtgaaagacagcaacaccaagaaggccggcaagacaggccccatgaaaaccctgctggttagagtgatgacacccgatctgagagagcggctggaaaacctgagaaagaagcctgaaaatatcccccagcccatcagcaatacatctagagccaacctgaataagctgctgaccgattacaccgaaatgaagaaggcgatcctgcatgtgtactgggaagagttccagaaggaccctgtgggcctgatgagccgggtggcccagcctgccagcaagaagatcgatcagaacaagctgaaacctgagatggacgagaagggcaacctgaccaccgccggctttgcctgctctcagtgtggccagcccctgttcgtgtacaagctggagcaggtgtctgagaagggcaaggcttacaccaactacttcggacggtgcaatgtggccgagcacgaaaagctgatcctgctggcccagctgaagcccgagaaggatagcgacgaagccgtgacatatagcctgggaaagtttgggcagagggccctggatttctacagcattcatgtgaccaaggagtccacccaccccgtgaagcccctggcccagatcgccggaaacagatacgcctccggacctgtgggaaaggccctgagcgacgcatgtatgggcacaatcgcctccttcctgtctaagtaccaggacatcatcatcgaacaccagaaggtggtgaagggcaaccagaagagactggagagcctgcgggagctggccggcaaggaaaacctggaataccctagcgtgaccctgccacctcagcctcacaccaaggagggcgttgatgcctacaacgaagtgatcgcccgggtgcgaatgtgggtgaacctgaacctgtggcagaagctgaagctaagcagagatgatgccaagcctctgctgagactgaagggattcccttcctttcctctggtcgagagacaggccaacgaagtggactggtgggacatggtgtgtaacgtgaagaagctgatcaacgagaaaaaggaggatggcaaggtgttttggcagaatctggctggctacaagagacaggaagccctgagaccatacctgagcagcgaggaagatcggaagaagggaaagaaattcgctcggtaccagctgggcgacctgctgctgcacctggaaaagaagcacggcgaggactggggaaaggtgtacgacgaggcctgggagcggattgacaagaaagtggaaggcctgagcaagcacatcaagctggaagaggaacggagaagcgaggacgcccagagcaaggccgccctgaccgactggctgcgggctaaggccagcttcgtgatcgagggcctgaaggaggccgacaaggacgagttctgcagatgcgagctgaagctgcagaagtggtacggggacctgcggggaaagcccttcgccatcgaagccgagaacagcatcctggacatcagcggcttcagcaagcagtacaactgtgccttcatctggcagaaggacggcgtgaagaagctgaacctgtacctgatcatcaactacttcaagggcggcaagctgcggttcaagaagatcaaacctgaagccttcgaagccaacagattctacaccgtgatcaacaaaaagagcggcgagatcgtgcccatggaggtgaacttcaacttcgacgaccccaacctgatcatcctgcctctggcctttggcaagagacagggcagagaattcatctggaacgacctgctgtccctggaaaccggcagcctgaagctggccaacggaagagtgatcgagaagacactgtacaacagaagaacccggcaggatgagcctgccctgttcgtggccctgaccttcgagcggcgggaggtcctggactcctccaatatcaaaccaatgaacctgatcggcgtggcaagaggcgaaaacatccccgccgtgatcgccctgaccgaccccgagggctgcccactgagccggtttaaggatagcctgggaaacccaacccacatcctgagaatcggcgagagctataaggagaagcagcggaccatccaggccaagaaggaggtggagcagcggagagccggcggctacagccggaagtacgccagcaaagccaagaatctggcagacgatatggtgagaaacaccgctagagatctgctgtactacgccgtgacccaggatgccatgctgatcttcgccaacctgagccggggcttcggccggcagggcaagcggaccttcatggccgagagacagtacacacggatggaggactggctgaccgccaagctggcctacgagggcctgagcaagacctacctgtccaagacactggcccagtacacctccaagacatgcagcaactgtgggtttaccatcaccagcgccgactacgacagggtgctggagaagctgaagaagacagcaacaggctggatgaccacaattaacggcaaggagctgaaggtggagggccagattacctactacaacagatacaagagacagaacgtagtcaaggacctgtccgtcgagctggatagactgagcgaagaatctgtgaacaacgacatctcctcctggacaaagggcagaagcggagaagctctgagcctcctgaagaaaagattctcccatagacccgtgcaggagaagttcgtgtgcctgaactgcggcttcgagacacacgcagccgagcaagccgccctgaacatcgccagatcctggctgttcctgcggagccaggagtacaagaaataccagacaaacaagacaaccggcaacaccgataagagagccttcgtcgagacctggcagtccttttaccggaagaagcttaaggaggtgtggaaacctgccgtgcggtctggcggatctggcggaggctccacaagcgtgacctacaacgacgtgcacatcgacttcacctgggaggagtggaccctgctggacctgagccagaagaacctgtacaaggacgtgatgctggagacctactggaacctgctgaccatcggctacagctgggaggaccacaacatcgaggagcactgccagagcagcaggaggtacgagaggcacgagaggagccaggccggcgagaagcccagcatctacacccagtgcatcaaggccttcgagcacctgaccagccccaagaaaaagagaaaagtctaagctgccttctgcggggcttgccttctggccatgcccttcttctctcccttgcacctgtacctcttggtctttgaataaagcctgagtaggaaggctagcaaaaaaaaaaaaaaaaaaaaaaaaaaaaaaaaaaaaaaaaaaaaaaaaaaaaaaaaaaaaaaaaaaaaaaaaaaaaaaaa

SEQ ID NO: 3966 - RNA, 5419 nt, synthetic construct
  source 1..5419: mol_type = other RNA
aggaaataagagagaaaagaagagtaagaagaaatataagagccaccatggcccctaagaagaagcgtaaagtgagccgggtgaacggcagcggcagcggcggcggcatgaaccacgaccaggagttcgacccccctaaggtgtaccctcccgtccccgccgagaagagaaagcccatccgggtcctgagcctgttcgatggcatcgccaccggtctgctggtgctgaaggacctgggcatccaggtggataggtacattgcctccgaggtgtgcgaggactccatcaccgtgggaatggtgcgtcatcagggcaagatcatgtacgtgggcgacgtgcggagcgtgacacagaagcatatccaggagtggggccctttcgacctggtgatcggcggcagcccttgcaatgacctgagcatcgtgaacccagcccggaagggcctgtacgagggaaccggcagactgttcttcgagttttacagactgctgcacgacgcccggcctaaggaaggcgacgaccggcccttcttttggctgttcgagaatgtggtggccatgggagtcagcgacaagcgggatattagccggttcctggagagcaaccccgtgatgatcgatgccaaggaagtgagcgccgcccaccgggccagatacttctggggcaatctgcctggcatgaacagacccctggccagcaccgtgaacgacaagctggagctgcaggagtgcctggagcacggccggatcgccaagttcagcaaggtgagaaccatcaccacccgaagcaacagcatcaaacaaggcaaggaccagcactttcctgtgttcatgaacgagaaggaggacatcctgtggtgtaccgagatggagagagtgttcgggttcccagtccactacacagatgtcagcaacatgtctagactggccagacagagactgctgggaagaagctggtccgtccctgtgatcagacacctgttcgcccctctgaaggagtacttcgcctgcgtgagcagcggcaacagcaacgccaacagccggggccccagcttctctagcggcctggtgccactgtccctgagagggagccacatgggccccatggagatctacaaaaccgtgagcgcctggaagcggcagcctgtgcgcgtgctgagcctgtttcggaatatcgataaagtcctgaaaagcctgggattcctggagagcggctctggctccggcggtggcaccctgaagtacgtggaggatgtgacaaacgtggtcagacgggatgtggagaagtggggccccttcgatctggtgtacggcagcacccaacccctgggcagctcttgtgaccggtgccctggctggtacatgtttcagttccaccggatcctgcagtacgccctgccgagacaggagtcccagcggccattcttttggattttcatggacaacttgctgctgaccgaggatgaccaggaaactaccactcggttcctgcagaccgaagccgtgaccctgcaggacgtgagaggccgggactaccagaacgccatgcgggtgtggtccaacatccctggactgaaaagcaagcacgcacctctgacccctaaagaagaggagtacctgcaggcccaggtgcggagcagaagcaagctggacgcccctaaggtggatctgctggtgaagaattgcctcctgcccctgagagagtacttcaagtatttcagccagaatagtctgcccctgggcggcccaagcagcggcgcccctcctcccagcggcggcagcccagccggctccccaacctctaccgaggagggcacctctgagtccgccacccccgagagcggccctggcacctccaccgagcccagcgagggcagcgcacccggcagccctgccggcagccccacctccacagaggagggaaccagcaccgagcccagcgaaggcagcgccccaggcaccagcaccgagcctagtgagggcggctctggcggcggcagcgcccaggagattaaacggatcaacaagatcagaagaagacttgtgaaagacagcaacaccaagaaggccggcaagacaggccccatgaaaaccctgctggttagagtgatgacacccgatctgagagagcggctggaaaacctgagaaagaagcctgaaaatatcccccagcccatcagcaatacatctagagccaacctgaataagctgctgaccgattacaccgaaatgaagaaggcgatcctgcatgtgtactgggaagagttccagaaggaccctgtgggcctgatgagccgggtggcccagcctgccagcaagaagatcgatcagaacaagctgaaacctgagatggacgagaagggcaacctgaccaccgccggctttgcctgctctcagtgtggccagcccctgttcgtgtacaagctggagcaggtgtctgagaagggcaaggcttacaccaactacttcggacggtgcaatgtggccgagcacgaaaagctgatcctgctggcccagctgaagcccgagaaggatagcgacgaagccgtgacatatagcctgggaaagtttgggcagagggccctggatttctacagcattcatgtgaccaaggagtccacccaccccgtgaagcccctggcccagatcgccggaaacagatacgcctccggacctgtgggaaaggccctgagcgacgcatgtatgggcacaatcgcctccttcctgtctaagtaccaggacatcatcatcgaacaccagaaggtggtgaagggcaaccagaagagactggagagcctgcgggagctggccggcaaggaaaacctggaataccctagcgtgaccctgccacctcagcctcacaccaaggagggcgttgatgcctacaacgaagtgatcgcccgggtgcgaatgtgggtgaacctgaacctgtggcagaagctgaagctaagcagagatgatgccaagcctctgctgagactgaagggattcccttcctttcctctggtcgagagacaggccaacgaagtggactggtgggacatggtgtgtaacgtgaagaagctgatcaacgagaaaaaggaggatggcaaggtgttttggcagaatctggctggctacaagagacaggaagccctgagaccatacctgagcagcgaggaagatcggaagaagggaaagaaattcgctcggtaccagctgggcgacctgctgctgcacctggaaaagaagcacggcgaggactggggaaaggtgtacgacgaggcctgggagcggattgacaagaaagtggaaggcctgagcaagcacatcaagctggaagaggaacggagaagcgaggacgcccagagcaaggccgccctgaccgactggctgcgggctaaggccagcttcgtgatcgagggcctgaaggaggccgacaaggacgagttctgcagatgcgagctgaagctgcagaagtggtacggggacctgcggggaaagcccttcgccatcgaagccgagaacagcatcctggacatcagcggcttcagcaagcagtacaactgtgccttcatctggcagaaggacggcgtgaagaagctgaacctgtacctgatcatcaactacttcaagggcggcaagctgcggttcaagaagatcaaacctgaagccttcgaagccaacagattctacaccgtgatcaacaaaaagagcggcgagatcgtgcccatggaggtgaacttcaacttcgacgaccccaacctgatcatcctgcctctggcctttggcaagagacagggcagagaattcatctggaacgacctgctgtccctggaaaccggcagcctgaagctggccaacggaagagtgatcgagaagacactgtacaacagaagaacccggcaggatgagcctgccctgttcgtggccctgaccttcgagcggcgggaggtcctggactcctccaatatcaaaccaatgaacctgatcggcgtggcaagaggcgaaaacatccccgccgtgatcgccctgaccgaccccgagggctgcccactgagccggtttaaggatagcctgggaaacccaacccacatcctgagaatcggcgagagctataaggagaagcagcggaccatccaggccaagaaggaggtggagcagcggagagccggcggctacagccggaagtacgccagcaaagccaagaatctggcagacgatatggtgagaaacaccgctagagatctgctgtactacgccgtgacccaggatgccatgctgatcttcgccaacctgagccggggcttcggccggcagggcaagcggaccttcatggccgagagacagtacacacggatggaggactggctgaccgccaagctggcctacgagggcctgagcaagacctacctgtccaagacactggcccagtacacctccaagacatgcagcaactgtgggtttaccatcaccagcgccgactacgacagggtgctggagaagctgaagaagacagcaacaggctggatgaccacaattaacggcaaggagctgaaggtggagggccagattacctactacaacagatacaagagacagaacgtagtcaaggacctgtccgtcgagctggatagactgagcgaagaatctgtgaacaacgacatctcctcctggacaaagggcagaagcggagaagctctgagcctcctgaagaaaagattctcccatagacccgtgcaggagaagttcgtgtgcctgaactgcggcttcgagacacacgcagccgagcaagccgccctgaacatcgccagatcctggctgttcctgcggagccaggagtacaagaaataccagacaaacaagacaaccggcaacaccgataagagagccttcgtcgagacctggcagtccttttaccggaagaagcttaaggaggtgtggaaacctgccgtgcggtctggcggatctggcggaggctccacaagcctggccagcatcagcttcgaggacctggccgtgaccttcaccgaggaggagtgggagcacctggacctgggccagaggaacctgtaccaggaggtgatgctggagacctaccagctgctggtgagcctgggcgaccaggtgaggctggccccccccacccccggcacccccctgcccgccctgcccgcccagcccaggctgctgggcctgcccagccagcccctggacaggaggggcacccccaccagccccaagaaaaagagaaaagtctaagctgccttctgcggggcttgccttctggccatgcccttcttctctcccttgcacctgtacctcttggtctttgaataaagcctgagtaggaaggctagcaaaaaaaaaaaaaaaaaaaaaaaaaaaaaaaaaaaaaaaaaaaaaaaaaaaaaaaaaaaaaaaaaaaaaaaaaaaaaaaa

SEQ ID NO: 3967 - RNA, 5419 nt, synthetic construct
  source 1..5419: mol_type = other RNA
aggaaataagagagaaaagaagagtaagaagaaatataagagccaccatggcccctaagaagaagcgtaaagtgagccgggtgaacggcagcggcagcggcggcggcatgaaccacgaccaggagttcgacccccctaaggtgtaccctcccgtccccgccgagaagagaaagcccatccgggtcctgagcctgttcgatggcatcgccaccggtctgctggtgctgaaggacctgggcatccaggtggataggtacattgcctccgaggtgtgcgaggactccatcaccgtgggaatggtgcgtcatcagggcaagatcatgtacgtgggcgacgtgcggagcgtgacacagaagcatatccaggagtggggccctttcgacctggtgatcggcggcagcccttgcaatgacctgagcatcgtgaacccagcccggaagggcctgtacgagggaaccggcagactgttcttcgagttttacagactgctgcacgacgcccggcctaaggaaggcgacgaccggcccttcttttggctgttcgagaatgtggtggccatgggagtcagcgacaagcgggatattagccggttcctggagagcaaccccgtgatgatcgatgccaaggaagtgagcgccgcccaccgggccagatacttctggggcaatctgcctggcatgaacagacccctggccagcaccgtgaacgacaagctggagctgcaggagtgcctggagcacggccggatcgccaagttcagcaaggtgagaaccatcaccacccgaagcaacagcatcaaacaaggcaaggaccagcactttcctgtgttcatgaacgagaaggaggacatcctgtggtgtaccgagatggagagagtgttcgggttcccagtccactacacagatgtcagcaacatgtctagactggccagacagagactgctgggaagaagctggtccgtccctgtgatcagacacctgttcgcccctctgaaggagtacttcgcctgcgtgagcagcggcaacagcaacgccaacagccggggccccagcttctctagcggcctggtgccactgtccctgagagggagccacatgggccccatggagatctacaaaaccgtgagcgcctggaagcggcagcctgtgcgcgtgctgagcctgtttcggaatatcgataaagtcctgaaaagcctgggattcctggagagcggctctggctccggcggtggcaccctgaagtacgtggaggatgtgacaaacgtggtcagacgggatgtggagaagtggggccccttcgatctggtgtacggcagcacccaacccctgggcagctcttgtgaccggtgccctggctggtacatgtttcagttccaccggatcctgcagtacgccctgccgagacaggagtcccagcggccattcttttggattttcatggacaacttgctgctgaccgaggatgaccaggaaactaccactcggttcctgcagaccgaagccgtgaccctgcaggacgtgagaggccgggactaccagaacgccatgcgggtgtggtccaacatccctggactgaaaagcaagcacgcacctctgacccctaaagaagaggagtacctgcaggcccaggtgcggagcagaagcaagctggacgcccctaaggtggatctgctggtgaagaattgcctcctgcccctgagagagtacttcaagtatttcagccagaatagtctgcccctgggcggcccaagcagcggcgcccctcctcccagcggcggcagcccagccggctccccaacctctaccgaggagggcacctctgagtccgccacccccgagagcggccctggcacctccaccgagcccagcgagggcagcgcacccggcagccctgccggcagccccacctccacagaggagggaaccagcaccgagcccagcgaaggcagcgccccaggcaccagcaccgagcctagtgagggcggctctggcggcggcagcgcccaggagattaaacggatcaacaagatcagaagaagacttgtgaaagacagcaacaccaagaaggccggcaagacaggccccatgaaaaccctgctggttagagtgatgacacccgatctgagagagcggctggaaaacctgagaaagaagcctgaaaatatcccccagcccatcagcaatacatctagagccaacctgaataagctgctgaccgattacaccgaaatgaagaaggcgatcctgcatgtgtactgggaagagttccagaaggaccctgtgggcctgatgagccgggtggcccagcctgccagcaagaagatcgatcagaacaagctgaaacctgagatggacgagaagggcaacctgaccaccgccggctttgcctgctctcagtgtggccagcccctgttcgtgtacaagctggagcaggtgtctgagaagggcaaggcttacaccaactacttcggacggtgcaatgtggccgagcacgaaaagctgatcctgctggcccagctgaagcccgagaaggatagcgacgaagccgtgacatatagcctgggaaagtttgggcagagggccctggatttctacagcattcatgtgaccaaggagtccacccaccccgtgaagcccctggcccagatcgccggaaacagatacgcctccggacctgtgggaaaggccctgagcgacgcatgtatgggcacaatcgcctccttcctgtctaagtaccaggacatcatcatcgaacaccagaaggtggtgaagggcaaccagaagagactggagagcctgcgggagctggccggcaaggaaaacctggaataccctagcgtgaccctgccacctcagcctcacaccaaggagggcgttgatgcctacaacgaagtgatcgcccgggtgcgaatgtgggtgaacctgaacctgtggcagaagctgaagctaagcagagatgatgccaagcctctgctgagactgaagggattcccttcctttcctctggtcgagagacaggccaacgaagtggactggtgggacatggtgtgtaacgtgaagaagctgatcaacgagaaaaaggaggatggcaaggtgttttggcagaatctggctggctacaagagacaggaagccctgagaccatacctgagcagcgaggaagatcggaagaagggaaagaaattcgctcggtaccagctgggcgacctgctgctgcacctggaaaagaagcacggcgaggactggggaaaggtgtacgacgaggcctgggagcggattgacaagaaagtggaaggcctgagcaagcacatcaagctggaagaggaacggagaagcgaggacgcccagagcaaggccgccctgaccgactggctgcgggctaaggccagcttcgtgatcgagggcctgaaggaggccgacaaggacgagttctgcagatgcgagctgaagctgcagaagtggtacggggacctgcggggaaagcccttcgccatcgaagccgagaacagcatcctggacatcagcggcttcagcaagcagtacaactgtgccttcatctggcagaaggacggcgtgaagaagctgaacctgtacctgatcatcaactacttcaagggcggcaagctgcggttcaagaagatcaaacctgaagccttcgaagccaacagattctacaccgtgatcaacaaaaagagcggcgagatcgtgcccatggaggtgaacttcaacttcgacgaccccaacctgatcatcctgcctctggcctttggcaagagacagggcagagaattcatctggaacgacctgctgtccctggaaaccggcagcctgaagctggccaacggaagagtgatcgagaagacactgtacaacagaagaacccggcaggatgagcctgccctgttcgtggccctgaccttcgagcggcgggaggtcctggactcctccaatatcaaaccaatgaacctgatcggcgtggcaagaggcgaaaacatccccgccgtgatcgccctgaccgaccccgagggctgcccactgagccggtttaaggatagcctgggaaacccaacccacatcctgagaatcggcgagagctataaggagaagcagcggaccatccaggccaagaaggaggtggagcagcggagagccggcggctacagccggaagtacgccagcaaagccaagaatctggcagacgatatggtgagaaacaccgctagagatctgctgtactacgccgtgacccaggatgccatgctgatcttcgccaacctgagccggggcttcggccggcagggcaagcggaccttcatggccgagagacagtacacacggatggaggactggctgaccgccaagctggcctacgagggcctgagcaagacctacctgtccaagacactggcccagtacacctccaagacatgcagcaactgtgggtttaccatcaccagcgccgactacgacagggtgctggagaagctgaagaagacagcaacaggctggatgaccacaattaacggcaaggagctgaaggtggagggccagattacctactacaacagatacaagagacagaacgtagtcaaggacctgtccgtcgagctggatagactgagcgaagaatctgtgaacaacgacatctcctcctggacaaagggcagaagcggagaagctctgagcctcctgaagaaaagattctcccatagacccgtgcaggagaagttcgtgtgcctgaactgcggcttcgagacacacgcagccgagcaagccgccctgaacatcgccagatcctggctgttcctgcggagccaggagtacaagaaataccagacaaacaagacaaccggcaacaccgataagagagccttcgtcgagacctggcagtccttttaccggaagaagcttaaggaggtgtggaaacctgccgtgcggtctggcggatctggcggaggctccacaagccagatgcaggtgaccttcgaggaggtggccatcagcttcagccaggaggagtgggagtacctggacgaggagcagaaggagctgtacagggaggtgatgaaggagaactaccagaccctgatcagcctggccaccggcagccccaccgtgacccccaagatcatcgcccacatcgagaggggcgaggagccctacatcaggggcgagcccggcagcgaggagagggagaccggcaacagcagcaccagccccaagaaaaagagaaaagtctaagctgccttctgcggggcttgccttctggccatgcccttcttctctcccttgcacctgtacctcttggtctttgaataaagcctgagtaggaaggctagcaaaaaaaaaaaaaaaaaaaaaaaaaaaaaaaaaaaaaaaaaaaaaaaaaaaaaaaaaaaaaaaaaaaaaaaaaaaaaaaa

SEQ ID NO: 3968 - RNA, 5419 nt, synthetic construct
  source 1..5419: mol_type = other RNA
aggaaataagagagaaaagaagagtaagaagaaatataagagccaccatggcccctaagaagaagcgtaaagtgagccgggtgaacggcagcggcagcggcggcggcatgaaccacgaccaggagttcgacccccctaaggtgtaccctcccgtccccgccgagaagagaaagcccatccgggtcctgagcctgttcgatggcatcgccaccggtctgctggtgctgaaggacctgggcatccaggtggataggtacattgcctccgaggtgtgcgaggactccatcaccgtgggaatggtgcgtcatcagggcaagatcatgtacgtgggcgacgtgcggagcgtgacacagaagcatatccaggagtggggccctttcgacctggtgatcggcggcagcccttgcaatgacctgagcatcgtgaacccagcccggaagggcctgtacgagggaaccggcagactgttcttcgagttttacagactgctgcacgacgcccggcctaaggaaggcgacgaccggcccttcttttggctgttcgagaatgtggtggccatgggagtcagcgacaagcgggatattagccggttcctggagagcaaccccgtgatgatcgatgccaaggaagtgagcgccgcccaccgggccagatacttctggggcaatctgcctggcatgaacagacccctggccagcaccgtgaacgacaagctggagctgcaggagtgcctggagcacggccggatcgccaagttcagcaaggtgagaaccatcaccacccgaagcaacagcatcaaacaaggcaaggaccagcactttcctgtgttcatgaacgagaaggaggacatcctgtggtgtaccgagatggagagagtgttcgggttcccagtccactacacagatgtcagcaacatgtctagactggccagacagagactgctgggaagaagctggtccgtccctgtgatcagacacctgttcgcccctctgaaggagtacttcgcctgcgtgagcagcggcaacagcaacgccaacagccggggccccagcttctctagcggcctggtgccactgtccctgagagggagccacatgggccccatggagatctacaaaaccgtgagcgcctggaagcggcagcctgtgcgcgtgctgagcctgtttcggaatatcgataaagtcctgaaaagcctgggattcctggagagcggctctggctccggcggtggcaccctgaagtacgtggaggatgtgacaaacgtggtcagacgggatgtggagaagtggggccccttcgatctggtgtacggcagcacccaacccctgggcagctcttgtgaccggtgccctggctggtacatgtttcagttccaccggatcctgcagtacgccctgccgagacaggagtcccagcggccattcttttggattttcatggacaacttgctgctgaccgaggatgaccaggaaactaccactcggttcctgcagaccgaagccgtgaccctgcaggacgtgagaggccgggactaccagaacgccatgcgggtgtggtccaacatccctggactgaaaagcaagcacgcacctctgacccctaaagaagaggagtacctgcaggcccaggtgcggagcagaagcaagctggacgcccctaaggtggatctgctggtgaagaattgcctcctgcccctgagagagtacttcaagtatttcagccagaatagtctgcccctgggcggcccaagcagcggcgcccctcctcccagcggcggcagcccagccggctccccaacctctaccgaggagggcacctctgagtccgccacccccgagagcggccctggcacctccaccgagcccagcgagggcagcgcacccggcagccctgccggcagccccacctccacagaggagggaaccagcaccgagcccagcgaaggcagcgccccaggcaccagcaccgagcctagtgagggcggctctggcggcggcagcgcccaggagattaaacggatcaacaagatcagaagaagacttgtgaaagacagcaacaccaagaaggccggcaagacaggccccatgaaaaccctgctggttagagtgatgacacccgatctgagagagcggctggaaaacctgagaaagaagcctgaaaatatcccccagcccatcagcaatacatctagagccaacctgaataagctgctgaccgattacaccgaaatgaagaaggcgatcctgcatgtgtactgggaagagttccagaaggaccctgtgggcctgatgagccgggtggcccagcctgccagcaagaagatcgatcagaacaagctgaaacctgagatggacgagaagggcaacctgaccaccgccggctttgcctgctctcagtgtggccagcccctgttcgtgtacaagctggagcaggtgtctgagaagggcaaggcttacaccaactacttcggacggtgcaatgtggccgagcacgaaaagctgatcctgctggcccagctgaagcccgagaaggatagcgacgaagccgtgacatatagcctgggaaagtttgggcagagggccctggatttctacagcattcatgtgaccaaggagtccacccaccccgtgaagcccctggcccagatcgccggaaacagatacgcctccggacctgtgggaaaggccctgagcgacgcatgtatgggcacaatcgcctccttcctgtctaagtaccaggacatcatcatcgaacaccagaaggtggtgaagggcaaccagaagagactggagagcctgcgggagctggccggcaaggaaaacctggaataccctagcgtgaccctgccacctcagcctcacaccaaggagggcgttgatgcctacaacgaagtgatcgcccgggtgcgaatgtgggtgaacctgaacctgtggcagaagctgaagctaagcagagatgatgccaagcctctgctgagactgaagggattcccttcctttcctctggtcgagagacaggccaacgaagtggactggtgggacatggtgtgtaacgtgaagaagctgatcaacgagaaaaaggaggatggcaaggtgttttggcagaatctggctggctacaagagacaggaagccctgagaccatacctgagcagcgaggaagatcggaagaagggaaagaaattcgctcggtaccagctgggcgacctgctgctgcacctggaaaagaagcacggcgaggactggggaaaggtgtacgacgaggcctgggagcggattgacaagaaagtggaaggcctgagcaagcacatcaagctggaagaggaacggagaagcgaggacgcccagagcaaggccgccctgaccgactggctgcgggctaaggccagcttcgtgatcgagggcctgaaggaggccgacaaggacgagttctgcagatgcgagctgaagctgcagaagtggtacggggacctgcggggaaagcccttcgccatcgaagccgagaacagcatcctggacatcagcggcttcagcaagcagtacaactgtgccttcatctggcagaaggacggcgtgaagaagctgaacctgtacctgatcatcaactacttcaagggcggcaagctgcggttcaagaagatcaaacctgaagccttcgaagccaacagattctacaccgtgatcaacaaaaagagcggcgagatcgtgcccatggaggtgaacttcaacttcgacgaccccaacctgatcatcctgcctctggcctttggcaagagacagggcagagaattcatctggaacgacctgctgtccctggaaaccggcagcctgaagctggccaacggaagagtgatcgagaagacactgtacaacagaagaacccggcaggatgagcctgccctgttcgtggccctgaccttcgagcggcgggaggtcctggactcctccaatatcaaaccaatgaacctgatcggcgtggcaagaggcgaaaacatccccgccgtgatcgccctgaccgaccccgagggctgcccactgagccggtttaaggatagcctgggaaacccaacccacatcctgagaatcggcgagagctataaggagaagcagcggaccatccaggccaagaaggaggtggagcagcggagagccggcggctacagccggaagtacgccagcaaagccaagaatctggcagacgatatggtgagaaacaccgctagagatctgctgtactacgccgtgacccaggatgccatgctgatcttcgccaacctgagccggggcttcggccggcagggcaagcggaccttcatggccgagagacagtacacacggatggaggactggctgaccgccaagctggcctacgagggcctgagcaagacctacctgtccaagacactggcccagtacacctccaagacatgcagcaactgtgggtttaccatcaccagcgccgactacgacagggtgctggagaagctgaagaagacagcaacaggctggatgaccacaattaacggcaaggagctgaaggtggagggccagattacctactacaacagatacaagagacagaacgtagtcaaggacctgtccgtcgagctggatagactgagcgaagaatctgtgaacaacgacatctcctcctggacaaagggcagaagcggagaagctctgagcctcctgaagaaaagattctcccatagacccgtgcaggagaagttcgtgtgcctgaactgcggcttcgagacacacgcagccgagcaagccgccctgaacatcgccagatcctggctgttcctgcggagccaggagtacaagaaataccagacaaacaagacaaccggcaacaccgataagagagccttcgtcgagacctggcagtccttttaccggaagaagcttaaggaggtgtggaaacctgccgtgcggtctggcggatctggcggaggctccacaagcgcccaggagagcgtgaccttcgaggacgtggccgtgaacttcaccaacagggagtggcagtgcctgacctacgcccagaggcacctgtacaaggacgtgatgctggagaactacggcaacatggtgagcctgggcttccccttccccaagccccccctgatcagccacctggagagggaggtggacccctgcgtgcaggacccccaggacagggagagcctgagctgcagctaccccgtgagcaccagccccaagaaaaagagaaaagtctaagctgccttctgcggggcttgccttctggccatgcccttcttctctcccttgcacctgtacctcttggtctttgaataaagcctgagtaggaaggctagcaaaaaaaaaaaaaaaaaaaaaaaaaaaaaaaaaaaaaaaaaaaaaaaaaaaaaaaaaaaaaaaaaaaaaaaaaaaaaaaa

SEQ ID NO: 3969 - RNA, 5419 nt, synthetic construct
  source 1..5419: mol_type = other RNA
aggaaataagagagaaaagaagagtaagaagaaatataagagccaccatggcccctaagaagaagcgtaaagtgagccgggtgaacggcagcggcagcggcggcggcatgaaccacgaccaggagttcgacccccctaaggtgtaccctcccgtccccgccgagaagagaaagcccatccgggtcctgagcctgttcgatggcatcgccaccggtctgctggtgctgaaggacctgggcatccaggtggataggtacattgcctccgaggtgtgcgaggactccatcaccgtgggaatggtgcgtcatcagggcaagatcatgtacgtgggcgacgtgcggagcgtgacacagaagcatatccaggagtggggccctttcgacctggtgatcggcggcagcccttgcaatgacctgagcatcgtgaacccagcccggaagggcctgtacgagggaaccggcagactgttcttcgagttttacagactgctgcacgacgcccggcctaaggaaggcgacgaccggcccttcttttggctgttcgagaatgtggtggccatgggagtcagcgacaagcgggatattagccggttcctggagagcaaccccgtgatgatcgatgccaaggaagtgagcgccgcccaccgggccagatacttctggggcaatctgcctggcatgaacagacccctggccagcaccgtgaacgacaagctggagctgcaggagtgcctggagcacggccggatcgccaagttcagcaaggtgagaaccatcaccacccgaagcaacagcatcaaacaaggcaaggaccagcactttcctgtgttcatgaacgagaaggaggacatcctgtggtgtaccgagatggagagagtgttcgggttcccagtccactacacagatgtcagcaacatgtctagactggccagacagagactgctgggaagaagctggtccgtccctgtgatcagacacctgttcgcccctctgaaggagtacttcgcctgcgtgagcagcggcaacagcaacgccaacagccggggccccagcttctctagcggcctggtgccactgtccctgagagggagccacatgggccccatggagatctacaaaaccgtgagcgcctggaagcggcagcctgtgcgcgtgctgagcctgtttcggaatatcgataaagtcctgaaaagcctgggattcctggagagcggctctggctccggcggtggcaccctgaagtacgtggaggatgtgacaaacgtggtcagacgggatgtggagaagtggggccccttcgatctggtgtacggcagcacccaacccctgggcagctcttgtgaccggtgccctggctggtacatgtttcagttccaccggatcctgcagtacgccctgccgagacaggagtcccagcggccattcttttggattttcatggacaacttgctgctgaccgaggatgaccaggaaactaccactcggttcctgcagaccgaagccgtgaccctgcaggacgtgagaggccgggactaccagaacgccatgcgggtgtggtccaacatccctggactgaaaagcaagcacgcacctctgacccctaaagaagaggagtacctgcaggcccaggtgcggagcagaagcaagctggacgcccctaaggtggatctgctggtgaagaattgcctcctgcccctgagagagtacttcaagtatttcagccagaatagtctgcccctgggcggcccaagcagcggcgcccctcctcccagcggcggcagcccagccggctccccaacctctaccgaggagggcacctctgagtccgccacccccgagagcggccctggcacctccaccgagcccagcgagggcagcgcacccggcagccctgccggcagccccacctccacagaggagggaaccagcaccgagcccagcgaaggcagcgccccaggcaccagcaccgagcctagtgagggcggctctggcggcggcagcgcccaggagattaaacggatcaacaagatcagaagaagacttgtgaaagacagcaacaccaagaaggccggcaagacaggccccatgaaaaccctgctggttagagtgatgacacccgatctgagagagcggctggaaaacctgagaaagaagcctgaaaatatcccccagcccatcagcaatacatctagagccaacctgaataagctgctgaccgattacaccgaaatgaagaaggcgatcctgcatgtgtactgggaagagttccagaaggaccctgtgggcctgatgagccgggtggcccagcctgccagcaagaagatcgatcagaacaagctgaaacctgagatggacgagaagggcaacctgaccaccgccggctttgcctgctctcagtgtggccagcccctgttcgtgtacaagctggagcaggtgtctgagaagggcaaggcttacaccaactacttcggacggtgcaatgtggccgagcacgaaaagctgatcctgctggcccagctgaagcccgagaaggatagcgacgaagccgtgacatatagcctgggaaagtttgggcagagggccctggatttctacagcattcatgtgaccaaggagtccacccaccccgtgaagcccctggcccagatcgccggaaacagatacgcctccggacctgtgggaaaggccctgagcgacgcatgtatgggcacaatcgcctccttcctgtctaagtaccaggacatcatcatcgaacaccagaaggtggtgaagggcaaccagaagagactggagagcctgcgggagctggccggcaaggaaaacctggaataccctagcgtgaccctgccacctcagcctcacaccaaggagggcgttgatgcctacaacgaagtgatcgcccgggtgcgaatgtgggtgaacctgaacctgtggcagaagctgaagctaagcagagatgatgccaagcctctgctgagactgaagggattcccttcctttcctctggtcgagagacaggccaacgaagtggactggtgggacatggtgtgtaacgtgaagaagctgatcaacgagaaaaaggaggatggcaaggtgttttggcagaatctggctggctacaagagacaggaagccctgagaccatacctgagcagcgaggaagatcggaagaagggaaagaaattcgctcggtaccagctgggcgacctgctgctgcacctggaaaagaagcacggcgaggactggggaaaggtgtacgacgaggcctgggagcggattgacaagaaagtggaaggcctgagcaagcacatcaagctggaagaggaacggagaagcgaggacgcccagagcaaggccgccctgaccgactggctgcgggctaaggccagcttcgtgatcgagggcctgaaggaggccgacaaggacgagttctgcagatgcgagctgaagctgcagaagtggtacggggacctgcggggaaagcccttcgccatcgaagccgagaacagcatcctggacatcagcggcttcagcaagcagtacaactgtgccttcatctggcagaaggacggcgtgaagaagctgaacctgtacctgatcatcaactacttcaagggcggcaagctgcggttcaagaagatcaaacctgaagccttcgaagccaacagattctacaccgtgatcaacaaaaagagcggcgagatcgtgcccatggaggtgaacttcaacttcgacgaccccaacctgatcatcctgcctctggcctttggcaagagacagggcagagaattcatctggaacgacctgctgtccctggaaaccggcagcctgaagctggccaacggaagagtgatcgagaagacactgtacaacagaagaacccggcaggatgagcctgccctgttcgtggccctgaccttcgagcggcgggaggtcctggactcctccaatatcaaaccaatgaacctgatcggcgtggcaagaggcgaaaacatccccgccgtgatcgccctgaccgaccccgagggctgcccactgagccggtttaaggatagcctgggaaacccaacccacatcctgagaatcggcgagagctataaggagaagcagcggaccatccaggccaagaaggaggtggagcagcggagagccggcggctacagccggaagtacgccagcaaagccaagaatctggcagacgatatggtgagaaacaccgctagagatctgctgtactacgccgtgacccaggatgccatgctgatcttcgccaacctgagccggggcttcggccggcagggcaagcggaccttcatggccgagagacagtacacacggatggaggactggctgaccgccaagctggcctacgagggcctgagcaagacctacctgtccaagacactggcccagtacacctccaagacatgcagcaactgtgggtttaccatcaccagcgccgactacgacagggtgctggagaagctgaagaagacagcaacaggctggatgaccacaattaacggcaaggagctgaaggtggagggccagattacctactacaacagatacaagagacagaacgtagtcaaggacctgtccgtcgagctggatagactgagcgaagaatctgtgaacaacgacatctcctcctggacaaagggcagaagcggagaagctctgagcctcctgaagaaaagattctcccatagacccgtgcaggagaagttcgtgtgcctgaactgcggcttcgagacacacgcagccgagcaagccgccctgaacatcgccagatcctggctgttcctgcggagccaggagtacaagaaataccagacaaacaagacaaccggcaacaccgataagagagccttcgtcgagacctggcagtccttttaccggaagaagcttaaggaggtgtggaaacctgccgtgcggtctggcggatctggcggaggctccacaagcgcccagggcagcgtgatgttcaccgacgtgagcatcgacttcagccaggaggagtgggagttcctgaaccccgaccagagggacctgtacaaggacgtgatgctggagaactacagcaacctggtgagcatgggcctgtacatccccaagccccaggtgatcagcctgctggagcagggcaaggagccctggatgatcggcagggagctgaccaggggcctgtgcagcgccctggagagcatgaccagccccaagaaaaagagaaaagtctaagctgccttctgcggggcttgccttctggccatgcccttcttctctcccttgcacctgtacctcttggtctttgaataaagcctgagtaggaaggctagcaaaaaaaaaaaaaaaaaaaaaaaaaaaaaaaaaaaaaaaaaaaaaaaaaaaaaaaaaaaaaaaaaaaaaaaaaaaaaaaa

SEQ ID NO: 3970 - RNA, 5419 nt, synthetic construct
  source 1..5419: mol_type = other RNA
aggaaataagagagaaaagaagagtaagaagaaatataagagccaccatggcccctaagaagaagcgtaaagtgagccgggtgaacggcagcggcagcggcggcggcatgaaccacgaccaggagttcgacccccctaaggtgtaccctcccgtccccgccgagaagagaaagcccatccgggtcctgagcctgttcgatggcatcgccaccggtctgctggtgctgaaggacctgggcatccaggtggataggtacattgcctccgaggtgtgcgaggactccatcaccgtgggaatggtgcgtcatcagggcaagatcatgtacgtgggcgacgtgcggagcgtgacacagaagcatatccaggagtggggccctttcgacctggtgatcggcggcagcccttgcaatgacctgagcatcgtgaacccagcccggaagggcctgtacgagggaaccggcagactgttcttcgagttttacagactgctgcacgacgcccggcctaaggaaggcgacgaccggcccttcttttggctgttcgagaatgtggtggccatgggagtcagcgacaagcgggatattagccggttcctggagagcaaccccgtgatgatcgatgccaaggaagtgagcgccgcccaccgggccagatacttctggggcaatctgcctggcatgaacagacccctggccagcaccgtgaacgacaagctggagctgcaggagtgcctggagcacggccggatcgccaagttcagcaaggtgagaaccatcaccacccgaagcaacagcatcaaacaaggcaaggaccagcactttcctgtgttcatgaacgagaaggaggacatcctgtggtgtaccgagatggagagagtgttcgggttcccagtccactacacagatgtcagcaacatgtctagactggccagacagagactgctgggaagaagctggtccgtccctgtgatcagacacctgttcgcccctctgaaggagtacttcgcctgcgtgagcagcggcaacagcaacgccaacagccggggccccagcttctctagcggcctggtgccactgtccctgagagggagccacatgggccccatggagatctacaaaaccgtgagcgcctggaagcggcagcctgtgcgcgtgctgagcctgtttcggaatatcgataaagtcctgaaaagcctgggattcctggagagcggctctggctccggcggtggcaccctgaagtacgtggaggatgtgacaaacgtggtcagacgggatgtggagaagtggggccccttcgatctggtgtacggcagcacccaacccctgggcagctcttgtgaccggtgccctggctggtacatgtttcagttccaccggatcctgcagtacgccctgccgagacaggagtcccagcggccattcttttggattttcatggacaacttgctgctgaccgaggatgaccaggaaactaccactcggttcctgcagaccgaagccgtgaccctgcaggacgtgagaggccgggactaccagaacgccatgcgggtgtggtccaacatccctggactgaaaagcaagcacgcacctctgacccctaaagaagaggagtacctgcaggcccaggtgcggagcagaagcaagctggacgcccctaaggtggatctgctggtgaagaattgcctcctgcccctgagagagtacttcaagtatttcagccagaatagtctgcccctgggcggcccaagcagcggcgcccctcctcccagcggcggcagcccagccggctccccaacctctaccgaggagggcacctctgagtccgccacccccgagagcggccctggcacctccaccgagcccagcgagggcagcgcacccggcagccctgccggcagccccacctccacagaggagggaaccagcaccgagcccagcgaaggcagcgccccaggcaccagcaccgagcctagtgagggcggctctggcggcggcagcgcccaggagattaaacggatcaacaagatcagaagaagacttgtgaaagacagcaacaccaagaaggccggcaagacaggccccatgaaaaccctgctggttagagtgatgacacccgatctgagagagcggctggaaaacctgagaaagaagcctgaaaatatcccccagcccatcagcaatacatctagagccaacctgaataagctgctgaccgattacaccgaaatgaagaaggcgatcctgcatgtgtactgggaagagttccagaaggaccctgtgggcctgatgagccgggtggcccagcctgccagcaagaagatcgatcagaacaagctgaaacctgagatggacgagaagggcaacctgaccaccgccggctttgcctgctctcagtgtggccagcccctgttcgtgtacaagctggagcaggtgtctgagaagggcaaggcttacaccaactacttcggacggtgcaatgtggccgagcacgaaaagctgatcctgctggcccagctgaagcccgagaaggatagcgacgaagccgtgacatatagcctgggaaagtttgggcagagggccctggatttctacagcattcatgtgaccaaggagtccacccaccccgtgaagcccctggcccagatcgccggaaacagatacgcctccggacctgtgggaaaggccctgagcgacgcatgtatgggcacaatcgcctccttcctgtctaagtaccaggacatcatcatcgaacaccagaaggtggtgaagggcaaccagaagagactggagagcctgcgggagctggccggcaaggaaaacctggaataccctagcgtgaccctgccacctcagcctcacaccaaggagggcgttgatgcctacaacgaagtgatcgcccgggtgcgaatgtgggtgaacctgaacctgtggcagaagctgaagctaagcagagatgatgccaagcctctgctgagactgaagggattcccttcctttcctctggtcgagagacaggccaacgaagtggactggtgggacatggtgtgtaacgtgaagaagctgatcaacgagaaaaaggaggatggcaaggtgttttggcagaatctggctggctacaagagacaggaagccctgagaccatacctgagcagcgaggaagatcggaagaagggaaagaaattcgctcggtaccagctgggcgacctgctgctgcacctggaaaagaagcacggcgaggactggggaaaggtgtacgacgaggcctgggagcggattgacaagaaagtggaaggcctgagcaagcacatcaagctggaagaggaacggagaagcgaggacgcccagagcaaggccgccctgaccgactggctgcgggctaaggccagcttcgtgatcgagggcctgaaggaggccgacaaggacgagttctgcagatgcgagctgaagctgcagaagtggtacggggacctgcggggaaagcccttcgccatcgaagccgagaacagcatcctggacatcagcggcttcagcaagcagtacaactgtgccttcatctggcagaaggacggcgtgaagaagctgaacctgtacctgatcatcaactacttcaagggcggcaagctgcggttcaagaagatcaaacctgaagccttcgaagccaacagattctacaccgtgatcaacaaaaagagcggcgagatcgtgcccatggaggtgaacttcaacttcgacgaccccaacctgatcatcctgcctctggcctttggcaagagacagggcagagaattcatctggaacgacctgctgtccctggaaaccggcagcctgaagctggccaacggaagagtgatcgagaagacactgtacaacagaagaacccggcaggatgagcctgccctgttcgtggccctgaccttcgagcggcgggaggtcctggactcctccaatatcaaaccaatgaacctgatcggcgtggcaagaggcgaaaacatccccgccgtgatcgccctgaccgaccccgagggctgcccactgagccggtttaaggatagcctgggaaacccaacccacatcctgagaatcggcgagagctataaggagaagcagcggaccatccaggccaagaaggaggtggagcagcggagagccggcggctacagccggaagtacgccagcaaagccaagaatctggcagacgatatggtgagaaacaccgctagagatctgctgtactacgccgtgacccaggatgccatgctgatcttcgccaacctgagccggggcttcggccggcagggcaagcggaccttcatggccgagagacagtacacacggatggaggactggctgaccgccaagctggcctacgagggcctgagcaagacctacctgtccaagacactggcccagtacacctccaagacatgcagcaactgtgggtttaccatcaccagcgccgactacgacagggtgctggagaagctgaagaagacagcaacaggctggatgaccacaattaacggcaaggagctgaaggtggagggccagattacctactacaacagatacaagagacagaacgtagtcaaggacctgtccgtcgagctggatagactgagcgaagaatctgtgaacaacgacatctcctcctggacaaagggcagaagcggagaagctctgagcctcctgaagaaaagattctcccatagacccgtgcaggagaagttcgtgtgcctgaactgcggcttcgagacacacgcagccgagcaagccgccctgaacatcgccagatcctggctgttcctgcggagccaggagtacaagaaataccagacaaacaagacaaccggcaacaccgataagagagccttcgtcgagacctggcagtccttttaccggaagaagcttaaggaggtgtggaaacctgccgtgcggtctggcggatctggcggaggctccacaagcccccaggacctgatgaccttcgacgacgtggccgtggagttcacccagtgggagtggggccagctgaaccccgcccagaaggacctgtacagggaggtgatgctggagaacttcaggaacctgaccctgctgggcctgctggtgagcaagccctacatgatctgccagctggaggagggcggcgagcccttcatggtgaacaccgagatcagcgtgggcgcccacagcgactgggagaggaggaccagccccaagaaaaagagaaaagtctaagctgccttctgcggggcttgccttctggccatgcccttcttctctcccttgcacctgtacctcttggtctttgaataaagcctgagtaggaaggctagcaaaaaaaaaaaaaaaaaaaaaaaaaaaaaaaaaaaaaaaaaaaaaaaaaaaaaaaaaaaaaaaaaaaaaaaaaaaaaaaa

SEQ ID NO: 3971 - RNA, 5419 nt, synthetic construct
  source 1..5419: mol_type = other RNA
aggaaataagagagaaaagaagagtaagaagaaatataagagccaccatggcccctaagaagaagcgtaaagtgagccgggtgaacggcagcggcagcggcggcggcatgaaccacgaccaggagttcgacccccctaaggtgtaccctcccgtccccgccgagaagagaaagcccatccgggtcctgagcctgttcgatggcatcgccaccggtctgctggtgctgaaggacctgggcatccaggtggataggtacattgcctccgaggtgtgcgaggactccatcaccgtgggaatggtgcgtcatcagggcaagatcatgtacgtgggcgacgtgcggagcgtgacacagaagcatatccaggagtggggccctttcgacctggtgatcggcggcagcccttgcaatgacctgagcatcgtgaacccagcccggaagggcctgtacgagggaaccggcagactgttcttcgagttttacagactgctgcacgacgcccggcctaaggaaggcgacgaccggcccttcttttggctgttcgagaatgtggtggccatgggagtcagcgacaagcgggatattagccggttcctggagagcaaccccgtgatgatcgatgccaaggaagtgagcgccgcccaccgggccagatacttctggggcaatctgcctggcatgaacagacccctggccagcaccgtgaacgacaagctggagctgcaggagtgcctggagcacggccggatcgccaagttcagcaaggtgagaaccatcaccacccgaagcaacagcatcaaacaaggcaaggaccagcactttcctgtgttcatgaacgagaaggaggacatcctgtggtgtaccgagatggagagagtgttcgggttcccagtccactacacagatgtcagcaacatgtctagactggccagacagagactgctgggaagaagctggtccgtccctgtgatcagacacctgttcgcccctctgaaggagtacttcgcctgcgtgagcagcggcaacagcaacgccaacagccggggccccagcttctctagcggcctggtgccactgtccctgagagggagccacatgggccccatggagatctacaaaaccgtgagcgcctggaagcggcagcctgtgcgcgtgctgagcctgtttcggaatatcgataaagtcctgaaaagcctgggattcctggagagcggctctggctccggcggtggcaccctgaagtacgtggaggatgtgacaaacgtggtcagacgggatgtggagaagtggggccccttcgatctggtgtacggcagcacccaacccctgggcagctcttgtgaccggtgccctggctggtacatgtttcagttccaccggatcctgcagtacgccctgccgagacaggagtcccagcggccattcttttggattttcatggacaacttgctgctgaccgaggatgaccaggaaactaccactcggttcctgcagaccgaagccgtgaccctgcaggacgtgagaggccgggactaccagaacgccatgcgggtgtggtccaacatccctggactgaaaagcaagcacgcacctctgacccctaaagaagaggagtacctgcaggcccaggtgcggagcagaagcaagctggacgcccctaaggtggatctgctggtgaagaattgcctcctgcccctgagagagtacttcaagtatttcagccagaatagtctgcccctgggcggcccaagcagcggcgcccctcctcccagcggcggcagcccagccggctccccaacctctaccgaggagggcacctctgagtccgccacccccgagagcggccctggcacctccaccgagcccagcgagggcagcgcacccggcagccctgccggcagccccacctccacagaggagggaaccagcaccgagcccagcgaaggcagcgccccaggcaccagcaccgagcctagtgagggcggctctggcggcggcagcgcccaggagattaaacggatcaacaagatcagaagaagacttgtgaaagacagcaacaccaagaaggccggcaagacaggccccatgaaaaccctgctggttagagtgatgacacccgatctgagagagcggctggaaaacctgagaaagaagcctgaaaatatcccccagcccatcagcaatacatctagagccaacctgaataagctgctgaccgattacaccgaaatgaagaaggcgatcctgcatgtgtactgggaagagttccagaaggaccctgtgggcctgatgagccgggtggcccagcctgccagcaagaagatcgatcagaacaagctgaaacctgagatggacgagaagggcaacctgaccaccgccggctttgcctgctctcagtgtggccagcccctgttcgtgtacaagctggagcaggtgtctgagaagggcaaggcttacaccaactacttcggacggtgcaatgtggccgagcacgaaaagctgatcctgctggcccagctgaagcccgagaaggatagcgacgaagccgtgacatatagcctgggaaagtttgggcagagggccctggatttctacagcattcatgtgaccaaggagtccacccaccccgtgaagcccctggcccagatcgccggaaacagatacgcctccggacctgtgggaaaggccctgagcgacgcatgtatgggcacaatcgcctccttcctgtctaagtaccaggacatcatcatcgaacaccagaaggtggtgaagggcaaccagaagagactggagagcctgcgggagctggccggcaaggaaaacctggaataccctagcgtgaccctgccacctcagcctcacaccaaggagggcgttgatgcctacaacgaagtgatcgcccgggtgcgaatgtgggtgaacctgaacctgtggcagaagctgaagctaagcagagatgatgccaagcctctgctgagactgaagggattcccttcctttcctctggtcgagagacaggccaacgaagtggactggtgggacatggtgtgtaacgtgaagaagctgatcaacgagaaaaaggaggatggcaaggtgttttggcagaatctggctggctacaagagacaggaagccctgagaccatacctgagcagcgaggaagatcggaagaagggaaagaaattcgctcggtaccagctgggcgacctgctgctgcacctggaaaagaagcacggcgaggactggggaaaggtgtacgacgaggcctgggagcggattgacaagaaagtggaaggcctgagcaagcacatcaagctggaagaggaacggagaagcgaggacgcccagagcaaggccgccctgaccgactggctgcgggctaaggccagcttcgtgatcgagggcctgaaggaggccgacaaggacgagttctgcagatgcgagctgaagctgcagaagtggtacggggacctgcggggaaagcccttcgccatcgaagccgagaacagcatcctggacatcagcggcttcagcaagcagtacaactgtgccttcatctggcagaaggacggcgtgaagaagctgaacctgtacctgatcatcaactacttcaagggcggcaagctgcggttcaagaagatcaaacctgaagccttcgaagccaacagattctacaccgtgatcaacaaaaagagcggcgagatcgtgcccatggaggtgaacttcaacttcgacgaccccaacctgatcatcctgcctctggcctttggcaagagacagggcagagaattcatctggaacgacctgctgtccctggaaaccggcagcctgaagctggccaacggaagagtgatcgagaagacactgtacaacagaagaacccggcaggatgagcctgccctgttcgtggccctgaccttcgagcggcgggaggtcctggactcctccaatatcaaaccaatgaacctgatcggcgtggcaagaggcgaaaacatccccgccgtgatcgccctgaccgaccccgagggctgcccactgagccggtttaaggatagcctgggaaacccaacccacatcctgagaatcggcgagagctataaggagaagcagcggaccatccaggccaagaaggaggtggagcagcggagagccggcggctacagccggaagtacgccagcaaagccaagaatctggcagacgatatggtgagaaacaccgctagagatctgctgtactacgccgtgacccaggatgccatgctgatcttcgccaacctgagccggggcttcggccggcagggcaagcggaccttcatggccgagagacagtacacacggatggaggactggctgaccgccaagctggcctacgagggcctgagcaagacctacctgtccaagacactggcccagtacacctccaagacatgcagcaactgtgggtttaccatcaccagcgccgactacgacagggtgctggagaagctgaagaagacagcaacaggctggatgaccacaattaacggcaaggagctgaaggtggagggccagattacctactacaacagatacaagagacagaacgtagtcaaggacctgtccgtcgagctggatagactgagcgaagaatctgtgaacaacgacatctcctcctggacaaagggcagaagcggagaagctctgagcctcctgaagaaaagattctcccatagacccgtgcaggagaagttcgtgtgcctgaactgcggcttcgagacacacgcagccgagcaagccgccctgaacatcgccagatcctggctgttcctgcggagccaggagtacaagaaataccagacaaacaagacaaccggcaacaccgataagagagccttcgtcgagacctggcagtccttttaccggaagaagcttaaggaggtgtggaaacctgccgtgcggtctggcggatctggcggaggctccacaagcaggagggagagcgtgaccttcgaggacgtggccgtgtacttcagcgagaacgagtggatcggcctgggccccgcccagagggccctgtacagggacgtgatgctggagaactacggcgccgtggccagcctggccttccccttccccaagcccgccctgatcagccagctggagaggggcgagaccccctggtgcagcgtgccccagggcgccctggacggcgaggcccccaggggcatcagcaccagccccaagaaaaagagaaaagtctaagctgccttctgcggggcttgccttctggccatgcccttcttctctcccttgcacctgtacctcttggtctttgaataaagcctgagtaggaaggctagcaaaaaaaaaaaaaaaaaaaaaaaaaaaaaaaaaaaaaaaaaaaaaaaaaaaaaaaaaaaaaaaaaaaaaaaaaaaaaaaa

SEQ ID NO: 3972 - RNA, 5419 nt, synthetic construct
  source 1..5419: mol_type = other RNA
aggaaataagagagaaaagaagagtaagaagaaatataagagccaccatggcccctaagaagaagcgtaaagtgagccgggtgaacggcagcggcagcggcggcggcatgaaccacgaccaggagttcgacccccctaaggtgtaccctcccgtccccgccgagaagagaaagcccatccgggtcctgagcctgttcgatggcatcgccaccggtctgctggtgctgaaggacctgggcatccaggtggataggtacattgcctccgaggtgtgcgaggactccatcaccgtgggaatggtgcgtcatcagggcaagatcatgtacgtgggcgacgtgcggagcgtgacacagaagcatatccaggagtggggccctttcgacctggtgatcggcggcagcccttgcaatgacctgagcatcgtgaacccagcccggaagggcctgtacgagggaaccggcagactgttcttcgagttttacagactgctgcacgacgcccggcctaaggaaggcgacgaccggcccttcttttggctgttcgagaatgtggtggccatgggagtcagcgacaagcgggatattagccggttcctggagagcaaccccgtgatgatcgatgccaaggaagtgagcgccgcccaccgggccagatacttctggggcaatctgcctggcatgaacagacccctggccagcaccgtgaacgacaagctggagctgcaggagtgcctggagcacggccggatcgccaagttcagcaaggtgagaaccatcaccacccgaagcaacagcatcaaacaaggcaaggaccagcactttcctgtgttcatgaacgagaaggaggacatcctgtggtgtaccgagatggagagagtgttcgggttcccagtccactacacagatgtcagcaacatgtctagactggccagacagagactgctgggaagaagctggtccgtccctgtgatcagacacctgttcgcccctctgaaggagtacttcgcctgcgtgagcagcggcaacagcaacgccaacagccggggccccagcttctctagcggcctggtgccactgtccctgagagggagccacatgggccccatggagatctacaaaaccgtgagcgcctggaagcggcagcctgtgcgcgtgctgagcctgtttcggaatatcgataaagtcctgaaaagcctgggattcctggagagcggctctggctccggcggtggcaccctgaagtacgtggaggatgtgacaaacgtggtcagacgggatgtggagaagtggggccccttcgatctggtgtacggcagcacccaacccctgggcagctcttgtgaccggtgccctggctggtacatgtttcagttccaccggatcctgcagtacgccctgccgagacaggagtcccagcggccattcttttggattttcatggacaacttgctgctgaccgaggatgaccaggaaactaccactcggttcctgcagaccgaagccgtgaccctgcaggacgtgagaggccgggactaccagaacgccatgcgggtgtggtccaacatccctggactgaaaagcaagcacgcacctctgacccctaaagaagaggagtacctgcaggcccaggtgcggagcagaagcaagctggacgcccctaaggtggatctgctggtgaagaattgcctcctgcccctgagagagtacttcaagtatttcagccagaatagtctgcccctgggcggcccaagcagcggcgcccctcctcccagcggcggcagcccagccggctccccaacctctaccgaggagggcacctctgagtccgccacccccgagagcggccctggcacctccaccgagcccagcgagggcagcgcacccggcagccctgccggcagccccacctccacagaggagggaaccagcaccgagcccagcgaaggcagcgccccaggcaccagcaccgagcctagtgagggcggctctggcggcggcagcgcccaggagattaaacggatcaacaagatcagaagaagacttgtgaaagacagcaacaccaagaaggccggcaagacaggccccatgaaaaccctgctggttagagtgatgacacccgatctgagagagcggctggaaaacctgagaaagaagcctgaaaatatcccccagcccatcagcaatacatctagagccaacctgaataagctgctgaccgattacaccgaaatgaagaaggcgatcctgcatgtgtactgggaagagttccagaaggaccctgtgggcctgatgagccgggtggcccagcctgccagcaagaagatcgatcagaacaagctgaaacctgagatggacgagaagggcaacctgaccaccgccggctttgcctgctctcagtgtggccagcccctgttcgtgtacaagctggagcaggtgtctgagaagggcaaggcttacaccaactacttcggacggtgcaatgtggccgagcacgaaaagctgatcctgctggcccagctgaagcccgagaaggatagcgacgaagccgtgacatatagcctgggaaagtttgggcagagggccctggatttctacagcattcatgtgaccaaggagtccacccaccccgtgaagcccctggcccagatcgccggaaacagatacgcctccggacctgtgggaaaggccctgagcgacgcatgtatgggcacaatcgcctccttcctgtctaagtaccaggacatcatcatcgaacaccagaaggtggtgaagggcaaccagaagagactggagagcctgcgggagctggccggcaaggaaaacctggaataccctagcgtgaccctgccacctcagcctcacaccaaggagggcgttgatgcctacaacgaagtgatcgcccgggtgcgaatgtgggtgaacctgaacctgtggcagaagctgaagctaagcagagatgatgccaagcctctgctgagactgaagggattcccttcctttcctctggtcgagagacaggccaacgaagtggactggtgggacatggtgtgtaacgtgaagaagctgatcaacgagaaaaaggaggatggcaaggtgttttggcagaatctggctggctacaagagacaggaagccctgagaccatacctgagcagcgaggaagatcggaagaagggaaagaaattcgctcggtaccagctgggcgacctgctgctgcacctggaaaagaagcacggcgaggactggggaaaggtgtacgacgaggcctgggagcggattgacaagaaagtggaaggcctgagcaagcacatcaagctggaagaggaacggagaagcgaggacgcccagagcaaggccgccctgaccgactggctgcgggctaaggccagcttcgtgatcgagggcctgaaggaggccgacaaggacgagttctgcagatgcgagctgaagctgcagaagtggtacggggacctgcggggaaagcccttcgccatcgaagccgagaacagcatcctggacatcagcggcttcagcaagcagtacaactgtgccttcatctggcagaaggacggcgtgaagaagctgaacctgtacctgatcatcaactacttcaagggcggcaagctgcggttcaagaagatcaaacctgaagccttcgaagccaacagattctacaccgtgatcaacaaaaagagcggcgagatcgtgcccatggaggtgaacttcaacttcgacgaccccaacctgatcatcctgcctctggcctttggcaagagacagggcagagaattcatctggaacgacctgctgtccctggaaaccggcagcctgaagctggccaacggaagagtgatcgagaagacactgtacaacagaagaacccggcaggatgagcctgccctgttcgtggccctgaccttcgagcggcgggaggtcctggactcctccaatatcaaaccaatgaacctgatcggcgtggcaagaggcgaaaacatccccgccgtgatcgccctgaccgaccccgagggctgcccactgagccggtttaaggatagcctgggaaacccaacccacatcctgagaatcggcgagagctataaggagaagcagcggaccatccaggccaagaaggaggtggagcagcggagagccggcggctacagccggaagtacgccagcaaagccaagaatctggcagacgatatggtgagaaacaccgctagagatctgctgtactacgccgtgacccaggatgccatgctgatcttcgccaacctgagccggggcttcggccggcagggcaagcggaccttcatggccgagagacagtacacacggatggaggactggctgaccgccaagctggcctacgagggcctgagcaagacctacctgtccaagacactggcccagtacacctccaagacatgcagcaactgtgggtttaccatcaccagcgccgactacgacagggtgctggagaagctgaagaagacagcaacaggctggatgaccacaattaacggcaaggagctgaaggtggagggccagattacctactacaacagatacaagagacagaacgtagtcaaggacctgtccgtcgagctggatagactgagcgaagaatctgtgaacaacgacatctcctcctggacaaagggcagaagcggagaagctctgagcctcctgaagaaaagattctcccatagacccgtgcaggagaagttcgtgtgcctgaactgcggcttcgagacacacgcagccgagcaagccgccctgaacatcgccagatcctggctgttcctgcggagccaggagtacaagaaataccagacaaacaagacaaccggcaacaccgataagagagccttcgtcgagacctggcagtccttttaccggaagaagcttaaggaggtgtggaaacctgccgtgcggtctggcggatctggcggaggctccacaagccaggccgaggtgaccttcgaggacgtggccgtgtacctgagcagggaggagtggggcaggctgggccccgcccagaggggcctgtacagggacgtgatgctggagacctacggcaacctggtgagcctgggcgtgggccccgccggccccaagcccggcgtgatcagccagctggagaggggcgacgagccctgggtgctggacgtgcagggcaccagcggcaaggagcacctgagggtgaacaccagccccaagaaaaagagaaaagtctaagctgccttctgcggggcttgccttctggccatgcccttcttctctcccttgcacctgtacctcttggtctttgaataaagcctgagtaggaaggctagcaaaaaaaaaaaaaaaaaaaaaaaaaaaaaaaaaaaaaaaaaaaaaaaaaaaaaaaaaaaaaaaaaaaaaaaaaaaaaaaa

SEQ ID NO: 3973 - RNA, 5419 nt, synthetic construct
  source 1..5419: mol_type = other RNA
aggaaataagagagaaaagaagagtaagaagaaatataagagccaccatggcccctaagaagaagcgtaaagtgagccgggtgaacggcagcggcagcggcggcggcatgaaccacgaccaggagttcgacccccctaaggtgtaccctcccgtccccgccgagaagagaaagcccatccgggtcctgagcctgttcgatggcatcgccaccggtctgctggtgctgaaggacctgggcatccaggtggataggtacattgcctccgaggtgtgcgaggactccatcaccgtgggaatggtgcgtcatcagggcaagatcatgtacgtgggcgacgtgcggagcgtgacacagaagcatatccaggagtggggccctttcgacctggtgatcggcggcagcccttgcaatgacctgagcatcgtgaacccagcccggaagggcctgtacgagggaaccggcagactgttcttcgagttttacagactgctgcacgacgcccggcctaaggaaggcgacgaccggcccttcttttggctgttcgagaatgtggtggccatgggagtcagcgacaagcgggatattagccggttcctggagagcaaccccgtgatgatcgatgccaaggaagtgagcgccgcccaccgggccagatacttctggggcaatctgcctggcatgaacagacccctggccagcaccgtgaacgacaagctggagctgcaggagtgcctggagcacggccggatcgccaagttcagcaaggtgagaaccatcaccacccgaagcaacagcatcaaacaaggcaaggaccagcactttcctgtgttcatgaacgagaaggaggacatcctgtggtgtaccgagatggagagagtgttcgggttcccagtccactacacagatgtcagcaacatgtctagactggccagacagagactgctgggaagaagctggtccgtccctgtgatcagacacctgttcgcccctctgaaggagtacttcgcctgcgtgagcagcggcaacagcaacgccaacagccggggccccagcttctctagcggcctggtgccactgtccctgagagggagccacatgggccccatggagatctacaaaaccgtgagcgcctggaagcggcagcctgtgcgcgtgctgagcctgtttcggaatatcgataaagtcctgaaaagcctgggattcctggagagcggctctggctccggcggtggcaccctgaagtacgtggaggatgtgacaaacgtggtcagacgggatgtggagaagtggggccccttcgatctggtgtacggcagcacccaacccctgggcagctcttgtgaccggtgccctggctggtacatgtttcagttccaccggatcctgcagtacgccctgccgagacaggagtcccagcggccattcttttggattttcatggacaacttgctgctgaccgaggatgaccaggaaactaccactcggttcctgcagaccgaagccgtgaccctgcaggacgtgagaggccgggactaccagaacgccatgcgggtgtggtccaacatccctggactgaaaagcaagcacgcacctctgacccctaaagaagaggagtacctgcaggcccaggtgcggagcagaagcaagctggacgcccctaaggtggatctgctggtgaagaattgcctcctgcccctgagagagtacttcaagtatttcagccagaatagtctgcccctgggcggcccaagcagcggcgcccctcctcccagcggcggcagcccagccggctccccaacctctaccgaggagggcacctctgagtccgccacccccgagagcggccctggcacctccaccgagcccagcgagggcagcgcacccggcagccctgccggcagccccacctccacagaggagggaaccagcaccgagcccagcgaaggcagcgccccaggcaccagcaccgagcctagtgagggcggctctggcggcggcagcgcccaggagattaaacggatcaacaagatcagaagaagacttgtgaaagacagcaacaccaagaaggccggcaagacaggccccatgaaaaccctgctggttagagtgatgacacccgatctgagagagcggctggaaaacctgagaaagaagcctgaaaatatcccccagcccatcagcaatacatctagagccaacctgaataagctgctgaccgattacaccgaaatgaagaaggcgatcctgcatgtgtactgggaagagttccagaaggaccctgtgggcctgatgagccgggtggcccagcctgccagcaagaagatcgatcagaacaagctgaaacctgagatggacgagaagggcaacctgaccaccgccggctttgcctgctctcagtgtggccagcccctgttcgtgtacaagctggagcaggtgtctgagaagggcaaggcttacaccaactacttcggacggtgcaatgtggccgagcacgaaaagctgatcctgctggcccagctgaagcccgagaaggatagcgacgaagccgtgacatatagcctgggaaagtttgggcagagggccctggatttctacagcattcatgtgaccaaggagtccacccaccccgtgaagcccctggcccagatcgccggaaacagatacgcctccggacctgtgggaaaggccctgagcgacgcatgtatgggcacaatcgcctccttcctgtctaagtaccaggacatcatcatcgaacaccagaaggtggtgaagggcaaccagaagagactggagagcctgcgggagctggccggcaaggaaaacctggaataccctagcgtgaccctgccacctcagcctcacaccaaggagggcgttgatgcctacaacgaagtgatcgcccgggtgcgaatgtgggtgaacctgaacctgtggcagaagctgaagctaagcagagatgatgccaagcctctgctgagactgaagggattcccttcctttcctctggtcgagagacaggccaacgaagtggactggtgggacatggtgtgtaacgtgaagaagctgatcaacgagaaaaaggaggatggcaaggtgttttggcagaatctggctggctacaagagacaggaagccctgagaccatacctgagcagcgaggaagatcggaagaagggaaagaaattcgctcggtaccagctgggcgacctgctgctgcacctggaaaagaagcacggcgaggactggggaaaggtgtacgacgaggcctgggagcggattgacaagaaagtggaaggcctgagcaagcacatcaagctggaagaggaacggagaagcgaggacgcccagagcaaggccgccctgaccgactggctgcgggctaaggccagcttcgtgatcgagggcctgaaggaggccgacaaggacgagttctgcagatgcgagctgaagctgcagaagtggtacggggacctgcggggaaagcccttcgccatcgaagccgagaacagcatcctggacatcagcggcttcagcaagcagtacaactgtgccttcatctggcagaaggacggcgtgaagaagctgaacctgtacctgatcatcaactacttcaagggcggcaagctgcggttcaagaagatcaaacctgaagccttcgaagccaacagattctacaccgtgatcaacaaaaagagcggcgagatcgtgcccatggaggtgaacttcaacttcgacgaccccaacctgatcatcctgcctctggcctttggcaagagacagggcagagaattcatctggaacgacctgctgtccctggaaaccggcagcctgaagctggccaacggaagagtgatcgagaagacactgtacaacagaagaacccggcaggatgagcctgccctgttcgtggccctgaccttcgagcggcgggaggtcctggactcctccaatatcaaaccaatgaacctgatcggcgtggcaagaggcgaaaacatccccgccgtgatcgccctgaccgaccccgagggctgcccactgagccggtttaaggatagcctgggaaacccaacccacatcctgagaatcggcgagagctataaggagaagcagcggaccatccaggccaagaaggaggtggagcagcggagagccggcggctacagccggaagtacgccagcaaagccaagaatctggcagacgatatggtgagaaacaccgctagagatctgctgtactacgccgtgacccaggatgccatgctgatcttcgccaacctgagccggggcttcggccggcagggcaagcggaccttcatggccgagagacagtacacacggatggaggactggctgaccgccaagctggcctacgagggcctgagcaagacctacctgtccaagacactggcccagtacacctccaagacatgcagcaactgtgggtttaccatcaccagcgccgactacgacagggtgctggagaagctgaagaagacagcaacaggctggatgaccacaattaacggcaaggagctgaaggtggagggccagattacctactacaacagatacaagagacagaacgtagtcaaggacctgtccgtcgagctggatagactgagcgaagaatctgtgaacaacgacatctcctcctggacaaagggcagaagcggagaagctctgagcctcctgaagaaaagattctcccatagacccgtgcaggagaagttcgtgtgcctgaactgcggcttcgagacacacgcagccgagcaagccgccctgaacatcgccagatcctggctgttcctgcggagccaggagtacaagaaataccagacaaacaagacaaccggcaacaccgataagagagccttcgtcgagacctggcagtccttttaccggaagaagcttaaggaggtgtggaaacctgccgtgcggtctggcggatctggcggaggctccacaagcgcccagggccaggtgaacttcgaggacgtggccgtgtacttcagccccgaggagtggggcctgctggacgaggcccagaggctgctgtacagggacgtgatgctggagaacctggccctgatggccagcctgggctacgagagcagcatgagccacggcttcgccagcctggagctgggcagcaagccctggggcagcgactgggccgacgtgacccccgccaggaccagggacacccagggcaccagccccaagaaaaagagaaaagtctaagctgccttctgcggggcttgccttctggccatgcccttcttctctcccttgcacctgtacctcttggtctttgaataaagcctgagtaggaaggctagcaaaaaaaaaaaaaaaaaaaaaaaaaaaaaaaaaaaaaaaaaaaaaaaaaaaaaaaaaaaaaaaaaaaaaaaaaaaaaaaa

SEQ ID NO: 3974 - RNA, 5419 nt, synthetic construct
  source 1..5419: mol_type = other RNA
aggaaataagagagaaaagaagagtaagaagaaatataagagccaccatggcccctaagaagaagcgtaaagtgagccgggtgaacggcagcggcagcggcggcggcatgaaccacgaccaggagttcgacccccctaaggtgtaccctcccgtccccgccgagaagagaaagcccatccgggtcctgagcctgttcgatggcatcgccaccggtctgctggtgctgaaggacctgggcatccaggtggataggtacattgcctccgaggtgtgcgaggactccatcaccgtgggaatggtgcgtcatcagggcaagatcatgtacgtgggcgacgtgcggagcgtgacacagaagcatatccaggagtggggccctttcgacctggtgatcggcggcagcccttgcaatgacctgagcatcgtgaacccagcccggaagggcctgtacgagggaaccggcagactgttcttcgagttttacagactgctgcacgacgcccggcctaaggaaggcgacgaccggcccttcttttggctgttcgagaatgtggtggccatgggagtcagcgacaagcgggatattagccggttcctggagagcaaccccgtgatgatcgatgccaaggaagtgagcgccgcccaccgggccagatacttctggggcaatctgcctggcatgaacagacccctggccagcaccgtgaacgacaagctggagctgcaggagtgcctggagcacggccggatcgccaagttcagcaaggtgagaaccatcaccacccgaagcaacagcatcaaacaaggcaaggaccagcactttcctgtgttcatgaacgagaaggaggacatcctgtggtgtaccgagatggagagagtgttcgggttcccagtccactacacagatgtcagcaacatgtctagactggccagacagagactgctgggaagaagctggtccgtccctgtgatcagacacctgttcgcccctctgaaggagtacttcgcctgcgtgagcagcggcaacagcaacgccaacagccggggccccagcttctctagcggcctggtgccactgtccctgagagggagccacatgggccccatggagatctacaaaaccgtgagcgcctggaagcggcagcctgtgcgcgtgctgagcctgtttcggaatatcgataaagtcctgaaaagcctgggattcctggagagcggctctggctccggcggtggcaccctgaagtacgtggaggatgtgacaaacgtggtcagacgggatgtggagaagtggggccccttcgatctggtgtacggcagcacccaacccctgggcagctcttgtgaccggtgccctggctggtacatgtttcagttccaccggatcctgcagtacgccctgccgagacaggagtcccagcggccattcttttggattttcatggacaacttgctgctgaccgaggatgaccaggaaactaccactcggttcctgcagaccgaagccgtgaccctgcaggacgtgagaggccgggactaccagaacgccatgcgggtgtggtccaacatccctggactgaaaagcaagcacgcacctctgacccctaaagaagaggagtacctgcaggcccaggtgcggagcagaagcaagctggacgcccctaaggtggatctgctggtgaagaattgcctcctgcccctgagagagtacttcaagtatttcagccagaatagtctgcccctgggcggcccaagcagcggcgcccctcctcccagcggcggcagcccagccggctccccaacctctaccgaggagggcacctctgagtccgccacccccgagagcggccctggcacctccaccgagcccagcgagggcagcgcacccggcagccctgccggcagccccacctccacagaggagggaaccagcaccgagcccagcgaaggcagcgccccaggcaccagcaccgagcctagtgagggcggctctggcggcggcagcgcccaggagattaaacggatcaacaagatcagaagaagacttgtgaaagacagcaacaccaagaaggccggcaagacaggccccatgaaaaccctgctggttagagtgatgacacccgatctgagagagcggctggaaaacctgagaaagaagcctgaaaatatcccccagcccatcagcaatacatctagagccaacctgaataagctgctgaccgattacaccgaaatgaagaaggcgatcctgcatgtgtactgggaagagttccagaaggaccctgtgggcctgatgagccgggtggcccagcctgccagcaagaagatcgatcagaacaagctgaaacctgagatggacgagaagggcaacctgaccaccgccggctttgcctgctctcagtgtggccagcccctgttcgtgtacaagctggagcaggtgtctgagaagggcaaggcttacaccaactacttcggacggtgcaatgtggccgagcacgaaaagctgatcctgctggcccagctgaagcccgagaaggatagcgacgaagccgtgacatatagcctgggaaagtttgggcagagggccctggatttctacagcattcatgtgaccaaggagtccacccaccccgtgaagcccctggcccagatcgccggaaacagatacgcctccggacctgtgggaaaggccctgagcgacgcatgtatgggcacaatcgcctccttcctgtctaagtaccaggacatcatcatcgaacaccagaaggtggtgaagggcaaccagaagagactggagagcctgcgggagctggccggcaaggaaaacctggaataccctagcgtgaccctgccacctcagcctcacaccaaggagggcgttgatgcctacaacgaagtgatcgcccgggtgcgaatgtgggtgaacctgaacctgtggcagaagctgaagctaagcagagatgatgccaagcctctgctgagactgaagggattcccttcctttcctctggtcgagagacaggccaacgaagtggactggtgggacatggtgtgtaacgtgaagaagctgatcaacgagaaaaaggaggatggcaaggtgttttggcagaatctggctggctacaagagacaggaagccctgagaccatacctgagcagcgaggaagatcggaagaagggaaagaaattcgctcggtaccagctgggcgacctgctgctgcacctggaaaagaagcacggcgaggactggggaaaggtgtacgacgaggcctgggagcggattgacaagaaagtggaaggcctgagcaagcacatcaagctggaagaggaacggagaagcgaggacgcccagagcaaggccgccctgaccgactggctgcgggctaaggccagcttcgtgatcgagggcctgaaggaggccgacaaggacgagttctgcagatgcgagctgaagctgcagaagtggtacggggacctgcggggaaagcccttcgccatcgaagccgagaacagcatcctggacatcagcggcttcagcaagcagtacaactgtgccttcatctggcagaaggacggcgtgaagaagctgaacctgtacctgatcatcaactacttcaagggcggcaagctgcggttcaagaagatcaaacctgaagccttcgaagccaacagattctacaccgtgatcaacaaaaagagcggcgagatcgtgcccatggaggtgaacttcaacttcgacgaccccaacctgatcatcctgcctctggcctttggcaagagacagggcagagaattcatctggaacgacctgctgtccctggaaaccggcagcctgaagctggccaacggaagagtgatcgagaagacactgtacaacagaagaacccggcaggatgagcctgccctgttcgtggccctgaccttcgagcggcgggaggtcctggactcctccaatatcaaaccaatgaacctgatcggcgtggcaagaggcgaaaacatccccgccgtgatcgccctgaccgaccccgagggctgcccactgagccggtttaaggatagcctgggaaacccaacccacatcctgagaatcggcgagagctataaggagaagcagcggaccatccaggccaagaaggaggtggagcagcggagagccggcggctacagccggaagtacgccagcaaagccaagaatctggcagacgatatggtgagaaacaccgctagagatctgctgtactacgccgtgacccaggatgccatgctgatcttcgccaacctgagccggggcttcggccggcagggcaagcggaccttcatggccgagagacagtacacacggatggaggactggctgaccgccaagctggcctacgagggcctgagcaagacctacctgtccaagacactggcccagtacacctccaagacatgcagcaactgtgggtttaccatcaccagcgccgactacgacagggtgctggagaagctgaagaagacagcaacaggctggatgaccacaattaacggcaaggagctgaaggtggagggccagattacctactacaacagatacaagagacagaacgtagtcaaggacctgtccgtcgagctggatagactgagcgaagaatctgtgaacaacgacatctcctcctggacaaagggcagaagcggagaagctctgagcctcctgaagaaaagattctcccatagacccgtgcaggagaagttcgtgtgcctgaactgcggcttcgagacacacgcagccgagcaagccgccctgaacatcgccagatcctggctgttcctgcggagccaggagtacaagaaataccagacaaacaagacaaccggcaacaccgataagagagccttcgtcgagacctggcagtccttttaccggaagaagcttaaggaggtgtggaaacctgccgtgcggtctggcggatctggcggaggctccacaagccaggccgaggtgaccttcgaggacgtggccgtgctgctgagccaggaggagtggggcctgctgggccccagccagaagggcctgtacagggaggtgatgctggagacctacaggaacctgctgagcctgggcgccggcctggccgaccccaagcccgaggtgatcgtgcagctggagaggggcgacgagctgtgggtgctggacatgcacggcgccgagcagcccagcgtggacggcagcgccaccagccccaagaaaaagagaaaagtctaagctgccttctgcggggcttgccttctggccatgcccttcttctctcccttgcacctgtacctcttggtctttgaataaagcctgagtaggaaggctagcaaaaaaaaaaaaaaaaaaaaaaaaaaaaaaaaaaaaaaaaaaaaaaaaaaaaaaaaaaaaaaaaaaaaaaaaaaaaaaaa

SEQ ID NO: 3975 - RNA, 5419 nt, synthetic construct
  source 1..5419: mol_type = other RNA
aggaaataagagagaaaagaagagtaagaagaaatataagagccaccatggcccctaagaagaagcgtaaagtgagccgggtgaacggcagcggcagcggcggcggcatgaaccacgaccaggagttcgacccccctaaggtgtaccctcccgtccccgccgagaagagaaagcccatccgggtcctgagcctgttcgatggcatcgccaccggtctgctggtgctgaaggacctgggcatccaggtggataggtacattgcctccgaggtgtgcgaggactccatcaccgtgggaatggtgcgtcatcagggcaagatcatgtacgtgggcgacgtgcggagcgtgacacagaagcatatccaggagtggggccctttcgacctggtgatcggcggcagcccttgcaatgacctgagcatcgtgaacccagcccggaagggcctgtacgagggaaccggcagactgttcttcgagttttacagactgctgcacgacgcccggcctaaggaaggcgacgaccggcccttcttttggctgttcgagaatgtggtggccatgggagtcagcgacaagcgggatattagccggttcctggagagcaaccccgtgatgatcgatgccaaggaagtgagcgccgcccaccgggccagatacttctggggcaatctgcctggcatgaacagacccctggccagcaccgtgaacgacaagctggagctgcaggagtgcctggagcacggccggatcgccaagttcagcaaggtgagaaccatcaccacccgaagcaacagcatcaaacaaggcaaggaccagcactttcctgtgttcatgaacgagaaggaggacatcctgtggtgtaccgagatggagagagtgttcgggttcccagtccactacacagatgtcagcaacatgtctagactggccagacagagactgctgggaagaagctggtccgtccctgtgatcagacacctgttcgcccctctgaaggagtacttcgcctgcgtgagcagcggcaacagcaacgccaacagccggggccccagcttctctagcggcctggtgccactgtccctgagagggagccacatgggccccatggagatctacaaaaccgtgagcgcctggaagcggcagcctgtgcgcgtgctgagcctgtttcggaatatcgataaagtcctgaaaagcctgggattcctggagagcggctctggctccggcggtggcaccctgaagtacgtggaggatgtgacaaacgtggtcagacgggatgtggagaagtggggccccttcgatctggtgtacggcagcacccaacccctgggcagctcttgtgaccggtgccctggctggtacatgtttcagttccaccggatcctgcagtacgccctgccgagacaggagtcccagcggccattcttttggattttcatggacaacttgctgctgaccgaggatgaccaggaaactaccactcggttcctgcagaccgaagccgtgaccctgcaggacgtgagaggccgggactaccagaacgccatgcgggtgtggtccaacatccctggactgaaaagcaagcacgcacctctgacccctaaagaagaggagtacctgcaggcccaggtgcggagcagaagcaagctggacgcccctaaggtggatctgctggtgaagaattgcctcctgcccctgagagagtacttcaagtatttcagccagaatagtctgcccctgggcggcccaagcagcggcgcccctcctcccagcggcggcagcccagccggctccccaacctctaccgaggagggcacctctgagtccgccacccccgagagcggccctggcacctccaccgagcccagcgagggcagcgcacccggcagccctgccggcagccccacctccacagaggagggaaccagcaccgagcccagcgaaggcagcgccccaggcaccagcaccgagcctagtgagggcggctctggcggcggcagcgcccaggagattaaacggatcaacaagatcagaagaagacttgtgaaagacagcaacaccaagaaggccggcaagacaggccccatgaaaaccctgctggttagagtgatgacacccgatctgagagagcggctggaaaacctgagaaagaagcctgaaaatatcccccagcccatcagcaatacatctagagccaacctgaataagctgctgaccgattacaccgaaatgaagaaggcgatcctgcatgtgtactgggaagagttccagaaggaccctgtgggcctgatgagccgggtggcccagcctgccagcaagaagatcgatcagaacaagctgaaacctgagatggacgagaagggcaacctgaccaccgccggctttgcctgctctcagtgtggccagcccctgttcgtgtacaagctggagcaggtgtctgagaagggcaaggcttacaccaactacttcggacggtgcaatgtggccgagcacgaaaagctgatcctgctggcccagctgaagcccgagaaggatagcgacgaagccgtgacatatagcctgggaaagtttgggcagagggccctggatttctacagcattcatgtgaccaaggagtccacccaccccgtgaagcccctggcccagatcgccggaaacagatacgcctccggacctgtgggaaaggccctgagcgacgcatgtatgggcacaatcgcctccttcctgtctaagtaccaggacatcatcatcgaacaccagaaggtggtgaagggcaaccagaagagactggagagcctgcgggagctggccggcaaggaaaacctggaataccctagcgtgaccctgccacctcagcctcacaccaaggagggcgttgatgcctacaacgaagtgatcgcccgggtgcgaatgtgggtgaacctgaacctgtggcagaagctgaagctaagcagagatgatgccaagcctctgctgagactgaagggattcccttcctttcctctggtcgagagacaggccaacgaagtggactggtgggacatggtgtgtaacgtgaagaagctgatcaacgagaaaaaggaggatggcaaggtgttttggcagaatctggctggctacaagagacaggaagccctgagaccatacctgagcagcgaggaagatcggaagaagggaaagaaattcgctcggtaccagctgggcgacctgctgctgcacctggaaaagaagcacggcgaggactggggaaaggtgtacgacgaggcctgggagcggattgacaagaaagtggaaggcctgagcaagcacatcaagctggaagaggaacggagaagcgaggacgcccagagcaaggccgccctgaccgactggctgcgggctaaggccagcttcgtgatcgagggcctgaaggaggccgacaaggacgagttctgcagatgcgagctgaagctgcagaagtggtacggggacctgcggggaaagcccttcgccatcgaagccgagaacagcatcctggacatcagcggcttcagcaagcagtacaactgtgccttcatctggcagaaggacggcgtgaagaagctgaacctgtacctgatcatcaactacttcaagggcggcaagctgcggttcaagaagatcaaacctgaagccttcgaagccaacagattctacaccgtgatcaacaaaaagagcggcgagatcgtgcccatggaggtgaacttcaacttcgacgaccccaacctgatcatcctgcctctggcctttggcaagagacagggcagagaattcatctggaacgacctgctgtccctggaaaccggcagcctgaagctggccaacggaagagtgatcgagaagacactgtacaacagaagaacccggcaggatgagcctgccctgttcgtggccctgaccttcgagcggcgggaggtcctggactcctccaatatcaaaccaatgaacctgatcggcgtggcaagaggcgaaaacatccccgccgtgatcgccctgaccgaccccgagggctgcccactgagccggtttaaggatagcctgggaaacccaacccacatcctgagaatcggcgagagctataaggagaagcagcggaccatccaggccaagaaggaggtggagcagcggagagccggcggctacagccggaagtacgccagcaaagccaagaatctggcagacgatatggtgagaaacaccgctagagatctgctgtactacgccgtgacccaggatgccatgctgatcttcgccaacctgagccggggcttcggccggcagggcaagcggaccttcatggccgagagacagtacacacggatggaggactggctgaccgccaagctggcctacgagggcctgagcaagacctacctgtccaagacactggcccagtacacctccaagacatgcagcaactgtgggtttaccatcaccagcgccgactacgacagggtgctggagaagctgaagaagacagcaacaggctggatgaccacaattaacggcaaggagctgaaggtggagggccagattacctactacaacagatacaagagacagaacgtagtcaaggacctgtccgtcgagctggatagactgagcgaagaatctgtgaacaacgacatctcctcctggacaaagggcagaagcggagaagctctgagcctcctgaagaaaagattctcccatagacccgtgcaggagaagttcgtgtgcctgaactgcggcttcgagacacacgcagccgagcaagccgccctgaacatcgccagatcctggctgttcctgcggagccaggagtacaagaaataccagacaaacaagacaaccggcaacaccgataagagagccttcgtcgagacctggcagtccttttaccggaagaagcttaaggaggtgtggaaacctgccgtgcggtctggcggatctggcggaggctccacaagcttcgaggagctggtgaccttcgaggacgtggccgtgtacttcagcgagaacgagtggaccagcctggcccccacccagagggtgctgtacagggacgtgatgctggagaactacggcgccgtggccagcctggccgccttccccttccccaagcccgccctgatcagccagctggagaggggcgaggccccctggtgcaaggccccccagggcgccctggacggcgagggccccaggggcatcaccagccccaagaaaaagagaaaagtctaagctgccttctgcggggcttgccttctggccatgcccttcttctctcccttgcacctgtacctcttggtctttgaataaagcctgagtaggaaggctagcaaaaaaaaaaaaaaaaaaaaaaaaaaaaaaaaaaaaaaaaaaaaaaaaaaaaaaaaaaaaaaaaaaaaaaaaaaaaaaaa

SEQ ID NO: 3976 - RNA, 5419 nt, synthetic construct
  source 1..5419: mol_type = other RNA
aggaaataagagagaaaagaagagtaagaagaaatataagagccaccatggcccctaagaagaagcgtaaagtgagccgggtgaacggcagcggcagcggcggcggcatgaaccacgaccaggagttcgacccccctaaggtgtaccctcccgtccccgccgagaagagaaagcccatccgggtcctgagcctgttcgatggcatcgccaccggtctgctggtgctgaaggacctgggcatccaggtggataggtacattgcctccgaggtgtgcgaggactccatcaccgtgggaatggtgcgtcatcagggcaagatcatgtacgtgggcgacgtgcggagcgtgacacagaagcatatccaggagtggggccctttcgacctggtgatcggcggcagcccttgcaatgacctgagcatcgtgaacccagcccggaagggcctgtacgagggaaccggcagactgttcttcgagttttacagactgctgcacgacgcccggcctaaggaaggcgacgaccggcccttcttttggctgttcgagaatgtggtggccatgggagtcagcgacaagcgggatattagccggttcctggagagcaaccccgtgatgatcgatgccaaggaagtgagcgccgcccaccgggccagatacttctggggcaatctgcctggcatgaacagacccctggccagcaccgtgaacgacaagctggagctgcaggagtgcctggagcacggccggatcgccaagttcagcaaggtgagaaccatcaccacccgaagcaacagcatcaaacaaggcaaggaccagcactttcctgtgttcatgaacgagaaggaggacatcctgtggtgtaccgagatggagagagtgttcgggttcccagtccactacacagatgtcagcaacatgtctagactggccagacagagactgctgggaagaagctggtccgtccctgtgatcagacacctgttcgcccctctgaaggagtacttcgcctgcgtgagcagcggcaacagcaacgccaacagccggggccccagcttctctagcggcctggtgccactgtccctgagagggagccacatgggccccatggagatctacaaaaccgtgagcgcctggaagcggcagcctgtgcgcgtgctgagcctgtttcggaatatcgataaagtcctgaaaagcctgggattcctggagagcggctctggctccggcggtggcaccctgaagtacgtggaggatgtgacaaacgtggtcagacgggatgtggagaagtggggccccttcgatctggtgtacggcagcacccaacccctgggcagctcttgtgaccggtgccctggctggtacatgtttcagttccaccggatcctgcagtacgccctgccgagacaggagtcccagcggccattcttttggattttcatggacaacttgctgctgaccgaggatgaccaggaaactaccactcggttcctgcagaccgaagccgtgaccctgcaggacgtgagaggccgggactaccagaacgccatgcgggtgtggtccaacatccctggactgaaaagcaagcacgcacctctgacccctaaagaagaggagtacctgcaggcccaggtgcggagcagaagcaagctggacgcccctaaggtggatctgctggtgaagaattgcctcctgcccctgagagagtacttcaagtatttcagccagaatagtctgcccctgggcggcccaagcagcggcgcccctcctcccagcggcggcagcccagccggctccccaacctctaccgaggagggcacctctgagtccgccacccccgagagcggccctggcacctccaccgagcccagcgagggcagcgcacccggcagccctgccggcagccccacctccacagaggagggaaccagcaccgagcccagcgaaggcagcgccccaggcaccagcaccgagcctagtgagggcggctctggcggcggcagcgcccaggagattaaacggatcaacaagatcagaagaagacttgtgaaagacagcaacaccaagaaggccggcaagacaggccccatgaaaaccctgctggttagagtgatgacacccgatctgagagagcggctggaaaacctgagaaagaagcctgaaaatatcccccagcccatcagcaatacatctagagccaacctgaataagctgctgaccgattacaccgaaatgaagaaggcgatcctgcatgtgtactgggaagagttccagaaggaccctgtgggcctgatgagccgggtggcccagcctgccagcaagaagatcgatcagaacaagctgaaacctgagatggacgagaagggcaacctgaccaccgccggctttgcctgctctcagtgtggccagcccctgttcgtgtacaagctggagcaggtgtctgagaagggcaaggcttacaccaactacttcggacggtgcaatgtggccgagcacgaaaagctgatcctgctggcccagctgaagcccgagaaggatagcgacgaagccgtgacatatagcctgggaaagtttgggcagagggccctggatttctacagcattcatgtgaccaaggagtccacccaccccgtgaagcccctggcccagatcgccggaaacagatacgcctccggacctgtgggaaaggccctgagcgacgcatgtatgggcacaatcgcctccttcctgtctaagtaccaggacatcatcatcgaacaccagaaggtggtgaagggcaaccagaagagactggagagcctgcgggagctggccggcaaggaaaacctggaataccctagcgtgaccctgccacctcagcctcacaccaaggagggcgttgatgcctacaacgaagtgatcgcccgggtgcgaatgtgggtgaacctgaacctgtggcagaagctgaagctaagcagagatgatgccaagcctctgctgagactgaagggattcccttcctttcctctggtcgagagacaggccaacgaagtggactggtgggacatggtgtgtaacgtgaagaagctgatcaacgagaaaaaggaggatggcaaggtgttttggcagaatctggctggctacaagagacaggaagccctgagaccatacctgagcagcgaggaagatcggaagaagggaaagaaattcgctcggtaccagctgggcgacctgctgctgcacctggaaaagaagcacggcgaggactggggaaaggtgtacgacgaggcctgggagcggattgacaagaaagtggaaggcctgagcaagcacatcaagctggaagaggaacggagaagcgaggacgcccagagcaaggccgccctgaccgactggctgcgggctaaggccagcttcgtgatcgagggcctgaaggaggccgacaaggacgagttctgcagatgcgagctgaagctgcagaagtggtacggggacctgcggggaaagcccttcgccatcgaagccgagaacagcatcctggacatcagcggcttcagcaagcagtacaactgtgccttcatctggcagaaggacggcgtgaagaagctgaacctgtacctgatcatcaactacttcaagggcggcaagctgcggttcaagaagatcaaacctgaagccttcgaagccaacagattctacaccgtgatcaacaaaaagagcggcgagatcgtgcccatggaggtgaacttcaacttcgacgaccccaacctgatcatcctgcctctggcctttggcaagagacagggcagagaattcatctggaacgacctgctgtccctggaaaccggcagcctgaagctggccaacggaagagtgatcgagaagacactgtacaacagaagaacccggcaggatgagcctgccctgttcgtggccctgaccttcgagcggcgggaggtcctggactcctccaatatcaaaccaatgaacctgatcggcgtggcaagaggcgaaaacatccccgccgtgatcgccctgaccgaccccgagggctgcccactgagccggtttaaggatagcctgggaaacccaacccacatcctgagaatcggcgagagctataaggagaagcagcggaccatccaggccaagaaggaggtggagcagcggagagccggcggctacagccggaagtacgccagcaaagccaagaatctggcagacgatatggtgagaaacaccgctagagatctgctgtactacgccgtgacccaggatgccatgctgatcttcgccaacctgagccggggcttcggccggcagggcaagcggaccttcatggccgagagacagtacacacggatggaggactggctgaccgccaagctggcctacgagggcctgagcaagacctacctgtccaagacactggcccagtacacctccaagacatgcagcaactgtgggtttaccatcaccagcgccgactacgacagggtgctggagaagctgaagaagacagcaacaggctggatgaccacaattaacggcaaggagctgaaggtggagggccagattacctactacaacagatacaagagacagaacgtagtcaaggacctgtccgtcgagctggatagactgagcgaagaatctgtgaacaacgacatctcctcctggacaaagggcagaagcggagaagctctgagcctcctgaagaaaagattctcccatagacccgtgcaggagaagttcgtgtgcctgaactgcggcttcgagacacacgcagccgagcaagccgccctgaacatcgccagatcctggctgttcctgcggagccaggagtacaagaaataccagacaaacaagacaaccggcaacaccgataagagagccttcgtcgagacctggcagtccttttaccggaagaagcttaaggaggtgtggaaacctgccgtgcggtctggcggatctggcggaggctccacaagcccccaggagagcgtggccttcgacgacgtggccgtgtacttcaccaagaaggagtgggccatcatggtgcccgaccagagggccctgtacagggacgtgatgctggagaactacgaggccgtggccttcgtggccgtgccccccaccagcaagcccgccctggtgagccacctggagcagggcaaggagccctgcttcacccagccccagggcgtgctgagcaggagggactggagggccggcaccagccccaagaaaaagagaaaagtctaagctgccttctgcggggcttgccttctggccatgcccttcttctctcccttgcacctgtacctcttggtctttgaataaagcctgagtaggaaggctagcaaaaaaaaaaaaaaaaaaaaaaaaaaaaaaaaaaaaaaaaaaaaaaaaaaaaaaaaaaaaaaaaaaaaaaaaaaaaaaaa

SEQ ID NO: 3977 - RNA, 5419 nt, synthetic construct
  source 1..5419: mol_type = other RNA
aggaaataagagagaaaagaagagtaagaagaaatataagagccaccatggcccctaagaagaagcgtaaagtgagccgggtgaacggcagcggcagcggcggcggcatgaaccacgaccaggagttcgacccccctaaggtgtaccctcccgtccccgccgagaagagaaagcccatccgggtcctgagcctgttcgatggcatcgccaccggtctgctggtgctgaaggacctgggcatccaggtggataggtacattgcctccgaggtgtgcgaggactccatcaccgtgggaatggtgcgtcatcagggcaagatcatgtacgtgggcgacgtgcggagcgtgacacagaagcatatccaggagtggggccctttcgacctggtgatcggcggcagcccttgcaatgacctgagcatcgtgaacccagcccggaagggcctgtacgagggaaccggcagactgttcttcgagttttacagactgctgcacgacgcccggcctaaggaaggcgacgaccggcccttcttttggctgttcgagaatgtggtggccatgggagtcagcgacaagcgggatattagccggttcctggagagcaaccccgtgatgatcgatgccaaggaagtgagcgccgcccaccgggccagatacttctggggcaatctgcctggcatgaacagacccctggccagcaccgtgaacgacaagctggagctgcaggagtgcctggagcacggccggatcgccaagttcagcaaggtgagaaccatcaccacccgaagcaacagcatcaaacaaggcaaggaccagcactttcctgtgttcatgaacgagaaggaggacatcctgtggtgtaccgagatggagagagtgttcgggttcccagtccactacacagatgtcagcaacatgtctagactggccagacagagactgctgggaagaagctggtccgtccctgtgatcagacacctgttcgcccctctgaaggagtacttcgcctgcgtgagcagcggcaacagcaacgccaacagccggggccccagcttctctagcggcctggtgccactgtccctgagagggagccacatgggccccatggagatctacaaaaccgtgagcgcctggaagcggcagcctgtgcgcgtgctgagcctgtttcggaatatcgataaagtcctgaaaagcctgggattcctggagagcggctctggctccggcggtggcaccctgaagtacgtggaggatgtgacaaacgtggtcagacgggatgtggagaagtggggccccttcgatctggtgtacggcagcacccaacccctgggcagctcttgtgaccggtgccctggctggtacatgtttcagttccaccggatcctgcagtacgccctgccgagacaggagtcccagcggccattcttttggattttcatggacaacttgctgctgaccgaggatgaccaggaaactaccactcggttcctgcagaccgaagccgtgaccctgcaggacgtgagaggccgggactaccagaacgccatgcgggtgtggtccaacatccctggactgaaaagcaagcacgcacctctgacccctaaagaagaggagtacctgcaggcccaggtgcggagcagaagcaagctggacgcccctaaggtggatctgctggtgaagaattgcctcctgcccctgagagagtacttcaagtatttcagccagaatagtctgcccctgggcggcccaagcagcggcgcccctcctcccagcggcggcagcccagccggctccccaacctctaccgaggagggcacctctgagtccgccacccccgagagcggccctggcacctccaccgagcccagcgagggcagcgcacccggcagccctgccggcagccccacctccacagaggagggaaccagcaccgagcccagcgaaggcagcgccccaggcaccagcaccgagcctagtgagggcggctctggcggcggcagcgcccaggagattaaacggatcaacaagatcagaagaagacttgtgaaagacagcaacaccaagaaggccggcaagacaggccccatgaaaaccctgctggttagagtgatgacacccgatctgagagagcggctggaaaacctgagaaagaagcctgaaaatatcccccagcccatcagcaatacatctagagccaacctgaataagctgctgaccgattacaccgaaatgaagaaggcgatcctgcatgtgtactgggaagagttccagaaggaccctgtgggcctgatgagccgggtggcccagcctgccagcaagaagatcgatcagaacaagctgaaacctgagatggacgagaagggcaacctgaccaccgccggctttgcctgctctcagtgtggccagcccctgttcgtgtacaagctggagcaggtgtctgagaagggcaaggcttacaccaactacttcggacggtgcaatgtggccgagcacgaaaagctgatcctgctggcccagctgaagcccgagaaggatagcgacgaagccgtgacatatagcctgggaaagtttgggcagagggccctggatttctacagcattcatgtgaccaaggagtccacccaccccgtgaagcccctggcccagatcgccggaaacagatacgcctccggacctgtgggaaaggccctgagcgacgcatgtatgggcacaatcgcctccttcctgtctaagtaccaggacatcatcatcgaacaccagaaggtggtgaagggcaaccagaagagactggagagcctgcgggagctggccggcaaggaaaacctggaataccctagcgtgaccctgccacctcagcctcacaccaaggagggcgttgatgcctacaacgaagtgatcgcccgggtgcgaatgtgggtgaacctgaacctgtggcagaagctgaagctaagcagagatgatgccaagcctctgctgagactgaagggattcccttcctttcctctggtcgagagacaggccaacgaagtggactggtgggacatggtgtgtaacgtgaagaagctgatcaacgagaaaaaggaggatggcaaggtgttttggcagaatctggctggctacaagagacaggaagccctgagaccatacctgagcagcgaggaagatcggaagaagggaaagaaattcgctcggtaccagctgggcgacctgctgctgcacctggaaaagaagcacggcgaggactggggaaaggtgtacgacgaggcctgggagcggattgacaagaaagtggaaggcctgagcaagcacatcaagctggaagaggaacggagaagcgaggacgcccagagcaaggccgccctgaccgactggctgcgggctaaggccagcttcgtgatcgagggcctgaaggaggccgacaaggacgagttctgcagatgcgagctgaagctgcagaagtggtacggggacctgcggggaaagcccttcgccatcgaagccgagaacagcatcctggacatcagcggcttcagcaagcagtacaactgtgccttcatctggcagaaggacggcgtgaagaagctgaacctgtacctgatcatcaactacttcaagggcggcaagctgcggttcaagaagatcaaacctgaagccttcgaagccaacagattctacaccgtgatcaacaaaaagagcggcgagatcgtgcccatggaggtgaacttcaacttcgacgaccccaacctgatcatcctgcctctggcctttggcaagagacagggcagagaattcatctggaacgacctgctgtccctggaaaccggcagcctgaagctggccaacggaagagtgatcgagaagacactgtacaacagaagaacccggcaggatgagcctgccctgttcgtggccctgaccttcgagcggcgggaggtcctggactcctccaatatcaaaccaatgaacctgatcggcgtggcaagaggcgaaaacatccccgccgtgatcgccctgaccgaccccgagggctgcccactgagccggtttaaggatagcctgggaaacccaacccacatcctgagaatcggcgagagctataaggagaagcagcggaccatccaggccaagaaggaggtggagcagcggagagccggcggctacagccggaagtacgccagcaaagccaagaatctggcagacgatatggtgagaaacaccgctagagatctgctgtactacgccgtgacccaggatgccatgctgatcttcgccaacctgagccggggcttcggccggcagggcaagcggaccttcatggccgagagacagtacacacggatggaggactggctgaccgccaagctggcctacgagggcctgagcaagacctacctgtccaagacactggcccagtacacctccaagacatgcagcaactgtgggtttaccatcaccagcgccgactacgacagggtgctggagaagctgaagaagacagcaacaggctggatgaccacaattaacggcaaggagctgaaggtggagggccagattacctactacaacagatacaagagacagaacgtagtcaaggacctgtccgtcgagctggatagactgagcgaagaatctgtgaacaacgacatctcctcctggacaaagggcagaagcggagaagctctgagcctcctgaagaaaagattctcccatagacccgtgcaggagaagttcgtgtgcctgaactgcggcttcgagacacacgcagccgagcaagccgccctgaacatcgccagatcctggctgttcctgcggagccaggagtacaagaaataccagacaaacaagacaaccggcaacaccgataagagagccttcgtcgagacctggcagtccttttaccggaagaagcttaaggaggtgtggaaacctgccgtgcggtctggcggatctggcggaggctccacaagcagccaggagctggtggccttcgaggacgtgctggtggacttcacccccgaggagtggcagtacctgaacagcagccagaagaccctgtacagggaggtgatgctggagacctacagcaacctggtgagcgtggccggccagcaggacaccaagcccgacctgatcctgaagctggagctggagggcccctgcctggccgagaggaagatcagcgtgtggagcttccccgaggaggcctgccagaccagccccaagaaaaagagaaaagtctaagctgccttctgcggggcttgccttctggccatgcccttcttctctcccttgcacctgtacctcttggtctttgaataaagcctgagtaggaaggctagcaaaaaaaaaaaaaaaaaaaaaaaaaaaaaaaaaaaaaaaaaaaaaaaaaaaaaaaaaaaaaaaaaaaaaaaaaaaaaaaa

SEQ ID NO: 3978 - RNA, 5419 nt, synthetic construct
  source 1..5419: mol_type = other RNA
aggaaataagagagaaaagaagagtaagaagaaatataagagccaccatggcccctaagaagaagcgtaaagtgagccgggtgaacggcagcggcagcggcggcggcatgaaccacgaccaggagttcgacccccctaaggtgtaccctcccgtccccgccgagaagagaaagcccatccgggtcctgagcctgttcgatggcatcgccaccggtctgctggtgctgaaggacctgggcatccaggtggataggtacattgcctccgaggtgtgcgaggactccatcaccgtgggaatggtgcgtcatcagggcaagatcatgtacgtgggcgacgtgcggagcgtgacacagaagcatatccaggagtggggccctttcgacctggtgatcggcggcagcccttgcaatgacctgagcatcgtgaacccagcccggaagggcctgtacgagggaaccggcagactgttcttcgagttttacagactgctgcacgacgcccggcctaaggaaggcgacgaccggcccttcttttggctgttcgagaatgtggtggccatgggagtcagcgacaagcgggatattagccggttcctggagagcaaccccgtgatgatcgatgccaaggaagtgagcgccgcccaccgggccagatacttctggggcaatctgcctggcatgaacagacccctggccagcaccgtgaacgacaagctggagctgcaggagtgcctggagcacggccggatcgccaagttcagcaaggtgagaaccatcaccacccgaagcaacagcatcaaacaaggcaaggaccagcactttcctgtgttcatgaacgagaaggaggacatcctgtggtgtaccgagatggagagagtgttcgggttcccagtccactacacagatgtcagcaacatgtctagactggccagacagagactgctgggaagaagctggtccgtccctgtgatcagacacctgttcgcccctctgaaggagtacttcgcctgcgtgagcagcggcaacagcaacgccaacagccggggccccagcttctctagcggcctggtgccactgtccctgagagggagccacatgggccccatggagatctacaaaaccgtgagcgcctggaagcggcagcctgtgcgcgtgctgagcctgtttcggaatatcgataaagtcctgaaaagcctgggattcctggagagcggctctggctccggcggtggcaccctgaagtacgtggaggatgtgacaaacgtggtcagacgggatgtggagaagtggggccccttcgatctggtgtacggcagcacccaacccctgggcagctcttgtgaccggtgccctggctggtacatgtttcagttccaccggatcctgcagtacgccctgccgagacaggagtcccagcggccattcttttggattttcatggacaacttgctgctgaccgaggatgaccaggaaactaccactcggttcctgcagaccgaagccgtgaccctgcaggacgtgagaggccgggactaccagaacgccatgcgggtgtggtccaacatccctggactgaaaagcaagcacgcacctctgacccctaaagaagaggagtacctgcaggcccaggtgcggagcagaagcaagctggacgcccctaaggtggatctgctggtgaagaattgcctcctgcccctgagagagtacttcaagtatttcagccagaatagtctgcccctgggcggcccaagcagcggcgcccctcctcccagcggcggcagcccagccggctccccaacctctaccgaggagggcacctctgagtccgccacccccgagagcggccctggcacctccaccgagcccagcgagggcagcgcacccggcagccctgccggcagccccacctccacagaggagggaaccagcaccgagcccagcgaaggcagcgccccaggcaccagcaccgagcctagtgagggcggctctggcggcggcagcgcccaggagattaaacggatcaacaagatcagaagaagacttgtgaaagacagcaacaccaagaaggccggcaagacaggccccatgaaaaccctgctggttagagtgatgacacccgatctgagagagcggctggaaaacctgagaaagaagcctgaaaatatcccccagcccatcagcaatacatctagagccaacctgaataagctgctgaccgattacaccgaaatgaagaaggcgatcctgcatgtgtactgggaagagttccagaaggaccctgtgggcctgatgagccgggtggcccagcctgccagcaagaagatcgatcagaacaagctgaaacctgagatggacgagaagggcaacctgaccaccgccggctttgcctgctctcagtgtggccagcccctgttcgtgtacaagctggagcaggtgtctgagaagggcaaggcttacaccaactacttcggacggtgcaatgtggccgagcacgaaaagctgatcctgctggcccagctgaagcccgagaaggatagcgacgaagccgtgacatatagcctgggaaagtttgggcagagggccctggatttctacagcattcatgtgaccaaggagtccacccaccccgtgaagcccctggcccagatcgccggaaacagatacgcctccggacctgtgggaaaggccctgagcgacgcatgtatgggcacaatcgcctccttcctgtctaagtaccaggacatcatcatcgaacaccagaaggtggtgaagggcaaccagaagagactggagagcctgcgggagctggccggcaaggaaaacctggaataccctagcgtgaccctgccacctcagcctcacaccaaggagggcgttgatgcctacaacgaagtgatcgcccgggtgcgaatgtgggtgaacctgaacctgtggcagaagctgaagctaagcagagatgatgccaagcctctgctgagactgaagggattcccttcctttcctctggtcgagagacaggccaacgaagtggactggtgggacatggtgtgtaacgtgaagaagctgatcaacgagaaaaaggaggatggcaaggtgttttggcagaatctggctggctacaagagacaggaagccctgagaccatacctgagcagcgaggaagatcggaagaagggaaagaaattcgctcggtaccagctgggcgacctgctgctgcacctggaaaagaagcacggcgaggactggggaaaggtgtacgacgaggcctgggagcggattgacaagaaagtggaaggcctgagcaagcacatcaagctggaagaggaacggagaagcgaggacgcccagagcaaggccgccctgaccgactggctgcgggctaaggccagcttcgtgatcgagggcctgaaggaggccgacaaggacgagttctgcagatgcgagctgaagctgcagaagtggtacggggacctgcggggaaagcccttcgccatcgaagccgagaacagcatcctggacatcagcggcttcagcaagcagtacaactgtgccttcatctggcagaaggacggcgtgaagaagctgaacctgtacctgatcatcaactacttcaagggcggcaagctgcggttcaagaagatcaaacctgaagccttcgaagccaacagattctacaccgtgatcaacaaaaagagcggcgagatcgtgcccatggaggtgaacttcaacttcgacgaccccaacctgatcatcctgcctctggcctttggcaagagacagggcagagaattcatctggaacgacctgctgtccctggaaaccggcagcctgaagctggccaacggaagagtgatcgagaagacactgtacaacagaagaacccggcaggatgagcctgccctgttcgtggccctgaccttcgagcggcgggaggtcctggactcctccaatatcaaaccaatgaacctgatcggcgtggcaagaggcgaaaacatccccgccgtgatcgccctgaccgaccccgagggctgcccactgagccggtttaaggatagcctgggaaacccaacccacatcctgagaatcggcgagagctataaggagaagcagcggaccatccaggccaagaaggaggtggagcagcggagagccggcggctacagccggaagtacgccagcaaagccaagaatctggcagacgatatggtgagaaacaccgctagagatctgctgtactacgccgtgacccaggatgccatgctgatcttcgccaacctgagccggggcttcggccggcagggcaagcggaccttcatggccgagagacagtacacacggatggaggactggctgaccgccaagctggcctacgagggcctgagcaagacctacctgtccaagacactggcccagtacacctccaagacatgcagcaactgtgggtttaccatcaccagcgccgactacgacagggtgctggagaagctgaagaagacagcaacaggctggatgaccacaattaacggcaaggagctgaaggtggagggccagattacctactacaacagatacaagagacagaacgtagtcaaggacctgtccgtcgagctggatagactgagcgaagaatctgtgaacaacgacatctcctcctggacaaagggcagaagcggagaagctctgagcctcctgaagaaaagattctcccatagacccgtgcaggagaagttcgtgtgcctgaactgcggcttcgagacacacgcagccgagcaagccgccctgaacatcgccagatcctggctgttcctgcggagccaggagtacaagaaataccagacaaacaagacaaccggcaacaccgataagagagccttcgtcgagacctggcagtccttttaccggaagaagcttaaggaggtgtggaaacctgccgtgcggtctggcggatctggcggaggctccacaagcagcagcgtgaccttcgaggacgtggccgtgtacttcagccaggaggagtggaggttcctgaacaaggcccagaagcacctgtaccacgacgtgatgctggaggtgttcgccctgatcgccagcctgggcggcggccagggcgccctggaggccgccgcccccagcgagcagaacgtgagcggcggcggcagccagaaggcctacgcccaggactgcagcctggacaccaaccccggccagaccaccagccccaagaaaaagagaaaagtctaagctgccttctgcggggcttgccttctggccatgcccttcttctctcccttgcacctgtacctcttggtctttgaataaagcctgagtaggaaggctagcaaaaaaaaaaaaaaaaaaaaaaaaaaaaaaaaaaaaaaaaaaaaaaaaaaaaaaaaaaaaaaaaaaaaaaaaaaaaaaaa

SEQ ID NO: 3979 - RNA, 5419 nt, synthetic construct
  source 1..5419: mol_type = other RNA
aggaaataagagagaaaagaagagtaagaagaaatataagagccaccatggcccctaagaagaagcgtaaagtgagccgggtgaacggcagcggcagcggcggcggcatgaaccacgaccaggagttcgacccccctaaggtgtaccctcccgtccccgccgagaagagaaagcccatccgggtcctgagcctgttcgatggcatcgccaccggtctgctggtgctgaaggacctgggcatccaggtggataggtacattgcctccgaggtgtgcgaggactccatcaccgtgggaatggtgcgtcatcagggcaagatcatgtacgtgggcgacgtgcggagcgtgacacagaagcatatccaggagtggggccctttcgacctggtgatcggcggcagcccttgcaatgacctgagcatcgtgaacccagcccggaagggcctgtacgagggaaccggcagactgttcttcgagttttacagactgctgcacgacgcccggcctaaggaaggcgacgaccggcccttcttttggctgttcgagaatgtggtggccatgggagtcagcgacaagcgggatattagccggttcctggagagcaaccccgtgatgatcgatgccaaggaagtgagcgccgcccaccgggccagatacttctggggcaatctgcctggcatgaacagacccctggccagcaccgtgaacgacaagctggagctgcaggagtgcctggagcacggccggatcgccaagttcagcaaggtgagaaccatcaccacccgaagcaacagcatcaaacaaggcaaggaccagcactttcctgtgttcatgaacgagaaggaggacatcctgtggtgtaccgagatggagagagtgttcgggttcccagtccactacacagatgtcagcaacatgtctagactggccagacagagactgctgggaagaagctggtccgtccctgtgatcagacacctgttcgcccctctgaaggagtacttcgcctgcgtgagcagcggcaacagcaacgccaacagccggggccccagcttctctagcggcctggtgccactgtccctgagagggagccacatgggccccatggagatctacaaaaccgtgagcgcctggaagcggcagcctgtgcgcgtgctgagcctgtttcggaatatcgataaagtcctgaaaagcctgggattcctggagagcggctctggctccggcggtggcaccctgaagtacgtggaggatgtgacaaacgtggtcagacgggatgtggagaagtggggccccttcgatctggtgtacggcagcacccaacccctgggcagctcttgtgaccggtgccctggctggtacatgtttcagttccaccggatcctgcagtacgccctgccgagacaggagtcccagcggccattcttttggattttcatggacaacttgctgctgaccgaggatgaccaggaaactaccactcggttcctgcagaccgaagccgtgaccctgcaggacgtgagaggccgggactaccagaacgccatgcgggtgtggtccaacatccctggactgaaaagcaagcacgcacctctgacccctaaagaagaggagtacctgcaggcccaggtgcggagcagaagcaagctggacgcccctaaggtggatctgctggtgaagaattgcctcctgcccctgagagagtacttcaagtatttcagccagaatagtctgcccctgggcggcccaagcagcggcgcccctcctcccagcggcggcagcccagccggctccccaacctctaccgaggagggcacctctgagtccgccacccccgagagcggccctggcacctccaccgagcccagcgagggcagcgcacccggcagccctgccggcagccccacctccacagaggagggaaccagcaccgagcccagcgaaggcagcgccccaggcaccagcaccgagcctagtgagggcggctctggcggcggcagcgcccaggagattaaacggatcaacaagatcagaagaagacttgtgaaagacagcaacaccaagaaggccggcaagacaggccccatgaaaaccctgctggttagagtgatgacacccgatctgagagagcggctggaaaacctgagaaagaagcctgaaaatatcccccagcccatcagcaatacatctagagccaacctgaataagctgctgaccgattacaccgaaatgaagaaggcgatcctgcatgtgtactgggaagagttccagaaggaccctgtgggcctgatgagccgggtggcccagcctgccagcaagaagatcgatcagaacaagctgaaacctgagatggacgagaagggcaacctgaccaccgccggctttgcctgctctcagtgtggccagcccctgttcgtgtacaagctggagcaggtgtctgagaagggcaaggcttacaccaactacttcggacggtgcaatgtggccgagcacgaaaagctgatcctgctggcccagctgaagcccgagaaggatagcgacgaagccgtgacatatagcctgggaaagtttgggcagagggccctggatttctacagcattcatgtgaccaaggagtccacccaccccgtgaagcccctggcccagatcgccggaaacagatacgcctccggacctgtgggaaaggccctgagcgacgcatgtatgggcacaatcgcctccttcctgtctaagtaccaggacatcatcatcgaacaccagaaggtggtgaagggcaaccagaagagactggagagcctgcgggagctggccggcaaggaaaacctggaataccctagcgtgaccctgccacctcagcctcacaccaaggagggcgttgatgcctacaacgaagtgatcgcccgggtgcgaatgtgggtgaacctgaacctgtggcagaagctgaagctaagcagagatgatgccaagcctctgctgagactgaagggattcccttcctttcctctggtcgagagacaggccaacgaagtggactggtgggacatggtgtgtaacgtgaagaagctgatcaacgagaaaaaggaggatggcaaggtgttttggcagaatctggctggctacaagagacaggaagccctgagaccatacctgagcagcgaggaagatcggaagaagggaaagaaattcgctcggtaccagctgggcgacctgctgctgcacctggaaaagaagcacggcgaggactggggaaaggtgtacgacgaggcctgggagcggattgacaagaaagtggaaggcctgagcaagcacatcaagctggaagaggaacggagaagcgaggacgcccagagcaaggccgccctgaccgactggctgcgggctaaggccagcttcgtgatcgagggcctgaaggaggccgacaaggacgagttctgcagatgcgagctgaagctgcagaagtggtacggggacctgcggggaaagcccttcgccatcgaagccgagaacagcatcctggacatcagcggcttcagcaagcagtacaactgtgccttcatctggcagaaggacggcgtgaagaagctgaacctgtacctgatcatcaactacttcaagggcggcaagctgcggttcaagaagatcaaacctgaagccttcgaagccaacagattctacaccgtgatcaacaaaaagagcggcgagatcgtgcccatggaggtgaacttcaacttcgacgaccccaacctgatcatcctgcctctggcctttggcaagagacagggcagagaattcatctggaacgacctgctgtccctggaaaccggcagcctgaagctggccaacggaagagtgatcgagaagacactgtacaacagaagaacccggcaggatgagcctgccctgttcgtggccctgaccttcgagcggcgggaggtcctggactcctccaatatcaaaccaatgaacctgatcggcgtggcaagaggcgaaaacatccccgccgtgatcgccctgaccgaccccgagggctgcccactgagccggtttaaggatagcctgggaaacccaacccacatcctgagaatcggcgagagctataaggagaagcagcggaccatccaggccaagaaggaggtggagcagcggagagccggcggctacagccggaagtacgccagcaaagccaagaatctggcagacgatatggtgagaaacaccgctagagatctgctgtactacgccgtgacccaggatgccatgctgatcttcgccaacctgagccggggcttcggccggcagggcaagcggaccttcatggccgagagacagtacacacggatggaggactggctgaccgccaagctggcctacgagggcctgagcaagacctacctgtccaagacactggcccagtacacctccaagacatgcagcaactgtgggtttaccatcaccagcgccgactacgacagggtgctggagaagctgaagaagacagcaacaggctggatgaccacaattaacggcaaggagctgaaggtggagggccagattacctactacaacagatacaagagacagaacgtagtcaaggacctgtccgtcgagctggatagactgagcgaagaatctgtgaacaacgacatctcctcctggacaaagggcagaagcggagaagctctgagcctcctgaagaaaagattctcccatagacccgtgcaggagaagttcgtgtgcctgaactgcggcttcgagacacacgcagccgagcaagccgccctgaacatcgccagatcctggctgttcctgcggagccaggagtacaagaaataccagacaaacaagacaaccggcaacaccgataagagagccttcgtcgagacctggcagtccttttaccggaagaagcttaaggaggtgtggaaacctgccgtgcggtctggcggatctggcggaggctccacaagcgtgaaggaggtggtgaccctgcaggacgtggccgtggacttcacctgggaggagtggaggctgctgagccccccccagaaggagctgtacagggaggtgatgctggagaacgcccagaacctgctgagcgtgggcctgcccgcccccctggaggacgtgctgagctacctggagcagaggaagggcccctggatgctggagcagaagaggctgaggagctgctgccccggcgagatcaggctgaccagccccaagaaaaagagaaaagtctaagctgccttctgcggggcttgccttctggccatgcccttcttctctcccttgcacctgtacctcttggtctttgaataaagcctgagtaggaaggctagcaaaaaaaaaaaaaaaaaaaaaaaaaaaaaaaaaaaaaaaaaaaaaaaaaaaaaaaaaaaaaaaaaaaaaaaaaaaaaaaa

SEQ ID NO: 3980 - RNA, 5419 nt, synthetic construct
  source 1..5419: mol_type = other RNA
aggaaataagagagaaaagaagagtaagaagaaatataagagccaccatggcccctaagaagaagcgtaaagtgagccgggtgaacggcagcggcagcggcggcggcatgaaccacgaccaggagttcgacccccctaaggtgtaccctcccgtccccgccgagaagagaaagcccatccgggtcctgagcctgttcgatggcatcgccaccggtctgctggtgctgaaggacctgggcatccaggtggataggtacattgcctccgaggtgtgcgaggactccatcaccgtgggaatggtgcgtcatcagggcaagatcatgtacgtgggcgacgtgcggagcgtgacacagaagcatatccaggagtggggccctttcgacctggtgatcggcggcagcccttgcaatgacctgagcatcgtgaacccagcccggaagggcctgtacgagggaaccggcagactgttcttcgagttttacagactgctgcacgacgcccggcctaaggaaggcgacgaccggcccttcttttggctgttcgagaatgtggtggccatgggagtcagcgacaagcgggatattagccggttcctggagagcaaccccgtgatgatcgatgccaaggaagtgagcgccgcccaccgggccagatacttctggggcaatctgcctggcatgaacagacccctggccagcaccgtgaacgacaagctggagctgcaggagtgcctggagcacggccggatcgccaagttcagcaaggtgagaaccatcaccacccgaagcaacagcatcaaacaaggcaaggaccagcactttcctgtgttcatgaacgagaaggaggacatcctgtggtgtaccgagatggagagagtgttcgggttcccagtccactacacagatgtcagcaacatgtctagactggccagacagagactgctgggaagaagctggtccgtccctgtgatcagacacctgttcgcccctctgaaggagtacttcgcctgcgtgagcagcggcaacagcaacgccaacagccggggccccagcttctctagcggcctggtgccactgtccctgagagggagccacatgggccccatggagatctacaaaaccgtgagcgcctggaagcggcagcctgtgcgcgtgctgagcctgtttcggaatatcgataaagtcctgaaaagcctgggattcctggagagcggctctggctccggcggtggcaccctgaagtacgtggaggatgtgacaaacgtggtcagacgggatgtggagaagtggggccccttcgatctggtgtacggcagcacccaacccctgggcagctcttgtgaccggtgccctggctggtacatgtttcagttccaccggatcctgcagtacgccctgccgagacaggagtcccagcggccattcttttggattttcatggacaacttgctgctgaccgaggatgaccaggaaactaccactcggttcctgcagaccgaagccgtgaccctgcaggacgtgagaggccgggactaccagaacgccatgcgggtgtggtccaacatccctggactgaaaagcaagcacgcacctctgacccctaaagaagaggagtacctgcaggcccaggtgcggagcagaagcaagctggacgcccctaaggtggatctgctggtgaagaattgcctcctgcccctgagagagtacttcaagtatttcagccagaatagtctgcccctgggcggcccaagcagcggcgcccctcctcccagcggcggcagcccagccggctccccaacctctaccgaggagggcacctctgagtccgccacccccgagagcggccctggcacctccaccgagcccagcgagggcagcgcacccggcagccctgccggcagccccacctccacagaggagggaaccagcaccgagcccagcgaaggcagcgccccaggcaccagcaccgagcctagtgagggcggctctggcggcggcagcgcccaggagattaaacggatcaacaagatcagaagaagacttgtgaaagacagcaacaccaagaaggccggcaagacaggccccatgaaaaccctgctggttagagtgatgacacccgatctgagagagcggctggaaaacctgagaaagaagcctgaaaatatcccccagcccatcagcaatacatctagagccaacctgaataagctgctgaccgattacaccgaaatgaagaaggcgatcctgcatgtgtactgggaagagttccagaaggaccctgtgggcctgatgagccgggtggcccagcctgccagcaagaagatcgatcagaacaagctgaaacctgagatggacgagaagggcaacctgaccaccgccggctttgcctgctctcagtgtggccagcccctgttcgtgtacaagctggagcaggtgtctgagaagggcaaggcttacaccaactacttcggacggtgcaatgtggccgagcacgaaaagctgatcctgctggcccagctgaagcccgagaaggatagcgacgaagccgtgacatatagcctgggaaagtttgggcagagggccctggatttctacagcattcatgtgaccaaggagtccacccaccccgtgaagcccctggcccagatcgccggaaacagatacgcctccggacctgtgggaaaggccctgagcgacgcatgtatgggcacaatcgcctccttcctgtctaagtaccaggacatcatcatcgaacaccagaaggtggtgaagggcaaccagaagagactggagagcctgcgggagctggccggcaaggaaaacctggaataccctagcgtgaccctgccacctcagcctcacaccaaggagggcgttgatgcctacaacgaagtgatcgcccgggtgcgaatgtgggtgaacctgaacctgtggcagaagctgaagctaagcagagatgatgccaagcctctgctgagactgaagggattcccttcctttcctctggtcgagagacaggccaacgaagtggactggtgggacatggtgtgtaacgtgaagaagctgatcaacgagaaaaaggaggatggcaaggtgttttggcagaatctggctggctacaagagacaggaagccctgagaccatacctgagcagcgaggaagatcggaagaagggaaagaaattcgctcggtaccagctgggcgacctgctgctgcacctggaaaagaagcacggcgaggactggggaaaggtgtacgacgaggcctgggagcggattgacaagaaagtggaaggcctgagcaagcacatcaagctggaagaggaacggagaagcgaggacgcccagagcaaggccgccctgaccgactggctgcgggctaaggccagcttcgtgatcgagggcctgaaggaggccgacaaggacgagttctgcagatgcgagctgaagctgcagaagtggtacggggacctgcggggaaagcccttcgccatcgaagccgagaacagcatcctggacatcagcggcttcagcaagcagtacaactgtgccttcatctggcagaaggacggcgtgaagaagctgaacctgtacctgatcatcaactacttcaagggcggcaagctgcggttcaagaagatcaaacctgaagccttcgaagccaacagattctacaccgtgatcaacaaaaagagcggcgagatcgtgcccatggaggtgaacttcaacttcgacgaccccaacctgatcatcctgcctctggcctttggcaagagacagggcagagaattcatctggaacgacctgctgtccctggaaaccggcagcctgaagctggccaacggaagagtgatcgagaagacactgtacaacagaagaacccggcaggatgagcctgccctgttcgtggccctgaccttcgagcggcgggaggtcctggactcctccaatatcaaaccaatgaacctgatcggcgtggcaagaggcgaaaacatccccgccgtgatcgccctgaccgaccccgagggctgcccactgagccggtttaaggatagcctgggaaacccaacccacatcctgagaatcggcgagagctataaggagaagcagcggaccatccaggccaagaaggaggtggagcagcggagagccggcggctacagccggaagtacgccagcaaagccaagaatctggcagacgatatggtgagaaacaccgctagagatctgctgtactacgccgtgacccaggatgccatgctgatcttcgccaacctgagccggggcttcggccggcagggcaagcggaccttcatggccgagagacagtacacacggatggaggactggctgaccgccaagctggcctacgagggcctgagcaagacctacctgtccaagacactggcccagtacacctccaagacatgcagcaactgtgggtttaccatcaccagcgccgactacgacagggtgctggagaagctgaagaagacagcaacaggctggatgaccacaattaacggcaaggagctgaaggtggagggccagattacctactacaacagatacaagagacagaacgtagtcaaggacctgtccgtcgagctggatagactgagcgaagaatctgtgaacaacgacatctcctcctggacaaagggcagaagcggagaagctctgagcctcctgaagaaaagattctcccatagacccgtgcaggagaagttcgtgtgcctgaactgcggcttcgagacacacgcagccgagcaagccgccctgaacatcgccagatcctggctgttcctgcggagccaggagtacaagaaataccagacaaacaagacaaccggcaacaccgataagagagccttcgtcgagacctggcagtccttttaccggaagaagcttaaggaggtgtggaaacctgccgtgcggtctggcggatctggcggaggctccacaagcatgctgcagaccgcctggaggcaggagcccgtgaccttcgaggacgtggccgtgtacttcacccagaacgagtggaccagcctggaccccgtgcagagggccctgtacagggaggtgatgctggagaactacgccaacgtggccagcctggccttccccttcaccacccccgtgctggtgagccagctggagcagggcgagaggccctggggcctggacccctgggagcccgtgggcagggagaccagccccaagaaaaagagaaaagtctaagctgccttctgcggggcttgccttctggccatgcccttcttctctcccttgcacctgtacctcttggtctttgaataaagcctgagtaggaaggctagcaaaaaaaaaaaaaaaaaaaaaaaaaaaaaaaaaaaaaaaaaaaaaaaaaaaaaaaaaaaaaaaaaaaaaaaaaaaaaaaa

SEQ ID NO: 3981 - RNA, 5419 nt, synthetic construct
  source 1..5419: mol_type = other RNA
aggaaataagagagaaaagaagagtaagaagaaatataagagccaccatggcccctaagaagaagcgtaaagtgagccgggtgaacggcagcggcagcggcggcggcatgaaccacgaccaggagttcgacccccctaaggtgtaccctcccgtccccgccgagaagagaaagcccatccgggtcctgagcctgttcgatggcatcgccaccggtctgctggtgctgaaggacctgggcatccaggtggataggtacattgcctccgaggtgtgcgaggactccatcaccgtgggaatggtgcgtcatcagggcaagatcatgtacgtgggcgacgtgcggagcgtgacacagaagcatatccaggagtggggccctttcgacctggtgatcggcggcagcccttgcaatgacctgagcatcgtgaacccagcccggaagggcctgtacgagggaaccggcagactgttcttcgagttttacagactgctgcacgacgcccggcctaaggaaggcgacgaccggcccttcttttggctgttcgagaatgtggtggccatgggagtcagcgacaagcgggatattagccggttcctggagagcaaccccgtgatgatcgatgccaaggaagtgagcgccgcccaccgggccagatacttctggggcaatctgcctggcatgaacagacccctggccagcaccgtgaacgacaagctggagctgcaggagtgcctggagcacggccggatcgccaagttcagcaaggtgagaaccatcaccacccgaagcaacagcatcaaacaaggcaaggaccagcactttcctgtgttcatgaacgagaaggaggacatcctgtggtgtaccgagatggagagagtgttcgggttcccagtccactacacagatgtcagcaacatgtctagactggccagacagagactgctgggaagaagctggtccgtccctgtgatcagacacctgttcgcccctctgaaggagtacttcgcctgcgtgagcagcggcaacagcaacgccaacagccggggccccagcttctctagcggcctggtgccactgtccctgagagggagccacatgggccccatggagatctacaaaaccgtgagcgcctggaagcggcagcctgtgcgcgtgctgagcctgtttcggaatatcgataaagtcctgaaaagcctgggattcctggagagcggctctggctccggcggtggcaccctgaagtacgtggaggatgtgacaaacgtggtcagacgggatgtggagaagtggggccccttcgatctggtgtacggcagcacccaacccctgggcagctcttgtgaccggtgccctggctggtacatgtttcagttccaccggatcctgcagtacgccctgccgagacaggagtcccagcggccattcttttggattttcatggacaacttgctgctgaccgaggatgaccaggaaactaccactcggttcctgcagaccgaagccgtgaccctgcaggacgtgagaggccgggactaccagaacgccatgcgggtgtggtccaacatccctggactgaaaagcaagcacgcacctctgacccctaaagaagaggagtacctgcaggcccaggtgcggagcagaagcaagctggacgcccctaaggtggatctgctggtgaagaattgcctcctgcccctgagagagtacttcaagtatttcagccagaatagtctgcccctgggcggcccaagcagcggcgcccctcctcccagcggcggcagcccagccggctccccaacctctaccgaggagggcacctctgagtccgccacccccgagagcggccctggcacctccaccgagcccagcgagggcagcgcacccggcagccctgccggcagccccacctccacagaggagggaaccagcaccgagcccagcgaaggcagcgccccaggcaccagcaccgagcctagtgagggcggctctggcggcggcagcgcccaggagattaaacggatcaacaagatcagaagaagacttgtgaaagacagcaacaccaagaaggccggcaagacaggccccatgaaaaccctgctggttagagtgatgacacccgatctgagagagcggctggaaaacctgagaaagaagcctgaaaatatcccccagcccatcagcaatacatctagagccaacctgaataagctgctgaccgattacaccgaaatgaagaaggcgatcctgcatgtgtactgggaagagttccagaaggaccctgtgggcctgatgagccgggtggcccagcctgccagcaagaagatcgatcagaacaagctgaaacctgagatggacgagaagggcaacctgaccaccgccggctttgcctgctctcagtgtggccagcccctgttcgtgtacaagctggagcaggtgtctgagaagggcaaggcttacaccaactacttcggacggtgcaatgtggccgagcacgaaaagctgatcctgctggcccagctgaagcccgagaaggatagcgacgaagccgtgacatatagcctgggaaagtttgggcagagggccctggatttctacagcattcatgtgaccaaggagtccacccaccccgtgaagcccctggcccagatcgccggaaacagatacgcctccggacctgtgggaaaggccctgagcgacgcatgtatgggcacaatcgcctccttcctgtctaagtaccaggacatcatcatcgaacaccagaaggtggtgaagggcaaccagaagagactggagagcctgcgggagctggccggcaaggaaaacctggaataccctagcgtgaccctgccacctcagcctcacaccaaggagggcgttgatgcctacaacgaagtgatcgcccgggtgcgaatgtgggtgaacctgaacctgtggcagaagctgaagctaagcagagatgatgccaagcctctgctgagactgaagggattcccttcctttcctctggtcgagagacaggccaacgaagtggactggtgggacatggtgtgtaacgtgaagaagctgatcaacgagaaaaaggaggatggcaaggtgttttggcagaatctggctggctacaagagacaggaagccctgagaccatacctgagcagcgaggaagatcggaagaagggaaagaaattcgctcggtaccagctgggcgacctgctgctgcacctggaaaagaagcacggcgaggactggggaaaggtgtacgacgaggcctgggagcggattgacaagaaagtggaaggcctgagcaagcacatcaagctggaagaggaacggagaagcgaggacgcccagagcaaggccgccctgaccgactggctgcgggctaaggccagcttcgtgatcgagggcctgaaggaggccgacaaggacgagttctgcagatgcgagctgaagctgcagaagtggtacggggacctgcggggaaagcccttcgccatcgaagccgagaacagcatcctggacatcagcggcttcagcaagcagtacaactgtgccttcatctggcagaaggacggcgtgaagaagctgaacctgtacctgatcatcaactacttcaagggcggcaagctgcggttcaagaagatcaaacctgaagccttcgaagccaacagattctacaccgtgatcaacaaaaagagcggcgagatcgtgcccatggaggtgaacttcaacttcgacgaccccaacctgatcatcctgcctctggcctttggcaagagacagggcagagaattcatctggaacgacctgctgtccctggaaaccggcagcctgaagctggccaacggaagagtgatcgagaagacactgtacaacagaagaacccggcaggatgagcctgccctgttcgtggccctgaccttcgagcggcgggaggtcctggactcctccaatatcaaaccaatgaacctgatcggcgtggcaagaggcgaaaacatccccgccgtgatcgccctgaccgaccccgagggctgcccactgagccggtttaaggatagcctgggaaacccaacccacatcctgagaatcggcgagagctataaggagaagcagcggaccatccaggccaagaaggaggtggagcagcggagagccggcggctacagccggaagtacgccagcaaagccaagaatctggcagacgatatggtgagaaacaccgctagagatctgctgtactacgccgtgacccaggatgccatgctgatcttcgccaacctgagccggggcttcggccggcagggcaagcggaccttcatggccgagagacagtacacacggatggaggactggctgaccgccaagctggcctacgagggcctgagcaagacctacctgtccaagacactggcccagtacacctccaagacatgcagcaactgtgggtttaccatcaccagcgccgactacgacagggtgctggagaagctgaagaagacagcaacaggctggatgaccacaattaacggcaaggagctgaaggtggagggccagattacctactacaacagatacaagagacagaacgtagtcaaggacctgtccgtcgagctggatagactgagcgaagaatctgtgaacaacgacatctcctcctggacaaagggcagaagcggagaagctctgagcctcctgaagaaaagattctcccatagacccgtgcaggagaagttcgtgtgcctgaactgcggcttcgagacacacgcagccgagcaagccgccctgaacatcgccagatcctggctgttcctgcggagccaggagtacaagaaataccagacaaacaagacaaccggcaacaccgataagagagccttcgtcgagacctggcagtccttttaccggaagaagcttaaggaggtgtggaaacctgccgtgcggtctggcggatctggcggaggctccacaagcagccagggcaccgtgagcttcaaggacgtggccgtgaacttcacccaggaggagtggcagtacctggacctgccccagagggacctgtacaaggacgtgatgctggagaactacaccaacctgatcagcgtgggctaccagaccaccaagcccagcgtgatccacaagctggagcagggcgaggagccctggatggtggagagggagatccccaactggagctacgccgaggagacctggcagaccagccccaagaaaaagagaaaagtctaagctgccttctgcggggcttgccttctggccatgcccttcttctctcccttgcacctgtacctcttggtctttgaataaagcctgagtaggaaggctagcaaaaaaaaaaaaaaaaaaaaaaaaaaaaaaaaaaaaaaaaaaaaaaaaaaaaaaaaaaaaaaaaaaaaaaaaaaaaaaaa

SEQ ID NO: 3982 - RNA, 5419 nt, synthetic construct
  source 1..5419: mol_type = other RNA
aggaaataagagagaaaagaagagtaagaagaaatataagagccaccatggcccctaagaagaagcgtaaagtgagccgggtgaacggcagcggcagcggcggcggcatgaaccacgaccaggagttcgacccccctaaggtgtaccctcccgtccccgccgagaagagaaagcccatccgggtcctgagcctgttcgatggcatcgccaccggtctgctggtgctgaaggacctgggcatccaggtggataggtacattgcctccgaggtgtgcgaggactccatcaccgtgggaatggtgcgtcatcagggcaagatcatgtacgtgggcgacgtgcggagcgtgacacagaagcatatccaggagtggggccctttcgacctggtgatcggcggcagcccttgcaatgacctgagcatcgtgaacccagcccggaagggcctgtacgagggaaccggcagactgttcttcgagttttacagactgctgcacgacgcccggcctaaggaaggcgacgaccggcccttcttttggctgttcgagaatgtggtggccatgggagtcagcgacaagcgggatattagccggttcctggagagcaaccccgtgatgatcgatgccaaggaagtgagcgccgcccaccgggccagatacttctggggcaatctgcctggcatgaacagacccctggccagcaccgtgaacgacaagctggagctgcaggagtgcctggagcacggccggatcgccaagttcagcaaggtgagaaccatcaccacccgaagcaacagcatcaaacaaggcaaggaccagcactttcctgtgttcatgaacgagaaggaggacatcctgtggtgtaccgagatggagagagtgttcgggttcccagtccactacacagatgtcagcaacatgtctagactggccagacagagactgctgggaagaagctggtccgtccctgtgatcagacacctgttcgcccctctgaaggagtacttcgcctgcgtgagcagcggcaacagcaacgccaacagccggggccccagcttctctagcggcctggtgccactgtccctgagagggagccacatgggccccatggagatctacaaaaccgtgagcgcctggaagcggcagcctgtgcgcgtgctgagcctgtttcggaatatcgataaagtcctgaaaagcctgggattcctggagagcggctctggctccggcggtggcaccctgaagtacgtggaggatgtgacaaacgtggtcagacgggatgtggagaagtggggccccttcgatctggtgtacggcagcacccaacccctgggcagctcttgtgaccggtgccctggctggtacatgtttcagttccaccggatcctgcagtacgccctgccgagacaggagtcccagcggccattcttttggattttcatggacaacttgctgctgaccgaggatgaccaggaaactaccactcggttcctgcagaccgaagccgtgaccctgcaggacgtgagaggccgggactaccagaacgccatgcgggtgtggtccaacatccctggactgaaaagcaagcacgcacctctgacccctaaagaagaggagtacctgcaggcccaggtgcggagcagaagcaagctggacgcccctaaggtggatctgctggtgaagaattgcctcctgcccctgagagagtacttcaagtatttcagccagaatagtctgcccctgggcggcccaagcagcggcgcccctcctcccagcggcggcagcccagccggctccccaacctctaccgaggagggcacctctgagtccgccacccccgagagcggccctggcacctccaccgagcccagcgagggcagcgcacccggcagccctgccggcagccccacctccacagaggagggaaccagcaccgagcccagcgaaggcagcgccccaggcaccagcaccgagcctagtgagggcggctctggcggcggcagcgcccaggagattaaacggatcaacaagatcagaagaagacttgtgaaagacagcaacaccaagaaggccggcaagacaggccccatgaaaaccctgctggttagagtgatgacacccgatctgagagagcggctggaaaacctgagaaagaagcctgaaaatatcccccagcccatcagcaatacatctagagccaacctgaataagctgctgaccgattacaccgaaatgaagaaggcgatcctgcatgtgtactgggaagagttccagaaggaccctgtgggcctgatgagccgggtggcccagcctgccagcaagaagatcgatcagaacaagctgaaacctgagatggacgagaagggcaacctgaccaccgccggctttgcctgctctcagtgtggccagcccctgttcgtgtacaagctggagcaggtgtctgagaagggcaaggcttacaccaactacttcggacggtgcaatgtggccgagcacgaaaagctgatcctgctggcccagctgaagcccgagaaggatagcgacgaagccgtgacatatagcctgggaaagtttgggcagagggccctggatttctacagcattcatgtgaccaaggagtccacccaccccgtgaagcccctggcccagatcgccggaaacagatacgcctccggacctgtgggaaaggccctgagcgacgcatgtatgggcacaatcgcctccttcctgtctaagtaccaggacatcatcatcgaacaccagaaggtggtgaagggcaaccagaagagactggagagcctgcgggagctggccggcaaggaaaacctggaataccctagcgtgaccctgccacctcagcctcacaccaaggagggcgttgatgcctacaacgaagtgatcgcccgggtgcgaatgtgggtgaacctgaacctgtggcagaagctgaagctaagcagagatgatgccaagcctctgctgagactgaagggattcccttcctttcctctggtcgagagacaggccaacgaagtggactggtgggacatggtgtgtaacgtgaagaagctgatcaacgagaaaaaggaggatggcaaggtgttttggcagaatctggctggctacaagagacaggaagccctgagaccatacctgagcagcgaggaagatcggaagaagggaaagaaattcgctcggtaccagctgggcgacctgctgctgcacctggaaaagaagcacggcgaggactggggaaaggtgtacgacgaggcctgggagcggattgacaagaaagtggaaggcctgagcaagcacatcaagctggaagaggaacggagaagcgaggacgcccagagcaaggccgccctgaccgactggctgcgggctaaggccagcttcgtgatcgagggcctgaaggaggccgacaaggacgagttctgcagatgcgagctgaagctgcagaagtggtacggggacctgcggggaaagcccttcgccatcgaagccgagaacagcatcctggacatcagcggcttcagcaagcagtacaactgtgccttcatctggcagaaggacggcgtgaagaagctgaacctgtacctgatcatcaactacttcaagggcggcaagctgcggttcaagaagatcaaacctgaagccttcgaagccaacagattctacaccgtgatcaacaaaaagagcggcgagatcgtgcccatggaggtgaacttcaacttcgacgaccccaacctgatcatcctgcctctggcctttggcaagagacagggcagagaattcatctggaacgacctgctgtccctggaaaccggcagcctgaagctggccaacggaagagtgatcgagaagacactgtacaacagaagaacccggcaggatgagcctgccctgttcgtggccctgaccttcgagcggcgggaggtcctggactcctccaatatcaaaccaatgaacctgatcggcgtggcaagaggcgaaaacatccccgccgtgatcgccctgaccgaccccgagggctgcccactgagccggtttaaggatagcctgggaaacccaacccacatcctgagaatcggcgagagctataaggagaagcagcggaccatccaggccaagaaggaggtggagcagcggagagccggcggctacagccggaagtacgccagcaaagccaagaatctggcagacgatatggtgagaaacaccgctagagatctgctgtactacgccgtgacccaggatgccatgctgatcttcgccaacctgagccggggcttcggccggcagggcaagcggaccttcatggccgagagacagtacacacggatggaggactggctgaccgccaagctggcctacgagggcctgagcaagacctacctgtccaagacactggcccagtacacctccaagacatgcagcaactgtgggtttaccatcaccagcgccgactacgacagggtgctggagaagctgaagaagacagcaacaggctggatgaccacaattaacggcaaggagctgaaggtggagggccagattacctactacaacagatacaagagacagaacgtagtcaaggacctgtccgtcgagctggatagactgagcgaagaatctgtgaacaacgacatctcctcctggacaaagggcagaagcggagaagctctgagcctcctgaagaaaagattctcccatagacccgtgcaggagaagttcgtgtgcctgaactgcggcttcgagacacacgcagccgagcaagccgccctgaacatcgccagatcctggctgttcctgcggagccaggagtacaagaaataccagacaaacaagacaaccggcaacaccgataagagagccttcgtcgagacctggcagtccttttaccggaagaagcttaaggaggtgtggaaacctgccgtgcggtctggcggatctggcggaggctccacaagcccccccagcctggtgaccttcggcgacgtggccatcgacttcagccaggaggagtgggagtggctgaacagcgcccagaggaccctgtacaggaacgtgatgctggagaactacaggaacctggccagcctgggcctgtgcggcagcaagcccgacatgatcagcagcctggagcagaggagggagccctggatcaccaagaggaagctgaccaggggcaggtgccccgacctgaaggccgtgaccagccccaagaaaaagagaaaagtctaagctgccttctgcggggcttgccttctggccatgcccttcttctctcccttgcacctgtacctcttggtctttgaataaagcctgagtaggaaggctagcaaaaaaaaaaaaaaaaaaaaaaaaaaaaaaaaaaaaaaaaaaaaaaaaaaaaaaaaaaaaaaaaaaaaaaaaaaaaaaaa

SEQ ID NO: 3983 - RNA, 5419 nt, synthetic construct
  source 1..5419: mol_type = other RNA
aggaaataagagagaaaagaagagtaagaagaaatataagagccaccatggcccctaagaagaagcgtaaagtgagccgggtgaacggcagcggcagcggcggcggcatgaaccacgaccaggagttcgacccccctaaggtgtaccctcccgtccccgccgagaagagaaagcccatccgggtcctgagcctgttcgatggcatcgccaccggtctgctggtgctgaaggacctgggcatccaggtggataggtacattgcctccgaggtgtgcgaggactccatcaccgtgggaatggtgcgtcatcagggcaagatcatgtacgtgggcgacgtgcggagcgtgacacagaagcatatccaggagtggggccctttcgacctggtgatcggcggcagcccttgcaatgacctgagcatcgtgaacccagcccggaagggcctgtacgagggaaccggcagactgttcttcgagttttacagactgctgcacgacgcccggcctaaggaaggcgacgaccggcccttcttttggctgttcgagaatgtggtggccatgggagtcagcgacaagcgggatattagccggttcctggagagcaaccccgtgatgatcgatgccaaggaagtgagcgccgcccaccgggccagatacttctggggcaatctgcctggcatgaacagacccctggccagcaccgtgaacgacaagctggagctgcaggagtgcctggagcacggccggatcgccaagttcagcaaggtgagaaccatcaccacccgaagcaacagcatcaaacaaggcaaggaccagcactttcctgtgttcatgaacgagaaggaggacatcctgtggtgtaccgagatggagagagtgttcgggttcccagtccactacacagatgtcagcaacatgtctagactggccagacagagactgctgggaagaagctggtccgtccctgtgatcagacacctgttcgcccctctgaaggagtacttcgcctgcgtgagcagcggcaacagcaacgccaacagccggggccccagcttctctagcggcctggtgccactgtccctgagagggagccacatgggccccatggagatctacaaaaccgtgagcgcctggaagcggcagcctgtgcgcgtgctgagcctgtttcggaatatcgataaagtcctgaaaagcctgggattcctggagagcggctctggctccggcggtggcaccctgaagtacgtggaggatgtgacaaacgtggtcagacgggatgtggagaagtggggccccttcgatctggtgtacggcagcacccaacccctgggcagctcttgtgaccggtgccctggctggtacatgtttcagttccaccggatcctgcagtacgccctgccgagacaggagtcccagcggccattcttttggattttcatggacaacttgctgctgaccgaggatgaccaggaaactaccactcggttcctgcagaccgaagccgtgaccctgcaggacgtgagaggccgggactaccagaacgccatgcgggtgtggtccaacatccctggactgaaaagcaagcacgcacctctgacccctaaagaagaggagtacctgcaggcccaggtgcggagcagaagcaagctggacgcccctaaggtggatctgctggtgaagaattgcctcctgcccctgagagagtacttcaagtatttcagccagaatagtctgcccctgggcggcccaagcagcggcgcccctcctcccagcggcggcagcccagccggctccccaacctctaccgaggagggcacctctgagtccgccacccccgagagcggccctggcacctccaccgagcccagcgagggcagcgcacccggcagccctgccggcagccccacctccacagaggagggaaccagcaccgagcccagcgaaggcagcgccccaggcaccagcaccgagcctagtgagggcggctctggcggcggcagcgcccaggagattaaacggatcaacaagatcagaagaagacttgtgaaagacagcaacaccaagaaggccggcaagacaggccccatgaaaaccctgctggttagagtgatgacacccgatctgagagagcggctggaaaacctgagaaagaagcctgaaaatatcccccagcccatcagcaatacatctagagccaacctgaataagctgctgaccgattacaccgaaatgaagaaggcgatcctgcatgtgtactgggaagagttccagaaggaccctgtgggcctgatgagccgggtggcccagcctgccagcaagaagatcgatcagaacaagctgaaacctgagatggacgagaagggcaacctgaccaccgccggctttgcctgctctcagtgtggccagcccctgttcgtgtacaagctggagcaggtgtctgagaagggcaaggcttacaccaactacttcggacggtgcaatgtggccgagcacgaaaagctgatcctgctggcccagctgaagcccgagaaggatagcgacgaagccgtgacatatagcctgggaaagtttgggcagagggccctggatttctacagcattcatgtgaccaaggagtccacccaccccgtgaagcccctggcccagatcgccggaaacagatacgcctccggacctgtgggaaaggccctgagcgacgcatgtatgggcacaatcgcctccttcctgtctaagtaccaggacatcatcatcgaacaccagaaggtggtgaagggcaaccagaagagactggagagcctgcgggagctggccggcaaggaaaacctggaataccctagcgtgaccctgccacctcagcctcacaccaaggagggcgttgatgcctacaacgaagtgatcgcccgggtgcgaatgtgggtgaacctgaacctgtggcagaagctgaagctaagcagagatgatgccaagcctctgctgagactgaagggattcccttcctttcctctggtcgagagacaggccaacgaagtggactggtgggacatggtgtgtaacgtgaagaagctgatcaacgagaaaaaggaggatggcaaggtgttttggcagaatctggctggctacaagagacaggaagccctgagaccatacctgagcagcgaggaagatcggaagaagggaaagaaattcgctcggtaccagctgggcgacctgctgctgcacctggaaaagaagcacggcgaggactggggaaaggtgtacgacgaggcctgggagcggattgacaagaaagtggaaggcctgagcaagcacatcaagctggaagaggaacggagaagcgaggacgcccagagcaaggccgccctgaccgactggctgcgggctaaggccagcttcgtgatcgagggcctgaaggaggccgacaaggacgagttctgcagatgcgagctgaagctgcagaagtggtacggggacctgcggggaaagcccttcgccatcgaagccgagaacagcatcctggacatcagcggcttcagcaagcagtacaactgtgccttcatctggcagaaggacggcgtgaagaagctgaacctgtacctgatcatcaactacttcaagggcggcaagctgcggttcaagaagatcaaacctgaagccttcgaagccaacagattctacaccgtgatcaacaaaaagagcggcgagatcgtgcccatggaggtgaacttcaacttcgacgaccccaacctgatcatcctgcctctggcctttggcaagagacagggcagagaattcatctggaacgacctgctgtccctggaaaccggcagcctgaagctggccaacggaagagtgatcgagaagacactgtacaacagaagaacccggcaggatgagcctgccctgttcgtggccctgaccttcgagcggcgggaggtcctggactcctccaatatcaaaccaatgaacctgatcggcgtggcaagaggcgaaaacatccccgccgtgatcgccctgaccgaccccgagggctgcccactgagccggtttaaggatagcctgggaaacccaacccacatcctgagaatcggcgagagctataaggagaagcagcggaccatccaggccaagaaggaggtggagcagcggagagccggcggctacagccggaagtacgccagcaaagccaagaatctggcagacgatatggtgagaaacaccgctagagatctgctgtactacgccgtgacccaggatgccatgctgatcttcgccaacctgagccggggcttcggccggcagggcaagcggaccttcatggccgagagacagtacacacggatggaggactggctgaccgccaagctggcctacgagggcctgagcaagacctacctgtccaagacactggcccagtacacctccaagacatgcagcaactgtgggtttaccatcaccagcgccgactacgacagggtgctggagaagctgaagaagacagcaacaggctggatgaccacaattaacggcaaggagctgaaggtggagggccagattacctactacaacagatacaagagacagaacgtagtcaaggacctgtccgtcgagctggatagactgagcgaagaatctgtgaacaacgacatctcctcctggacaaagggcagaagcggagaagctctgagcctcctgaagaaaagattctcccatagacccgtgcaggagaagttcgtgtgcctgaactgcggcttcgagacacacgcagccgagcaagccgccctgaacatcgccagatcctggctgttcctgcggagccaggagtacaagaaataccagacaaacaagacaaccggcaacaccgataagagagccttcgtcgagacctggcagtccttttaccggaagaagcttaaggaggtgtggaaacctgccgtgcggtctggcggatctggcggaggctccacaagcatgagggtgaccttcgaggacatcgccgtgagcttcagccaggaggagtgggagtacctggacgaggagcagaaggagctgtacagggaggtgatgaaggagaactaccagaccctgatcagcctgggcgccggcagcctgaccttcacccccgagatcatcagccacatcgagaggggcgaggagccctacagcagggacgagcccggcagcggcgagagggagcccggcaagagcaggtgcaccagccccaagaaaaagagaaaagtctaagctgccttctgcggggcttgccttctggccatgcccttcttctctcccttgcacctgtacctcttggtctttgaataaagcctgagtaggaaggctagcaaaaaaaaaaaaaaaaaaaaaaaaaaaaaaaaaaaaaaaaaaaaaaaaaaaaaaaaaaaaaaaaaaaaaaaaaaaaaaaa

SEQ ID NO: 3984 - RNA, 5419 nt, synthetic construct
  source 1..5419: mol_type = other RNA
aggaaataagagagaaaagaagagtaagaagaaatataagagccaccatggcccctaagaagaagcgtaaagtgagccgggtgaacggcagcggcagcggcggcggcatgaaccacgaccaggagttcgacccccctaaggtgtaccctcccgtccccgccgagaagagaaagcccatccgggtcctgagcctgttcgatggcatcgccaccggtctgctggtgctgaaggacctgggcatccaggtggataggtacattgcctccgaggtgtgcgaggactccatcaccgtgggaatggtgcgtcatcagggcaagatcatgtacgtgggcgacgtgcggagcgtgacacagaagcatatccaggagtggggccctttcgacctggtgatcggcggcagcccttgcaatgacctgagcatcgtgaacccagcccggaagggcctgtacgagggaaccggcagactgttcttcgagttttacagactgctgcacgacgcccggcctaaggaaggcgacgaccggcccttcttttggctgttcgagaatgtggtggccatgggagtcagcgacaagcgggatattagccggttcctggagagcaaccccgtgatgatcgatgccaaggaagtgagcgccgcccaccgggccagatacttctggggcaatctgcctggcatgaacagacccctggccagcaccgtgaacgacaagctggagctgcaggagtgcctggagcacggccggatcgccaagttcagcaaggtgagaaccatcaccacccgaagcaacagcatcaaacaaggcaaggaccagcactttcctgtgttcatgaacgagaaggaggacatcctgtggtgtaccgagatggagagagtgttcgggttcccagtccactacacagatgtcagcaacatgtctagactggccagacagagactgctgggaagaagctggtccgtccctgtgatcagacacctgttcgcccctctgaaggagtacttcgcctgcgtgagcagcggcaacagcaacgccaacagccggggccccagcttctctagcggcctggtgccactgtccctgagagggagccacatgggccccatggagatctacaaaaccgtgagcgcctggaagcggcagcctgtgcgcgtgctgagcctgtttcggaatatcgataaagtcctgaaaagcctgggattcctggagagcggctctggctccggcggtggcaccctgaagtacgtggaggatgtgacaaacgtggtcagacgggatgtggagaagtggggccccttcgatctggtgtacggcagcacccaacccctgggcagctcttgtgaccggtgccctggctggtacatgtttcagttccaccggatcctgcagtacgccctgccgagacaggagtcccagcggccattcttttggattttcatggacaacttgctgctgaccgaggatgaccaggaaactaccactcggttcctgcagaccgaagccgtgaccctgcaggacgtgagaggccgggactaccagaacgccatgcgggtgtggtccaacatccctggactgaaaagcaagcacgcacctctgacccctaaagaagaggagtacctgcaggcccaggtgcggagcagaagcaagctggacgcccctaaggtggatctgctggtgaagaattgcctcctgcccctgagagagtacttcaagtatttcagccagaatagtctgcccctgggcggcccaagcagcggcgcccctcctcccagcggcggcagcccagccggctccccaacctctaccgaggagggcacctctgagtccgccacccccgagagcggccctggcacctccaccgagcccagcgagggcagcgcacccggcagccctgccggcagccccacctccacagaggagggaaccagcaccgagcccagcgaaggcagcgccccaggcaccagcaccgagcctagtgagggcggctctggcggcggcagcgcccaggagattaaacggatcaacaagatcagaagaagacttgtgaaagacagcaacaccaagaaggccggcaagacaggccccatgaaaaccctgctggttagagtgatgacacccgatctgagagagcggctggaaaacctgagaaagaagcctgaaaatatcccccagcccatcagcaatacatctagagccaacctgaataagctgctgaccgattacaccgaaatgaagaaggcgatcctgcatgtgtactgggaagagttccagaaggaccctgtgggcctgatgagccgggtggcccagcctgccagcaagaagatcgatcagaacaagctgaaacctgagatggacgagaagggcaacctgaccaccgccggctttgcctgctctcagtgtggccagcccctgttcgtgtacaagctggagcaggtgtctgagaagggcaaggcttacaccaactacttcggacggtgcaatgtggccgagcacgaaaagctgatcctgctggcccagctgaagcccgagaaggatagcgacgaagccgtgacatatagcctgggaaagtttgggcagagggccctggatttctacagcattcatgtgaccaaggagtccacccaccccgtgaagcccctggcccagatcgccggaaacagatacgcctccggacctgtgggaaaggccctgagcgacgcatgtatgggcacaatcgcctccttcctgtctaagtaccaggacatcatcatcgaacaccagaaggtggtgaagggcaaccagaagagactggagagcctgcgggagctggccggcaaggaaaacctggaataccctagcgtgaccctgccacctcagcctcacaccaaggagggcgttgatgcctacaacgaagtgatcgcccgggtgcgaatgtgggtgaacctgaacctgtggcagaagctgaagctaagcagagatgatgccaagcctctgctgagactgaagggattcccttcctttcctctggtcgagagacaggccaacgaagtggactggtgggacatggtgtgtaacgtgaagaagctgatcaacgagaaaaaggaggatggcaaggtgttttggcagaatctggctggctacaagagacaggaagccctgagaccatacctgagcagcgaggaagatcggaagaagggaaagaaattcgctcggtaccagctgggcgacctgctgctgcacctggaaaagaagcacggcgaggactggggaaaggtgtacgacgaggcctgggagcggattgacaagaaagtggaaggcctgagcaagcacatcaagctggaagaggaacggagaagcgaggacgcccagagcaaggccgccctgaccgactggctgcgggctaaggccagcttcgtgatcgagggcctgaaggaggccgacaaggacgagttctgcagatgcgagctgaagctgcagaagtggtacggggacctgcggggaaagcccttcgccatcgaagccgagaacagcatcctggacatcagcggcttcagcaagcagtacaactgtgccttcatctggcagaaggacggcgtgaagaagctgaacctgtacctgatcatcaactacttcaagggcggcaagctgcggttcaagaagatcaaacctgaagccttcgaagccaacagattctacaccgtgatcaacaaaaagagcggcgagatcgtgcccatggaggtgaacttcaacttcgacgaccccaacctgatcatcctgcctctggcctttggcaagagacagggcagagaattcatctggaacgacctgctgtccctggaaaccggcagcctgaagctggccaacggaagagtgatcgagaagacactgtacaacagaagaacccggcaggatgagcctgccctgttcgtggccctgaccttcgagcggcgggaggtcctggactcctccaatatcaaaccaatgaacctgatcggcgtggcaagaggcgaaaacatccccgccgtgatcgccctgaccgaccccgagggctgcccactgagccggtttaaggatagcctgggaaacccaacccacatcctgagaatcggcgagagctataaggagaagcagcggaccatccaggccaagaaggaggtggagcagcggagagccggcggctacagccggaagtacgccagcaaagccaagaatctggcagacgatatggtgagaaacaccgctagagatctgctgtactacgccgtgacccaggatgccatgctgatcttcgccaacctgagccggggcttcggccggcagggcaagcggaccttcatggccgagagacagtacacacggatggaggactggctgaccgccaagctggcctacgagggcctgagcaagacctacctgtccaagacactggcccagtacacctccaagacatgcagcaactgtgggtttaccatcaccagcgccgactacgacagggtgctggagaagctgaagaagacagcaacaggctggatgaccacaattaacggcaaggagctgaaggtggagggccagattacctactacaacagatacaagagacagaacgtagtcaaggacctgtccgtcgagctggatagactgagcgaagaatctgtgaacaacgacatctcctcctggacaaagggcagaagcggagaagctctgagcctcctgaagaaaagattctcccatagacccgtgcaggagaagttcgtgtgcctgaactgcggcttcgagacacacgcagccgagcaagccgccctgaacatcgccagatcctggctgttcctgcggagccaggagtacaagaaataccagacaaacaagacaaccggcaacaccgataagagagccttcgtcgagacctggcagtccttttaccggaagaagcttaaggaggtgtggaaacctgccgtgcggtctggcggatctggcggaggctccacaagccaggacctggtgaccttcaaggacgtgagcgtggacttcaccagggaggagtggatgaggctggaccacccccagagggccctgtacagggacgtgatgctggagaactacaggaacctggtgctggtgagcctgggccaccccatcagcaagcccgacgtgatcagcaggctggagcagggcggcgtgccctgggtgctgaagaagggcgccaccggcagggccttcagcgacagggagaccaccagccccaagaaaaagagaaaagtctaagctgccttctgcggggcttgccttctggccatgcccttcttctctcccttgcacctgtacctcttggtctttgaataaagcctgagtaggaaggctagcaaaaaaaaaaaaaaaaaaaaaaaaaaaaaaaaaaaaaaaaaaaaaaaaaaaaaaaaaaaaaaaaaaaaaaaaaaaaaaaa

SEQ ID NO: 3985 - RNA, 5419 nt, synthetic construct
  source 1..5419: mol_type = other RNA
aggaaataagagagaaaagaagagtaagaagaaatataagagccaccatggcccctaagaagaagcgtaaagtgagccgggtgaacggcagcggcagcggcggcggcatgaaccacgaccaggagttcgacccccctaaggtgtaccctcccgtccccgccgagaagagaaagcccatccgggtcctgagcctgttcgatggcatcgccaccggtctgctggtgctgaaggacctgggcatccaggtggataggtacattgcctccgaggtgtgcgaggactccatcaccgtgggaatggtgcgtcatcagggcaagatcatgtacgtgggcgacgtgcggagcgtgacacagaagcatatccaggagtggggccctttcgacctggtgatcggcggcagcccttgcaatgacctgagcatcgtgaacccagcccggaagggcctgtacgagggaaccggcagactgttcttcgagttttacagactgctgcacgacgcccggcctaaggaaggcgacgaccggcccttcttttggctgttcgagaatgtggtggccatgggagtcagcgacaagcgggatattagccggttcctggagagcaaccccgtgatgatcgatgccaaggaagtgagcgccgcccaccgggccagatacttctggggcaatctgcctggcatgaacagacccctggccagcaccgtgaacgacaagctggagctgcaggagtgcctggagcacggccggatcgccaagttcagcaaggtgagaaccatcaccacccgaagcaacagcatcaaacaaggcaaggaccagcactttcctgtgttcatgaacgagaaggaggacatcctgtggtgtaccgagatggagagagtgttcgggttcccagtccactacacagatgtcagcaacatgtctagactggccagacagagactgctgggaagaagctggtccgtccctgtgatcagacacctgttcgcccctctgaaggagtacttcgcctgcgtgagcagcggcaacagcaacgccaacagccggggccccagcttctctagcggcctggtgccactgtccctgagagggagccacatgggccccatggagatctacaaaaccgtgagcgcctggaagcggcagcctgtgcgcgtgctgagcctgtttcggaatatcgataaagtcctgaaaagcctgggattcctggagagcggctctggctccggcggtggcaccctgaagtacgtggaggatgtgacaaacgtggtcagacgggatgtggagaagtggggccccttcgatctggtgtacggcagcacccaacccctgggcagctcttgtgaccggtgccctggctggtacatgtttcagttccaccggatcctgcagtacgccctgccgagacaggagtcccagcggccattcttttggattttcatggacaacttgctgctgaccgaggatgaccaggaaactaccactcggttcctgcagaccgaagccgtgaccctgcaggacgtgagaggccgggactaccagaacgccatgcgggtgtggtccaacatccctggactgaaaagcaagcacgcacctctgacccctaaagaagaggagtacctgcaggcccaggtgcggagcagaagcaagctggacgcccctaaggtggatctgctggtgaagaattgcctcctgcccctgagagagtacttcaagtatttcagccagaatagtctgcccctgggcggcccaagcagcggcgcccctcctcccagcggcggcagcccagccggctccccaacctctaccgaggagggcacctctgagtccgccacccccgagagcggccctggcacctccaccgagcccagcgagggcagcgcacccggcagccctgccggcagccccacctccacagaggagggaaccagcaccgagcccagcgaaggcagcgccccaggcaccagcaccgagcctagtgagggcggctctggcggcggcagcgcccaggagattaaacggatcaacaagatcagaagaagacttgtgaaagacagcaacaccaagaaggccggcaagacaggccccatgaaaaccctgctggttagagtgatgacacccgatctgagagagcggctggaaaacctgagaaagaagcctgaaaatatcccccagcccatcagcaatacatctagagccaacctgaataagctgctgaccgattacaccgaaatgaagaaggcgatcctgcatgtgtactgggaagagttccagaaggaccctgtgggcctgatgagccgggtggcccagcctgccagcaagaagatcgatcagaacaagctgaaacctgagatggacgagaagggcaacctgaccaccgccggctttgcctgctctcagtgtggccagcccctgttcgtgtacaagctggagcaggtgtctgagaagggcaaggcttacaccaactacttcggacggtgcaatgtggccgagcacgaaaagctgatcctgctggcccagctgaagcccgagaaggatagcgacgaagccgtgacatatagcctgggaaagtttgggcagagggccctggatttctacagcattcatgtgaccaaggagtccacccaccccgtgaagcccctggcccagatcgccggaaacagatacgcctccggacctgtgggaaaggccctgagcgacgcatgtatgggcacaatcgcctccttcctgtctaagtaccaggacatcatcatcgaacaccagaaggtggtgaagggcaaccagaagagactggagagcctgcgggagctggccggcaaggaaaacctggaataccctagcgtgaccctgccacctcagcctcacaccaaggagggcgttgatgcctacaacgaagtgatcgcccgggtgcgaatgtgggtgaacctgaacctgtggcagaagctgaagctaagcagagatgatgccaagcctctgctgagactgaagggattcccttcctttcctctggtcgagagacaggccaacgaagtggactggtgggacatggtgtgtaacgtgaagaagctgatcaacgagaaaaaggaggatggcaaggtgttttggcagaatctggctggctacaagagacaggaagccctgagaccatacctgagcagcgaggaagatcggaagaagggaaagaaattcgctcggtaccagctgggcgacctgctgctgcacctggaaaagaagcacggcgaggactggggaaaggtgtacgacgaggcctgggagcggattgacaagaaagtggaaggcctgagcaagcacatcaagctggaagaggaacggagaagcgaggacgcccagagcaaggccgccctgaccgactggctgcgggctaaggccagcttcgtgatcgagggcctgaaggaggccgacaaggacgagttctgcagatgcgagctgaagctgcagaagtggtacggggacctgcggggaaagcccttcgccatcgaagccgagaacagcatcctggacatcagcggcttcagcaagcagtacaactgtgccttcatctggcagaaggacggcgtgaagaagctgaacctgtacctgatcatcaactacttcaagggcggcaagctgcggttcaagaagatcaaacctgaagccttcgaagccaacagattctacaccgtgatcaacaaaaagagcggcgagatcgtgcccatggaggtgaacttcaacttcgacgaccccaacctgatcatcctgcctctggcctttggcaagagacagggcagagaattcatctggaacgacctgctgtccctggaaaccggcagcctgaagctggccaacggaagagtgatcgagaagacactgtacaacagaagaacccggcaggatgagcctgccctgttcgtggccctgaccttcgagcggcgggaggtcctggactcctccaatatcaaaccaatgaacctgatcggcgtggcaagaggcgaaaacatccccgccgtgatcgccctgaccgaccccgagggctgcccactgagccggtttaaggatagcctgggaaacccaacccacatcctgagaatcggcgagagctataaggagaagcagcggaccatccaggccaagaaggaggtggagcagcggagagccggcggctacagccggaagtacgccagcaaagccaagaatctggcagacgatatggtgagaaacaccgctagagatctgctgtactacgccgtgacccaggatgccatgctgatcttcgccaacctgagccggggcttcggccggcagggcaagcggaccttcatggccgagagacagtacacacggatggaggactggctgaccgccaagctggcctacgagggcctgagcaagacctacctgtccaagacactggcccagtacacctccaagacatgcagcaactgtgggtttaccatcaccagcgccgactacgacagggtgctggagaagctgaagaagacagcaacaggctggatgaccacaattaacggcaaggagctgaaggtggagggccagattacctactacaacagatacaagagacagaacgtagtcaaggacctgtccgtcgagctggatagactgagcgaagaatctgtgaacaacgacatctcctcctggacaaagggcagaagcggagaagctctgagcctcctgaagaaaagattctcccatagacccgtgcaggagaagttcgtgtgcctgaactgcggcttcgagacacacgcagccgagcaagccgccctgaacatcgccagatcctggctgttcctgcggagccaggagtacaagaaataccagacaaacaagacaaccggcaacaccgataagagagccttcgtcgagacctggcagtccttttaccggaagaagcttaaggaggtgtggaaacctgccgtgcggtctggcggatctggcggaggctccacaagcgaccaggagagcctgaccctggaggacgtggccgtggacttcagcagggaggagtggcagctgctggcccccgcccagaaggacctgtacagggacgtgatgctggagaactacaggaacctggtgagcctgggctaccaggccagcacccccgacgccctgtgcatgctggagaggggcgagggcccctgggccaccggcgaggccgtgaggggcggcgccaggcccgagaccaggaaggtgaccagccccaagaaaaagagaaaagtctaagctgccttctgcggggcttgccttctggccatgcccttcttctctcccttgcacctgtacctcttggtctttgaataaagcctgagtaggaaggctagcaaaaaaaaaaaaaaaaaaaaaaaaaaaaaaaaaaaaaaaaaaaaaaaaaaaaaaaaaaaaaaaaaaaaaaaaaaaaaaaa

SEQ ID NO: 3986 - RNA, 5419 nt, synthetic construct
  source 1..5419: mol_type = other RNA
aggaaataagagagaaaagaagagtaagaagaaatataagagccaccatggcccctaagaagaagcgtaaagtgagccgggtgaacggcagcggcagcggcggcggcatgaaccacgaccaggagttcgacccccctaaggtgtaccctcccgtccccgccgagaagagaaagcccatccgggtcctgagcctgttcgatggcatcgccaccggtctgctggtgctgaaggacctgggcatccaggtggataggtacattgcctccgaggtgtgcgaggactccatcaccgtgggaatggtgcgtcatcagggcaagatcatgtacgtgggcgacgtgcggagcgtgacacagaagcatatccaggagtggggccctttcgacctggtgatcggcggcagcccttgcaatgacctgagcatcgtgaacccagcccggaagggcctgtacgagggaaccggcagactgttcttcgagttttacagactgctgcacgacgcccggcctaaggaaggcgacgaccggcccttcttttggctgttcgagaatgtggtggccatgggagtcagcgacaagcgggatattagccggttcctggagagcaaccccgtgatgatcgatgccaaggaagtgagcgccgcccaccgggccagatacttctggggcaatctgcctggcatgaacagacccctggccagcaccgtgaacgacaagctggagctgcaggagtgcctggagcacggccggatcgccaagttcagcaaggtgagaaccatcaccacccgaagcaacagcatcaaacaaggcaaggaccagcactttcctgtgttcatgaacgagaaggaggacatcctgtggtgtaccgagatggagagagtgttcgggttcccagtccactacacagatgtcagcaacatgtctagactggccagacagagactgctgggaagaagctggtccgtccctgtgatcagacacctgttcgcccctctgaaggagtacttcgcctgcgtgagcagcggcaacagcaacgccaacagccggggccccagcttctctagcggcctggtgccactgtccctgagagggagccacatgggccccatggagatctacaaaaccgtgagcgcctggaagcggcagcctgtgcgcgtgctgagcctgtttcggaatatcgataaagtcctgaaaagcctgggattcctggagagcggctctggctccggcggtggcaccctgaagtacgtggaggatgtgacaaacgtggtcagacgggatgtggagaagtggggccccttcgatctggtgtacggcagcacccaacccctgggcagctcttgtgaccggtgccctggctggtacatgtttcagttccaccggatcctgcagtacgccctgccgagacaggagtcccagcggccattcttttggattttcatggacaacttgctgctgaccgaggatgaccaggaaactaccactcggttcctgcagaccgaagccgtgaccctgcaggacgtgagaggccgggactaccagaacgccatgcgggtgtggtccaacatccctggactgaaaagcaagcacgcacctctgacccctaaagaagaggagtacctgcaggcccaggtgcggagcagaagcaagctggacgcccctaaggtggatctgctggtgaagaattgcctcctgcccctgagagagtacttcaagtatttcagccagaatagtctgcccctgggcggcccaagcagcggcgcccctcctcccagcggcggcagcccagccggctccccaacctctaccgaggagggcacctctgagtccgccacccccgagagcggccctggcacctccaccgagcccagcgagggcagcgcacccggcagccctgccggcagccccacctccacagaggagggaaccagcaccgagcccagcgaaggcagcgccccaggcaccagcaccgagcctagtgagggcggctctggcggcggcagcgcccaggagattaaacggatcaacaagatcagaagaagacttgtgaaagacagcaacaccaagaaggccggcaagacaggccccatgaaaaccctgctggttagagtgatgacacccgatctgagagagcggctggaaaacctgagaaagaagcctgaaaatatcccccagcccatcagcaatacatctagagccaacctgaataagctgctgaccgattacaccgaaatgaagaaggcgatcctgcatgtgtactgggaagagttccagaaggaccctgtgggcctgatgagccgggtggcccagcctgccagcaagaagatcgatcagaacaagctgaaacctgagatggacgagaagggcaacctgaccaccgccggctttgcctgctctcagtgtggccagcccctgttcgtgtacaagctggagcaggtgtctgagaagggcaaggcttacaccaactacttcggacggtgcaatgtggccgagcacgaaaagctgatcctgctggcccagctgaagcccgagaaggatagcgacgaagccgtgacatatagcctgggaaagtttgggcagagggccctggatttctacagcattcatgtgaccaaggagtccacccaccccgtgaagcccctggcccagatcgccggaaacagatacgcctccggacctgtgggaaaggccctgagcgacgcatgtatgggcacaatcgcctccttcctgtctaagtaccaggacatcatcatcgaacaccagaaggtggtgaagggcaaccagaagagactggagagcctgcgggagctggccggcaaggaaaacctggaataccctagcgtgaccctgccacctcagcctcacaccaaggagggcgttgatgcctacaacgaagtgatcgcccgggtgcgaatgtgggtgaacctgaacctgtggcagaagctgaagctaagcagagatgatgccaagcctctgctgagactgaagggattcccttcctttcctctggtcgagagacaggccaacgaagtggactggtgggacatggtgtgtaacgtgaagaagctgatcaacgagaaaaaggaggatggcaaggtgttttggcagaatctggctggctacaagagacaggaagccctgagaccatacctgagcagcgaggaagatcggaagaagggaaagaaattcgctcggtaccagctgggcgacctgctgctgcacctggaaaagaagcacggcgaggactggggaaaggtgtacgacgaggcctgggagcggattgacaagaaagtggaaggcctgagcaagcacatcaagctggaagaggaacggagaagcgaggacgcccagagcaaggccgccctgaccgactggctgcgggctaaggccagcttcgtgatcgagggcctgaaggaggccgacaaggacgagttctgcagatgcgagctgaagctgcagaagtggtacggggacctgcggggaaagcccttcgccatcgaagccgagaacagcatcctggacatcagcggcttcagcaagcagtacaactgtgccttcatctggcagaaggacggcgtgaagaagctgaacctgtacctgatcatcaactacttcaagggcggcaagctgcggttcaagaagatcaaacctgaagccttcgaagccaacagattctacaccgtgatcaacaaaaagagcggcgagatcgtgcccatggaggtgaacttcaacttcgacgaccccaacctgatcatcctgcctctggcctttggcaagagacagggcagagaattcatctggaacgacctgctgtccctggaaaccggcagcctgaagctggccaacggaagagtgatcgagaagacactgtacaacagaagaacccggcaggatgagcctgccctgttcgtggccctgaccttcgagcggcgggaggtcctggactcctccaatatcaaaccaatgaacctgatcggcgtggcaagaggcgaaaacatccccgccgtgatcgccctgaccgaccccgagggctgcccactgagccggtttaaggatagcctgggaaacccaacccacatcctgagaatcggcgagagctataaggagaagcagcggaccatccaggccaagaaggaggtggagcagcggagagccggcggctacagccggaagtacgccagcaaagccaagaatctggcagacgatatggtgagaaacaccgctagagatctgctgtactacgccgtgacccaggatgccatgctgatcttcgccaacctgagccggggcttcggccggcagggcaagcggaccttcatggccgagagacagtacacacggatggaggactggctgaccgccaagctggcctacgagggcctgagcaagacctacctgtccaagacactggcccagtacacctccaagacatgcagcaactgtgggtttaccatcaccagcgccgactacgacagggtgctggagaagctgaagaagacagcaacaggctggatgaccacaattaacggcaaggagctgaaggtggagggccagattacctactacaacagatacaagagacagaacgtagtcaaggacctgtccgtcgagctggatagactgagcgaagaatctgtgaacaacgacatctcctcctggacaaagggcagaagcggagaagctctgagcctcctgaagaaaagattctcccatagacccgtgcaggagaagttcgtgtgcctgaactgcggcttcgagacacacgcagccgagcaagccgccctgaacatcgccagatcctggctgttcctgcggagccaggagtacaagaaataccagacaaacaagacaaccggcaacaccgataagagagccttcgtcgagacctggcagtccttttaccggaagaagcttaaggaggtgtggaaacctgccgtgcggtctggcggatctggcggaggctccacaagccccaggggcctggtgaccttcaaggacgtggccgtggacttcacccaggaggagtggggcctgctggaccacaaccagaaggagctgtacaaggaggtgatgctggagaacgccaggaacctgctgagcctgggcctgcccgtgcccagggaggacgtgatcagctacttcgagcagagggaggccccctggatgctggagcaggagggcctgaggagcaggtgcctggagggcgagatcaggaccagccccaagaaaaagagaaaagtctaagctgccttctgcggggcttgccttctggccatgcccttcttctctcccttgcacctgtacctcttggtctttgaataaagcctgagtaggaaggctagcaaaaaaaaaaaaaaaaaaaaaaaaaaaaaaaaaaaaaaaaaaaaaaaaaaaaaaaaaaaaaaaaaaaaaaaaaaaaaaaa

SEQ ID NO: 3987 - RNA, 5419 nt, synthetic construct
  source 1..5419: mol_type = other RNA
aggaaataagagagaaaagaagagtaagaagaaatataagagccaccatggcccctaagaagaagcgtaaagtgagccgggtgaacggcagcggcagcggcggcggcatgaaccacgaccaggagttcgacccccctaaggtgtaccctcccgtccccgccgagaagagaaagcccatccgggtcctgagcctgttcgatggcatcgccaccggtctgctggtgctgaaggacctgggcatccaggtggataggtacattgcctccgaggtgtgcgaggactccatcaccgtgggaatggtgcgtcatcagggcaagatcatgtacgtgggcgacgtgcggagcgtgacacagaagcatatccaggagtggggccctttcgacctggtgatcggcggcagcccttgcaatgacctgagcatcgtgaacccagcccggaagggcctgtacgagggaaccggcagactgttcttcgagttttacagactgctgcacgacgcccggcctaaggaaggcgacgaccggcccttcttttggctgttcgagaatgtggtggccatgggagtcagcgacaagcgggatattagccggttcctggagagcaaccccgtgatgatcgatgccaaggaagtgagcgccgcccaccgggccagatacttctggggcaatctgcctggcatgaacagacccctggccagcaccgtgaacgacaagctggagctgcaggagtgcctggagcacggccggatcgccaagttcagcaaggtgagaaccatcaccacccgaagcaacagcatcaaacaaggcaaggaccagcactttcctgtgttcatgaacgagaaggaggacatcctgtggtgtaccgagatggagagagtgttcgggttcccagtccactacacagatgtcagcaacatgtctagactggccagacagagactgctgggaagaagctggtccgtccctgtgatcagacacctgttcgcccctctgaaggagtacttcgcctgcgtgagcagcggcaacagcaacgccaacagccggggccccagcttctctagcggcctggtgccactgtccctgagagggagccacatgggccccatggagatctacaaaaccgtgagcgcctggaagcggcagcctgtgcgcgtgctgagcctgtttcggaatatcgataaagtcctgaaaagcctgggattcctggagagcggctctggctccggcggtggcaccctgaagtacgtggaggatgtgacaaacgtggtcagacgggatgtggagaagtggggccccttcgatctggtgtacggcagcacccaacccctgggcagctcttgtgaccggtgccctggctggtacatgtttcagttccaccggatcctgcagtacgccctgccgagacaggagtcccagcggccattcttttggattttcatggacaacttgctgctgaccgaggatgaccaggaaactaccactcggttcctgcagaccgaagccgtgaccctgcaggacgtgagaggccgggactaccagaacgccatgcgggtgtggtccaacatccctggactgaaaagcaagcacgcacctctgacccctaaagaagaggagtacctgcaggcccaggtgcggagcagaagcaagctggacgcccctaaggtggatctgctggtgaagaattgcctcctgcccctgagagagtacttcaagtatttcagccagaatagtctgcccctgggcggcccaagcagcggcgcccctcctcccagcggcggcagcccagccggctccccaacctctaccgaggagggcacctctgagtccgccacccccgagagcggccctggcacctccaccgagcccagcgagggcagcgcacccggcagccctgccggcagccccacctccacagaggagggaaccagcaccgagcccagcgaaggcagcgccccaggcaccagcaccgagcctagtgagggcggctctggcggcggcagcgcccaggagattaaacggatcaacaagatcagaagaagacttgtgaaagacagcaacaccaagaaggccggcaagacaggccccatgaaaaccctgctggttagagtgatgacacccgatctgagagagcggctggaaaacctgagaaagaagcctgaaaatatcccccagcccatcagcaatacatctagagccaacctgaataagctgctgaccgattacaccgaaatgaagaaggcgatcctgcatgtgtactgggaagagttccagaaggaccctgtgggcctgatgagccgggtggcccagcctgccagcaagaagatcgatcagaacaagctgaaacctgagatggacgagaagggcaacctgaccaccgccggctttgcctgctctcagtgtggccagcccctgttcgtgtacaagctggagcaggtgtctgagaagggcaaggcttacaccaactacttcggacggtgcaatgtggccgagcacgaaaagctgatcctgctggcccagctgaagcccgagaaggatagcgacgaagccgtgacatatagcctgggaaagtttgggcagagggccctggatttctacagcattcatgtgaccaaggagtccacccaccccgtgaagcccctggcccagatcgccggaaacagatacgcctccggacctgtgggaaaggccctgagcgacgcatgtatgggcacaatcgcctccttcctgtctaagtaccaggacatcatcatcgaacaccagaaggtggtgaagggcaaccagaagagactggagagcctgcgggagctggccggcaaggaaaacctggaataccctagcgtgaccctgccacctcagcctcacaccaaggagggcgttgatgcctacaacgaagtgatcgcccgggtgcgaatgtgggtgaacctgaacctgtggcagaagctgaagctaagcagagatgatgccaagcctctgctgagactgaagggattcccttcctttcctctggtcgagagacaggccaacgaagtggactggtgggacatggtgtgtaacgtgaagaagctgatcaacgagaaaaaggaggatggcaaggtgttttggcagaatctggctggctacaagagacaggaagccctgagaccatacctgagcagcgaggaagatcggaagaagggaaagaaattcgctcggtaccagctgggcgacctgctgctgcacctggaaaagaagcacggcgaggactggggaaaggtgtacgacgaggcctgggagcggattgacaagaaagtggaaggcctgagcaagcacatcaagctggaagaggaacggagaagcgaggacgcccagagcaaggccgccctgaccgactggctgcgggctaaggccagcttcgtgatcgagggcctgaaggaggccgacaaggacgagttctgcagatgcgagctgaagctgcagaagtggtacggggacctgcggggaaagcccttcgccatcgaagccgagaacagcatcctggacatcagcggcttcagcaagcagtacaactgtgccttcatctggcagaaggacggcgtgaagaagctgaacctgtacctgatcatcaactacttcaagggcggcaagctgcggttcaagaagatcaaacctgaagccttcgaagccaacagattctacaccgtgatcaacaaaaagagcggcgagatcgtgcccatggaggtgaacttcaacttcgacgaccccaacctgatcatcctgcctctggcctttggcaagagacagggcagagaattcatctggaacgacctgctgtccctggaaaccggcagcctgaagctggccaacggaagagtgatcgagaagacactgtacaacagaagaacccggcaggatgagcctgccctgttcgtggccctgaccttcgagcggcgggaggtcctggactcctccaatatcaaaccaatgaacctgatcggcgtggcaagaggcgaaaacatccccgccgtgatcgccctgaccgaccccgagggctgcccactgagccggtttaaggatagcctgggaaacccaacccacatcctgagaatcggcgagagctataaggagaagcagcggaccatccaggccaagaaggaggtggagcagcggagagccggcggctacagccggaagtacgccagcaaagccaagaatctggcagacgatatggtgagaaacaccgctagagatctgctgtactacgccgtgacccaggatgccatgctgatcttcgccaacctgagccggggcttcggccggcagggcaagcggaccttcatggccgagagacagtacacacggatggaggactggctgaccgccaagctggcctacgagggcctgagcaagacctacctgtccaagacactggcccagtacacctccaagacatgcagcaactgtgggtttaccatcaccagcgccgactacgacagggtgctggagaagctgaagaagacagcaacaggctggatgaccacaattaacggcaaggagctgaaggtggagggccagattacctactacaacagatacaagagacagaacgtagtcaaggacctgtccgtcgagctggatagactgagcgaagaatctgtgaacaacgacatctcctcctggacaaagggcagaagcggagaagctctgagcctcctgaagaaaagattctcccatagacccgtgcaggagaagttcgtgtgcctgaactgcggcttcgagacacacgcagccgagcaagccgccctgaacatcgccagatcctggctgttcctgcggagccaggagtacaagaaataccagacaaacaagacaaccggcaacaccgataagagagccttcgtcgagacctggcagtccttttaccggaagaagcttaaggaggtgtggaaacctgccgtgcggtctggcggatctggcggaggctccacaagcatggacgccgtgaccttcatggacgtgcacgtgaacttcagccaggaggagtgggccctgctgaaccccagccagaagagcctgtacaaggacgtgatgctggagacctactggaacctgacctgcatcggctacgagtgggaggaccacaacagcgaggagtgctgccagagcagcaggaggcacggcaggtacttcaacagcagccagtacagcacctgcaaggccaagggctacggcaagaccagccccaagaaaaagagaaaagtctaagctgccttctgcggggcttgccttctggccatgcccttcttctctcccttgcacctgtacctcttggtctttgaataaagcctgagtaggaaggctagcaaaaaaaaaaaaaaaaaaaaaaaaaaaaaaaaaaaaaaaaaaaaaaaaaaaaaaaaaaaaaaaaaaaaaaaaaaaaaaaa

SEQ ID NO: 3988 - RNA, 5419 nt, synthetic construct
  source 1..5419: mol_type = other RNA
aggaaataagagagaaaagaagagtaagaagaaatataagagccaccatggcccctaagaagaagcgtaaagtgagccgggtgaacggcagcggcagcggcggcggcatgaaccacgaccaggagttcgacccccctaaggtgtaccctcccgtccccgccgagaagagaaagcccatccgggtcctgagcctgttcgatggcatcgccaccggtctgctggtgctgaaggacctgggcatccaggtggataggtacattgcctccgaggtgtgcgaggactccatcaccgtgggaatggtgcgtcatcagggcaagatcatgtacgtgggcgacgtgcggagcgtgacacagaagcatatccaggagtggggccctttcgacctggtgatcggcggcagcccttgcaatgacctgagcatcgtgaacccagcccggaagggcctgtacgagggaaccggcagactgttcttcgagttttacagactgctgcacgacgcccggcctaaggaaggcgacgaccggcccttcttttggctgttcgagaatgtggtggccatgggagtcagcgacaagcgggatattagccggttcctggagagcaaccccgtgatgatcgatgccaaggaagtgagcgccgcccaccgggccagatacttctggggcaatctgcctggcatgaacagacccctggccagcaccgtgaacgacaagctggagctgcaggagtgcctggagcacggccggatcgccaagttcagcaaggtgagaaccatcaccacccgaagcaacagcatcaaacaaggcaaggaccagcactttcctgtgttcatgaacgagaaggaggacatcctgtggtgtaccgagatggagagagtgttcgggttcccagtccactacacagatgtcagcaacatgtctagactggccagacagagactgctgggaagaagctggtccgtccctgtgatcagacacctgttcgcccctctgaaggagtacttcgcctgcgtgagcagcggcaacagcaacgccaacagccggggccccagcttctctagcggcctggtgccactgtccctgagagggagccacatgggccccatggagatctacaaaaccgtgagcgcctggaagcggcagcctgtgcgcgtgctgagcctgtttcggaatatcgataaagtcctgaaaagcctgggattcctggagagcggctctggctccggcggtggcaccctgaagtacgtggaggatgtgacaaacgtggtcagacgggatgtggagaagtggggccccttcgatctggtgtacggcagcacccaacccctgggcagctcttgtgaccggtgccctggctggtacatgtttcagttccaccggatcctgcagtacgccctgccgagacaggagtcccagcggccattcttttggattttcatggacaacttgctgctgaccgaggatgaccaggaaactaccactcggttcctgcagaccgaagccgtgaccctgcaggacgtgagaggccgggactaccagaacgccatgcgggtgtggtccaacatccctggactgaaaagcaagcacgcacctctgacccctaaagaagaggagtacctgcaggcccaggtgcggagcagaagcaagctggacgcccctaaggtggatctgctggtgaagaattgcctcctgcccctgagagagtacttcaagtatttcagccagaatagtctgcccctgggcggcccaagcagcggcgcccctcctcccagcggcggcagcccagccggctccccaacctctaccgaggagggcacctctgagtccgccacccccgagagcggccctggcacctccaccgagcccagcgagggcagcgcacccggcagccctgccggcagccccacctccacagaggagggaaccagcaccgagcccagcgaaggcagcgccccaggcaccagcaccgagcctagtgagggcggctctggcggcggcagcgcccaggagattaaacggatcaacaagatcagaagaagacttgtgaaagacagcaacaccaagaaggccggcaagacaggccccatgaaaaccctgctggttagagtgatgacacccgatctgagagagcggctggaaaacctgagaaagaagcctgaaaatatcccccagcccatcagcaatacatctagagccaacctgaataagctgctgaccgattacaccgaaatgaagaaggcgatcctgcatgtgtactgggaagagttccagaaggaccctgtgggcctgatgagccgggtggcccagcctgccagcaagaagatcgatcagaacaagctgaaacctgagatggacgagaagggcaacctgaccaccgccggctttgcctgctctcagtgtggccagcccctgttcgtgtacaagctggagcaggtgtctgagaagggcaaggcttacaccaactacttcggacggtgcaatgtggccgagcacgaaaagctgatcctgctggcccagctgaagcccgagaaggatagcgacgaagccgtgacatatagcctgggaaagtttgggcagagggccctggatttctacagcattcatgtgaccaaggagtccacccaccccgtgaagcccctggcccagatcgccggaaacagatacgcctccggacctgtgggaaaggccctgagcgacgcatgtatgggcacaatcgcctccttcctgtctaagtaccaggacatcatcatcgaacaccagaaggtggtgaagggcaaccagaagagactggagagcctgcgggagctggccggcaaggaaaacctggaataccctagcgtgaccctgccacctcagcctcacaccaaggagggcgttgatgcctacaacgaagtgatcgcccgggtgcgaatgtgggtgaacctgaacctgtggcagaagctgaagctaagcagagatgatgccaagcctctgctgagactgaagggattcccttcctttcctctggtcgagagacaggccaacgaagtggactggtgggacatggtgtgtaacgtgaagaagctgatcaacgagaaaaaggaggatggcaaggtgttttggcagaatctggctggctacaagagacaggaagccctgagaccatacctgagcagcgaggaagatcggaagaagggaaagaaattcgctcggtaccagctgggcgacctgctgctgcacctggaaaagaagcacggcgaggactggggaaaggtgtacgacgaggcctgggagcggattgacaagaaagtggaaggcctgagcaagcacatcaagctggaagaggaacggagaagcgaggacgcccagagcaaggccgccctgaccgactggctgcgggctaaggccagcttcgtgatcgagggcctgaaggaggccgacaaggacgagttctgcagatgcgagctgaagctgcagaagtggtacggggacctgcggggaaagcccttcgccatcgaagccgagaacagcatcctggacatcagcggcttcagcaagcagtacaactgtgccttcatctggcagaaggacggcgtgaagaagctgaacctgtacctgatcatcaactacttcaagggcggcaagctgcggttcaagaagatcaaacctgaagccttcgaagccaacagattctacaccgtgatcaacaaaaagagcggcgagatcgtgcccatggaggtgaacttcaacttcgacgaccccaacctgatcatcctgcctctggcctttggcaagagacagggcagagaattcatctggaacgacctgctgtccctggaaaccggcagcctgaagctggccaacggaagagtgatcgagaagacactgtacaacagaagaacccggcaggatgagcctgccctgttcgtggccctgaccttcgagcggcgggaggtcctggactcctccaatatcaaaccaatgaacctgatcggcgtggcaagaggcgaaaacatccccgccgtgatcgccctgaccgaccccgagggctgcccactgagccggtttaaggatagcctgggaaacccaacccacatcctgagaatcggcgagagctataaggagaagcagcggaccatccaggccaagaaggaggtggagcagcggagagccggcggctacagccggaagtacgccagcaaagccaagaatctggcagacgatatggtgagaaacaccgctagagatctgctgtactacgccgtgacccaggatgccatgctgatcttcgccaacctgagccggggcttcggccggcagggcaagcggaccttcatggccgagagacagtacacacggatggaggactggctgaccgccaagctggcctacgagggcctgagcaagacctacctgtccaagacactggcccagtacacctccaagacatgcagcaactgtgggtttaccatcaccagcgccgactacgacagggtgctggagaagctgaagaagacagcaacaggctggatgaccacaattaacggcaaggagctgaaggtggagggccagattacctactacaacagatacaagagacagaacgtagtcaaggacctgtccgtcgagctggatagactgagcgaagaatctgtgaacaacgacatctcctcctggacaaagggcagaagcggagaagctctgagcctcctgaagaaaagattctcccatagacccgtgcaggagaagttcgtgtgcctgaactgcggcttcgagacacacgcagccgagcaagccgccctgaacatcgccagatcctggctgttcctgcggagccaggagtacaagaaataccagacaaacaagacaaccggcaacaccgataagagagccttcgtcgagacctggcagtccttttaccggaagaagcttaaggaggtgtggaaacctgccgtgcggtctggcggatctggcggaggctccacaagcttccaggagagcgtgaccttcaaggacgtggccgtggacttcacccaggaggagtgggcccagctggaccccccccagaggaacctgtacagggacgtgatgctggagaactacgagcacttcgtgttcctgggcctgcccgtggccaagcccgaggtgatcagccagctggagaggggcgaggtgcccctgttccccgagcagcccgagttcagcaccagcatctgccccgacagcctgaacaccagccccaagaaaaagagaaaagtctaagctgccttctgcggggcttgccttctggccatgcccttcttctctcccttgcacctgtacctcttggtctttgaataaagcctgagtaggaaggctagcaaaaaaaaaaaaaaaaaaaaaaaaaaaaaaaaaaaaaaaaaaaaaaaaaaaaaaaaaaaaaaaaaaaaaaaaaaaaaaaa

SEQ ID NO: 3989 - RNA, 5419 nt, synthetic construct
  source 1..5419: mol_type = other RNA
aggaaataagagagaaaagaagagtaagaagaaatataagagccaccatggcccctaagaagaagcgtaaagtgagccgggtgaacggcagcggcagcggcggcggcatgaaccacgaccaggagttcgacccccctaaggtgtaccctcccgtccccgccgagaagagaaagcccatccgggtcctgagcctgttcgatggcatcgccaccggtctgctggtgctgaaggacctgggcatccaggtggataggtacattgcctccgaggtgtgcgaggactccatcaccgtgggaatggtgcgtcatcagggcaagatcatgtacgtgggcgacgtgcggagcgtgacacagaagcatatccaggagtggggccctttcgacctggtgatcggcggcagcccttgcaatgacctgagcatcgtgaacccagcccggaagggcctgtacgagggaaccggcagactgttcttcgagttttacagactgctgcacgacgcccggcctaaggaaggcgacgaccggcccttcttttggctgttcgagaatgtggtggccatgggagtcagcgacaagcgggatattagccggttcctggagagcaaccccgtgatgatcgatgccaaggaagtgagcgccgcccaccgggccagatacttctggggcaatctgcctggcatgaacagacccctggccagcaccgtgaacgacaagctggagctgcaggagtgcctggagcacggccggatcgccaagttcagcaaggtgagaaccatcaccacccgaagcaacagcatcaaacaaggcaaggaccagcactttcctgtgttcatgaacgagaaggaggacatcctgtggtgtaccgagatggagagagtgttcgggttcccagtccactacacagatgtcagcaacatgtctagactggccagacagagactgctgggaagaagctggtccgtccctgtgatcagacacctgttcgcccctctgaaggagtacttcgcctgcgtgagcagcggcaacagcaacgccaacagccggggccccagcttctctagcggcctggtgccactgtccctgagagggagccacatgggccccatggagatctacaaaaccgtgagcgcctggaagcggcagcctgtgcgcgtgctgagcctgtttcggaatatcgataaagtcctgaaaagcctgggattcctggagagcggctctggctccggcggtggcaccctgaagtacgtggaggatgtgacaaacgtggtcagacgggatgtggagaagtggggccccttcgatctggtgtacggcagcacccaacccctgggcagctcttgtgaccggtgccctggctggtacatgtttcagttccaccggatcctgcagtacgccctgccgagacaggagtcccagcggccattcttttggattttcatggacaacttgctgctgaccgaggatgaccaggaaactaccactcggttcctgcagaccgaagccgtgaccctgcaggacgtgagaggccgggactaccagaacgccatgcgggtgtggtccaacatccctggactgaaaagcaagcacgcacctctgacccctaaagaagaggagtacctgcaggcccaggtgcggagcagaagcaagctggacgcccctaaggtggatctgctggtgaagaattgcctcctgcccctgagagagtacttcaagtatttcagccagaatagtctgcccctgggcggcccaagcagcggcgcccctcctcccagcggcggcagcccagccggctccccaacctctaccgaggagggcacctctgagtccgccacccccgagagcggccctggcacctccaccgagcccagcgagggcagcgcacccggcagccctgccggcagccccacctccacagaggagggaaccagcaccgagcccagcgaaggcagcgccccaggcaccagcaccgagcctagtgagggcggctctggcggcggcagcgcccaggagattaaacggatcaacaagatcagaagaagacttgtgaaagacagcaacaccaagaaggccggcaagacaggccccatgaaaaccctgctggttagagtgatgacacccgatctgagagagcggctggaaaacctgagaaagaagcctgaaaatatcccccagcccatcagcaatacatctagagccaacctgaataagctgctgaccgattacaccgaaatgaagaaggcgatcctgcatgtgtactgggaagagttccagaaggaccctgtgggcctgatgagccgggtggcccagcctgccagcaagaagatcgatcagaacaagctgaaacctgagatggacgagaagggcaacctgaccaccgccggctttgcctgctctcagtgtggccagcccctgttcgtgtacaagctggagcaggtgtctgagaagggcaaggcttacaccaactacttcggacggtgcaatgtggccgagcacgaaaagctgatcctgctggcccagctgaagcccgagaaggatagcgacgaagccgtgacatatagcctgggaaagtttgggcagagggccctggatttctacagcattcatgtgaccaaggagtccacccaccccgtgaagcccctggcccagatcgccggaaacagatacgcctccggacctgtgggaaaggccctgagcgacgcatgtatgggcacaatcgcctccttcctgtctaagtaccaggacatcatcatcgaacaccagaaggtggtgaagggcaaccagaagagactggagagcctgcgggagctggccggcaaggaaaacctggaataccctagcgtgaccctgccacctcagcctcacaccaaggagggcgttgatgcctacaacgaagtgatcgcccgggtgcgaatgtgggtgaacctgaacctgtggcagaagctgaagctaagcagagatgatgccaagcctctgctgagactgaagggattcccttcctttcctctggtcgagagacaggccaacgaagtggactggtgggacatggtgtgtaacgtgaagaagctgatcaacgagaaaaaggaggatggcaaggtgttttggcagaatctggctggctacaagagacaggaagccctgagaccatacctgagcagcgaggaagatcggaagaagggaaagaaattcgctcggtaccagctgggcgacctgctgctgcacctggaaaagaagcacggcgaggactggggaaaggtgtacgacgaggcctgggagcggattgacaagaaagtggaaggcctgagcaagcacatcaagctggaagaggaacggagaagcgaggacgcccagagcaaggccgccctgaccgactggctgcgggctaaggccagcttcgtgatcgagggcctgaaggaggccgacaaggacgagttctgcagatgcgagctgaagctgcagaagtggtacggggacctgcggggaaagcccttcgccatcgaagccgagaacagcatcctggacatcagcggcttcagcaagcagtacaactgtgccttcatctggcagaaggacggcgtgaagaagctgaacctgtacctgatcatcaactacttcaagggcggcaagctgcggttcaagaagatcaaacctgaagccttcgaagccaacagattctacaccgtgatcaacaaaaagagcggcgagatcgtgcccatggaggtgaacttcaacttcgacgaccccaacctgatcatcctgcctctggcctttggcaagagacagggcagagaattcatctggaacgacctgctgtccctggaaaccggcagcctgaagctggccaacggaagagtgatcgagaagacactgtacaacagaagaacccggcaggatgagcctgccctgttcgtggccctgaccttcgagcggcgggaggtcctggactcctccaatatcaaaccaatgaacctgatcggcgtggcaagaggcgaaaacatccccgccgtgatcgccctgaccgaccccgagggctgcccactgagccggtttaaggatagcctgggaaacccaacccacatcctgagaatcggcgagagctataaggagaagcagcggaccatccaggccaagaaggaggtggagcagcggagagccggcggctacagccggaagtacgccagcaaagccaagaatctggcagacgatatggtgagaaacaccgctagagatctgctgtactacgccgtgacccaggatgccatgctgatcttcgccaacctgagccggggcttcggccggcagggcaagcggaccttcatggccgagagacagtacacacggatggaggactggctgaccgccaagctggcctacgagggcctgagcaagacctacctgtccaagacactggcccagtacacctccaagacatgcagcaactgtgggtttaccatcaccagcgccgactacgacagggtgctggagaagctgaagaagacagcaacaggctggatgaccacaattaacggcaaggagctgaaggtggagggccagattacctactacaacagatacaagagacagaacgtagtcaaggacctgtccgtcgagctggatagactgagcgaagaatctgtgaacaacgacatctcctcctggacaaagggcagaagcggagaagctctgagcctcctgaagaaaagattctcccatagacccgtgcaggagaagttcgtgtgcctgaactgcggcttcgagacacacgcagccgagcaagccgccctgaacatcgccagatcctggctgttcctgcggagccaggagtacaagaaataccagacaaacaagacaaccggcaacaccgataagagagccttcgtcgagacctggcagtccttttaccggaagaagcttaaggaggtgtggaaacctgccgtgcggtctggcggatctggcggaggctccacaagcccccaggccagcgtgaccttcaaggacgtggccgtggacttcacctgggaggagtggaggctgctggaccccagccagaaggagctgttctgggaggtgatgctggagaactacaggaacctggtgtgcctgggcctggccgacagcaacaaggacgtgaggatcagcgagctggagagcggcgagccccactggatccccaccggcggcgtgctgaggagctgctggcccggctgggagagcaccagccccaagaaaaagagaaaagtctaagctgccttctgcggggcttgccttctggccatgcccttcttctctcccttgcacctgtacctcttggtctttgaataaagcctgagtaggaaggctagcaaaaaaaaaaaaaaaaaaaaaaaaaaaaaaaaaaaaaaaaaaaaaaaaaaaaaaaaaaaaaaaaaaaaaaaaaaaaaaaa

SEQ ID NO: 3990 - RNA, 5419 nt, synthetic construct
  source 1..5419: mol_type = other RNA
aggaaataagagagaaaagaagagtaagaagaaatataagagccaccatggcccctaagaagaagcgtaaagtgagccgggtgaacggcagcggcagcggcggcggcatgaaccacgaccaggagttcgacccccctaaggtgtaccctcccgtccccgccgagaagagaaagcccatccgggtcctgagcctgttcgatggcatcgccaccggtctgctggtgctgaaggacctgggcatccaggtggataggtacattgcctccgaggtgtgcgaggactccatcaccgtgggaatggtgcgtcatcagggcaagatcatgtacgtgggcgacgtgcggagcgtgacacagaagcatatccaggagtggggccctttcgacctggtgatcggcggcagcccttgcaatgacctgagcatcgtgaacccagcccggaagggcctgtacgagggaaccggcagactgttcttcgagttttacagactgctgcacgacgcccggcctaaggaaggcgacgaccggcccttcttttggctgttcgagaatgtggtggccatgggagtcagcgacaagcgggatattagccggttcctggagagcaaccccgtgatgatcgatgccaaggaagtgagcgccgcccaccgggccagatacttctggggcaatctgcctggcatgaacagacccctggccagcaccgtgaacgacaagctggagctgcaggagtgcctggagcacggccggatcgccaagttcagcaaggtgagaaccatcaccacccgaagcaacagcatcaaacaaggcaaggaccagcactttcctgtgttcatgaacgagaaggaggacatcctgtggtgtaccgagatggagagagtgttcgggttcccagtccactacacagatgtcagcaacatgtctagactggccagacagagactgctgggaagaagctggtccgtccctgtgatcagacacctgttcgcccctctgaaggagtacttcgcctgcgtgagcagcggcaacagcaacgccaacagccggggccccagcttctctagcggcctggtgccactgtccctgagagggagccacatgggccccatggagatctacaaaaccgtgagcgcctggaagcggcagcctgtgcgcgtgctgagcctgtttcggaatatcgataaagtcctgaaaagcctgggattcctggagagcggctctggctccggcggtggcaccctgaagtacgtggaggatgtgacaaacgtggtcagacgggatgtggagaagtggggccccttcgatctggtgtacggcagcacccaacccctgggcagctcttgtgaccggtgccctggctggtacatgtttcagttccaccggatcctgcagtacgccctgccgagacaggagtcccagcggccattcttttggattttcatggacaacttgctgctgaccgaggatgaccaggaaactaccactcggttcctgcagaccgaagccgtgaccctgcaggacgtgagaggccgggactaccagaacgccatgcgggtgtggtccaacatccctggactgaaaagcaagcacgcacctctgacccctaaagaagaggagtacctgcaggcccaggtgcggagcagaagcaagctggacgcccctaaggtggatctgctggtgaagaattgcctcctgcccctgagagagtacttcaagtatttcagccagaatagtctgcccctgggcggcccaagcagcggcgcccctcctcccagcggcggcagcccagccggctccccaacctctaccgaggagggcacctctgagtccgccacccccgagagcggccctggcacctccaccgagcccagcgagggcagcgcacccggcagccctgccggcagccccacctccacagaggagggaaccagcaccgagcccagcgaaggcagcgccccaggcaccagcaccgagcctagtgagggcggctctggcggcggcagcgcccaggagattaaacggatcaacaagatcagaagaagacttgtgaaagacagcaacaccaagaaggccggcaagacaggccccatgaaaaccctgctggttagagtgatgacacccgatctgagagagcggctggaaaacctgagaaagaagcctgaaaatatcccccagcccatcagcaatacatctagagccaacctgaataagctgctgaccgattacaccgaaatgaagaaggcgatcctgcatgtgtactgggaagagttccagaaggaccctgtgggcctgatgagccgggtggcccagcctgccagcaagaagatcgatcagaacaagctgaaacctgagatggacgagaagggcaacctgaccaccgccggctttgcctgctctcagtgtggccagcccctgttcgtgtacaagctggagcaggtgtctgagaagggcaaggcttacaccaactacttcggacggtgcaatgtggccgagcacgaaaagctgatcctgctggcccagctgaagcccgagaaggatagcgacgaagccgtgacatatagcctgggaaagtttgggcagagggccctggatttctacagcattcatgtgaccaaggagtccacccaccccgtgaagcccctggcccagatcgccggaaacagatacgcctccggacctgtgggaaaggccctgagcgacgcatgtatgggcacaatcgcctccttcctgtctaagtaccaggacatcatcatcgaacaccagaaggtggtgaagggcaaccagaagagactggagagcctgcgggagctggccggcaaggaaaacctggaataccctagcgtgaccctgccacctcagcctcacaccaaggagggcgttgatgcctacaacgaagtgatcgcccgggtgcgaatgtgggtgaacctgaacctgtggcagaagctgaagctaagcagagatgatgccaagcctctgctgagactgaagggattcccttcctttcctctggtcgagagacaggccaacgaagtggactggtgggacatggtgtgtaacgtgaagaagctgatcaacgagaaaaaggaggatggcaaggtgttttggcagaatctggctggctacaagagacaggaagccctgagaccatacctgagcagcgaggaagatcggaagaagggaaagaaattcgctcggtaccagctgggcgacctgctgctgcacctggaaaagaagcacggcgaggactggggaaaggtgtacgacgaggcctgggagcggattgacaagaaagtggaaggcctgagcaagcacatcaagctggaagaggaacggagaagcgaggacgcccagagcaaggccgccctgaccgactggctgcgggctaaggccagcttcgtgatcgagggcctgaaggaggccgacaaggacgagttctgcagatgcgagctgaagctgcagaagtggtacggggacctgcggggaaagcccttcgccatcgaagccgagaacagcatcctggacatcagcggcttcagcaagcagtacaactgtgccttcatctggcagaaggacggcgtgaagaagctgaacctgtacctgatcatcaactacttcaagggcggcaagctgcggttcaagaagatcaaacctgaagccttcgaagccaacagattctacaccgtgatcaacaaaaagagcggcgagatcgtgcccatggaggtgaacttcaacttcgacgaccccaacctgatcatcctgcctctggcctttggcaagagacagggcagagaattcatctggaacgacctgctgtccctggaaaccggcagcctgaagctggccaacggaagagtgatcgagaagacactgtacaacagaagaacccggcaggatgagcctgccctgttcgtggccctgaccttcgagcggcgggaggtcctggactcctccaatatcaaaccaatgaacctgatcggcgtggcaagaggcgaaaacatccccgccgtgatcgccctgaccgaccccgagggctgcccactgagccggtttaaggatagcctgggaaacccaacccacatcctgagaatcggcgagagctataaggagaagcagcggaccatccaggccaagaaggaggtggagcagcggagagccggcggctacagccggaagtacgccagcaaagccaagaatctggcagacgatatggtgagaaacaccgctagagatctgctgtactacgccgtgacccaggatgccatgctgatcttcgccaacctgagccggggcttcggccggcagggcaagcggaccttcatggccgagagacagtacacacggatggaggactggctgaccgccaagctggcctacgagggcctgagcaagacctacctgtccaagacactggcccagtacacctccaagacatgcagcaactgtgggtttaccatcaccagcgccgactacgacagggtgctggagaagctgaagaagacagcaacaggctggatgaccacaattaacggcaaggagctgaaggtggagggccagattacctactacaacagatacaagagacagaacgtagtcaaggacctgtccgtcgagctggatagactgagcgaagaatctgtgaacaacgacatctcctcctggacaaagggcagaagcggagaagctctgagcctcctgaagaaaagattctcccatagacccgtgcaggagaagttcgtgtgcctgaactgcggcttcgagacacacgcagccgagcaagccgccctgaacatcgccagatcctggctgttcctgcggagccaggagtacaagaaataccagacaaacaagacaaccggcaacaccgataagagagccttcgtcgagacctggcagtccttttaccggaagaagcttaaggaggtgtggaaacctgccgtgcggtctggcggatctggcggaggctccacaagcagcaaggacctggtgaccttcggcgacgtggccgtgaacttcagccaggaggagtgggagtggctgaaccccgcccagaggaacctgtacaggagggtgatgctggagaactacaggagcctggtgagcctgggcgtgagcgtgagcaagcccgacgtgatcagcctgctggagcagggcaaggagccctggatggtgaagaaggagggcaccaggggcgcctgccccgactgggagtacgtgaccagccccaagaaaaagagaaaagtctaagctgccttctgcggggcttgccttctggccatgcccttcttctctcccttgcacctgtacctcttggtctttgaataaagcctgagtaggaaggctagcaaaaaaaaaaaaaaaaaaaaaaaaaaaaaaaaaaaaaaaaaaaaaaaaaaaaaaaaaaaaaaaaaaaaaaaaaaaaaaaa

SEQ ID NO: 3991 - RNA, 5419 nt, synthetic construct
  source 1..5419: mol_type = other RNA
aggaaataagagagaaaagaagagtaagaagaaatataagagccaccatggcccctaagaagaagcgtaaagtgagccgggtgaacggcagcggcagcggcggcggcatgaaccacgaccaggagttcgacccccctaaggtgtaccctcccgtccccgccgagaagagaaagcccatccgggtcctgagcctgttcgatggcatcgccaccggtctgctggtgctgaaggacctgggcatccaggtggataggtacattgcctccgaggtgtgcgaggactccatcaccgtgggaatggtgcgtcatcagggcaagatcatgtacgtgggcgacgtgcggagcgtgacacagaagcatatccaggagtggggccctttcgacctggtgatcggcggcagcccttgcaatgacctgagcatcgtgaacccagcccggaagggcctgtacgagggaaccggcagactgttcttcgagttttacagactgctgcacgacgcccggcctaaggaaggcgacgaccggcccttcttttggctgttcgagaatgtggtggccatgggagtcagcgacaagcgggatattagccggttcctggagagcaaccccgtgatgatcgatgccaaggaagtgagcgccgcccaccgggccagatacttctggggcaatctgcctggcatgaacagacccctggccagcaccgtgaacgacaagctggagctgcaggagtgcctggagcacggccggatcgccaagttcagcaaggtgagaaccatcaccacccgaagcaacagcatcaaacaaggcaaggaccagcactttcctgtgttcatgaacgagaaggaggacatcctgtggtgtaccgagatggagagagtgttcgggttcccagtccactacacagatgtcagcaacatgtctagactggccagacagagactgctgggaagaagctggtccgtccctgtgatcagacacctgttcgcccctctgaaggagtacttcgcctgcgtgagcagcggcaacagcaacgccaacagccggggccccagcttctctagcggcctggtgccactgtccctgagagggagccacatgggccccatggagatctacaaaaccgtgagcgcctggaagcggcagcctgtgcgcgtgctgagcctgtttcggaatatcgataaagtcctgaaaagcctgggattcctggagagcggctctggctccggcggtggcaccctgaagtacgtggaggatgtgacaaacgtggtcagacgggatgtggagaagtggggccccttcgatctggtgtacggcagcacccaacccctgggcagctcttgtgaccggtgccctggctggtacatgtttcagttccaccggatcctgcagtacgccctgccgagacaggagtcccagcggccattcttttggattttcatggacaacttgctgctgaccgaggatgaccaggaaactaccactcggttcctgcagaccgaagccgtgaccctgcaggacgtgagaggccgggactaccagaacgccatgcgggtgtggtccaacatccctggactgaaaagcaagcacgcacctctgacccctaaagaagaggagtacctgcaggcccaggtgcggagcagaagcaagctggacgcccctaaggtggatctgctggtgaagaattgcctcctgcccctgagagagtacttcaagtatttcagccagaatagtctgcccctgggcggcccaagcagcggcgcccctcctcccagcggcggcagcccagccggctccccaacctctaccgaggagggcacctctgagtccgccacccccgagagcggccctggcacctccaccgagcccagcgagggcagcgcacccggcagccctgccggcagccccacctccacagaggagggaaccagcaccgagcccagcgaaggcagcgccccaggcaccagcaccgagcctagtgagggcggctctggcggcggcagcgcccaggagattaaacggatcaacaagatcagaagaagacttgtgaaagacagcaacaccaagaaggccggcaagacaggccccatgaaaaccctgctggttagagtgatgacacccgatctgagagagcggctggaaaacctgagaaagaagcctgaaaatatcccccagcccatcagcaatacatctagagccaacctgaataagctgctgaccgattacaccgaaatgaagaaggcgatcctgcatgtgtactgggaagagttccagaaggaccctgtgggcctgatgagccgggtggcccagcctgccagcaagaagatcgatcagaacaagctgaaacctgagatggacgagaagggcaacctgaccaccgccggctttgcctgctctcagtgtggccagcccctgttcgtgtacaagctggagcaggtgtctgagaagggcaaggcttacaccaactacttcggacggtgcaatgtggccgagcacgaaaagctgatcctgctggcccagctgaagcccgagaaggatagcgacgaagccgtgacatatagcctgggaaagtttgggcagagggccctggatttctacagcattcatgtgaccaaggagtccacccaccccgtgaagcccctggcccagatcgccggaaacagatacgcctccggacctgtgggaaaggccctgagcgacgcatgtatgggcacaatcgcctccttcctgtctaagtaccaggacatcatcatcgaacaccagaaggtggtgaagggcaaccagaagagactggagagcctgcgggagctggccggcaaggaaaacctggaataccctagcgtgaccctgccacctcagcctcacaccaaggagggcgttgatgcctacaacgaagtgatcgcccgggtgcgaatgtgggtgaacctgaacctgtggcagaagctgaagctaagcagagatgatgccaagcctctgctgagactgaagggattcccttcctttcctctggtcgagagacaggccaacgaagtggactggtgggacatggtgtgtaacgtgaagaagctgatcaacgagaaaaaggaggatggcaaggtgttttggcagaatctggctggctacaagagacaggaagccctgagaccatacctgagcagcgaggaagatcggaagaagggaaagaaattcgctcggtaccagctgggcgacctgctgctgcacctggaaaagaagcacggcgaggactggggaaaggtgtacgacgaggcctgggagcggattgacaagaaagtggaaggcctgagcaagcacatcaagctggaagaggaacggagaagcgaggacgcccagagcaaggccgccctgaccgactggctgcgggctaaggccagcttcgtgatcgagggcctgaaggaggccgacaaggacgagttctgcagatgcgagctgaagctgcagaagtggtacggggacctgcggggaaagcccttcgccatcgaagccgagaacagcatcctggacatcagcggcttcagcaagcagtacaactgtgccttcatctggcagaaggacggcgtgaagaagctgaacctgtacctgatcatcaactacttcaagggcggcaagctgcggttcaagaagatcaaacctgaagccttcgaagccaacagattctacaccgtgatcaacaaaaagagcggcgagatcgtgcccatggaggtgaacttcaacttcgacgaccccaacctgatcatcctgcctctggcctttggcaagagacagggcagagaattcatctggaacgacctgctgtccctggaaaccggcagcctgaagctggccaacggaagagtgatcgagaagacactgtacaacagaagaacccggcaggatgagcctgccctgttcgtggccctgaccttcgagcggcgggaggtcctggactcctccaatatcaaaccaatgaacctgatcggcgtggcaagaggcgaaaacatccccgccgtgatcgccctgaccgaccccgagggctgcccactgagccggtttaaggatagcctgggaaacccaacccacatcctgagaatcggcgagagctataaggagaagcagcggaccatccaggccaagaaggaggtggagcagcggagagccggcggctacagccggaagtacgccagcaaagccaagaatctggcagacgatatggtgagaaacaccgctagagatctgctgtactacgccgtgacccaggatgccatgctgatcttcgccaacctgagccggggcttcggccggcagggcaagcggaccttcatggccgagagacagtacacacggatggaggactggctgaccgccaagctggcctacgagggcctgagcaagacctacctgtccaagacactggcccagtacacctccaagacatgcagcaactgtgggtttaccatcaccagcgccgactacgacagggtgctggagaagctgaagaagacagcaacaggctggatgaccacaattaacggcaaggagctgaaggtggagggccagattacctactacaacagatacaagagacagaacgtagtcaaggacctgtccgtcgagctggatagactgagcgaagaatctgtgaacaacgacatctcctcctggacaaagggcagaagcggagaagctctgagcctcctgaagaaaagattctcccatagacccgtgcaggagaagttcgtgtgcctgaactgcggcttcgagacacacgcagccgagcaagccgccctgaacatcgccagatcctggctgttcctgcggagccaggagtacaagaaataccagacaaacaagacaaccggcaacaccgataagagagccttcgtcgagacctggcagtccttttaccggaagaagcttaaggaggtgtggaaacctgccgtgcggtctggcggatctggcggaggctccacaagccaggtgcccgtgaccttcgaggacatcaccgtgtacttcagcagggagcagtgggagtacctggacgagggccagaaggagctgtacagggaggtgatgaaggagaactacgagaccctgatcagcctgggcaccggccccgagggcttcaaccccgaggtgctggccaggatcaagctggaggaggagagccacgtgtgggaccccaaggagcccggccagaaggaggtgaccaggagctacaccagccccaagaaaaagagaaaagtctaagctgccttctgcggggcttgccttctggccatgcccttcttctctcccttgcacctgtacctcttggtctttgaataaagcctgagtaggaaggctagcaaaaaaaaaaaaaaaaaaaaaaaaaaaaaaaaaaaaaaaaaaaaaaaaaaaaaaaaaaaaaaaaaaaaaaaaaaaaaaaa

SEQ ID NO: 3992 - RNA, 5419 nt, synthetic construct
  source 1..5419: mol_type = other RNA
aggaaataagagagaaaagaagagtaagaagaaatataagagccaccatggcccctaagaagaagcgtaaagtgagccgggtgaacggcagcggcagcggcggcggcatgaaccacgaccaggagttcgacccccctaaggtgtaccctcccgtccccgccgagaagagaaagcccatccgggtcctgagcctgttcgatggcatcgccaccggtctgctggtgctgaaggacctgggcatccaggtggataggtacattgcctccgaggtgtgcgaggactccatcaccgtgggaatggtgcgtcatcagggcaagatcatgtacgtgggcgacgtgcggagcgtgacacagaagcatatccaggagtggggccctttcgacctggtgatcggcggcagcccttgcaatgacctgagcatcgtgaacccagcccggaagggcctgtacgagggaaccggcagactgttcttcgagttttacagactgctgcacgacgcccggcctaaggaaggcgacgaccggcccttcttttggctgttcgagaatgtggtggccatgggagtcagcgacaagcgggatattagccggttcctggagagcaaccccgtgatgatcgatgccaaggaagtgagcgccgcccaccgggccagatacttctggggcaatctgcctggcatgaacagacccctggccagcaccgtgaacgacaagctggagctgcaggagtgcctggagcacggccggatcgccaagttcagcaaggtgagaaccatcaccacccgaagcaacagcatcaaacaaggcaaggaccagcactttcctgtgttcatgaacgagaaggaggacatcctgtggtgtaccgagatggagagagtgttcgggttcccagtccactacacagatgtcagcaacatgtctagactggccagacagagactgctgggaagaagctggtccgtccctgtgatcagacacctgttcgcccctctgaaggagtacttcgcctgcgtgagcagcggcaacagcaacgccaacagccggggccccagcttctctagcggcctggtgccactgtccctgagagggagccacatgggccccatggagatctacaaaaccgtgagcgcctggaagcggcagcctgtgcgcgtgctgagcctgtttcggaatatcgataaagtcctgaaaagcctgggattcctggagagcggctctggctccggcggtggcaccctgaagtacgtggaggatgtgacaaacgtggtcagacgggatgtggagaagtggggccccttcgatctggtgtacggcagcacccaacccctgggcagctcttgtgaccggtgccctggctggtacatgtttcagttccaccggatcctgcagtacgccctgccgagacaggagtcccagcggccattcttttggattttcatggacaacttgctgctgaccgaggatgaccaggaaactaccactcggttcctgcagaccgaagccgtgaccctgcaggacgtgagaggccgggactaccagaacgccatgcgggtgtggtccaacatccctggactgaaaagcaagcacgcacctctgacccctaaagaagaggagtacctgcaggcccaggtgcggagcagaagcaagctggacgcccctaaggtggatctgctggtgaagaattgcctcctgcccctgagagagtacttcaagtatttcagccagaatagtctgcccctgggcggcccaagcagcggcgcccctcctcccagcggcggcagcccagccggctccccaacctctaccgaggagggcacctctgagtccgccacccccgagagcggccctggcacctccaccgagcccagcgagggcagcgcacccggcagccctgccggcagccccacctccacagaggagggaaccagcaccgagcccagcgaaggcagcgccccaggcaccagcaccgagcctagtgagggcggctctggcggcggcagcgcccaggagattaaacggatcaacaagatcagaagaagacttgtgaaagacagcaacaccaagaaggccggcaagacaggccccatgaaaaccctgctggttagagtgatgacacccgatctgagagagcggctggaaaacctgagaaagaagcctgaaaatatcccccagcccatcagcaatacatctagagccaacctgaataagctgctgaccgattacaccgaaatgaagaaggcgatcctgcatgtgtactgggaagagttccagaaggaccctgtgggcctgatgagccgggtggcccagcctgccagcaagaagatcgatcagaacaagctgaaacctgagatggacgagaagggcaacctgaccaccgccggctttgcctgctctcagtgtggccagcccctgttcgtgtacaagctggagcaggtgtctgagaagggcaaggcttacaccaactacttcggacggtgcaatgtggccgagcacgaaaagctgatcctgctggcccagctgaagcccgagaaggatagcgacgaagccgtgacatatagcctgggaaagtttgggcagagggccctggatttctacagcattcatgtgaccaaggagtccacccaccccgtgaagcccctggcccagatcgccggaaacagatacgcctccggacctgtgggaaaggccctgagcgacgcatgtatgggcacaatcgcctccttcctgtctaagtaccaggacatcatcatcgaacaccagaaggtggtgaagggcaaccagaagagactggagagcctgcgggagctggccggcaaggaaaacctggaataccctagcgtgaccctgccacctcagcctcacaccaaggagggcgttgatgcctacaacgaagtgatcgcccgggtgcgaatgtgggtgaacctgaacctgtggcagaagctgaagctaagcagagatgatgccaagcctctgctgagactgaagggattcccttcctttcctctggtcgagagacaggccaacgaagtggactggtgggacatggtgtgtaacgtgaagaagctgatcaacgagaaaaaggaggatggcaaggtgttttggcagaatctggctggctacaagagacaggaagccctgagaccatacctgagcagcgaggaagatcggaagaagggaaagaaattcgctcggtaccagctgggcgacctgctgctgcacctggaaaagaagcacggcgaggactggggaaaggtgtacgacgaggcctgggagcggattgacaagaaagtggaaggcctgagcaagcacatcaagctggaagaggaacggagaagcgaggacgcccagagcaaggccgccctgaccgactggctgcgggctaaggccagcttcgtgatcgagggcctgaaggaggccgacaaggacgagttctgcagatgcgagctgaagctgcagaagtggtacggggacctgcggggaaagcccttcgccatcgaagccgagaacagcatcctggacatcagcggcttcagcaagcagtacaactgtgccttcatctggcagaaggacggcgtgaagaagctgaacctgtacctgatcatcaactacttcaagggcggcaagctgcggttcaagaagatcaaacctgaagccttcgaagccaacagattctacaccgtgatcaacaaaaagagcggcgagatcgtgcccatggaggtgaacttcaacttcgacgaccccaacctgatcatcctgcctctggcctttggcaagagacagggcagagaattcatctggaacgacctgctgtccctggaaaccggcagcctgaagctggccaacggaagagtgatcgagaagacactgtacaacagaagaacccggcaggatgagcctgccctgttcgtggccctgaccttcgagcggcgggaggtcctggactcctccaatatcaaaccaatgaacctgatcggcgtggcaagaggcgaaaacatccccgccgtgatcgccctgaccgaccccgagggctgcccactgagccggtttaaggatagcctgggaaacccaacccacatcctgagaatcggcgagagctataaggagaagcagcggaccatccaggccaagaaggaggtggagcagcggagagccggcggctacagccggaagtacgccagcaaagccaagaatctggcagacgatatggtgagaaacaccgctagagatctgctgtactacgccgtgacccaggatgccatgctgatcttcgccaacctgagccggggcttcggccggcagggcaagcggaccttcatggccgagagacagtacacacggatggaggactggctgaccgccaagctggcctacgagggcctgagcaagacctacctgtccaagacactggcccagtacacctccaagacatgcagcaactgtgggtttaccatcaccagcgccgactacgacagggtgctggagaagctgaagaagacagcaacaggctggatgaccacaattaacggcaaggagctgaaggtggagggccagattacctactacaacagatacaagagacagaacgtagtcaaggacctgtccgtcgagctggatagactgagcgaagaatctgtgaacaacgacatctcctcctggacaaagggcagaagcggagaagctctgagcctcctgaagaaaagattctcccatagacccgtgcaggagaagttcgtgtgcctgaactgcggcttcgagacacacgcagccgagcaagccgccctgaacatcgccagatcctggctgttcctgcggagccaggagtacaagaaataccagacaaacaagacaaccggcaacaccgataagagagccttcgtcgagacctggcagtccttttaccggaagaagcttaaggaggtgtggaaacctgccgtgcggtctggcggatctggcggaggctccacaagcttccagggcagcgtgatgttcagggacgtgagcatcaacttcagccaggaggagtgggagtgcctggaccccggccagatgaacctgtacaaggaggtgatgctggagaacttcagcaacctggtgagcgtgggcctgagcagcgccaagcccgtggtgatcagcctgctggaggagggcaaggagccctggatggtggagagggaggtgaagaggggcctgtgcagcgacctggagagcatgaccagccccaagaaaaagagaaaagtctaagctgccttctgcggggcttgccttctggccatgcccttcttctctcccttgcacctgtacctcttggtctttgaataaagcctgagtaggaaggctagcaaaaaaaaaaaaaaaaaaaaaaaaaaaaaaaaaaaaaaaaaaaaaaaaaaaaaaaaaaaaaaaaaaaaaaaaaaaaaaaa

SEQ ID NO: 3993 - RNA, 5419 nt, synthetic construct
  source 1..5419: mol_type = other RNA
aggaaataagagagaaaagaagagtaagaagaaatataagagccaccatggcccctaagaagaagcgtaaagtgagccgggtgaacggcagcggcagcggcggcggcatgaaccacgaccaggagttcgacccccctaaggtgtaccctcccgtccccgccgagaagagaaagcccatccgggtcctgagcctgttcgatggcatcgccaccggtctgctggtgctgaaggacctgggcatccaggtggataggtacattgcctccgaggtgtgcgaggactccatcaccgtgggaatggtgcgtcatcagggcaagatcatgtacgtgggcgacgtgcggagcgtgacacagaagcatatccaggagtggggccctttcgacctggtgatcggcggcagcccttgcaatgacctgagcatcgtgaacccagcccggaagggcctgtacgagggaaccggcagactgttcttcgagttttacagactgctgcacgacgcccggcctaaggaaggcgacgaccggcccttcttttggctgttcgagaatgtggtggccatgggagtcagcgacaagcgggatattagccggttcctggagagcaaccccgtgatgatcgatgccaaggaagtgagcgccgcccaccgggccagatacttctggggcaatctgcctggcatgaacagacccctggccagcaccgtgaacgacaagctggagctgcaggagtgcctggagcacggccggatcgccaagttcagcaaggtgagaaccatcaccacccgaagcaacagcatcaaacaaggcaaggaccagcactttcctgtgttcatgaacgagaaggaggacatcctgtggtgtaccgagatggagagagtgttcgggttcccagtccactacacagatgtcagcaacatgtctagactggccagacagagactgctgggaagaagctggtccgtccctgtgatcagacacctgttcgcccctctgaaggagtacttcgcctgcgtgagcagcggcaacagcaacgccaacagccggggccccagcttctctagcggcctggtgccactgtccctgagagggagccacatgggccccatggagatctacaaaaccgtgagcgcctggaagcggcagcctgtgcgcgtgctgagcctgtttcggaatatcgataaagtcctgaaaagcctgggattcctggagagcggctctggctccggcggtggcaccctgaagtacgtggaggatgtgacaaacgtggtcagacgggatgtggagaagtggggccccttcgatctggtgtacggcagcacccaacccctgggcagctcttgtgaccggtgccctggctggtacatgtttcagttccaccggatcctgcagtacgccctgccgagacaggagtcccagcggccattcttttggattttcatggacaacttgctgctgaccgaggatgaccaggaaactaccactcggttcctgcagaccgaagccgtgaccctgcaggacgtgagaggccgggactaccagaacgccatgcgggtgtggtccaacatccctggactgaaaagcaagcacgcacctctgacccctaaagaagaggagtacctgcaggcccaggtgcggagcagaagcaagctggacgcccctaaggtggatctgctggtgaagaattgcctcctgcccctgagagagtacttcaagtatttcagccagaatagtctgcccctgggcggcccaagcagcggcgcccctcctcccagcggcggcagcccagccggctccccaacctctaccgaggagggcacctctgagtccgccacccccgagagcggccctggcacctccaccgagcccagcgagggcagcgcacccggcagccctgccggcagccccacctccacagaggagggaaccagcaccgagcccagcgaaggcagcgccccaggcaccagcaccgagcctagtgagggcggctctggcggcggcagcgcccaggagattaaacggatcaacaagatcagaagaagacttgtgaaagacagcaacaccaagaaggccggcaagacaggccccatgaaaaccctgctggttagagtgatgacacccgatctgagagagcggctggaaaacctgagaaagaagcctgaaaatatcccccagcccatcagcaatacatctagagccaacctgaataagctgctgaccgattacaccgaaatgaagaaggcgatcctgcatgtgtactgggaagagttccagaaggaccctgtgggcctgatgagccgggtggcccagcctgccagcaagaagatcgatcagaacaagctgaaacctgagatggacgagaagggcaacctgaccaccgccggctttgcctgctctcagtgtggccagcccctgttcgtgtacaagctggagcaggtgtctgagaagggcaaggcttacaccaactacttcggacggtgcaatgtggccgagcacgaaaagctgatcctgctggcccagctgaagcccgagaaggatagcgacgaagccgtgacatatagcctgggaaagtttgggcagagggccctggatttctacagcattcatgtgaccaaggagtccacccaccccgtgaagcccctggcccagatcgccggaaacagatacgcctccggacctgtgggaaaggccctgagcgacgcatgtatgggcacaatcgcctccttcctgtctaagtaccaggacatcatcatcgaacaccagaaggtggtgaagggcaaccagaagagactggagagcctgcgggagctggccggcaaggaaaacctggaataccctagcgtgaccctgccacctcagcctcacaccaaggagggcgttgatgcctacaacgaagtgatcgcccgggtgcgaatgtgggtgaacctgaacctgtggcagaagctgaagctaagcagagatgatgccaagcctctgctgagactgaagggattcccttcctttcctctggtcgagagacaggccaacgaagtggactggtgggacatggtgtgtaacgtgaagaagctgatcaacgagaaaaaggaggatggcaaggtgttttggcagaatctggctggctacaagagacaggaagccctgagaccatacctgagcagcgaggaagatcggaagaagggaaagaaattcgctcggtaccagctgggcgacctgctgctgcacctggaaaagaagcacggcgaggactggggaaaggtgtacgacgaggcctgggagcggattgacaagaaagtggaaggcctgagcaagcacatcaagctggaagaggaacggagaagcgaggacgcccagagcaaggccgccctgaccgactggctgcgggctaaggccagcttcgtgatcgagggcctgaaggaggccgacaaggacgagttctgcagatgcgagctgaagctgcagaagtggtacggggacctgcggggaaagcccttcgccatcgaagccgagaacagcatcctggacatcagcggcttcagcaagcagtacaactgtgccttcatctggcagaaggacggcgtgaagaagctgaacctgtacctgatcatcaactacttcaagggcggcaagctgcggttcaagaagatcaaacctgaagccttcgaagccaacagattctacaccgtgatcaacaaaaagagcggcgagatcgtgcccatggaggtgaacttcaacttcgacgaccccaacctgatcatcctgcctctggcctttggcaagagacagggcagagaattcatctggaacgacctgctgtccctggaaaccggcagcctgaagctggccaacggaagagtgatcgagaagacactgtacaacagaagaacccggcaggatgagcctgccctgttcgtggccctgaccttcgagcggcgggaggtcctggactcctccaatatcaaaccaatgaacctgatcggcgtggcaagaggcgaaaacatccccgccgtgatcgccctgaccgaccccgagggctgcccactgagccggtttaaggatagcctgggaaacccaacccacatcctgagaatcggcgagagctataaggagaagcagcggaccatccaggccaagaaggaggtggagcagcggagagccggcggctacagccggaagtacgccagcaaagccaagaatctggcagacgatatggtgagaaacaccgctagagatctgctgtactacgccgtgacccaggatgccatgctgatcttcgccaacctgagccggggcttcggccggcagggcaagcggaccttcatggccgagagacagtacacacggatggaggactggctgaccgccaagctggcctacgagggcctgagcaagacctacctgtccaagacactggcccagtacacctccaagacatgcagcaactgtgggtttaccatcaccagcgccgactacgacagggtgctggagaagctgaagaagacagcaacaggctggatgaccacaattaacggcaaggagctgaaggtggagggccagattacctactacaacagatacaagagacagaacgtagtcaaggacctgtccgtcgagctggatagactgagcgaagaatctgtgaacaacgacatctcctcctggacaaagggcagaagcggagaagctctgagcctcctgaagaaaagattctcccatagacccgtgcaggagaagttcgtgtgcctgaactgcggcttcgagacacacgcagccgagcaagccgccctgaacatcgccagatcctggctgttcctgcggagccaggagtacaagaaataccagacaaacaagacaaccggcaacaccgataagagagccttcgtcgagacctggcagtccttttaccggaagaagcttaaggaggtgtggaaacctgccgtgcggtctggcggatctggcggaggctccacaagcctgcagggcggcgtgaccttcgaggacgtggccgtggacttcacccaggaggagtggcagcagctgagccccgagcagaggggcctgtacagggacgtgaccctggagaactacaggaacctggccagcatgggcggcgaggacttcgccaagcccgaggtgatcctgaggctggagaacggcgaggagccctggatggtggagacccaggtgctgaggagctgcggccccgccgagaaggacaccagccccaagaaaaagagaaaagtctaagctgccttctgcggggcttgccttctggccatgcccttcttctctcccttgcacctgtacctcttggtctttgaataaagcctgagtaggaaggctagcaaaaaaaaaaaaaaaaaaaaaaaaaaaaaaaaaaaaaaaaaaaaaaaaaaaaaaaaaaaaaaaaaaaaaaaaaaaaaaaa

SEQ ID NO: 3994 - RNA, 5419 nt, synthetic construct
  source 1..5419: mol_type = other RNA
aggaaataagagagaaaagaagagtaagaagaaatataagagccaccatggcccctaagaagaagcgtaaagtgagccgggtgaacggcagcggcagcggcggcggcatgaaccacgaccaggagttcgacccccctaaggtgtaccctcccgtccccgccgagaagagaaagcccatccgggtcctgagcctgttcgatggcatcgccaccggtctgctggtgctgaaggacctgggcatccaggtggataggtacattgcctccgaggtgtgcgaggactccatcaccgtgggaatggtgcgtcatcagggcaagatcatgtacgtgggcgacgtgcggagcgtgacacagaagcatatccaggagtggggccctttcgacctggtgatcggcggcagcccttgcaatgacctgagcatcgtgaacccagcccggaagggcctgtacgagggaaccggcagactgttcttcgagttttacagactgctgcacgacgcccggcctaaggaaggcgacgaccggcccttcttttggctgttcgagaatgtggtggccatgggagtcagcgacaagcgggatattagccggttcctggagagcaaccccgtgatgatcgatgccaaggaagtgagcgccgcccaccgggccagatacttctggggcaatctgcctggcatgaacagacccctggccagcaccgtgaacgacaagctggagctgcaggagtgcctggagcacggccggatcgccaagttcagcaaggtgagaaccatcaccacccgaagcaacagcatcaaacaaggcaaggaccagcactttcctgtgttcatgaacgagaaggaggacatcctgtggtgtaccgagatggagagagtgttcgggttcccagtccactacacagatgtcagcaacatgtctagactggccagacagagactgctgggaagaagctggtccgtccctgtgatcagacacctgttcgcccctctgaaggagtacttcgcctgcgtgagcagcggcaacagcaacgccaacagccggggccccagcttctctagcggcctggtgccactgtccctgagagggagccacatgggccccatggagatctacaaaaccgtgagcgcctggaagcggcagcctgtgcgcgtgctgagcctgtttcggaatatcgataaagtcctgaaaagcctgggattcctggagagcggctctggctccggcggtggcaccctgaagtacgtggaggatgtgacaaacgtggtcagacgggatgtggagaagtggggccccttcgatctggtgtacggcagcacccaacccctgggcagctcttgtgaccggtgccctggctggtacatgtttcagttccaccggatcctgcagtacgccctgccgagacaggagtcccagcggccattcttttggattttcatggacaacttgctgctgaccgaggatgaccaggaaactaccactcggttcctgcagaccgaagccgtgaccctgcaggacgtgagaggccgggactaccagaacgccatgcgggtgtggtccaacatccctggactgaaaagcaagcacgcacctctgacccctaaagaagaggagtacctgcaggcccaggtgcggagcagaagcaagctggacgcccctaaggtggatctgctggtgaagaattgcctcctgcccctgagagagtacttcaagtatttcagccagaatagtctgcccctgggcggcccaagcagcggcgcccctcctcccagcggcggcagcccagccggctccccaacctctaccgaggagggcacctctgagtccgccacccccgagagcggccctggcacctccaccgagcccagcgagggcagcgcacccggcagccctgccggcagccccacctccacagaggagggaaccagcaccgagcccagcgaaggcagcgccccaggcaccagcaccgagcctagtgagggcggctctggcggcggcagcgcccaggagattaaacggatcaacaagatcagaagaagacttgtgaaagacagcaacaccaagaaggccggcaagacaggccccatgaaaaccctgctggttagagtgatgacacccgatctgagagagcggctggaaaacctgagaaagaagcctgaaaatatcccccagcccatcagcaatacatctagagccaacctgaataagctgctgaccgattacaccgaaatgaagaaggcgatcctgcatgtgtactgggaagagttccagaaggaccctgtgggcctgatgagccgggtggcccagcctgccagcaagaagatcgatcagaacaagctgaaacctgagatggacgagaagggcaacctgaccaccgccggctttgcctgctctcagtgtggccagcccctgttcgtgtacaagctggagcaggtgtctgagaagggcaaggcttacaccaactacttcggacggtgcaatgtggccgagcacgaaaagctgatcctgctggcccagctgaagcccgagaaggatagcgacgaagccgtgacatatagcctgggaaagtttgggcagagggccctggatttctacagcattcatgtgaccaaggagtccacccaccccgtgaagcccctggcccagatcgccggaaacagatacgcctccggacctgtgggaaaggccctgagcgacgcatgtatgggcacaatcgcctccttcctgtctaagtaccaggacatcatcatcgaacaccagaaggtggtgaagggcaaccagaagagactggagagcctgcgggagctggccggcaaggaaaacctggaataccctagcgtgaccctgccacctcagcctcacaccaaggagggcgttgatgcctacaacgaagtgatcgcccgggtgcgaatgtgggtgaacctgaacctgtggcagaagctgaagctaagcagagatgatgccaagcctctgctgagactgaagggattcccttcctttcctctggtcgagagacaggccaacgaagtggactggtgggacatggtgtgtaacgtgaagaagctgatcaacgagaaaaaggaggatggcaaggtgttttggcagaatctggctggctacaagagacaggaagccctgagaccatacctgagcagcgaggaagatcggaagaagggaaagaaattcgctcggtaccagctgggcgacctgctgctgcacctggaaaagaagcacggcgaggactggggaaaggtgtacgacgaggcctgggagcggattgacaagaaagtggaaggcctgagcaagcacatcaagctggaagaggaacggagaagcgaggacgcccagagcaaggccgccctgaccgactggctgcgggctaaggccagcttcgtgatcgagggcctgaaggaggccgacaaggacgagttctgcagatgcgagctgaagctgcagaagtggtacggggacctgcggggaaagcccttcgccatcgaagccgagaacagcatcctggacatcagcggcttcagcaagcagtacaactgtgccttcatctggcagaaggacggcgtgaagaagctgaacctgtacctgatcatcaactacttcaagggcggcaagctgcggttcaagaagatcaaacctgaagccttcgaagccaacagattctacaccgtgatcaacaaaaagagcggcgagatcgtgcccatggaggtgaacttcaacttcgacgaccccaacctgatcatcctgcctctggcctttggcaagagacagggcagagaattcatctggaacgacctgctgtccctggaaaccggcagcctgaagctggccaacggaagagtgatcgagaagacactgtacaacagaagaacccggcaggatgagcctgccctgttcgtggccctgaccttcgagcggcgggaggtcctggactcctccaatatcaaaccaatgaacctgatcggcgtggcaagaggcgaaaacatccccgccgtgatcgccctgaccgaccccgagggctgcccactgagccggtttaaggatagcctgggaaacccaacccacatcctgagaatcggcgagagctataaggagaagcagcggaccatccaggccaagaaggaggtggagcagcggagagccggcggctacagccggaagtacgccagcaaagccaagaatctggcagacgatatggtgagaaacaccgctagagatctgctgtactacgccgtgacccaggatgccatgctgatcttcgccaacctgagccggggcttcggccggcagggcaagcggaccttcatggccgagagacagtacacacggatggaggactggctgaccgccaagctggcctacgagggcctgagcaagacctacctgtccaagacactggcccagtacacctccaagacatgcagcaactgtgggtttaccatcaccagcgccgactacgacagggtgctggagaagctgaagaagacagcaacaggctggatgaccacaattaacggcaaggagctgaaggtggagggccagattacctactacaacagatacaagagacagaacgtagtcaaggacctgtccgtcgagctggatagactgagcgaagaatctgtgaacaacgacatctcctcctggacaaagggcagaagcggagaagctctgagcctcctgaagaaaagattctcccatagacccgtgcaggagaagttcgtgtgcctgaactgcggcttcgagacacacgcagccgagcaagccgccctgaacatcgccagatcctggctgttcctgcggagccaggagtacaagaaataccagacaaacaagacaaccggcaacaccgataagagagccttcgtcgagacctggcagtccttttaccggaagaagcttaaggaggtgtggaaacctgccgtgcggtctggcggatctggcggaggctccacaagcatggccgccgccgccctgagggaccccgcccagcagggctacgtgaccttcgaggacgtggccgtgtacttcagccaggaggagtggaggctgctggacgaggcccagaagctgctgtacaggaacgtgatgctggagaacttcagcctgctggccagcctgggcctggccagcagcaagacccacgagatcacccagctggagagctgggaggagcccttcatgcccgcctgggaggtggtgaccagccccaagaaaaagagaaaagtctaagctgccttctgcggggcttgccttctggccatgcccttcttctctcccttgcacctgtacctcttggtctttgaataaagcctgagtaggaaggctagcaaaaaaaaaaaaaaaaaaaaaaaaaaaaaaaaaaaaaaaaaaaaaaaaaaaaaaaaaaaaaaaaaaaaaaaaaaaaaaaa

SEQ ID NO: 3995 - RNA, 5419 nt, synthetic construct
  source 1..5419: mol_type = other RNA
aggaaataagagagaaaagaagagtaagaagaaatataagagccaccatggcccctaagaagaagcgtaaagtgagccgggtgaacggcagcggcagcggcggcggcatgaaccacgaccaggagttcgacccccctaaggtgtaccctcccgtccccgccgagaagagaaagcccatccgggtcctgagcctgttcgatggcatcgccaccggtctgctggtgctgaaggacctgggcatccaggtggataggtacattgcctccgaggtgtgcgaggactccatcaccgtgggaatggtgcgtcatcagggcaagatcatgtacgtgggcgacgtgcggagcgtgacacagaagcatatccaggagtggggccctttcgacctggtgatcggcggcagcccttgcaatgacctgagcatcgtgaacccagcccggaagggcctgtacgagggaaccggcagactgttcttcgagttttacagactgctgcacgacgcccggcctaaggaaggcgacgaccggcccttcttttggctgttcgagaatgtggtggccatgggagtcagcgacaagcgggatattagccggttcctggagagcaaccccgtgatgatcgatgccaaggaagtgagcgccgcccaccgggccagatacttctggggcaatctgcctggcatgaacagacccctggccagcaccgtgaacgacaagctggagctgcaggagtgcctggagcacggccggatcgccaagttcagcaaggtgagaaccatcaccacccgaagcaacagcatcaaacaaggcaaggaccagcactttcctgtgttcatgaacgagaaggaggacatcctgtggtgtaccgagatggagagagtgttcgggttcccagtccactacacagatgtcagcaacatgtctagactggccagacagagactgctgggaagaagctggtccgtccctgtgatcagacacctgttcgcccctctgaaggagtacttcgcctgcgtgagcagcggcaacagcaacgccaacagccggggccccagcttctctagcggcctggtgccactgtccctgagagggagccacatgggccccatggagatctacaaaaccgtgagcgcctggaagcggcagcctgtgcgcgtgctgagcctgtttcggaatatcgataaagtcctgaaaagcctgggattcctggagagcggctctggctccggcggtggcaccctgaagtacgtggaggatgtgacaaacgtggtcagacgggatgtggagaagtggggccccttcgatctggtgtacggcagcacccaacccctgggcagctcttgtgaccggtgccctggctggtacatgtttcagttccaccggatcctgcagtacgccctgccgagacaggagtcccagcggccattcttttggattttcatggacaacttgctgctgaccgaggatgaccaggaaactaccactcggttcctgcagaccgaagccgtgaccctgcaggacgtgagaggccgggactaccagaacgccatgcgggtgtggtccaacatccctggactgaaaagcaagcacgcacctctgacccctaaagaagaggagtacctgcaggcccaggtgcggagcagaagcaagctggacgcccctaaggtggatctgctggtgaagaattgcctcctgcccctgagagagtacttcaagtatttcagccagaatagtctgcccctgggcggcccaagcagcggcgcccctcctcccagcggcggcagcccagccggctccccaacctctaccgaggagggcacctctgagtccgccacccccgagagcggccctggcacctccaccgagcccagcgagggcagcgcacccggcagccctgccggcagccccacctccacagaggagggaaccagcaccgagcccagcgaaggcagcgccccaggcaccagcaccgagcctagtgagggcggctctggcggcggcagcgcccaggagattaaacggatcaacaagatcagaagaagacttgtgaaagacagcaacaccaagaaggccggcaagacaggccccatgaaaaccctgctggttagagtgatgacacccgatctgagagagcggctggaaaacctgagaaagaagcctgaaaatatcccccagcccatcagcaatacatctagagccaacctgaataagctgctgaccgattacaccgaaatgaagaaggcgatcctgcatgtgtactgggaagagttccagaaggaccctgtgggcctgatgagccgggtggcccagcctgccagcaagaagatcgatcagaacaagctgaaacctgagatggacgagaagggcaacctgaccaccgccggctttgcctgctctcagtgtggccagcccctgttcgtgtacaagctggagcaggtgtctgagaagggcaaggcttacaccaactacttcggacggtgcaatgtggccgagcacgaaaagctgatcctgctggcccagctgaagcccgagaaggatagcgacgaagccgtgacatatagcctgggaaagtttgggcagagggccctggatttctacagcattcatgtgaccaaggagtccacccaccccgtgaagcccctggcccagatcgccggaaacagatacgcctccggacctgtgggaaaggccctgagcgacgcatgtatgggcacaatcgcctccttcctgtctaagtaccaggacatcatcatcgaacaccagaaggtggtgaagggcaaccagaagagactggagagcctgcgggagctggccggcaaggaaaacctggaataccctagcgtgaccctgccacctcagcctcacaccaaggagggcgttgatgcctacaacgaagtgatcgcccgggtgcgaatgtgggtgaacctgaacctgtggcagaagctgaagctaagcagagatgatgccaagcctctgctgagactgaagggattcccttcctttcctctggtcgagagacaggccaacgaagtggactggtgggacatggtgtgtaacgtgaagaagctgatcaacgagaaaaaggaggatggcaaggtgttttggcagaatctggctggctacaagagacaggaagccctgagaccatacctgagcagcgaggaagatcggaagaagggaaagaaattcgctcggtaccagctgggcgacctgctgctgcacctggaaaagaagcacggcgaggactggggaaaggtgtacgacgaggcctgggagcggattgacaagaaagtggaaggcctgagcaagcacatcaagctggaagaggaacggagaagcgaggacgcccagagcaaggccgccctgaccgactggctgcgggctaaggccagcttcgtgatcgagggcctgaaggaggccgacaaggacgagttctgcagatgcgagctgaagctgcagaagtggtacggggacctgcggggaaagcccttcgccatcgaagccgagaacagcatcctggacatcagcggcttcagcaagcagtacaactgtgccttcatctggcagaaggacggcgtgaagaagctgaacctgtacctgatcatcaactacttcaagggcggcaagctgcggttcaagaagatcaaacctgaagccttcgaagccaacagattctacaccgtgatcaacaaaaagagcggcgagatcgtgcccatggaggtgaacttcaacttcgacgaccccaacctgatcatcctgcctctggcctttggcaagagacagggcagagaattcatctggaacgacctgctgtccctggaaaccggcagcctgaagctggccaacggaagagtgatcgagaagacactgtacaacagaagaacccggcaggatgagcctgccctgttcgtggccctgaccttcgagcggcgggaggtcctggactcctccaatatcaaaccaatgaacctgatcggcgtggcaagaggcgaaaacatccccgccgtgatcgccctgaccgaccccgagggctgcccactgagccggtttaaggatagcctgggaaacccaacccacatcctgagaatcggcgagagctataaggagaagcagcggaccatccaggccaagaaggaggtggagcagcggagagccggcggctacagccggaagtacgccagcaaagccaagaatctggcagacgatatggtgagaaacaccgctagagatctgctgtactacgccgtgacccaggatgccatgctgatcttcgccaacctgagccggggcttcggccggcagggcaagcggaccttcatggccgagagacagtacacacggatggaggactggctgaccgccaagctggcctacgagggcctgagcaagacctacctgtccaagacactggcccagtacacctccaagacatgcagcaactgtgggtttaccatcaccagcgccgactacgacagggtgctggagaagctgaagaagacagcaacaggctggatgaccacaattaacggcaaggagctgaaggtggagggccagattacctactacaacagatacaagagacagaacgtagtcaaggacctgtccgtcgagctggatagactgagcgaagaatctgtgaacaacgacatctcctcctggacaaagggcagaagcggagaagctctgagcctcctgaagaaaagattctcccatagacccgtgcaggagaagttcgtgtgcctgaactgcggcttcgagacacacgcagccgagcaagccgccctgaacatcgccagatcctggctgttcctgcggagccaggagtacaagaaataccagacaaacaagacaaccggcaacaccgataagagagccttcgtcgagacctggcagtccttttaccggaagaagcttaaggaggtgtggaaacctgccgtgcggtctggcggatctggcggaggctccacaagcgagatggagcccctgaccttcagggacgtggccatcgagttcagcctggaggagtggcagtgcctgaaccccgcccagcaggacctgttcaggaacgtgatgctggagaactacaggaacctggtgttcctgggcatcgccgccagcaagcccgacctgatcacctgcctggagaaggccaaggagccctggaagatgaagcagcacgagatggtggacgagccccccggcgccagcaccttcaccagccccaagaaaaagagaaaagtctaagctgccttctgcggggcttgccttctggccatgcccttcttctctcccttgcacctgtacctcttggtctttgaataaagcctgagtaggaaggctagcaaaaaaaaaaaaaaaaaaaaaaaaaaaaaaaaaaaaaaaaaaaaaaaaaaaaaaaaaaaaaaaaaaaaaaaaaaaaaaaa

SEQ ID NO: 3996 - RNA, 5419 nt, synthetic construct
  source 1..5419: mol_type = other RNA
aggaaataagagagaaaagaagagtaagaagaaatataagagccaccatggcccctaagaagaagcgtaaagtgagccgggtgaacggcagcggcagcggcggcggcatgaaccacgaccaggagttcgacccccctaaggtgtaccctcccgtccccgccgagaagagaaagcccatccgggtcctgagcctgttcgatggcatcgccaccggtctgctggtgctgaaggacctgggcatccaggtggataggtacattgcctccgaggtgtgcgaggactccatcaccgtgggaatggtgcgtcatcagggcaagatcatgtacgtgggcgacgtgcggagcgtgacacagaagcatatccaggagtggggccctttcgacctggtgatcggcggcagcccttgcaatgacctgagcatcgtgaacccagcccggaagggcctgtacgagggaaccggcagactgttcttcgagttttacagactgctgcacgacgcccggcctaaggaaggcgacgaccggcccttcttttggctgttcgagaatgtggtggccatgggagtcagcgacaagcgggatattagccggttcctggagagcaaccccgtgatgatcgatgccaaggaagtgagcgccgcccaccgggccagatacttctggggcaatctgcctggcatgaacagacccctggccagcaccgtgaacgacaagctggagctgcaggagtgcctggagcacggccggatcgccaagttcagcaaggtgagaaccatcaccacccgaagcaacagcatcaaacaaggcaaggaccagcactttcctgtgttcatgaacgagaaggaggacatcctgtggtgtaccgagatggagagagtgttcgggttcccagtccactacacagatgtcagcaacatgtctagactggccagacagagactgctgggaagaagctggtccgtccctgtgatcagacacctgttcgcccctctgaaggagtacttcgcctgcgtgagcagcggcaacagcaacgccaacagccggggccccagcttctctagcggcctggtgccactgtccctgagagggagccacatgggccccatggagatctacaaaaccgtgagcgcctggaagcggcagcctgtgcgcgtgctgagcctgtttcggaatatcgataaagtcctgaaaagcctgggattcctggagagcggctctggctccggcggtggcaccctgaagtacgtggaggatgtgacaaacgtggtcagacgggatgtggagaagtggggccccttcgatctggtgtacggcagcacccaacccctgggcagctcttgtgaccggtgccctggctggtacatgtttcagttccaccggatcctgcagtacgccctgccgagacaggagtcccagcggccattcttttggattttcatggacaacttgctgctgaccgaggatgaccaggaaactaccactcggttcctgcagaccgaagccgtgaccctgcaggacgtgagaggccgggactaccagaacgccatgcgggtgtggtccaacatccctggactgaaaagcaagcacgcacctctgacccctaaagaagaggagtacctgcaggcccaggtgcggagcagaagcaagctggacgcccctaaggtggatctgctggtgaagaattgcctcctgcccctgagagagtacttcaagtatttcagccagaatagtctgcccctgggcggcccaagcagcggcgcccctcctcccagcggcggcagcccagccggctccccaacctctaccgaggagggcacctctgagtccgccacccccgagagcggccctggcacctccaccgagcccagcgagggcagcgcacccggcagccctgccggcagccccacctccacagaggagggaaccagcaccgagcccagcgaaggcagcgccccaggcaccagcaccgagcctagtgagggcggctctggcggcggcagcgcccaggagattaaacggatcaacaagatcagaagaagacttgtgaaagacagcaacaccaagaaggccggcaagacaggccccatgaaaaccctgctggttagagtgatgacacccgatctgagagagcggctggaaaacctgagaaagaagcctgaaaatatcccccagcccatcagcaatacatctagagccaacctgaataagctgctgaccgattacaccgaaatgaagaaggcgatcctgcatgtgtactgggaagagttccagaaggaccctgtgggcctgatgagccgggtggcccagcctgccagcaagaagatcgatcagaacaagctgaaacctgagatggacgagaagggcaacctgaccaccgccggctttgcctgctctcagtgtggccagcccctgttcgtgtacaagctggagcaggtgtctgagaagggcaaggcttacaccaactacttcggacggtgcaatgtggccgagcacgaaaagctgatcctgctggcccagctgaagcccgagaaggatagcgacgaagccgtgacatatagcctgggaaagtttgggcagagggccctggatttctacagcattcatgtgaccaaggagtccacccaccccgtgaagcccctggcccagatcgccggaaacagatacgcctccggacctgtgggaaaggccctgagcgacgcatgtatgggcacaatcgcctccttcctgtctaagtaccaggacatcatcatcgaacaccagaaggtggtgaagggcaaccagaagagactggagagcctgcgggagctggccggcaaggaaaacctggaataccctagcgtgaccctgccacctcagcctcacaccaaggagggcgttgatgcctacaacgaagtgatcgcccgggtgcgaatgtgggtgaacctgaacctgtggcagaagctgaagctaagcagagatgatgccaagcctctgctgagactgaagggattcccttcctttcctctggtcgagagacaggccaacgaagtggactggtgggacatggtgtgtaacgtgaagaagctgatcaacgagaaaaaggaggatggcaaggtgttttggcagaatctggctggctacaagagacaggaagccctgagaccatacctgagcagcgaggaagatcggaagaagggaaagaaattcgctcggtaccagctgggcgacctgctgctgcacctggaaaagaagcacggcgaggactggggaaaggtgtacgacgaggcctgggagcggattgacaagaaagtggaaggcctgagcaagcacatcaagctggaagaggaacggagaagcgaggacgcccagagcaaggccgccctgaccgactggctgcgggctaaggccagcttcgtgatcgagggcctgaaggaggccgacaaggacgagttctgcagatgcgagctgaagctgcagaagtggtacggggacctgcggggaaagcccttcgccatcgaagccgagaacagcatcctggacatcagcggcttcagcaagcagtacaactgtgccttcatctggcagaaggacggcgtgaagaagctgaacctgtacctgatcatcaactacttcaagggcggcaagctgcggttcaagaagatcaaacctgaagccttcgaagccaacagattctacaccgtgatcaacaaaaagagcggcgagatcgtgcccatggaggtgaacttcaacttcgacgaccccaacctgatcatcctgcctctggcctttggcaagagacagggcagagaattcatctggaacgacctgctgtccctggaaaccggcagcctgaagctggccaacggaagagtgatcgagaagacactgtacaacagaagaacccggcaggatgagcctgccctgttcgtggccctgaccttcgagcggcgggaggtcctggactcctccaatatcaaaccaatgaacctgatcggcgtggcaagaggcgaaaacatccccgccgtgatcgccctgaccgaccccgagggctgcccactgagccggtttaaggatagcctgggaaacccaacccacatcctgagaatcggcgagagctataaggagaagcagcggaccatccaggccaagaaggaggtggagcagcggagagccggcggctacagccggaagtacgccagcaaagccaagaatctggcagacgatatggtgagaaacaccgctagagatctgctgtactacgccgtgacccaggatgccatgctgatcttcgccaacctgagccggggcttcggccggcagggcaagcggaccttcatggccgagagacagtacacacggatggaggactggctgaccgccaagctggcctacgagggcctgagcaagacctacctgtccaagacactggcccagtacacctccaagacatgcagcaactgtgggtttaccatcaccagcgccgactacgacagggtgctggagaagctgaagaagacagcaacaggctggatgaccacaattaacggcaaggagctgaaggtggagggccagattacctactacaacagatacaagagacagaacgtagtcaaggacctgtccgtcgagctggatagactgagcgaagaatctgtgaacaacgacatctcctcctggacaaagggcagaagcggagaagctctgagcctcctgaagaaaagattctcccatagacccgtgcaggagaagttcgtgtgcctgaactgcggcttcgagacacacgcagccgagcaagccgccctgaacatcgccagatcctggctgttcctgcggagccaggagtacaagaaataccagacaaacaagacaaccggcaacaccgataagagagccttcgtcgagacctggcagtccttttaccggaagaagcttaaggaggtgtggaaacctgccgtgcggtctggcggatctggcggaggctccacaagcaagcccggcgccgtgagcttcgccgacgtggccgtgtacttcagccccgaggagtggggctgcctgaggcccgcccagaggagcctgtacagggacgtgatgagggagacctacggccacctgggcgccctgggcttccccggccccaagcccgccctgatcagctggatggagcaggagagcgaggcctggagcagcgccgcccaggaccccgagaagggcgagagcctgggcggcgcccagaccagccccaagaaaaagagaaaagtctaagctgccttctgcggggcttgccttctggccatgcccttcttctctcccttgcacctgtacctcttggtctttgaataaagcctgagtaggaaggctagcaaaaaaaaaaaaaaaaaaaaaaaaaaaaaaaaaaaaaaaaaaaaaaaaaaaaaaaaaaaaaaaaaaaaaaaaaaaaaaaa

SEQ ID NO: 3997 - RNA, 5419 nt, synthetic construct
  source 1..5419: mol_type = other RNA
aggaaataagagagaaaagaagagtaagaagaaatataagagccaccatggcccctaagaagaagcgtaaagtgagccgggtgaacggcagcggcagcggcggcggcatgaaccacgaccaggagttcgacccccctaaggtgtaccctcccgtccccgccgagaagagaaagcccatccgggtcctgagcctgttcgatggcatcgccaccggtctgctggtgctgaaggacctgggcatccaggtggataggtacattgcctccgaggtgtgcgaggactccatcaccgtgggaatggtgcgtcatcagggcaagatcatgtacgtgggcgacgtgcggagcgtgacacagaagcatatccaggagtggggccctttcgacctggtgatcggcggcagcccttgcaatgacctgagcatcgtgaacccagcccggaagggcctgtacgagggaaccggcagactgttcttcgagttttacagactgctgcacgacgcccggcctaaggaaggcgacgaccggcccttcttttggctgttcgagaatgtggtggccatgggagtcagcgacaagcgggatattagccggttcctggagagcaaccccgtgatgatcgatgccaaggaagtgagcgccgcccaccgggccagatacttctggggcaatctgcctggcatgaacagacccctggccagcaccgtgaacgacaagctggagctgcaggagtgcctggagcacggccggatcgccaagttcagcaaggtgagaaccatcaccacccgaagcaacagcatcaaacaaggcaaggaccagcactttcctgtgttcatgaacgagaaggaggacatcctgtggtgtaccgagatggagagagtgttcgggttcccagtccactacacagatgtcagcaacatgtctagactggccagacagagactgctgggaagaagctggtccgtccctgtgatcagacacctgttcgcccctctgaaggagtacttcgcctgcgtgagcagcggcaacagcaacgccaacagccggggccccagcttctctagcggcctggtgccactgtccctgagagggagccacatgggccccatggagatctacaaaaccgtgagcgcctggaagcggcagcctgtgcgcgtgctgagcctgtttcggaatatcgataaagtcctgaaaagcctgggattcctggagagcggctctggctccggcggtggcaccctgaagtacgtggaggatgtgacaaacgtggtcagacgggatgtggagaagtggggccccttcgatctggtgtacggcagcacccaacccctgggcagctcttgtgaccggtgccctggctggtacatgtttcagttccaccggatcctgcagtacgccctgccgagacaggagtcccagcggccattcttttggattttcatggacaacttgctgctgaccgaggatgaccaggaaactaccactcggttcctgcagaccgaagccgtgaccctgcaggacgtgagaggccgggactaccagaacgccatgcgggtgtggtccaacatccctggactgaaaagcaagcacgcacctctgacccctaaagaagaggagtacctgcaggcccaggtgcggagcagaagcaagctggacgcccctaaggtggatctgctggtgaagaattgcctcctgcccctgagagagtacttcaagtatttcagccagaatagtctgcccctgggcggcccaagcagcggcgcccctcctcccagcggcggcagcccagccggctccccaacctctaccgaggagggcacctctgagtccgccacccccgagagcggccctggcacctccaccgagcccagcgagggcagcgcacccggcagccctgccggcagccccacctccacagaggagggaaccagcaccgagcccagcgaaggcagcgccccaggcaccagcaccgagcctagtgagggcggctctggcggcggcagcgcccaggagattaaacggatcaacaagatcagaagaagacttgtgaaagacagcaacaccaagaaggccggcaagacaggccccatgaaaaccctgctggttagagtgatgacacccgatctgagagagcggctggaaaacctgagaaagaagcctgaaaatatcccccagcccatcagcaatacatctagagccaacctgaataagctgctgaccgattacaccgaaatgaagaaggcgatcctgcatgtgtactgggaagagttccagaaggaccctgtgggcctgatgagccgggtggcccagcctgccagcaagaagatcgatcagaacaagctgaaacctgagatggacgagaagggcaacctgaccaccgccggctttgcctgctctcagtgtggccagcccctgttcgtgtacaagctggagcaggtgtctgagaagggcaaggcttacaccaactacttcggacggtgcaatgtggccgagcacgaaaagctgatcctgctggcccagctgaagcccgagaaggatagcgacgaagccgtgacatatagcctgggaaagtttgggcagagggccctggatttctacagcattcatgtgaccaaggagtccacccaccccgtgaagcccctggcccagatcgccggaaacagatacgcctccggacctgtgggaaaggccctgagcgacgcatgtatgggcacaatcgcctccttcctgtctaagtaccaggacatcatcatcgaacaccagaaggtggtgaagggcaaccagaagagactggagagcctgcgggagctggccggcaaggaaaacctggaataccctagcgtgaccctgccacctcagcctcacaccaaggagggcgttgatgcctacaacgaagtgatcgcccgggtgcgaatgtgggtgaacctgaacctgtggcagaagctgaagctaagcagagatgatgccaagcctctgctgagactgaagggattcccttcctttcctctggtcgagagacaggccaacgaagtggactggtgggacatggtgtgtaacgtgaagaagctgatcaacgagaaaaaggaggatggcaaggtgttttggcagaatctggctggctacaagagacaggaagccctgagaccatacctgagcagcgaggaagatcggaagaagggaaagaaattcgctcggtaccagctgggcgacctgctgctgcacctggaaaagaagcacggcgaggactggggaaaggtgtacgacgaggcctgggagcggattgacaagaaagtggaaggcctgagcaagcacatcaagctggaagaggaacggagaagcgaggacgcccagagcaaggccgccctgaccgactggctgcgggctaaggccagcttcgtgatcgagggcctgaaggaggccgacaaggacgagttctgcagatgcgagctgaagctgcagaagtggtacggggacctgcggggaaagcccttcgccatcgaagccgagaacagcatcctggacatcagcggcttcagcaagcagtacaactgtgccttcatctggcagaaggacggcgtgaagaagctgaacctgtacctgatcatcaactacttcaagggcggcaagctgcggttcaagaagatcaaacctgaagccttcgaagccaacagattctacaccgtgatcaacaaaaagagcggcgagatcgtgcccatggaggtgaacttcaacttcgacgaccccaacctgatcatcctgcctctggcctttggcaagagacagggcagagaattcatctggaacgacctgctgtccctggaaaccggcagcctgaagctggccaacggaagagtgatcgagaagacactgtacaacagaagaacccggcaggatgagcctgccctgttcgtggccctgaccttcgagcggcgggaggtcctggactcctccaatatcaaaccaatgaacctgatcggcgtggcaagaggcgaaaacatccccgccgtgatcgccctgaccgaccccgagggctgcccactgagccggtttaaggatagcctgggaaacccaacccacatcctgagaatcggcgagagctataaggagaagcagcggaccatccaggccaagaaggaggtggagcagcggagagccggcggctacagccggaagtacgccagcaaagccaagaatctggcagacgatatggtgagaaacaccgctagagatctgctgtactacgccgtgacccaggatgccatgctgatcttcgccaacctgagccggggcttcggccggcagggcaagcggaccttcatggccgagagacagtacacacggatggaggactggctgaccgccaagctggcctacgagggcctgagcaagacctacctgtccaagacactggcccagtacacctccaagacatgcagcaactgtgggtttaccatcaccagcgccgactacgacagggtgctggagaagctgaagaagacagcaacaggctggatgaccacaattaacggcaaggagctgaaggtggagggccagattacctactacaacagatacaagagacagaacgtagtcaaggacctgtccgtcgagctggatagactgagcgaagaatctgtgaacaacgacatctcctcctggacaaagggcagaagcggagaagctctgagcctcctgaagaaaagattctcccatagacccgtgcaggagaagttcgtgtgcctgaactgcggcttcgagacacacgcagccgagcaagccgccctgaacatcgccagatcctggctgttcctgcggagccaggagtacaagaaataccagacaaacaagacaaccggcaacaccgataagagagccttcgtcgagacctggcagtccttttaccggaagaagcttaaggaggtgtggaaacctgccgtgcggtctggcggatctggcggaggctccacaagcttccaggagctggtgagcttcaaggacgtgaccgtgggcttcacccaggaggagtggcagcacctggaccccacccagaggagcctgtacagggacgtgatgctggagaactacagcaacctggtgagcgtgggctactgcgtgaccaagcccgaggtgatcttcaggctggagcagggcgaggagccctggatcctggaggaggagttccccaggcagagcttccccgaggtgtggaagatcaccagccccaagaaaaagagaaaagtctaagctgccttctgcggggcttgccttctggccatgcccttcttctctcccttgcacctgtacctcttggtctttgaataaagcctgagtaggaaggctagcaaaaaaaaaaaaaaaaaaaaaaaaaaaaaaaaaaaaaaaaaaaaaaaaaaaaaaaaaaaaaaaaaaaaaaaaaaaaaaaa

SEQ ID NO: 3998 - RNA, 5419 nt, synthetic construct
  source 1..5419: mol_type = other RNA
aggaaataagagagaaaagaagagtaagaagaaatataagagccaccatggcccctaagaagaagcgtaaagtgagccgggtgaacggcagcggcagcggcggcggcatgaaccacgaccaggagttcgacccccctaaggtgtaccctcccgtccccgccgagaagagaaagcccatccgggtcctgagcctgttcgatggcatcgccaccggtctgctggtgctgaaggacctgggcatccaggtggataggtacattgcctccgaggtgtgcgaggactccatcaccgtgggaatggtgcgtcatcagggcaagatcatgtacgtgggcgacgtgcggagcgtgacacagaagcatatccaggagtggggccctttcgacctggtgatcggcggcagcccttgcaatgacctgagcatcgtgaacccagcccggaagggcctgtacgagggaaccggcagactgttcttcgagttttacagactgctgcacgacgcccggcctaaggaaggcgacgaccggcccttcttttggctgttcgagaatgtggtggccatgggagtcagcgacaagcgggatattagccggttcctggagagcaaccccgtgatgatcgatgccaaggaagtgagcgccgcccaccgggccagatacttctggggcaatctgcctggcatgaacagacccctggccagcaccgtgaacgacaagctggagctgcaggagtgcctggagcacggccggatcgccaagttcagcaaggtgagaaccatcaccacccgaagcaacagcatcaaacaaggcaaggaccagcactttcctgtgttcatgaacgagaaggaggacatcctgtggtgtaccgagatggagagagtgttcgggttcccagtccactacacagatgtcagcaacatgtctagactggccagacagagactgctgggaagaagctggtccgtccctgtgatcagacacctgttcgcccctctgaaggagtacttcgcctgcgtgagcagcggcaacagcaacgccaacagccggggccccagcttctctagcggcctggtgccactgtccctgagagggagccacatgggccccatggagatctacaaaaccgtgagcgcctggaagcggcagcctgtgcgcgtgctgagcctgtttcggaatatcgataaagtcctgaaaagcctgggattcctggagagcggctctggctccggcggtggcaccctgaagtacgtggaggatgtgacaaacgtggtcagacgggatgtggagaagtggggccccttcgatctggtgtacggcagcacccaacccctgggcagctcttgtgaccggtgccctggctggtacatgtttcagttccaccggatcctgcagtacgccctgccgagacaggagtcccagcggccattcttttggattttcatggacaacttgctgctgaccgaggatgaccaggaaactaccactcggttcctgcagaccgaagccgtgaccctgcaggacgtgagaggccgggactaccagaacgccatgcgggtgtggtccaacatccctggactgaaaagcaagcacgcacctctgacccctaaagaagaggagtacctgcaggcccaggtgcggagcagaagcaagctggacgcccctaaggtggatctgctggtgaagaattgcctcctgcccctgagagagtacttcaagtatttcagccagaatagtctgcccctgggcggcccaagcagcggcgcccctcctcccagcggcggcagcccagccggctccccaacctctaccgaggagggcacctctgagtccgccacccccgagagcggccctggcacctccaccgagcccagcgagggcagcgcacccggcagccctgccggcagccccacctccacagaggagggaaccagcaccgagcccagcgaaggcagcgccccaggcaccagcaccgagcctagtgagggcggctctggcggcggcagcgcccaggagattaaacggatcaacaagatcagaagaagacttgtgaaagacagcaacaccaagaaggccggcaagacaggccccatgaaaaccctgctggttagagtgatgacacccgatctgagagagcggctggaaaacctgagaaagaagcctgaaaatatcccccagcccatcagcaatacatctagagccaacctgaataagctgctgaccgattacaccgaaatgaagaaggcgatcctgcatgtgtactgggaagagttccagaaggaccctgtgggcctgatgagccgggtggcccagcctgccagcaagaagatcgatcagaacaagctgaaacctgagatggacgagaagggcaacctgaccaccgccggctttgcctgctctcagtgtggccagcccctgttcgtgtacaagctggagcaggtgtctgagaagggcaaggcttacaccaactacttcggacggtgcaatgtggccgagcacgaaaagctgatcctgctggcccagctgaagcccgagaaggatagcgacgaagccgtgacatatagcctgggaaagtttgggcagagggccctggatttctacagcattcatgtgaccaaggagtccacccaccccgtgaagcccctggcccagatcgccggaaacagatacgcctccggacctgtgggaaaggccctgagcgacgcatgtatgggcacaatcgcctccttcctgtctaagtaccaggacatcatcatcgaacaccagaaggtggtgaagggcaaccagaagagactggagagcctgcgggagctggccggcaaggaaaacctggaataccctagcgtgaccctgccacctcagcctcacaccaaggagggcgttgatgcctacaacgaagtgatcgcccgggtgcgaatgtgggtgaacctgaacctgtggcagaagctgaagctaagcagagatgatgccaagcctctgctgagactgaagggattcccttcctttcctctggtcgagagacaggccaacgaagtggactggtgggacatggtgtgtaacgtgaagaagctgatcaacgagaaaaaggaggatggcaaggtgttttggcagaatctggctggctacaagagacaggaagccctgagaccatacctgagcagcgaggaagatcggaagaagggaaagaaattcgctcggtaccagctgggcgacctgctgctgcacctggaaaagaagcacggcgaggactggggaaaggtgtacgacgaggcctgggagcggattgacaagaaagtggaaggcctgagcaagcacatcaagctggaagaggaacggagaagcgaggacgcccagagcaaggccgccctgaccgactggctgcgggctaaggccagcttcgtgatcgagggcctgaaggaggccgacaaggacgagttctgcagatgcgagctgaagctgcagaagtggtacggggacctgcggggaaagcccttcgccatcgaagccgagaacagcatcctggacatcagcggcttcagcaagcagtacaactgtgccttcatctggcagaaggacggcgtgaagaagctgaacctgtacctgatcatcaactacttcaagggcggcaagctgcggttcaagaagatcaaacctgaagccttcgaagccaacagattctacaccgtgatcaacaaaaagagcggcgagatcgtgcccatggaggtgaacttcaacttcgacgaccccaacctgatcatcctgcctctggcctttggcaagagacagggcagagaattcatctggaacgacctgctgtccctggaaaccggcagcctgaagctggccaacggaagagtgatcgagaagacactgtacaacagaagaacccggcaggatgagcctgccctgttcgtggccctgaccttcgagcggcgggaggtcctggactcctccaatatcaaaccaatgaacctgatcggcgtggcaagaggcgaaaacatccccgccgtgatcgccctgaccgaccccgagggctgcccactgagccggtttaaggatagcctgggaaacccaacccacatcctgagaatcggcgagagctataaggagaagcagcggaccatccaggccaagaaggaggtggagcagcggagagccggcggctacagccggaagtacgccagcaaagccaagaatctggcagacgatatggtgagaaacaccgctagagatctgctgtactacgccgtgacccaggatgccatgctgatcttcgccaacctgagccggggcttcggccggcagggcaagcggaccttcatggccgagagacagtacacacggatggaggactggctgaccgccaagctggcctacgagggcctgagcaagacctacctgtccaagacactggcccagtacacctccaagacatgcagcaactgtgggtttaccatcaccagcgccgactacgacagggtgctggagaagctgaagaagacagcaacaggctggatgaccacaattaacggcaaggagctgaaggtggagggccagattacctactacaacagatacaagagacagaacgtagtcaaggacctgtccgtcgagctggatagactgagcgaagaatctgtgaacaacgacatctcctcctggacaaagggcagaagcggagaagctctgagcctcctgaagaaaagattctcccatagacccgtgcaggagaagttcgtgtgcctgaactgcggcttcgagacacacgcagccgagcaagccgccctgaacatcgccagatcctggctgttcctgcggagccaggagtacaagaaataccagacaaacaagacaaccggcaacaccgataagagagccttcgtcgagacctggcagtccttttaccggaagaagcttaaggaggtgtggaaacctgccgtgcggtctggcggatctggcggaggctccacaagcctgagggagagcgtgaccttcaaggacgtggccgtggacttcaccggcgaggagtggaggaggctggaccccgcccagagggccctgtacagggacgtgatgctggagaactacgagaacctggtgagcctgggcctgcccgtgagcaagctggacgtgatcagcctgctggagaggggcgaggccccctggtggctggagggcggcggcctgcagagcccctgcagcgacgccctgagccagaccagccccaagaaaaagagaaaagtctaagctgccttctgcggggcttgccttctggccatgcccttcttctctcccttgcacctgtacctcttggtctttgaataaagcctgagtaggaaggctagcaaaaaaaaaaaaaaaaaaaaaaaaaaaaaaaaaaaaaaaaaaaaaaaaaaaaaaaaaaaaaaaaaaaaaaaaaaaaaaaa

SEQ ID NO: 3999 - RNA, 5419 nt, synthetic construct
  source 1..5419: mol_type = other RNA
aggaaataagagagaaaagaagagtaagaagaaatataagagccaccatggcccctaagaagaagcgtaaagtgagccgggtgaacggcagcggcagcggcggcggcatgaaccacgaccaggagttcgacccccctaaggtgtaccctcccgtccccgccgagaagagaaagcccatccgggtcctgagcctgttcgatggcatcgccaccggtctgctggtgctgaaggacctgggcatccaggtggataggtacattgcctccgaggtgtgcgaggactccatcaccgtgggaatggtgcgtcatcagggcaagatcatgtacgtgggcgacgtgcggagcgtgacacagaagcatatccaggagtggggccctttcgacctggtgatcggcggcagcccttgcaatgacctgagcatcgtgaacccagcccggaagggcctgtacgagggaaccggcagactgttcttcgagttttacagactgctgcacgacgcccggcctaaggaaggcgacgaccggcccttcttttggctgttcgagaatgtggtggccatgggagtcagcgacaagcgggatattagccggttcctggagagcaaccccgtgatgatcgatgccaaggaagtgagcgccgcccaccgggccagatacttctggggcaatctgcctggcatgaacagacccctggccagcaccgtgaacgacaagctggagctgcaggagtgcctggagcacggccggatcgccaagttcagcaaggtgagaaccatcaccacccgaagcaacagcatcaaacaaggcaaggaccagcactttcctgtgttcatgaacgagaaggaggacatcctgtggtgtaccgagatggagagagtgttcgggttcccagtccactacacagatgtcagcaacatgtctagactggccagacagagactgctgggaagaagctggtccgtccctgtgatcagacacctgttcgcccctctgaaggagtacttcgcctgcgtgagcagcggcaacagcaacgccaacagccggggccccagcttctctagcggcctggtgccactgtccctgagagggagccacatgggccccatggagatctacaaaaccgtgagcgcctggaagcggcagcctgtgcgcgtgctgagcctgtttcggaatatcgataaagtcctgaaaagcctgggattcctggagagcggctctggctccggcggtggcaccctgaagtacgtggaggatgtgacaaacgtggtcagacgggatgtggagaagtggggccccttcgatctggtgtacggcagcacccaacccctgggcagctcttgtgaccggtgccctggctggtacatgtttcagttccaccggatcctgcagtacgccctgccgagacaggagtcccagcggccattcttttggattttcatggacaacttgctgctgaccgaggatgaccaggaaactaccactcggttcctgcagaccgaagccgtgaccctgcaggacgtgagaggccgggactaccagaacgccatgcgggtgtggtccaacatccctggactgaaaagcaagcacgcacctctgacccctaaagaagaggagtacctgcaggcccaggtgcggagcagaagcaagctggacgcccctaaggtggatctgctggtgaagaattgcctcctgcccctgagagagtacttcaagtatttcagccagaatagtctgcccctgggcggcccaagcagcggcgcccctcctcccagcggcggcagcccagccggctccccaacctctaccgaggagggcacctctgagtccgccacccccgagagcggccctggcacctccaccgagcccagcgagggcagcgcacccggcagccctgccggcagccccacctccacagaggagggaaccagcaccgagcccagcgaaggcagcgccccaggcaccagcaccgagcctagtgagggcggctctggcggcggcagcgcccaggagattaaacggatcaacaagatcagaagaagacttgtgaaagacagcaacaccaagaaggccggcaagacaggccccatgaaaaccctgctggttagagtgatgacacccgatctgagagagcggctggaaaacctgagaaagaagcctgaaaatatcccccagcccatcagcaatacatctagagccaacctgaataagctgctgaccgattacaccgaaatgaagaaggcgatcctgcatgtgtactgggaagagttccagaaggaccctgtgggcctgatgagccgggtggcccagcctgccagcaagaagatcgatcagaacaagctgaaacctgagatggacgagaagggcaacctgaccaccgccggctttgcctgctctcagtgtggccagcccctgttcgtgtacaagctggagcaggtgtctgagaagggcaaggcttacaccaactacttcggacggtgcaatgtggccgagcacgaaaagctgatcctgctggcccagctgaagcccgagaaggatagcgacgaagccgtgacatatagcctgggaaagtttgggcagagggccctggatttctacagcattcatgtgaccaaggagtccacccaccccgtgaagcccctggcccagatcgccggaaacagatacgcctccggacctgtgggaaaggccctgagcgacgcatgtatgggcacaatcgcctccttcctgtctaagtaccaggacatcatcatcgaacaccagaaggtggtgaagggcaaccagaagagactggagagcctgcgggagctggccggcaaggaaaacctggaataccctagcgtgaccctgccacctcagcctcacaccaaggagggcgttgatgcctacaacgaagtgatcgcccgggtgcgaatgtgggtgaacctgaacctgtggcagaagctgaagctaagcagagatgatgccaagcctctgctgagactgaagggattcccttcctttcctctggtcgagagacaggccaacgaagtggactggtgggacatggtgtgtaacgtgaagaagctgatcaacgagaaaaaggaggatggcaaggtgttttggcagaatctggctggctacaagagacaggaagccctgagaccatacctgagcagcgaggaagatcggaagaagggaaagaaattcgctcggtaccagctgggcgacctgctgctgcacctggaaaagaagcacggcgaggactggggaaaggtgtacgacgaggcctgggagcggattgacaagaaagtggaaggcctgagcaagcacatcaagctggaagaggaacggagaagcgaggacgcccagagcaaggccgccctgaccgactggctgcgggctaaggccagcttcgtgatcgagggcctgaaggaggccgacaaggacgagttctgcagatgcgagctgaagctgcagaagtggtacggggacctgcggggaaagcccttcgccatcgaagccgagaacagcatcctggacatcagcggcttcagcaagcagtacaactgtgccttcatctggcagaaggacggcgtgaagaagctgaacctgtacctgatcatcaactacttcaagggcggcaagctgcggttcaagaagatcaaacctgaagccttcgaagccaacagattctacaccgtgatcaacaaaaagagcggcgagatcgtgcccatggaggtgaacttcaacttcgacgaccccaacctgatcatcctgcctctggcctttggcaagagacagggcagagaattcatctggaacgacctgctgtccctggaaaccggcagcctgaagctggccaacggaagagtgatcgagaagacactgtacaacagaagaacccggcaggatgagcctgccctgttcgtggccctgaccttcgagcggcgggaggtcctggactcctccaatatcaaaccaatgaacctgatcggcgtggcaagaggcgaaaacatccccgccgtgatcgccctgaccgaccccgagggctgcccactgagccggtttaaggatagcctgggaaacccaacccacatcctgagaatcggcgagagctataaggagaagcagcggaccatccaggccaagaaggaggtggagcagcggagagccggcggctacagccggaagtacgccagcaaagccaagaatctggcagacgatatggtgagaaacaccgctagagatctgctgtactacgccgtgacccaggatgccatgctgatcttcgccaacctgagccggggcttcggccggcagggcaagcggaccttcatggccgagagacagtacacacggatggaggactggctgaccgccaagctggcctacgagggcctgagcaagacctacctgtccaagacactggcccagtacacctccaagacatgcagcaactgtgggtttaccatcaccagcgccgactacgacagggtgctggagaagctgaagaagacagcaacaggctggatgaccacaattaacggcaaggagctgaaggtggagggccagattacctactacaacagatacaagagacagaacgtagtcaaggacctgtccgtcgagctggatagactgagcgaagaatctgtgaacaacgacatctcctcctggacaaagggcagaagcggagaagctctgagcctcctgaagaaaagattctcccatagacccgtgcaggagaagttcgtgtgcctgaactgcggcttcgagacacacgcagccgagcaagccgccctgaacatcgccagatcctggctgttcctgcggagccaggagtacaagaaataccagacaaacaagacaaccggcaacaccgataagagagccttcgtcgagacctggcagtccttttaccggaagaagcttaaggaggtgtggaaacctgccgtgcggtctggcggatctggcggaggctccacaagcttccagggccccgtgaccttcgaggaggtggccgtgtacttcaccagcgaggagtgggccctgctggaccccacccagagggccctgtactgggacgtgatgcaggagaactacgagaacgtgaccagcctgggcttccccgtgagcaagccccacatcatcagccagctggagcagggcgccgagccctgggtgcccgacctgcagggcagcgaggagatcctgagcaagcaccagaggatcaccagccccaagaaaaagagaaaagtctaagctgccttctgcggggcttgccttctggccatgcccttcttctctcccttgcacctgtacctcttggtctttgaataaagcctgagtaggaaggctagcaaaaaaaaaaaaaaaaaaaaaaaaaaaaaaaaaaaaaaaaaaaaaaaaaaaaaaaaaaaaaaaaaaaaaaaaaaaaaaaa

SEQ ID NO: 4000 - RNA, 5419 nt, synthetic construct
  source 1..5419: mol_type = other RNA
aggaaataagagagaaaagaagagtaagaagaaatataagagccaccatggcccctaagaagaagcgtaaagtgagccgggtgaacggcagcggcagcggcggcggcatgaaccacgaccaggagttcgacccccctaaggtgtaccctcccgtccccgccgagaagagaaagcccatccgggtcctgagcctgttcgatggcatcgccaccggtctgctggtgctgaaggacctgggcatccaggtggataggtacattgcctccgaggtgtgcgaggactccatcaccgtgggaatggtgcgtcatcagggcaagatcatgtacgtgggcgacgtgcggagcgtgacacagaagcatatccaggagtggggccctttcgacctggtgatcggcggcagcccttgcaatgacctgagcatcgtgaacccagcccggaagggcctgtacgagggaaccggcagactgttcttcgagttttacagactgctgcacgacgcccggcctaaggaaggcgacgaccggcccttcttttggctgttcgagaatgtggtggccatgggagtcagcgacaagcgggatattagccggttcctggagagcaaccccgtgatgatcgatgccaaggaagtgagcgccgcccaccgggccagatacttctggggcaatctgcctggcatgaacagacccctggccagcaccgtgaacgacaagctggagctgcaggagtgcctggagcacggccggatcgccaagttcagcaaggtgagaaccatcaccacccgaagcaacagcatcaaacaaggcaaggaccagcactttcctgtgttcatgaacgagaaggaggacatcctgtggtgtaccgagatggagagagtgttcgggttcccagtccactacacagatgtcagcaacatgtctagactggccagacagagactgctgggaagaagctggtccgtccctgtgatcagacacctgttcgcccctctgaaggagtacttcgcctgcgtgagcagcggcaacagcaacgccaacagccggggccccagcttctctagcggcctggtgccactgtccctgagagggagccacatgggccccatggagatctacaaaaccgtgagcgcctggaagcggcagcctgtgcgcgtgctgagcctgtttcggaatatcgataaagtcctgaaaagcctgggattcctggagagcggctctggctccggcggtggcaccctgaagtacgtggaggatgtgacaaacgtggtcagacgggatgtggagaagtggggccccttcgatctggtgtacggcagcacccaacccctgggcagctcttgtgaccggtgccctggctggtacatgtttcagttccaccggatcctgcagtacgccctgccgagacaggagtcccagcggccattcttttggattttcatggacaacttgctgctgaccgaggatgaccaggaaactaccactcggttcctgcagaccgaagccgtgaccctgcaggacgtgagaggccgggactaccagaacgccatgcgggtgtggtccaacatccctggactgaaaagcaagcacgcacctctgacccctaaagaagaggagtacctgcaggcccaggtgcggagcagaagcaagctggacgcccctaaggtggatctgctggtgaagaattgcctcctgcccctgagagagtacttcaagtatttcagccagaatagtctgcccctgggcggcccaagcagcggcgcccctcctcccagcggcggcagcccagccggctccccaacctctaccgaggagggcacctctgagtccgccacccccgagagcggccctggcacctccaccgagcccagcgagggcagcgcacccggcagccctgccggcagccccacctccacagaggagggaaccagcaccgagcccagcgaaggcagcgccccaggcaccagcaccgagcctagtgagggcggctctggcggcggcagcgcccaggagattaaacggatcaacaagatcagaagaagacttgtgaaagacagcaacaccaagaaggccggcaagacaggccccatgaaaaccctgctggttagagtgatgacacccgatctgagagagcggctggaaaacctgagaaagaagcctgaaaatatcccccagcccatcagcaatacatctagagccaacctgaataagctgctgaccgattacaccgaaatgaagaaggcgatcctgcatgtgtactgggaagagttccagaaggaccctgtgggcctgatgagccgggtggcccagcctgccagcaagaagatcgatcagaacaagctgaaacctgagatggacgagaagggcaacctgaccaccgccggctttgcctgctctcagtgtggccagcccctgttcgtgtacaagctggagcaggtgtctgagaagggcaaggcttacaccaactacttcggacggtgcaatgtggccgagcacgaaaagctgatcctgctggcccagctgaagcccgagaaggatagcgacgaagccgtgacatatagcctgggaaagtttgggcagagggccctggatttctacagcattcatgtgaccaaggagtccacccaccccgtgaagcccctggcccagatcgccggaaacagatacgcctccggacctgtgggaaaggccctgagcgacgcatgtatgggcacaatcgcctccttcctgtctaagtaccaggacatcatcatcgaacaccagaaggtggtgaagggcaaccagaagagactggagagcctgcgggagctggccggcaaggaaaacctggaataccctagcgtgaccctgccacctcagcctcacaccaaggagggcgttgatgcctacaacgaagtgatcgcccgggtgcgaatgtgggtgaacctgaacctgtggcagaagctgaagctaagcagagatgatgccaagcctctgctgagactgaagggattcccttcctttcctctggtcgagagacaggccaacgaagtggactggtgggacatggtgtgtaacgtgaagaagctgatcaacgagaaaaaggaggatggcaaggtgttttggcagaatctggctggctacaagagacaggaagccctgagaccatacctgagcagcgaggaagatcggaagaagggaaagaaattcgctcggtaccagctgggcgacctgctgctgcacctggaaaagaagcacggcgaggactggggaaaggtgtacgacgaggcctgggagcggattgacaagaaagtggaaggcctgagcaagcacatcaagctggaagaggaacggagaagcgaggacgcccagagcaaggccgccctgaccgactggctgcgggctaaggccagcttcgtgatcgagggcctgaaggaggccgacaaggacgagttctgcagatgcgagctgaagctgcagaagtggtacggggacctgcggggaaagcccttcgccatcgaagccgagaacagcatcctggacatcagcggcttcagcaagcagtacaactgtgccttcatctggcagaaggacggcgtgaagaagctgaacctgtacctgatcatcaactacttcaagggcggcaagctgcggttcaagaagatcaaacctgaagccttcgaagccaacagattctacaccgtgatcaacaaaaagagcggcgagatcgtgcccatggaggtgaacttcaacttcgacgaccccaacctgatcatcctgcctctggcctttggcaagagacagggcagagaattcatctggaacgacctgctgtccctggaaaccggcagcctgaagctggccaacggaagagtgatcgagaagacactgtacaacagaagaacccggcaggatgagcctgccctgttcgtggccctgaccttcgagcggcgggaggtcctggactcctccaatatcaaaccaatgaacctgatcggcgtggcaagaggcgaaaacatccccgccgtgatcgccctgaccgaccccgagggctgcccactgagccggtttaaggatagcctgggaaacccaacccacatcctgagaatcggcgagagctataaggagaagcagcggaccatccaggccaagaaggaggtggagcagcggagagccggcggctacagccggaagtacgccagcaaagccaagaatctggcagacgatatggtgagaaacaccgctagagatctgctgtactacgccgtgacccaggatgccatgctgatcttcgccaacctgagccggggcttcggccggcagggcaagcggaccttcatggccgagagacagtacacacggatggaggactggctgaccgccaagctggcctacgagggcctgagcaagacctacctgtccaagacactggcccagtacacctccaagacatgcagcaactgtgggtttaccatcaccagcgccgactacgacagggtgctggagaagctgaagaagacagcaacaggctggatgaccacaattaacggcaaggagctgaaggtggagggccagattacctactacaacagatacaagagacagaacgtagtcaaggacctgtccgtcgagctggatagactgagcgaagaatctgtgaacaacgacatctcctcctggacaaagggcagaagcggagaagctctgagcctcctgaagaaaagattctcccatagacccgtgcaggagaagttcgtgtgcctgaactgcggcttcgagacacacgcagccgagcaagccgccctgaacatcgccagatcctggctgttcctgcggagccaggagtacaagaaataccagacaaacaagacaaccggcaacaccgataagagagccttcgtcgagacctggcagtccttttaccggaagaagcttaaggaggtgtggaaacctgccgtgcggtctggcggatctggcggaggctccacaagcccccaggagcccgtgaccttcgccgacgtggccgtgctgttcacccccgaggagtggctgttcctggacagcgcccagaagagcctgtacagggacgtgatgctggagaactacaggaacctggccagcgtgggcgaccagctgtgcaagaccaggatgagcagccacatggagcagagggaggagctgtgcgtgaccgagaggggcgtgttccccggcgcccacctgggcccccacctgcagaccagccccaagaaaaagagaaaagtctaagctgccttctgcggggcttgccttctggccatgcccttcttctctcccttgcacctgtacctcttggtctttgaataaagcctgagtaggaaggctagcaaaaaaaaaaaaaaaaaaaaaaaaaaaaaaaaaaaaaaaaaaaaaaaaaaaaaaaaaaaaaaaaaaaaaaaaaaaaaaaa

SEQ ID NO: 4001 - RNA, 5419 nt, synthetic construct
  source 1..5419: mol_type = other RNA
aggaaataagagagaaaagaagagtaagaagaaatataagagccaccatggcccctaagaagaagcgtaaagtgagccgggtgaacggcagcggcagcggcggcggcatgaaccacgaccaggagttcgacccccctaaggtgtaccctcccgtccccgccgagaagagaaagcccatccgggtcctgagcctgttcgatggcatcgccaccggtctgctggtgctgaaggacctgggcatccaggtggataggtacattgcctccgaggtgtgcgaggactccatcaccgtgggaatggtgcgtcatcagggcaagatcatgtacgtgggcgacgtgcggagcgtgacacagaagcatatccaggagtggggccctttcgacctggtgatcggcggcagcccttgcaatgacctgagcatcgtgaacccagcccggaagggcctgtacgagggaaccggcagactgttcttcgagttttacagactgctgcacgacgcccggcctaaggaaggcgacgaccggcccttcttttggctgttcgagaatgtggtggccatgggagtcagcgacaagcgggatattagccggttcctggagagcaaccccgtgatgatcgatgccaaggaagtgagcgccgcccaccgggccagatacttctggggcaatctgcctggcatgaacagacccctggccagcaccgtgaacgacaagctggagctgcaggagtgcctggagcacggccggatcgccaagttcagcaaggtgagaaccatcaccacccgaagcaacagcatcaaacaaggcaaggaccagcactttcctgtgttcatgaacgagaaggaggacatcctgtggtgtaccgagatggagagagtgttcgggttcccagtccactacacagatgtcagcaacatgtctagactggccagacagagactgctgggaagaagctggtccgtccctgtgatcagacacctgttcgcccctctgaaggagtacttcgcctgcgtgagcagcggcaacagcaacgccaacagccggggccccagcttctctagcggcctggtgccactgtccctgagagggagccacatgggccccatggagatctacaaaaccgtgagcgcctggaagcggcagcctgtgcgcgtgctgagcctgtttcggaatatcgataaagtcctgaaaagcctgggattcctggagagcggctctggctccggcggtggcaccctgaagtacgtggaggatgtgacaaacgtggtcagacgggatgtggagaagtggggccccttcgatctggtgtacggcagcacccaacccctgggcagctcttgtgaccggtgccctggctggtacatgtttcagttccaccggatcctgcagtacgccctgccgagacaggagtcccagcggccattcttttggattttcatggacaacttgctgctgaccgaggatgaccaggaaactaccactcggttcctgcagaccgaagccgtgaccctgcaggacgtgagaggccgggactaccagaacgccatgcgggtgtggtccaacatccctggactgaaaagcaagcacgcacctctgacccctaaagaagaggagtacctgcaggcccaggtgcggagcagaagcaagctggacgcccctaaggtggatctgctggtgaagaattgcctcctgcccctgagagagtacttcaagtatttcagccagaatagtctgcccctgggcggcccaagcagcggcgcccctcctcccagcggcggcagcccagccggctccccaacctctaccgaggagggcacctctgagtccgccacccccgagagcggccctggcacctccaccgagcccagcgagggcagcgcacccggcagccctgccggcagccccacctccacagaggagggaaccagcaccgagcccagcgaaggcagcgccccaggcaccagcaccgagcctagtgagggcggctctggcggcggcagcgcccaggagattaaacggatcaacaagatcagaagaagacttgtgaaagacagcaacaccaagaaggccggcaagacaggccccatgaaaaccctgctggttagagtgatgacacccgatctgagagagcggctggaaaacctgagaaagaagcctgaaaatatcccccagcccatcagcaatacatctagagccaacctgaataagctgctgaccgattacaccgaaatgaagaaggcgatcctgcatgtgtactgggaagagttccagaaggaccctgtgggcctgatgagccgggtggcccagcctgccagcaagaagatcgatcagaacaagctgaaacctgagatggacgagaagggcaacctgaccaccgccggctttgcctgctctcagtgtggccagcccctgttcgtgtacaagctggagcaggtgtctgagaagggcaaggcttacaccaactacttcggacggtgcaatgtggccgagcacgaaaagctgatcctgctggcccagctgaagcccgagaaggatagcgacgaagccgtgacatatagcctgggaaagtttgggcagagggccctggatttctacagcattcatgtgaccaaggagtccacccaccccgtgaagcccctggcccagatcgccggaaacagatacgcctccggacctgtgggaaaggccctgagcgacgcatgtatgggcacaatcgcctccttcctgtctaagtaccaggacatcatcatcgaacaccagaaggtggtgaagggcaaccagaagagactggagagcctgcgggagctggccggcaaggaaaacctggaataccctagcgtgaccctgccacctcagcctcacaccaaggagggcgttgatgcctacaacgaagtgatcgcccgggtgcgaatgtgggtgaacctgaacctgtggcagaagctgaagctaagcagagatgatgccaagcctctgctgagactgaagggattcccttcctttcctctggtcgagagacaggccaacgaagtggactggtgggacatggtgtgtaacgtgaagaagctgatcaacgagaaaaaggaggatggcaaggtgttttggcagaatctggctggctacaagagacaggaagccctgagaccatacctgagcagcgaggaagatcggaagaagggaaagaaattcgctcggtaccagctgggcgacctgctgctgcacctggaaaagaagcacggcgaggactggggaaaggtgtacgacgaggcctgggagcggattgacaagaaagtggaaggcctgagcaagcacatcaagctggaagaggaacggagaagcgaggacgcccagagcaaggccgccctgaccgactggctgcgggctaaggccagcttcgtgatcgagggcctgaaggaggccgacaaggacgagttctgcagatgcgagctgaagctgcagaagtggtacggggacctgcggggaaagcccttcgccatcgaagccgagaacagcatcctggacatcagcggcttcagcaagcagtacaactgtgccttcatctggcagaaggacggcgtgaagaagctgaacctgtacctgatcatcaactacttcaagggcggcaagctgcggttcaagaagatcaaacctgaagccttcgaagccaacagattctacaccgtgatcaacaaaaagagcggcgagatcgtgcccatggaggtgaacttcaacttcgacgaccccaacctgatcatcctgcctctggcctttggcaagagacagggcagagaattcatctggaacgacctgctgtccctggaaaccggcagcctgaagctggccaacggaagagtgatcgagaagacactgtacaacagaagaacccggcaggatgagcctgccctgttcgtggccctgaccttcgagcggcgggaggtcctggactcctccaatatcaaaccaatgaacctgatcggcgtggcaagaggcgaaaacatccccgccgtgatcgccctgaccgaccccgagggctgcccactgagccggtttaaggatagcctgggaaacccaacccacatcctgagaatcggcgagagctataaggagaagcagcggaccatccaggccaagaaggaggtggagcagcggagagccggcggctacagccggaagtacgccagcaaagccaagaatctggcagacgatatggtgagaaacaccgctagagatctgctgtactacgccgtgacccaggatgccatgctgatcttcgccaacctgagccggggcttcggccggcagggcaagcggaccttcatggccgagagacagtacacacggatggaggactggctgaccgccaagctggcctacgagggcctgagcaagacctacctgtccaagacactggcccagtacacctccaagacatgcagcaactgtgggtttaccatcaccagcgccgactacgacagggtgctggagaagctgaagaagacagcaacaggctggatgaccacaattaacggcaaggagctgaaggtggagggccagattacctactacaacagatacaagagacagaacgtagtcaaggacctgtccgtcgagctggatagactgagcgaagaatctgtgaacaacgacatctcctcctggacaaagggcagaagcggagaagctctgagcctcctgaagaaaagattctcccatagacccgtgcaggagaagttcgtgtgcctgaactgcggcttcgagacacacgcagccgagcaagccgccctgaacatcgccagatcctggctgttcctgcggagccaggagtacaagaaataccagacaaacaagacaaccggcaacaccgataagagagccttcgtcgagacctggcagtccttttaccggaagaagcttaaggaggtgtggaaacctgccgtgcggtctggcggatctggcggaggctccacaagcagggagcccgcccaggtgctggtggccgccgagagcctgatcgacaacgaggagggctacgtgaccttcgaggacgtggccgtgtacttcagccaggaggagtggaggctgctggacgaggcccagaggctgctgtacaggaacgtgatgctggagaacttcagcctgatggccagcctgggcctggccagcagcaagacccacgagatcacccagctggagagctgggaggagcccttcgtgaccagccccaagaaaaagagaaaagtctaagctgccttctgcggggcttgccttctggccatgcccttcttctctcccttgcacctgtacctcttggtctttgaataaagcctgagtaggaaggctagcaaaaaaaaaaaaaaaaaaaaaaaaaaaaaaaaaaaaaaaaaaaaaaaaaaaaaaaaaaaaaaaaaaaaaaaaaaaaaaaa

SEQ ID NO: 4002 - RNA, 5419 nt, synthetic construct
  source 1..5419: mol_type = other RNA
aggaaataagagagaaaagaagagtaagaagaaatataagagccaccatggcccctaagaagaagcgtaaagtgagccgggtgaacggcagcggcagcggcggcggcatgaaccacgaccaggagttcgacccccctaaggtgtaccctcccgtccccgccgagaagagaaagcccatccgggtcctgagcctgttcgatggcatcgccaccggtctgctggtgctgaaggacctgggcatccaggtggataggtacattgcctccgaggtgtgcgaggactccatcaccgtgggaatggtgcgtcatcagggcaagatcatgtacgtgggcgacgtgcggagcgtgacacagaagcatatccaggagtggggccctttcgacctggtgatcggcggcagcccttgcaatgacctgagcatcgtgaacccagcccggaagggcctgtacgagggaaccggcagactgttcttcgagttttacagactgctgcacgacgcccggcctaaggaaggcgacgaccggcccttcttttggctgttcgagaatgtggtggccatgggagtcagcgacaagcgggatattagccggttcctggagagcaaccccgtgatgatcgatgccaaggaagtgagcgccgcccaccgggccagatacttctggggcaatctgcctggcatgaacagacccctggccagcaccgtgaacgacaagctggagctgcaggagtgcctggagcacggccggatcgccaagttcagcaaggtgagaaccatcaccacccgaagcaacagcatcaaacaaggcaaggaccagcactttcctgtgttcatgaacgagaaggaggacatcctgtggtgtaccgagatggagagagtgttcgggttcccagtccactacacagatgtcagcaacatgtctagactggccagacagagactgctgggaagaagctggtccgtccctgtgatcagacacctgttcgcccctctgaaggagtacttcgcctgcgtgagcagcggcaacagcaacgccaacagccggggccccagcttctctagcggcctggtgccactgtccctgagagggagccacatgggccccatggagatctacaaaaccgtgagcgcctggaagcggcagcctgtgcgcgtgctgagcctgtttcggaatatcgataaagtcctgaaaagcctgggattcctggagagcggctctggctccggcggtggcaccctgaagtacgtggaggatgtgacaaacgtggtcagacgggatgtggagaagtggggccccttcgatctggtgtacggcagcacccaacccctgggcagctcttgtgaccggtgccctggctggtacatgtttcagttccaccggatcctgcagtacgccctgccgagacaggagtcccagcggccattcttttggattttcatggacaacttgctgctgaccgaggatgaccaggaaactaccactcggttcctgcagaccgaagccgtgaccctgcaggacgtgagaggccgggactaccagaacgccatgcgggtgtggtccaacatccctggactgaaaagcaagcacgcacctctgacccctaaagaagaggagtacctgcaggcccaggtgcggagcagaagcaagctggacgcccctaaggtggatctgctggtgaagaattgcctcctgcccctgagagagtacttcaagtatttcagccagaatagtctgcccctgggcggcccaagcagcggcgcccctcctcccagcggcggcagcccagccggctccccaacctctaccgaggagggcacctctgagtccgccacccccgagagcggccctggcacctccaccgagcccagcgagggcagcgcacccggcagccctgccggcagccccacctccacagaggagggaaccagcaccgagcccagcgaaggcagcgccccaggcaccagcaccgagcctagtgagggcggctctggcggcggcagcgcccaggagattaaacggatcaacaagatcagaagaagacttgtgaaagacagcaacaccaagaaggccggcaagacaggccccatgaaaaccctgctggttagagtgatgacacccgatctgagagagcggctggaaaacctgagaaagaagcctgaaaatatcccccagcccatcagcaatacatctagagccaacctgaataagctgctgaccgattacaccgaaatgaagaaggcgatcctgcatgtgtactgggaagagttccagaaggaccctgtgggcctgatgagccgggtggcccagcctgccagcaagaagatcgatcagaacaagctgaaacctgagatggacgagaagggcaacctgaccaccgccggctttgcctgctctcagtgtggccagcccctgttcgtgtacaagctggagcaggtgtctgagaagggcaaggcttacaccaactacttcggacggtgcaatgtggccgagcacgaaaagctgatcctgctggcccagctgaagcccgagaaggatagcgacgaagccgtgacatatagcctgggaaagtttgggcagagggccctggatttctacagcattcatgtgaccaaggagtccacccaccccgtgaagcccctggcccagatcgccggaaacagatacgcctccggacctgtgggaaaggccctgagcgacgcatgtatgggcacaatcgcctccttcctgtctaagtaccaggacatcatcatcgaacaccagaaggtggtgaagggcaaccagaagagactggagagcctgcgggagctggccggcaaggaaaacctggaataccctagcgtgaccctgccacctcagcctcacaccaaggagggcgttgatgcctacaacgaagtgatcgcccgggtgcgaatgtgggtgaacctgaacctgtggcagaagctgaagctaagcagagatgatgccaagcctctgctgagactgaagggattcccttcctttcctctggtcgagagacaggccaacgaagtggactggtgggacatggtgtgtaacgtgaagaagctgatcaacgagaaaaaggaggatggcaaggtgttttggcagaatctggctggctacaagagacaggaagccctgagaccatacctgagcagcgaggaagatcggaagaagggaaagaaattcgctcggtaccagctgggcgacctgctgctgcacctggaaaagaagcacggcgaggactggggaaaggtgtacgacgaggcctgggagcggattgacaagaaagtggaaggcctgagcaagcacatcaagctggaagaggaacggagaagcgaggacgcccagagcaaggccgccctgaccgactggctgcgggctaaggccagcttcgtgatcgagggcctgaaggaggccgacaaggacgagttctgcagatgcgagctgaagctgcagaagtggtacggggacctgcggggaaagcccttcgccatcgaagccgagaacagcatcctggacatcagcggcttcagcaagcagtacaactgtgccttcatctggcagaaggacggcgtgaagaagctgaacctgtacctgatcatcaactacttcaagggcggcaagctgcggttcaagaagatcaaacctgaagccttcgaagccaacagattctacaccgtgatcaacaaaaagagcggcgagatcgtgcccatggaggtgaacttcaacttcgacgaccccaacctgatcatcctgcctctggcctttggcaagagacagggcagagaattcatctggaacgacctgctgtccctggaaaccggcagcctgaagctggccaacggaagagtgatcgagaagacactgtacaacagaagaacccggcaggatgagcctgccctgttcgtggccctgaccttcgagcggcgggaggtcctggactcctccaatatcaaaccaatgaacctgatcggcgtggcaagaggcgaaaacatccccgccgtgatcgccctgaccgaccccgagggctgcccactgagccggtttaaggatagcctgggaaacccaacccacatcctgagaatcggcgagagctataaggagaagcagcggaccatccaggccaagaaggaggtggagcagcggagagccggcggctacagccggaagtacgccagcaaagccaagaatctggcagacgatatggtgagaaacaccgctagagatctgctgtactacgccgtgacccaggatgccatgctgatcttcgccaacctgagccggggcttcggccggcagggcaagcggaccttcatggccgagagacagtacacacggatggaggactggctgaccgccaagctggcctacgagggcctgagcaagacctacctgtccaagacactggcccagtacacctccaagacatgcagcaactgtgggtttaccatcaccagcgccgactacgacagggtgctggagaagctgaagaagacagcaacaggctggatgaccacaattaacggcaaggagctgaaggtggagggccagattacctactacaacagatacaagagacagaacgtagtcaaggacctgtccgtcgagctggatagactgagcgaagaatctgtgaacaacgacatctcctcctggacaaagggcagaagcggagaagctctgagcctcctgaagaaaagattctcccatagacccgtgcaggagaagttcgtgtgcctgaactgcggcttcgagacacacgcagccgagcaagccgccctgaacatcgccagatcctggctgttcctgcggagccaggagtacaagaaataccagacaaacaagacaaccggcaacaccgataagagagccttcgtcgagacctggcagtccttttaccggaagaagcttaaggaggtgtggaaacctgccgtgcggtctggcggatctggcggaggctccacaagcttccaggccagcgtggtgttcgaggacgtggccgtgaagttcacccccgaggagtgggccctgctggacaggggccagaggaagctgtacagggacgtgatgctggagacctgcaggaacctgagcagcgtggagaagcagaagttccacagcaacggcgacctgaccaggatgcaggagggcctgctgaggagccccctggtggagagcgtgtgcgagaggatcgagggcgaccagtgcggcaccagccccaagaaaaagagaaaagtctaagctgccttctgcggggcttgccttctggccatgcccttcttctctcccttgcacctgtacctcttggtctttgaataaagcctgagtaggaaggctagcaaaaaaaaaaaaaaaaaaaaaaaaaaaaaaaaaaaaaaaaaaaaaaaaaaaaaaaaaaaaaaaaaaaaaaaaaaaaaaaa

SEQ ID NO: 4003 - RNA, 5419 nt, synthetic construct
  source 1..5419: mol_type = other RNA
aggaaataagagagaaaagaagagtaagaagaaatataagagccaccatggcccctaagaagaagcgtaaagtgagccgggtgaacggcagcggcagcggcggcggcatgaaccacgaccaggagttcgacccccctaaggtgtaccctcccgtccccgccgagaagagaaagcccatccgggtcctgagcctgttcgatggcatcgccaccggtctgctggtgctgaaggacctgggcatccaggtggataggtacattgcctccgaggtgtgcgaggactccatcaccgtgggaatggtgcgtcatcagggcaagatcatgtacgtgggcgacgtgcggagcgtgacacagaagcatatccaggagtggggccctttcgacctggtgatcggcggcagcccttgcaatgacctgagcatcgtgaacccagcccggaagggcctgtacgagggaaccggcagactgttcttcgagttttacagactgctgcacgacgcccggcctaaggaaggcgacgaccggcccttcttttggctgttcgagaatgtggtggccatgggagtcagcgacaagcgggatattagccggttcctggagagcaaccccgtgatgatcgatgccaaggaagtgagcgccgcccaccgggccagatacttctggggcaatctgcctggcatgaacagacccctggccagcaccgtgaacgacaagctggagctgcaggagtgcctggagcacggccggatcgccaagttcagcaaggtgagaaccatcaccacccgaagcaacagcatcaaacaaggcaaggaccagcactttcctgtgttcatgaacgagaaggaggacatcctgtggtgtaccgagatggagagagtgttcgggttcccagtccactacacagatgtcagcaacatgtctagactggccagacagagactgctgggaagaagctggtccgtccctgtgatcagacacctgttcgcccctctgaaggagtacttcgcctgcgtgagcagcggcaacagcaacgccaacagccggggccccagcttctctagcggcctggtgccactgtccctgagagggagccacatgggccccatggagatctacaaaaccgtgagcgcctggaagcggcagcctgtgcgcgtgctgagcctgtttcggaatatcgataaagtcctgaaaagcctgggattcctggagagcggctctggctccggcggtggcaccctgaagtacgtggaggatgtgacaaacgtggtcagacgggatgtggagaagtggggccccttcgatctggtgtacggcagcacccaacccctgggcagctcttgtgaccggtgccctggctggtacatgtttcagttccaccggatcctgcagtacgccctgccgagacaggagtcccagcggccattcttttggattttcatggacaacttgctgctgaccgaggatgaccaggaaactaccactcggttcctgcagaccgaagccgtgaccctgcaggacgtgagaggccgggactaccagaacgccatgcgggtgtggtccaacatccctggactgaaaagcaagcacgcacctctgacccctaaagaagaggagtacctgcaggcccaggtgcggagcagaagcaagctggacgcccctaaggtggatctgctggtgaagaattgcctcctgcccctgagagagtacttcaagtatttcagccagaatagtctgcccctgggcggcccaagcagcggcgcccctcctcccagcggcggcagcccagccggctccccaacctctaccgaggagggcacctctgagtccgccacccccgagagcggccctggcacctccaccgagcccagcgagggcagcgcacccggcagccctgccggcagccccacctccacagaggagggaaccagcaccgagcccagcgaaggcagcgccccaggcaccagcaccgagcctagtgagggcggctctggcggcggcagcgcccaggagattaaacggatcaacaagatcagaagaagacttgtgaaagacagcaacaccaagaaggccggcaagacaggccccatgaaaaccctgctggttagagtgatgacacccgatctgagagagcggctggaaaacctgagaaagaagcctgaaaatatcccccagcccatcagcaatacatctagagccaacctgaataagctgctgaccgattacaccgaaatgaagaaggcgatcctgcatgtgtactgggaagagttccagaaggaccctgtgggcctgatgagccgggtggcccagcctgccagcaagaagatcgatcagaacaagctgaaacctgagatggacgagaagggcaacctgaccaccgccggctttgcctgctctcagtgtggccagcccctgttcgtgtacaagctggagcaggtgtctgagaagggcaaggcttacaccaactacttcggacggtgcaatgtggccgagcacgaaaagctgatcctgctggcccagctgaagcccgagaaggatagcgacgaagccgtgacatatagcctgggaaagtttgggcagagggccctggatttctacagcattcatgtgaccaaggagtccacccaccccgtgaagcccctggcccagatcgccggaaacagatacgcctccggacctgtgggaaaggccctgagcgacgcatgtatgggcacaatcgcctccttcctgtctaagtaccaggacatcatcatcgaacaccagaaggtggtgaagggcaaccagaagagactggagagcctgcgggagctggccggcaaggaaaacctggaataccctagcgtgaccctgccacctcagcctcacaccaaggagggcgttgatgcctacaacgaagtgatcgcccgggtgcgaatgtgggtgaacctgaacctgtggcagaagctgaagctaagcagagatgatgccaagcctctgctgagactgaagggattcccttcctttcctctggtcgagagacaggccaacgaagtggactggtgggacatggtgtgtaacgtgaagaagctgatcaacgagaaaaaggaggatggcaaggtgttttggcagaatctggctggctacaagagacaggaagccctgagaccatacctgagcagcgaggaagatcggaagaagggaaagaaattcgctcggtaccagctgggcgacctgctgctgcacctggaaaagaagcacggcgaggactggggaaaggtgtacgacgaggcctgggagcggattgacaagaaagtggaaggcctgagcaagcacatcaagctggaagaggaacggagaagcgaggacgcccagagcaaggccgccctgaccgactggctgcgggctaaggccagcttcgtgatcgagggcctgaaggaggccgacaaggacgagttctgcagatgcgagctgaagctgcagaagtggtacggggacctgcggggaaagcccttcgccatcgaagccgagaacagcatcctggacatcagcggcttcagcaagcagtacaactgtgccttcatctggcagaaggacggcgtgaagaagctgaacctgtacctgatcatcaactacttcaagggcggcaagctgcggttcaagaagatcaaacctgaagccttcgaagccaacagattctacaccgtgatcaacaaaaagagcggcgagatcgtgcccatggaggtgaacttcaacttcgacgaccccaacctgatcatcctgcctctggcctttggcaagagacagggcagagaattcatctggaacgacctgctgtccctggaaaccggcagcctgaagctggccaacggaagagtgatcgagaagacactgtacaacagaagaacccggcaggatgagcctgccctgttcgtggccctgaccttcgagcggcgggaggtcctggactcctccaatatcaaaccaatgaacctgatcggcgtggcaagaggcgaaaacatccccgccgtgatcgccctgaccgaccccgagggctgcccactgagccggtttaaggatagcctgggaaacccaacccacatcctgagaatcggcgagagctataaggagaagcagcggaccatccaggccaagaaggaggtggagcagcggagagccggcggctacagccggaagtacgccagcaaagccaagaatctggcagacgatatggtgagaaacaccgctagagatctgctgtactacgccgtgacccaggatgccatgctgatcttcgccaacctgagccggggcttcggccggcagggcaagcggaccttcatggccgagagacagtacacacggatggaggactggctgaccgccaagctggcctacgagggcctgagcaagacctacctgtccaagacactggcccagtacacctccaagacatgcagcaactgtgggtttaccatcaccagcgccgactacgacagggtgctggagaagctgaagaagacagcaacaggctggatgaccacaattaacggcaaggagctgaaggtggagggccagattacctactacaacagatacaagagacagaacgtagtcaaggacctgtccgtcgagctggatagactgagcgaagaatctgtgaacaacgacatctcctcctggacaaagggcagaagcggagaagctctgagcctcctgaagaaaagattctcccatagacccgtgcaggagaagttcgtgtgcctgaactgcggcttcgagacacacgcagccgagcaagccgccctgaacatcgccagatcctggctgttcctgcggagccaggagtacaagaaataccagacaaacaagacaaccggcaacaccgataagagagccttcgtcgagacctggcagtccttttaccggaagaagcttaaggaggtgtggaaacctgccgtgcggtctggcggatctggcggaggctccacaagccagtgcctgctgaccttcaaggacgtgttcctggacttcagcagcgaggagtgggagtgcctgaacttcgcccagaggaccctgtacatggacgtgatgctggagaactacaacaacctgctgttcgtggagaaccactgcatctgcggcaactacgagaaggagaaggtgctggagcaggacacccagcacatcgtgaacgagcacggccacaacaggaagaagagcagcaagtgcaacgagaccagccccaagaaaaagagaaaagtctaagctgccttctgcggggcttgccttctggccatgcccttcttctctcccttgcacctgtacctcttggtctttgaataaagcctgagtaggaaggctagcaaaaaaaaaaaaaaaaaaaaaaaaaaaaaaaaaaaaaaaaaaaaaaaaaaaaaaaaaaaaaaaaaaaaaaaaaaaaaaaa

SEQ ID NO: 4004 - RNA, 5419 nt, synthetic construct
  source 1..5419: mol_type = other RNA
aggaaataagagagaaaagaagagtaagaagaaatataagagccaccatggcccctaagaagaagcgtaaagtgagccgggtgaacggcagcggcagcggcggcggcatgaaccacgaccaggagttcgacccccctaaggtgtaccctcccgtccccgccgagaagagaaagcccatccgggtcctgagcctgttcgatggcatcgccaccggtctgctggtgctgaaggacctgggcatccaggtggataggtacattgcctccgaggtgtgcgaggactccatcaccgtgggaatggtgcgtcatcagggcaagatcatgtacgtgggcgacgtgcggagcgtgacacagaagcatatccaggagtggggccctttcgacctggtgatcggcggcagcccttgcaatgacctgagcatcgtgaacccagcccggaagggcctgtacgagggaaccggcagactgttcttcgagttttacagactgctgcacgacgcccggcctaaggaaggcgacgaccggcccttcttttggctgttcgagaatgtggtggccatgggagtcagcgacaagcgggatattagccggttcctggagagcaaccccgtgatgatcgatgccaaggaagtgagcgccgcccaccgggccagatacttctggggcaatctgcctggcatgaacagacccctggccagcaccgtgaacgacaagctggagctgcaggagtgcctggagcacggccggatcgccaagttcagcaaggtgagaaccatcaccacccgaagcaacagcatcaaacaaggcaaggaccagcactttcctgtgttcatgaacgagaaggaggacatcctgtggtgtaccgagatggagagagtgttcgggttcccagtccactacacagatgtcagcaacatgtctagactggccagacagagactgctgggaagaagctggtccgtccctgtgatcagacacctgttcgcccctctgaaggagtacttcgcctgcgtgagcagcggcaacagcaacgccaacagccggggccccagcttctctagcggcctggtgccactgtccctgagagggagccacatgggccccatggagatctacaaaaccgtgagcgcctggaagcggcagcctgtgcgcgtgctgagcctgtttcggaatatcgataaagtcctgaaaagcctgggattcctggagagcggctctggctccggcggtggcaccctgaagtacgtggaggatgtgacaaacgtggtcagacgggatgtggagaagtggggccccttcgatctggtgtacggcagcacccaacccctgggcagctcttgtgaccggtgccctggctggtacatgtttcagttccaccggatcctgcagtacgccctgccgagacaggagtcccagcggccattcttttggattttcatggacaacttgctgctgaccgaggatgaccaggaaactaccactcggttcctgcagaccgaagccgtgaccctgcaggacgtgagaggccgggactaccagaacgccatgcgggtgtggtccaacatccctggactgaaaagcaagcacgcacctctgacccctaaagaagaggagtacctgcaggcccaggtgcggagcagaagcaagctggacgcccctaaggtggatctgctggtgaagaattgcctcctgcccctgagagagtacttcaagtatttcagccagaatagtctgcccctgggcggcccaagcagcggcgcccctcctcccagcggcggcagcccagccggctccccaacctctaccgaggagggcacctctgagtccgccacccccgagagcggccctggcacctccaccgagcccagcgagggcagcgcacccggcagccctgccggcagccccacctccacagaggagggaaccagcaccgagcccagcgaaggcagcgccccaggcaccagcaccgagcctagtgagggcggctctggcggcggcagcgcccaggagattaaacggatcaacaagatcagaagaagacttgtgaaagacagcaacaccaagaaggccggcaagacaggccccatgaaaaccctgctggttagagtgatgacacccgatctgagagagcggctggaaaacctgagaaagaagcctgaaaatatcccccagcccatcagcaatacatctagagccaacctgaataagctgctgaccgattacaccgaaatgaagaaggcgatcctgcatgtgtactgggaagagttccagaaggaccctgtgggcctgatgagccgggtggcccagcctgccagcaagaagatcgatcagaacaagctgaaacctgagatggacgagaagggcaacctgaccaccgccggctttgcctgctctcagtgtggccagcccctgttcgtgtacaagctggagcaggtgtctgagaagggcaaggcttacaccaactacttcggacggtgcaatgtggccgagcacgaaaagctgatcctgctggcccagctgaagcccgagaaggatagcgacgaagccgtgacatatagcctgggaaagtttgggcagagggccctggatttctacagcattcatgtgaccaaggagtccacccaccccgtgaagcccctggcccagatcgccggaaacagatacgcctccggacctgtgggaaaggccctgagcgacgcatgtatgggcacaatcgcctccttcctgtctaagtaccaggacatcatcatcgaacaccagaaggtggtgaagggcaaccagaagagactggagagcctgcgggagctggccggcaaggaaaacctggaataccctagcgtgaccctgccacctcagcctcacaccaaggagggcgttgatgcctacaacgaagtgatcgcccgggtgcgaatgtgggtgaacctgaacctgtggcagaagctgaagctaagcagagatgatgccaagcctctgctgagactgaagggattcccttcctttcctctggtcgagagacaggccaacgaagtggactggtgggacatggtgtgtaacgtgaagaagctgatcaacgagaaaaaggaggatggcaaggtgttttggcagaatctggctggctacaagagacaggaagccctgagaccatacctgagcagcgaggaagatcggaagaagggaaagaaattcgctcggtaccagctgggcgacctgctgctgcacctggaaaagaagcacggcgaggactggggaaaggtgtacgacgaggcctgggagcggattgacaagaaagtggaaggcctgagcaagcacatcaagctggaagaggaacggagaagcgaggacgcccagagcaaggccgccctgaccgactggctgcgggctaaggccagcttcgtgatcgagggcctgaaggaggccgacaaggacgagttctgcagatgcgagctgaagctgcagaagtggtacggggacctgcggggaaagcccttcgccatcgaagccgagaacagcatcctggacatcagcggcttcagcaagcagtacaactgtgccttcatctggcagaaggacggcgtgaagaagctgaacctgtacctgatcatcaactacttcaagggcggcaagctgcggttcaagaagatcaaacctgaagccttcgaagccaacagattctacaccgtgatcaacaaaaagagcggcgagatcgtgcccatggaggtgaacttcaacttcgacgaccccaacctgatcatcctgcctctggcctttggcaagagacagggcagagaattcatctggaacgacctgctgtccctggaaaccggcagcctgaagctggccaacggaagagtgatcgagaagacactgtacaacagaagaacccggcaggatgagcctgccctgttcgtggccctgaccttcgagcggcgggaggtcctggactcctccaatatcaaaccaatgaacctgatcggcgtggcaagaggcgaaaacatccccgccgtgatcgccctgaccgaccccgagggctgcccactgagccggtttaaggatagcctgggaaacccaacccacatcctgagaatcggcgagagctataaggagaagcagcggaccatccaggccaagaaggaggtggagcagcggagagccggcggctacagccggaagtacgccagcaaagccaagaatctggcagacgatatggtgagaaacaccgctagagatctgctgtactacgccgtgacccaggatgccatgctgatcttcgccaacctgagccggggcttcggccggcagggcaagcggaccttcatggccgagagacagtacacacggatggaggactggctgaccgccaagctggcctacgagggcctgagcaagacctacctgtccaagacactggcccagtacacctccaagacatgcagcaactgtgggtttaccatcaccagcgccgactacgacagggtgctggagaagctgaagaagacagcaacaggctggatgaccacaattaacggcaaggagctgaaggtggagggccagattacctactacaacagatacaagagacagaacgtagtcaaggacctgtccgtcgagctggatagactgagcgaagaatctgtgaacaacgacatctcctcctggacaaagggcagaagcggagaagctctgagcctcctgaagaaaagattctcccatagacccgtgcaggagaagttcgtgtgcctgaactgcggcttcgagacacacgcagccgagcaagccgccctgaacatcgccagatcctggctgttcctgcggagccaggagtacaagaaataccagacaaacaagacaaccggcaacaccgataagagagccttcgtcgagacctggcagtccttttaccggaagaagcttaaggaggtgtggaaacctgccgtgcggtctggcggatctggcggaggctccacaagcagccaggccagcgtgagcttcaaggacgtgaccatcgagttcacccaggaggagtggcagcagatggcccccgtgcagaagaacctgtacagggacgtgatgctggagaactacagcaacctggtgagcgtgggctactgctgcttcaagcccgaggtgatcttcaagctggagcagggcgaggagccctggttcagcgaggaggagttcagcaaccagagccaccccaaggactacaggggcaccagccccaagaaaaagagaaaagtctaagctgccttctgcggggcttgccttctggccatgcccttcttctctcccttgcacctgtacctcttggtctttgaataaagcctgagtaggaaggctagcaaaaaaaaaaaaaaaaaaaaaaaaaaaaaaaaaaaaaaaaaaaaaaaaaaaaaaaaaaaaaaaaaaaaaaaaaaaaaaaa

SEQ ID NO: 4005 - RNA, 5419 nt, synthetic construct
  source 1..5419: mol_type = other RNA
aggaaataagagagaaaagaagagtaagaagaaatataagagccaccatggcccctaagaagaagcgtaaagtgagccgggtgaacggcagcggcagcggcggcggcatgaaccacgaccaggagttcgacccccctaaggtgtaccctcccgtccccgccgagaagagaaagcccatccgggtcctgagcctgttcgatggcatcgccaccggtctgctggtgctgaaggacctgggcatccaggtggataggtacattgcctccgaggtgtgcgaggactccatcaccgtgggaatggtgcgtcatcagggcaagatcatgtacgtgggcgacgtgcggagcgtgacacagaagcatatccaggagtggggccctttcgacctggtgatcggcggcagcccttgcaatgacctgagcatcgtgaacccagcccggaagggcctgtacgagggaaccggcagactgttcttcgagttttacagactgctgcacgacgcccggcctaaggaaggcgacgaccggcccttcttttggctgttcgagaatgtggtggccatgggagtcagcgacaagcgggatattagccggttcctggagagcaaccccgtgatgatcgatgccaaggaagtgagcgccgcccaccgggccagatacttctggggcaatctgcctggcatgaacagacccctggccagcaccgtgaacgacaagctggagctgcaggagtgcctggagcacggccggatcgccaagttcagcaaggtgagaaccatcaccacccgaagcaacagcatcaaacaaggcaaggaccagcactttcctgtgttcatgaacgagaaggaggacatcctgtggtgtaccgagatggagagagtgttcgggttcccagtccactacacagatgtcagcaacatgtctagactggccagacagagactgctgggaagaagctggtccgtccctgtgatcagacacctgttcgcccctctgaaggagtacttcgcctgcgtgagcagcggcaacagcaacgccaacagccggggccccagcttctctagcggcctggtgccactgtccctgagagggagccacatgggccccatggagatctacaaaaccgtgagcgcctggaagcggcagcctgtgcgcgtgctgagcctgtttcggaatatcgataaagtcctgaaaagcctgggattcctggagagcggctctggctccggcggtggcaccctgaagtacgtggaggatgtgacaaacgtggtcagacgggatgtggagaagtggggccccttcgatctggtgtacggcagcacccaacccctgggcagctcttgtgaccggtgccctggctggtacatgtttcagttccaccggatcctgcagtacgccctgccgagacaggagtcccagcggccattcttttggattttcatggacaacttgctgctgaccgaggatgaccaggaaactaccactcggttcctgcagaccgaagccgtgaccctgcaggacgtgagaggccgggactaccagaacgccatgcgggtgtggtccaacatccctggactgaaaagcaagcacgcacctctgacccctaaagaagaggagtacctgcaggcccaggtgcggagcagaagcaagctggacgcccctaaggtggatctgctggtgaagaattgcctcctgcccctgagagagtacttcaagtatttcagccagaatagtctgcccctgggcggcccaagcagcggcgcccctcctcccagcggcggcagcccagccggctccccaacctctaccgaggagggcacctctgagtccgccacccccgagagcggccctggcacctccaccgagcccagcgagggcagcgcacccggcagccctgccggcagccccacctccacagaggagggaaccagcaccgagcccagcgaaggcagcgccccaggcaccagcaccgagcctagtgagggcggctctggcggcggcagcgcccaggagattaaacggatcaacaagatcagaagaagacttgtgaaagacagcaacaccaagaaggccggcaagacaggccccatgaaaaccctgctggttagagtgatgacacccgatctgagagagcggctggaaaacctgagaaagaagcctgaaaatatcccccagcccatcagcaatacatctagagccaacctgaataagctgctgaccgattacaccgaaatgaagaaggcgatcctgcatgtgtactgggaagagttccagaaggaccctgtgggcctgatgagccgggtggcccagcctgccagcaagaagatcgatcagaacaagctgaaacctgagatggacgagaagggcaacctgaccaccgccggctttgcctgctctcagtgtggccagcccctgttcgtgtacaagctggagcaggtgtctgagaagggcaaggcttacaccaactacttcggacggtgcaatgtggccgagcacgaaaagctgatcctgctggcccagctgaagcccgagaaggatagcgacgaagccgtgacatatagcctgggaaagtttgggcagagggccctggatttctacagcattcatgtgaccaaggagtccacccaccccgtgaagcccctggcccagatcgccggaaacagatacgcctccggacctgtgggaaaggccctgagcgacgcatgtatgggcacaatcgcctccttcctgtctaagtaccaggacatcatcatcgaacaccagaaggtggtgaagggcaaccagaagagactggagagcctgcgggagctggccggcaaggaaaacctggaataccctagcgtgaccctgccacctcagcctcacaccaaggagggcgttgatgcctacaacgaagtgatcgcccgggtgcgaatgtgggtgaacctgaacctgtggcagaagctgaagctaagcagagatgatgccaagcctctgctgagactgaagggattcccttcctttcctctggtcgagagacaggccaacgaagtggactggtgggacatggtgtgtaacgtgaagaagctgatcaacgagaaaaaggaggatggcaaggtgttttggcagaatctggctggctacaagagacaggaagccctgagaccatacctgagcagcgaggaagatcggaagaagggaaagaaattcgctcggtaccagctgggcgacctgctgctgcacctggaaaagaagcacggcgaggactggggaaaggtgtacgacgaggcctgggagcggattgacaagaaagtggaaggcctgagcaagcacatcaagctggaagaggaacggagaagcgaggacgcccagagcaaggccgccctgaccgactggctgcgggctaaggccagcttcgtgatcgagggcctgaaggaggccgacaaggacgagttctgcagatgcgagctgaagctgcagaagtggtacggggacctgcggggaaagcccttcgccatcgaagccgagaacagcatcctggacatcagcggcttcagcaagcagtacaactgtgccttcatctggcagaaggacggcgtgaagaagctgaacctgtacctgatcatcaactacttcaagggcggcaagctgcggttcaagaagatcaaacctgaagccttcgaagccaacagattctacaccgtgatcaacaaaaagagcggcgagatcgtgcccatggaggtgaacttcaacttcgacgaccccaacctgatcatcctgcctctggcctttggcaagagacagggcagagaattcatctggaacgacctgctgtccctggaaaccggcagcctgaagctggccaacggaagagtgatcgagaagacactgtacaacagaagaacccggcaggatgagcctgccctgttcgtggccctgaccttcgagcggcgggaggtcctggactcctccaatatcaaaccaatgaacctgatcggcgtggcaagaggcgaaaacatccccgccgtgatcgccctgaccgaccccgagggctgcccactgagccggtttaaggatagcctgggaaacccaacccacatcctgagaatcggcgagagctataaggagaagcagcggaccatccaggccaagaaggaggtggagcagcggagagccggcggctacagccggaagtacgccagcaaagccaagaatctggcagacgatatggtgagaaacaccgctagagatctgctgtactacgccgtgacccaggatgccatgctgatcttcgccaacctgagccggggcttcggccggcagggcaagcggaccttcatggccgagagacagtacacacggatggaggactggctgaccgccaagctggcctacgagggcctgagcaagacctacctgtccaagacactggcccagtacacctccaagacatgcagcaactgtgggtttaccatcaccagcgccgactacgacagggtgctggagaagctgaagaagacagcaacaggctggatgaccacaattaacggcaaggagctgaaggtggagggccagattacctactacaacagatacaagagacagaacgtagtcaaggacctgtccgtcgagctggatagactgagcgaagaatctgtgaacaacgacatctcctcctggacaaagggcagaagcggagaagctctgagcctcctgaagaaaagattctcccatagacccgtgcaggagaagttcgtgtgcctgaactgcggcttcgagacacacgcagccgagcaagccgccctgaacatcgccagatcctggctgttcctgcggagccaggagtacaagaaataccagacaaacaagacaaccggcaacaccgataagagagccttcgtcgagacctggcagtccttttaccggaagaagcttaaggaggtgtggaaacctgccgtgcggtctggcggatctggcggaggctccacaagcgtgaaggagagcgtgaccttcaaggacgtggccatcgacttcaccctggaggagtggaggctgatggaccccacccagaggaacctgcacaaggacgtgatgctggagaactacaggaacctggtgagcctgggcctggccgtgagcaagcccgacatgatcagccacctggagaacggcaagggcccctggcccaagcccgccaccaagaacgccaccaggaccaaggacatcagcgaggacaccagccccaagaaaaagagaaaagtctaagctgccttctgcggggcttgccttctggccatgcccttcttctctcccttgcacctgtacctcttggtctttgaataaagcctgagtaggaaggctagcaaaaaaaaaaaaaaaaaaaaaaaaaaaaaaaaaaaaaaaaaaaaaaaaaaaaaaaaaaaaaaaaaaaaaaaaaaaaaaaa

SEQ ID NO: 4006 - RNA, 5419 nt, synthetic construct
  source 1..5419: mol_type = other RNA
aggaaataagagagaaaagaagagtaagaagaaatataagagccaccatggcccctaagaagaagcgtaaagtgagccgggtgaacggcagcggcagcggcggcggcatgaaccacgaccaggagttcgacccccctaaggtgtaccctcccgtccccgccgagaagagaaagcccatccgggtcctgagcctgttcgatggcatcgccaccggtctgctggtgctgaaggacctgggcatccaggtggataggtacattgcctccgaggtgtgcgaggactccatcaccgtgggaatggtgcgtcatcagggcaagatcatgtacgtgggcgacgtgcggagcgtgacacagaagcatatccaggagtggggccctttcgacctggtgatcggcggcagcccttgcaatgacctgagcatcgtgaacccagcccggaagggcctgtacgagggaaccggcagactgttcttcgagttttacagactgctgcacgacgcccggcctaaggaaggcgacgaccggcccttcttttggctgttcgagaatgtggtggccatgggagtcagcgacaagcgggatattagccggttcctggagagcaaccccgtgatgatcgatgccaaggaagtgagcgccgcccaccgggccagatacttctggggcaatctgcctggcatgaacagacccctggccagcaccgtgaacgacaagctggagctgcaggagtgcctggagcacggccggatcgccaagttcagcaaggtgagaaccatcaccacccgaagcaacagcatcaaacaaggcaaggaccagcactttcctgtgttcatgaacgagaaggaggacatcctgtggtgtaccgagatggagagagtgttcgggttcccagtccactacacagatgtcagcaacatgtctagactggccagacagagactgctgggaagaagctggtccgtccctgtgatcagacacctgttcgcccctctgaaggagtacttcgcctgcgtgagcagcggcaacagcaacgccaacagccggggccccagcttctctagcggcctggtgccactgtccctgagagggagccacatgggccccatggagatctacaaaaccgtgagcgcctggaagcggcagcctgtgcgcgtgctgagcctgtttcggaatatcgataaagtcctgaaaagcctgggattcctggagagcggctctggctccggcggtggcaccctgaagtacgtggaggatgtgacaaacgtggtcagacgggatgtggagaagtggggccccttcgatctggtgtacggcagcacccaacccctgggcagctcttgtgaccggtgccctggctggtacatgtttcagttccaccggatcctgcagtacgccctgccgagacaggagtcccagcggccattcttttggattttcatggacaacttgctgctgaccgaggatgaccaggaaactaccactcggttcctgcagaccgaagccgtgaccctgcaggacgtgagaggccgggactaccagaacgccatgcgggtgtggtccaacatccctggactgaaaagcaagcacgcacctctgacccctaaagaagaggagtacctgcaggcccaggtgcggagcagaagcaagctggacgcccctaaggtggatctgctggtgaagaattgcctcctgcccctgagagagtacttcaagtatttcagccagaatagtctgcccctgggcggcccaagcagcggcgcccctcctcccagcggcggcagcccagccggctccccaacctctaccgaggagggcacctctgagtccgccacccccgagagcggccctggcacctccaccgagcccagcgagggcagcgcacccggcagccctgccggcagccccacctccacagaggagggaaccagcaccgagcccagcgaaggcagcgccccaggcaccagcaccgagcctagtgagggcggctctggcggcggcagcgcccaggagattaaacggatcaacaagatcagaagaagacttgtgaaagacagcaacaccaagaaggccggcaagacaggccccatgaaaaccctgctggttagagtgatgacacccgatctgagagagcggctggaaaacctgagaaagaagcctgaaaatatcccccagcccatcagcaatacatctagagccaacctgaataagctgctgaccgattacaccgaaatgaagaaggcgatcctgcatgtgtactgggaagagttccagaaggaccctgtgggcctgatgagccgggtggcccagcctgccagcaagaagatcgatcagaacaagctgaaacctgagatggacgagaagggcaacctgaccaccgccggctttgcctgctctcagtgtggccagcccctgttcgtgtacaagctggagcaggtgtctgagaagggcaaggcttacaccaactacttcggacggtgcaatgtggccgagcacgaaaagctgatcctgctggcccagctgaagcccgagaaggatagcgacgaagccgtgacatatagcctgggaaagtttgggcagagggccctggatttctacagcattcatgtgaccaaggagtccacccaccccgtgaagcccctggcccagatcgccggaaacagatacgcctccggacctgtgggaaaggccctgagcgacgcatgtatgggcacaatcgcctccttcctgtctaagtaccaggacatcatcatcgaacaccagaaggtggtgaagggcaaccagaagagactggagagcctgcgggagctggccggcaaggaaaacctggaataccctagcgtgaccctgccacctcagcctcacaccaaggagggcgttgatgcctacaacgaagtgatcgcccgggtgcgaatgtgggtgaacctgaacctgtggcagaagctgaagctaagcagagatgatgccaagcctctgctgagactgaagggattcccttcctttcctctggtcgagagacaggccaacgaagtggactggtgggacatggtgtgtaacgtgaagaagctgatcaacgagaaaaaggaggatggcaaggtgttttggcagaatctggctggctacaagagacaggaagccctgagaccatacctgagcagcgaggaagatcggaagaagggaaagaaattcgctcggtaccagctgggcgacctgctgctgcacctggaaaagaagcacggcgaggactggggaaaggtgtacgacgaggcctgggagcggattgacaagaaagtggaaggcctgagcaagcacatcaagctggaagaggaacggagaagcgaggacgcccagagcaaggccgccctgaccgactggctgcgggctaaggccagcttcgtgatcgagggcctgaaggaggccgacaaggacgagttctgcagatgcgagctgaagctgcagaagtggtacggggacctgcggggaaagcccttcgccatcgaagccgagaacagcatcctggacatcagcggcttcagcaagcagtacaactgtgccttcatctggcagaaggacggcgtgaagaagctgaacctgtacctgatcatcaactacttcaagggcggcaagctgcggttcaagaagatcaaacctgaagccttcgaagccaacagattctacaccgtgatcaacaaaaagagcggcgagatcgtgcccatggaggtgaacttcaacttcgacgaccccaacctgatcatcctgcctctggcctttggcaagagacagggcagagaattcatctggaacgacctgctgtccctggaaaccggcagcctgaagctggccaacggaagagtgatcgagaagacactgtacaacagaagaacccggcaggatgagcctgccctgttcgtggccctgaccttcgagcggcgggaggtcctggactcctccaatatcaaaccaatgaacctgatcggcgtggcaagaggcgaaaacatccccgccgtgatcgccctgaccgaccccgagggctgcccactgagccggtttaaggatagcctgggaaacccaacccacatcctgagaatcggcgagagctataaggagaagcagcggaccatccaggccaagaaggaggtggagcagcggagagccggcggctacagccggaagtacgccagcaaagccaagaatctggcagacgatatggtgagaaacaccgctagagatctgctgtactacgccgtgacccaggatgccatgctgatcttcgccaacctgagccggggcttcggccggcagggcaagcggaccttcatggccgagagacagtacacacggatggaggactggctgaccgccaagctggcctacgagggcctgagcaagacctacctgtccaagacactggcccagtacacctccaagacatgcagcaactgtgggtttaccatcaccagcgccgactacgacagggtgctggagaagctgaagaagacagcaacaggctggatgaccacaattaacggcaaggagctgaaggtggagggccagattacctactacaacagatacaagagacagaacgtagtcaaggacctgtccgtcgagctggatagactgagcgaagaatctgtgaacaacgacatctcctcctggacaaagggcagaagcggagaagctctgagcctcctgaagaaaagattctcccatagacccgtgcaggagaagttcgtgtgcctgaactgcggcttcgagacacacgcagccgagcaagccgccctgaacatcgccagatcctggctgttcctgcggagccaggagtacaagaaataccagacaaacaagacaaccggcaacaccgataagagagccttcgtcgagacctggcagtccttttaccggaagaagcttaaggaggtgtggaaacctgccgtgcggtctggcggatctggcggaggctccacaagcgcccaggagatggtgaccttccaggacgtggccgtggacttcaccagggaggagtggtgcctgctgagccccccccagaaggagctgtacaaggaggtgatgctggagaacgccaggaacctgctgagcgtgggcctgcccgccctgcccgaggacgtgatcagctacctggagcagagggaggccccctggatgctggagagggagggccccaggagctgctgccccggcgagatcctgctgaccagccccaagaaaaagagaaaagtctaagctgccttctgcggggcttgccttctggccatgcccttcttctctcccttgcacctgtacctcttggtctttgaataaagcctgagtaggaaggctagcaaaaaaaaaaaaaaaaaaaaaaaaaaaaaaaaaaaaaaaaaaaaaaaaaaaaaaaaaaaaaaaaaaaaaaaaaaaaaaaa

SEQ ID NO: 4007 - RNA, 5419 nt, synthetic construct
  source 1..5419: mol_type = other RNA
aggaaataagagagaaaagaagagtaagaagaaatataagagccaccatggcccctaagaagaagcgtaaagtgagccgggtgaacggcagcggcagcggcggcggcatgaaccacgaccaggagttcgacccccctaaggtgtaccctcccgtccccgccgagaagagaaagcccatccgggtcctgagcctgttcgatggcatcgccaccggtctgctggtgctgaaggacctgggcatccaggtggataggtacattgcctccgaggtgtgcgaggactccatcaccgtgggaatggtgcgtcatcagggcaagatcatgtacgtgggcgacgtgcggagcgtgacacagaagcatatccaggagtggggccctttcgacctggtgatcggcggcagcccttgcaatgacctgagcatcgtgaacccagcccggaagggcctgtacgagggaaccggcagactgttcttcgagttttacagactgctgcacgacgcccggcctaaggaaggcgacgaccggcccttcttttggctgttcgagaatgtggtggccatgggagtcagcgacaagcgggatattagccggttcctggagagcaaccccgtgatgatcgatgccaaggaagtgagcgccgcccaccgggccagatacttctggggcaatctgcctggcatgaacagacccctggccagcaccgtgaacgacaagctggagctgcaggagtgcctggagcacggccggatcgccaagttcagcaaggtgagaaccatcaccacccgaagcaacagcatcaaacaaggcaaggaccagcactttcctgtgttcatgaacgagaaggaggacatcctgtggtgtaccgagatggagagagtgttcgggttcccagtccactacacagatgtcagcaacatgtctagactggccagacagagactgctgggaagaagctggtccgtccctgtgatcagacacctgttcgcccctctgaaggagtacttcgcctgcgtgagcagcggcaacagcaacgccaacagccggggccccagcttctctagcggcctggtgccactgtccctgagagggagccacatgggccccatggagatctacaaaaccgtgagcgcctggaagcggcagcctgtgcgcgtgctgagcctgtttcggaatatcgataaagtcctgaaaagcctgggattcctggagagcggctctggctccggcggtggcaccctgaagtacgtggaggatgtgacaaacgtggtcagacgggatgtggagaagtggggccccttcgatctggtgtacggcagcacccaacccctgggcagctcttgtgaccggtgccctggctggtacatgtttcagttccaccggatcctgcagtacgccctgccgagacaggagtcccagcggccattcttttggattttcatggacaacttgctgctgaccgaggatgaccaggaaactaccactcggttcctgcagaccgaagccgtgaccctgcaggacgtgagaggccgggactaccagaacgccatgcgggtgtggtccaacatccctggactgaaaagcaagcacgcacctctgacccctaaagaagaggagtacctgcaggcccaggtgcggagcagaagcaagctggacgcccctaaggtggatctgctggtgaagaattgcctcctgcccctgagagagtacttcaagtatttcagccagaatagtctgcccctgggcggcccaagcagcggcgcccctcctcccagcggcggcagcccagccggctccccaacctctaccgaggagggcacctctgagtccgccacccccgagagcggccctggcacctccaccgagcccagcgagggcagcgcacccggcagccctgccggcagccccacctccacagaggagggaaccagcaccgagcccagcgaaggcagcgccccaggcaccagcaccgagcctagtgagggcggctctggcggcggcagcgcccaggagattaaacggatcaacaagatcagaagaagacttgtgaaagacagcaacaccaagaaggccggcaagacaggccccatgaaaaccctgctggttagagtgatgacacccgatctgagagagcggctggaaaacctgagaaagaagcctgaaaatatcccccagcccatcagcaatacatctagagccaacctgaataagctgctgaccgattacaccgaaatgaagaaggcgatcctgcatgtgtactgggaagagttccagaaggaccctgtgggcctgatgagccgggtggcccagcctgccagcaagaagatcgatcagaacaagctgaaacctgagatggacgagaagggcaacctgaccaccgccggctttgcctgctctcagtgtggccagcccctgttcgtgtacaagctggagcaggtgtctgagaagggcaaggcttacaccaactacttcggacggtgcaatgtggccgagcacgaaaagctgatcctgctggcccagctgaagcccgagaaggatagcgacgaagccgtgacatatagcctgggaaagtttgggcagagggccctggatttctacagcattcatgtgaccaaggagtccacccaccccgtgaagcccctggcccagatcgccggaaacagatacgcctccggacctgtgggaaaggccctgagcgacgcatgtatgggcacaatcgcctccttcctgtctaagtaccaggacatcatcatcgaacaccagaaggtggtgaagggcaaccagaagagactggagagcctgcgggagctggccggcaaggaaaacctggaataccctagcgtgaccctgccacctcagcctcacaccaaggagggcgttgatgcctacaacgaagtgatcgcccgggtgcgaatgtgggtgaacctgaacctgtggcagaagctgaagctaagcagagatgatgccaagcctctgctgagactgaagggattcccttcctttcctctggtcgagagacaggccaacgaagtggactggtgggacatggtgtgtaacgtgaagaagctgatcaacgagaaaaaggaggatggcaaggtgttttggcagaatctggctggctacaagagacaggaagccctgagaccatacctgagcagcgaggaagatcggaagaagggaaagaaattcgctcggtaccagctgggcgacctgctgctgcacctggaaaagaagcacggcgaggactggggaaaggtgtacgacgaggcctgggagcggattgacaagaaagtggaaggcctgagcaagcacatcaagctggaagaggaacggagaagcgaggacgcccagagcaaggccgccctgaccgactggctgcgggctaaggccagcttcgtgatcgagggcctgaaggaggccgacaaggacgagttctgcagatgcgagctgaagctgcagaagtggtacggggacctgcggggaaagcccttcgccatcgaagccgagaacagcatcctggacatcagcggcttcagcaagcagtacaactgtgccttcatctggcagaaggacggcgtgaagaagctgaacctgtacctgatcatcaactacttcaagggcggcaagctgcggttcaagaagatcaaacctgaagccttcgaagccaacagattctacaccgtgatcaacaaaaagagcggcgagatcgtgcccatggaggtgaacttcaacttcgacgaccccaacctgatcatcctgcctctggcctttggcaagagacagggcagagaattcatctggaacgacctgctgtccctggaaaccggcagcctgaagctggccaacggaagagtgatcgagaagacactgtacaacagaagaacccggcaggatgagcctgccctgttcgtggccctgaccttcgagcggcgggaggtcctggactcctccaatatcaaaccaatgaacctgatcggcgtggcaagaggcgaaaacatccccgccgtgatcgccctgaccgaccccgagggctgcccactgagccggtttaaggatagcctgggaaacccaacccacatcctgagaatcggcgagagctataaggagaagcagcggaccatccaggccaagaaggaggtggagcagcggagagccggcggctacagccggaagtacgccagcaaagccaagaatctggcagacgatatggtgagaaacaccgctagagatctgctgtactacgccgtgacccaggatgccatgctgatcttcgccaacctgagccggggcttcggccggcagggcaagcggaccttcatggccgagagacagtacacacggatggaggactggctgaccgccaagctggcctacgagggcctgagcaagacctacctgtccaagacactggcccagtacacctccaagacatgcagcaactgtgggtttaccatcaccagcgccgactacgacagggtgctggagaagctgaagaagacagcaacaggctggatgaccacaattaacggcaaggagctgaaggtggagggccagattacctactacaacagatacaagagacagaacgtagtcaaggacctgtccgtcgagctggatagactgagcgaagaatctgtgaacaacgacatctcctcctggacaaagggcagaagcggagaagctctgagcctcctgaagaaaagattctcccatagacccgtgcaggagaagttcgtgtgcctgaactgcggcttcgagacacacgcagccgagcaagccgccctgaacatcgccagatcctggctgttcctgcggagccaggagtacaagaaataccagacaaacaagacaaccggcaacaccgataagagagccttcgtcgagacctggcagtccttttaccggaagaagcttaaggaggtgtggaaacctgccgtgcggtctggcggatctggcggaggctccacaagcgtgagcttcgaggacgtggccgtgtacttcacccaggaggagtggaccctgctggacagcgcccagagggacctgtacagggacgtgatgctggagacctgcgagaacctggccagcatcggcaacctgctgaaccacagcgtgatgtactggctggagggcgaggagaacctgggcaccgtgcaggagggcgacccccaggagtggaggctgaagaccaagggcagcaccctgaggcccgacaccagccccaagaaaaagagaaaagtctaagctgccttctgcggggcttgccttctggccatgcccttcttctctcccttgcacctgtacctcttggtctttgaataaagcctgagtaggaaggctagcaaaaaaaaaaaaaaaaaaaaaaaaaaaaaaaaaaaaaaaaaaaaaaaaaaaaaaaaaaaaaaaaaaaaaaaaaaaaaaaa

SEQ ID NO: 4008 - RNA, 5419 nt, synthetic construct
  source 1..5419: mol_type = other RNA
aggaaataagagagaaaagaagagtaagaagaaatataagagccaccatggcccctaagaagaagcgtaaagtgagccgggtgaacggcagcggcagcggcggcggcatgaaccacgaccaggagttcgacccccctaaggtgtaccctcccgtccccgccgagaagagaaagcccatccgggtcctgagcctgttcgatggcatcgccaccggtctgctggtgctgaaggacctgggcatccaggtggataggtacattgcctccgaggtgtgcgaggactccatcaccgtgggaatggtgcgtcatcagggcaagatcatgtacgtgggcgacgtgcggagcgtgacacagaagcatatccaggagtggggccctttcgacctggtgatcggcggcagcccttgcaatgacctgagcatcgtgaacccagcccggaagggcctgtacgagggaaccggcagactgttcttcgagttttacagactgctgcacgacgcccggcctaaggaaggcgacgaccggcccttcttttggctgttcgagaatgtggtggccatgggagtcagcgacaagcgggatattagccggttcctggagagcaaccccgtgatgatcgatgccaaggaagtgagcgccgcccaccgggccagatacttctggggcaatctgcctggcatgaacagacccctggccagcaccgtgaacgacaagctggagctgcaggagtgcctggagcacggccggatcgccaagttcagcaaggtgagaaccatcaccacccgaagcaacagcatcaaacaaggcaaggaccagcactttcctgtgttcatgaacgagaaggaggacatcctgtggtgtaccgagatggagagagtgttcgggttcccagtccactacacagatgtcagcaacatgtctagactggccagacagagactgctgggaagaagctggtccgtccctgtgatcagacacctgttcgcccctctgaaggagtacttcgcctgcgtgagcagcggcaacagcaacgccaacagccggggccccagcttctctagcggcctggtgccactgtccctgagagggagccacatgggccccatggagatctacaaaaccgtgagcgcctggaagcggcagcctgtgcgcgtgctgagcctgtttcggaatatcgataaagtcctgaaaagcctgggattcctggagagcggctctggctccggcggtggcaccctgaagtacgtggaggatgtgacaaacgtggtcagacgggatgtggagaagtggggccccttcgatctggtgtacggcagcacccaacccctgggcagctcttgtgaccggtgccctggctggtacatgtttcagttccaccggatcctgcagtacgccctgccgagacaggagtcccagcggccattcttttggattttcatggacaacttgctgctgaccgaggatgaccaggaaactaccactcggttcctgcagaccgaagccgtgaccctgcaggacgtgagaggccgggactaccagaacgccatgcgggtgtggtccaacatccctggactgaaaagcaagcacgcacctctgacccctaaagaagaggagtacctgcaggcccaggtgcggagcagaagcaagctggacgcccctaaggtggatctgctggtgaagaattgcctcctgcccctgagagagtacttcaagtatttcagccagaatagtctgcccctgggcggcccaagcagcggcgcccctcctcccagcggcggcagcccagccggctccccaacctctaccgaggagggcacctctgagtccgccacccccgagagcggccctggcacctccaccgagcccagcgagggcagcgcacccggcagccctgccggcagccccacctccacagaggagggaaccagcaccgagcccagcgaaggcagcgccccaggcaccagcaccgagcctagtgagggcggctctggcggcggcagcgcccaggagattaaacggatcaacaagatcagaagaagacttgtgaaagacagcaacaccaagaaggccggcaagacaggccccatgaaaaccctgctggttagagtgatgacacccgatctgagagagcggctggaaaacctgagaaagaagcctgaaaatatcccccagcccatcagcaatacatctagagccaacctgaataagctgctgaccgattacaccgaaatgaagaaggcgatcctgcatgtgtactgggaagagttccagaaggaccctgtgggcctgatgagccgggtggcccagcctgccagcaagaagatcgatcagaacaagctgaaacctgagatggacgagaagggcaacctgaccaccgccggctttgcctgctctcagtgtggccagcccctgttcgtgtacaagctggagcaggtgtctgagaagggcaaggcttacaccaactacttcggacggtgcaatgtggccgagcacgaaaagctgatcctgctggcccagctgaagcccgagaaggatagcgacgaagccgtgacatatagcctgggaaagtttgggcagagggccctggatttctacagcattcatgtgaccaaggagtccacccaccccgtgaagcccctggcccagatcgccggaaacagatacgcctccggacctgtgggaaaggccctgagcgacgcatgtatgggcacaatcgcctccttcctgtctaagtaccaggacatcatcatcgaacaccagaaggtggtgaagggcaaccagaagagactggagagcctgcgggagctggccggcaaggaaaacctggaataccctagcgtgaccctgccacctcagcctcacaccaaggagggcgttgatgcctacaacgaagtgatcgcccgggtgcgaatgtgggtgaacctgaacctgtggcagaagctgaagctaagcagagatgatgccaagcctctgctgagactgaagggattcccttcctttcctctggtcgagagacaggccaacgaagtggactggtgggacatggtgtgtaacgtgaagaagctgatcaacgagaaaaaggaggatggcaaggtgttttggcagaatctggctggctacaagagacaggaagccctgagaccatacctgagcagcgaggaagatcggaagaagggaaagaaattcgctcggtaccagctgggcgacctgctgctgcacctggaaaagaagcacggcgaggactggggaaaggtgtacgacgaggcctgggagcggattgacaagaaagtggaaggcctgagcaagcacatcaagctggaagaggaacggagaagcgaggacgcccagagcaaggccgccctgaccgactggctgcgggctaaggccagcttcgtgatcgagggcctgaaggaggccgacaaggacgagttctgcagatgcgagctgaagctgcagaagtggtacggggacctgcggggaaagcccttcgccatcgaagccgagaacagcatcctggacatcagcggcttcagcaagcagtacaactgtgccttcatctggcagaaggacggcgtgaagaagctgaacctgtacctgatcatcaactacttcaagggcggcaagctgcggttcaagaagatcaaacctgaagccttcgaagccaacagattctacaccgtgatcaacaaaaagagcggcgagatcgtgcccatggaggtgaacttcaacttcgacgaccccaacctgatcatcctgcctctggcctttggcaagagacagggcagagaattcatctggaacgacctgctgtccctggaaaccggcagcctgaagctggccaacggaagagtgatcgagaagacactgtacaacagaagaacccggcaggatgagcctgccctgttcgtggccctgaccttcgagcggcgggaggtcctggactcctccaatatcaaaccaatgaacctgatcggcgtggcaagaggcgaaaacatccccgccgtgatcgccctgaccgaccccgagggctgcccactgagccggtttaaggatagcctgggaaacccaacccacatcctgagaatcggcgagagctataaggagaagcagcggaccatccaggccaagaaggaggtggagcagcggagagccggcggctacagccggaagtacgccagcaaagccaagaatctggcagacgatatggtgagaaacaccgctagagatctgctgtactacgccgtgacccaggatgccatgctgatcttcgccaacctgagccggggcttcggccggcagggcaagcggaccttcatggccgagagacagtacacacggatggaggactggctgaccgccaagctggcctacgagggcctgagcaagacctacctgtccaagacactggcccagtacacctccaagacatgcagcaactgtgggtttaccatcaccagcgccgactacgacagggtgctggagaagctgaagaagacagcaacaggctggatgaccacaattaacggcaaggagctgaaggtggagggccagattacctactacaacagatacaagagacagaacgtagtcaaggacctgtccgtcgagctggatagactgagcgaagaatctgtgaacaacgacatctcctcctggacaaagggcagaagcggagaagctctgagcctcctgaagaaaagattctcccatagacccgtgcaggagaagttcgtgtgcctgaactgcggcttcgagacacacgcagccgagcaagccgccctgaacatcgccagatcctggctgttcctgcggagccaggagtacaagaaataccagacaaacaagacaaccggcaacaccgataagagagccttcgtcgagacctggcagtccttttaccggaagaagcttaaggaggtgtggaaacctgccgtgcggtctggcggatctggcggaggctccacaagcgcctgggcccccctgagcttcgaggacgtggccgtgggcttcagctgggaggagtggcagctgctggcccccagccagaaggacctgtacagggacgtgatgctggagaactacaggaacctggtgagcgtgggctaccaggccagcaagcccgacagcgtgttccagctggagcagggcgagcccccctggatcgtggagggcgccgcccagagccagacctgccaggaggagatctgggagaccagccccaagaaaaagagaaaagtctaagctgccttctgcggggcttgccttctggccatgcccttcttctctcccttgcacctgtacctcttggtctttgaataaagcctgagtaggaaggctagcaaaaaaaaaaaaaaaaaaaaaaaaaaaaaaaaaaaaaaaaaaaaaaaaaaaaaaaaaaaaaaaaaaaaaaaaaaaaaaaa

SEQ ID NO: 4009 - RNA, 5419 nt, synthetic construct
  source 1..5419: mol_type = other RNA
aggaaataagagagaaaagaagagtaagaagaaatataagagccaccatggcccctaagaagaagcgtaaagtgagccgggtgaacggcagcggcagcggcggcggcatgaaccacgaccaggagttcgacccccctaaggtgtaccctcccgtccccgccgagaagagaaagcccatccgggtcctgagcctgttcgatggcatcgccaccggtctgctggtgctgaaggacctgggcatccaggtggataggtacattgcctccgaggtgtgcgaggactccatcaccgtgggaatggtgcgtcatcagggcaagatcatgtacgtgggcgacgtgcggagcgtgacacagaagcatatccaggagtggggccctttcgacctggtgatcggcggcagcccttgcaatgacctgagcatcgtgaacccagcccggaagggcctgtacgagggaaccggcagactgttcttcgagttttacagactgctgcacgacgcccggcctaaggaaggcgacgaccggcccttcttttggctgttcgagaatgtggtggccatgggagtcagcgacaagcgggatattagccggttcctggagagcaaccccgtgatgatcgatgccaaggaagtgagcgccgcccaccgggccagatacttctggggcaatctgcctggcatgaacagacccctggccagcaccgtgaacgacaagctggagctgcaggagtgcctggagcacggccggatcgccaagttcagcaaggtgagaaccatcaccacccgaagcaacagcatcaaacaaggcaaggaccagcactttcctgtgttcatgaacgagaaggaggacatcctgtggtgtaccgagatggagagagtgttcgggttcccagtccactacacagatgtcagcaacatgtctagactggccagacagagactgctgggaagaagctggtccgtccctgtgatcagacacctgttcgcccctctgaaggagtacttcgcctgcgtgagcagcggcaacagcaacgccaacagccggggccccagcttctctagcggcctggtgccactgtccctgagagggagccacatgggccccatggagatctacaaaaccgtgagcgcctggaagcggcagcctgtgcgcgtgctgagcctgtttcggaatatcgataaagtcctgaaaagcctgggattcctggagagcggctctggctccggcggtggcaccctgaagtacgtggaggatgtgacaaacgtggtcagacgggatgtggagaagtggggccccttcgatctggtgtacggcagcacccaacccctgggcagctcttgtgaccggtgccctggctggtacatgtttcagttccaccggatcctgcagtacgccctgccgagacaggagtcccagcggccattcttttggattttcatggacaacttgctgctgaccgaggatgaccaggaaactaccactcggttcctgcagaccgaagccgtgaccctgcaggacgtgagaggccgggactaccagaacgccatgcgggtgtggtccaacatccctggactgaaaagcaagcacgcacctctgacccctaaagaagaggagtacctgcaggcccaggtgcggagcagaagcaagctggacgcccctaaggtggatctgctggtgaagaattgcctcctgcccctgagagagtacttcaagtatttcagccagaatagtctgcccctgggcggcccaagcagcggcgcccctcctcccagcggcggcagcccagccggctccccaacctctaccgaggagggcacctctgagtccgccacccccgagagcggccctggcacctccaccgagcccagcgagggcagcgcacccggcagccctgccggcagccccacctccacagaggagggaaccagcaccgagcccagcgaaggcagcgccccaggcaccagcaccgagcctagtgagggcggctctggcggcggcagcgcccaggagattaaacggatcaacaagatcagaagaagacttgtgaaagacagcaacaccaagaaggccggcaagacaggccccatgaaaaccctgctggttagagtgatgacacccgatctgagagagcggctggaaaacctgagaaagaagcctgaaaatatcccccagcccatcagcaatacatctagagccaacctgaataagctgctgaccgattacaccgaaatgaagaaggcgatcctgcatgtgtactgggaagagttccagaaggaccctgtgggcctgatgagccgggtggcccagcctgccagcaagaagatcgatcagaacaagctgaaacctgagatggacgagaagggcaacctgaccaccgccggctttgcctgctctcagtgtggccagcccctgttcgtgtacaagctggagcaggtgtctgagaagggcaaggcttacaccaactacttcggacggtgcaatgtggccgagcacgaaaagctgatcctgctggcccagctgaagcccgagaaggatagcgacgaagccgtgacatatagcctgggaaagtttgggcagagggccctggatttctacagcattcatgtgaccaaggagtccacccaccccgtgaagcccctggcccagatcgccggaaacagatacgcctccggacctgtgggaaaggccctgagcgacgcatgtatgggcacaatcgcctccttcctgtctaagtaccaggacatcatcatcgaacaccagaaggtggtgaagggcaaccagaagagactggagagcctgcgggagctggccggcaaggaaaacctggaataccctagcgtgaccctgccacctcagcctcacaccaaggagggcgttgatgcctacaacgaagtgatcgcccgggtgcgaatgtgggtgaacctgaacctgtggcagaagctgaagctaagcagagatgatgccaagcctctgctgagactgaagggattcccttcctttcctctggtcgagagacaggccaacgaagtggactggtgggacatggtgtgtaacgtgaagaagctgatcaacgagaaaaaggaggatggcaaggtgttttggcagaatctggctggctacaagagacaggaagccctgagaccatacctgagcagcgaggaagatcggaagaagggaaagaaattcgctcggtaccagctgggcgacctgctgctgcacctggaaaagaagcacggcgaggactggggaaaggtgtacgacgaggcctgggagcggattgacaagaaagtggaaggcctgagcaagcacatcaagctggaagaggaacggagaagcgaggacgcccagagcaaggccgccctgaccgactggctgcgggctaaggccagcttcgtgatcgagggcctgaaggaggccgacaaggacgagttctgcagatgcgagctgaagctgcagaagtggtacggggacctgcggggaaagcccttcgccatcgaagccgagaacagcatcctggacatcagcggcttcagcaagcagtacaactgtgccttcatctggcagaaggacggcgtgaagaagctgaacctgtacctgatcatcaactacttcaagggcggcaagctgcggttcaagaagatcaaacctgaagccttcgaagccaacagattctacaccgtgatcaacaaaaagagcggcgagatcgtgcccatggaggtgaacttcaacttcgacgaccccaacctgatcatcctgcctctggcctttggcaagagacagggcagagaattcatctggaacgacctgctgtccctggaaaccggcagcctgaagctggccaacggaagagtgatcgagaagacactgtacaacagaagaacccggcaggatgagcctgccctgttcgtggccctgaccttcgagcggcgggaggtcctggactcctccaatatcaaaccaatgaacctgatcggcgtggcaagaggcgaaaacatccccgccgtgatcgccctgaccgaccccgagggctgcccactgagccggtttaaggatagcctgggaaacccaacccacatcctgagaatcggcgagagctataaggagaagcagcggaccatccaggccaagaaggaggtggagcagcggagagccggcggctacagccggaagtacgccagcaaagccaagaatctggcagacgatatggtgagaaacaccgctagagatctgctgtactacgccgtgacccaggatgccatgctgatcttcgccaacctgagccggggcttcggccggcagggcaagcggaccttcatggccgagagacagtacacacggatggaggactggctgaccgccaagctggcctacgagggcctgagcaagacctacctgtccaagacactggcccagtacacctccaagacatgcagcaactgtgggtttaccatcaccagcgccgactacgacagggtgctggagaagctgaagaagacagcaacaggctggatgaccacaattaacggcaaggagctgaaggtggagggccagattacctactacaacagatacaagagacagaacgtagtcaaggacctgtccgtcgagctggatagactgagcgaagaatctgtgaacaacgacatctcctcctggacaaagggcagaagcggagaagctctgagcctcctgaagaaaagattctcccatagacccgtgcaggagaagttcgtgtgcctgaactgcggcttcgagacacacgcagccgagcaagccgccctgaacatcgccagatcctggctgttcctgcggagccaggagtacaagaaataccagacaaacaagacaaccggcaacaccgataagagagccttcgtcgagacctggcagtccttttaccggaagaagcttaaggaggtgtggaaacctgccgtgcggtctggcggatctggcggaggctccacaagcatgctgatgatgttcagggacgtggccgtggacttcagccaggaggagtgggagtgcctggacctggagcagaggggcctgtacagggacgtgatgctggagaactacagcaacatggtgagcctgggcctgtgcatctaccagcccgaggccttcagcctgctggagaagggcaaggagccctggaagatcctgagggacgagaccaggggcccctgccccgacatgcagagcaggtgccagaccagccccaagaaaaagagaaaagtctaagctgccttctgcggggcttgccttctggccatgcccttcttctctcccttgcacctgtacctcttggtctttgaataaagcctgagtaggaaggctagcaaaaaaaaaaaaaaaaaaaaaaaaaaaaaaaaaaaaaaaaaaaaaaaaaaaaaaaaaaaaaaaaaaaaaaaaaaaaaaaa

SEQ ID NO: 4010 - RNA, 5419 nt, synthetic construct
  source 1..5419: mol_type = other RNA
aggaaataagagagaaaagaagagtaagaagaaatataagagccaccatggcccctaagaagaagcgtaaagtgagccgggtgaacggcagcggcagcggcggcggcatgaaccacgaccaggagttcgacccccctaaggtgtaccctcccgtccccgccgagaagagaaagcccatccgggtcctgagcctgttcgatggcatcgccaccggtctgctggtgctgaaggacctgggcatccaggtggataggtacattgcctccgaggtgtgcgaggactccatcaccgtgggaatggtgcgtcatcagggcaagatcatgtacgtgggcgacgtgcggagcgtgacacagaagcatatccaggagtggggccctttcgacctggtgatcggcggcagcccttgcaatgacctgagcatcgtgaacccagcccggaagggcctgtacgagggaaccggcagactgttcttcgagttttacagactgctgcacgacgcccggcctaaggaaggcgacgaccggcccttcttttggctgttcgagaatgtggtggccatgggagtcagcgacaagcgggatattagccggttcctggagagcaaccccgtgatgatcgatgccaaggaagtgagcgccgcccaccgggccagatacttctggggcaatctgcctggcatgaacagacccctggccagcaccgtgaacgacaagctggagctgcaggagtgcctggagcacggccggatcgccaagttcagcaaggtgagaaccatcaccacccgaagcaacagcatcaaacaaggcaaggaccagcactttcctgtgttcatgaacgagaaggaggacatcctgtggtgtaccgagatggagagagtgttcgggttcccagtccactacacagatgtcagcaacatgtctagactggccagacagagactgctgggaagaagctggtccgtccctgtgatcagacacctgttcgcccctctgaaggagtacttcgcctgcgtgagcagcggcaacagcaacgccaacagccggggccccagcttctctagcggcctggtgccactgtccctgagagggagccacatgggccccatggagatctacaaaaccgtgagcgcctggaagcggcagcctgtgcgcgtgctgagcctgtttcggaatatcgataaagtcctgaaaagcctgggattcctggagagcggctctggctccggcggtggcaccctgaagtacgtggaggatgtgacaaacgtggtcagacgggatgtggagaagtggggccccttcgatctggtgtacggcagcacccaacccctgggcagctcttgtgaccggtgccctggctggtacatgtttcagttccaccggatcctgcagtacgccctgccgagacaggagtcccagcggccattcttttggattttcatggacaacttgctgctgaccgaggatgaccaggaaactaccactcggttcctgcagaccgaagccgtgaccctgcaggacgtgagaggccgggactaccagaacgccatgcgggtgtggtccaacatccctggactgaaaagcaagcacgcacctctgacccctaaagaagaggagtacctgcaggcccaggtgcggagcagaagcaagctggacgcccctaaggtggatctgctggtgaagaattgcctcctgcccctgagagagtacttcaagtatttcagccagaatagtctgcccctgggcggcccaagcagcggcgcccctcctcccagcggcggcagcccagccggctccccaacctctaccgaggagggcacctctgagtccgccacccccgagagcggccctggcacctccaccgagcccagcgagggcagcgcacccggcagccctgccggcagccccacctccacagaggagggaaccagcaccgagcccagcgaaggcagcgccccaggcaccagcaccgagcctagtgagggcggctctggcggcggcagcgcccaggagattaaacggatcaacaagatcagaagaagacttgtgaaagacagcaacaccaagaaggccggcaagacaggccccatgaaaaccctgctggttagagtgatgacacccgatctgagagagcggctggaaaacctgagaaagaagcctgaaaatatcccccagcccatcagcaatacatctagagccaacctgaataagctgctgaccgattacaccgaaatgaagaaggcgatcctgcatgtgtactgggaagagttccagaaggaccctgtgggcctgatgagccgggtggcccagcctgccagcaagaagatcgatcagaacaagctgaaacctgagatggacgagaagggcaacctgaccaccgccggctttgcctgctctcagtgtggccagcccctgttcgtgtacaagctggagcaggtgtctgagaagggcaaggcttacaccaactacttcggacggtgcaatgtggccgagcacgaaaagctgatcctgctggcccagctgaagcccgagaaggatagcgacgaagccgtgacatatagcctgggaaagtttgggcagagggccctggatttctacagcattcatgtgaccaaggagtccacccaccccgtgaagcccctggcccagatcgccggaaacagatacgcctccggacctgtgggaaaggccctgagcgacgcatgtatgggcacaatcgcctccttcctgtctaagtaccaggacatcatcatcgaacaccagaaggtggtgaagggcaaccagaagagactggagagcctgcgggagctggccggcaaggaaaacctggaataccctagcgtgaccctgccacctcagcctcacaccaaggagggcgttgatgcctacaacgaagtgatcgcccgggtgcgaatgtgggtgaacctgaacctgtggcagaagctgaagctaagcagagatgatgccaagcctctgctgagactgaagggattcccttcctttcctctggtcgagagacaggccaacgaagtggactggtgggacatggtgtgtaacgtgaagaagctgatcaacgagaaaaaggaggatggcaaggtgttttggcagaatctggctggctacaagagacaggaagccctgagaccatacctgagcagcgaggaagatcggaagaagggaaagaaattcgctcggtaccagctgggcgacctgctgctgcacctggaaaagaagcacggcgaggactggggaaaggtgtacgacgaggcctgggagcggattgacaagaaagtggaaggcctgagcaagcacatcaagctggaagaggaacggagaagcgaggacgcccagagcaaggccgccctgaccgactggctgcgggctaaggccagcttcgtgatcgagggcctgaaggaggccgacaaggacgagttctgcagatgcgagctgaagctgcagaagtggtacggggacctgcggggaaagcccttcgccatcgaagccgagaacagcatcctggacatcagcggcttcagcaagcagtacaactgtgccttcatctggcagaaggacggcgtgaagaagctgaacctgtacctgatcatcaactacttcaagggcggcaagctgcggttcaagaagatcaaacctgaagccttcgaagccaacagattctacaccgtgatcaacaaaaagagcggcgagatcgtgcccatggaggtgaacttcaacttcgacgaccccaacctgatcatcctgcctctggcctttggcaagagacagggcagagaattcatctggaacgacctgctgtccctggaaaccggcagcctgaagctggccaacggaagagtgatcgagaagacactgtacaacagaagaacccggcaggatgagcctgccctgttcgtggccctgaccttcgagcggcgggaggtcctggactcctccaatatcaaaccaatgaacctgatcggcgtggcaagaggcgaaaacatccccgccgtgatcgccctgaccgaccccgagggctgcccactgagccggtttaaggatagcctgggaaacccaacccacatcctgagaatcggcgagagctataaggagaagcagcggaccatccaggccaagaaggaggtggagcagcggagagccggcggctacagccggaagtacgccagcaaagccaagaatctggcagacgatatggtgagaaacaccgctagagatctgctgtactacgccgtgacccaggatgccatgctgatcttcgccaacctgagccggggcttcggccggcagggcaagcggaccttcatggccgagagacagtacacacggatggaggactggctgaccgccaagctggcctacgagggcctgagcaagacctacctgtccaagacactggcccagtacacctccaagacatgcagcaactgtgggtttaccatcaccagcgccgactacgacagggtgctggagaagctgaagaagacagcaacaggctggatgaccacaattaacggcaaggagctgaaggtggagggccagattacctactacaacagatacaagagacagaacgtagtcaaggacctgtccgtcgagctggatagactgagcgaagaatctgtgaacaacgacatctcctcctggacaaagggcagaagcggagaagctctgagcctcctgaagaaaagattctcccatagacccgtgcaggagaagttcgtgtgcctgaactgcggcttcgagacacacgcagccgagcaagccgccctgaacatcgccagatcctggctgttcctgcggagccaggagtacaagaaataccagacaaacaagacaaccggcaacaccgataagagagccttcgtcgagacctggcagtccttttaccggaagaagcttaaggaggtgtggaaacctgccgtgcggtctggcggatctggcggaggctccacaagcgagcccggcgccgtgaccttcggcgacgtggccgtgtacttcagcagggaggagtggggctgcctgaggcccgcccagagggccctgtacagggacgtgaccagggagacctacagccacctgggcgccctgggcgtgggcggcagcaagcccgccctgatcagctggatggaggaggaggccgagctgtggggccccgccgcccaggaccccgaggtggccaagtgccccaccgaggccgacaccagccccaagaaaaagagaaaagtctaagctgccttctgcggggcttgccttctggccatgcccttcttctctcccttgcacctgtacctcttggtctttgaataaagcctgagtaggaaggctagcaaaaaaaaaaaaaaaaaaaaaaaaaaaaaaaaaaaaaaaaaaaaaaaaaaaaaaaaaaaaaaaaaaaaaaaaaaaaaaaa

SEQ ID NO: 4011 - RNA, 5419 nt, synthetic construct
  source 1..5419: mol_type = other RNA
aggaaataagagagaaaagaagagtaagaagaaatataagagccaccatggcccctaagaagaagcgtaaagtgagccgggtgaacggcagcggcagcggcggcggcatgaaccacgaccaggagttcgacccccctaaggtgtaccctcccgtccccgccgagaagagaaagcccatccgggtcctgagcctgttcgatggcatcgccaccggtctgctggtgctgaaggacctgggcatccaggtggataggtacattgcctccgaggtgtgcgaggactccatcaccgtgggaatggtgcgtcatcagggcaagatcatgtacgtgggcgacgtgcggagcgtgacacagaagcatatccaggagtggggccctttcgacctggtgatcggcggcagcccttgcaatgacctgagcatcgtgaacccagcccggaagggcctgtacgagggaaccggcagactgttcttcgagttttacagactgctgcacgacgcccggcctaaggaaggcgacgaccggcccttcttttggctgttcgagaatgtggtggccatgggagtcagcgacaagcgggatattagccggttcctggagagcaaccccgtgatgatcgatgccaaggaagtgagcgccgcccaccgggccagatacttctggggcaatctgcctggcatgaacagacccctggccagcaccgtgaacgacaagctggagctgcaggagtgcctggagcacggccggatcgccaagttcagcaaggtgagaaccatcaccacccgaagcaacagcatcaaacaaggcaaggaccagcactttcctgtgttcatgaacgagaaggaggacatcctgtggtgtaccgagatggagagagtgttcgggttcccagtccactacacagatgtcagcaacatgtctagactggccagacagagactgctgggaagaagctggtccgtccctgtgatcagacacctgttcgcccctctgaaggagtacttcgcctgcgtgagcagcggcaacagcaacgccaacagccggggccccagcttctctagcggcctggtgccactgtccctgagagggagccacatgggccccatggagatctacaaaaccgtgagcgcctggaagcggcagcctgtgcgcgtgctgagcctgtttcggaatatcgataaagtcctgaaaagcctgggattcctggagagcggctctggctccggcggtggcaccctgaagtacgtggaggatgtgacaaacgtggtcagacgggatgtggagaagtggggccccttcgatctggtgtacggcagcacccaacccctgggcagctcttgtgaccggtgccctggctggtacatgtttcagttccaccggatcctgcagtacgccctgccgagacaggagtcccagcggccattcttttggattttcatggacaacttgctgctgaccgaggatgaccaggaaactaccactcggttcctgcagaccgaagccgtgaccctgcaggacgtgagaggccgggactaccagaacgccatgcgggtgtggtccaacatccctggactgaaaagcaagcacgcacctctgacccctaaagaagaggagtacctgcaggcccaggtgcggagcagaagcaagctggacgcccctaaggtggatctgctggtgaagaattgcctcctgcccctgagagagtacttcaagtatttcagccagaatagtctgcccctgggcggcccaagcagcggcgcccctcctcccagcggcggcagcccagccggctccccaacctctaccgaggagggcacctctgagtccgccacccccgagagcggccctggcacctccaccgagcccagcgagggcagcgcacccggcagccctgccggcagccccacctccacagaggagggaaccagcaccgagcccagcgaaggcagcgccccaggcaccagcaccgagcctagtgagggcggctctggcggcggcagcgcccaggagattaaacggatcaacaagatcagaagaagacttgtgaaagacagcaacaccaagaaggccggcaagacaggccccatgaaaaccctgctggttagagtgatgacacccgatctgagagagcggctggaaaacctgagaaagaagcctgaaaatatcccccagcccatcagcaatacatctagagccaacctgaataagctgctgaccgattacaccgaaatgaagaaggcgatcctgcatgtgtactgggaagagttccagaaggaccctgtgggcctgatgagccgggtggcccagcctgccagcaagaagatcgatcagaacaagctgaaacctgagatggacgagaagggcaacctgaccaccgccggctttgcctgctctcagtgtggccagcccctgttcgtgtacaagctggagcaggtgtctgagaagggcaaggcttacaccaactacttcggacggtgcaatgtggccgagcacgaaaagctgatcctgctggcccagctgaagcccgagaaggatagcgacgaagccgtgacatatagcctgggaaagtttgggcagagggccctggatttctacagcattcatgtgaccaaggagtccacccaccccgtgaagcccctggcccagatcgccggaaacagatacgcctccggacctgtgggaaaggccctgagcgacgcatgtatgggcacaatcgcctccttcctgtctaagtaccaggacatcatcatcgaacaccagaaggtggtgaagggcaaccagaagagactggagagcctgcgggagctggccggcaaggaaaacctggaataccctagcgtgaccctgccacctcagcctcacaccaaggagggcgttgatgcctacaacgaagtgatcgcccgggtgcgaatgtgggtgaacctgaacctgtggcagaagctgaagctaagcagagatgatgccaagcctctgctgagactgaagggattcccttcctttcctctggtcgagagacaggccaacgaagtggactggtgggacatggtgtgtaacgtgaagaagctgatcaacgagaaaaaggaggatggcaaggtgttttggcagaatctggctggctacaagagacaggaagccctgagaccatacctgagcagcgaggaagatcggaagaagggaaagaaattcgctcggtaccagctgggcgacctgctgctgcacctggaaaagaagcacggcgaggactggggaaaggtgtacgacgaggcctgggagcggattgacaagaaagtggaaggcctgagcaagcacatcaagctggaagaggaacggagaagcgaggacgcccagagcaaggccgccctgaccgactggctgcgggctaaggccagcttcgtgatcgagggcctgaaggaggccgacaaggacgagttctgcagatgcgagctgaagctgcagaagtggtacggggacctgcggggaaagcccttcgccatcgaagccgagaacagcatcctggacatcagcggcttcagcaagcagtacaactgtgccttcatctggcagaaggacggcgtgaagaagctgaacctgtacctgatcatcaactacttcaagggcggcaagctgcggttcaagaagatcaaacctgaagccttcgaagccaacagattctacaccgtgatcaacaaaaagagcggcgagatcgtgcccatggaggtgaacttcaacttcgacgaccccaacctgatcatcctgcctctggcctttggcaagagacagggcagagaattcatctggaacgacctgctgtccctggaaaccggcagcctgaagctggccaacggaagagtgatcgagaagacactgtacaacagaagaacccggcaggatgagcctgccctgttcgtggccctgaccttcgagcggcgggaggtcctggactcctccaatatcaaaccaatgaacctgatcggcgtggcaagaggcgaaaacatccccgccgtgatcgccctgaccgaccccgagggctgcccactgagccggtttaaggatagcctgggaaacccaacccacatcctgagaatcggcgagagctataaggagaagcagcggaccatccaggccaagaaggaggtggagcagcggagagccggcggctacagccggaagtacgccagcaaagccaagaatctggcagacgatatggtgagaaacaccgctagagatctgctgtactacgccgtgacccaggatgccatgctgatcttcgccaacctgagccggggcttcggccggcagggcaagcggaccttcatggccgagagacagtacacacggatggaggactggctgaccgccaagctggcctacgagggcctgagcaagacctacctgtccaagacactggcccagtacacctccaagacatgcagcaactgtgggtttaccatcaccagcgccgactacgacagggtgctggagaagctgaagaagacagcaacaggctggatgaccacaattaacggcaaggagctgaaggtggagggccagattacctactacaacagatacaagagacagaacgtagtcaaggacctgtccgtcgagctggatagactgagcgaagaatctgtgaacaacgacatctcctcctggacaaagggcagaagcggagaagctctgagcctcctgaagaaaagattctcccatagacccgtgcaggagaagttcgtgtgcctgaactgcggcttcgagacacacgcagccgagcaagccgccctgaacatcgccagatcctggctgttcctgcggagccaggagtacaagaaataccagacaaacaagacaaccggcaacaccgataagagagccttcgtcgagacctggcagtccttttaccggaagaagcttaaggaggtgtggaaacctgccgtgcggtctggcggatctggcggaggctccacaagcttccaggacagcgtgaccttcgaggacgtggccgtgaggttcagcagcggcgagtggcagtgcctgaccagggcccagaggcacctgtacgccgacgtgatgctggagaactacggcaacatgatcagcgtgggcttcgccgtgcccaagccccccctgatcagccacctggagcagggcgccgagccctgcgtgcaggacctgcaggacggcggcttcctgagctgcagcttccccgtgagcaccagccccaagaaaaagagaaaagtctaagctgccttctgcggggcttgccttctggccatgcccttcttctctcccttgcacctgtacctcttggtctttgaataaagcctgagtaggaaggctagcaaaaaaaaaaaaaaaaaaaaaaaaaaaaaaaaaaaaaaaaaaaaaaaaaaaaaaaaaaaaaaaaaaaaaaaaaaaaaaaa

SEQ ID NO: 4012 - RNA, 5419 nt, synthetic construct
  source 1..5419: mol_type = other RNA
aggaaataagagagaaaagaagagtaagaagaaatataagagccaccatggcccctaagaagaagcgtaaagtgagccgggtgaacggcagcggcagcggcggcggcatgaaccacgaccaggagttcgacccccctaaggtgtaccctcccgtccccgccgagaagagaaagcccatccgggtcctgagcctgttcgatggcatcgccaccggtctgctggtgctgaaggacctgggcatccaggtggataggtacattgcctccgaggtgtgcgaggactccatcaccgtgggaatggtgcgtcatcagggcaagatcatgtacgtgggcgacgtgcggagcgtgacacagaagcatatccaggagtggggccctttcgacctggtgatcggcggcagcccttgcaatgacctgagcatcgtgaacccagcccggaagggcctgtacgagggaaccggcagactgttcttcgagttttacagactgctgcacgacgcccggcctaaggaaggcgacgaccggcccttcttttggctgttcgagaatgtggtggccatgggagtcagcgacaagcgggatattagccggttcctggagagcaaccccgtgatgatcgatgccaaggaagtgagcgccgcccaccgggccagatacttctggggcaatctgcctggcatgaacagacccctggccagcaccgtgaacgacaagctggagctgcaggagtgcctggagcacggccggatcgccaagttcagcaaggtgagaaccatcaccacccgaagcaacagcatcaaacaaggcaaggaccagcactttcctgtgttcatgaacgagaaggaggacatcctgtggtgtaccgagatggagagagtgttcgggttcccagtccactacacagatgtcagcaacatgtctagactggccagacagagactgctgggaagaagctggtccgtccctgtgatcagacacctgttcgcccctctgaaggagtacttcgcctgcgtgagcagcggcaacagcaacgccaacagccggggccccagcttctctagcggcctggtgccactgtccctgagagggagccacatgggccccatggagatctacaaaaccgtgagcgcctggaagcggcagcctgtgcgcgtgctgagcctgtttcggaatatcgataaagtcctgaaaagcctgggattcctggagagcggctctggctccggcggtggcaccctgaagtacgtggaggatgtgacaaacgtggtcagacgggatgtggagaagtggggccccttcgatctggtgtacggcagcacccaacccctgggcagctcttgtgaccggtgccctggctggtacatgtttcagttccaccggatcctgcagtacgccctgccgagacaggagtcccagcggccattcttttggattttcatggacaacttgctgctgaccgaggatgaccaggaaactaccactcggttcctgcagaccgaagccgtgaccctgcaggacgtgagaggccgggactaccagaacgccatgcgggtgtggtccaacatccctggactgaaaagcaagcacgcacctctgacccctaaagaagaggagtacctgcaggcccaggtgcggagcagaagcaagctggacgcccctaaggtggatctgctggtgaagaattgcctcctgcccctgagagagtacttcaagtatttcagccagaatagtctgcccctgggcggcccaagcagcggcgcccctcctcccagcggcggcagcccagccggctccccaacctctaccgaggagggcacctctgagtccgccacccccgagagcggccctggcacctccaccgagcccagcgagggcagcgcacccggcagccctgccggcagccccacctccacagaggagggaaccagcaccgagcccagcgaaggcagcgccccaggcaccagcaccgagcctagtgagggcggctctggcggcggcagcgcccaggagattaaacggatcaacaagatcagaagaagacttgtgaaagacagcaacaccaagaaggccggcaagacaggccccatgaaaaccctgctggttagagtgatgacacccgatctgagagagcggctggaaaacctgagaaagaagcctgaaaatatcccccagcccatcagcaatacatctagagccaacctgaataagctgctgaccgattacaccgaaatgaagaaggcgatcctgcatgtgtactgggaagagttccagaaggaccctgtgggcctgatgagccgggtggcccagcctgccagcaagaagatcgatcagaacaagctgaaacctgagatggacgagaagggcaacctgaccaccgccggctttgcctgctctcagtgtggccagcccctgttcgtgtacaagctggagcaggtgtctgagaagggcaaggcttacaccaactacttcggacggtgcaatgtggccgagcacgaaaagctgatcctgctggcccagctgaagcccgagaaggatagcgacgaagccgtgacatatagcctgggaaagtttgggcagagggccctggatttctacagcattcatgtgaccaaggagtccacccaccccgtgaagcccctggcccagatcgccggaaacagatacgcctccggacctgtgggaaaggccctgagcgacgcatgtatgggcacaatcgcctccttcctgtctaagtaccaggacatcatcatcgaacaccagaaggtggtgaagggcaaccagaagagactggagagcctgcgggagctggccggcaaggaaaacctggaataccctagcgtgaccctgccacctcagcctcacaccaaggagggcgttgatgcctacaacgaagtgatcgcccgggtgcgaatgtgggtgaacctgaacctgtggcagaagctgaagctaagcagagatgatgccaagcctctgctgagactgaagggattcccttcctttcctctggtcgagagacaggccaacgaagtggactggtgggacatggtgtgtaacgtgaagaagctgatcaacgagaaaaaggaggatggcaaggtgttttggcagaatctggctggctacaagagacaggaagccctgagaccatacctgagcagcgaggaagatcggaagaagggaaagaaattcgctcggtaccagctgggcgacctgctgctgcacctggaaaagaagcacggcgaggactggggaaaggtgtacgacgaggcctgggagcggattgacaagaaagtggaaggcctgagcaagcacatcaagctggaagaggaacggagaagcgaggacgcccagagcaaggccgccctgaccgactggctgcgggctaaggccagcttcgtgatcgagggcctgaaggaggccgacaaggacgagttctgcagatgcgagctgaagctgcagaagtggtacggggacctgcggggaaagcccttcgccatcgaagccgagaacagcatcctggacatcagcggcttcagcaagcagtacaactgtgccttcatctggcagaaggacggcgtgaagaagctgaacctgtacctgatcatcaactacttcaagggcggcaagctgcggttcaagaagatcaaacctgaagccttcgaagccaacagattctacaccgtgatcaacaaaaagagcggcgagatcgtgcccatggaggtgaacttcaacttcgacgaccccaacctgatcatcctgcctctggcctttggcaagagacagggcagagaattcatctggaacgacctgctgtccctggaaaccggcagcctgaagctggccaacggaagagtgatcgagaagacactgtacaacagaagaacccggcaggatgagcctgccctgttcgtggccctgaccttcgagcggcgggaggtcctggactcctccaatatcaaaccaatgaacctgatcggcgtggcaagaggcgaaaacatccccgccgtgatcgccctgaccgaccccgagggctgcccactgagccggtttaaggatagcctgggaaacccaacccacatcctgagaatcggcgagagctataaggagaagcagcggaccatccaggccaagaaggaggtggagcagcggagagccggcggctacagccggaagtacgccagcaaagccaagaatctggcagacgatatggtgagaaacaccgctagagatctgctgtactacgccgtgacccaggatgccatgctgatcttcgccaacctgagccggggcttcggccggcagggcaagcggaccttcatggccgagagacagtacacacggatggaggactggctgaccgccaagctggcctacgagggcctgagcaagacctacctgtccaagacactggcccagtacacctccaagacatgcagcaactgtgggtttaccatcaccagcgccgactacgacagggtgctggagaagctgaagaagacagcaacaggctggatgaccacaattaacggcaaggagctgaaggtggagggccagattacctactacaacagatacaagagacagaacgtagtcaaggacctgtccgtcgagctggatagactgagcgaagaatctgtgaacaacgacatctcctcctggacaaagggcagaagcggagaagctctgagcctcctgaagaaaagattctcccatagacccgtgcaggagaagttcgtgtgcctgaactgcggcttcgagacacacgcagccgagcaagccgccctgaacatcgccagatcctggctgttcctgcggagccaggagtacaagaaataccagacaaacaagacaaccggcaacaccgataagagagccttcgtcgagacctggcagtccttttaccggaagaagcttaaggaggtgtggaaacctgccgtgcggtctggcggatctggcggaggctccacaagcatgaccttcgaggacgtggccgtggagttcacccagtgggagtggggccagctggaccccgcccagcaggacctgtacagggaggtgatgctggagaacttcaagaacctggccagcctgggcctgcccgtgagcaagccctacgtgatcacccagctggaggagggcaaggacccctgcgtgctggacggcgagatcagcaccgagtacctgagccccccccccgactgggagaagaggcccaccagccccaagaaaaagagaaaagtctaagctgccttctgcggggcttgccttctggccatgcccttcttctctcccttgcacctgtacctcttggtctttgaataaagcctgagtaggaaggctagcaaaaaaaaaaaaaaaaaaaaaaaaaaaaaaaaaaaaaaaaaaaaaaaaaaaaaaaaaaaaaaaaaaaaaaaaaaaaaaaa

SEQ ID NO: 4013 - RNA, 5419 nt, synthetic construct
  source 1..5419: mol_type = other RNA
aggaaataagagagaaaagaagagtaagaagaaatataagagccaccatggcccctaagaagaagcgtaaagtgagccgggtgaacggcagcggcagcggcggcggcatgaaccacgaccaggagttcgacccccctaaggtgtaccctcccgtccccgccgagaagagaaagcccatccgggtcctgagcctgttcgatggcatcgccaccggtctgctggtgctgaaggacctgggcatccaggtggataggtacattgcctccgaggtgtgcgaggactccatcaccgtgggaatggtgcgtcatcagggcaagatcatgtacgtgggcgacgtgcggagcgtgacacagaagcatatccaggagtggggccctttcgacctggtgatcggcggcagcccttgcaatgacctgagcatcgtgaacccagcccggaagggcctgtacgagggaaccggcagactgttcttcgagttttacagactgctgcacgacgcccggcctaaggaaggcgacgaccggcccttcttttggctgttcgagaatgtggtggccatgggagtcagcgacaagcgggatattagccggttcctggagagcaaccccgtgatgatcgatgccaaggaagtgagcgccgcccaccgggccagatacttctggggcaatctgcctggcatgaacagacccctggccagcaccgtgaacgacaagctggagctgcaggagtgcctggagcacggccggatcgccaagttcagcaaggtgagaaccatcaccacccgaagcaacagcatcaaacaaggcaaggaccagcactttcctgtgttcatgaacgagaaggaggacatcctgtggtgtaccgagatggagagagtgttcgggttcccagtccactacacagatgtcagcaacatgtctagactggccagacagagactgctgggaagaagctggtccgtccctgtgatcagacacctgttcgcccctctgaaggagtacttcgcctgcgtgagcagcggcaacagcaacgccaacagccggggccccagcttctctagcggcctggtgccactgtccctgagagggagccacatgggccccatggagatctacaaaaccgtgagcgcctggaagcggcagcctgtgcgcgtgctgagcctgtttcggaatatcgataaagtcctgaaaagcctgggattcctggagagcggctctggctccggcggtggcaccctgaagtacgtggaggatgtgacaaacgtggtcagacgggatgtggagaagtggggccccttcgatctggtgtacggcagcacccaacccctgggcagctcttgtgaccggtgccctggctggtacatgtttcagttccaccggatcctgcagtacgccctgccgagacaggagtcccagcggccattcttttggattttcatggacaacttgctgctgaccgaggatgaccaggaaactaccactcggttcctgcagaccgaagccgtgaccctgcaggacgtgagaggccgggactaccagaacgccatgcgggtgtggtccaacatccctggactgaaaagcaagcacgcacctctgacccctaaagaagaggagtacctgcaggcccaggtgcggagcagaagcaagctggacgcccctaaggtggatctgctggtgaagaattgcctcctgcccctgagagagtacttcaagtatttcagccagaatagtctgcccctgggcggcccaagcagcggcgcccctcctcccagcggcggcagcccagccggctccccaacctctaccgaggagggcacctctgagtccgccacccccgagagcggccctggcacctccaccgagcccagcgagggcagcgcacccggcagccctgccggcagccccacctccacagaggagggaaccagcaccgagcccagcgaaggcagcgccccaggcaccagcaccgagcctagtgagggcggctctggcggcggcagcgcccaggagattaaacggatcaacaagatcagaagaagacttgtgaaagacagcaacaccaagaaggccggcaagacaggccccatgaaaaccctgctggttagagtgatgacacccgatctgagagagcggctggaaaacctgagaaagaagcctgaaaatatcccccagcccatcagcaatacatctagagccaacctgaataagctgctgaccgattacaccgaaatgaagaaggcgatcctgcatgtgtactgggaagagttccagaaggaccctgtgggcctgatgagccgggtggcccagcctgccagcaagaagatcgatcagaacaagctgaaacctgagatggacgagaagggcaacctgaccaccgccggctttgcctgctctcagtgtggccagcccctgttcgtgtacaagctggagcaggtgtctgagaagggcaaggcttacaccaactacttcggacggtgcaatgtggccgagcacgaaaagctgatcctgctggcccagctgaagcccgagaaggatagcgacgaagccgtgacatatagcctgggaaagtttgggcagagggccctggatttctacagcattcatgtgaccaaggagtccacccaccccgtgaagcccctggcccagatcgccggaaacagatacgcctccggacctgtgggaaaggccctgagcgacgcatgtatgggcacaatcgcctccttcctgtctaagtaccaggacatcatcatcgaacaccagaaggtggtgaagggcaaccagaagagactggagagcctgcgggagctggccggcaaggaaaacctggaataccctagcgtgaccctgccacctcagcctcacaccaaggagggcgttgatgcctacaacgaagtgatcgcccgggtgcgaatgtgggtgaacctgaacctgtggcagaagctgaagctaagcagagatgatgccaagcctctgctgagactgaagggattcccttcctttcctctggtcgagagacaggccaacgaagtggactggtgggacatggtgtgtaacgtgaagaagctgatcaacgagaaaaaggaggatggcaaggtgttttggcagaatctggctggctacaagagacaggaagccctgagaccatacctgagcagcgaggaagatcggaagaagggaaagaaattcgctcggtaccagctgggcgacctgctgctgcacctggaaaagaagcacggcgaggactggggaaaggtgtacgacgaggcctgggagcggattgacaagaaagtggaaggcctgagcaagcacatcaagctggaagaggaacggagaagcgaggacgcccagagcaaggccgccctgaccgactggctgcgggctaaggccagcttcgtgatcgagggcctgaaggaggccgacaaggacgagttctgcagatgcgagctgaagctgcagaagtggtacggggacctgcggggaaagcccttcgccatcgaagccgagaacagcatcctggacatcagcggcttcagcaagcagtacaactgtgccttcatctggcagaaggacggcgtgaagaagctgaacctgtacctgatcatcaactacttcaagggcggcaagctgcggttcaagaagatcaaacctgaagccttcgaagccaacagattctacaccgtgatcaacaaaaagagcggcgagatcgtgcccatggaggtgaacttcaacttcgacgaccccaacctgatcatcctgcctctggcctttggcaagagacagggcagagaattcatctggaacgacctgctgtccctggaaaccggcagcctgaagctggccaacggaagagtgatcgagaagacactgtacaacagaagaacccggcaggatgagcctgccctgttcgtggccctgaccttcgagcggcgggaggtcctggactcctccaatatcaaaccaatgaacctgatcggcgtggcaagaggcgaaaacatccccgccgtgatcgccctgaccgaccccgagggctgcccactgagccggtttaaggatagcctgggaaacccaacccacatcctgagaatcggcgagagctataaggagaagcagcggaccatccaggccaagaaggaggtggagcagcggagagccggcggctacagccggaagtacgccagcaaagccaagaatctggcagacgatatggtgagaaacaccgctagagatctgctgtactacgccgtgacccaggatgccatgctgatcttcgccaacctgagccggggcttcggccggcagggcaagcggaccttcatggccgagagacagtacacacggatggaggactggctgaccgccaagctggcctacgagggcctgagcaagacctacctgtccaagacactggcccagtacacctccaagacatgcagcaactgtgggtttaccatcaccagcgccgactacgacagggtgctggagaagctgaagaagacagcaacaggctggatgaccacaattaacggcaaggagctgaaggtggagggccagattacctactacaacagatacaagagacagaacgtagtcaaggacctgtccgtcgagctggatagactgagcgaagaatctgtgaacaacgacatctcctcctggacaaagggcagaagcggagaagctctgagcctcctgaagaaaagattctcccatagacccgtgcaggagaagttcgtgtgcctgaactgcggcttcgagacacacgcagccgagcaagccgccctgaacatcgccagatcctggctgttcctgcggagccaggagtacaagaaataccagacaaacaagacaaccggcaacaccgataagagagccttcgtcgagacctggcagtccttttaccggaagaagcttaaggaggtgtggaaacctgccgtgcggtctggcggatctggcggaggctccacaagcatgctgcagaccgcctggccccagaggctgagcaggaacctgtggttccaggagagcgtggccttcgaggacgtggccgtgtacttcacccagaaccagtgggccagcctggaccccgcccagagggccctgtacagggaggtgatgctggagaactacgccaacgtgaccagcctggtggccttccccttccccaagcccgccctgatcagccacctggagaagggcgaggccccctggggcaccagccccaagaaaaagagaaaagtctaagctgccttctgcggggcttgccttctggccatgcccttcttctctcccttgcacctgtacctcttggtctttgaataaagcctgagtaggaaggctagcaaaaaaaaaaaaaaaaaaaaaaaaaaaaaaaaaaaaaaaaaaaaaaaaaaaaaaaaaaaaaaaaaaaaaaaaaaaaaaaa

SEQ ID NO: 4014 - RNA, 5419 nt, synthetic construct
  source 1..5419: mol_type = other RNA
aggaaataagagagaaaagaagagtaagaagaaatataagagccaccatggcccctaagaagaagcgtaaagtgagccgggtgaacggcagcggcagcggcggcggcatgaaccacgaccaggagttcgacccccctaaggtgtaccctcccgtccccgccgagaagagaaagcccatccgggtcctgagcctgttcgatggcatcgccaccggtctgctggtgctgaaggacctgggcatccaggtggataggtacattgcctccgaggtgtgcgaggactccatcaccgtgggaatggtgcgtcatcagggcaagatcatgtacgtgggcgacgtgcggagcgtgacacagaagcatatccaggagtggggccctttcgacctggtgatcggcggcagcccttgcaatgacctgagcatcgtgaacccagcccggaagggcctgtacgagggaaccggcagactgttcttcgagttttacagactgctgcacgacgcccggcctaaggaaggcgacgaccggcccttcttttggctgttcgagaatgtggtggccatgggagtcagcgacaagcgggatattagccggttcctggagagcaaccccgtgatgatcgatgccaaggaagtgagcgccgcccaccgggccagatacttctggggcaatctgcctggcatgaacagacccctggccagcaccgtgaacgacaagctggagctgcaggagtgcctggagcacggccggatcgccaagttcagcaaggtgagaaccatcaccacccgaagcaacagcatcaaacaaggcaaggaccagcactttcctgtgttcatgaacgagaaggaggacatcctgtggtgtaccgagatggagagagtgttcgggttcccagtccactacacagatgtcagcaacatgtctagactggccagacagagactgctgggaagaagctggtccgtccctgtgatcagacacctgttcgcccctctgaaggagtacttcgcctgcgtgagcagcggcaacagcaacgccaacagccggggccccagcttctctagcggcctggtgccactgtccctgagagggagccacatgggccccatggagatctacaaaaccgtgagcgcctggaagcggcagcctgtgcgcgtgctgagcctgtttcggaatatcgataaagtcctgaaaagcctgggattcctggagagcggctctggctccggcggtggcaccctgaagtacgtggaggatgtgacaaacgtggtcagacgggatgtggagaagtggggccccttcgatctggtgtacggcagcacccaacccctgggcagctcttgtgaccggtgccctggctggtacatgtttcagttccaccggatcctgcagtacgccctgccgagacaggagtcccagcggccattcttttggattttcatggacaacttgctgctgaccgaggatgaccaggaaactaccactcggttcctgcagaccgaagccgtgaccctgcaggacgtgagaggccgggactaccagaacgccatgcgggtgtggtccaacatccctggactgaaaagcaagcacgcacctctgacccctaaagaagaggagtacctgcaggcccaggtgcggagcagaagcaagctggacgcccctaaggtggatctgctggtgaagaattgcctcctgcccctgagagagtacttcaagtatttcagccagaatagtctgcccctgggcggcccaagcagcggcgcccctcctcccagcggcggcagcccagccggctccccaacctctaccgaggagggcacctctgagtccgccacccccgagagcggccctggcacctccaccgagcccagcgagggcagcgcacccggcagccctgccggcagccccacctccacagaggagggaaccagcaccgagcccagcgaaggcagcgccccaggcaccagcaccgagcctagtgagggcggctctggcggcggcagcgcccaggagattaaacggatcaacaagatcagaagaagacttgtgaaagacagcaacaccaagaaggccggcaagacaggccccatgaaaaccctgctggttagagtgatgacacccgatctgagagagcggctggaaaacctgagaaagaagcctgaaaatatcccccagcccatcagcaatacatctagagccaacctgaataagctgctgaccgattacaccgaaatgaagaaggcgatcctgcatgtgtactgggaagagttccagaaggaccctgtgggcctgatgagccgggtggcccagcctgccagcaagaagatcgatcagaacaagctgaaacctgagatggacgagaagggcaacctgaccaccgccggctttgcctgctctcagtgtggccagcccctgttcgtgtacaagctggagcaggtgtctgagaagggcaaggcttacaccaactacttcggacggtgcaatgtggccgagcacgaaaagctgatcctgctggcccagctgaagcccgagaaggatagcgacgaagccgtgacatatagcctgggaaagtttgggcagagggccctggatttctacagcattcatgtgaccaaggagtccacccaccccgtgaagcccctggcccagatcgccggaaacagatacgcctccggacctgtgggaaaggccctgagcgacgcatgtatgggcacaatcgcctccttcctgtctaagtaccaggacatcatcatcgaacaccagaaggtggtgaagggcaaccagaagagactggagagcctgcgggagctggccggcaaggaaaacctggaataccctagcgtgaccctgccacctcagcctcacaccaaggagggcgttgatgcctacaacgaagtgatcgcccgggtgcgaatgtgggtgaacctgaacctgtggcagaagctgaagctaagcagagatgatgccaagcctctgctgagactgaagggattcccttcctttcctctggtcgagagacaggccaacgaagtggactggtgggacatggtgtgtaacgtgaagaagctgatcaacgagaaaaaggaggatggcaaggtgttttggcagaatctggctggctacaagagacaggaagccctgagaccatacctgagcagcgaggaagatcggaagaagggaaagaaattcgctcggtaccagctgggcgacctgctgctgcacctggaaaagaagcacggcgaggactggggaaaggtgtacgacgaggcctgggagcggattgacaagaaagtggaaggcctgagcaagcacatcaagctggaagaggaacggagaagcgaggacgcccagagcaaggccgccctgaccgactggctgcgggctaaggccagcttcgtgatcgagggcctgaaggaggccgacaaggacgagttctgcagatgcgagctgaagctgcagaagtggtacggggacctgcggggaaagcccttcgccatcgaagccgagaacagcatcctggacatcagcggcttcagcaagcagtacaactgtgccttcatctggcagaaggacggcgtgaagaagctgaacctgtacctgatcatcaactacttcaagggcggcaagctgcggttcaagaagatcaaacctgaagccttcgaagccaacagattctacaccgtgatcaacaaaaagagcggcgagatcgtgcccatggaggtgaacttcaacttcgacgaccccaacctgatcatcctgcctctggcctttggcaagagacagggcagagaattcatctggaacgacctgctgtccctggaaaccggcagcctgaagctggccaacggaagagtgatcgagaagacactgtacaacagaagaacccggcaggatgagcctgccctgttcgtggccctgaccttcgagcggcgggaggtcctggactcctccaatatcaaaccaatgaacctgatcggcgtggcaagaggcgaaaacatccccgccgtgatcgccctgaccgaccccgagggctgcccactgagccggtttaaggatagcctgggaaacccaacccacatcctgagaatcggcgagagctataaggagaagcagcggaccatccaggccaagaaggaggtggagcagcggagagccggcggctacagccggaagtacgccagcaaagccaagaatctggcagacgatatggtgagaaacaccgctagagatctgctgtactacgccgtgacccaggatgccatgctgatcttcgccaacctgagccggggcttcggccggcagggcaagcggaccttcatggccgagagacagtacacacggatggaggactggctgaccgccaagctggcctacgagggcctgagcaagacctacctgtccaagacactggcccagtacacctccaagacatgcagcaactgtgggtttaccatcaccagcgccgactacgacagggtgctggagaagctgaagaagacagcaacaggctggatgaccacaattaacggcaaggagctgaaggtggagggccagattacctactacaacagatacaagagacagaacgtagtcaaggacctgtccgtcgagctggatagactgagcgaagaatctgtgaacaacgacatctcctcctggacaaagggcagaagcggagaagctctgagcctcctgaagaaaagattctcccatagacccgtgcaggagaagttcgtgtgcctgaactgcggcttcgagacacacgcagccgagcaagccgccctgaacatcgccagatcctggctgttcctgcggagccaggagtacaagaaataccagacaaacaagacaaccggcaacaccgataagagagccttcgtcgagacctggcagtccttttaccggaagaagcttaaggaggtgtggaaacctgccgtgcggtctggcggatctggcggaggctccacaagcatggagcccctgaagttcagggacgtggccatcgagttcagcctggaggagtggcagtgcctggacagcatccagcagaacctgtacaggaacgtgatgctggagaactacaggaacctggtgttcctgggcatcgccgccagcaagcccgacctgatcatctgcctggagcaggagaaggagccctggagcaggaagaggaggaggatggtggccgagctgcccgtgatctgcagccacttcaccagccccaagaaaaagagaaaagtctaagctgccttctgcggggcttgccttctggccatgcccttcttctctcccttgcacctgtacctcttggtctttgaataaagcctgagtaggaaggctagcaaaaaaaaaaaaaaaaaaaaaaaaaaaaaaaaaaaaaaaaaaaaaaaaaaaaaaaaaaaaaaaaaaaaaaaaaaaaaaaa

SEQ ID NO: 4015 - RNA, 5419 nt, synthetic construct
  source 1..5419: mol_type = other RNA
aggaaataagagagaaaagaagagtaagaagaaatataagagccaccatggcccctaagaagaagcgtaaagtgagccgggtgaacggcagcggcagcggcggcggcatgaaccacgaccaggagttcgacccccctaaggtgtaccctcccgtccccgccgagaagagaaagcccatccgggtcctgagcctgttcgatggcatcgccaccggtctgctggtgctgaaggacctgggcatccaggtggataggtacattgcctccgaggtgtgcgaggactccatcaccgtgggaatggtgcgtcatcagggcaagatcatgtacgtgggcgacgtgcggagcgtgacacagaagcatatccaggagtggggccctttcgacctggtgatcggcggcagcccttgcaatgacctgagcatcgtgaacccagcccggaagggcctgtacgagggaaccggcagactgttcttcgagttttacagactgctgcacgacgcccggcctaaggaaggcgacgaccggcccttcttttggctgttcgagaatgtggtggccatgggagtcagcgacaagcgggatattagccggttcctggagagcaaccccgtgatgatcgatgccaaggaagtgagcgccgcccaccgggccagatacttctggggcaatctgcctggcatgaacagacccctggccagcaccgtgaacgacaagctggagctgcaggagtgcctggagcacggccggatcgccaagttcagcaaggtgagaaccatcaccacccgaagcaacagcatcaaacaaggcaaggaccagcactttcctgtgttcatgaacgagaaggaggacatcctgtggtgtaccgagatggagagagtgttcgggttcccagtccactacacagatgtcagcaacatgtctagactggccagacagagactgctgggaagaagctggtccgtccctgtgatcagacacctgttcgcccctctgaaggagtacttcgcctgcgtgagcagcggcaacagcaacgccaacagccggggccccagcttctctagcggcctggtgccactgtccctgagagggagccacatgggccccatggagatctacaaaaccgtgagcgcctggaagcggcagcctgtgcgcgtgctgagcctgtttcggaatatcgataaagtcctgaaaagcctgggattcctggagagcggctctggctccggcggtggcaccctgaagtacgtggaggatgtgacaaacgtggtcagacgggatgtggagaagtggggccccttcgatctggtgtacggcagcacccaacccctgggcagctcttgtgaccggtgccctggctggtacatgtttcagttccaccggatcctgcagtacgccctgccgagacaggagtcccagcggccattcttttggattttcatggacaacttgctgctgaccgaggatgaccaggaaactaccactcggttcctgcagaccgaagccgtgaccctgcaggacgtgagaggccgggactaccagaacgccatgcgggtgtggtccaacatccctggactgaaaagcaagcacgcacctctgacccctaaagaagaggagtacctgcaggcccaggtgcggagcagaagcaagctggacgcccctaaggtggatctgctggtgaagaattgcctcctgcccctgagagagtacttcaagtatttcagccagaatagtctgcccctgggcggcccaagcagcggcgcccctcctcccagcggcggcagcccagccggctccccaacctctaccgaggagggcacctctgagtccgccacccccgagagcggccctggcacctccaccgagcccagcgagggcagcgcacccggcagccctgccggcagccccacctccacagaggagggaaccagcaccgagcccagcgaaggcagcgccccaggcaccagcaccgagcctagtgagggcggctctggcggcggcagcgcccaggagattaaacggatcaacaagatcagaagaagacttgtgaaagacagcaacaccaagaaggccggcaagacaggccccatgaaaaccctgctggttagagtgatgacacccgatctgagagagcggctggaaaacctgagaaagaagcctgaaaatatcccccagcccatcagcaatacatctagagccaacctgaataagctgctgaccgattacaccgaaatgaagaaggcgatcctgcatgtgtactgggaagagttccagaaggaccctgtgggcctgatgagccgggtggcccagcctgccagcaagaagatcgatcagaacaagctgaaacctgagatggacgagaagggcaacctgaccaccgccggctttgcctgctctcagtgtggccagcccctgttcgtgtacaagctggagcaggtgtctgagaagggcaaggcttacaccaactacttcggacggtgcaatgtggccgagcacgaaaagctgatcctgctggcccagctgaagcccgagaaggatagcgacgaagccgtgacatatagcctgggaaagtttgggcagagggccctggatttctacagcattcatgtgaccaaggagtccacccaccccgtgaagcccctggcccagatcgccggaaacagatacgcctccggacctgtgggaaaggccctgagcgacgcatgtatgggcacaatcgcctccttcctgtctaagtaccaggacatcatcatcgaacaccagaaggtggtgaagggcaaccagaagagactggagagcctgcgggagctggccggcaaggaaaacctggaataccctagcgtgaccctgccacctcagcctcacaccaaggagggcgttgatgcctacaacgaagtgatcgcccgggtgcgaatgtgggtgaacctgaacctgtggcagaagctgaagctaagcagagatgatgccaagcctctgctgagactgaagggattcccttcctttcctctggtcgagagacaggccaacgaagtggactggtgggacatggtgtgtaacgtgaagaagctgatcaacgagaaaaaggaggatggcaaggtgttttggcagaatctggctggctacaagagacaggaagccctgagaccatacctgagcagcgaggaagatcggaagaagggaaagaaattcgctcggtaccagctgggcgacctgctgctgcacctggaaaagaagcacggcgaggactggggaaaggtgtacgacgaggcctgggagcggattgacaagaaagtggaaggcctgagcaagcacatcaagctggaagaggaacggagaagcgaggacgcccagagcaaggccgccctgaccgactggctgcgggctaaggccagcttcgtgatcgagggcctgaaggaggccgacaaggacgagttctgcagatgcgagctgaagctgcagaagtggtacggggacctgcggggaaagcccttcgccatcgaagccgagaacagcatcctggacatcagcggcttcagcaagcagtacaactgtgccttcatctggcagaaggacggcgtgaagaagctgaacctgtacctgatcatcaactacttcaagggcggcaagctgcggttcaagaagatcaaacctgaagccttcgaagccaacagattctacaccgtgatcaacaaaaagagcggcgagatcgtgcccatggaggtgaacttcaacttcgacgaccccaacctgatcatcctgcctctggcctttggcaagagacagggcagagaattcatctggaacgacctgctgtccctggaaaccggcagcctgaagctggccaacggaagagtgatcgagaagacactgtacaacagaagaacccggcaggatgagcctgccctgttcgtggccctgaccttcgagcggcgggaggtcctggactcctccaatatcaaaccaatgaacctgatcggcgtggcaagaggcgaaaacatccccgccgtgatcgccctgaccgaccccgagggctgcccactgagccggtttaaggatagcctgggaaacccaacccacatcctgagaatcggcgagagctataaggagaagcagcggaccatccaggccaagaaggaggtggagcagcggagagccggcggctacagccggaagtacgccagcaaagccaagaatctggcagacgatatggtgagaaacaccgctagagatctgctgtactacgccgtgacccaggatgccatgctgatcttcgccaacctgagccggggcttcggccggcagggcaagcggaccttcatggccgagagacagtacacacggatggaggactggctgaccgccaagctggcctacgagggcctgagcaagacctacctgtccaagacactggcccagtacacctccaagacatgcagcaactgtgggtttaccatcaccagcgccgactacgacagggtgctggagaagctgaagaagacagcaacaggctggatgaccacaattaacggcaaggagctgaaggtggagggccagattacctactacaacagatacaagagacagaacgtagtcaaggacctgtccgtcgagctggatagactgagcgaagaatctgtgaacaacgacatctcctcctggacaaagggcagaagcggagaagctctgagcctcctgaagaaaagattctcccatagacccgtgcaggagaagttcgtgtgcctgaactgcggcttcgagacacacgcagccgagcaagccgccctgaacatcgccagatcctggctgttcctgcggagccaggagtacaagaaataccagacaaacaagacaaccggcaacaccgataagagagccttcgtcgagacctggcagtccttttaccggaagaagcttaaggaggtgtggaaacctgccgtgcggtctggcggatctggcggaggctccacaagcatggagagcgtgagcttcgaggacgtggccgtgaacttcacccccgaggagtgggccctgctgaacagcagccagaagaggctgcacagggacgtgatgcaggagaacttcaggaacctggccgccatcgccaagaaccaggaggaccccaccctggaggacgactacgagtacctgaggaagatcctgcccttcgccgtgcagaccggctacaggctgtgcgagaaccaggactacgccgagaccagccccaagaaaaagagaaaagtctaagctgccttctgcggggcttgccttctggccatgcccttcttctctcccttgcacctgtacctcttggtctttgaataaagcctgagtaggaaggctagcaaaaaaaaaaaaaaaaaaaaaaaaaaaaaaaaaaaaaaaaaaaaaaaaaaaaaaaaaaaaaaaaaaaaaaaaaaaaaaaa

SEQ ID NO: 4016 - RNA, 5419 nt, synthetic construct
  source 1..5419: mol_type = other RNA
aggaaataagagagaaaagaagagtaagaagaaatataagagccaccatggcccctaagaagaagcgtaaagtgagccgggtgaacggcagcggcagcggcggcggcatgaaccacgaccaggagttcgacccccctaaggtgtaccctcccgtccccgccgagaagagaaagcccatccgggtcctgagcctgttcgatggcatcgccaccggtctgctggtgctgaaggacctgggcatccaggtggataggtacattgcctccgaggtgtgcgaggactccatcaccgtgggaatggtgcgtcatcagggcaagatcatgtacgtgggcgacgtgcggagcgtgacacagaagcatatccaggagtggggccctttcgacctggtgatcggcggcagcccttgcaatgacctgagcatcgtgaacccagcccggaagggcctgtacgagggaaccggcagactgttcttcgagttttacagactgctgcacgacgcccggcctaaggaaggcgacgaccggcccttcttttggctgttcgagaatgtggtggccatgggagtcagcgacaagcgggatattagccggttcctggagagcaaccccgtgatgatcgatgccaaggaagtgagcgccgcccaccgggccagatacttctggggcaatctgcctggcatgaacagacccctggccagcaccgtgaacgacaagctggagctgcaggagtgcctggagcacggccggatcgccaagttcagcaaggtgagaaccatcaccacccgaagcaacagcatcaaacaaggcaaggaccagcactttcctgtgttcatgaacgagaaggaggacatcctgtggtgtaccgagatggagagagtgttcgggttcccagtccactacacagatgtcagcaacatgtctagactggccagacagagactgctgggaagaagctggtccgtccctgtgatcagacacctgttcgcccctctgaaggagtacttcgcctgcgtgagcagcggcaacagcaacgccaacagccggggccccagcttctctagcggcctggtgccactgtccctgagagggagccacatgggccccatggagatctacaaaaccgtgagcgcctggaagcggcagcctgtgcgcgtgctgagcctgtttcggaatatcgataaagtcctgaaaagcctgggattcctggagagcggctctggctccggcggtggcaccctgaagtacgtggaggatgtgacaaacgtggtcagacgggatgtggagaagtggggccccttcgatctggtgtacggcagcacccaacccctgggcagctcttgtgaccggtgccctggctggtacatgtttcagttccaccggatcctgcagtacgccctgccgagacaggagtcccagcggccattcttttggattttcatggacaacttgctgctgaccgaggatgaccaggaaactaccactcggttcctgcagaccgaagccgtgaccctgcaggacgtgagaggccgggactaccagaacgccatgcgggtgtggtccaacatccctggactgaaaagcaagcacgcacctctgacccctaaagaagaggagtacctgcaggcccaggtgcggagcagaagcaagctggacgcccctaaggtggatctgctggtgaagaattgcctcctgcccctgagagagtacttcaagtatttcagccagaatagtctgcccctgggcggcccaagcagcggcgcccctcctcccagcggcggcagcccagccggctccccaacctctaccgaggagggcacctctgagtccgccacccccgagagcggccctggcacctccaccgagcccagcgagggcagcgcacccggcagccctgccggcagccccacctccacagaggagggaaccagcaccgagcccagcgaaggcagcgccccaggcaccagcaccgagcctagtgagggcggctctggcggcggcagcgcccaggagattaaacggatcaacaagatcagaagaagacttgtgaaagacagcaacaccaagaaggccggcaagacaggccccatgaaaaccctgctggttagagtgatgacacccgatctgagagagcggctggaaaacctgagaaagaagcctgaaaatatcccccagcccatcagcaatacatctagagccaacctgaataagctgctgaccgattacaccgaaatgaagaaggcgatcctgcatgtgtactgggaagagttccagaaggaccctgtgggcctgatgagccgggtggcccagcctgccagcaagaagatcgatcagaacaagctgaaacctgagatggacgagaagggcaacctgaccaccgccggctttgcctgctctcagtgtggccagcccctgttcgtgtacaagctggagcaggtgtctgagaagggcaaggcttacaccaactacttcggacggtgcaatgtggccgagcacgaaaagctgatcctgctggcccagctgaagcccgagaaggatagcgacgaagccgtgacatatagcctgggaaagtttgggcagagggccctggatttctacagcattcatgtgaccaaggagtccacccaccccgtgaagcccctggcccagatcgccggaaacagatacgcctccggacctgtgggaaaggccctgagcgacgcatgtatgggcacaatcgcctccttcctgtctaagtaccaggacatcatcatcgaacaccagaaggtggtgaagggcaaccagaagagactggagagcctgcgggagctggccggcaaggaaaacctggaataccctagcgtgaccctgccacctcagcctcacaccaaggagggcgttgatgcctacaacgaagtgatcgcccgggtgcgaatgtgggtgaacctgaacctgtggcagaagctgaagctaagcagagatgatgccaagcctctgctgagactgaagggattcccttcctttcctctggtcgagagacaggccaacgaagtggactggtgggacatggtgtgtaacgtgaagaagctgatcaacgagaaaaaggaggatggcaaggtgttttggcagaatctggctggctacaagagacaggaagccctgagaccatacctgagcagcgaggaagatcggaagaagggaaagaaattcgctcggtaccagctgggcgacctgctgctgcacctggaaaagaagcacggcgaggactggggaaaggtgtacgacgaggcctgggagcggattgacaagaaagtggaaggcctgagcaagcacatcaagctggaagaggaacggagaagcgaggacgcccagagcaaggccgccctgaccgactggctgcgggctaaggccagcttcgtgatcgagggcctgaaggaggccgacaaggacgagttctgcagatgcgagctgaagctgcagaagtggtacggggacctgcggggaaagcccttcgccatcgaagccgagaacagcatcctggacatcagcggcttcagcaagcagtacaactgtgccttcatctggcagaaggacggcgtgaagaagctgaacctgtacctgatcatcaactacttcaagggcggcaagctgcggttcaagaagatcaaacctgaagccttcgaagccaacagattctacaccgtgatcaacaaaaagagcggcgagatcgtgcccatggaggtgaacttcaacttcgacgaccccaacctgatcatcctgcctctggcctttggcaagagacagggcagagaattcatctggaacgacctgctgtccctggaaaccggcagcctgaagctggccaacggaagagtgatcgagaagacactgtacaacagaagaacccggcaggatgagcctgccctgttcgtggccctgaccttcgagcggcgggaggtcctggactcctccaatatcaaaccaatgaacctgatcggcgtggcaagaggcgaaaacatccccgccgtgatcgccctgaccgaccccgagggctgcccactgagccggtttaaggatagcctgggaaacccaacccacatcctgagaatcggcgagagctataaggagaagcagcggaccatccaggccaagaaggaggtggagcagcggagagccggcggctacagccggaagtacgccagcaaagccaagaatctggcagacgatatggtgagaaacaccgctagagatctgctgtactacgccgtgacccaggatgccatgctgatcttcgccaacctgagccggggcttcggccggcagggcaagcggaccttcatggccgagagacagtacacacggatggaggactggctgaccgccaagctggcctacgagggcctgagcaagacctacctgtccaagacactggcccagtacacctccaagacatgcagcaactgtgggtttaccatcaccagcgccgactacgacagggtgctggagaagctgaagaagacagcaacaggctggatgaccacaattaacggcaaggagctgaaggtggagggccagattacctactacaacagatacaagagacagaacgtagtcaaggacctgtccgtcgagctggatagactgagcgaagaatctgtgaacaacgacatctcctcctggacaaagggcagaagcggagaagctctgagcctcctgaagaaaagattctcccatagacccgtgcaggagaagttcgtgtgcctgaactgcggcttcgagacacacgcagccgagcaagccgccctgaacatcgccagatcctggctgttcctgcggagccaggagtacaagaaataccagacaaacaagacaaccggcaacaccgataagagagccttcgtcgagacctggcagtccttttaccggaagaagcttaaggaggtgtggaaacctgccgtgcggtctggcggatctggcggaggctccacaagcaccccccagaccctgaagcccagggcccccggcgcctgcagcagggccaggagccccggccccggcatccaggacagcgacgccgtgggcagcgtgaccttcgaggacgtggccgtgtacttcagctgggaggagtgggccctgctggacgaggcccagaggtgcctgtaccacgacgtgatgctggagaacttcgccctgaccagcagcctgggcggccccaccggcggcggcagggtggtgaccagccccaagaaaaagagaaaagtctaagctgccttctgcggggcttgccttctggccatgcccttcttctctcccttgcacctgtacctcttggtctttgaataaagcctgagtaggaaggctagcaaaaaaaaaaaaaaaaaaaaaaaaaaaaaaaaaaaaaaaaaaaaaaaaaaaaaaaaaaaaaaaaaaaaaaaaaaaaaaaa

SEQ ID NO: 4017 - RNA, 5419 nt, synthetic construct
  source 1..5419: mol_type = other RNA
aggaaataagagagaaaagaagagtaagaagaaatataagagccaccatggcccctaagaagaagcgtaaagtgagccgggtgaacggcagcggcagcggcggcggcatgaaccacgaccaggagttcgacccccctaaggtgtaccctcccgtccccgccgagaagagaaagcccatccgggtcctgagcctgttcgatggcatcgccaccggtctgctggtgctgaaggacctgggcatccaggtggataggtacattgcctccgaggtgtgcgaggactccatcaccgtgggaatggtgcgtcatcagggcaagatcatgtacgtgggcgacgtgcggagcgtgacacagaagcatatccaggagtggggccctttcgacctggtgatcggcggcagcccttgcaatgacctgagcatcgtgaacccagcccggaagggcctgtacgagggaaccggcagactgttcttcgagttttacagactgctgcacgacgcccggcctaaggaaggcgacgaccggcccttcttttggctgttcgagaatgtggtggccatgggagtcagcgacaagcgggatattagccggttcctggagagcaaccccgtgatgatcgatgccaaggaagtgagcgccgcccaccgggccagatacttctggggcaatctgcctggcatgaacagacccctggccagcaccgtgaacgacaagctggagctgcaggagtgcctggagcacggccggatcgccaagttcagcaaggtgagaaccatcaccacccgaagcaacagcatcaaacaaggcaaggaccagcactttcctgtgttcatgaacgagaaggaggacatcctgtggtgtaccgagatggagagagtgttcgggttcccagtccactacacagatgtcagcaacatgtctagactggccagacagagactgctgggaagaagctggtccgtccctgtgatcagacacctgttcgcccctctgaaggagtacttcgcctgcgtgagcagcggcaacagcaacgccaacagccggggccccagcttctctagcggcctggtgccactgtccctgagagggagccacatgggccccatggagatctacaaaaccgtgagcgcctggaagcggcagcctgtgcgcgtgctgagcctgtttcggaatatcgataaagtcctgaaaagcctgggattcctggagagcggctctggctccggcggtggcaccctgaagtacgtggaggatgtgacaaacgtggtcagacgggatgtggagaagtggggccccttcgatctggtgtacggcagcacccaacccctgggcagctcttgtgaccggtgccctggctggtacatgtttcagttccaccggatcctgcagtacgccctgccgagacaggagtcccagcggccattcttttggattttcatggacaacttgctgctgaccgaggatgaccaggaaactaccactcggttcctgcagaccgaagccgtgaccctgcaggacgtgagaggccgggactaccagaacgccatgcgggtgtggtccaacatccctggactgaaaagcaagcacgcacctctgacccctaaagaagaggagtacctgcaggcccaggtgcggagcagaagcaagctggacgcccctaaggtggatctgctggtgaagaattgcctcctgcccctgagagagtacttcaagtatttcagccagaatagtctgcccctgggcggcccaagcagcggcgcccctcctcccagcggcggcagcccagccggctccccaacctctaccgaggagggcacctctgagtccgccacccccgagagcggccctggcacctccaccgagcccagcgagggcagcgcacccggcagccctgccggcagccccacctccacagaggagggaaccagcaccgagcccagcgaaggcagcgccccaggcaccagcaccgagcctagtgagggcggctctggcggcggcagcgcccaggagattaaacggatcaacaagatcagaagaagacttgtgaaagacagcaacaccaagaaggccggcaagacaggccccatgaaaaccctgctggttagagtgatgacacccgatctgagagagcggctggaaaacctgagaaagaagcctgaaaatatcccccagcccatcagcaatacatctagagccaacctgaataagctgctgaccgattacaccgaaatgaagaaggcgatcctgcatgtgtactgggaagagttccagaaggaccctgtgggcctgatgagccgggtggcccagcctgccagcaagaagatcgatcagaacaagctgaaacctgagatggacgagaagggcaacctgaccaccgccggctttgcctgctctcagtgtggccagcccctgttcgtgtacaagctggagcaggtgtctgagaagggcaaggcttacaccaactacttcggacggtgcaatgtggccgagcacgaaaagctgatcctgctggcccagctgaagcccgagaaggatagcgacgaagccgtgacatatagcctgggaaagtttgggcagagggccctggatttctacagcattcatgtgaccaaggagtccacccaccccgtgaagcccctggcccagatcgccggaaacagatacgcctccggacctgtgggaaaggccctgagcgacgcatgtatgggcacaatcgcctccttcctgtctaagtaccaggacatcatcatcgaacaccagaaggtggtgaagggcaaccagaagagactggagagcctgcgggagctggccggcaaggaaaacctggaataccctagcgtgaccctgccacctcagcctcacaccaaggagggcgttgatgcctacaacgaagtgatcgcccgggtgcgaatgtgggtgaacctgaacctgtggcagaagctgaagctaagcagagatgatgccaagcctctgctgagactgaagggattcccttcctttcctctggtcgagagacaggccaacgaagtggactggtgggacatggtgtgtaacgtgaagaagctgatcaacgagaaaaaggaggatggcaaggtgttttggcagaatctggctggctacaagagacaggaagccctgagaccatacctgagcagcgaggaagatcggaagaagggaaagaaattcgctcggtaccagctgggcgacctgctgctgcacctggaaaagaagcacggcgaggactggggaaaggtgtacgacgaggcctgggagcggattgacaagaaagtggaaggcctgagcaagcacatcaagctggaagaggaacggagaagcgaggacgcccagagcaaggccgccctgaccgactggctgcgggctaaggccagcttcgtgatcgagggcctgaaggaggccgacaaggacgagttctgcagatgcgagctgaagctgcagaagtggtacggggacctgcggggaaagcccttcgccatcgaagccgagaacagcatcctggacatcagcggcttcagcaagcagtacaactgtgccttcatctggcagaaggacggcgtgaagaagctgaacctgtacctgatcatcaactacttcaagggcggcaagctgcggttcaagaagatcaaacctgaagccttcgaagccaacagattctacaccgtgatcaacaaaaagagcggcgagatcgtgcccatggaggtgaacttcaacttcgacgaccccaacctgatcatcctgcctctggcctttggcaagagacagggcagagaattcatctggaacgacctgctgtccctggaaaccggcagcctgaagctggccaacggaagagtgatcgagaagacactgtacaacagaagaacccggcaggatgagcctgccctgttcgtggccctgaccttcgagcggcgggaggtcctggactcctccaatatcaaaccaatgaacctgatcggcgtggcaagaggcgaaaacatccccgccgtgatcgccctgaccgaccccgagggctgcccactgagccggtttaaggatagcctgggaaacccaacccacatcctgagaatcggcgagagctataaggagaagcagcggaccatccaggccaagaaggaggtggagcagcggagagccggcggctacagccggaagtacgccagcaaagccaagaatctggcagacgatatggtgagaaacaccgctagagatctgctgtactacgccgtgacccaggatgccatgctgatcttcgccaacctgagccggggcttcggccggcagggcaagcggaccttcatggccgagagacagtacacacggatggaggactggctgaccgccaagctggcctacgagggcctgagcaagacctacctgtccaagacactggcccagtacacctccaagacatgcagcaactgtgggtttaccatcaccagcgccgactacgacagggtgctggagaagctgaagaagacagcaacaggctggatgaccacaattaacggcaaggagctgaaggtggagggccagattacctactacaacagatacaagagacagaacgtagtcaaggacctgtccgtcgagctggatagactgagcgaagaatctgtgaacaacgacatctcctcctggacaaagggcagaagcggagaagctctgagcctcctgaagaaaagattctcccatagacccgtgcaggagaagttcgtgtgcctgaactgcggcttcgagacacacgcagccgagcaagccgccctgaacatcgccagatcctggctgttcctgcggagccaggagtacaagaaataccagacaaacaagacaaccggcaacaccgataagagagccttcgtcgagacctggcagtccttttaccggaagaagcttaaggaggtgtggaaacctgccgtgcggtctggcggatctggcggaggctccacaagccagggcagcgtgaccttcagggacgtggccatcgacttcagccaggaggagtgggagtggctgcagcccgcccagagggacctgtacaggcacgtgatgctggagaactacggccacctggtgagcctgggcctgaacatcagcaagccctacgtggtgagcctgctggagcagggcagggacccctggctggagaaggacgtgaggagggacctgttcagcgagagcagcggcgagatcaggaccagccccaagaaaaagagaaaagtctaagctgccttctgcggggcttgccttctggccatgcccttcttctctcccttgcacctgtacctcttggtctttgaataaagcctgagtaggaaggctagcaaaaaaaaaaaaaaaaaaaaaaaaaaaaaaaaaaaaaaaaaaaaaaaaaaaaaaaaaaaaaaaaaaaaaaaaaaaaaaaa

SEQ ID NO: 4018 - RNA, 5419 nt, synthetic construct
  source 1..5419: mol_type = other RNA
aggaaataagagagaaaagaagagtaagaagaaatataagagccaccatggcccctaagaagaagcgtaaagtgagccgggtgaacggcagcggcagcggcggcggcatgaaccacgaccaggagttcgacccccctaaggtgtaccctcccgtccccgccgagaagagaaagcccatccgggtcctgagcctgttcgatggcatcgccaccggtctgctggtgctgaaggacctgggcatccaggtggataggtacattgcctccgaggtgtgcgaggactccatcaccgtgggaatggtgcgtcatcagggcaagatcatgtacgtgggcgacgtgcggagcgtgacacagaagcatatccaggagtggggccctttcgacctggtgatcggcggcagcccttgcaatgacctgagcatcgtgaacccagcccggaagggcctgtacgagggaaccggcagactgttcttcgagttttacagactgctgcacgacgcccggcctaaggaaggcgacgaccggcccttcttttggctgttcgagaatgtggtggccatgggagtcagcgacaagcgggatattagccggttcctggagagcaaccccgtgatgatcgatgccaaggaagtgagcgccgcccaccgggccagatacttctggggcaatctgcctggcatgaacagacccctggccagcaccgtgaacgacaagctggagctgcaggagtgcctggagcacggccggatcgccaagttcagcaaggtgagaaccatcaccacccgaagcaacagcatcaaacaaggcaaggaccagcactttcctgtgttcatgaacgagaaggaggacatcctgtggtgtaccgagatggagagagtgttcgggttcccagtccactacacagatgtcagcaacatgtctagactggccagacagagactgctgggaagaagctggtccgtccctgtgatcagacacctgttcgcccctctgaaggagtacttcgcctgcgtgagcagcggcaacagcaacgccaacagccggggccccagcttctctagcggcctggtgccactgtccctgagagggagccacatgggccccatggagatctacaaaaccgtgagcgcctggaagcggcagcctgtgcgcgtgctgagcctgtttcggaatatcgataaagtcctgaaaagcctgggattcctggagagcggctctggctccggcggtggcaccctgaagtacgtggaggatgtgacaaacgtggtcagacgggatgtggagaagtggggccccttcgatctggtgtacggcagcacccaacccctgggcagctcttgtgaccggtgccctggctggtacatgtttcagttccaccggatcctgcagtacgccctgccgagacaggagtcccagcggccattcttttggattttcatggacaacttgctgctgaccgaggatgaccaggaaactaccactcggttcctgcagaccgaagccgtgaccctgcaggacgtgagaggccgggactaccagaacgccatgcgggtgtggtccaacatccctggactgaaaagcaagcacgcacctctgacccctaaagaagaggagtacctgcaggcccaggtgcggagcagaagcaagctggacgcccctaaggtggatctgctggtgaagaattgcctcctgcccctgagagagtacttcaagtatttcagccagaatagtctgcccctgggcggcccaagcagcggcgcccctcctcccagcggcggcagcccagccggctccccaacctctaccgaggagggcacctctgagtccgccacccccgagagcggccctggcacctccaccgagcccagcgagggcagcgcacccggcagccctgccggcagccccacctccacagaggagggaaccagcaccgagcccagcgaaggcagcgccccaggcaccagcaccgagcctagtgagggcggctctggcggcggcagcgcccaggagattaaacggatcaacaagatcagaagaagacttgtgaaagacagcaacaccaagaaggccggcaagacaggccccatgaaaaccctgctggttagagtgatgacacccgatctgagagagcggctggaaaacctgagaaagaagcctgaaaatatcccccagcccatcagcaatacatctagagccaacctgaataagctgctgaccgattacaccgaaatgaagaaggcgatcctgcatgtgtactgggaagagttccagaaggaccctgtgggcctgatgagccgggtggcccagcctgccagcaagaagatcgatcagaacaagctgaaacctgagatggacgagaagggcaacctgaccaccgccggctttgcctgctctcagtgtggccagcccctgttcgtgtacaagctggagcaggtgtctgagaagggcaaggcttacaccaactacttcggacggtgcaatgtggccgagcacgaaaagctgatcctgctggcccagctgaagcccgagaaggatagcgacgaagccgtgacatatagcctgggaaagtttgggcagagggccctggatttctacagcattcatgtgaccaaggagtccacccaccccgtgaagcccctggcccagatcgccggaaacagatacgcctccggacctgtgggaaaggccctgagcgacgcatgtatgggcacaatcgcctccttcctgtctaagtaccaggacatcatcatcgaacaccagaaggtggtgaagggcaaccagaagagactggagagcctgcgggagctggccggcaaggaaaacctggaataccctagcgtgaccctgccacctcagcctcacaccaaggagggcgttgatgcctacaacgaagtgatcgcccgggtgcgaatgtgggtgaacctgaacctgtggcagaagctgaagctaagcagagatgatgccaagcctctgctgagactgaagggattcccttcctttcctctggtcgagagacaggccaacgaagtggactggtgggacatggtgtgtaacgtgaagaagctgatcaacgagaaaaaggaggatggcaaggtgttttggcagaatctggctggctacaagagacaggaagccctgagaccatacctgagcagcgaggaagatcggaagaagggaaagaaattcgctcggtaccagctgggcgacctgctgctgcacctggaaaagaagcacggcgaggactggggaaaggtgtacgacgaggcctgggagcggattgacaagaaagtggaaggcctgagcaagcacatcaagctggaagaggaacggagaagcgaggacgcccagagcaaggccgccctgaccgactggctgcgggctaaggccagcttcgtgatcgagggcctgaaggaggccgacaaggacgagttctgcagatgcgagctgaagctgcagaagtggtacggggacctgcggggaaagcccttcgccatcgaagccgagaacagcatcctggacatcagcggcttcagcaagcagtacaactgtgccttcatctggcagaaggacggcgtgaagaagctgaacctgtacctgatcatcaactacttcaagggcggcaagctgcggttcaagaagatcaaacctgaagccttcgaagccaacagattctacaccgtgatcaacaaaaagagcggcgagatcgtgcccatggaggtgaacttcaacttcgacgaccccaacctgatcatcctgcctctggcctttggcaagagacagggcagagaattcatctggaacgacctgctgtccctggaaaccggcagcctgaagctggccaacggaagagtgatcgagaagacactgtacaacagaagaacccggcaggatgagcctgccctgttcgtggccctgaccttcgagcggcgggaggtcctggactcctccaatatcaaaccaatgaacctgatcggcgtggcaagaggcgaaaacatccccgccgtgatcgccctgaccgaccccgagggctgcccactgagccggtttaaggatagcctgggaaacccaacccacatcctgagaatcggcgagagctataaggagaagcagcggaccatccaggccaagaaggaggtggagcagcggagagccggcggctacagccggaagtacgccagcaaagccaagaatctggcagacgatatggtgagaaacaccgctagagatctgctgtactacgccgtgacccaggatgccatgctgatcttcgccaacctgagccggggcttcggccggcagggcaagcggaccttcatggccgagagacagtacacacggatggaggactggctgaccgccaagctggcctacgagggcctgagcaagacctacctgtccaagacactggcccagtacacctccaagacatgcagcaactgtgggtttaccatcaccagcgccgactacgacagggtgctggagaagctgaagaagacagcaacaggctggatgaccacaattaacggcaaggagctgaaggtggagggccagattacctactacaacagatacaagagacagaacgtagtcaaggacctgtccgtcgagctggatagactgagcgaagaatctgtgaacaacgacatctcctcctggacaaagggcagaagcggagaagctctgagcctcctgaagaaaagattctcccatagacccgtgcaggagaagttcgtgtgcctgaactgcggcttcgagacacacgcagccgagcaagccgccctgaacatcgccagatcctggctgttcctgcggagccaggagtacaagaaataccagacaaacaagacaaccggcaacaccgataagagagccttcgtcgagacctggcagtccttttaccggaagaagcttaaggaggtgtggaaacctgccgtgcggtctggcggatctggcggaggctccacaagcatgaccaccctgaaggagaccgtgaccttcaaggacgtggccgtggtgttcaccgaggaggagctgcagctgctggaccccgcccagaagaagctgtaccaggacgtgatgctggagaacttcaggaacctgctgagcgtgggccaccagcccttccacggcgacaccttccacttccccagggaggagaagttctggatggtggagaccgccacccagaaggagggcaacctggacggcgtgaccagccccaagaaaaagagaaaagtctaagctgccttctgcggggcttgccttctggccatgcccttcttctctcccttgcacctgtacctcttggtctttgaataaagcctgagtaggaaggctagcaaaaaaaaaaaaaaaaaaaaaaaaaaaaaaaaaaaaaaaaaaaaaaaaaaaaaaaaaaaaaaaaaaaaaaaaaaaaaaaa

SEQ ID NO: 4019 - RNA, 5419 nt, synthetic construct
  source 1..5419: mol_type = other RNA
aggaaataagagagaaaagaagagtaagaagaaatataagagccaccatggcccctaagaagaagcgtaaagtgagccgggtgaacggcagcggcagcggcggcggcatgaaccacgaccaggagttcgacccccctaaggtgtaccctcccgtccccgccgagaagagaaagcccatccgggtcctgagcctgttcgatggcatcgccaccggtctgctggtgctgaaggacctgggcatccaggtggataggtacattgcctccgaggtgtgcgaggactccatcaccgtgggaatggtgcgtcatcagggcaagatcatgtacgtgggcgacgtgcggagcgtgacacagaagcatatccaggagtggggccctttcgacctggtgatcggcggcagcccttgcaatgacctgagcatcgtgaacccagcccggaagggcctgtacgagggaaccggcagactgttcttcgagttttacagactgctgcacgacgcccggcctaaggaaggcgacgaccggcccttcttttggctgttcgagaatgtggtggccatgggagtcagcgacaagcgggatattagccggttcctggagagcaaccccgtgatgatcgatgccaaggaagtgagcgccgcccaccgggccagatacttctggggcaatctgcctggcatgaacagacccctggccagcaccgtgaacgacaagctggagctgcaggagtgcctggagcacggccggatcgccaagttcagcaaggtgagaaccatcaccacccgaagcaacagcatcaaacaaggcaaggaccagcactttcctgtgttcatgaacgagaaggaggacatcctgtggtgtaccgagatggagagagtgttcgggttcccagtccactacacagatgtcagcaacatgtctagactggccagacagagactgctgggaagaagctggtccgtccctgtgatcagacacctgttcgcccctctgaaggagtacttcgcctgcgtgagcagcggcaacagcaacgccaacagccggggccccagcttctctagcggcctggtgccactgtccctgagagggagccacatgggccccatggagatctacaaaaccgtgagcgcctggaagcggcagcctgtgcgcgtgctgagcctgtttcggaatatcgataaagtcctgaaaagcctgggattcctggagagcggctctggctccggcggtggcaccctgaagtacgtggaggatgtgacaaacgtggtcagacgggatgtggagaagtggggccccttcgatctggtgtacggcagcacccaacccctgggcagctcttgtgaccggtgccctggctggtacatgtttcagttccaccggatcctgcagtacgccctgccgagacaggagtcccagcggccattcttttggattttcatggacaacttgctgctgaccgaggatgaccaggaaactaccactcggttcctgcagaccgaagccgtgaccctgcaggacgtgagaggccgggactaccagaacgccatgcgggtgtggtccaacatccctggactgaaaagcaagcacgcacctctgacccctaaagaagaggagtacctgcaggcccaggtgcggagcagaagcaagctggacgcccctaaggtggatctgctggtgaagaattgcctcctgcccctgagagagtacttcaagtatttcagccagaatagtctgcccctgggcggcccaagcagcggcgcccctcctcccagcggcggcagcccagccggctccccaacctctaccgaggagggcacctctgagtccgccacccccgagagcggccctggcacctccaccgagcccagcgagggcagcgcacccggcagccctgccggcagccccacctccacagaggagggaaccagcaccgagcccagcgaaggcagcgccccaggcaccagcaccgagcctagtgagggcggctctggcggcggcagcgcccaggagattaaacggatcaacaagatcagaagaagacttgtgaaagacagcaacaccaagaaggccggcaagacaggccccatgaaaaccctgctggttagagtgatgacacccgatctgagagagcggctggaaaacctgagaaagaagcctgaaaatatcccccagcccatcagcaatacatctagagccaacctgaataagctgctgaccgattacaccgaaatgaagaaggcgatcctgcatgtgtactgggaagagttccagaaggaccctgtgggcctgatgagccgggtggcccagcctgccagcaagaagatcgatcagaacaagctgaaacctgagatggacgagaagggcaacctgaccaccgccggctttgcctgctctcagtgtggccagcccctgttcgtgtacaagctggagcaggtgtctgagaagggcaaggcttacaccaactacttcggacggtgcaatgtggccgagcacgaaaagctgatcctgctggcccagctgaagcccgagaaggatagcgacgaagccgtgacatatagcctgggaaagtttgggcagagggccctggatttctacagcattcatgtgaccaaggagtccacccaccccgtgaagcccctggcccagatcgccggaaacagatacgcctccggacctgtgggaaaggccctgagcgacgcatgtatgggcacaatcgcctccttcctgtctaagtaccaggacatcatcatcgaacaccagaaggtggtgaagggcaaccagaagagactggagagcctgcgggagctggccggcaaggaaaacctggaataccctagcgtgaccctgccacctcagcctcacaccaaggagggcgttgatgcctacaacgaagtgatcgcccgggtgcgaatgtgggtgaacctgaacctgtggcagaagctgaagctaagcagagatgatgccaagcctctgctgagactgaagggattcccttcctttcctctggtcgagagacaggccaacgaagtggactggtgggacatggtgtgtaacgtgaagaagctgatcaacgagaaaaaggaggatggcaaggtgttttggcagaatctggctggctacaagagacaggaagccctgagaccatacctgagcagcgaggaagatcggaagaagggaaagaaattcgctcggtaccagctgggcgacctgctgctgcacctggaaaagaagcacggcgaggactggggaaaggtgtacgacgaggcctgggagcggattgacaagaaagtggaaggcctgagcaagcacatcaagctggaagaggaacggagaagcgaggacgcccagagcaaggccgccctgaccgactggctgcgggctaaggccagcttcgtgatcgagggcctgaaggaggccgacaaggacgagttctgcagatgcgagctgaagctgcagaagtggtacggggacctgcggggaaagcccttcgccatcgaagccgagaacagcatcctggacatcagcggcttcagcaagcagtacaactgtgccttcatctggcagaaggacggcgtgaagaagctgaacctgtacctgatcatcaactacttcaagggcggcaagctgcggttcaagaagatcaaacctgaagccttcgaagccaacagattctacaccgtgatcaacaaaaagagcggcgagatcgtgcccatggaggtgaacttcaacttcgacgaccccaacctgatcatcctgcctctggcctttggcaagagacagggcagagaattcatctggaacgacctgctgtccctggaaaccggcagcctgaagctggccaacggaagagtgatcgagaagacactgtacaacagaagaacccggcaggatgagcctgccctgttcgtggccctgaccttcgagcggcgggaggtcctggactcctccaatatcaaaccaatgaacctgatcggcgtggcaagaggcgaaaacatccccgccgtgatcgccctgaccgaccccgagggctgcccactgagccggtttaaggatagcctgggaaacccaacccacatcctgagaatcggcgagagctataaggagaagcagcggaccatccaggccaagaaggaggtggagcagcggagagccggcggctacagccggaagtacgccagcaaagccaagaatctggcagacgatatggtgagaaacaccgctagagatctgctgtactacgccgtgacccaggatgccatgctgatcttcgccaacctgagccggggcttcggccggcagggcaagcggaccttcatggccgagagacagtacacacggatggaggactggctgaccgccaagctggcctacgagggcctgagcaagacctacctgtccaagacactggcccagtacacctccaagacatgcagcaactgtgggtttaccatcaccagcgccgactacgacagggtgctggagaagctgaagaagacagcaacaggctggatgaccacaattaacggcaaggagctgaaggtggagggccagattacctactacaacagatacaagagacagaacgtagtcaaggacctgtccgtcgagctggatagactgagcgaagaatctgtgaacaacgacatctcctcctggacaaagggcagaagcggagaagctctgagcctcctgaagaaaagattctcccatagacccgtgcaggagaagttcgtgtgcctgaactgcggcttcgagacacacgcagccgagcaagccgccctgaacatcgccagatcctggctgttcctgcggagccaggagtacaagaaataccagacaaacaagacaaccggcaacaccgataagagagccttcgtcgagacctggcagtccttttaccggaagaagcttaaggaggtgtggaaacctgccgtgcggtctggcggatctggcggaggctccacaagcatgaccttcagcgacgtggccgtggacttcagccagcaggagtgggagtgcctggaccccgtgcagaagaccctgtacagggacgtgatgatggagaactacggcaacctggtgagcctgggccacagcatcagcaagcccgacgtgatcgccctgctggagcagggcaaggagccctgggtggtgaccaaggaggagaccaggaggtgctgcaccgacctggagagcaggtacgagatcatcaccagccccaagaaaaagagaaaagtctaagctgccttctgcggggcttgccttctggccatgcccttcttctctcccttgcacctgtacctcttggtctttgaataaagcctgagtaggaaggctagcaaaaaaaaaaaaaaaaaaaaaaaaaaaaaaaaaaaaaaaaaaaaaaaaaaaaaaaaaaaaaaaaaaaaaaaaaaaaaaaa

SEQ ID NO: 4020 - RNA, 5419 nt, synthetic construct
  source 1..5419: mol_type = other RNA
aggaaataagagagaaaagaagagtaagaagaaatataagagccaccatggcccctaagaagaagcgtaaagtgagccgggtgaacggcagcggcagcggcggcggcatgaaccacgaccaggagttcgacccccctaaggtgtaccctcccgtccccgccgagaagagaaagcccatccgggtcctgagcctgttcgatggcatcgccaccggtctgctggtgctgaaggacctgggcatccaggtggataggtacattgcctccgaggtgtgcgaggactccatcaccgtgggaatggtgcgtcatcagggcaagatcatgtacgtgggcgacgtgcggagcgtgacacagaagcatatccaggagtggggccctttcgacctggtgatcggcggcagcccttgcaatgacctgagcatcgtgaacccagcccggaagggcctgtacgagggaaccggcagactgttcttcgagttttacagactgctgcacgacgcccggcctaaggaaggcgacgaccggcccttcttttggctgttcgagaatgtggtggccatgggagtcagcgacaagcgggatattagccggttcctggagagcaaccccgtgatgatcgatgccaaggaagtgagcgccgcccaccgggccagatacttctggggcaatctgcctggcatgaacagacccctggccagcaccgtgaacgacaagctggagctgcaggagtgcctggagcacggccggatcgccaagttcagcaaggtgagaaccatcaccacccgaagcaacagcatcaaacaaggcaaggaccagcactttcctgtgttcatgaacgagaaggaggacatcctgtggtgtaccgagatggagagagtgttcgggttcccagtccactacacagatgtcagcaacatgtctagactggccagacagagactgctgggaagaagctggtccgtccctgtgatcagacacctgttcgcccctctgaaggagtacttcgcctgcgtgagcagcggcaacagcaacgccaacagccggggccccagcttctctagcggcctggtgccactgtccctgagagggagccacatgggccccatggagatctacaaaaccgtgagcgcctggaagcggcagcctgtgcgcgtgctgagcctgtttcggaatatcgataaagtcctgaaaagcctgggattcctggagagcggctctggctccggcggtggcaccctgaagtacgtggaggatgtgacaaacgtggtcagacgggatgtggagaagtggggccccttcgatctggtgtacggcagcacccaacccctgggcagctcttgtgaccggtgccctggctggtacatgtttcagttccaccggatcctgcagtacgccctgccgagacaggagtcccagcggccattcttttggattttcatggacaacttgctgctgaccgaggatgaccaggaaactaccactcggttcctgcagaccgaagccgtgaccctgcaggacgtgagaggccgggactaccagaacgccatgcgggtgtggtccaacatccctggactgaaaagcaagcacgcacctctgacccctaaagaagaggagtacctgcaggcccaggtgcggagcagaagcaagctggacgcccctaaggtggatctgctggtgaagaattgcctcctgcccctgagagagtacttcaagtatttcagccagaatagtctgcccctgggcggcccaagcagcggcgcccctcctcccagcggcggcagcccagccggctccccaacctctaccgaggagggcacctctgagtccgccacccccgagagcggccctggcacctccaccgagcccagcgagggcagcgcacccggcagccctgccggcagccccacctccacagaggagggaaccagcaccgagcccagcgaaggcagcgccccaggcaccagcaccgagcctagtgagggcggctctggcggcggcagcgcccaggagattaaacggatcaacaagatcagaagaagacttgtgaaagacagcaacaccaagaaggccggcaagacaggccccatgaaaaccctgctggttagagtgatgacacccgatctgagagagcggctggaaaacctgagaaagaagcctgaaaatatcccccagcccatcagcaatacatctagagccaacctgaataagctgctgaccgattacaccgaaatgaagaaggcgatcctgcatgtgtactgggaagagttccagaaggaccctgtgggcctgatgagccgggtggcccagcctgccagcaagaagatcgatcagaacaagctgaaacctgagatggacgagaagggcaacctgaccaccgccggctttgcctgctctcagtgtggccagcccctgttcgtgtacaagctggagcaggtgtctgagaagggcaaggcttacaccaactacttcggacggtgcaatgtggccgagcacgaaaagctgatcctgctggcccagctgaagcccgagaaggatagcgacgaagccgtgacatatagcctgggaaagtttgggcagagggccctggatttctacagcattcatgtgaccaaggagtccacccaccccgtgaagcccctggcccagatcgccggaaacagatacgcctccggacctgtgggaaaggccctgagcgacgcatgtatgggcacaatcgcctccttcctgtctaagtaccaggacatcatcatcgaacaccagaaggtggtgaagggcaaccagaagagactggagagcctgcgggagctggccggcaaggaaaacctggaataccctagcgtgaccctgccacctcagcctcacaccaaggagggcgttgatgcctacaacgaagtgatcgcccgggtgcgaatgtgggtgaacctgaacctgtggcagaagctgaagctaagcagagatgatgccaagcctctgctgagactgaagggattcccttcctttcctctggtcgagagacaggccaacgaagtggactggtgggacatggtgtgtaacgtgaagaagctgatcaacgagaaaaaggaggatggcaaggtgttttggcagaatctggctggctacaagagacaggaagccctgagaccatacctgagcagcgaggaagatcggaagaagggaaagaaattcgctcggtaccagctgggcgacctgctgctgcacctggaaaagaagcacggcgaggactggggaaaggtgtacgacgaggcctgggagcggattgacaagaaagtggaaggcctgagcaagcacatcaagctggaagaggaacggagaagcgaggacgcccagagcaaggccgccctgaccgactggctgcgggctaaggccagcttcgtgatcgagggcctgaaggaggccgacaaggacgagttctgcagatgcgagctgaagctgcagaagtggtacggggacctgcggggaaagcccttcgccatcgaagccgagaacagcatcctggacatcagcggcttcagcaagcagtacaactgtgccttcatctggcagaaggacggcgtgaagaagctgaacctgtacctgatcatcaactacttcaagggcggcaagctgcggttcaagaagatcaaacctgaagccttcgaagccaacagattctacaccgtgatcaacaaaaagagcggcgagatcgtgcccatggaggtgaacttcaacttcgacgaccccaacctgatcatcctgcctctggcctttggcaagagacagggcagagaattcatctggaacgacctgctgtccctggaaaccggcagcctgaagctggccaacggaagagtgatcgagaagacactgtacaacagaagaacccggcaggatgagcctgccctgttcgtggccctgaccttcgagcggcgggaggtcctggactcctccaatatcaaaccaatgaacctgatcggcgtggcaagaggcgaaaacatccccgccgtgatcgccctgaccgaccccgagggctgcccactgagccggtttaaggatagcctgggaaacccaacccacatcctgagaatcggcgagagctataaggagaagcagcggaccatccaggccaagaaggaggtggagcagcggagagccggcggctacagccggaagtacgccagcaaagccaagaatctggcagacgatatggtgagaaacaccgctagagatctgctgtactacgccgtgacccaggatgccatgctgatcttcgccaacctgagccggggcttcggccggcagggcaagcggaccttcatggccgagagacagtacacacggatggaggactggctgaccgccaagctggcctacgagggcctgagcaagacctacctgtccaagacactggcccagtacacctccaagacatgcagcaactgtgggtttaccatcaccagcgccgactacgacagggtgctggagaagctgaagaagacagcaacaggctggatgaccacaattaacggcaaggagctgaaggtggagggccagattacctactacaacagatacaagagacagaacgtagtcaaggacctgtccgtcgagctggatagactgagcgaagaatctgtgaacaacgacatctcctcctggacaaagggcagaagcggagaagctctgagcctcctgaagaaaagattctcccatagacccgtgcaggagaagttcgtgtgcctgaactgcggcttcgagacacacgcagccgagcaagccgccctgaacatcgccagatcctggctgttcctgcggagccaggagtacaagaaataccagacaaacaagacaaccggcaacaccgataagagagccttcgtcgagacctggcagtccttttaccggaagaagcttaaggaggtgtggaaacctgccgtgcggtctggcggatctggcggaggctccacaagcacccaggtgagcctgaccttcgacgacgtggccgtgaagctgacctgggaggagtggcagctgctggaccccgcccagaaggacctgtacagggacgtgatgctggagaactacagcaacctggtgagcgtgggctaccaggtgagcaagcccgacgccctgagcaggctggagaggggcgagcccccctggagcatcgaggacaagatccacaccaggaccttcagcggcgagaggccctacaccagccccaagaaaaagagaaaagtctaagctgccttctgcggggcttgccttctggccatgcccttcttctctcccttgcacctgtacctcttggtctttgaataaagcctgagtaggaaggctagcaaaaaaaaaaaaaaaaaaaaaaaaaaaaaaaaaaaaaaaaaaaaaaaaaaaaaaaaaaaaaaaaaaaaaaaaaaaaaaaa

SEQ ID NO: 4021 - RNA, 5419 nt, synthetic construct
  source 1..5419: mol_type = other RNA
aggaaataagagagaaaagaagagtaagaagaaatataagagccaccatggcccctaagaagaagcgtaaagtgagccgggtgaacggcagcggcagcggcggcggcatgaaccacgaccaggagttcgacccccctaaggtgtaccctcccgtccccgccgagaagagaaagcccatccgggtcctgagcctgttcgatggcatcgccaccggtctgctggtgctgaaggacctgggcatccaggtggataggtacattgcctccgaggtgtgcgaggactccatcaccgtgggaatggtgcgtcatcagggcaagatcatgtacgtgggcgacgtgcggagcgtgacacagaagcatatccaggagtggggccctttcgacctggtgatcggcggcagcccttgcaatgacctgagcatcgtgaacccagcccggaagggcctgtacgagggaaccggcagactgttcttcgagttttacagactgctgcacgacgcccggcctaaggaaggcgacgaccggcccttcttttggctgttcgagaatgtggtggccatgggagtcagcgacaagcgggatattagccggttcctggagagcaaccccgtgatgatcgatgccaaggaagtgagcgccgcccaccgggccagatacttctggggcaatctgcctggcatgaacagacccctggccagcaccgtgaacgacaagctggagctgcaggagtgcctggagcacggccggatcgccaagttcagcaaggtgagaaccatcaccacccgaagcaacagcatcaaacaaggcaaggaccagcactttcctgtgttcatgaacgagaaggaggacatcctgtggtgtaccgagatggagagagtgttcgggttcccagtccactacacagatgtcagcaacatgtctagactggccagacagagactgctgggaagaagctggtccgtccctgtgatcagacacctgttcgcccctctgaaggagtacttcgcctgcgtgagcagcggcaacagcaacgccaacagccggggccccagcttctctagcggcctggtgccactgtccctgagagggagccacatgggccccatggagatctacaaaaccgtgagcgcctggaagcggcagcctgtgcgcgtgctgagcctgtttcggaatatcgataaagtcctgaaaagcctgggattcctggagagcggctctggctccggcggtggcaccctgaagtacgtggaggatgtgacaaacgtggtcagacgggatgtggagaagtggggccccttcgatctggtgtacggcagcacccaacccctgggcagctcttgtgaccggtgccctggctggtacatgtttcagttccaccggatcctgcagtacgccctgccgagacaggagtcccagcggccattcttttggattttcatggacaacttgctgctgaccgaggatgaccaggaaactaccactcggttcctgcagaccgaagccgtgaccctgcaggacgtgagaggccgggactaccagaacgccatgcgggtgtggtccaacatccctggactgaaaagcaagcacgcacctctgacccctaaagaagaggagtacctgcaggcccaggtgcggagcagaagcaagctggacgcccctaaggtggatctgctggtgaagaattgcctcctgcccctgagagagtacttcaagtatttcagccagaatagtctgcccctgggcggcccaagcagcggcgcccctcctcccagcggcggcagcccagccggctccccaacctctaccgaggagggcacctctgagtccgccacccccgagagcggccctggcacctccaccgagcccagcgagggcagcgcacccggcagccctgccggcagccccacctccacagaggagggaaccagcaccgagcccagcgaaggcagcgccccaggcaccagcaccgagcctagtgagggcggctctggcggcggcagcgcccaggagattaaacggatcaacaagatcagaagaagacttgtgaaagacagcaacaccaagaaggccggcaagacaggccccatgaaaaccctgctggttagagtgatgacacccgatctgagagagcggctggaaaacctgagaaagaagcctgaaaatatcccccagcccatcagcaatacatctagagccaacctgaataagctgctgaccgattacaccgaaatgaagaaggcgatcctgcatgtgtactgggaagagttccagaaggaccctgtgggcctgatgagccgggtggcccagcctgccagcaagaagatcgatcagaacaagctgaaacctgagatggacgagaagggcaacctgaccaccgccggctttgcctgctctcagtgtggccagcccctgttcgtgtacaagctggagcaggtgtctgagaagggcaaggcttacaccaactacttcggacggtgcaatgtggccgagcacgaaaagctgatcctgctggcccagctgaagcccgagaaggatagcgacgaagccgtgacatatagcctgggaaagtttgggcagagggccctggatttctacagcattcatgtgaccaaggagtccacccaccccgtgaagcccctggcccagatcgccggaaacagatacgcctccggacctgtgggaaaggccctgagcgacgcatgtatgggcacaatcgcctccttcctgtctaagtaccaggacatcatcatcgaacaccagaaggtggtgaagggcaaccagaagagactggagagcctgcgggagctggccggcaaggaaaacctggaataccctagcgtgaccctgccacctcagcctcacaccaaggagggcgttgatgcctacaacgaagtgatcgcccgggtgcgaatgtgggtgaacctgaacctgtggcagaagctgaagctaagcagagatgatgccaagcctctgctgagactgaagggattcccttcctttcctctggtcgagagacaggccaacgaagtggactggtgggacatggtgtgtaacgtgaagaagctgatcaacgagaaaaaggaggatggcaaggtgttttggcagaatctggctggctacaagagacaggaagccctgagaccatacctgagcagcgaggaagatcggaagaagggaaagaaattcgctcggtaccagctgggcgacctgctgctgcacctggaaaagaagcacggcgaggactggggaaaggtgtacgacgaggcctgggagcggattgacaagaaagtggaaggcctgagcaagcacatcaagctggaagaggaacggagaagcgaggacgcccagagcaaggccgccctgaccgactggctgcgggctaaggccagcttcgtgatcgagggcctgaaggaggccgacaaggacgagttctgcagatgcgagctgaagctgcagaagtggtacggggacctgcggggaaagcccttcgccatcgaagccgagaacagcatcctggacatcagcggcttcagcaagcagtacaactgtgccttcatctggcagaaggacggcgtgaagaagctgaacctgtacctgatcatcaactacttcaagggcggcaagctgcggttcaagaagatcaaacctgaagccttcgaagccaacagattctacaccgtgatcaacaaaaagagcggcgagatcgtgcccatggaggtgaacttcaacttcgacgaccccaacctgatcatcctgcctctggcctttggcaagagacagggcagagaattcatctggaacgacctgctgtccctggaaaccggcagcctgaagctggccaacggaagagtgatcgagaagacactgtacaacagaagaacccggcaggatgagcctgccctgttcgtggccctgaccttcgagcggcgggaggtcctggactcctccaatatcaaaccaatgaacctgatcggcgtggcaagaggcgaaaacatccccgccgtgatcgccctgaccgaccccgagggctgcccactgagccggtttaaggatagcctgggaaacccaacccacatcctgagaatcggcgagagctataaggagaagcagcggaccatccaggccaagaaggaggtggagcagcggagagccggcggctacagccggaagtacgccagcaaagccaagaatctggcagacgatatggtgagaaacaccgctagagatctgctgtactacgccgtgacccaggatgccatgctgatcttcgccaacctgagccggggcttcggccggcagggcaagcggaccttcatggccgagagacagtacacacggatggaggactggctgaccgccaagctggcctacgagggcctgagcaagacctacctgtccaagacactggcccagtacacctccaagacatgcagcaactgtgggtttaccatcaccagcgccgactacgacagggtgctggagaagctgaagaagacagcaacaggctggatgaccacaattaacggcaaggagctgaaggtggagggccagattacctactacaacagatacaagagacagaacgtagtcaaggacctgtccgtcgagctggatagactgagcgaagaatctgtgaacaacgacatctcctcctggacaaagggcagaagcggagaagctctgagcctcctgaagaaaagattctcccatagacccgtgcaggagaagttcgtgtgcctgaactgcggcttcgagacacacgcagccgagcaagccgccctgaacatcgccagatcctggctgttcctgcggagccaggagtacaagaaataccagacaaacaagacaaccggcaacaccgataagagagccttcgtcgagacctggcagtccttttaccggaagaagcttaaggaggtgtggaaacctgccgtgcggtctggcggatctggcggaggctccacaagcatggccgccgccgccctggtgaacaccccccagggccacgtgaccttcgaggacatcgccgtgtacttcagccaggaggagtggggcctgctggacgaggcccagaggtgcctgtaccacgacgtgatgctggagaacttcagcctgatggccagcgtgggctgcctgcacggcatcgaggccgaggaggcccccagcgagcagaccgtgagcgcccagggcgccagccaggccaggacccccaccagccccaagaaaaagagaaaagtctaagctgccttctgcggggcttgccttctggccatgcccttcttctctcccttgcacctgtacctcttggtctttgaataaagcctgagtaggaaggctagcaaaaaaaaaaaaaaaaaaaaaaaaaaaaaaaaaaaaaaaaaaaaaaaaaaaaaaaaaaaaaaaaaaaaaaaaaaaaaaaa

SEQ ID NO: 4022 - RNA, 5419 nt, synthetic construct
  source 1..5419: mol_type = other RNA
aggaaataagagagaaaagaagagtaagaagaaatataagagccaccatggcccctaagaagaagcgtaaagtgagccgggtgaacggcagcggcagcggcggcggcatgaaccacgaccaggagttcgacccccctaaggtgtaccctcccgtccccgccgagaagagaaagcccatccgggtcctgagcctgttcgatggcatcgccaccggtctgctggtgctgaaggacctgggcatccaggtggataggtacattgcctccgaggtgtgcgaggactccatcaccgtgggaatggtgcgtcatcagggcaagatcatgtacgtgggcgacgtgcggagcgtgacacagaagcatatccaggagtggggccctttcgacctggtgatcggcggcagcccttgcaatgacctgagcatcgtgaacccagcccggaagggcctgtacgagggaaccggcagactgttcttcgagttttacagactgctgcacgacgcccggcctaaggaaggcgacgaccggcccttcttttggctgttcgagaatgtggtggccatgggagtcagcgacaagcgggatattagccggttcctggagagcaaccccgtgatgatcgatgccaaggaagtgagcgccgcccaccgggccagatacttctggggcaatctgcctggcatgaacagacccctggccagcaccgtgaacgacaagctggagctgcaggagtgcctggagcacggccggatcgccaagttcagcaaggtgagaaccatcaccacccgaagcaacagcatcaaacaaggcaaggaccagcactttcctgtgttcatgaacgagaaggaggacatcctgtggtgtaccgagatggagagagtgttcgggttcccagtccactacacagatgtcagcaacatgtctagactggccagacagagactgctgggaagaagctggtccgtccctgtgatcagacacctgttcgcccctctgaaggagtacttcgcctgcgtgagcagcggcaacagcaacgccaacagccggggccccagcttctctagcggcctggtgccactgtccctgagagggagccacatgggccccatggagatctacaaaaccgtgagcgcctggaagcggcagcctgtgcgcgtgctgagcctgtttcggaatatcgataaagtcctgaaaagcctgggattcctggagagcggctctggctccggcggtggcaccctgaagtacgtggaggatgtgacaaacgtggtcagacgggatgtggagaagtggggccccttcgatctggtgtacggcagcacccaacccctgggcagctcttgtgaccggtgccctggctggtacatgtttcagttccaccggatcctgcagtacgccctgccgagacaggagtcccagcggccattcttttggattttcatggacaacttgctgctgaccgaggatgaccaggaaactaccactcggttcctgcagaccgaagccgtgaccctgcaggacgtgagaggccgggactaccagaacgccatgcgggtgtggtccaacatccctggactgaaaagcaagcacgcacctctgacccctaaagaagaggagtacctgcaggcccaggtgcggagcagaagcaagctggacgcccctaaggtggatctgctggtgaagaattgcctcctgcccctgagagagtacttcaagtatttcagccagaatagtctgcccctgggcggcccaagcagcggcgcccctcctcccagcggcggcagcccagccggctccccaacctctaccgaggagggcacctctgagtccgccacccccgagagcggccctggcacctccaccgagcccagcgagggcagcgcacccggcagccctgccggcagccccacctccacagaggagggaaccagcaccgagcccagcgaaggcagcgccccaggcaccagcaccgagcctagtgagggcggctctggcggcggcagcgcccaggagattaaacggatcaacaagatcagaagaagacttgtgaaagacagcaacaccaagaaggccggcaagacaggccccatgaaaaccctgctggttagagtgatgacacccgatctgagagagcggctggaaaacctgagaaagaagcctgaaaatatcccccagcccatcagcaatacatctagagccaacctgaataagctgctgaccgattacaccgaaatgaagaaggcgatcctgcatgtgtactgggaagagttccagaaggaccctgtgggcctgatgagccgggtggcccagcctgccagcaagaagatcgatcagaacaagctgaaacctgagatggacgagaagggcaacctgaccaccgccggctttgcctgctctcagtgtggccagcccctgttcgtgtacaagctggagcaggtgtctgagaagggcaaggcttacaccaactacttcggacggtgcaatgtggccgagcacgaaaagctgatcctgctggcccagctgaagcccgagaaggatagcgacgaagccgtgacatatagcctgggaaagtttgggcagagggccctggatttctacagcattcatgtgaccaaggagtccacccaccccgtgaagcccctggcccagatcgccggaaacagatacgcctccggacctgtgggaaaggccctgagcgacgcatgtatgggcacaatcgcctccttcctgtctaagtaccaggacatcatcatcgaacaccagaaggtggtgaagggcaaccagaagagactggagagcctgcgggagctggccggcaaggaaaacctggaataccctagcgtgaccctgccacctcagcctcacaccaaggagggcgttgatgcctacaacgaagtgatcgcccgggtgcgaatgtgggtgaacctgaacctgtggcagaagctgaagctaagcagagatgatgccaagcctctgctgagactgaagggattcccttcctttcctctggtcgagagacaggccaacgaagtggactggtgggacatggtgtgtaacgtgaagaagctgatcaacgagaaaaaggaggatggcaaggtgttttggcagaatctggctggctacaagagacaggaagccctgagaccatacctgagcagcgaggaagatcggaagaagggaaagaaattcgctcggtaccagctgggcgacctgctgctgcacctggaaaagaagcacggcgaggactggggaaaggtgtacgacgaggcctgggagcggattgacaagaaagtggaaggcctgagcaagcacatcaagctggaagaggaacggagaagcgaggacgcccagagcaaggccgccctgaccgactggctgcgggctaaggccagcttcgtgatcgagggcctgaaggaggccgacaaggacgagttctgcagatgcgagctgaagctgcagaagtggtacggggacctgcggggaaagcccttcgccatcgaagccgagaacagcatcctggacatcagcggcttcagcaagcagtacaactgtgccttcatctggcagaaggacggcgtgaagaagctgaacctgtacctgatcatcaactacttcaagggcggcaagctgcggttcaagaagatcaaacctgaagccttcgaagccaacagattctacaccgtgatcaacaaaaagagcggcgagatcgtgcccatggaggtgaacttcaacttcgacgaccccaacctgatcatcctgcctctggcctttggcaagagacagggcagagaattcatctggaacgacctgctgtccctggaaaccggcagcctgaagctggccaacggaagagtgatcgagaagacactgtacaacagaagaacccggcaggatgagcctgccctgttcgtggccctgaccttcgagcggcgggaggtcctggactcctccaatatcaaaccaatgaacctgatcggcgtggcaagaggcgaaaacatccccgccgtgatcgccctgaccgaccccgagggctgcccactgagccggtttaaggatagcctgggaaacccaacccacatcctgagaatcggcgagagctataaggagaagcagcggaccatccaggccaagaaggaggtggagcagcggagagccggcggctacagccggaagtacgccagcaaagccaagaatctggcagacgatatggtgagaaacaccgctagagatctgctgtactacgccgtgacccaggatgccatgctgatcttcgccaacctgagccggggcttcggccggcagggcaagcggaccttcatggccgagagacagtacacacggatggaggactggctgaccgccaagctggcctacgagggcctgagcaagacctacctgtccaagacactggcccagtacacctccaagacatgcagcaactgtgggtttaccatcaccagcgccgactacgacagggtgctggagaagctgaagaagacagcaacaggctggatgaccacaattaacggcaaggagctgaaggtggagggccagattacctactacaacagatacaagagacagaacgtagtcaaggacctgtccgtcgagctggatagactgagcgaagaatctgtgaacaacgacatctcctcctggacaaagggcagaagcggagaagctctgagcctcctgaagaaaagattctcccatagacccgtgcaggagaagttcgtgtgcctgaactgcggcttcgagacacacgcagccgagcaagccgccctgaacatcgccagatcctggctgttcctgcggagccaggagtacaagaaataccagacaaacaagacaaccggcaacaccgataagagagccttcgtcgagacctggcagtccttttaccggaagaagcttaaggaggtgtggaaacctgccgtgcggtctggcggatctggcggaggctccacaagcatggagctgctgaccttcaaggacgtggccatcgagttcagccccgaggagtggaagtgcctggacaccagccagcagaacctgtacagggacgtgatgctggagaactacaggaacctggtgagcctgggcgtgaccatcagcaaccccgacctggtgacctgcctggagcagaggaaggagccctacaacctgaagatccacgagaccgccgccaggccccccggccactacaggaagaggaccagccccaagaaaaagagaaaagtctaagctgccttctgcggggcttgccttctggccatgcccttcttctctcccttgcacctgtacctcttggtctttgaataaagcctgagtaggaaggctagcaaaaaaaaaaaaaaaaaaaaaaaaaaaaaaaaaaaaaaaaaaaaaaaaaaaaaaaaaaaaaaaaaaaaaaaaaaaaaaaa

SEQ ID NO: 4023 - RNA, 5419 nt, synthetic construct
  source 1..5419: mol_type = other RNA
aggaaataagagagaaaagaagagtaagaagaaatataagagccaccatggcccctaagaagaagcgtaaagtgagccgggtgaacggcagcggcagcggcggcggcatgaaccacgaccaggagttcgacccccctaaggtgtaccctcccgtccccgccgagaagagaaagcccatccgggtcctgagcctgttcgatggcatcgccaccggtctgctggtgctgaaggacctgggcatccaggtggataggtacattgcctccgaggtgtgcgaggactccatcaccgtgggaatggtgcgtcatcagggcaagatcatgtacgtgggcgacgtgcggagcgtgacacagaagcatatccaggagtggggccctttcgacctggtgatcggcggcagcccttgcaatgacctgagcatcgtgaacccagcccggaagggcctgtacgagggaaccggcagactgttcttcgagttttacagactgctgcacgacgcccggcctaaggaaggcgacgaccggcccttcttttggctgttcgagaatgtggtggccatgggagtcagcgacaagcgggatattagccggttcctggagagcaaccccgtgatgatcgatgccaaggaagtgagcgccgcccaccgggccagatacttctggggcaatctgcctggcatgaacagacccctggccagcaccgtgaacgacaagctggagctgcaggagtgcctggagcacggccggatcgccaagttcagcaaggtgagaaccatcaccacccgaagcaacagcatcaaacaaggcaaggaccagcactttcctgtgttcatgaacgagaaggaggacatcctgtggtgtaccgagatggagagagtgttcgggttcccagtccactacacagatgtcagcaacatgtctagactggccagacagagactgctgggaagaagctggtccgtccctgtgatcagacacctgttcgcccctctgaaggagtacttcgcctgcgtgagcagcggcaacagcaacgccaacagccggggccccagcttctctagcggcctggtgccactgtccctgagagggagccacatgggccccatggagatctacaaaaccgtgagcgcctggaagcggcagcctgtgcgcgtgctgagcctgtttcggaatatcgataaagtcctgaaaagcctgggattcctggagagcggctctggctccggcggtggcaccctgaagtacgtggaggatgtgacaaacgtggtcagacgggatgtggagaagtggggccccttcgatctggtgtacggcagcacccaacccctgggcagctcttgtgaccggtgccctggctggtacatgtttcagttccaccggatcctgcagtacgccctgccgagacaggagtcccagcggccattcttttggattttcatggacaacttgctgctgaccgaggatgaccaggaaactaccactcggttcctgcagaccgaagccgtgaccctgcaggacgtgagaggccgggactaccagaacgccatgcgggtgtggtccaacatccctggactgaaaagcaagcacgcacctctgacccctaaagaagaggagtacctgcaggcccaggtgcggagcagaagcaagctggacgcccctaaggtggatctgctggtgaagaattgcctcctgcccctgagagagtacttcaagtatttcagccagaatagtctgcccctgggcggcccaagcagcggcgcccctcctcccagcggcggcagcccagccggctccccaacctctaccgaggagggcacctctgagtccgccacccccgagagcggccctggcacctccaccgagcccagcgagggcagcgcacccggcagccctgccggcagccccacctccacagaggagggaaccagcaccgagcccagcgaaggcagcgccccaggcaccagcaccgagcctagtgagggcggctctggcggcggcagcgcccaggagattaaacggatcaacaagatcagaagaagacttgtgaaagacagcaacaccaagaaggccggcaagacaggccccatgaaaaccctgctggttagagtgatgacacccgatctgagagagcggctggaaaacctgagaaagaagcctgaaaatatcccccagcccatcagcaatacatctagagccaacctgaataagctgctgaccgattacaccgaaatgaagaaggcgatcctgcatgtgtactgggaagagttccagaaggaccctgtgggcctgatgagccgggtggcccagcctgccagcaagaagatcgatcagaacaagctgaaacctgagatggacgagaagggcaacctgaccaccgccggctttgcctgctctcagtgtggccagcccctgttcgtgtacaagctggagcaggtgtctgagaagggcaaggcttacaccaactacttcggacggtgcaatgtggccgagcacgaaaagctgatcctgctggcccagctgaagcccgagaaggatagcgacgaagccgtgacatatagcctgggaaagtttgggcagagggccctggatttctacagcattcatgtgaccaaggagtccacccaccccgtgaagcccctggcccagatcgccggaaacagatacgcctccggacctgtgggaaaggccctgagcgacgcatgtatgggcacaatcgcctccttcctgtctaagtaccaggacatcatcatcgaacaccagaaggtggtgaagggcaaccagaagagactggagagcctgcgggagctggccggcaaggaaaacctggaataccctagcgtgaccctgccacctcagcctcacaccaaggagggcgttgatgcctacaacgaagtgatcgcccgggtgcgaatgtgggtgaacctgaacctgtggcagaagctgaagctaagcagagatgatgccaagcctctgctgagactgaagggattcccttcctttcctctggtcgagagacaggccaacgaagtggactggtgggacatggtgtgtaacgtgaagaagctgatcaacgagaaaaaggaggatggcaaggtgttttggcagaatctggctggctacaagagacaggaagccctgagaccatacctgagcagcgaggaagatcggaagaagggaaagaaattcgctcggtaccagctgggcgacctgctgctgcacctggaaaagaagcacggcgaggactggggaaaggtgtacgacgaggcctgggagcggattgacaagaaagtggaaggcctgagcaagcacatcaagctggaagaggaacggagaagcgaggacgcccagagcaaggccgccctgaccgactggctgcgggctaaggccagcttcgtgatcgagggcctgaaggaggccgacaaggacgagttctgcagatgcgagctgaagctgcagaagtggtacggggacctgcggggaaagcccttcgccatcgaagccgagaacagcatcctggacatcagcggcttcagcaagcagtacaactgtgccttcatctggcagaaggacggcgtgaagaagctgaacctgtacctgatcatcaactacttcaagggcggcaagctgcggttcaagaagatcaaacctgaagccttcgaagccaacagattctacaccgtgatcaacaaaaagagcggcgagatcgtgcccatggaggtgaacttcaacttcgacgaccccaacctgatcatcctgcctctggcctttggcaagagacagggcagagaattcatctggaacgacctgctgtccctggaaaccggcagcctgaagctggccaacggaagagtgatcgagaagacactgtacaacagaagaacccggcaggatgagcctgccctgttcgtggccctgaccttcgagcggcgggaggtcctggactcctccaatatcaaaccaatgaacctgatcggcgtggcaagaggcgaaaacatccccgccgtgatcgccctgaccgaccccgagggctgcccactgagccggtttaaggatagcctgggaaacccaacccacatcctgagaatcggcgagagctataaggagaagcagcggaccatccaggccaagaaggaggtggagcagcggagagccggcggctacagccggaagtacgccagcaaagccaagaatctggcagacgatatggtgagaaacaccgctagagatctgctgtactacgccgtgacccaggatgccatgctgatcttcgccaacctgagccggggcttcggccggcagggcaagcggaccttcatggccgagagacagtacacacggatggaggactggctgaccgccaagctggcctacgagggcctgagcaagacctacctgtccaagacactggcccagtacacctccaagacatgcagcaactgtgggtttaccatcaccagcgccgactacgacagggtgctggagaagctgaagaagacagcaacaggctggatgaccacaattaacggcaaggagctgaaggtggagggccagattacctactacaacagatacaagagacagaacgtagtcaaggacctgtccgtcgagctggatagactgagcgaagaatctgtgaacaacgacatctcctcctggacaaagggcagaagcggagaagctctgagcctcctgaagaaaagattctcccatagacccgtgcaggagaagttcgtgtgcctgaactgcggcttcgagacacacgcagccgagcaagccgccctgaacatcgccagatcctggctgttcctgcggagccaggagtacaagaaataccagacaaacaagacaaccggcaacaccgataagagagccttcgtcgagacctggcagtccttttaccggaagaagcttaaggaggtgtggaaacctgccgtgcggtctggcggatctggcggaggctccacaagcagccagggcagcgtgaccttcagggacgtggccatcgacttcagccaggaggagtggaagtggctgcagcccgcccagagggacctgtacaggtgcgtgatgctggagaactacggccacctggtgagcctgggcctgagcatcagcaagcccgacgtggtgagcctgctggagcagggcaaggagccctggctgggcaagaggaacgtgaacagggacctgttcagcgtgagcgagagcagcaccagccccaagaaaaagagaaaagtctaagctgccttctgcggggcttgccttctggccatgcccttcttctctcccttgcacctgtacctcttggtctttgaataaagcctgagtaggaaggctagcaaaaaaaaaaaaaaaaaaaaaaaaaaaaaaaaaaaaaaaaaaaaaaaaaaaaaaaaaaaaaaaaaaaaaaaaaaaaaaaa

SEQ ID NO: 4024 - RNA, 5419 nt, synthetic construct
  source 1..5419: mol_type = other RNA
aggaaataagagagaaaagaagagtaagaagaaatataagagccaccatggcccctaagaagaagcgtaaagtgagccgggtgaacggcagcggcagcggcggcggcatgaaccacgaccaggagttcgacccccctaaggtgtaccctcccgtccccgccgagaagagaaagcccatccgggtcctgagcctgttcgatggcatcgccaccggtctgctggtgctgaaggacctgggcatccaggtggataggtacattgcctccgaggtgtgcgaggactccatcaccgtgggaatggtgcgtcatcagggcaagatcatgtacgtgggcgacgtgcggagcgtgacacagaagcatatccaggagtggggccctttcgacctggtgatcggcggcagcccttgcaatgacctgagcatcgtgaacccagcccggaagggcctgtacgagggaaccggcagactgttcttcgagttttacagactgctgcacgacgcccggcctaaggaaggcgacgaccggcccttcttttggctgttcgagaatgtggtggccatgggagtcagcgacaagcgggatattagccggttcctggagagcaaccccgtgatgatcgatgccaaggaagtgagcgccgcccaccgggccagatacttctggggcaatctgcctggcatgaacagacccctggccagcaccgtgaacgacaagctggagctgcaggagtgcctggagcacggccggatcgccaagttcagcaaggtgagaaccatcaccacccgaagcaacagcatcaaacaaggcaaggaccagcactttcctgtgttcatgaacgagaaggaggacatcctgtggtgtaccgagatggagagagtgttcgggttcccagtccactacacagatgtcagcaacatgtctagactggccagacagagactgctgggaagaagctggtccgtccctgtgatcagacacctgttcgcccctctgaaggagtacttcgcctgcgtgagcagcggcaacagcaacgccaacagccggggccccagcttctctagcggcctggtgccactgtccctgagagggagccacatgggccccatggagatctacaaaaccgtgagcgcctggaagcggcagcctgtgcgcgtgctgagcctgtttcggaatatcgataaagtcctgaaaagcctgggattcctggagagcggctctggctccggcggtggcaccctgaagtacgtggaggatgtgacaaacgtggtcagacgggatgtggagaagtggggccccttcgatctggtgtacggcagcacccaacccctgggcagctcttgtgaccggtgccctggctggtacatgtttcagttccaccggatcctgcagtacgccctgccgagacaggagtcccagcggccattcttttggattttcatggacaacttgctgctgaccgaggatgaccaggaaactaccactcggttcctgcagaccgaagccgtgaccctgcaggacgtgagaggccgggactaccagaacgccatgcgggtgtggtccaacatccctggactgaaaagcaagcacgcacctctgacccctaaagaagaggagtacctgcaggcccaggtgcggagcagaagcaagctggacgcccctaaggtggatctgctggtgaagaattgcctcctgcccctgagagagtacttcaagtatttcagccagaatagtctgcccctgggcggcccaagcagcggcgcccctcctcccagcggcggcagcccagccggctccccaacctctaccgaggagggcacctctgagtccgccacccccgagagcggccctggcacctccaccgagcccagcgagggcagcgcacccggcagccctgccggcagccccacctccacagaggagggaaccagcaccgagcccagcgaaggcagcgccccaggcaccagcaccgagcctagtgagggcggctctggcggcggcagcgcccaggagattaaacggatcaacaagatcagaagaagacttgtgaaagacagcaacaccaagaaggccggcaagacaggccccatgaaaaccctgctggttagagtgatgacacccgatctgagagagcggctggaaaacctgagaaagaagcctgaaaatatcccccagcccatcagcaatacatctagagccaacctgaataagctgctgaccgattacaccgaaatgaagaaggcgatcctgcatgtgtactgggaagagttccagaaggaccctgtgggcctgatgagccgggtggcccagcctgccagcaagaagatcgatcagaacaagctgaaacctgagatggacgagaagggcaacctgaccaccgccggctttgcctgctctcagtgtggccagcccctgttcgtgtacaagctggagcaggtgtctgagaagggcaaggcttacaccaactacttcggacggtgcaatgtggccgagcacgaaaagctgatcctgctggcccagctgaagcccgagaaggatagcgacgaagccgtgacatatagcctgggaaagtttgggcagagggccctggatttctacagcattcatgtgaccaaggagtccacccaccccgtgaagcccctggcccagatcgccggaaacagatacgcctccggacctgtgggaaaggccctgagcgacgcatgtatgggcacaatcgcctccttcctgtctaagtaccaggacatcatcatcgaacaccagaaggtggtgaagggcaaccagaagagactggagagcctgcgggagctggccggcaaggaaaacctggaataccctagcgtgaccctgccacctcagcctcacaccaaggagggcgttgatgcctacaacgaagtgatcgcccgggtgcgaatgtgggtgaacctgaacctgtggcagaagctgaagctaagcagagatgatgccaagcctctgctgagactgaagggattcccttcctttcctctggtcgagagacaggccaacgaagtggactggtgggacatggtgtgtaacgtgaagaagctgatcaacgagaaaaaggaggatggcaaggtgttttggcagaatctggctggctacaagagacaggaagccctgagaccatacctgagcagcgaggaagatcggaagaagggaaagaaattcgctcggtaccagctgggcgacctgctgctgcacctggaaaagaagcacggcgaggactggggaaaggtgtacgacgaggcctgggagcggattgacaagaaagtggaaggcctgagcaagcacatcaagctggaagaggaacggagaagcgaggacgcccagagcaaggccgccctgaccgactggctgcgggctaaggccagcttcgtgatcgagggcctgaaggaggccgacaaggacgagttctgcagatgcgagctgaagctgcagaagtggtacggggacctgcggggaaagcccttcgccatcgaagccgagaacagcatcctggacatcagcggcttcagcaagcagtacaactgtgccttcatctggcagaaggacggcgtgaagaagctgaacctgtacctgatcatcaactacttcaagggcggcaagctgcggttcaagaagatcaaacctgaagccttcgaagccaacagattctacaccgtgatcaacaaaaagagcggcgagatcgtgcccatggaggtgaacttcaacttcgacgaccccaacctgatcatcctgcctctggcctttggcaagagacagggcagagaattcatctggaacgacctgctgtccctggaaaccggcagcctgaagctggccaacggaagagtgatcgagaagacactgtacaacagaagaacccggcaggatgagcctgccctgttcgtggccctgaccttcgagcggcgggaggtcctggactcctccaatatcaaaccaatgaacctgatcggcgtggcaagaggcgaaaacatccccgccgtgatcgccctgaccgaccccgagggctgcccactgagccggtttaaggatagcctgggaaacccaacccacatcctgagaatcggcgagagctataaggagaagcagcggaccatccaggccaagaaggaggtggagcagcggagagccggcggctacagccggaagtacgccagcaaagccaagaatctggcagacgatatggtgagaaacaccgctagagatctgctgtactacgccgtgacccaggatgccatgctgatcttcgccaacctgagccggggcttcggccggcagggcaagcggaccttcatggccgagagacagtacacacggatggaggactggctgaccgccaagctggcctacgagggcctgagcaagacctacctgtccaagacactggcccagtacacctccaagacatgcagcaactgtgggtttaccatcaccagcgccgactacgacagggtgctggagaagctgaagaagacagcaacaggctggatgaccacaattaacggcaaggagctgaaggtggagggccagattacctactacaacagatacaagagacagaacgtagtcaaggacctgtccgtcgagctggatagactgagcgaagaatctgtgaacaacgacatctcctcctggacaaagggcagaagcggagaagctctgagcctcctgaagaaaagattctcccatagacccgtgcaggagaagttcgtgtgcctgaactgcggcttcgagacacacgcagccgagcaagccgccctgaacatcgccagatcctggctgttcctgcggagccaggagtacaagaaataccagacaaacaagacaaccggcaacaccgataagagagccttcgtcgagacctggcagtccttttaccggaagaagcttaaggaggtgtggaaacctgccgtgcggtctggcggatctggcggaggctccacaagcatgaacatggagggcctggtgatgttccaggacctgttcatccacttcagccaggaggagtgggagtgcctggacgccgcccagaaggacctgtacagggacgtgatgatggagaactacagcagcctggtgagcctgggcctgtgcatccccaagcccgacgtgatcagcctgctggagcagggcaaggagccctggatggtgagcagggacgtgctgggcggctggtgccccgacagcgagaccagccccaagaaaaagagaaaagtctaagctgccttctgcggggcttgccttctggccatgcccttcttctctcccttgcacctgtacctcttggtctttgaataaagcctgagtaggaaggctagcaaaaaaaaaaaaaaaaaaaaaaaaaaaaaaaaaaaaaaaaaaaaaaaaaaaaaaaaaaaaaaaaaaaaaaaaaaaaaaaa

SEQ ID NO: 4025 - RNA, 5419 nt, synthetic construct
  source 1..5419: mol_type = other RNA
aggaaataagagagaaaagaagagtaagaagaaatataagagccaccatggcccctaagaagaagcgtaaagtgagccgggtgaacggcagcggcagcggcggcggcatgaaccacgaccaggagttcgacccccctaaggtgtaccctcccgtccccgccgagaagagaaagcccatccgggtcctgagcctgttcgatggcatcgccaccggtctgctggtgctgaaggacctgggcatccaggtggataggtacattgcctccgaggtgtgcgaggactccatcaccgtgggaatggtgcgtcatcagggcaagatcatgtacgtgggcgacgtgcggagcgtgacacagaagcatatccaggagtggggccctttcgacctggtgatcggcggcagcccttgcaatgacctgagcatcgtgaacccagcccggaagggcctgtacgagggaaccggcagactgttcttcgagttttacagactgctgcacgacgcccggcctaaggaaggcgacgaccggcccttcttttggctgttcgagaatgtggtggccatgggagtcagcgacaagcgggatattagccggttcctggagagcaaccccgtgatgatcgatgccaaggaagtgagcgccgcccaccgggccagatacttctggggcaatctgcctggcatgaacagacccctggccagcaccgtgaacgacaagctggagctgcaggagtgcctggagcacggccggatcgccaagttcagcaaggtgagaaccatcaccacccgaagcaacagcatcaaacaaggcaaggaccagcactttcctgtgttcatgaacgagaaggaggacatcctgtggtgtaccgagatggagagagtgttcgggttcccagtccactacacagatgtcagcaacatgtctagactggccagacagagactgctgggaagaagctggtccgtccctgtgatcagacacctgttcgcccctctgaaggagtacttcgcctgcgtgagcagcggcaacagcaacgccaacagccggggccccagcttctctagcggcctggtgccactgtccctgagagggagccacatgggccccatggagatctacaaaaccgtgagcgcctggaagcggcagcctgtgcgcgtgctgagcctgtttcggaatatcgataaagtcctgaaaagcctgggattcctggagagcggctctggctccggcggtggcaccctgaagtacgtggaggatgtgacaaacgtggtcagacgggatgtggagaagtggggccccttcgatctggtgtacggcagcacccaacccctgggcagctcttgtgaccggtgccctggctggtacatgtttcagttccaccggatcctgcagtacgccctgccgagacaggagtcccagcggccattcttttggattttcatggacaacttgctgctgaccgaggatgaccaggaaactaccactcggttcctgcagaccgaagccgtgaccctgcaggacgtgagaggccgggactaccagaacgccatgcgggtgtggtccaacatccctggactgaaaagcaagcacgcacctctgacccctaaagaagaggagtacctgcaggcccaggtgcggagcagaagcaagctggacgcccctaaggtggatctgctggtgaagaattgcctcctgcccctgagagagtacttcaagtatttcagccagaatagtctgcccctgggcggcccaagcagcggcgcccctcctcccagcggcggcagcccagccggctccccaacctctaccgaggagggcacctctgagtccgccacccccgagagcggccctggcacctccaccgagcccagcgagggcagcgcacccggcagccctgccggcagccccacctccacagaggagggaaccagcaccgagcccagcgaaggcagcgccccaggcaccagcaccgagcctagtgagggcggctctggcggcggcagcgcccaggagattaaacggatcaacaagatcagaagaagacttgtgaaagacagcaacaccaagaaggccggcaagacaggccccatgaaaaccctgctggttagagtgatgacacccgatctgagagagcggctggaaaacctgagaaagaagcctgaaaatatcccccagcccatcagcaatacatctagagccaacctgaataagctgctgaccgattacaccgaaatgaagaaggcgatcctgcatgtgtactgggaagagttccagaaggaccctgtgggcctgatgagccgggtggcccagcctgccagcaagaagatcgatcagaacaagctgaaacctgagatggacgagaagggcaacctgaccaccgccggctttgcctgctctcagtgtggccagcccctgttcgtgtacaagctggagcaggtgtctgagaagggcaaggcttacaccaactacttcggacggtgcaatgtggccgagcacgaaaagctgatcctgctggcccagctgaagcccgagaaggatagcgacgaagccgtgacatatagcctgggaaagtttgggcagagggccctggatttctacagcattcatgtgaccaaggagtccacccaccccgtgaagcccctggcccagatcgccggaaacagatacgcctccggacctgtgggaaaggccctgagcgacgcatgtatgggcacaatcgcctccttcctgtctaagtaccaggacatcatcatcgaacaccagaaggtggtgaagggcaaccagaagagactggagagcctgcgggagctggccggcaaggaaaacctggaataccctagcgtgaccctgccacctcagcctcacaccaaggagggcgttgatgcctacaacgaagtgatcgcccgggtgcgaatgtgggtgaacctgaacctgtggcagaagctgaagctaagcagagatgatgccaagcctctgctgagactgaagggattcccttcctttcctctggtcgagagacaggccaacgaagtggactggtgggacatggtgtgtaacgtgaagaagctgatcaacgagaaaaaggaggatggcaaggtgttttggcagaatctggctggctacaagagacaggaagccctgagaccatacctgagcagcgaggaagatcggaagaagggaaagaaattcgctcggtaccagctgggcgacctgctgctgcacctggaaaagaagcacggcgaggactggggaaaggtgtacgacgaggcctgggagcggattgacaagaaagtggaaggcctgagcaagcacatcaagctggaagaggaacggagaagcgaggacgcccagagcaaggccgccctgaccgactggctgcgggctaaggccagcttcgtgatcgagggcctgaaggaggccgacaaggacgagttctgcagatgcgagctgaagctgcagaagtggtacggggacctgcggggaaagcccttcgccatcgaagccgagaacagcatcctggacatcagcggcttcagcaagcagtacaactgtgccttcatctggcagaaggacggcgtgaagaagctgaacctgtacctgatcatcaactacttcaagggcggcaagctgcggttcaagaagatcaaacctgaagccttcgaagccaacagattctacaccgtgatcaacaaaaagagcggcgagatcgtgcccatggaggtgaacttcaacttcgacgaccccaacctgatcatcctgcctctggcctttggcaagagacagggcagagaattcatctggaacgacctgctgtccctggaaaccggcagcctgaagctggccaacggaagagtgatcgagaagacactgtacaacagaagaacccggcaggatgagcctgccctgttcgtggccctgaccttcgagcggcgggaggtcctggactcctccaatatcaaaccaatgaacctgatcggcgtggcaagaggcgaaaacatccccgccgtgatcgccctgaccgaccccgagggctgcccactgagccggtttaaggatagcctgggaaacccaacccacatcctgagaatcggcgagagctataaggagaagcagcggaccatccaggccaagaaggaggtggagcagcggagagccggcggctacagccggaagtacgccagcaaagccaagaatctggcagacgatatggtgagaaacaccgctagagatctgctgtactacgccgtgacccaggatgccatgctgatcttcgccaacctgagccggggcttcggccggcagggcaagcggaccttcatggccgagagacagtacacacggatggaggactggctgaccgccaagctggcctacgagggcctgagcaagacctacctgtccaagacactggcccagtacacctccaagacatgcagcaactgtgggtttaccatcaccagcgccgactacgacagggtgctggagaagctgaagaagacagcaacaggctggatgaccacaattaacggcaaggagctgaaggtggagggccagattacctactacaacagatacaagagacagaacgtagtcaaggacctgtccgtcgagctggatagactgagcgaagaatctgtgaacaacgacatctcctcctggacaaagggcagaagcggagaagctctgagcctcctgaagaaaagattctcccatagacccgtgcaggagaagttcgtgtgcctgaactgcggcttcgagacacacgcagccgagcaagccgccctgaacatcgccagatcctggctgttcctgcggagccaggagtacaagaaataccagacaaacaagacaaccggcaacaccgataagagagccttcgtcgagacctggcagtccttttaccggaagaagcttaaggaggtgtggaaacctgccgtgcggtctggcggatctggcggaggctccacaagccagcagatgcaggtgaccttcgaggacgtggccgtgagcttcagccaggaggagtgggagtacctggacgagggccagaaggagctgtacagggaggtgatgaaggagaactacgagaccgtggtgagcctgggcagccccgccagcacccccaagatcatcagctgcatcgagtgcggcgaggaggcctacatcaggggcgagcccggcagcgagggcagggagaccggcaagagcagctgcaccagccccaagaaaaagagaaaagtctaagctgccttctgcggggcttgccttctggccatgcccttcttctctcccttgcacctgtacctcttggtctttgaataaagcctgagtaggaaggctagcaaaaaaaaaaaaaaaaaaaaaaaaaaaaaaaaaaaaaaaaaaaaaaaaaaaaaaaaaaaaaaaaaaaaaaaaaaaaaaaa

SEQ ID NO: 4026 - RNA, 5419 nt, synthetic construct
  source 1..5419: mol_type = other RNA
aggaaataagagagaaaagaagagtaagaagaaatataagagccaccatggcccctaagaagaagcgtaaagtgagccgggtgaacggcagcggcagcggcggcggcatgaaccacgaccaggagttcgacccccctaaggtgtaccctcccgtccccgccgagaagagaaagcccatccgggtcctgagcctgttcgatggcatcgccaccggtctgctggtgctgaaggacctgggcatccaggtggataggtacattgcctccgaggtgtgcgaggactccatcaccgtgggaatggtgcgtcatcagggcaagatcatgtacgtgggcgacgtgcggagcgtgacacagaagcatatccaggagtggggccctttcgacctggtgatcggcggcagcccttgcaatgacctgagcatcgtgaacccagcccggaagggcctgtacgagggaaccggcagactgttcttcgagttttacagactgctgcacgacgcccggcctaaggaaggcgacgaccggcccttcttttggctgttcgagaatgtggtggccatgggagtcagcgacaagcgggatattagccggttcctggagagcaaccccgtgatgatcgatgccaaggaagtgagcgccgcccaccgggccagatacttctggggcaatctgcctggcatgaacagacccctggccagcaccgtgaacgacaagctggagctgcaggagtgcctggagcacggccggatcgccaagttcagcaaggtgagaaccatcaccacccgaagcaacagcatcaaacaaggcaaggaccagcactttcctgtgttcatgaacgagaaggaggacatcctgtggtgtaccgagatggagagagtgttcgggttcccagtccactacacagatgtcagcaacatgtctagactggccagacagagactgctgggaagaagctggtccgtccctgtgatcagacacctgttcgcccctctgaaggagtacttcgcctgcgtgagcagcggcaacagcaacgccaacagccggggccccagcttctctagcggcctggtgccactgtccctgagagggagccacatgggccccatggagatctacaaaaccgtgagcgcctggaagcggcagcctgtgcgcgtgctgagcctgtttcggaatatcgataaagtcctgaaaagcctgggattcctggagagcggctctggctccggcggtggcaccctgaagtacgtggaggatgtgacaaacgtggtcagacgggatgtggagaagtggggccccttcgatctggtgtacggcagcacccaacccctgggcagctcttgtgaccggtgccctggctggtacatgtttcagttccaccggatcctgcagtacgccctgccgagacaggagtcccagcggccattcttttggattttcatggacaacttgctgctgaccgaggatgaccaggaaactaccactcggttcctgcagaccgaagccgtgaccctgcaggacgtgagaggccgggactaccagaacgccatgcgggtgtggtccaacatccctggactgaaaagcaagcacgcacctctgacccctaaagaagaggagtacctgcaggcccaggtgcggagcagaagcaagctggacgcccctaaggtggatctgctggtgaagaattgcctcctgcccctgagagagtacttcaagtatttcagccagaatagtctgcccctgggcggcccaagcagcggcgcccctcctcccagcggcggcagcccagccggctccccaacctctaccgaggagggcacctctgagtccgccacccccgagagcggccctggcacctccaccgagcccagcgagggcagcgcacccggcagccctgccggcagccccacctccacagaggagggaaccagcaccgagcccagcgaaggcagcgccccaggcaccagcaccgagcctagtgagggcggctctggcggcggcagcgcccaggagattaaacggatcaacaagatcagaagaagacttgtgaaagacagcaacaccaagaaggccggcaagacaggccccatgaaaaccctgctggttagagtgatgacacccgatctgagagagcggctggaaaacctgagaaagaagcctgaaaatatcccccagcccatcagcaatacatctagagccaacctgaataagctgctgaccgattacaccgaaatgaagaaggcgatcctgcatgtgtactgggaagagttccagaaggaccctgtgggcctgatgagccgggtggcccagcctgccagcaagaagatcgatcagaacaagctgaaacctgagatggacgagaagggcaacctgaccaccgccggctttgcctgctctcagtgtggccagcccctgttcgtgtacaagctggagcaggtgtctgagaagggcaaggcttacaccaactacttcggacggtgcaatgtggccgagcacgaaaagctgatcctgctggcccagctgaagcccgagaaggatagcgacgaagccgtgacatatagcctgggaaagtttgggcagagggccctggatttctacagcattcatgtgaccaaggagtccacccaccccgtgaagcccctggcccagatcgccggaaacagatacgcctccggacctgtgggaaaggccctgagcgacgcatgtatgggcacaatcgcctccttcctgtctaagtaccaggacatcatcatcgaacaccagaaggtggtgaagggcaaccagaagagactggagagcctgcgggagctggccggcaaggaaaacctggaataccctagcgtgaccctgccacctcagcctcacaccaaggagggcgttgatgcctacaacgaagtgatcgcccgggtgcgaatgtgggtgaacctgaacctgtggcagaagctgaagctaagcagagatgatgccaagcctctgctgagactgaagggattcccttcctttcctctggtcgagagacaggccaacgaagtggactggtgggacatggtgtgtaacgtgaagaagctgatcaacgagaaaaaggaggatggcaaggtgttttggcagaatctggctggctacaagagacaggaagccctgagaccatacctgagcagcgaggaagatcggaagaagggaaagaaattcgctcggtaccagctgggcgacctgctgctgcacctggaaaagaagcacggcgaggactggggaaaggtgtacgacgaggcctgggagcggattgacaagaaagtggaaggcctgagcaagcacatcaagctggaagaggaacggagaagcgaggacgcccagagcaaggccgccctgaccgactggctgcgggctaaggccagcttcgtgatcgagggcctgaaggaggccgacaaggacgagttctgcagatgcgagctgaagctgcagaagtggtacggggacctgcggggaaagcccttcgccatcgaagccgagaacagcatcctggacatcagcggcttcagcaagcagtacaactgtgccttcatctggcagaaggacggcgtgaagaagctgaacctgtacctgatcatcaactacttcaagggcggcaagctgcggttcaagaagatcaaacctgaagccttcgaagccaacagattctacaccgtgatcaacaaaaagagcggcgagatcgtgcccatggaggtgaacttcaacttcgacgaccccaacctgatcatcctgcctctggcctttggcaagagacagggcagagaattcatctggaacgacctgctgtccctggaaaccggcagcctgaagctggccaacggaagagtgatcgagaagacactgtacaacagaagaacccggcaggatgagcctgccctgttcgtggccctgaccttcgagcggcgggaggtcctggactcctccaatatcaaaccaatgaacctgatcggcgtggcaagaggcgaaaacatccccgccgtgatcgccctgaccgaccccgagggctgcccactgagccggtttaaggatagcctgggaaacccaacccacatcctgagaatcggcgagagctataaggagaagcagcggaccatccaggccaagaaggaggtggagcagcggagagccggcggctacagccggaagtacgccagcaaagccaagaatctggcagacgatatggtgagaaacaccgctagagatctgctgtactacgccgtgacccaggatgccatgctgatcttcgccaacctgagccggggcttcggccggcagggcaagcggaccttcatggccgagagacagtacacacggatggaggactggctgaccgccaagctggcctacgagggcctgagcaagacctacctgtccaagacactggcccagtacacctccaagacatgcagcaactgtgggtttaccatcaccagcgccgactacgacagggtgctggagaagctgaagaagacagcaacaggctggatgaccacaattaacggcaaggagctgaaggtggagggccagattacctactacaacagatacaagagacagaacgtagtcaaggacctgtccgtcgagctggatagactgagcgaagaatctgtgaacaacgacatctcctcctggacaaagggcagaagcggagaagctctgagcctcctgaagaaaagattctcccatagacccgtgcaggagaagttcgtgtgcctgaactgcggcttcgagacacacgcagccgagcaagccgccctgaacatcgccagatcctggctgttcctgcggagccaggagtacaagaaataccagacaaacaagacaaccggcaacaccgataagagagccttcgtcgagacctggcagtccttttaccggaagaagcttaaggaggtgtggaaacctgccgtgcggtctggcggatctggcggaggctccacaagcagccagggccccgtgctgttcgaggacgtgagcgtggacttcacccagaaggagtggcagctgctggaccccgcccagaggaggctgtacagggacgtgatgctggagaactacaggcacctggagagcctgggccactgcgtgaccaagcccgagctgatcaggaggctggagcagggcgaggagccctggatcctgaagagggaggtgcccagccacagccacgccgaggtgcagagggccaccagccccaagaaaaagagaaaagtctaagctgccttctgcggggcttgccttctggccatgcccttcttctctcccttgcacctgtacctcttggtctttgaataaagcctgagtaggaaggctagcaaaaaaaaaaaaaaaaaaaaaaaaaaaaaaaaaaaaaaaaaaaaaaaaaaaaaaaaaaaaaaaaaaaaaaaaaaaaaaaa

SEQ ID NO: 4027 - RNA, 5419 nt, synthetic construct
  source 1..5419: mol_type = other RNA
aggaaataagagagaaaagaagagtaagaagaaatataagagccaccatggcccctaagaagaagcgtaaagtgagccgggtgaacggcagcggcagcggcggcggcatgaaccacgaccaggagttcgacccccctaaggtgtaccctcccgtccccgccgagaagagaaagcccatccgggtcctgagcctgttcgatggcatcgccaccggtctgctggtgctgaaggacctgggcatccaggtggataggtacattgcctccgaggtgtgcgaggactccatcaccgtgggaatggtgcgtcatcagggcaagatcatgtacgtgggcgacgtgcggagcgtgacacagaagcatatccaggagtggggccctttcgacctggtgatcggcggcagcccttgcaatgacctgagcatcgtgaacccagcccggaagggcctgtacgagggaaccggcagactgttcttcgagttttacagactgctgcacgacgcccggcctaaggaaggcgacgaccggcccttcttttggctgttcgagaatgtggtggccatgggagtcagcgacaagcgggatattagccggttcctggagagcaaccccgtgatgatcgatgccaaggaagtgagcgccgcccaccgggccagatacttctggggcaatctgcctggcatgaacagacccctggccagcaccgtgaacgacaagctggagctgcaggagtgcctggagcacggccggatcgccaagttcagcaaggtgagaaccatcaccacccgaagcaacagcatcaaacaaggcaaggaccagcactttcctgtgttcatgaacgagaaggaggacatcctgtggtgtaccgagatggagagagtgttcgggttcccagtccactacacagatgtcagcaacatgtctagactggccagacagagactgctgggaagaagctggtccgtccctgtgatcagacacctgttcgcccctctgaaggagtacttcgcctgcgtgagcagcggcaacagcaacgccaacagccggggccccagcttctctagcggcctggtgccactgtccctgagagggagccacatgggccccatggagatctacaaaaccgtgagcgcctggaagcggcagcctgtgcgcgtgctgagcctgtttcggaatatcgataaagtcctgaaaagcctgggattcctggagagcggctctggctccggcggtggcaccctgaagtacgtggaggatgtgacaaacgtggtcagacgggatgtggagaagtggggccccttcgatctggtgtacggcagcacccaacccctgggcagctcttgtgaccggtgccctggctggtacatgtttcagttccaccggatcctgcagtacgccctgccgagacaggagtcccagcggccattcttttggattttcatggacaacttgctgctgaccgaggatgaccaggaaactaccactcggttcctgcagaccgaagccgtgaccctgcaggacgtgagaggccgggactaccagaacgccatgcgggtgtggtccaacatccctggactgaaaagcaagcacgcacctctgacccctaaagaagaggagtacctgcaggcccaggtgcggagcagaagcaagctggacgcccctaaggtggatctgctggtgaagaattgcctcctgcccctgagagagtacttcaagtatttcagccagaatagtctgcccctgggcggcccaagcagcggcgcccctcctcccagcggcggcagcccagccggctccccaacctctaccgaggagggcacctctgagtccgccacccccgagagcggccctggcacctccaccgagcccagcgagggcagcgcacccggcagccctgccggcagccccacctccacagaggagggaaccagcaccgagcccagcgaaggcagcgccccaggcaccagcaccgagcctagtgagggcggctctggcggcggcagcgcccaggagattaaacggatcaacaagatcagaagaagacttgtgaaagacagcaacaccaagaaggccggcaagacaggccccatgaaaaccctgctggttagagtgatgacacccgatctgagagagcggctggaaaacctgagaaagaagcctgaaaatatcccccagcccatcagcaatacatctagagccaacctgaataagctgctgaccgattacaccgaaatgaagaaggcgatcctgcatgtgtactgggaagagttccagaaggaccctgtgggcctgatgagccgggtggcccagcctgccagcaagaagatcgatcagaacaagctgaaacctgagatggacgagaagggcaacctgaccaccgccggctttgcctgctctcagtgtggccagcccctgttcgtgtacaagctggagcaggtgtctgagaagggcaaggcttacaccaactacttcggacggtgcaatgtggccgagcacgaaaagctgatcctgctggcccagctgaagcccgagaaggatagcgacgaagccgtgacatatagcctgggaaagtttgggcagagggccctggatttctacagcattcatgtgaccaaggagtccacccaccccgtgaagcccctggcccagatcgccggaaacagatacgcctccggacctgtgggaaaggccctgagcgacgcatgtatgggcacaatcgcctccttcctgtctaagtaccaggacatcatcatcgaacaccagaaggtggtgaagggcaaccagaagagactggagagcctgcgggagctggccggcaaggaaaacctggaataccctagcgtgaccctgccacctcagcctcacaccaaggagggcgttgatgcctacaacgaagtgatcgcccgggtgcgaatgtgggtgaacctgaacctgtggcagaagctgaagctaagcagagatgatgccaagcctctgctgagactgaagggattcccttcctttcctctggtcgagagacaggccaacgaagtggactggtgggacatggtgtgtaacgtgaagaagctgatcaacgagaaaaaggaggatggcaaggtgttttggcagaatctggctggctacaagagacaggaagccctgagaccatacctgagcagcgaggaagatcggaagaagggaaagaaattcgctcggtaccagctgggcgacctgctgctgcacctggaaaagaagcacggcgaggactggggaaaggtgtacgacgaggcctgggagcggattgacaagaaagtggaaggcctgagcaagcacatcaagctggaagaggaacggagaagcgaggacgcccagagcaaggccgccctgaccgactggctgcgggctaaggccagcttcgtgatcgagggcctgaaggaggccgacaaggacgagttctgcagatgcgagctgaagctgcagaagtggtacggggacctgcggggaaagcccttcgccatcgaagccgagaacagcatcctggacatcagcggcttcagcaagcagtacaactgtgccttcatctggcagaaggacggcgtgaagaagctgaacctgtacctgatcatcaactacttcaagggcggcaagctgcggttcaagaagatcaaacctgaagccttcgaagccaacagattctacaccgtgatcaacaaaaagagcggcgagatcgtgcccatggaggtgaacttcaacttcgacgaccccaacctgatcatcctgcctctggcctttggcaagagacagggcagagaattcatctggaacgacctgctgtccctggaaaccggcagcctgaagctggccaacggaagagtgatcgagaagacactgtacaacagaagaacccggcaggatgagcctgccctgttcgtggccctgaccttcgagcggcgggaggtcctggactcctccaatatcaaaccaatgaacctgatcggcgtggcaagaggcgaaaacatccccgccgtgatcgccctgaccgaccccgagggctgcccactgagccggtttaaggatagcctgggaaacccaacccacatcctgagaatcggcgagagctataaggagaagcagcggaccatccaggccaagaaggaggtggagcagcggagagccggcggctacagccggaagtacgccagcaaagccaagaatctggcagacgatatggtgagaaacaccgctagagatctgctgtactacgccgtgacccaggatgccatgctgatcttcgccaacctgagccggggcttcggccggcagggcaagcggaccttcatggccgagagacagtacacacggatggaggactggctgaccgccaagctggcctacgagggcctgagcaagacctacctgtccaagacactggcccagtacacctccaagacatgcagcaactgtgggtttaccatcaccagcgccgactacgacagggtgctggagaagctgaagaagacagcaacaggctggatgaccacaattaacggcaaggagctgaaggtggagggccagattacctactacaacagatacaagagacagaacgtagtcaaggacctgtccgtcgagctggatagactgagcgaagaatctgtgaacaacgacatctcctcctggacaaagggcagaagcggagaagctctgagcctcctgaagaaaagattctcccatagacccgtgcaggagaagttcgtgtgcctgaactgcggcttcgagacacacgcagccgagcaagccgccctgaacatcgccagatcctggctgttcctgcggagccaggagtacaagaaataccagacaaacaagacaaccggcaacaccgataagagagccttcgtcgagacctggcagtccttttaccggaagaagcttaaggaggtgtggaaacctgccgtgcggtctggcggatctggcggaggctccacaagcgtgaccgagctgctgaccttcaaggacatcagcgtggacttcacccaggaggagtggggccagctggcccccgcccacaggaacctgtacagggaggtgatgctggagaactacggcaacctggtgagcgtggccggctgccagctgagcaagcccagcgtgatcagccagctggagaagggcgaggagccctggatgaccgagaaggagggcgccggcgaccccagcagcgacctgaagagcaccagccccaagaaaaagagaaaagtctaagctgccttctgcggggcttgccttctggccatgcccttcttctctcccttgcacctgtacctcttggtctttgaataaagcctgagtaggaaggctagcaaaaaaaaaaaaaaaaaaaaaaaaaaaaaaaaaaaaaaaaaaaaaaaaaaaaaaaaaaaaaaaaaaaaaaaaaaaaaaaa

SEQ ID NO: 4028 - RNA, 5419 nt, synthetic construct
  source 1..5419: mol_type = other RNA
aggaaataagagagaaaagaagagtaagaagaaatataagagccaccatggcccctaagaagaagcgtaaagtgagccgggtgaacggcagcggcagcggcggcggcatgaaccacgaccaggagttcgacccccctaaggtgtaccctcccgtccccgccgagaagagaaagcccatccgggtcctgagcctgttcgatggcatcgccaccggtctgctggtgctgaaggacctgggcatccaggtggataggtacattgcctccgaggtgtgcgaggactccatcaccgtgggaatggtgcgtcatcagggcaagatcatgtacgtgggcgacgtgcggagcgtgacacagaagcatatccaggagtggggccctttcgacctggtgatcggcggcagcccttgcaatgacctgagcatcgtgaacccagcccggaagggcctgtacgagggaaccggcagactgttcttcgagttttacagactgctgcacgacgcccggcctaaggaaggcgacgaccggcccttcttttggctgttcgagaatgtggtggccatgggagtcagcgacaagcgggatattagccggttcctggagagcaaccccgtgatgatcgatgccaaggaagtgagcgccgcccaccgggccagatacttctggggcaatctgcctggcatgaacagacccctggccagcaccgtgaacgacaagctggagctgcaggagtgcctggagcacggccggatcgccaagttcagcaaggtgagaaccatcaccacccgaagcaacagcatcaaacaaggcaaggaccagcactttcctgtgttcatgaacgagaaggaggacatcctgtggtgtaccgagatggagagagtgttcgggttcccagtccactacacagatgtcagcaacatgtctagactggccagacagagactgctgggaagaagctggtccgtccctgtgatcagacacctgttcgcccctctgaaggagtacttcgcctgcgtgagcagcggcaacagcaacgccaacagccggggccccagcttctctagcggcctggtgccactgtccctgagagggagccacatgggccccatggagatctacaaaaccgtgagcgcctggaagcggcagcctgtgcgcgtgctgagcctgtttcggaatatcgataaagtcctgaaaagcctgggattcctggagagcggctctggctccggcggtggcaccctgaagtacgtggaggatgtgacaaacgtggtcagacgggatgtggagaagtggggccccttcgatctggtgtacggcagcacccaacccctgggcagctcttgtgaccggtgccctggctggtacatgtttcagttccaccggatcctgcagtacgccctgccgagacaggagtcccagcggccattcttttggattttcatggacaacttgctgctgaccgaggatgaccaggaaactaccactcggttcctgcagaccgaagccgtgaccctgcaggacgtgagaggccgggactaccagaacgccatgcgggtgtggtccaacatccctggactgaaaagcaagcacgcacctctgacccctaaagaagaggagtacctgcaggcccaggtgcggagcagaagcaagctggacgcccctaaggtggatctgctggtgaagaattgcctcctgcccctgagagagtacttcaagtatttcagccagaatagtctgcccctgggcggcccaagcagcggcgcccctcctcccagcggcggcagcccagccggctccccaacctctaccgaggagggcacctctgagtccgccacccccgagagcggccctggcacctccaccgagcccagcgagggcagcgcacccggcagccctgccggcagccccacctccacagaggagggaaccagcaccgagcccagcgaaggcagcgccccaggcaccagcaccgagcctagtgagggcggctctggcggcggcagcgcccaggagattaaacggatcaacaagatcagaagaagacttgtgaaagacagcaacaccaagaaggccggcaagacaggccccatgaaaaccctgctggttagagtgatgacacccgatctgagagagcggctggaaaacctgagaaagaagcctgaaaatatcccccagcccatcagcaatacatctagagccaacctgaataagctgctgaccgattacaccgaaatgaagaaggcgatcctgcatgtgtactgggaagagttccagaaggaccctgtgggcctgatgagccgggtggcccagcctgccagcaagaagatcgatcagaacaagctgaaacctgagatggacgagaagggcaacctgaccaccgccggctttgcctgctctcagtgtggccagcccctgttcgtgtacaagctggagcaggtgtctgagaagggcaaggcttacaccaactacttcggacggtgcaatgtggccgagcacgaaaagctgatcctgctggcccagctgaagcccgagaaggatagcgacgaagccgtgacatatagcctgggaaagtttgggcagagggccctggatttctacagcattcatgtgaccaaggagtccacccaccccgtgaagcccctggcccagatcgccggaaacagatacgcctccggacctgtgggaaaggccctgagcgacgcatgtatgggcacaatcgcctccttcctgtctaagtaccaggacatcatcatcgaacaccagaaggtggtgaagggcaaccagaagagactggagagcctgcgggagctggccggcaaggaaaacctggaataccctagcgtgaccctgccacctcagcctcacaccaaggagggcgttgatgcctacaacgaagtgatcgcccgggtgcgaatgtgggtgaacctgaacctgtggcagaagctgaagctaagcagagatgatgccaagcctctgctgagactgaagggattcccttcctttcctctggtcgagagacaggccaacgaagtggactggtgggacatggtgtgtaacgtgaagaagctgatcaacgagaaaaaggaggatggcaaggtgttttggcagaatctggctggctacaagagacaggaagccctgagaccatacctgagcagcgaggaagatcggaagaagggaaagaaattcgctcggtaccagctgggcgacctgctgctgcacctggaaaagaagcacggcgaggactggggaaaggtgtacgacgaggcctgggagcggattgacaagaaagtggaaggcctgagcaagcacatcaagctggaagaggaacggagaagcgaggacgcccagagcaaggccgccctgaccgactggctgcgggctaaggccagcttcgtgatcgagggcctgaaggaggccgacaaggacgagttctgcagatgcgagctgaagctgcagaagtggtacggggacctgcggggaaagcccttcgccatcgaagccgagaacagcatcctggacatcagcggcttcagcaagcagtacaactgtgccttcatctggcagaaggacggcgtgaagaagctgaacctgtacctgatcatcaactacttcaagggcggcaagctgcggttcaagaagatcaaacctgaagccttcgaagccaacagattctacaccgtgatcaacaaaaagagcggcgagatcgtgcccatggaggtgaacttcaacttcgacgaccccaacctgatcatcctgcctctggcctttggcaagagacagggcagagaattcatctggaacgacctgctgtccctggaaaccggcagcctgaagctggccaacggaagagtgatcgagaagacactgtacaacagaagaacccggcaggatgagcctgccctgttcgtggccctgaccttcgagcggcgggaggtcctggactcctccaatatcaaaccaatgaacctgatcggcgtggcaagaggcgaaaacatccccgccgtgatcgccctgaccgaccccgagggctgcccactgagccggtttaaggatagcctgggaaacccaacccacatcctgagaatcggcgagagctataaggagaagcagcggaccatccaggccaagaaggaggtggagcagcggagagccggcggctacagccggaagtacgccagcaaagccaagaatctggcagacgatatggtgagaaacaccgctagagatctgctgtactacgccgtgacccaggatgccatgctgatcttcgccaacctgagccggggcttcggccggcagggcaagcggaccttcatggccgagagacagtacacacggatggaggactggctgaccgccaagctggcctacgagggcctgagcaagacctacctgtccaagacactggcccagtacacctccaagacatgcagcaactgtgggtttaccatcaccagcgccgactacgacagggtgctggagaagctgaagaagacagcaacaggctggatgaccacaattaacggcaaggagctgaaggtggagggccagattacctactacaacagatacaagagacagaacgtagtcaaggacctgtccgtcgagctggatagactgagcgaagaatctgtgaacaacgacatctcctcctggacaaagggcagaagcggagaagctctgagcctcctgaagaaaagattctcccatagacccgtgcaggagaagttcgtgtgcctgaactgcggcttcgagacacacgcagccgagcaagccgccctgaacatcgccagatcctggctgttcctgcggagccaggagtacaagaaataccagacaaacaagacaaccggcaacaccgataagagagccttcgtcgagacctggcagtccttttaccggaagaagcttaaggaggtgtggaaacctgccgtgcggtctggcggatctggcggaggctccacaagcgacctggaccaggtgaccttcgaggacgtggtggtggacttcaccagggaggagtggggctgcctggagcccgcccagaggaccctgtacagggacgtgatgctggagaccttcaggctgctggtgagcgtgggccactggctgcccaagcccgacgtgatcagcctgctggagcaggaggccgagctgtgggccgccgacgagggcggccccaggggcatgtgccccgacctggagaccaggaccagccccaagaaaaagagaaaagtctaagctgccttctgcggggcttgccttctggccatgcccttcttctctcccttgcacctgtacctcttggtctttgaataaagcctgagtaggaaggctagcaaaaaaaaaaaaaaaaaaaaaaaaaaaaaaaaaaaaaaaaaaaaaaaaaaaaaaaaaaaaaaaaaaaaaaaaaaaaaaaa

SEQ ID NO: 4029 - RNA, 5419 nt, synthetic construct
  source 1..5419: mol_type = other RNA
aggaaataagagagaaaagaagagtaagaagaaatataagagccaccatggcccctaagaagaagcgtaaagtgagccgggtgaacggcagcggcagcggcggcggcatgaaccacgaccaggagttcgacccccctaaggtgtaccctcccgtccccgccgagaagagaaagcccatccgggtcctgagcctgttcgatggcatcgccaccggtctgctggtgctgaaggacctgggcatccaggtggataggtacattgcctccgaggtgtgcgaggactccatcaccgtgggaatggtgcgtcatcagggcaagatcatgtacgtgggcgacgtgcggagcgtgacacagaagcatatccaggagtggggccctttcgacctggtgatcggcggcagcccttgcaatgacctgagcatcgtgaacccagcccggaagggcctgtacgagggaaccggcagactgttcttcgagttttacagactgctgcacgacgcccggcctaaggaaggcgacgaccggcccttcttttggctgttcgagaatgtggtggccatgggagtcagcgacaagcgggatattagccggttcctggagagcaaccccgtgatgatcgatgccaaggaagtgagcgccgcccaccgggccagatacttctggggcaatctgcctggcatgaacagacccctggccagcaccgtgaacgacaagctggagctgcaggagtgcctggagcacggccggatcgccaagttcagcaaggtgagaaccatcaccacccgaagcaacagcatcaaacaaggcaaggaccagcactttcctgtgttcatgaacgagaaggaggacatcctgtggtgtaccgagatggagagagtgttcgggttcccagtccactacacagatgtcagcaacatgtctagactggccagacagagactgctgggaagaagctggtccgtccctgtgatcagacacctgttcgcccctctgaaggagtacttcgcctgcgtgagcagcggcaacagcaacgccaacagccggggccccagcttctctagcggcctggtgccactgtccctgagagggagccacatgggccccatggagatctacaaaaccgtgagcgcctggaagcggcagcctgtgcgcgtgctgagcctgtttcggaatatcgataaagtcctgaaaagcctgggattcctggagagcggctctggctccggcggtggcaccctgaagtacgtggaggatgtgacaaacgtggtcagacgggatgtggagaagtggggccccttcgatctggtgtacggcagcacccaacccctgggcagctcttgtgaccggtgccctggctggtacatgtttcagttccaccggatcctgcagtacgccctgccgagacaggagtcccagcggccattcttttggattttcatggacaacttgctgctgaccgaggatgaccaggaaactaccactcggttcctgcagaccgaagccgtgaccctgcaggacgtgagaggccgggactaccagaacgccatgcgggtgtggtccaacatccctggactgaaaagcaagcacgcacctctgacccctaaagaagaggagtacctgcaggcccaggtgcggagcagaagcaagctggacgcccctaaggtggatctgctggtgaagaattgcctcctgcccctgagagagtacttcaagtatttcagccagaatagtctgcccctgggcggcccaagcagcggcgcccctcctcccagcggcggcagcccagccggctccccaacctctaccgaggagggcacctctgagtccgccacccccgagagcggccctggcacctccaccgagcccagcgagggcagcgcacccggcagccctgccggcagccccacctccacagaggagggaaccagcaccgagcccagcgaaggcagcgccccaggcaccagcaccgagcctagtgagggcggctctggcggcggcagcgcccaggagattaaacggatcaacaagatcagaagaagacttgtgaaagacagcaacaccaagaaggccggcaagacaggccccatgaaaaccctgctggttagagtgatgacacccgatctgagagagcggctggaaaacctgagaaagaagcctgaaaatatcccccagcccatcagcaatacatctagagccaacctgaataagctgctgaccgattacaccgaaatgaagaaggcgatcctgcatgtgtactgggaagagttccagaaggaccctgtgggcctgatgagccgggtggcccagcctgccagcaagaagatcgatcagaacaagctgaaacctgagatggacgagaagggcaacctgaccaccgccggctttgcctgctctcagtgtggccagcccctgttcgtgtacaagctggagcaggtgtctgagaagggcaaggcttacaccaactacttcggacggtgcaatgtggccgagcacgaaaagctgatcctgctggcccagctgaagcccgagaaggatagcgacgaagccgtgacatatagcctgggaaagtttgggcagagggccctggatttctacagcattcatgtgaccaaggagtccacccaccccgtgaagcccctggcccagatcgccggaaacagatacgcctccggacctgtgggaaaggccctgagcgacgcatgtatgggcacaatcgcctccttcctgtctaagtaccaggacatcatcatcgaacaccagaaggtggtgaagggcaaccagaagagactggagagcctgcgggagctggccggcaaggaaaacctggaataccctagcgtgaccctgccacctcagcctcacaccaaggagggcgttgatgcctacaacgaagtgatcgcccgggtgcgaatgtgggtgaacctgaacctgtggcagaagctgaagctaagcagagatgatgccaagcctctgctgagactgaagggattcccttcctttcctctggtcgagagacaggccaacgaagtggactggtgggacatggtgtgtaacgtgaagaagctgatcaacgagaaaaaggaggatggcaaggtgttttggcagaatctggctggctacaagagacaggaagccctgagaccatacctgagcagcgaggaagatcggaagaagggaaagaaattcgctcggtaccagctgggcgacctgctgctgcacctggaaaagaagcacggcgaggactggggaaaggtgtacgacgaggcctgggagcggattgacaagaaagtggaaggcctgagcaagcacatcaagctggaagaggaacggagaagcgaggacgcccagagcaaggccgccctgaccgactggctgcgggctaaggccagcttcgtgatcgagggcctgaaggaggccgacaaggacgagttctgcagatgcgagctgaagctgcagaagtggtacggggacctgcggggaaagcccttcgccatcgaagccgagaacagcatcctggacatcagcggcttcagcaagcagtacaactgtgccttcatctggcagaaggacggcgtgaagaagctgaacctgtacctgatcatcaactacttcaagggcggcaagctgcggttcaagaagatcaaacctgaagccttcgaagccaacagattctacaccgtgatcaacaaaaagagcggcgagatcgtgcccatggaggtgaacttcaacttcgacgaccccaacctgatcatcctgcctctggcctttggcaagagacagggcagagaattcatctggaacgacctgctgtccctggaaaccggcagcctgaagctggccaacggaagagtgatcgagaagacactgtacaacagaagaacccggcaggatgagcctgccctgttcgtggccctgaccttcgagcggcgggaggtcctggactcctccaatatcaaaccaatgaacctgatcggcgtggcaagaggcgaaaacatccccgccgtgatcgccctgaccgaccccgagggctgcccactgagccggtttaaggatagcctgggaaacccaacccacatcctgagaatcggcgagagctataaggagaagcagcggaccatccaggccaagaaggaggtggagcagcggagagccggcggctacagccggaagtacgccagcaaagccaagaatctggcagacgatatggtgagaaacaccgctagagatctgctgtactacgccgtgacccaggatgccatgctgatcttcgccaacctgagccggggcttcggccggcagggcaagcggaccttcatggccgagagacagtacacacggatggaggactggctgaccgccaagctggcctacgagggcctgagcaagacctacctgtccaagacactggcccagtacacctccaagacatgcagcaactgtgggtttaccatcaccagcgccgactacgacagggtgctggagaagctgaagaagacagcaacaggctggatgaccacaattaacggcaaggagctgaaggtggagggccagattacctactacaacagatacaagagacagaacgtagtcaaggacctgtccgtcgagctggatagactgagcgaagaatctgtgaacaacgacatctcctcctggacaaagggcagaagcggagaagctctgagcctcctgaagaaaagattctcccatagacccgtgcaggagaagttcgtgtgcctgaactgcggcttcgagacacacgcagccgagcaagccgccctgaacatcgccagatcctggctgttcctgcggagccaggagtacaagaaataccagacaaacaagacaaccggcaacaccgataagagagccttcgtcgagacctggcagtccttttaccggaagaagcttaaggaggtgtggaaacctgccgtgcggtctggcggatctggcggaggctccacaagcgcccacggcagcgtgaccttcagggacgtggccatggacttcagccagcaggagtgggagtgcctgaaccccttccagaagaccctgtacagggacgtgatgatggagaactacggcaacctggtgagcctgggccacagcatcagcaagcccgacgtgatcaccctgctggagcagggcaaggagccctggatgatcgtgaagaaggagaccaggaagtggaggaaggacctggagagcaggaccagccccaagaaaaagagaaaagtctaagctgccttctgcggggcttgccttctggccatgcccttcttctctcccttgcacctgtacctcttggtctttgaataaagcctgagtaggaaggctagcaaaaaaaaaaaaaaaaaaaaaaaaaaaaaaaaaaaaaaaaaaaaaaaaaaaaaaaaaaaaaaaaaaaaaaaaaaaaaaaa

SEQ ID NO: 4030 - RNA, 5419 nt, synthetic construct
  source 1..5419: mol_type = other RNA
aggaaataagagagaaaagaagagtaagaagaaatataagagccaccatggcccctaagaagaagcgtaaagtgagccgggtgaacggcagcggcagcggcggcggcatgaaccacgaccaggagttcgacccccctaaggtgtaccctcccgtccccgccgagaagagaaagcccatccgggtcctgagcctgttcgatggcatcgccaccggtctgctggtgctgaaggacctgggcatccaggtggataggtacattgcctccgaggtgtgcgaggactccatcaccgtgggaatggtgcgtcatcagggcaagatcatgtacgtgggcgacgtgcggagcgtgacacagaagcatatccaggagtggggccctttcgacctggtgatcggcggcagcccttgcaatgacctgagcatcgtgaacccagcccggaagggcctgtacgagggaaccggcagactgttcttcgagttttacagactgctgcacgacgcccggcctaaggaaggcgacgaccggcccttcttttggctgttcgagaatgtggtggccatgggagtcagcgacaagcgggatattagccggttcctggagagcaaccccgtgatgatcgatgccaaggaagtgagcgccgcccaccgggccagatacttctggggcaatctgcctggcatgaacagacccctggccagcaccgtgaacgacaagctggagctgcaggagtgcctggagcacggccggatcgccaagttcagcaaggtgagaaccatcaccacccgaagcaacagcatcaaacaaggcaaggaccagcactttcctgtgttcatgaacgagaaggaggacatcctgtggtgtaccgagatggagagagtgttcgggttcccagtccactacacagatgtcagcaacatgtctagactggccagacagagactgctgggaagaagctggtccgtccctgtgatcagacacctgttcgcccctctgaaggagtacttcgcctgcgtgagcagcggcaacagcaacgccaacagccggggccccagcttctctagcggcctggtgccactgtccctgagagggagccacatgggccccatggagatctacaaaaccgtgagcgcctggaagcggcagcctgtgcgcgtgctgagcctgtttcggaatatcgataaagtcctgaaaagcctgggattcctggagagcggctctggctccggcggtggcaccctgaagtacgtggaggatgtgacaaacgtggtcagacgggatgtggagaagtggggccccttcgatctggtgtacggcagcacccaacccctgggcagctcttgtgaccggtgccctggctggtacatgtttcagttccaccggatcctgcagtacgccctgccgagacaggagtcccagcggccattcttttggattttcatggacaacttgctgctgaccgaggatgaccaggaaactaccactcggttcctgcagaccgaagccgtgaccctgcaggacgtgagaggccgggactaccagaacgccatgcgggtgtggtccaacatccctggactgaaaagcaagcacgcacctctgacccctaaagaagaggagtacctgcaggcccaggtgcggagcagaagcaagctggacgcccctaaggtggatctgctggtgaagaattgcctcctgcccctgagagagtacttcaagtatttcagccagaatagtctgcccctgggcggcccaagcagcggcgcccctcctcccagcggcggcagcccagccggctccccaacctctaccgaggagggcacctctgagtccgccacccccgagagcggccctggcacctccaccgagcccagcgagggcagcgcacccggcagccctgccggcagccccacctccacagaggagggaaccagcaccgagcccagcgaaggcagcgccccaggcaccagcaccgagcctagtgagggcggctctggcggcggcagcgcccaggagattaaacggatcaacaagatcagaagaagacttgtgaaagacagcaacaccaagaaggccggcaagacaggccccatgaaaaccctgctggttagagtgatgacacccgatctgagagagcggctggaaaacctgagaaagaagcctgaaaatatcccccagcccatcagcaatacatctagagccaacctgaataagctgctgaccgattacaccgaaatgaagaaggcgatcctgcatgtgtactgggaagagttccagaaggaccctgtgggcctgatgagccgggtggcccagcctgccagcaagaagatcgatcagaacaagctgaaacctgagatggacgagaagggcaacctgaccaccgccggctttgcctgctctcagtgtggccagcccctgttcgtgtacaagctggagcaggtgtctgagaagggcaaggcttacaccaactacttcggacggtgcaatgtggccgagcacgaaaagctgatcctgctggcccagctgaagcccgagaaggatagcgacgaagccgtgacatatagcctgggaaagtttgggcagagggccctggatttctacagcattcatgtgaccaaggagtccacccaccccgtgaagcccctggcccagatcgccggaaacagatacgcctccggacctgtgggaaaggccctgagcgacgcatgtatgggcacaatcgcctccttcctgtctaagtaccaggacatcatcatcgaacaccagaaggtggtgaagggcaaccagaagagactggagagcctgcgggagctggccggcaaggaaaacctggaataccctagcgtgaccctgccacctcagcctcacaccaaggagggcgttgatgcctacaacgaagtgatcgcccgggtgcgaatgtgggtgaacctgaacctgtggcagaagctgaagctaagcagagatgatgccaagcctctgctgagactgaagggattcccttcctttcctctggtcgagagacaggccaacgaagtggactggtgggacatggtgtgtaacgtgaagaagctgatcaacgagaaaaaggaggatggcaaggtgttttggcagaatctggctggctacaagagacaggaagccctgagaccatacctgagcagcgaggaagatcggaagaagggaaagaaattcgctcggtaccagctgggcgacctgctgctgcacctggaaaagaagcacggcgaggactggggaaaggtgtacgacgaggcctgggagcggattgacaagaaagtggaaggcctgagcaagcacatcaagctggaagaggaacggagaagcgaggacgcccagagcaaggccgccctgaccgactggctgcgggctaaggccagcttcgtgatcgagggcctgaaggaggccgacaaggacgagttctgcagatgcgagctgaagctgcagaagtggtacggggacctgcggggaaagcccttcgccatcgaagccgagaacagcatcctggacatcagcggcttcagcaagcagtacaactgtgccttcatctggcagaaggacggcgtgaagaagctgaacctgtacctgatcatcaactacttcaagggcggcaagctgcggttcaagaagatcaaacctgaagccttcgaagccaacagattctacaccgtgatcaacaaaaagagcggcgagatcgtgcccatggaggtgaacttcaacttcgacgaccccaacctgatcatcctgcctctggcctttggcaagagacagggcagagaattcatctggaacgacctgctgtccctggaaaccggcagcctgaagctggccaacggaagagtgatcgagaagacactgtacaacagaagaacccggcaggatgagcctgccctgttcgtggccctgaccttcgagcggcgggaggtcctggactcctccaatatcaaaccaatgaacctgatcggcgtggcaagaggcgaaaacatccccgccgtgatcgccctgaccgaccccgagggctgcccactgagccggtttaaggatagcctgggaaacccaacccacatcctgagaatcggcgagagctataaggagaagcagcggaccatccaggccaagaaggaggtggagcagcggagagccggcggctacagccggaagtacgccagcaaagccaagaatctggcagacgatatggtgagaaacaccgctagagatctgctgtactacgccgtgacccaggatgccatgctgatcttcgccaacctgagccggggcttcggccggcagggcaagcggaccttcatggccgagagacagtacacacggatggaggactggctgaccgccaagctggcctacgagggcctgagcaagacctacctgtccaagacactggcccagtacacctccaagacatgcagcaactgtgggtttaccatcaccagcgccgactacgacagggtgctggagaagctgaagaagacagcaacaggctggatgaccacaattaacggcaaggagctgaaggtggagggccagattacctactacaacagatacaagagacagaacgtagtcaaggacctgtccgtcgagctggatagactgagcgaagaatctgtgaacaacgacatctcctcctggacaaagggcagaagcggagaagctctgagcctcctgaagaaaagattctcccatagacccgtgcaggagaagttcgtgtgcctgaactgcggcttcgagacacacgcagccgagcaagccgccctgaacatcgccagatcctggctgttcctgcggagccaggagtacaagaaataccagacaaacaagacaaccggcaacaccgataagagagccttcgtcgagacctggcagtccttttaccggaagaagcttaaggaggtgtggaaacctgccgtgcggtctggcggatctggcggaggctccacaagcgcccaggagagcgtgaccttcgaggacgtggccgtgaacttcaccaacagggagtggcagagcctgacctacgcccagaggcacctgtacaagcacgtgatgctggagaactacaggaacatggtgagcctgggcttccccttccccaagccccccctgatcagccacctggagaggggcgtggagccctgcgtgcaggacccccaggacaaggagagcctgagctgcagctaccccgtgagcaccagccccaagaaaaagagaaaagtctaagctgccttctgcggggcttgccttctggccatgcccttcttctctcccttgcacctgtacctcttggtctttgaataaagcctgagtaggaaggctagcaaaaaaaaaaaaaaaaaaaaaaaaaaaaaaaaaaaaaaaaaaaaaaaaaaaaaaaaaaaaaaaaaaaaaaaaaaaaaaaa

SEQ ID NO: 4031 - RNA, 5419 nt, synthetic construct
  source 1..5419: mol_type = other RNA
aggaaataagagagaaaagaagagtaagaagaaatataagagccaccatggcccctaagaagaagcgtaaagtgagccgggtgaacggcagcggcagcggcggcggcatgaaccacgaccaggagttcgacccccctaaggtgtaccctcccgtccccgccgagaagagaaagcccatccgggtcctgagcctgttcgatggcatcgccaccggtctgctggtgctgaaggacctgggcatccaggtggataggtacattgcctccgaggtgtgcgaggactccatcaccgtgggaatggtgcgtcatcagggcaagatcatgtacgtgggcgacgtgcggagcgtgacacagaagcatatccaggagtggggccctttcgacctggtgatcggcggcagcccttgcaatgacctgagcatcgtgaacccagcccggaagggcctgtacgagggaaccggcagactgttcttcgagttttacagactgctgcacgacgcccggcctaaggaaggcgacgaccggcccttcttttggctgttcgagaatgtggtggccatgggagtcagcgacaagcgggatattagccggttcctggagagcaaccccgtgatgatcgatgccaaggaagtgagcgccgcccaccgggccagatacttctggggcaatctgcctggcatgaacagacccctggccagcaccgtgaacgacaagctggagctgcaggagtgcctggagcacggccggatcgccaagttcagcaaggtgagaaccatcaccacccgaagcaacagcatcaaacaaggcaaggaccagcactttcctgtgttcatgaacgagaaggaggacatcctgtggtgtaccgagatggagagagtgttcgggttcccagtccactacacagatgtcagcaacatgtctagactggccagacagagactgctgggaagaagctggtccgtccctgtgatcagacacctgttcgcccctctgaaggagtacttcgcctgcgtgagcagcggcaacagcaacgccaacagccggggccccagcttctctagcggcctggtgccactgtccctgagagggagccacatgggccccatggagatctacaaaaccgtgagcgcctggaagcggcagcctgtgcgcgtgctgagcctgtttcggaatatcgataaagtcctgaaaagcctgggattcctggagagcggctctggctccggcggtggcaccctgaagtacgtggaggatgtgacaaacgtggtcagacgggatgtggagaagtggggccccttcgatctggtgtacggcagcacccaacccctgggcagctcttgtgaccggtgccctggctggtacatgtttcagttccaccggatcctgcagtacgccctgccgagacaggagtcccagcggccattcttttggattttcatggacaacttgctgctgaccgaggatgaccaggaaactaccactcggttcctgcagaccgaagccgtgaccctgcaggacgtgagaggccgggactaccagaacgccatgcgggtgtggtccaacatccctggactgaaaagcaagcacgcacctctgacccctaaagaagaggagtacctgcaggcccaggtgcggagcagaagcaagctggacgcccctaaggtggatctgctggtgaagaattgcctcctgcccctgagagagtacttcaagtatttcagccagaatagtctgcccctgggcggcccaagcagcggcgcccctcctcccagcggcggcagcccagccggctccccaacctctaccgaggagggcacctctgagtccgccacccccgagagcggccctggcacctccaccgagcccagcgagggcagcgcacccggcagccctgccggcagccccacctccacagaggagggaaccagcaccgagcccagcgaaggcagcgccccaggcaccagcaccgagcctagtgagggcggctctggcggcggcagcgcccaggagattaaacggatcaacaagatcagaagaagacttgtgaaagacagcaacaccaagaaggccggcaagacaggccccatgaaaaccctgctggttagagtgatgacacccgatctgagagagcggctggaaaacctgagaaagaagcctgaaaatatcccccagcccatcagcaatacatctagagccaacctgaataagctgctgaccgattacaccgaaatgaagaaggcgatcctgcatgtgtactgggaagagttccagaaggaccctgtgggcctgatgagccgggtggcccagcctgccagcaagaagatcgatcagaacaagctgaaacctgagatggacgagaagggcaacctgaccaccgccggctttgcctgctctcagtgtggccagcccctgttcgtgtacaagctggagcaggtgtctgagaagggcaaggcttacaccaactacttcggacggtgcaatgtggccgagcacgaaaagctgatcctgctggcccagctgaagcccgagaaggatagcgacgaagccgtgacatatagcctgggaaagtttgggcagagggccctggatttctacagcattcatgtgaccaaggagtccacccaccccgtgaagcccctggcccagatcgccggaaacagatacgcctccggacctgtgggaaaggccctgagcgacgcatgtatgggcacaatcgcctccttcctgtctaagtaccaggacatcatcatcgaacaccagaaggtggtgaagggcaaccagaagagactggagagcctgcgggagctggccggcaaggaaaacctggaataccctagcgtgaccctgccacctcagcctcacaccaaggagggcgttgatgcctacaacgaagtgatcgcccgggtgcgaatgtgggtgaacctgaacctgtggcagaagctgaagctaagcagagatgatgccaagcctctgctgagactgaagggattcccttcctttcctctggtcgagagacaggccaacgaagtggactggtgggacatggtgtgtaacgtgaagaagctgatcaacgagaaaaaggaggatggcaaggtgttttggcagaatctggctggctacaagagacaggaagccctgagaccatacctgagcagcgaggaagatcggaagaagggaaagaaattcgctcggtaccagctgggcgacctgctgctgcacctggaaaagaagcacggcgaggactggggaaaggtgtacgacgaggcctgggagcggattgacaagaaagtggaaggcctgagcaagcacatcaagctggaagaggaacggagaagcgaggacgcccagagcaaggccgccctgaccgactggctgcgggctaaggccagcttcgtgatcgagggcctgaaggaggccgacaaggacgagttctgcagatgcgagctgaagctgcagaagtggtacggggacctgcggggaaagcccttcgccatcgaagccgagaacagcatcctggacatcagcggcttcagcaagcagtacaactgtgccttcatctggcagaaggacggcgtgaagaagctgaacctgtacctgatcatcaactacttcaagggcggcaagctgcggttcaagaagatcaaacctgaagccttcgaagccaacagattctacaccgtgatcaacaaaaagagcggcgagatcgtgcccatggaggtgaacttcaacttcgacgaccccaacctgatcatcctgcctctggcctttggcaagagacagggcagagaattcatctggaacgacctgctgtccctggaaaccggcagcctgaagctggccaacggaagagtgatcgagaagacactgtacaacagaagaacccggcaggatgagcctgccctgttcgtggccctgaccttcgagcggcgggaggtcctggactcctccaatatcaaaccaatgaacctgatcggcgtggcaagaggcgaaaacatccccgccgtgatcgccctgaccgaccccgagggctgcccactgagccggtttaaggatagcctgggaaacccaacccacatcctgagaatcggcgagagctataaggagaagcagcggaccatccaggccaagaaggaggtggagcagcggagagccggcggctacagccggaagtacgccagcaaagccaagaatctggcagacgatatggtgagaaacaccgctagagatctgctgtactacgccgtgacccaggatgccatgctgatcttcgccaacctgagccggggcttcggccggcagggcaagcggaccttcatggccgagagacagtacacacggatggaggactggctgaccgccaagctggcctacgagggcctgagcaagacctacctgtccaagacactggcccagtacacctccaagacatgcagcaactgtgggtttaccatcaccagcgccgactacgacagggtgctggagaagctgaagaagacagcaacaggctggatgaccacaattaacggcaaggagctgaaggtggagggccagattacctactacaacagatacaagagacagaacgtagtcaaggacctgtccgtcgagctggatagactgagcgaagaatctgtgaacaacgacatctcctcctggacaaagggcagaagcggagaagctctgagcctcctgaagaaaagattctcccatagacccgtgcaggagaagttcgtgtgcctgaactgcggcttcgagacacacgcagccgagcaagccgccctgaacatcgccagatcctggctgttcctgcggagccaggagtacaagaaataccagacaaacaagacaaccggcaacaccgataagagagccttcgtcgagacctggcagtccttttaccggaagaagcttaaggaggtgtggaaacctgccgtgcggtctggcggatctggcggaggctccacaagcatgcaggagagcgtgaccttcaaggacgtggccgtggacttcacccaggaggagtggaagcagctggaccccgcccagagggacctgtacagggacgtgatgctggagaactacaggaacctggtgagcctgggcctgcccgtgttcaagcccgacgtgatcagccagctggagaagggcgaggccccctggacccccgaggtgcccaggagcacctgcagcggcagcttcagccaggaggccaccagccccaagaaaaagagaaaagtctaagctgccttctgcggggcttgccttctggccatgcccttcttctctcccttgcacctgtacctcttggtctttgaataaagcctgagtaggaaggctagcaaaaaaaaaaaaaaaaaaaaaaaaaaaaaaaaaaaaaaaaaaaaaaaaaaaaaaaaaaaaaaaaaaaaaaaaaaaaaaaa

SEQ ID NO: 4032 - RNA, 5419 nt, synthetic construct
  source 1..5419: mol_type = other RNA
aggaaataagagagaaaagaagagtaagaagaaatataagagccaccatggcccctaagaagaagcgtaaagtgagccgggtgaacggcagcggcagcggcggcggcatgaaccacgaccaggagttcgacccccctaaggtgtaccctcccgtccccgccgagaagagaaagcccatccgggtcctgagcctgttcgatggcatcgccaccggtctgctggtgctgaaggacctgggcatccaggtggataggtacattgcctccgaggtgtgcgaggactccatcaccgtgggaatggtgcgtcatcagggcaagatcatgtacgtgggcgacgtgcggagcgtgacacagaagcatatccaggagtggggccctttcgacctggtgatcggcggcagcccttgcaatgacctgagcatcgtgaacccagcccggaagggcctgtacgagggaaccggcagactgttcttcgagttttacagactgctgcacgacgcccggcctaaggaaggcgacgaccggcccttcttttggctgttcgagaatgtggtggccatgggagtcagcgacaagcgggatattagccggttcctggagagcaaccccgtgatgatcgatgccaaggaagtgagcgccgcccaccgggccagatacttctggggcaatctgcctggcatgaacagacccctggccagcaccgtgaacgacaagctggagctgcaggagtgcctggagcacggccggatcgccaagttcagcaaggtgagaaccatcaccacccgaagcaacagcatcaaacaaggcaaggaccagcactttcctgtgttcatgaacgagaaggaggacatcctgtggtgtaccgagatggagagagtgttcgggttcccagtccactacacagatgtcagcaacatgtctagactggccagacagagactgctgggaagaagctggtccgtccctgtgatcagacacctgttcgcccctctgaaggagtacttcgcctgcgtgagcagcggcaacagcaacgccaacagccggggccccagcttctctagcggcctggtgccactgtccctgagagggagccacatgggccccatggagatctacaaaaccgtgagcgcctggaagcggcagcctgtgcgcgtgctgagcctgtttcggaatatcgataaagtcctgaaaagcctgggattcctggagagcggctctggctccggcggtggcaccctgaagtacgtggaggatgtgacaaacgtggtcagacgggatgtggagaagtggggccccttcgatctggtgtacggcagcacccaacccctgggcagctcttgtgaccggtgccctggctggtacatgtttcagttccaccggatcctgcagtacgccctgccgagacaggagtcccagcggccattcttttggattttcatggacaacttgctgctgaccgaggatgaccaggaaactaccactcggttcctgcagaccgaagccgtgaccctgcaggacgtgagaggccgggactaccagaacgccatgcgggtgtggtccaacatccctggactgaaaagcaagcacgcacctctgacccctaaagaagaggagtacctgcaggcccaggtgcggagcagaagcaagctggacgcccctaaggtggatctgctggtgaagaattgcctcctgcccctgagagagtacttcaagtatttcagccagaatagtctgcccctgggcggcccaagcagcggcgcccctcctcccagcggcggcagcccagccggctccccaacctctaccgaggagggcacctctgagtccgccacccccgagagcggccctggcacctccaccgagcccagcgagggcagcgcacccggcagccctgccggcagccccacctccacagaggagggaaccagcaccgagcccagcgaaggcagcgccccaggcaccagcaccgagcctagtgagggcggctctggcggcggcagcgcccaggagattaaacggatcaacaagatcagaagaagacttgtgaaagacagcaacaccaagaaggccggcaagacaggccccatgaaaaccctgctggttagagtgatgacacccgatctgagagagcggctggaaaacctgagaaagaagcctgaaaatatcccccagcccatcagcaatacatctagagccaacctgaataagctgctgaccgattacaccgaaatgaagaaggcgatcctgcatgtgtactgggaagagttccagaaggaccctgtgggcctgatgagccgggtggcccagcctgccagcaagaagatcgatcagaacaagctgaaacctgagatggacgagaagggcaacctgaccaccgccggctttgcctgctctcagtgtggccagcccctgttcgtgtacaagctggagcaggtgtctgagaagggcaaggcttacaccaactacttcggacggtgcaatgtggccgagcacgaaaagctgatcctgctggcccagctgaagcccgagaaggatagcgacgaagccgtgacatatagcctgggaaagtttgggcagagggccctggatttctacagcattcatgtgaccaaggagtccacccaccccgtgaagcccctggcccagatcgccggaaacagatacgcctccggacctgtgggaaaggccctgagcgacgcatgtatgggcacaatcgcctccttcctgtctaagtaccaggacatcatcatcgaacaccagaaggtggtgaagggcaaccagaagagactggagagcctgcgggagctggccggcaaggaaaacctggaataccctagcgtgaccctgccacctcagcctcacaccaaggagggcgttgatgcctacaacgaagtgatcgcccgggtgcgaatgtgggtgaacctgaacctgtggcagaagctgaagctaagcagagatgatgccaagcctctgctgagactgaagggattcccttcctttcctctggtcgagagacaggccaacgaagtggactggtgggacatggtgtgtaacgtgaagaagctgatcaacgagaaaaaggaggatggcaaggtgttttggcagaatctggctggctacaagagacaggaagccctgagaccatacctgagcagcgaggaagatcggaagaagggaaagaaattcgctcggtaccagctgggcgacctgctgctgcacctggaaaagaagcacggcgaggactggggaaaggtgtacgacgaggcctgggagcggattgacaagaaagtggaaggcctgagcaagcacatcaagctggaagaggaacggagaagcgaggacgcccagagcaaggccgccctgaccgactggctgcgggctaaggccagcttcgtgatcgagggcctgaaggaggccgacaaggacgagttctgcagatgcgagctgaagctgcagaagtggtacggggacctgcggggaaagcccttcgccatcgaagccgagaacagcatcctggacatcagcggcttcagcaagcagtacaactgtgccttcatctggcagaaggacggcgtgaagaagctgaacctgtacctgatcatcaactacttcaagggcggcaagctgcggttcaagaagatcaaacctgaagccttcgaagccaacagattctacaccgtgatcaacaaaaagagcggcgagatcgtgcccatggaggtgaacttcaacttcgacgaccccaacctgatcatcctgcctctggcctttggcaagagacagggcagagaattcatctggaacgacctgctgtccctggaaaccggcagcctgaagctggccaacggaagagtgatcgagaagacactgtacaacagaagaacccggcaggatgagcctgccctgttcgtggccctgaccttcgagcggcgggaggtcctggactcctccaatatcaaaccaatgaacctgatcggcgtggcaagaggcgaaaacatccccgccgtgatcgccctgaccgaccccgagggctgcccactgagccggtttaaggatagcctgggaaacccaacccacatcctgagaatcggcgagagctataaggagaagcagcggaccatccaggccaagaaggaggtggagcagcggagagccggcggctacagccggaagtacgccagcaaagccaagaatctggcagacgatatggtgagaaacaccgctagagatctgctgtactacgccgtgacccaggatgccatgctgatcttcgccaacctgagccggggcttcggccggcagggcaagcggaccttcatggccgagagacagtacacacggatggaggactggctgaccgccaagctggcctacgagggcctgagcaagacctacctgtccaagacactggcccagtacacctccaagacatgcagcaactgtgggtttaccatcaccagcgccgactacgacagggtgctggagaagctgaagaagacagcaacaggctggatgaccacaattaacggcaaggagctgaaggtggagggccagattacctactacaacagatacaagagacagaacgtagtcaaggacctgtccgtcgagctggatagactgagcgaagaatctgtgaacaacgacatctcctcctggacaaagggcagaagcggagaagctctgagcctcctgaagaaaagattctcccatagacccgtgcaggagaagttcgtgtgcctgaactgcggcttcgagacacacgcagccgagcaagccgccctgaacatcgccagatcctggctgttcctgcggagccaggagtacaagaaataccagacaaacaagacaaccggcaacaccgataagagagccttcgtcgagacctggcagtccttttaccggaagaagcttaaggaggtgtggaaacctgccgtgcggtctggcggatctggcggaggctccacaagcgaccagctgcaggaggccttcgaggacgtggccctgtacttcacccagaacgagtgggagctgctgggcgacggcgacaaggtgctgtacagggaccagatgctgaggaactaccaggccctggtgagcctgggctaccagggccccgcccccgacctgatcagcaggatccagaggcaggaggtggagctgtgggtgtgcgaggaggagaaccccggcgagagcgtgtggaccgagggcctgaccagccccaagaaaaagagaaaagtctaagctgccttctgcggggcttgccttctggccatgcccttcttctctcccttgcacctgtacctcttggtctttgaataaagcctgagtaggaaggctagcaaaaaaaaaaaaaaaaaaaaaaaaaaaaaaaaaaaaaaaaaaaaaaaaaaaaaaaaaaaaaaaaaaaaaaaaaaaaaaaa

SEQ ID NO: 4033 - RNA, 5419 nt, synthetic construct
  source 1..5419: mol_type = other RNA
aggaaataagagagaaaagaagagtaagaagaaatataagagccaccatggcccctaagaagaagcgtaaagtgagccgggtgaacggcagcggcagcggcggcggcatgaaccacgaccaggagttcgacccccctaaggtgtaccctcccgtccccgccgagaagagaaagcccatccgggtcctgagcctgttcgatggcatcgccaccggtctgctggtgctgaaggacctgggcatccaggtggataggtacattgcctccgaggtgtgcgaggactccatcaccgtgggaatggtgcgtcatcagggcaagatcatgtacgtgggcgacgtgcggagcgtgacacagaagcatatccaggagtggggccctttcgacctggtgatcggcggcagcccttgcaatgacctgagcatcgtgaacccagcccggaagggcctgtacgagggaaccggcagactgttcttcgagttttacagactgctgcacgacgcccggcctaaggaaggcgacgaccggcccttcttttggctgttcgagaatgtggtggccatgggagtcagcgacaagcgggatattagccggttcctggagagcaaccccgtgatgatcgatgccaaggaagtgagcgccgcccaccgggccagatacttctggggcaatctgcctggcatgaacagacccctggccagcaccgtgaacgacaagctggagctgcaggagtgcctggagcacggccggatcgccaagttcagcaaggtgagaaccatcaccacccgaagcaacagcatcaaacaaggcaaggaccagcactttcctgtgttcatgaacgagaaggaggacatcctgtggtgtaccgagatggagagagtgttcgggttcccagtccactacacagatgtcagcaacatgtctagactggccagacagagactgctgggaagaagctggtccgtccctgtgatcagacacctgttcgcccctctgaaggagtacttcgcctgcgtgagcagcggcaacagcaacgccaacagccggggccccagcttctctagcggcctggtgccactgtccctgagagggagccacatgggccccatggagatctacaaaaccgtgagcgcctggaagcggcagcctgtgcgcgtgctgagcctgtttcggaatatcgataaagtcctgaaaagcctgggattcctggagagcggctctggctccggcggtggcaccctgaagtacgtggaggatgtgacaaacgtggtcagacgggatgtggagaagtggggccccttcgatctggtgtacggcagcacccaacccctgggcagctcttgtgaccggtgccctggctggtacatgtttcagttccaccggatcctgcagtacgccctgccgagacaggagtcccagcggccattcttttggattttcatggacaacttgctgctgaccgaggatgaccaggaaactaccactcggttcctgcagaccgaagccgtgaccctgcaggacgtgagaggccgggactaccagaacgccatgcgggtgtggtccaacatccctggactgaaaagcaagcacgcacctctgacccctaaagaagaggagtacctgcaggcccaggtgcggagcagaagcaagctggacgcccctaaggtggatctgctggtgaagaattgcctcctgcccctgagagagtacttcaagtatttcagccagaatagtctgcccctgggcggcccaagcagcggcgcccctcctcccagcggcggcagcccagccggctccccaacctctaccgaggagggcacctctgagtccgccacccccgagagcggccctggcacctccaccgagcccagcgagggcagcgcacccggcagccctgccggcagccccacctccacagaggagggaaccagcaccgagcccagcgaaggcagcgccccaggcaccagcaccgagcctagtgagggcggctctggcggcggcagcgcccaggagattaaacggatcaacaagatcagaagaagacttgtgaaagacagcaacaccaagaaggccggcaagacaggccccatgaaaaccctgctggttagagtgatgacacccgatctgagagagcggctggaaaacctgagaaagaagcctgaaaatatcccccagcccatcagcaatacatctagagccaacctgaataagctgctgaccgattacaccgaaatgaagaaggcgatcctgcatgtgtactgggaagagttccagaaggaccctgtgggcctgatgagccgggtggcccagcctgccagcaagaagatcgatcagaacaagctgaaacctgagatggacgagaagggcaacctgaccaccgccggctttgcctgctctcagtgtggccagcccctgttcgtgtacaagctggagcaggtgtctgagaagggcaaggcttacaccaactacttcggacggtgcaatgtggccgagcacgaaaagctgatcctgctggcccagctgaagcccgagaaggatagcgacgaagccgtgacatatagcctgggaaagtttgggcagagggccctggatttctacagcattcatgtgaccaaggagtccacccaccccgtgaagcccctggcccagatcgccggaaacagatacgcctccggacctgtgggaaaggccctgagcgacgcatgtatgggcacaatcgcctccttcctgtctaagtaccaggacatcatcatcgaacaccagaaggtggtgaagggcaaccagaagagactggagagcctgcgggagctggccggcaaggaaaacctggaataccctagcgtgaccctgccacctcagcctcacaccaaggagggcgttgatgcctacaacgaagtgatcgcccgggtgcgaatgtgggtgaacctgaacctgtggcagaagctgaagctaagcagagatgatgccaagcctctgctgagactgaagggattcccttcctttcctctggtcgagagacaggccaacgaagtggactggtgggacatggtgtgtaacgtgaagaagctgatcaacgagaaaaaggaggatggcaaggtgttttggcagaatctggctggctacaagagacaggaagccctgagaccatacctgagcagcgaggaagatcggaagaagggaaagaaattcgctcggtaccagctgggcgacctgctgctgcacctggaaaagaagcacggcgaggactggggaaaggtgtacgacgaggcctgggagcggattgacaagaaagtggaaggcctgagcaagcacatcaagctggaagaggaacggagaagcgaggacgcccagagcaaggccgccctgaccgactggctgcgggctaaggccagcttcgtgatcgagggcctgaaggaggccgacaaggacgagttctgcagatgcgagctgaagctgcagaagtggtacggggacctgcggggaaagcccttcgccatcgaagccgagaacagcatcctggacatcagcggcttcagcaagcagtacaactgtgccttcatctggcagaaggacggcgtgaagaagctgaacctgtacctgatcatcaactacttcaagggcggcaagctgcggttcaagaagatcaaacctgaagccttcgaagccaacagattctacaccgtgatcaacaaaaagagcggcgagatcgtgcccatggaggtgaacttcaacttcgacgaccccaacctgatcatcctgcctctggcctttggcaagagacagggcagagaattcatctggaacgacctgctgtccctggaaaccggcagcctgaagctggccaacggaagagtgatcgagaagacactgtacaacagaagaacccggcaggatgagcctgccctgttcgtggccctgaccttcgagcggcgggaggtcctggactcctccaatatcaaaccaatgaacctgatcggcgtggcaagaggcgaaaacatccccgccgtgatcgccctgaccgaccccgagggctgcccactgagccggtttaaggatagcctgggaaacccaacccacatcctgagaatcggcgagagctataaggagaagcagcggaccatccaggccaagaaggaggtggagcagcggagagccggcggctacagccggaagtacgccagcaaagccaagaatctggcagacgatatggtgagaaacaccgctagagatctgctgtactacgccgtgacccaggatgccatgctgatcttcgccaacctgagccggggcttcggccggcagggcaagcggaccttcatggccgagagacagtacacacggatggaggactggctgaccgccaagctggcctacgagggcctgagcaagacctacctgtccaagacactggcccagtacacctccaagacatgcagcaactgtgggtttaccatcaccagcgccgactacgacagggtgctggagaagctgaagaagacagcaacaggctggatgaccacaattaacggcaaggagctgaaggtggagggccagattacctactacaacagatacaagagacagaacgtagtcaaggacctgtccgtcgagctggatagactgagcgaagaatctgtgaacaacgacatctcctcctggacaaagggcagaagcggagaagctctgagcctcctgaagaaaagattctcccatagacccgtgcaggagaagttcgtgtgcctgaactgcggcttcgagacacacgcagccgagcaagccgccctgaacatcgccagatcctggctgttcctgcggagccaggagtacaagaaataccagacaaacaagacaaccggcaacaccgataagagagccttcgtcgagacctggcagtccttttaccggaagaagcttaaggaggtgtggaaacctgccgtgcggtctggcggatctggcggaggctccacaagcgtgagggagcccctgaccttcgaggacgtggccgtgaacttcacccaggaggagtggcagcagctggaccccgcccagaagaccctgcacagggacgtgatgctggagatctacagccacctggtgagcgtgggctgcagcggcatcaagcccgacatcatcagcaagctggagcacggcgaggacccctggatcagggagagcgagctgcccaggtggacctacagcgacagggagaagagcaccagccccaagaaaaagagaaaagtctaagctgccttctgcggggcttgccttctggccatgcccttcttctctcccttgcacctgtacctcttggtctttgaataaagcctgagtaggaaggctagcaaaaaaaaaaaaaaaaaaaaaaaaaaaaaaaaaaaaaaaaaaaaaaaaaaaaaaaaaaaaaaaaaaaaaaaaaaaaaaaa

SEQ ID NO: 4034 - RNA, 5419 nt, synthetic construct
  source 1..5419: mol_type = other RNA
aggaaataagagagaaaagaagagtaagaagaaatataagagccaccatggcccctaagaagaagcgtaaagtgagccgggtgaacggcagcggcagcggcggcggcatgaaccacgaccaggagttcgacccccctaaggtgtaccctcccgtccccgccgagaagagaaagcccatccgggtcctgagcctgttcgatggcatcgccaccggtctgctggtgctgaaggacctgggcatccaggtggataggtacattgcctccgaggtgtgcgaggactccatcaccgtgggaatggtgcgtcatcagggcaagatcatgtacgtgggcgacgtgcggagcgtgacacagaagcatatccaggagtggggccctttcgacctggtgatcggcggcagcccttgcaatgacctgagcatcgtgaacccagcccggaagggcctgtacgagggaaccggcagactgttcttcgagttttacagactgctgcacgacgcccggcctaaggaaggcgacgaccggcccttcttttggctgttcgagaatgtggtggccatgggagtcagcgacaagcgggatattagccggttcctggagagcaaccccgtgatgatcgatgccaaggaagtgagcgccgcccaccgggccagatacttctggggcaatctgcctggcatgaacagacccctggccagcaccgtgaacgacaagctggagctgcaggagtgcctggagcacggccggatcgccaagttcagcaaggtgagaaccatcaccacccgaagcaacagcatcaaacaaggcaaggaccagcactttcctgtgttcatgaacgagaaggaggacatcctgtggtgtaccgagatggagagagtgttcgggttcccagtccactacacagatgtcagcaacatgtctagactggccagacagagactgctgggaagaagctggtccgtccctgtgatcagacacctgttcgcccctctgaaggagtacttcgcctgcgtgagcagcggcaacagcaacgccaacagccggggccccagcttctctagcggcctggtgccactgtccctgagagggagccacatgggccccatggagatctacaaaaccgtgagcgcctggaagcggcagcctgtgcgcgtgctgagcctgtttcggaatatcgataaagtcctgaaaagcctgggattcctggagagcggctctggctccggcggtggcaccctgaagtacgtggaggatgtgacaaacgtggtcagacgggatgtggagaagtggggccccttcgatctggtgtacggcagcacccaacccctgggcagctcttgtgaccggtgccctggctggtacatgtttcagttccaccggatcctgcagtacgccctgccgagacaggagtcccagcggccattcttttggattttcatggacaacttgctgctgaccgaggatgaccaggaaactaccactcggttcctgcagaccgaagccgtgaccctgcaggacgtgagaggccgggactaccagaacgccatgcgggtgtggtccaacatccctggactgaaaagcaagcacgcacctctgacccctaaagaagaggagtacctgcaggcccaggtgcggagcagaagcaagctggacgcccctaaggtggatctgctggtgaagaattgcctcctgcccctgagagagtacttcaagtatttcagccagaatagtctgcccctgggcggcccaagcagcggcgcccctcctcccagcggcggcagcccagccggctccccaacctctaccgaggagggcacctctgagtccgccacccccgagagcggccctggcacctccaccgagcccagcgagggcagcgcacccggcagccctgccggcagccccacctccacagaggagggaaccagcaccgagcccagcgaaggcagcgccccaggcaccagcaccgagcctagtgagggcggctctggcggcggcagcgcccaggagattaaacggatcaacaagatcagaagaagacttgtgaaagacagcaacaccaagaaggccggcaagacaggccccatgaaaaccctgctggttagagtgatgacacccgatctgagagagcggctggaaaacctgagaaagaagcctgaaaatatcccccagcccatcagcaatacatctagagccaacctgaataagctgctgaccgattacaccgaaatgaagaaggcgatcctgcatgtgtactgggaagagttccagaaggaccctgtgggcctgatgagccgggtggcccagcctgccagcaagaagatcgatcagaacaagctgaaacctgagatggacgagaagggcaacctgaccaccgccggctttgcctgctctcagtgtggccagcccctgttcgtgtacaagctggagcaggtgtctgagaagggcaaggcttacaccaactacttcggacggtgcaatgtggccgagcacgaaaagctgatcctgctggcccagctgaagcccgagaaggatagcgacgaagccgtgacatatagcctgggaaagtttgggcagagggccctggatttctacagcattcatgtgaccaaggagtccacccaccccgtgaagcccctggcccagatcgccggaaacagatacgcctccggacctgtgggaaaggccctgagcgacgcatgtatgggcacaatcgcctccttcctgtctaagtaccaggacatcatcatcgaacaccagaaggtggtgaagggcaaccagaagagactggagagcctgcgggagctggccggcaaggaaaacctggaataccctagcgtgaccctgccacctcagcctcacaccaaggagggcgttgatgcctacaacgaagtgatcgcccgggtgcgaatgtgggtgaacctgaacctgtggcagaagctgaagctaagcagagatgatgccaagcctctgctgagactgaagggattcccttcctttcctctggtcgagagacaggccaacgaagtggactggtgggacatggtgtgtaacgtgaagaagctgatcaacgagaaaaaggaggatggcaaggtgttttggcagaatctggctggctacaagagacaggaagccctgagaccatacctgagcagcgaggaagatcggaagaagggaaagaaattcgctcggtaccagctgggcgacctgctgctgcacctggaaaagaagcacggcgaggactggggaaaggtgtacgacgaggcctgggagcggattgacaagaaagtggaaggcctgagcaagcacatcaagctggaagaggaacggagaagcgaggacgcccagagcaaggccgccctgaccgactggctgcgggctaaggccagcttcgtgatcgagggcctgaaggaggccgacaaggacgagttctgcagatgcgagctgaagctgcagaagtggtacggggacctgcggggaaagcccttcgccatcgaagccgagaacagcatcctggacatcagcggcttcagcaagcagtacaactgtgccttcatctggcagaaggacggcgtgaagaagctgaacctgtacctgatcatcaactacttcaagggcggcaagctgcggttcaagaagatcaaacctgaagccttcgaagccaacagattctacaccgtgatcaacaaaaagagcggcgagatcgtgcccatggaggtgaacttcaacttcgacgaccccaacctgatcatcctgcctctggcctttggcaagagacagggcagagaattcatctggaacgacctgctgtccctggaaaccggcagcctgaagctggccaacggaagagtgatcgagaagacactgtacaacagaagaacccggcaggatgagcctgccctgttcgtggccctgaccttcgagcggcgggaggtcctggactcctccaatatcaaaccaatgaacctgatcggcgtggcaagaggcgaaaacatccccgccgtgatcgccctgaccgaccccgagggctgcccactgagccggtttaaggatagcctgggaaacccaacccacatcctgagaatcggcgagagctataaggagaagcagcggaccatccaggccaagaaggaggtggagcagcggagagccggcggctacagccggaagtacgccagcaaagccaagaatctggcagacgatatggtgagaaacaccgctagagatctgctgtactacgccgtgacccaggatgccatgctgatcttcgccaacctgagccggggcttcggccggcagggcaagcggaccttcatggccgagagacagtacacacggatggaggactggctgaccgccaagctggcctacgagggcctgagcaagacctacctgtccaagacactggcccagtacacctccaagacatgcagcaactgtgggtttaccatcaccagcgccgactacgacagggtgctggagaagctgaagaagacagcaacaggctggatgaccacaattaacggcaaggagctgaaggtggagggccagattacctactacaacagatacaagagacagaacgtagtcaaggacctgtccgtcgagctggatagactgagcgaagaatctgtgaacaacgacatctcctcctggacaaagggcagaagcggagaagctctgagcctcctgaagaaaagattctcccatagacccgtgcaggagaagttcgtgtgcctgaactgcggcttcgagacacacgcagccgagcaagccgccctgaacatcgccagatcctggctgttcctgcggagccaggagtacaagaaataccagacaaacaagacaaccggcaacaccgataagagagccttcgtcgagacctggcagtccttttaccggaagaagcttaaggaggtgtggaaacctgccgtgcggtctggcggatctggcggaggctccacaagcatgaagctgggcagcgtgaccttcgaggacgtggccgtgtacttcagctgggaggagtgggccctgctggacgaggcccagaggtgcctgtaccacgacgtgatgctggagaacttcgccctgaccagcagcctggtggtgagcagcagcagccacaccatcgcccagctgggcctgggcgaggagagcttcgtgctgcccaggatgcacatgatccccctgagcaccaggtgggcccagaggaccagccccaagaaaaagagaaaagtctaagctgccttctgcggggcttgccttctggccatgcccttcttctctcccttgcacctgtacctcttggtctttgaataaagcctgagtaggaaggctagcaaaaaaaaaaaaaaaaaaaaaaaaaaaaaaaaaaaaaaaaaaaaaaaaaaaaaaaaaaaaaaaaaaaaaaaaaaaaaaaa

SEQ ID NO: 4035 - RNA, 5419 nt, synthetic construct
  source 1..5419: mol_type = other RNA
aggaaataagagagaaaagaagagtaagaagaaatataagagccaccatggcccctaagaagaagcgtaaagtgagccgggtgaacggcagcggcagcggcggcggcatgaaccacgaccaggagttcgacccccctaaggtgtaccctcccgtccccgccgagaagagaaagcccatccgggtcctgagcctgttcgatggcatcgccaccggtctgctggtgctgaaggacctgggcatccaggtggataggtacattgcctccgaggtgtgcgaggactccatcaccgtgggaatggtgcgtcatcagggcaagatcatgtacgtgggcgacgtgcggagcgtgacacagaagcatatccaggagtggggccctttcgacctggtgatcggcggcagcccttgcaatgacctgagcatcgtgaacccagcccggaagggcctgtacgagggaaccggcagactgttcttcgagttttacagactgctgcacgacgcccggcctaaggaaggcgacgaccggcccttcttttggctgttcgagaatgtggtggccatgggagtcagcgacaagcgggatattagccggttcctggagagcaaccccgtgatgatcgatgccaaggaagtgagcgccgcccaccgggccagatacttctggggcaatctgcctggcatgaacagacccctggccagcaccgtgaacgacaagctggagctgcaggagtgcctggagcacggccggatcgccaagttcagcaaggtgagaaccatcaccacccgaagcaacagcatcaaacaaggcaaggaccagcactttcctgtgttcatgaacgagaaggaggacatcctgtggtgtaccgagatggagagagtgttcgggttcccagtccactacacagatgtcagcaacatgtctagactggccagacagagactgctgggaagaagctggtccgtccctgtgatcagacacctgttcgcccctctgaaggagtacttcgcctgcgtgagcagcggcaacagcaacgccaacagccggggccccagcttctctagcggcctggtgccactgtccctgagagggagccacatgggccccatggagatctacaaaaccgtgagcgcctggaagcggcagcctgtgcgcgtgctgagcctgtttcggaatatcgataaagtcctgaaaagcctgggattcctggagagcggctctggctccggcggtggcaccctgaagtacgtggaggatgtgacaaacgtggtcagacgggatgtggagaagtggggccccttcgatctggtgtacggcagcacccaacccctgggcagctcttgtgaccggtgccctggctggtacatgtttcagttccaccggatcctgcagtacgccctgccgagacaggagtcccagcggccattcttttggattttcatggacaacttgctgctgaccgaggatgaccaggaaactaccactcggttcctgcagaccgaagccgtgaccctgcaggacgtgagaggccgggactaccagaacgccatgcgggtgtggtccaacatccctggactgaaaagcaagcacgcacctctgacccctaaagaagaggagtacctgcaggcccaggtgcggagcagaagcaagctggacgcccctaaggtggatctgctggtgaagaattgcctcctgcccctgagagagtacttcaagtatttcagccagaatagtctgcccctgggcggcccaagcagcggcgcccctcctcccagcggcggcagcccagccggctccccaacctctaccgaggagggcacctctgagtccgccacccccgagagcggccctggcacctccaccgagcccagcgagggcagcgcacccggcagccctgccggcagccccacctccacagaggagggaaccagcaccgagcccagcgaaggcagcgccccaggcaccagcaccgagcctagtgagggcggctctggcggcggcagcgcccaggagattaaacggatcaacaagatcagaagaagacttgtgaaagacagcaacaccaagaaggccggcaagacaggccccatgaaaaccctgctggttagagtgatgacacccgatctgagagagcggctggaaaacctgagaaagaagcctgaaaatatcccccagcccatcagcaatacatctagagccaacctgaataagctgctgaccgattacaccgaaatgaagaaggcgatcctgcatgtgtactgggaagagttccagaaggaccctgtgggcctgatgagccgggtggcccagcctgccagcaagaagatcgatcagaacaagctgaaacctgagatggacgagaagggcaacctgaccaccgccggctttgcctgctctcagtgtggccagcccctgttcgtgtacaagctggagcaggtgtctgagaagggcaaggcttacaccaactacttcggacggtgcaatgtggccgagcacgaaaagctgatcctgctggcccagctgaagcccgagaaggatagcgacgaagccgtgacatatagcctgggaaagtttgggcagagggccctggatttctacagcattcatgtgaccaaggagtccacccaccccgtgaagcccctggcccagatcgccggaaacagatacgcctccggacctgtgggaaaggccctgagcgacgcatgtatgggcacaatcgcctccttcctgtctaagtaccaggacatcatcatcgaacaccagaaggtggtgaagggcaaccagaagagactggagagcctgcgggagctggccggcaaggaaaacctggaataccctagcgtgaccctgccacctcagcctcacaccaaggagggcgttgatgcctacaacgaagtgatcgcccgggtgcgaatgtgggtgaacctgaacctgtggcagaagctgaagctaagcagagatgatgccaagcctctgctgagactgaagggattcccttcctttcctctggtcgagagacaggccaacgaagtggactggtgggacatggtgtgtaacgtgaagaagctgatcaacgagaaaaaggaggatggcaaggtgttttggcagaatctggctggctacaagagacaggaagccctgagaccatacctgagcagcgaggaagatcggaagaagggaaagaaattcgctcggtaccagctgggcgacctgctgctgcacctggaaaagaagcacggcgaggactggggaaaggtgtacgacgaggcctgggagcggattgacaagaaagtggaaggcctgagcaagcacatcaagctggaagaggaacggagaagcgaggacgcccagagcaaggccgccctgaccgactggctgcgggctaaggccagcttcgtgatcgagggcctgaaggaggccgacaaggacgagttctgcagatgcgagctgaagctgcagaagtggtacggggacctgcggggaaagcccttcgccatcgaagccgagaacagcatcctggacatcagcggcttcagcaagcagtacaactgtgccttcatctggcagaaggacggcgtgaagaagctgaacctgtacctgatcatcaactacttcaagggcggcaagctgcggttcaagaagatcaaacctgaagccttcgaagccaacagattctacaccgtgatcaacaaaaagagcggcgagatcgtgcccatggaggtgaacttcaacttcgacgaccccaacctgatcatcctgcctctggcctttggcaagagacagggcagagaattcatctggaacgacctgctgtccctggaaaccggcagcctgaagctggccaacggaagagtgatcgagaagacactgtacaacagaagaacccggcaggatgagcctgccctgttcgtggccctgaccttcgagcggcgggaggtcctggactcctccaatatcaaaccaatgaacctgatcggcgtggcaagaggcgaaaacatccccgccgtgatcgccctgaccgaccccgagggctgcccactgagccggtttaaggatagcctgggaaacccaacccacatcctgagaatcggcgagagctataaggagaagcagcggaccatccaggccaagaaggaggtggagcagcggagagccggcggctacagccggaagtacgccagcaaagccaagaatctggcagacgatatggtgagaaacaccgctagagatctgctgtactacgccgtgacccaggatgccatgctgatcttcgccaacctgagccggggcttcggccggcagggcaagcggaccttcatggccgagagacagtacacacggatggaggactggctgaccgccaagctggcctacgagggcctgagcaagacctacctgtccaagacactggcccagtacacctccaagacatgcagcaactgtgggtttaccatcaccagcgccgactacgacagggtgctggagaagctgaagaagacagcaacaggctggatgaccacaattaacggcaaggagctgaaggtggagggccagattacctactacaacagatacaagagacagaacgtagtcaaggacctgtccgtcgagctggatagactgagcgaagaatctgtgaacaacgacatctcctcctggacaaagggcagaagcggagaagctctgagcctcctgaagaaaagattctcccatagacccgtgcaggagaagttcgtgtgcctgaactgcggcttcgagacacacgcagccgagcaagccgccctgaacatcgccagatcctggctgttcctgcggagccaggagtacaagaaataccagacaaacaagacaaccggcaacaccgataagagagccttcgtcgagacctggcagtccttttaccggaagaagcttaaggaggtgtggaaacctgccgtgcggtctggcggatctggcggaggctccacaagccagatgtgggtgaccttcgaggacgtggccgtgagcttcagccaggaggagtgggtgtacctggacgagggccagaaggagctgtacagggaggtgatgaaggagaactacgagaccgtgatgagcctggccggcgaggagttcagcaggggcaaggagaaggagggcagcatcgagcagcagagcctgaagaccgaggtgcacgagatgaacaagagggtgaagctgttcaagtgcagcgagaccagccccaagaaaaagagaaaagtctaagctgccttctgcggggcttgccttctggccatgcccttcttctctcccttgcacctgtacctcttggtctttgaataaagcctgagtaggaaggctagcaaaaaaaaaaaaaaaaaaaaaaaaaaaaaaaaaaaaaaaaaaaaaaaaaaaaaaaaaaaaaaaaaaaaaaaaaaaaaaaa

SEQ ID NO: 4036 - RNA, 5419 nt, synthetic construct
  source 1..5419: mol_type = other RNA
aggaaataagagagaaaagaagagtaagaagaaatataagagccaccatggcccctaagaagaagcgtaaagtgagccgggtgaacggcagcggcagcggcggcggcatgaaccacgaccaggagttcgacccccctaaggtgtaccctcccgtccccgccgagaagagaaagcccatccgggtcctgagcctgttcgatggcatcgccaccggtctgctggtgctgaaggacctgggcatccaggtggataggtacattgcctccgaggtgtgcgaggactccatcaccgtgggaatggtgcgtcatcagggcaagatcatgtacgtgggcgacgtgcggagcgtgacacagaagcatatccaggagtggggccctttcgacctggtgatcggcggcagcccttgcaatgacctgagcatcgtgaacccagcccggaagggcctgtacgagggaaccggcagactgttcttcgagttttacagactgctgcacgacgcccggcctaaggaaggcgacgaccggcccttcttttggctgttcgagaatgtggtggccatgggagtcagcgacaagcgggatattagccggttcctggagagcaaccccgtgatgatcgatgccaaggaagtgagcgccgcccaccgggccagatacttctggggcaatctgcctggcatgaacagacccctggccagcaccgtgaacgacaagctggagctgcaggagtgcctggagcacggccggatcgccaagttcagcaaggtgagaaccatcaccacccgaagcaacagcatcaaacaaggcaaggaccagcactttcctgtgttcatgaacgagaaggaggacatcctgtggtgtaccgagatggagagagtgttcgggttcccagtccactacacagatgtcagcaacatgtctagactggccagacagagactgctgggaagaagctggtccgtccctgtgatcagacacctgttcgcccctctgaaggagtacttcgcctgcgtgagcagcggcaacagcaacgccaacagccggggccccagcttctctagcggcctggtgccactgtccctgagagggagccacatgggccccatggagatctacaaaaccgtgagcgcctggaagcggcagcctgtgcgcgtgctgagcctgtttcggaatatcgataaagtcctgaaaagcctgggattcctggagagcggctctggctccggcggtggcaccctgaagtacgtggaggatgtgacaaacgtggtcagacgggatgtggagaagtggggccccttcgatctggtgtacggcagcacccaacccctgggcagctcttgtgaccggtgccctggctggtacatgtttcagttccaccggatcctgcagtacgccctgccgagacaggagtcccagcggccattcttttggattttcatggacaacttgctgctgaccgaggatgaccaggaaactaccactcggttcctgcagaccgaagccgtgaccctgcaggacgtgagaggccgggactaccagaacgccatgcgggtgtggtccaacatccctggactgaaaagcaagcacgcacctctgacccctaaagaagaggagtacctgcaggcccaggtgcggagcagaagcaagctggacgcccctaaggtggatctgctggtgaagaattgcctcctgcccctgagagagtacttcaagtatttcagccagaatagtctgcccctgggcggcccaagcagcggcgcccctcctcccagcggcggcagcccagccggctccccaacctctaccgaggagggcacctctgagtccgccacccccgagagcggccctggcacctccaccgagcccagcgagggcagcgcacccggcagccctgccggcagccccacctccacagaggagggaaccagcaccgagcccagcgaaggcagcgccccaggcaccagcaccgagcctagtgagggcggctctggcggcggcagcgcccaggagattaaacggatcaacaagatcagaagaagacttgtgaaagacagcaacaccaagaaggccggcaagacaggccccatgaaaaccctgctggttagagtgatgacacccgatctgagagagcggctggaaaacctgagaaagaagcctgaaaatatcccccagcccatcagcaatacatctagagccaacctgaataagctgctgaccgattacaccgaaatgaagaaggcgatcctgcatgtgtactgggaagagttccagaaggaccctgtgggcctgatgagccgggtggcccagcctgccagcaagaagatcgatcagaacaagctgaaacctgagatggacgagaagggcaacctgaccaccgccggctttgcctgctctcagtgtggccagcccctgttcgtgtacaagctggagcaggtgtctgagaagggcaaggcttacaccaactacttcggacggtgcaatgtggccgagcacgaaaagctgatcctgctggcccagctgaagcccgagaaggatagcgacgaagccgtgacatatagcctgggaaagtttgggcagagggccctggatttctacagcattcatgtgaccaaggagtccacccaccccgtgaagcccctggcccagatcgccggaaacagatacgcctccggacctgtgggaaaggccctgagcgacgcatgtatgggcacaatcgcctccttcctgtctaagtaccaggacatcatcatcgaacaccagaaggtggtgaagggcaaccagaagagactggagagcctgcgggagctggccggcaaggaaaacctggaataccctagcgtgaccctgccacctcagcctcacaccaaggagggcgttgatgcctacaacgaagtgatcgcccgggtgcgaatgtgggtgaacctgaacctgtggcagaagctgaagctaagcagagatgatgccaagcctctgctgagactgaagggattcccttcctttcctctggtcgagagacaggccaacgaagtggactggtgggacatggtgtgtaacgtgaagaagctgatcaacgagaaaaaggaggatggcaaggtgttttggcagaatctggctggctacaagagacaggaagccctgagaccatacctgagcagcgaggaagatcggaagaagggaaagaaattcgctcggtaccagctgggcgacctgctgctgcacctggaaaagaagcacggcgaggactggggaaaggtgtacgacgaggcctgggagcggattgacaagaaagtggaaggcctgagcaagcacatcaagctggaagaggaacggagaagcgaggacgcccagagcaaggccgccctgaccgactggctgcgggctaaggccagcttcgtgatcgagggcctgaaggaggccgacaaggacgagttctgcagatgcgagctgaagctgcagaagtggtacggggacctgcggggaaagcccttcgccatcgaagccgagaacagcatcctggacatcagcggcttcagcaagcagtacaactgtgccttcatctggcagaaggacggcgtgaagaagctgaacctgtacctgatcatcaactacttcaagggcggcaagctgcggttcaagaagatcaaacctgaagccttcgaagccaacagattctacaccgtgatcaacaaaaagagcggcgagatcgtgcccatggaggtgaacttcaacttcgacgaccccaacctgatcatcctgcctctggcctttggcaagagacagggcagagaattcatctggaacgacctgctgtccctggaaaccggcagcctgaagctggccaacggaagagtgatcgagaagacactgtacaacagaagaacccggcaggatgagcctgccctgttcgtggccctgaccttcgagcggcgggaggtcctggactcctccaatatcaaaccaatgaacctgatcggcgtggcaagaggcgaaaacatccccgccgtgatcgccctgaccgaccccgagggctgcccactgagccggtttaaggatagcctgggaaacccaacccacatcctgagaatcggcgagagctataaggagaagcagcggaccatccaggccaagaaggaggtggagcagcggagagccggcggctacagccggaagtacgccagcaaagccaagaatctggcagacgatatggtgagaaacaccgctagagatctgctgtactacgccgtgacccaggatgccatgctgatcttcgccaacctgagccggggcttcggccggcagggcaagcggaccttcatggccgagagacagtacacacggatggaggactggctgaccgccaagctggcctacgagggcctgagcaagacctacctgtccaagacactggcccagtacacctccaagacatgcagcaactgtgggtttaccatcaccagcgccgactacgacagggtgctggagaagctgaagaagacagcaacaggctggatgaccacaattaacggcaaggagctgaaggtggagggccagattacctactacaacagatacaagagacagaacgtagtcaaggacctgtccgtcgagctggatagactgagcgaagaatctgtgaacaacgacatctcctcctggacaaagggcagaagcggagaagctctgagcctcctgaagaaaagattctcccatagacccgtgcaggagaagttcgtgtgcctgaactgcggcttcgagacacacgcagccgagcaagccgccctgaacatcgccagatcctggctgttcctgcggagccaggagtacaagaaataccagacaaacaagacaaccggcaacaccgataagagagccttcgtcgagacctggcagtccttttaccggaagaagcttaaggaggtgtggaaacctgccgtgcggtctggcggatctggcggaggctccacaagcctgcaggccagcgtgaccttcgaggacgtggccgtggacttcagcgccgaggagtggaggaggctgaggcccctgcagagggagctgtacagggaggtgatgctggagaactacaggagcctggcctggctgggcctggccgccagcaagcccggcgtgatctgcaggctggagaggggcgaggcccccagggagcccgaccccgacggcccccagagcggctgggccgactgcggcaccggcaccagccccaagaaaaagagaaaagtctaagctgccttctgcggggcttgccttctggccatgcccttcttctctcccttgcacctgtacctcttggtctttgaataaagcctgagtaggaaggctagcaaaaaaaaaaaaaaaaaaaaaaaaaaaaaaaaaaaaaaaaaaaaaaaaaaaaaaaaaaaaaaaaaaaaaaaaaaaaaaaa

SEQ ID NO: 4037 - RNA, 5419 nt, synthetic construct
  source 1..5419: mol_type = other RNA
aggaaataagagagaaaagaagagtaagaagaaatataagagccaccatggcccctaagaagaagcgtaaagtgagccgggtgaacggcagcggcagcggcggcggcatgaaccacgaccaggagttcgacccccctaaggtgtaccctcccgtccccgccgagaagagaaagcccatccgggtcctgagcctgttcgatggcatcgccaccggtctgctggtgctgaaggacctgggcatccaggtggataggtacattgcctccgaggtgtgcgaggactccatcaccgtgggaatggtgcgtcatcagggcaagatcatgtacgtgggcgacgtgcggagcgtgacacagaagcatatccaggagtggggccctttcgacctggtgatcggcggcagcccttgcaatgacctgagcatcgtgaacccagcccggaagggcctgtacgagggaaccggcagactgttcttcgagttttacagactgctgcacgacgcccggcctaaggaaggcgacgaccggcccttcttttggctgttcgagaatgtggtggccatgggagtcagcgacaagcgggatattagccggttcctggagagcaaccccgtgatgatcgatgccaaggaagtgagcgccgcccaccgggccagatacttctggggcaatctgcctggcatgaacagacccctggccagcaccgtgaacgacaagctggagctgcaggagtgcctggagcacggccggatcgccaagttcagcaaggtgagaaccatcaccacccgaagcaacagcatcaaacaaggcaaggaccagcactttcctgtgttcatgaacgagaaggaggacatcctgtggtgtaccgagatggagagagtgttcgggttcccagtccactacacagatgtcagcaacatgtctagactggccagacagagactgctgggaagaagctggtccgtccctgtgatcagacacctgttcgcccctctgaaggagtacttcgcctgcgtgagcagcggcaacagcaacgccaacagccggggccccagcttctctagcggcctggtgccactgtccctgagagggagccacatgggccccatggagatctacaaaaccgtgagcgcctggaagcggcagcctgtgcgcgtgctgagcctgtttcggaatatcgataaagtcctgaaaagcctgggattcctggagagcggctctggctccggcggtggcaccctgaagtacgtggaggatgtgacaaacgtggtcagacgggatgtggagaagtggggccccttcgatctggtgtacggcagcacccaacccctgggcagctcttgtgaccggtgccctggctggtacatgtttcagttccaccggatcctgcagtacgccctgccgagacaggagtcccagcggccattcttttggattttcatggacaacttgctgctgaccgaggatgaccaggaaactaccactcggttcctgcagaccgaagccgtgaccctgcaggacgtgagaggccgggactaccagaacgccatgcgggtgtggtccaacatccctggactgaaaagcaagcacgcacctctgacccctaaagaagaggagtacctgcaggcccaggtgcggagcagaagcaagctggacgcccctaaggtggatctgctggtgaagaattgcctcctgcccctgagagagtacttcaagtatttcagccagaatagtctgcccctgggcggcccaagcagcggcgcccctcctcccagcggcggcagcccagccggctccccaacctctaccgaggagggcacctctgagtccgccacccccgagagcggccctggcacctccaccgagcccagcgagggcagcgcacccggcagccctgccggcagccccacctccacagaggagggaaccagcaccgagcccagcgaaggcagcgccccaggcaccagcaccgagcctagtgagggcggctctggcggcggcagcgcccaggagattaaacggatcaacaagatcagaagaagacttgtgaaagacagcaacaccaagaaggccggcaagacaggccccatgaaaaccctgctggttagagtgatgacacccgatctgagagagcggctggaaaacctgagaaagaagcctgaaaatatcccccagcccatcagcaatacatctagagccaacctgaataagctgctgaccgattacaccgaaatgaagaaggcgatcctgcatgtgtactgggaagagttccagaaggaccctgtgggcctgatgagccgggtggcccagcctgccagcaagaagatcgatcagaacaagctgaaacctgagatggacgagaagggcaacctgaccaccgccggctttgcctgctctcagtgtggccagcccctgttcgtgtacaagctggagcaggtgtctgagaagggcaaggcttacaccaactacttcggacggtgcaatgtggccgagcacgaaaagctgatcctgctggcccagctgaagcccgagaaggatagcgacgaagccgtgacatatagcctgggaaagtttgggcagagggccctggatttctacagcattcatgtgaccaaggagtccacccaccccgtgaagcccctggcccagatcgccggaaacagatacgcctccggacctgtgggaaaggccctgagcgacgcatgtatgggcacaatcgcctccttcctgtctaagtaccaggacatcatcatcgaacaccagaaggtggtgaagggcaaccagaagagactggagagcctgcgggagctggccggcaaggaaaacctggaataccctagcgtgaccctgccacctcagcctcacaccaaggagggcgttgatgcctacaacgaagtgatcgcccgggtgcgaatgtgggtgaacctgaacctgtggcagaagctgaagctaagcagagatgatgccaagcctctgctgagactgaagggattcccttcctttcctctggtcgagagacaggccaacgaagtggactggtgggacatggtgtgtaacgtgaagaagctgatcaacgagaaaaaggaggatggcaaggtgttttggcagaatctggctggctacaagagacaggaagccctgagaccatacctgagcagcgaggaagatcggaagaagggaaagaaattcgctcggtaccagctgggcgacctgctgctgcacctggaaaagaagcacggcgaggactggggaaaggtgtacgacgaggcctgggagcggattgacaagaaagtggaaggcctgagcaagcacatcaagctggaagaggaacggagaagcgaggacgcccagagcaaggccgccctgaccgactggctgcgggctaaggccagcttcgtgatcgagggcctgaaggaggccgacaaggacgagttctgcagatgcgagctgaagctgcagaagtggtacggggacctgcggggaaagcccttcgccatcgaagccgagaacagcatcctggacatcagcggcttcagcaagcagtacaactgtgccttcatctggcagaaggacggcgtgaagaagctgaacctgtacctgatcatcaactacttcaagggcggcaagctgcggttcaagaagatcaaacctgaagccttcgaagccaacagattctacaccgtgatcaacaaaaagagcggcgagatcgtgcccatggaggtgaacttcaacttcgacgaccccaacctgatcatcctgcctctggcctttggcaagagacagggcagagaattcatctggaacgacctgctgtccctggaaaccggcagcctgaagctggccaacggaagagtgatcgagaagacactgtacaacagaagaacccggcaggatgagcctgccctgttcgtggccctgaccttcgagcggcgggaggtcctggactcctccaatatcaaaccaatgaacctgatcggcgtggcaagaggcgaaaacatccccgccgtgatcgccctgaccgaccccgagggctgcccactgagccggtttaaggatagcctgggaaacccaacccacatcctgagaatcggcgagagctataaggagaagcagcggaccatccaggccaagaaggaggtggagcagcggagagccggcggctacagccggaagtacgccagcaaagccaagaatctggcagacgatatggtgagaaacaccgctagagatctgctgtactacgccgtgacccaggatgccatgctgatcttcgccaacctgagccggggcttcggccggcagggcaagcggaccttcatggccgagagacagtacacacggatggaggactggctgaccgccaagctggcctacgagggcctgagcaagacctacctgtccaagacactggcccagtacacctccaagacatgcagcaactgtgggtttaccatcaccagcgccgactacgacagggtgctggagaagctgaagaagacagcaacaggctggatgaccacaattaacggcaaggagctgaaggtggagggccagattacctactacaacagatacaagagacagaacgtagtcaaggacctgtccgtcgagctggatagactgagcgaagaatctgtgaacaacgacatctcctcctggacaaagggcagaagcggagaagctctgagcctcctgaagaaaagattctcccatagacccgtgcaggagaagttcgtgtgcctgaactgcggcttcgagacacacgcagccgagcaagccgccctgaacatcgccagatcctggctgttcctgcggagccaggagtacaagaaataccagacaaacaagacaaccggcaacaccgataagagagccttcgtcgagacctggcagtccttttaccggaagaagcttaaggaggtgtggaaacctgccgtgcggtctggcggatctggcggaggctccacaagcagccagggcctggtgaccttcggcgacgtggccgtggtgttcagccaggaggagtgggagtggctgagcagcgagcagaggagcctgtactggaaggtgatgctggacaactacaggaacctggccagcctgggcctgtgcgccagcaagcccgacatgatcaccagcctggagcagggcagggacccctggatgatgaagaggaagatgaggaagggccagaggctggacctgaaggccatgaccagccccaagaaaaagagaaaagtctaagctgccttctgcggggcttgccttctggccatgcccttcttctctcccttgcacctgtacctcttggtctttgaataaagcctgagtaggaaggctagcaaaaaaaaaaaaaaaaaaaaaaaaaaaaaaaaaaaaaaaaaaaaaaaaaaaaaaaaaaaaaaaaaaaaaaaaaaaaaaaa

SEQ ID NO: 4038 - RNA, 5419 nt, synthetic construct
  source 1..5419: mol_type = other RNA
aggaaataagagagaaaagaagagtaagaagaaatataagagccaccatggcccctaagaagaagcgtaaagtgagccgggtgaacggcagcggcagcggcggcggcatgaaccacgaccaggagttcgacccccctaaggtgtaccctcccgtccccgccgagaagagaaagcccatccgggtcctgagcctgttcgatggcatcgccaccggtctgctggtgctgaaggacctgggcatccaggtggataggtacattgcctccgaggtgtgcgaggactccatcaccgtgggaatggtgcgtcatcagggcaagatcatgtacgtgggcgacgtgcggagcgtgacacagaagcatatccaggagtggggccctttcgacctggtgatcggcggcagcccttgcaatgacctgagcatcgtgaacccagcccggaagggcctgtacgagggaaccggcagactgttcttcgagttttacagactgctgcacgacgcccggcctaaggaaggcgacgaccggcccttcttttggctgttcgagaatgtggtggccatgggagtcagcgacaagcgggatattagccggttcctggagagcaaccccgtgatgatcgatgccaaggaagtgagcgccgcccaccgggccagatacttctggggcaatctgcctggcatgaacagacccctggccagcaccgtgaacgacaagctggagctgcaggagtgcctggagcacggccggatcgccaagttcagcaaggtgagaaccatcaccacccgaagcaacagcatcaaacaaggcaaggaccagcactttcctgtgttcatgaacgagaaggaggacatcctgtggtgtaccgagatggagagagtgttcgggttcccagtccactacacagatgtcagcaacatgtctagactggccagacagagactgctgggaagaagctggtccgtccctgtgatcagacacctgttcgcccctctgaaggagtacttcgcctgcgtgagcagcggcaacagcaacgccaacagccggggccccagcttctctagcggcctggtgccactgtccctgagagggagccacatgggccccatggagatctacaaaaccgtgagcgcctggaagcggcagcctgtgcgcgtgctgagcctgtttcggaatatcgataaagtcctgaaaagcctgggattcctggagagcggctctggctccggcggtggcaccctgaagtacgtggaggatgtgacaaacgtggtcagacgggatgtggagaagtggggccccttcgatctggtgtacggcagcacccaacccctgggcagctcttgtgaccggtgccctggctggtacatgtttcagttccaccggatcctgcagtacgccctgccgagacaggagtcccagcggccattcttttggattttcatggacaacttgctgctgaccgaggatgaccaggaaactaccactcggttcctgcagaccgaagccgtgaccctgcaggacgtgagaggccgggactaccagaacgccatgcgggtgtggtccaacatccctggactgaaaagcaagcacgcacctctgacccctaaagaagaggagtacctgcaggcccaggtgcggagcagaagcaagctggacgcccctaaggtggatctgctggtgaagaattgcctcctgcccctgagagagtacttcaagtatttcagccagaatagtctgcccctgggcggcccaagcagcggcgcccctcctcccagcggcggcagcccagccggctccccaacctctaccgaggagggcacctctgagtccgccacccccgagagcggccctggcacctccaccgagcccagcgagggcagcgcacccggcagccctgccggcagccccacctccacagaggagggaaccagcaccgagcccagcgaaggcagcgccccaggcaccagcaccgagcctagtgagggcggctctggcggcggcagcgcccaggagattaaacggatcaacaagatcagaagaagacttgtgaaagacagcaacaccaagaaggccggcaagacaggccccatgaaaaccctgctggttagagtgatgacacccgatctgagagagcggctggaaaacctgagaaagaagcctgaaaatatcccccagcccatcagcaatacatctagagccaacctgaataagctgctgaccgattacaccgaaatgaagaaggcgatcctgcatgtgtactgggaagagttccagaaggaccctgtgggcctgatgagccgggtggcccagcctgccagcaagaagatcgatcagaacaagctgaaacctgagatggacgagaagggcaacctgaccaccgccggctttgcctgctctcagtgtggccagcccctgttcgtgtacaagctggagcaggtgtctgagaagggcaaggcttacaccaactacttcggacggtgcaatgtggccgagcacgaaaagctgatcctgctggcccagctgaagcccgagaaggatagcgacgaagccgtgacatatagcctgggaaagtttgggcagagggccctggatttctacagcattcatgtgaccaaggagtccacccaccccgtgaagcccctggcccagatcgccggaaacagatacgcctccggacctgtgggaaaggccctgagcgacgcatgtatgggcacaatcgcctccttcctgtctaagtaccaggacatcatcatcgaacaccagaaggtggtgaagggcaaccagaagagactggagagcctgcgggagctggccggcaaggaaaacctggaataccctagcgtgaccctgccacctcagcctcacaccaaggagggcgttgatgcctacaacgaagtgatcgcccgggtgcgaatgtgggtgaacctgaacctgtggcagaagctgaagctaagcagagatgatgccaagcctctgctgagactgaagggattcccttcctttcctctggtcgagagacaggccaacgaagtggactggtgggacatggtgtgtaacgtgaagaagctgatcaacgagaaaaaggaggatggcaaggtgttttggcagaatctggctggctacaagagacaggaagccctgagaccatacctgagcagcgaggaagatcggaagaagggaaagaaattcgctcggtaccagctgggcgacctgctgctgcacctggaaaagaagcacggcgaggactggggaaaggtgtacgacgaggcctgggagcggattgacaagaaagtggaaggcctgagcaagcacatcaagctggaagaggaacggagaagcgaggacgcccagagcaaggccgccctgaccgactggctgcgggctaaggccagcttcgtgatcgagggcctgaaggaggccgacaaggacgagttctgcagatgcgagctgaagctgcagaagtggtacggggacctgcggggaaagcccttcgccatcgaagccgagaacagcatcctggacatcagcggcttcagcaagcagtacaactgtgccttcatctggcagaaggacggcgtgaagaagctgaacctgtacctgatcatcaactacttcaagggcggcaagctgcggttcaagaagatcaaacctgaagccttcgaagccaacagattctacaccgtgatcaacaaaaagagcggcgagatcgtgcccatggaggtgaacttcaacttcgacgaccccaacctgatcatcctgcctctggcctttggcaagagacagggcagagaattcatctggaacgacctgctgtccctggaaaccggcagcctgaagctggccaacggaagagtgatcgagaagacactgtacaacagaagaacccggcaggatgagcctgccctgttcgtggccctgaccttcgagcggcgggaggtcctggactcctccaatatcaaaccaatgaacctgatcggcgtggcaagaggcgaaaacatccccgccgtgatcgccctgaccgaccccgagggctgcccactgagccggtttaaggatagcctgggaaacccaacccacatcctgagaatcggcgagagctataaggagaagcagcggaccatccaggccaagaaggaggtggagcagcggagagccggcggctacagccggaagtacgccagcaaagccaagaatctggcagacgatatggtgagaaacaccgctagagatctgctgtactacgccgtgacccaggatgccatgctgatcttcgccaacctgagccggggcttcggccggcagggcaagcggaccttcatggccgagagacagtacacacggatggaggactggctgaccgccaagctggcctacgagggcctgagcaagacctacctgtccaagacactggcccagtacacctccaagacatgcagcaactgtgggtttaccatcaccagcgccgactacgacagggtgctggagaagctgaagaagacagcaacaggctggatgaccacaattaacggcaaggagctgaaggtggagggccagattacctactacaacagatacaagagacagaacgtagtcaaggacctgtccgtcgagctggatagactgagcgaagaatctgtgaacaacgacatctcctcctggacaaagggcagaagcggagaagctctgagcctcctgaagaaaagattctcccatagacccgtgcaggagaagttcgtgtgcctgaactgcggcttcgagacacacgcagccgagcaagccgccctgaacatcgccagatcctggctgttcctgcggagccaggagtacaagaaataccagacaaacaagacaaccggcaacaccgataagagagccttcgtcgagacctggcagtccttttaccggaagaagcttaaggaggtgtggaaacctgccgtgcggtctggcggatctggcggaggctccacaagcaggcccgagctggtgaccttcgaggacgtggccgtgtacttcagcgagaacgagtggaccagcctggcccccacccagagggtgctgtacagggacgtgatgctggagaactacggcgccgtggccagcctggccgtgcccttccccaagcccgccctgatcagccagctggagaggggcgaggccccctggtgcaaggccccccagggcgccctggacggcgagggccccaggggcatcagcaccagccccaagaaaaagagaaaagtctaagctgccttctgcggggcttgccttctggccatgcccttcttctctcccttgcacctgtacctcttggtctttgaataaagcctgagtaggaaggctagcaaaaaaaaaaaaaaaaaaaaaaaaaaaaaaaaaaaaaaaaaaaaaaaaaaaaaaaaaaaaaaaaaaaaaaaaaaaaaaaa

SEQ ID NO: 4039 - RNA, 5419 nt, synthetic construct
  source 1..5419: mol_type = other RNA
aggaaataagagagaaaagaagagtaagaagaaatataagagccaccatggcccctaagaagaagcgtaaagtgagccgggtgaacggcagcggcagcggcggcggcatgaaccacgaccaggagttcgacccccctaaggtgtaccctcccgtccccgccgagaagagaaagcccatccgggtcctgagcctgttcgatggcatcgccaccggtctgctggtgctgaaggacctgggcatccaggtggataggtacattgcctccgaggtgtgcgaggactccatcaccgtgggaatggtgcgtcatcagggcaagatcatgtacgtgggcgacgtgcggagcgtgacacagaagcatatccaggagtggggccctttcgacctggtgatcggcggcagcccttgcaatgacctgagcatcgtgaacccagcccggaagggcctgtacgagggaaccggcagactgttcttcgagttttacagactgctgcacgacgcccggcctaaggaaggcgacgaccggcccttcttttggctgttcgagaatgtggtggccatgggagtcagcgacaagcgggatattagccggttcctggagagcaaccccgtgatgatcgatgccaaggaagtgagcgccgcccaccgggccagatacttctggggcaatctgcctggcatgaacagacccctggccagcaccgtgaacgacaagctggagctgcaggagtgcctggagcacggccggatcgccaagttcagcaaggtgagaaccatcaccacccgaagcaacagcatcaaacaaggcaaggaccagcactttcctgtgttcatgaacgagaaggaggacatcctgtggtgtaccgagatggagagagtgttcgggttcccagtccactacacagatgtcagcaacatgtctagactggccagacagagactgctgggaagaagctggtccgtccctgtgatcagacacctgttcgcccctctgaaggagtacttcgcctgcgtgagcagcggcaacagcaacgccaacagccggggccccagcttctctagcggcctggtgccactgtccctgagagggagccacatgggccccatggagatctacaaaaccgtgagcgcctggaagcggcagcctgtgcgcgtgctgagcctgtttcggaatatcgataaagtcctgaaaagcctgggattcctggagagcggctctggctccggcggtggcaccctgaagtacgtggaggatgtgacaaacgtggtcagacgggatgtggagaagtggggccccttcgatctggtgtacggcagcacccaacccctgggcagctcttgtgaccggtgccctggctggtacatgtttcagttccaccggatcctgcagtacgccctgccgagacaggagtcccagcggccattcttttggattttcatggacaacttgctgctgaccgaggatgaccaggaaactaccactcggttcctgcagaccgaagccgtgaccctgcaggacgtgagaggccgggactaccagaacgccatgcgggtgtggtccaacatccctggactgaaaagcaagcacgcacctctgacccctaaagaagaggagtacctgcaggcccaggtgcggagcagaagcaagctggacgcccctaaggtggatctgctggtgaagaattgcctcctgcccctgagagagtacttcaagtatttcagccagaatagtctgcccctgggcggcccaagcagcggcgcccctcctcccagcggcggcagcccagccggctccccaacctctaccgaggagggcacctctgagtccgccacccccgagagcggccctggcacctccaccgagcccagcgagggcagcgcacccggcagccctgccggcagccccacctccacagaggagggaaccagcaccgagcccagcgaaggcagcgccccaggcaccagcaccgagcctagtgagggcggctctggcggcggcagcgcccaggagattaaacggatcaacaagatcagaagaagacttgtgaaagacagcaacaccaagaaggccggcaagacaggccccatgaaaaccctgctggttagagtgatgacacccgatctgagagagcggctggaaaacctgagaaagaagcctgaaaatatcccccagcccatcagcaatacatctagagccaacctgaataagctgctgaccgattacaccgaaatgaagaaggcgatcctgcatgtgtactgggaagagttccagaaggaccctgtgggcctgatgagccgggtggcccagcctgccagcaagaagatcgatcagaacaagctgaaacctgagatggacgagaagggcaacctgaccaccgccggctttgcctgctctcagtgtggccagcccctgttcgtgtacaagctggagcaggtgtctgagaagggcaaggcttacaccaactacttcggacggtgcaatgtggccgagcacgaaaagctgatcctgctggcccagctgaagcccgagaaggatagcgacgaagccgtgacatatagcctgggaaagtttgggcagagggccctggatttctacagcattcatgtgaccaaggagtccacccaccccgtgaagcccctggcccagatcgccggaaacagatacgcctccggacctgtgggaaaggccctgagcgacgcatgtatgggcacaatcgcctccttcctgtctaagtaccaggacatcatcatcgaacaccagaaggtggtgaagggcaaccagaagagactggagagcctgcgggagctggccggcaaggaaaacctggaataccctagcgtgaccctgccacctcagcctcacaccaaggagggcgttgatgcctacaacgaagtgatcgcccgggtgcgaatgtgggtgaacctgaacctgtggcagaagctgaagctaagcagagatgatgccaagcctctgctgagactgaagggattcccttcctttcctctggtcgagagacaggccaacgaagtggactggtgggacatggtgtgtaacgtgaagaagctgatcaacgagaaaaaggaggatggcaaggtgttttggcagaatctggctggctacaagagacaggaagccctgagaccatacctgagcagcgaggaagatcggaagaagggaaagaaattcgctcggtaccagctgggcgacctgctgctgcacctggaaaagaagcacggcgaggactggggaaaggtgtacgacgaggcctgggagcggattgacaagaaagtggaaggcctgagcaagcacatcaagctggaagaggaacggagaagcgaggacgcccagagcaaggccgccctgaccgactggctgcgggctaaggccagcttcgtgatcgagggcctgaaggaggccgacaaggacgagttctgcagatgcgagctgaagctgcagaagtggtacggggacctgcggggaaagcccttcgccatcgaagccgagaacagcatcctggacatcagcggcttcagcaagcagtacaactgtgccttcatctggcagaaggacggcgtgaagaagctgaacctgtacctgatcatcaactacttcaagggcggcaagctgcggttcaagaagatcaaacctgaagccttcgaagccaacagattctacaccgtgatcaacaaaaagagcggcgagatcgtgcccatggaggtgaacttcaacttcgacgaccccaacctgatcatcctgcctctggcctttggcaagagacagggcagagaattcatctggaacgacctgctgtccctggaaaccggcagcctgaagctggccaacggaagagtgatcgagaagacactgtacaacagaagaacccggcaggatgagcctgccctgttcgtggccctgaccttcgagcggcgggaggtcctggactcctccaatatcaaaccaatgaacctgatcggcgtggcaagaggcgaaaacatccccgccgtgatcgccctgaccgaccccgagggctgcccactgagccggtttaaggatagcctgggaaacccaacccacatcctgagaatcggcgagagctataaggagaagcagcggaccatccaggccaagaaggaggtggagcagcggagagccggcggctacagccggaagtacgccagcaaagccaagaatctggcagacgatatggtgagaaacaccgctagagatctgctgtactacgccgtgacccaggatgccatgctgatcttcgccaacctgagccggggcttcggccggcagggcaagcggaccttcatggccgagagacagtacacacggatggaggactggctgaccgccaagctggcctacgagggcctgagcaagacctacctgtccaagacactggcccagtacacctccaagacatgcagcaactgtgggtttaccatcaccagcgccgactacgacagggtgctggagaagctgaagaagacagcaacaggctggatgaccacaattaacggcaaggagctgaaggtggagggccagattacctactacaacagatacaagagacagaacgtagtcaaggacctgtccgtcgagctggatagactgagcgaagaatctgtgaacaacgacatctcctcctggacaaagggcagaagcggagaagctctgagcctcctgaagaaaagattctcccatagacccgtgcaggagaagttcgtgtgcctgaactgcggcttcgagacacacgcagccgagcaagccgccctgaacatcgccagatcctggctgttcctgcggagccaggagtacaagaaataccagacaaacaagacaaccggcaacaccgataagagagccttcgtcgagacctggcagtccttttaccggaagaagcttaaggaggtgtggaaacctgccgtgcggtctggcggatctggcggaggctccacaagcttccagggcagcgtgaccttcgaggacgtggccatcgccttcagccagcaggagtgggagagcctggacagcagccagaggggcctgtacagggacgtgatgctggagaactacaggaacctggtgagcatggccggccacagcctgagcaagccccacgtgatcgccctgctggagaggtggaaggagcccaaggtgaccgagaggaaggacggcaggaggtggtgcaccgacctgcagctgaccagccccaagaaaaagagaaaagtctaagctgccttctgcggggcttgccttctggccatgcccttcttctctcccttgcacctgtacctcttggtctttgaataaagcctgagtaggaaggctagcaaaaaaaaaaaaaaaaaaaaaaaaaaaaaaaaaaaaaaaaaaaaaaaaaaaaaaaaaaaaaaaaaaaaaaaaaaaaaaaa

SEQ ID NO: 4040 - RNA, 5419 nt, synthetic construct
  source 1..5419: mol_type = other RNA
aggaaataagagagaaaagaagagtaagaagaaatataagagccaccatggcccctaagaagaagcgtaaagtgagccgggtgaacggcagcggcagcggcggcggcatgaaccacgaccaggagttcgacccccctaaggtgtaccctcccgtccccgccgagaagagaaagcccatccgggtcctgagcctgttcgatggcatcgccaccggtctgctggtgctgaaggacctgggcatccaggtggataggtacattgcctccgaggtgtgcgaggactccatcaccgtgggaatggtgcgtcatcagggcaagatcatgtacgtgggcgacgtgcggagcgtgacacagaagcatatccaggagtggggccctttcgacctggtgatcggcggcagcccttgcaatgacctgagcatcgtgaacccagcccggaagggcctgtacgagggaaccggcagactgttcttcgagttttacagactgctgcacgacgcccggcctaaggaaggcgacgaccggcccttcttttggctgttcgagaatgtggtggccatgggagtcagcgacaagcgggatattagccggttcctggagagcaaccccgtgatgatcgatgccaaggaagtgagcgccgcccaccgggccagatacttctggggcaatctgcctggcatgaacagacccctggccagcaccgtgaacgacaagctggagctgcaggagtgcctggagcacggccggatcgccaagttcagcaaggtgagaaccatcaccacccgaagcaacagcatcaaacaaggcaaggaccagcactttcctgtgttcatgaacgagaaggaggacatcctgtggtgtaccgagatggagagagtgttcgggttcccagtccactacacagatgtcagcaacatgtctagactggccagacagagactgctgggaagaagctggtccgtccctgtgatcagacacctgttcgcccctctgaaggagtacttcgcctgcgtgagcagcggcaacagcaacgccaacagccggggccccagcttctctagcggcctggtgccactgtccctgagagggagccacatgggccccatggagatctacaaaaccgtgagcgcctggaagcggcagcctgtgcgcgtgctgagcctgtttcggaatatcgataaagtcctgaaaagcctgggattcctggagagcggctctggctccggcggtggcaccctgaagtacgtggaggatgtgacaaacgtggtcagacgggatgtggagaagtggggccccttcgatctggtgtacggcagcacccaacccctgggcagctcttgtgaccggtgccctggctggtacatgtttcagttccaccggatcctgcagtacgccctgccgagacaggagtcccagcggccattcttttggattttcatggacaacttgctgctgaccgaggatgaccaggaaactaccactcggttcctgcagaccgaagccgtgaccctgcaggacgtgagaggccgggactaccagaacgccatgcgggtgtggtccaacatccctggactgaaaagcaagcacgcacctctgacccctaaagaagaggagtacctgcaggcccaggtgcggagcagaagcaagctggacgcccctaaggtggatctgctggtgaagaattgcctcctgcccctgagagagtacttcaagtatttcagccagaatagtctgcccctgggcggcccaagcagcggcgcccctcctcccagcggcggcagcccagccggctccccaacctctaccgaggagggcacctctgagtccgccacccccgagagcggccctggcacctccaccgagcccagcgagggcagcgcacccggcagccctgccggcagccccacctccacagaggagggaaccagcaccgagcccagcgaaggcagcgccccaggcaccagcaccgagcctagtgagggcggctctggcggcggcagcgcccaggagattaaacggatcaacaagatcagaagaagacttgtgaaagacagcaacaccaagaaggccggcaagacaggccccatgaaaaccctgctggttagagtgatgacacccgatctgagagagcggctggaaaacctgagaaagaagcctgaaaatatcccccagcccatcagcaatacatctagagccaacctgaataagctgctgaccgattacaccgaaatgaagaaggcgatcctgcatgtgtactgggaagagttccagaaggaccctgtgggcctgatgagccgggtggcccagcctgccagcaagaagatcgatcagaacaagctgaaacctgagatggacgagaagggcaacctgaccaccgccggctttgcctgctctcagtgtggccagcccctgttcgtgtacaagctggagcaggtgtctgagaagggcaaggcttacaccaactacttcggacggtgcaatgtggccgagcacgaaaagctgatcctgctggcccagctgaagcccgagaaggatagcgacgaagccgtgacatatagcctgggaaagtttgggcagagggccctggatttctacagcattcatgtgaccaaggagtccacccaccccgtgaagcccctggcccagatcgccggaaacagatacgcctccggacctgtgggaaaggccctgagcgacgcatgtatgggcacaatcgcctccttcctgtctaagtaccaggacatcatcatcgaacaccagaaggtggtgaagggcaaccagaagagactggagagcctgcgggagctggccggcaaggaaaacctggaataccctagcgtgaccctgccacctcagcctcacaccaaggagggcgttgatgcctacaacgaagtgatcgcccgggtgcgaatgtgggtgaacctgaacctgtggcagaagctgaagctaagcagagatgatgccaagcctctgctgagactgaagggattcccttcctttcctctggtcgagagacaggccaacgaagtggactggtgggacatggtgtgtaacgtgaagaagctgatcaacgagaaaaaggaggatggcaaggtgttttggcagaatctggctggctacaagagacaggaagccctgagaccatacctgagcagcgaggaagatcggaagaagggaaagaaattcgctcggtaccagctgggcgacctgctgctgcacctggaaaagaagcacggcgaggactggggaaaggtgtacgacgaggcctgggagcggattgacaagaaagtggaaggcctgagcaagcacatcaagctggaagaggaacggagaagcgaggacgcccagagcaaggccgccctgaccgactggctgcgggctaaggccagcttcgtgatcgagggcctgaaggaggccgacaaggacgagttctgcagatgcgagctgaagctgcagaagtggtacggggacctgcggggaaagcccttcgccatcgaagccgagaacagcatcctggacatcagcggcttcagcaagcagtacaactgtgccttcatctggcagaaggacggcgtgaagaagctgaacctgtacctgatcatcaactacttcaagggcggcaagctgcggttcaagaagatcaaacctgaagccttcgaagccaacagattctacaccgtgatcaacaaaaagagcggcgagatcgtgcccatggaggtgaacttcaacttcgacgaccccaacctgatcatcctgcctctggcctttggcaagagacagggcagagaattcatctggaacgacctgctgtccctggaaaccggcagcctgaagctggccaacggaagagtgatcgagaagacactgtacaacagaagaacccggcaggatgagcctgccctgttcgtggccctgaccttcgagcggcgggaggtcctggactcctccaatatcaaaccaatgaacctgatcggcgtggcaagaggcgaaaacatccccgccgtgatcgccctgaccgaccccgagggctgcccactgagccggtttaaggatagcctgggaaacccaacccacatcctgagaatcggcgagagctataaggagaagcagcggaccatccaggccaagaaggaggtggagcagcggagagccggcggctacagccggaagtacgccagcaaagccaagaatctggcagacgatatggtgagaaacaccgctagagatctgctgtactacgccgtgacccaggatgccatgctgatcttcgccaacctgagccggggcttcggccggcagggcaagcggaccttcatggccgagagacagtacacacggatggaggactggctgaccgccaagctggcctacgagggcctgagcaagacctacctgtccaagacactggcccagtacacctccaagacatgcagcaactgtgggtttaccatcaccagcgccgactacgacagggtgctggagaagctgaagaagacagcaacaggctggatgaccacaattaacggcaaggagctgaaggtggagggccagattacctactacaacagatacaagagacagaacgtagtcaaggacctgtccgtcgagctggatagactgagcgaagaatctgtgaacaacgacatctcctcctggacaaagggcagaagcggagaagctctgagcctcctgaagaaaagattctcccatagacccgtgcaggagaagttcgtgtgcctgaactgcggcttcgagacacacgcagccgagcaagccgccctgaacatcgccagatcctggctgttcctgcggagccaggagtacaagaaataccagacaaacaagacaaccggcaacaccgataagagagccttcgtcgagacctggcagtccttttaccggaagaagcttaaggaggtgtggaaacctgccgtgcggtctggcggatctggcggaggctccacaagcagcctggagagcgacgtgttcaccgacgtggccatcgtgttcagccaggaggagtgggagcagctggcccccgcccagagggacctgtacagggacgtgatgctggagacctacagcaacctggtgagcctgggcctggccatcgccaagcccgacgtgatcagcttcctggaggagggcaaggagccctgggtggtggagaagaccagcaggggcggcctgtgccccgtgctggagagcaggaccagccccaagaaaaagagaaaagtctaagctgccttctgcggggcttgccttctggccatgcccttcttctctcccttgcacctgtacctcttggtctttgaataaagcctgagtaggaaggctagcaaaaaaaaaaaaaaaaaaaaaaaaaaaaaaaaaaaaaaaaaaaaaaaaaaaaaaaaaaaaaaaaaaaaaaaaaaaaaaaa

SEQ ID NO: 4041 - RNA, 5419 nt, synthetic construct
  source 1..5419: mol_type = other RNA
aggaaataagagagaaaagaagagtaagaagaaatataagagccaccatggcccctaagaagaagcgtaaagtgagccgggtgaacggcagcggcagcggcggcggcatgaaccacgaccaggagttcgacccccctaaggtgtaccctcccgtccccgccgagaagagaaagcccatccgggtcctgagcctgttcgatggcatcgccaccggtctgctggtgctgaaggacctgggcatccaggtggataggtacattgcctccgaggtgtgcgaggactccatcaccgtgggaatggtgcgtcatcagggcaagatcatgtacgtgggcgacgtgcggagcgtgacacagaagcatatccaggagtggggccctttcgacctggtgatcggcggcagcccttgcaatgacctgagcatcgtgaacccagcccggaagggcctgtacgagggaaccggcagactgttcttcgagttttacagactgctgcacgacgcccggcctaaggaaggcgacgaccggcccttcttttggctgttcgagaatgtggtggccatgggagtcagcgacaagcgggatattagccggttcctggagagcaaccccgtgatgatcgatgccaaggaagtgagcgccgcccaccgggccagatacttctggggcaatctgcctggcatgaacagacccctggccagcaccgtgaacgacaagctggagctgcaggagtgcctggagcacggccggatcgccaagttcagcaaggtgagaaccatcaccacccgaagcaacagcatcaaacaaggcaaggaccagcactttcctgtgttcatgaacgagaaggaggacatcctgtggtgtaccgagatggagagagtgttcgggttcccagtccactacacagatgtcagcaacatgtctagactggccagacagagactgctgggaagaagctggtccgtccctgtgatcagacacctgttcgcccctctgaaggagtacttcgcctgcgtgagcagcggcaacagcaacgccaacagccggggccccagcttctctagcggcctggtgccactgtccctgagagggagccacatgggccccatggagatctacaaaaccgtgagcgcctggaagcggcagcctgtgcgcgtgctgagcctgtttcggaatatcgataaagtcctgaaaagcctgggattcctggagagcggctctggctccggcggtggcaccctgaagtacgtggaggatgtgacaaacgtggtcagacgggatgtggagaagtggggccccttcgatctggtgtacggcagcacccaacccctgggcagctcttgtgaccggtgccctggctggtacatgtttcagttccaccggatcctgcagtacgccctgccgagacaggagtcccagcggccattcttttggattttcatggacaacttgctgctgaccgaggatgaccaggaaactaccactcggttcctgcagaccgaagccgtgaccctgcaggacgtgagaggccgggactaccagaacgccatgcgggtgtggtccaacatccctggactgaaaagcaagcacgcacctctgacccctaaagaagaggagtacctgcaggcccaggtgcggagcagaagcaagctggacgcccctaaggtggatctgctggtgaagaattgcctcctgcccctgagagagtacttcaagtatttcagccagaatagtctgcccctgggcggcccaagcagcggcgcccctcctcccagcggcggcagcccagccggctccccaacctctaccgaggagggcacctctgagtccgccacccccgagagcggccctggcacctccaccgagcccagcgagggcagcgcacccggcagccctgccggcagccccacctccacagaggagggaaccagcaccgagcccagcgaaggcagcgccccaggcaccagcaccgagcctagtgagggcggctctggcggcggcagcgcccaggagattaaacggatcaacaagatcagaagaagacttgtgaaagacagcaacaccaagaaggccggcaagacaggccccatgaaaaccctgctggttagagtgatgacacccgatctgagagagcggctggaaaacctgagaaagaagcctgaaaatatcccccagcccatcagcaatacatctagagccaacctgaataagctgctgaccgattacaccgaaatgaagaaggcgatcctgcatgtgtactgggaagagttccagaaggaccctgtgggcctgatgagccgggtggcccagcctgccagcaagaagatcgatcagaacaagctgaaacctgagatggacgagaagggcaacctgaccaccgccggctttgcctgctctcagtgtggccagcccctgttcgtgtacaagctggagcaggtgtctgagaagggcaaggcttacaccaactacttcggacggtgcaatgtggccgagcacgaaaagctgatcctgctggcccagctgaagcccgagaaggatagcgacgaagccgtgacatatagcctgggaaagtttgggcagagggccctggatttctacagcattcatgtgaccaaggagtccacccaccccgtgaagcccctggcccagatcgccggaaacagatacgcctccggacctgtgggaaaggccctgagcgacgcatgtatgggcacaatcgcctccttcctgtctaagtaccaggacatcatcatcgaacaccagaaggtggtgaagggcaaccagaagagactggagagcctgcgggagctggccggcaaggaaaacctggaataccctagcgtgaccctgccacctcagcctcacaccaaggagggcgttgatgcctacaacgaagtgatcgcccgggtgcgaatgtgggtgaacctgaacctgtggcagaagctgaagctaagcagagatgatgccaagcctctgctgagactgaagggattcccttcctttcctctggtcgagagacaggccaacgaagtggactggtgggacatggtgtgtaacgtgaagaagctgatcaacgagaaaaaggaggatggcaaggtgttttggcagaatctggctggctacaagagacaggaagccctgagaccatacctgagcagcgaggaagatcggaagaagggaaagaaattcgctcggtaccagctgggcgacctgctgctgcacctggaaaagaagcacggcgaggactggggaaaggtgtacgacgaggcctgggagcggattgacaagaaagtggaaggcctgagcaagcacatcaagctggaagaggaacggagaagcgaggacgcccagagcaaggccgccctgaccgactggctgcgggctaaggccagcttcgtgatcgagggcctgaaggaggccgacaaggacgagttctgcagatgcgagctgaagctgcagaagtggtacggggacctgcggggaaagcccttcgccatcgaagccgagaacagcatcctggacatcagcggcttcagcaagcagtacaactgtgccttcatctggcagaaggacggcgtgaagaagctgaacctgtacctgatcatcaactacttcaagggcggcaagctgcggttcaagaagatcaaacctgaagccttcgaagccaacagattctacaccgtgatcaacaaaaagagcggcgagatcgtgcccatggaggtgaacttcaacttcgacgaccccaacctgatcatcctgcctctggcctttggcaagagacagggcagagaattcatctggaacgacctgctgtccctggaaaccggcagcctgaagctggccaacggaagagtgatcgagaagacactgtacaacagaagaacccggcaggatgagcctgccctgttcgtggccctgaccttcgagcggcgggaggtcctggactcctccaatatcaaaccaatgaacctgatcggcgtggcaagaggcgaaaacatccccgccgtgatcgccctgaccgaccccgagggctgcccactgagccggtttaaggatagcctgggaaacccaacccacatcctgagaatcggcgagagctataaggagaagcagcggaccatccaggccaagaaggaggtggagcagcggagagccggcggctacagccggaagtacgccagcaaagccaagaatctggcagacgatatggtgagaaacaccgctagagatctgctgtactacgccgtgacccaggatgccatgctgatcttcgccaacctgagccggggcttcggccggcagggcaagcggaccttcatggccgagagacagtacacacggatggaggactggctgaccgccaagctggcctacgagggcctgagcaagacctacctgtccaagacactggcccagtacacctccaagacatgcagcaactgtgggtttaccatcaccagcgccgactacgacagggtgctggagaagctgaagaagacagcaacaggctggatgaccacaattaacggcaaggagctgaaggtggagggccagattacctactacaacagatacaagagacagaacgtagtcaaggacctgtccgtcgagctggatagactgagcgaagaatctgtgaacaacgacatctcctcctggacaaagggcagaagcggagaagctctgagcctcctgaagaaaagattctcccatagacccgtgcaggagaagttcgtgtgcctgaactgcggcttcgagacacacgcagccgagcaagccgccctgaacatcgccagatcctggctgttcctgcggagccaggagtacaagaaataccagacaaacaagacaaccggcaacaccgataagagagccttcgtcgagacctggcagtccttttaccggaagaagcttaaggaggtgtggaaacctgccgtgcggtctggcggatctggcggaggctccacaagcctgctggagagcgtgaccttcggcgacgtggccgtggtgttcagcagggacgagtggctgcacctggacgccgcccagaggagcctgtacagggaggtgatgctggagaactacagcgccctggtgagcctgggcatccccctgagcatccccaagctgatctgccagctgcagcagggcgaggacccctgcatggtggagagggagatcccccaggacgtgtgcctgggcttcaagacctggaccagccccaagaaaaagagaaaagtctaagctgccttctgcggggcttgccttctggccatgcccttcttctctcccttgcacctgtacctcttggtctttgaataaagcctgagtaggaaggctagcaaaaaaaaaaaaaaaaaaaaaaaaaaaaaaaaaaaaaaaaaaaaaaaaaaaaaaaaaaaaaaaaaaaaaaaaaaaaaaaa

SEQ ID NO: 4042 - RNA, 5419 nt, synthetic construct
  source 1..5419: mol_type = other RNA
aggaaataagagagaaaagaagagtaagaagaaatataagagccaccatggcccctaagaagaagcgtaaagtgagccgggtgaacggcagcggcagcggcggcggcatgaaccacgaccaggagttcgacccccctaaggtgtaccctcccgtccccgccgagaagagaaagcccatccgggtcctgagcctgttcgatggcatcgccaccggtctgctggtgctgaaggacctgggcatccaggtggataggtacattgcctccgaggtgtgcgaggactccatcaccgtgggaatggtgcgtcatcagggcaagatcatgtacgtgggcgacgtgcggagcgtgacacagaagcatatccaggagtggggccctttcgacctggtgatcggcggcagcccttgcaatgacctgagcatcgtgaacccagcccggaagggcctgtacgagggaaccggcagactgttcttcgagttttacagactgctgcacgacgcccggcctaaggaaggcgacgaccggcccttcttttggctgttcgagaatgtggtggccatgggagtcagcgacaagcgggatattagccggttcctggagagcaaccccgtgatgatcgatgccaaggaagtgagcgccgcccaccgggccagatacttctggggcaatctgcctggcatgaacagacccctggccagcaccgtgaacgacaagctggagctgcaggagtgcctggagcacggccggatcgccaagttcagcaaggtgagaaccatcaccacccgaagcaacagcatcaaacaaggcaaggaccagcactttcctgtgttcatgaacgagaaggaggacatcctgtggtgtaccgagatggagagagtgttcgggttcccagtccactacacagatgtcagcaacatgtctagactggccagacagagactgctgggaagaagctggtccgtccctgtgatcagacacctgttcgcccctctgaaggagtacttcgcctgcgtgagcagcggcaacagcaacgccaacagccggggccccagcttctctagcggcctggtgccactgtccctgagagggagccacatgggccccatggagatctacaaaaccgtgagcgcctggaagcggcagcctgtgcgcgtgctgagcctgtttcggaatatcgataaagtcctgaaaagcctgggattcctggagagcggctctggctccggcggtggcaccctgaagtacgtggaggatgtgacaaacgtggtcagacgggatgtggagaagtggggccccttcgatctggtgtacggcagcacccaacccctgggcagctcttgtgaccggtgccctggctggtacatgtttcagttccaccggatcctgcagtacgccctgccgagacaggagtcccagcggccattcttttggattttcatggacaacttgctgctgaccgaggatgaccaggaaactaccactcggttcctgcagaccgaagccgtgaccctgcaggacgtgagaggccgggactaccagaacgccatgcgggtgtggtccaacatccctggactgaaaagcaagcacgcacctctgacccctaaagaagaggagtacctgcaggcccaggtgcggagcagaagcaagctggacgcccctaaggtggatctgctggtgaagaattgcctcctgcccctgagagagtacttcaagtatttcagccagaatagtctgcccctgggcggcccaagcagcggcgcccctcctcccagcggcggcagcccagccggctccccaacctctaccgaggagggcacctctgagtccgccacccccgagagcggccctggcacctccaccgagcccagcgagggcagcgcacccggcagccctgccggcagccccacctccacagaggagggaaccagcaccgagcccagcgaaggcagcgccccaggcaccagcaccgagcctagtgagggcggctctggcggcggcagcgcccaggagattaaacggatcaacaagatcagaagaagacttgtgaaagacagcaacaccaagaaggccggcaagacaggccccatgaaaaccctgctggttagagtgatgacacccgatctgagagagcggctggaaaacctgagaaagaagcctgaaaatatcccccagcccatcagcaatacatctagagccaacctgaataagctgctgaccgattacaccgaaatgaagaaggcgatcctgcatgtgtactgggaagagttccagaaggaccctgtgggcctgatgagccgggtggcccagcctgccagcaagaagatcgatcagaacaagctgaaacctgagatggacgagaagggcaacctgaccaccgccggctttgcctgctctcagtgtggccagcccctgttcgtgtacaagctggagcaggtgtctgagaagggcaaggcttacaccaactacttcggacggtgcaatgtggccgagcacgaaaagctgatcctgctggcccagctgaagcccgagaaggatagcgacgaagccgtgacatatagcctgggaaagtttgggcagagggccctggatttctacagcattcatgtgaccaaggagtccacccaccccgtgaagcccctggcccagatcgccggaaacagatacgcctccggacctgtgggaaaggccctgagcgacgcatgtatgggcacaatcgcctccttcctgtctaagtaccaggacatcatcatcgaacaccagaaggtggtgaagggcaaccagaagagactggagagcctgcgggagctggccggcaaggaaaacctggaataccctagcgtgaccctgccacctcagcctcacaccaaggagggcgttgatgcctacaacgaagtgatcgcccgggtgcgaatgtgggtgaacctgaacctgtggcagaagctgaagctaagcagagatgatgccaagcctctgctgagactgaagggattcccttcctttcctctggtcgagagacaggccaacgaagtggactggtgggacatggtgtgtaacgtgaagaagctgatcaacgagaaaaaggaggatggcaaggtgttttggcagaatctggctggctacaagagacaggaagccctgagaccatacctgagcagcgaggaagatcggaagaagggaaagaaattcgctcggtaccagctgggcgacctgctgctgcacctggaaaagaagcacggcgaggactggggaaaggtgtacgacgaggcctgggagcggattgacaagaaagtggaaggcctgagcaagcacatcaagctggaagaggaacggagaagcgaggacgcccagagcaaggccgccctgaccgactggctgcgggctaaggccagcttcgtgatcgagggcctgaaggaggccgacaaggacgagttctgcagatgcgagctgaagctgcagaagtggtacggggacctgcggggaaagcccttcgccatcgaagccgagaacagcatcctggacatcagcggcttcagcaagcagtacaactgtgccttcatctggcagaaggacggcgtgaagaagctgaacctgtacctgatcatcaactacttcaagggcggcaagctgcggttcaagaagatcaaacctgaagccttcgaagccaacagattctacaccgtgatcaacaaaaagagcggcgagatcgtgcccatggaggtgaacttcaacttcgacgaccccaacctgatcatcctgcctctggcctttggcaagagacagggcagagaattcatctggaacgacctgctgtccctggaaaccggcagcctgaagctggccaacggaagagtgatcgagaagacactgtacaacagaagaacccggcaggatgagcctgccctgttcgtggccctgaccttcgagcggcgggaggtcctggactcctccaatatcaaaccaatgaacctgatcggcgtggcaagaggcgaaaacatccccgccgtgatcgccctgaccgaccccgagggctgcccactgagccggtttaaggatagcctgggaaacccaacccacatcctgagaatcggcgagagctataaggagaagcagcggaccatccaggccaagaaggaggtggagcagcggagagccggcggctacagccggaagtacgccagcaaagccaagaatctggcagacgatatggtgagaaacaccgctagagatctgctgtactacgccgtgacccaggatgccatgctgatcttcgccaacctgagccggggcttcggccggcagggcaagcggaccttcatggccgagagacagtacacacggatggaggactggctgaccgccaagctggcctacgagggcctgagcaagacctacctgtccaagacactggcccagtacacctccaagacatgcagcaactgtgggtttaccatcaccagcgccgactacgacagggtgctggagaagctgaagaagacagcaacaggctggatgaccacaattaacggcaaggagctgaaggtggagggccagattacctactacaacagatacaagagacagaacgtagtcaaggacctgtccgtcgagctggatagactgagcgaagaatctgtgaacaacgacatctcctcctggacaaagggcagaagcggagaagctctgagcctcctgaagaaaagattctcccatagacccgtgcaggagaagttcgtgtgcctgaactgcggcttcgagacacacgcagccgagcaagccgccctgaacatcgccagatcctggctgttcctgcggagccaggagtacaagaaataccagacaaacaagacaaccggcaacaccgataagagagccttcgtcgagacctggcagtccttttaccggaagaagcttaaggaggtgtggaaacctgccgtgcggtctggcggatctggcggaggctccacaagcagccagggcagggtgaccttcgaggacgtgaccgtgaacttcaccaagggcgagtggcagaggctgaaccccgagcagaggaacctgtacagggacgtgatgctggagaactacagcaacctggtgagcgtgggcagggaggagaccaccaagcccaacgtgatcctgaggctggagcagggcaaggagccctggctggtggaggaggaggtgctgggcagcggcaggcccgagaagaacggcaccagccccaagaaaaagagaaaagtctaagctgccttctgcggggcttgccttctggccatgcccttcttctctcccttgcacctgtacctcttggtctttgaataaagcctgagtaggaaggctagcaaaaaaaaaaaaaaaaaaaaaaaaaaaaaaaaaaaaaaaaaaaaaaaaaaaaaaaaaaaaaaaaaaaaaaaaaaaaaaaa

SEQ ID NO: 4043 - RNA, 5419 nt, synthetic construct
  source 1..5419: mol_type = other RNA
aggaaataagagagaaaagaagagtaagaagaaatataagagccaccatggcccctaagaagaagcgtaaagtgagccgggtgaacggcagcggcagcggcggcggcatgaaccacgaccaggagttcgacccccctaaggtgtaccctcccgtccccgccgagaagagaaagcccatccgggtcctgagcctgttcgatggcatcgccaccggtctgctggtgctgaaggacctgggcatccaggtggataggtacattgcctccgaggtgtgcgaggactccatcaccgtgggaatggtgcgtcatcagggcaagatcatgtacgtgggcgacgtgcggagcgtgacacagaagcatatccaggagtggggccctttcgacctggtgatcggcggcagcccttgcaatgacctgagcatcgtgaacccagcccggaagggcctgtacgagggaaccggcagactgttcttcgagttttacagactgctgcacgacgcccggcctaaggaaggcgacgaccggcccttcttttggctgttcgagaatgtggtggccatgggagtcagcgacaagcgggatattagccggttcctggagagcaaccccgtgatgatcgatgccaaggaagtgagcgccgcccaccgggccagatacttctggggcaatctgcctggcatgaacagacccctggccagcaccgtgaacgacaagctggagctgcaggagtgcctggagcacggccggatcgccaagttcagcaaggtgagaaccatcaccacccgaagcaacagcatcaaacaaggcaaggaccagcactttcctgtgttcatgaacgagaaggaggacatcctgtggtgtaccgagatggagagagtgttcgggttcccagtccactacacagatgtcagcaacatgtctagactggccagacagagactgctgggaagaagctggtccgtccctgtgatcagacacctgttcgcccctctgaaggagtacttcgcctgcgtgagcagcggcaacagcaacgccaacagccggggccccagcttctctagcggcctggtgccactgtccctgagagggagccacatgggccccatggagatctacaaaaccgtgagcgcctggaagcggcagcctgtgcgcgtgctgagcctgtttcggaatatcgataaagtcctgaaaagcctgggattcctggagagcggctctggctccggcggtggcaccctgaagtacgtggaggatgtgacaaacgtggtcagacgggatgtggagaagtggggccccttcgatctggtgtacggcagcacccaacccctgggcagctcttgtgaccggtgccctggctggtacatgtttcagttccaccggatcctgcagtacgccctgccgagacaggagtcccagcggccattcttttggattttcatggacaacttgctgctgaccgaggatgaccaggaaactaccactcggttcctgcagaccgaagccgtgaccctgcaggacgtgagaggccgggactaccagaacgccatgcgggtgtggtccaacatccctggactgaaaagcaagcacgcacctctgacccctaaagaagaggagtacctgcaggcccaggtgcggagcagaagcaagctggacgcccctaaggtggatctgctggtgaagaattgcctcctgcccctgagagagtacttcaagtatttcagccagaatagtctgcccctgggcggcccaagcagcggcgcccctcctcccagcggcggcagcccagccggctccccaacctctaccgaggagggcacctctgagtccgccacccccgagagcggccctggcacctccaccgagcccagcgagggcagcgcacccggcagccctgccggcagccccacctccacagaggagggaaccagcaccgagcccagcgaaggcagcgccccaggcaccagcaccgagcctagtgagggcggctctggcggcggcagcgcccaggagattaaacggatcaacaagatcagaagaagacttgtgaaagacagcaacaccaagaaggccggcaagacaggccccatgaaaaccctgctggttagagtgatgacacccgatctgagagagcggctggaaaacctgagaaagaagcctgaaaatatcccccagcccatcagcaatacatctagagccaacctgaataagctgctgaccgattacaccgaaatgaagaaggcgatcctgcatgtgtactgggaagagttccagaaggaccctgtgggcctgatgagccgggtggcccagcctgccagcaagaagatcgatcagaacaagctgaaacctgagatggacgagaagggcaacctgaccaccgccggctttgcctgctctcagtgtggccagcccctgttcgtgtacaagctggagcaggtgtctgagaagggcaaggcttacaccaactacttcggacggtgcaatgtggccgagcacgaaaagctgatcctgctggcccagctgaagcccgagaaggatagcgacgaagccgtgacatatagcctgggaaagtttgggcagagggccctggatttctacagcattcatgtgaccaaggagtccacccaccccgtgaagcccctggcccagatcgccggaaacagatacgcctccggacctgtgggaaaggccctgagcgacgcatgtatgggcacaatcgcctccttcctgtctaagtaccaggacatcatcatcgaacaccagaaggtggtgaagggcaaccagaagagactggagagcctgcgggagctggccggcaaggaaaacctggaataccctagcgtgaccctgccacctcagcctcacaccaaggagggcgttgatgcctacaacgaagtgatcgcccgggtgcgaatgtgggtgaacctgaacctgtggcagaagctgaagctaagcagagatgatgccaagcctctgctgagactgaagggattcccttcctttcctctggtcgagagacaggccaacgaagtggactggtgggacatggtgtgtaacgtgaagaagctgatcaacgagaaaaaggaggatggcaaggtgttttggcagaatctggctggctacaagagacaggaagccctgagaccatacctgagcagcgaggaagatcggaagaagggaaagaaattcgctcggtaccagctgggcgacctgctgctgcacctggaaaagaagcacggcgaggactggggaaaggtgtacgacgaggcctgggagcggattgacaagaaagtggaaggcctgagcaagcacatcaagctggaagaggaacggagaagcgaggacgcccagagcaaggccgccctgaccgactggctgcgggctaaggccagcttcgtgatcgagggcctgaaggaggccgacaaggacgagttctgcagatgcgagctgaagctgcagaagtggtacggggacctgcggggaaagcccttcgccatcgaagccgagaacagcatcctggacatcagcggcttcagcaagcagtacaactgtgccttcatctggcagaaggacggcgtgaagaagctgaacctgtacctgatcatcaactacttcaagggcggcaagctgcggttcaagaagatcaaacctgaagccttcgaagccaacagattctacaccgtgatcaacaaaaagagcggcgagatcgtgcccatggaggtgaacttcaacttcgacgaccccaacctgatcatcctgcctctggcctttggcaagagacagggcagagaattcatctggaacgacctgctgtccctggaaaccggcagcctgaagctggccaacggaagagtgatcgagaagacactgtacaacagaagaacccggcaggatgagcctgccctgttcgtggccctgaccttcgagcggcgggaggtcctggactcctccaatatcaaaccaatgaacctgatcggcgtggcaagaggcgaaaacatccccgccgtgatcgccctgaccgaccccgagggctgcccactgagccggtttaaggatagcctgggaaacccaacccacatcctgagaatcggcgagagctataaggagaagcagcggaccatccaggccaagaaggaggtggagcagcggagagccggcggctacagccggaagtacgccagcaaagccaagaatctggcagacgatatggtgagaaacaccgctagagatctgctgtactacgccgtgacccaggatgccatgctgatcttcgccaacctgagccggggcttcggccggcagggcaagcggaccttcatggccgagagacagtacacacggatggaggactggctgaccgccaagctggcctacgagggcctgagcaagacctacctgtccaagacactggcccagtacacctccaagacatgcagcaactgtgggtttaccatcaccagcgccgactacgacagggtgctggagaagctgaagaagacagcaacaggctggatgaccacaattaacggcaaggagctgaaggtggagggccagattacctactacaacagatacaagagacagaacgtagtcaaggacctgtccgtcgagctggatagactgagcgaagaatctgtgaacaacgacatctcctcctggacaaagggcagaagcggagaagctctgagcctcctgaagaaaagattctcccatagacccgtgcaggagaagttcgtgtgcctgaactgcggcttcgagacacacgcagccgagcaagccgccctgaacatcgccagatcctggctgttcctgcggagccaggagtacaagaaataccagacaaacaagacaaccggcaacaccgataagagagccttcgtcgagacctggcagtccttttaccggaagaagcttaaggaggtgtggaaacctgccgtgcggtctggcggatctggcggaggctccacaagcgccctgaggagcgtgatgttcagcgacgtgagcatcgacttcagccccgaggagtgggagtacctggacctggagcagaaggacctgtacagggacgtgatgctggagaactacagcaacctggtgagcctgggctgcttcatcagcaagcccgacgtgatcagcctgctggagcagggcaaggagccctggaaggtggtgaggaagggcaggaggcagtaccccgacctggagaccaagtacaccagccccaagaaaaagagaaaagtctaagctgccttctgcggggcttgccttctggccatgcccttcttctctcccttgcacctgtacctcttggtctttgaataaagcctgagtaggaaggctagcaaaaaaaaaaaaaaaaaaaaaaaaaaaaaaaaaaaaaaaaaaaaaaaaaaaaaaaaaaaaaaaaaaaaaaaaaaaaaaaa

SEQ ID NO: 4044 - RNA, 5419 nt, synthetic construct
  source 1..5419: mol_type = other RNA
aggaaataagagagaaaagaagagtaagaagaaatataagagccaccatggcccctaagaagaagcgtaaagtgagccgggtgaacggcagcggcagcggcggcggcatgaaccacgaccaggagttcgacccccctaaggtgtaccctcccgtccccgccgagaagagaaagcccatccgggtcctgagcctgttcgatggcatcgccaccggtctgctggtgctgaaggacctgggcatccaggtggataggtacattgcctccgaggtgtgcgaggactccatcaccgtgggaatggtgcgtcatcagggcaagatcatgtacgtgggcgacgtgcggagcgtgacacagaagcatatccaggagtggggccctttcgacctggtgatcggcggcagcccttgcaatgacctgagcatcgtgaacccagcccggaagggcctgtacgagggaaccggcagactgttcttcgagttttacagactgctgcacgacgcccggcctaaggaaggcgacgaccggcccttcttttggctgttcgagaatgtggtggccatgggagtcagcgacaagcgggatattagccggttcctggagagcaaccccgtgatgatcgatgccaaggaagtgagcgccgcccaccgggccagatacttctggggcaatctgcctggcatgaacagacccctggccagcaccgtgaacgacaagctggagctgcaggagtgcctggagcacggccggatcgccaagttcagcaaggtgagaaccatcaccacccgaagcaacagcatcaaacaaggcaaggaccagcactttcctgtgttcatgaacgagaaggaggacatcctgtggtgtaccgagatggagagagtgttcgggttcccagtccactacacagatgtcagcaacatgtctagactggccagacagagactgctgggaagaagctggtccgtccctgtgatcagacacctgttcgcccctctgaaggagtacttcgcctgcgtgagcagcggcaacagcaacgccaacagccggggccccagcttctctagcggcctggtgccactgtccctgagagggagccacatgggccccatggagatctacaaaaccgtgagcgcctggaagcggcagcctgtgcgcgtgctgagcctgtttcggaatatcgataaagtcctgaaaagcctgggattcctggagagcggctctggctccggcggtggcaccctgaagtacgtggaggatgtgacaaacgtggtcagacgggatgtggagaagtggggccccttcgatctggtgtacggcagcacccaacccctgggcagctcttgtgaccggtgccctggctggtacatgtttcagttccaccggatcctgcagtacgccctgccgagacaggagtcccagcggccattcttttggattttcatggacaacttgctgctgaccgaggatgaccaggaaactaccactcggttcctgcagaccgaagccgtgaccctgcaggacgtgagaggccgggactaccagaacgccatgcgggtgtggtccaacatccctggactgaaaagcaagcacgcacctctgacccctaaagaagaggagtacctgcaggcccaggtgcggagcagaagcaagctggacgcccctaaggtggatctgctggtgaagaattgcctcctgcccctgagagagtacttcaagtatttcagccagaatagtctgcccctgggcggcccaagcagcggcgcccctcctcccagcggcggcagcccagccggctccccaacctctaccgaggagggcacctctgagtccgccacccccgagagcggccctggcacctccaccgagcccagcgagggcagcgcacccggcagccctgccggcagccccacctccacagaggagggaaccagcaccgagcccagcgaaggcagcgccccaggcaccagcaccgagcctagtgagggcggctctggcggcggcagcgcccaggagattaaacggatcaacaagatcagaagaagacttgtgaaagacagcaacaccaagaaggccggcaagacaggccccatgaaaaccctgctggttagagtgatgacacccgatctgagagagcggctggaaaacctgagaaagaagcctgaaaatatcccccagcccatcagcaatacatctagagccaacctgaataagctgctgaccgattacaccgaaatgaagaaggcgatcctgcatgtgtactgggaagagttccagaaggaccctgtgggcctgatgagccgggtggcccagcctgccagcaagaagatcgatcagaacaagctgaaacctgagatggacgagaagggcaacctgaccaccgccggctttgcctgctctcagtgtggccagcccctgttcgtgtacaagctggagcaggtgtctgagaagggcaaggcttacaccaactacttcggacggtgcaatgtggccgagcacgaaaagctgatcctgctggcccagctgaagcccgagaaggatagcgacgaagccgtgacatatagcctgggaaagtttgggcagagggccctggatttctacagcattcatgtgaccaaggagtccacccaccccgtgaagcccctggcccagatcgccggaaacagatacgcctccggacctgtgggaaaggccctgagcgacgcatgtatgggcacaatcgcctccttcctgtctaagtaccaggacatcatcatcgaacaccagaaggtggtgaagggcaaccagaagagactggagagcctgcgggagctggccggcaaggaaaacctggaataccctagcgtgaccctgccacctcagcctcacaccaaggagggcgttgatgcctacaacgaagtgatcgcccgggtgcgaatgtgggtgaacctgaacctgtggcagaagctgaagctaagcagagatgatgccaagcctctgctgagactgaagggattcccttcctttcctctggtcgagagacaggccaacgaagtggactggtgggacatggtgtgtaacgtgaagaagctgatcaacgagaaaaaggaggatggcaaggtgttttggcagaatctggctggctacaagagacaggaagccctgagaccatacctgagcagcgaggaagatcggaagaagggaaagaaattcgctcggtaccagctgggcgacctgctgctgcacctggaaaagaagcacggcgaggactggggaaaggtgtacgacgaggcctgggagcggattgacaagaaagtggaaggcctgagcaagcacatcaagctggaagaggaacggagaagcgaggacgcccagagcaaggccgccctgaccgactggctgcgggctaaggccagcttcgtgatcgagggcctgaaggaggccgacaaggacgagttctgcagatgcgagctgaagctgcagaagtggtacggggacctgcggggaaagcccttcgccatcgaagccgagaacagcatcctggacatcagcggcttcagcaagcagtacaactgtgccttcatctggcagaaggacggcgtgaagaagctgaacctgtacctgatcatcaactacttcaagggcggcaagctgcggttcaagaagatcaaacctgaagccttcgaagccaacagattctacaccgtgatcaacaaaaagagcggcgagatcgtgcccatggaggtgaacttcaacttcgacgaccccaacctgatcatcctgcctctggcctttggcaagagacagggcagagaattcatctggaacgacctgctgtccctggaaaccggcagcctgaagctggccaacggaagagtgatcgagaagacactgtacaacagaagaacccggcaggatgagcctgccctgttcgtggccctgaccttcgagcggcgggaggtcctggactcctccaatatcaaaccaatgaacctgatcggcgtggcaagaggcgaaaacatccccgccgtgatcgccctgaccgaccccgagggctgcccactgagccggtttaaggatagcctgggaaacccaacccacatcctgagaatcggcgagagctataaggagaagcagcggaccatccaggccaagaaggaggtggagcagcggagagccggcggctacagccggaagtacgccagcaaagccaagaatctggcagacgatatggtgagaaacaccgctagagatctgctgtactacgccgtgacccaggatgccatgctgatcttcgccaacctgagccggggcttcggccggcagggcaagcggaccttcatggccgagagacagtacacacggatggaggactggctgaccgccaagctggcctacgagggcctgagcaagacctacctgtccaagacactggcccagtacacctccaagacatgcagcaactgtgggtttaccatcaccagcgccgactacgacagggtgctggagaagctgaagaagacagcaacaggctggatgaccacaattaacggcaaggagctgaaggtggagggccagattacctactacaacagatacaagagacagaacgtagtcaaggacctgtccgtcgagctggatagactgagcgaagaatctgtgaacaacgacatctcctcctggacaaagggcagaagcggagaagctctgagcctcctgaagaaaagattctcccatagacccgtgcaggagaagttcgtgtgcctgaactgcggcttcgagacacacgcagccgagcaagccgccctgaacatcgccagatcctggctgttcctgcggagccaggagtacaagaaataccagacaaacaagacaaccggcaacaccgataagagagccttcgtcgagacctggcagtccttttaccggaagaagcttaaggaggtgtggaaacctgccgtgcggtctggcggatctggcggaggctccacaagcgagcaggacgccgtgacctacgaggacgtgcacgtgaacttcacccacgaggagtgggccctgctggaccccagccagaagagcctgtacaaggacgtgatgatggagacctactggaacctgacctgcatcggctacaagtgggaggaccacaacatcgaggagcactgccagagctgcaggaggaacggcagcaggtgcgtgatctgccacagcggccacaacccctgcgagcacaagggcaccagccccaagaaaaagagaaaagtctaagctgccttctgcggggcttgccttctggccatgcccttcttctctcccttgcacctgtacctcttggtctttgaataaagcctgagtaggaaggctagcaaaaaaaaaaaaaaaaaaaaaaaaaaaaaaaaaaaaaaaaaaaaaaaaaaaaaaaaaaaaaaaaaaaaaaaaaaaaaaaa

SEQ ID NO: 4045 - RNA, 5419 nt, synthetic construct
  source 1..5419: mol_type = other RNA
aggaaataagagagaaaagaagagtaagaagaaatataagagccaccatggcccctaagaagaagcgtaaagtgagccgggtgaacggcagcggcagcggcggcggcatgaaccacgaccaggagttcgacccccctaaggtgtaccctcccgtccccgccgagaagagaaagcccatccgggtcctgagcctgttcgatggcatcgccaccggtctgctggtgctgaaggacctgggcatccaggtggataggtacattgcctccgaggtgtgcgaggactccatcaccgtgggaatggtgcgtcatcagggcaagatcatgtacgtgggcgacgtgcggagcgtgacacagaagcatatccaggagtggggccctttcgacctggtgatcggcggcagcccttgcaatgacctgagcatcgtgaacccagcccggaagggcctgtacgagggaaccggcagactgttcttcgagttttacagactgctgcacgacgcccggcctaaggaaggcgacgaccggcccttcttttggctgttcgagaatgtggtggccatgggagtcagcgacaagcgggatattagccggttcctggagagcaaccccgtgatgatcgatgccaaggaagtgagcgccgcccaccgggccagatacttctggggcaatctgcctggcatgaacagacccctggccagcaccgtgaacgacaagctggagctgcaggagtgcctggagcacggccggatcgccaagttcagcaaggtgagaaccatcaccacccgaagcaacagcatcaaacaaggcaaggaccagcactttcctgtgttcatgaacgagaaggaggacatcctgtggtgtaccgagatggagagagtgttcgggttcccagtccactacacagatgtcagcaacatgtctagactggccagacagagactgctgggaagaagctggtccgtccctgtgatcagacacctgttcgcccctctgaaggagtacttcgcctgcgtgagcagcggcaacagcaacgccaacagccggggccccagcttctctagcggcctggtgccactgtccctgagagggagccacatgggccccatggagatctacaaaaccgtgagcgcctggaagcggcagcctgtgcgcgtgctgagcctgtttcggaatatcgataaagtcctgaaaagcctgggattcctggagagcggctctggctccggcggtggcaccctgaagtacgtggaggatgtgacaaacgtggtcagacgggatgtggagaagtggggccccttcgatctggtgtacggcagcacccaacccctgggcagctcttgtgaccggtgccctggctggtacatgtttcagttccaccggatcctgcagtacgccctgccgagacaggagtcccagcggccattcttttggattttcatggacaacttgctgctgaccgaggatgaccaggaaactaccactcggttcctgcagaccgaagccgtgaccctgcaggacgtgagaggccgggactaccagaacgccatgcgggtgtggtccaacatccctggactgaaaagcaagcacgcacctctgacccctaaagaagaggagtacctgcaggcccaggtgcggagcagaagcaagctggacgcccctaaggtggatctgctggtgaagaattgcctcctgcccctgagagagtacttcaagtatttcagccagaatagtctgcccctgggcggcccaagcagcggcgcccctcctcccagcggcggcagcccagccggctccccaacctctaccgaggagggcacctctgagtccgccacccccgagagcggccctggcacctccaccgagcccagcgagggcagcgcacccggcagccctgccggcagccccacctccacagaggagggaaccagcaccgagcccagcgaaggcagcgccccaggcaccagcaccgagcctagtgagggcggctctggcggcggcagcgcccaggagattaaacggatcaacaagatcagaagaagacttgtgaaagacagcaacaccaagaaggccggcaagacaggccccatgaaaaccctgctggttagagtgatgacacccgatctgagagagcggctggaaaacctgagaaagaagcctgaaaatatcccccagcccatcagcaatacatctagagccaacctgaataagctgctgaccgattacaccgaaatgaagaaggcgatcctgcatgtgtactgggaagagttccagaaggaccctgtgggcctgatgagccgggtggcccagcctgccagcaagaagatcgatcagaacaagctgaaacctgagatggacgagaagggcaacctgaccaccgccggctttgcctgctctcagtgtggccagcccctgttcgtgtacaagctggagcaggtgtctgagaagggcaaggcttacaccaactacttcggacggtgcaatgtggccgagcacgaaaagctgatcctgctggcccagctgaagcccgagaaggatagcgacgaagccgtgacatatagcctgggaaagtttgggcagagggccctggatttctacagcattcatgtgaccaaggagtccacccaccccgtgaagcccctggcccagatcgccggaaacagatacgcctccggacctgtgggaaaggccctgagcgacgcatgtatgggcacaatcgcctccttcctgtctaagtaccaggacatcatcatcgaacaccagaaggtggtgaagggcaaccagaagagactggagagcctgcgggagctggccggcaaggaaaacctggaataccctagcgtgaccctgccacctcagcctcacaccaaggagggcgttgatgcctacaacgaagtgatcgcccgggtgcgaatgtgggtgaacctgaacctgtggcagaagctgaagctaagcagagatgatgccaagcctctgctgagactgaagggattcccttcctttcctctggtcgagagacaggccaacgaagtggactggtgggacatggtgtgtaacgtgaagaagctgatcaacgagaaaaaggaggatggcaaggtgttttggcagaatctggctggctacaagagacaggaagccctgagaccatacctgagcagcgaggaagatcggaagaagggaaagaaattcgctcggtaccagctgggcgacctgctgctgcacctggaaaagaagcacggcgaggactggggaaaggtgtacgacgaggcctgggagcggattgacaagaaagtggaaggcctgagcaagcacatcaagctggaagaggaacggagaagcgaggacgcccagagcaaggccgccctgaccgactggctgcgggctaaggccagcttcgtgatcgagggcctgaaggaggccgacaaggacgagttctgcagatgcgagctgaagctgcagaagtggtacggggacctgcggggaaagcccttcgccatcgaagccgagaacagcatcctggacatcagcggcttcagcaagcagtacaactgtgccttcatctggcagaaggacggcgtgaagaagctgaacctgtacctgatcatcaactacttcaagggcggcaagctgcggttcaagaagatcaaacctgaagccttcgaagccaacagattctacaccgtgatcaacaaaaagagcggcgagatcgtgcccatggaggtgaacttcaacttcgacgaccccaacctgatcatcctgcctctggcctttggcaagagacagggcagagaattcatctggaacgacctgctgtccctggaaaccggcagcctgaagctggccaacggaagagtgatcgagaagacactgtacaacagaagaacccggcaggatgagcctgccctgttcgtggccctgaccttcgagcggcgggaggtcctggactcctccaatatcaaaccaatgaacctgatcggcgtggcaagaggcgaaaacatccccgccgtgatcgccctgaccgaccccgagggctgcccactgagccggtttaaggatagcctgggaaacccaacccacatcctgagaatcggcgagagctataaggagaagcagcggaccatccaggccaagaaggaggtggagcagcggagagccggcggctacagccggaagtacgccagcaaagccaagaatctggcagacgatatggtgagaaacaccgctagagatctgctgtactacgccgtgacccaggatgccatgctgatcttcgccaacctgagccggggcttcggccggcagggcaagcggaccttcatggccgagagacagtacacacggatggaggactggctgaccgccaagctggcctacgagggcctgagcaagacctacctgtccaagacactggcccagtacacctccaagacatgcagcaactgtgggtttaccatcaccagcgccgactacgacagggtgctggagaagctgaagaagacagcaacaggctggatgaccacaattaacggcaaggagctgaaggtggagggccagattacctactacaacagatacaagagacagaacgtagtcaaggacctgtccgtcgagctggatagactgagcgaagaatctgtgaacaacgacatctcctcctggacaaagggcagaagcggagaagctctgagcctcctgaagaaaagattctcccatagacccgtgcaggagaagttcgtgtgcctgaactgcggcttcgagacacacgcagccgagcaagccgccctgaacatcgccagatcctggctgttcctgcggagccaggagtacaagaaataccagacaaacaagacaaccggcaacaccgataagagagccttcgtcgagacctggcagtccttttaccggaagaagcttaaggaggtgtggaaacctgccgtgcggtctggcggatctggcggaggctccacaagctgcaaggagagcgtgatcttcaaggacgtgtgcgtgaacttcagcctggaggagtgggagtgcctggacctgacccagaggaacctgtacaggtgcgtgatgctggagaactacagcaacctggtgagcgtggtgggcctgagcatccccaagcccgacgtgatcagcctgctggagcagggcaaggagccctggggcgtgttcgacagcgagatgaccaggggcctgaaccaggactgcggcaccagccccaagaaaaagagaaaagtctaagctgccttctgcggggcttgccttctggccatgcccttcttctctcccttgcacctgtacctcttggtctttgaataaagcctgagtaggaaggctagcaaaaaaaaaaaaaaaaaaaaaaaaaaaaaaaaaaaaaaaaaaaaaaaaaaaaaaaaaaaaaaaaaaaaaaaaaaaaaaaa

SEQ ID NO: 4046 - RNA, 5419 nt, synthetic construct
  source 1..5419: mol_type = other RNA
aggaaataagagagaaaagaagagtaagaagaaatataagagccaccatggcccctaagaagaagcgtaaagtgagccgggtgaacggcagcggcagcggcggcggcatgaaccacgaccaggagttcgacccccctaaggtgtaccctcccgtccccgccgagaagagaaagcccatccgggtcctgagcctgttcgatggcatcgccaccggtctgctggtgctgaaggacctgggcatccaggtggataggtacattgcctccgaggtgtgcgaggactccatcaccgtgggaatggtgcgtcatcagggcaagatcatgtacgtgggcgacgtgcggagcgtgacacagaagcatatccaggagtggggccctttcgacctggtgatcggcggcagcccttgcaatgacctgagcatcgtgaacccagcccggaagggcctgtacgagggaaccggcagactgttcttcgagttttacagactgctgcacgacgcccggcctaaggaaggcgacgaccggcccttcttttggctgttcgagaatgtggtggccatgggagtcagcgacaagcgggatattagccggttcctggagagcaaccccgtgatgatcgatgccaaggaagtgagcgccgcccaccgggccagatacttctggggcaatctgcctggcatgaacagacccctggccagcaccgtgaacgacaagctggagctgcaggagtgcctggagcacggccggatcgccaagttcagcaaggtgagaaccatcaccacccgaagcaacagcatcaaacaaggcaaggaccagcactttcctgtgttcatgaacgagaaggaggacatcctgtggtgtaccgagatggagagagtgttcgggttcccagtccactacacagatgtcagcaacatgtctagactggccagacagagactgctgggaagaagctggtccgtccctgtgatcagacacctgttcgcccctctgaaggagtacttcgcctgcgtgagcagcggcaacagcaacgccaacagccggggccccagcttctctagcggcctggtgccactgtccctgagagggagccacatgggccccatggagatctacaaaaccgtgagcgcctggaagcggcagcctgtgcgcgtgctgagcctgtttcggaatatcgataaagtcctgaaaagcctgggattcctggagagcggctctggctccggcggtggcaccctgaagtacgtggaggatgtgacaaacgtggtcagacgggatgtggagaagtggggccccttcgatctggtgtacggcagcacccaacccctgggcagctcttgtgaccggtgccctggctggtacatgtttcagttccaccggatcctgcagtacgccctgccgagacaggagtcccagcggccattcttttggattttcatggacaacttgctgctgaccgaggatgaccaggaaactaccactcggttcctgcagaccgaagccgtgaccctgcaggacgtgagaggccgggactaccagaacgccatgcgggtgtggtccaacatccctggactgaaaagcaagcacgcacctctgacccctaaagaagaggagtacctgcaggcccaggtgcggagcagaagcaagctggacgcccctaaggtggatctgctggtgaagaattgcctcctgcccctgagagagtacttcaagtatttcagccagaatagtctgcccctgggcggcccaagcagcggcgcccctcctcccagcggcggcagcccagccggctccccaacctctaccgaggagggcacctctgagtccgccacccccgagagcggccctggcacctccaccgagcccagcgagggcagcgcacccggcagccctgccggcagccccacctccacagaggagggaaccagcaccgagcccagcgaaggcagcgccccaggcaccagcaccgagcctagtgagggcggctctggcggcggcagcgcccaggagattaaacggatcaacaagatcagaagaagacttgtgaaagacagcaacaccaagaaggccggcaagacaggccccatgaaaaccctgctggttagagtgatgacacccgatctgagagagcggctggaaaacctgagaaagaagcctgaaaatatcccccagcccatcagcaatacatctagagccaacctgaataagctgctgaccgattacaccgaaatgaagaaggcgatcctgcatgtgtactgggaagagttccagaaggaccctgtgggcctgatgagccgggtggcccagcctgccagcaagaagatcgatcagaacaagctgaaacctgagatggacgagaagggcaacctgaccaccgccggctttgcctgctctcagtgtggccagcccctgttcgtgtacaagctggagcaggtgtctgagaagggcaaggcttacaccaactacttcggacggtgcaatgtggccgagcacgaaaagctgatcctgctggcccagctgaagcccgagaaggatagcgacgaagccgtgacatatagcctgggaaagtttgggcagagggccctggatttctacagcattcatgtgaccaaggagtccacccaccccgtgaagcccctggcccagatcgccggaaacagatacgcctccggacctgtgggaaaggccctgagcgacgcatgtatgggcacaatcgcctccttcctgtctaagtaccaggacatcatcatcgaacaccagaaggtggtgaagggcaaccagaagagactggagagcctgcgggagctggccggcaaggaaaacctggaataccctagcgtgaccctgccacctcagcctcacaccaaggagggcgttgatgcctacaacgaagtgatcgcccgggtgcgaatgtgggtgaacctgaacctgtggcagaagctgaagctaagcagagatgatgccaagcctctgctgagactgaagggattcccttcctttcctctggtcgagagacaggccaacgaagtggactggtgggacatggtgtgtaacgtgaagaagctgatcaacgagaaaaaggaggatggcaaggtgttttggcagaatctggctggctacaagagacaggaagccctgagaccatacctgagcagcgaggaagatcggaagaagggaaagaaattcgctcggtaccagctgggcgacctgctgctgcacctggaaaagaagcacggcgaggactggggaaaggtgtacgacgaggcctgggagcggattgacaagaaagtggaaggcctgagcaagcacatcaagctggaagaggaacggagaagcgaggacgcccagagcaaggccgccctgaccgactggctgcgggctaaggccagcttcgtgatcgagggcctgaaggaggccgacaaggacgagttctgcagatgcgagctgaagctgcagaagtggtacggggacctgcggggaaagcccttcgccatcgaagccgagaacagcatcctggacatcagcggcttcagcaagcagtacaactgtgccttcatctggcagaaggacggcgtgaagaagctgaacctgtacctgatcatcaactacttcaagggcggcaagctgcggttcaagaagatcaaacctgaagccttcgaagccaacagattctacaccgtgatcaacaaaaagagcggcgagatcgtgcccatggaggtgaacttcaacttcgacgaccccaacctgatcatcctgcctctggcctttggcaagagacagggcagagaattcatctggaacgacctgctgtccctggaaaccggcagcctgaagctggccaacggaagagtgatcgagaagacactgtacaacagaagaacccggcaggatgagcctgccctgttcgtggccctgaccttcgagcggcgggaggtcctggactcctccaatatcaaaccaatgaacctgatcggcgtggcaagaggcgaaaacatccccgccgtgatcgccctgaccgaccccgagggctgcccactgagccggtttaaggatagcctgggaaacccaacccacatcctgagaatcggcgagagctataaggagaagcagcggaccatccaggccaagaaggaggtggagcagcggagagccggcggctacagccggaagtacgccagcaaagccaagaatctggcagacgatatggtgagaaacaccgctagagatctgctgtactacgccgtgacccaggatgccatgctgatcttcgccaacctgagccggggcttcggccggcagggcaagcggaccttcatggccgagagacagtacacacggatggaggactggctgaccgccaagctggcctacgagggcctgagcaagacctacctgtccaagacactggcccagtacacctccaagacatgcagcaactgtgggtttaccatcaccagcgccgactacgacagggtgctggagaagctgaagaagacagcaacaggctggatgaccacaattaacggcaaggagctgaaggtggagggccagattacctactacaacagatacaagagacagaacgtagtcaaggacctgtccgtcgagctggatagactgagcgaagaatctgtgaacaacgacatctcctcctggacaaagggcagaagcggagaagctctgagcctcctgaagaaaagattctcccatagacccgtgcaggagaagttcgtgtgcctgaactgcggcttcgagacacacgcagccgagcaagccgccctgaacatcgccagatcctggctgttcctgcggagccaggagtacaagaaataccagacaaacaagacaaccggcaacaccgataagagagccttcgtcgagacctggcagtccttttaccggaagaagcttaaggaggtgtggaaacctgccgtgcggtctggcggatctggcggaggctccacaagcggcagggtgaccttcagggacgtggccgtggagttcagcctggccgagtggaagtgcctgaaccccgtgcagagggccctgtacagggaggtgatgctggagaactacaggaacctggagttcgtggacagcagcctgaagagcatgatggagttcagcagccacgagcacagcaacaccggcgagggcttccacaccggcaccctggagaggcacaagagctaccacatcggcgacttctggaccagccccaagaaaaagagaaaagtctaagctgccttctgcggggcttgccttctggccatgcccttcttctctcccttgcacctgtacctcttggtctttgaataaagcctgagtaggaaggctagcaaaaaaaaaaaaaaaaaaaaaaaaaaaaaaaaaaaaaaaaaaaaaaaaaaaaaaaaaaaaaaaaaaaaaaaaaaaaaaaa

SEQ ID NO: 4047 - RNA, 5419 nt, synthetic construct
  source 1..5419: mol_type = other RNA
aggaaataagagagaaaagaagagtaagaagaaatataagagccaccatggcccctaagaagaagcgtaaagtgagccgggtgaacggcagcggcagcggcggcggcatgaaccacgaccaggagttcgacccccctaaggtgtaccctcccgtccccgccgagaagagaaagcccatccgggtcctgagcctgttcgatggcatcgccaccggtctgctggtgctgaaggacctgggcatccaggtggataggtacattgcctccgaggtgtgcgaggactccatcaccgtgggaatggtgcgtcatcagggcaagatcatgtacgtgggcgacgtgcggagcgtgacacagaagcatatccaggagtggggccctttcgacctggtgatcggcggcagcccttgcaatgacctgagcatcgtgaacccagcccggaagggcctgtacgagggaaccggcagactgttcttcgagttttacagactgctgcacgacgcccggcctaaggaaggcgacgaccggcccttcttttggctgttcgagaatgtggtggccatgggagtcagcgacaagcgggatattagccggttcctggagagcaaccccgtgatgatcgatgccaaggaagtgagcgccgcccaccgggccagatacttctggggcaatctgcctggcatgaacagacccctggccagcaccgtgaacgacaagctggagctgcaggagtgcctggagcacggccggatcgccaagttcagcaaggtgagaaccatcaccacccgaagcaacagcatcaaacaaggcaaggaccagcactttcctgtgttcatgaacgagaaggaggacatcctgtggtgtaccgagatggagagagtgttcgggttcccagtccactacacagatgtcagcaacatgtctagactggccagacagagactgctgggaagaagctggtccgtccctgtgatcagacacctgttcgcccctctgaaggagtacttcgcctgcgtgagcagcggcaacagcaacgccaacagccggggccccagcttctctagcggcctggtgccactgtccctgagagggagccacatgggccccatggagatctacaaaaccgtgagcgcctggaagcggcagcctgtgcgcgtgctgagcctgtttcggaatatcgataaagtcctgaaaagcctgggattcctggagagcggctctggctccggcggtggcaccctgaagtacgtggaggatgtgacaaacgtggtcagacgggatgtggagaagtggggccccttcgatctggtgtacggcagcacccaacccctgggcagctcttgtgaccggtgccctggctggtacatgtttcagttccaccggatcctgcagtacgccctgccgagacaggagtcccagcggccattcttttggattttcatggacaacttgctgctgaccgaggatgaccaggaaactaccactcggttcctgcagaccgaagccgtgaccctgcaggacgtgagaggccgggactaccagaacgccatgcgggtgtggtccaacatccctggactgaaaagcaagcacgcacctctgacccctaaagaagaggagtacctgcaggcccaggtgcggagcagaagcaagctggacgcccctaaggtggatctgctggtgaagaattgcctcctgcccctgagagagtacttcaagtatttcagccagaatagtctgcccctgggcggcccaagcagcggcgcccctcctcccagcggcggcagcccagccggctccccaacctctaccgaggagggcacctctgagtccgccacccccgagagcggccctggcacctccaccgagcccagcgagggcagcgcacccggcagccctgccggcagccccacctccacagaggagggaaccagcaccgagcccagcgaaggcagcgccccaggcaccagcaccgagcctagtgagggcggctctggcggcggcagcgcccaggagattaaacggatcaacaagatcagaagaagacttgtgaaagacagcaacaccaagaaggccggcaagacaggccccatgaaaaccctgctggttagagtgatgacacccgatctgagagagcggctggaaaacctgagaaagaagcctgaaaatatcccccagcccatcagcaatacatctagagccaacctgaataagctgctgaccgattacaccgaaatgaagaaggcgatcctgcatgtgtactgggaagagttccagaaggaccctgtgggcctgatgagccgggtggcccagcctgccagcaagaagatcgatcagaacaagctgaaacctgagatggacgagaagggcaacctgaccaccgccggctttgcctgctctcagtgtggccagcccctgttcgtgtacaagctggagcaggtgtctgagaagggcaaggcttacaccaactacttcggacggtgcaatgtggccgagcacgaaaagctgatcctgctggcccagctgaagcccgagaaggatagcgacgaagccgtgacatatagcctgggaaagtttgggcagagggccctggatttctacagcattcatgtgaccaaggagtccacccaccccgtgaagcccctggcccagatcgccggaaacagatacgcctccggacctgtgggaaaggccctgagcgacgcatgtatgggcacaatcgcctccttcctgtctaagtaccaggacatcatcatcgaacaccagaaggtggtgaagggcaaccagaagagactggagagcctgcgggagctggccggcaaggaaaacctggaataccctagcgtgaccctgccacctcagcctcacaccaaggagggcgttgatgcctacaacgaagtgatcgcccgggtgcgaatgtgggtgaacctgaacctgtggcagaagctgaagctaagcagagatgatgccaagcctctgctgagactgaagggattcccttcctttcctctggtcgagagacaggccaacgaagtggactggtgggacatggtgtgtaacgtgaagaagctgatcaacgagaaaaaggaggatggcaaggtgttttggcagaatctggctggctacaagagacaggaagccctgagaccatacctgagcagcgaggaagatcggaagaagggaaagaaattcgctcggtaccagctgggcgacctgctgctgcacctggaaaagaagcacggcgaggactggggaaaggtgtacgacgaggcctgggagcggattgacaagaaagtggaaggcctgagcaagcacatcaagctggaagaggaacggagaagcgaggacgcccagagcaaggccgccctgaccgactggctgcgggctaaggccagcttcgtgatcgagggcctgaaggaggccgacaaggacgagttctgcagatgcgagctgaagctgcagaagtggtacggggacctgcggggaaagcccttcgccatcgaagccgagaacagcatcctggacatcagcggcttcagcaagcagtacaactgtgccttcatctggcagaaggacggcgtgaagaagctgaacctgtacctgatcatcaactacttcaagggcggcaagctgcggttcaagaagatcaaacctgaagccttcgaagccaacagattctacaccgtgatcaacaaaaagagcggcgagatcgtgcccatggaggtgaacttcaacttcgacgaccccaacctgatcatcctgcctctggcctttggcaagagacagggcagagaattcatctggaacgacctgctgtccctggaaaccggcagcctgaagctggccaacggaagagtgatcgagaagacactgtacaacagaagaacccggcaggatgagcctgccctgttcgtggccctgaccttcgagcggcgggaggtcctggactcctccaatatcaaaccaatgaacctgatcggcgtggcaagaggcgaaaacatccccgccgtgatcgccctgaccgaccccgagggctgcccactgagccggtttaaggatagcctgggaaacccaacccacatcctgagaatcggcgagagctataaggagaagcagcggaccatccaggccaagaaggaggtggagcagcggagagccggcggctacagccggaagtacgccagcaaagccaagaatctggcagacgatatggtgagaaacaccgctagagatctgctgtactacgccgtgacccaggatgccatgctgatcttcgccaacctgagccggggcttcggccggcagggcaagcggaccttcatggccgagagacagtacacacggatggaggactggctgaccgccaagctggcctacgagggcctgagcaagacctacctgtccaagacactggcccagtacacctccaagacatgcagcaactgtgggtttaccatcaccagcgccgactacgacagggtgctggagaagctgaagaagacagcaacaggctggatgaccacaattaacggcaaggagctgaaggtggagggccagattacctactacaacagatacaagagacagaacgtagtcaaggacctgtccgtcgagctggatagactgagcgaagaatctgtgaacaacgacatctcctcctggacaaagggcagaagcggagaagctctgagcctcctgaagaaaagattctcccatagacccgtgcaggagaagttcgtgtgcctgaactgcggcttcgagacacacgcagccgagcaagccgccctgaacatcgccagatcctggctgttcctgcggagccaggagtacaagaaataccagacaaacaagacaaccggcaacaccgataagagagccttcgtcgagacctggcagtccttttaccggaagaagcttaaggaggtgtggaaacctgccgtgcggtctggcggatctggcggaggctccacaagcggcaaggagctgctgagcttcgaggacgtggccatgtacttcaccagggaggagtggggccacctgaacctgggccagaaggacctgtacagggacgtgatgctggagaactacaggaacatggtgctgctgggcttccagttccccaagcccgaggtgatctgccagctggagaactgggacgagcagtggatcctggacctgcccagggccggcaacaggaaggccagcggcagcgcctgcaccagccccaagaaaaagagaaaagtctaagctgccttctgcggggcttgccttctggccatgcccttcttctctcccttgcacctgtacctcttggtctttgaataaagcctgagtaggaaggctagcaaaaaaaaaaaaaaaaaaaaaaaaaaaaaaaaaaaaaaaaaaaaaaaaaaaaaaaaaaaaaaaaaaaaaaaaaaaaaaaa

SEQ ID NO: 4048 - RNA, 5419 nt, synthetic construct
  source 1..5419: mol_type = other RNA
aggaaataagagagaaaagaagagtaagaagaaatataagagccaccatggcccctaagaagaagcgtaaagtgagccgggtgaacggcagcggcagcggcggcggcatgaaccacgaccaggagttcgacccccctaaggtgtaccctcccgtccccgccgagaagagaaagcccatccgggtcctgagcctgttcgatggcatcgccaccggtctgctggtgctgaaggacctgggcatccaggtggataggtacattgcctccgaggtgtgcgaggactccatcaccgtgggaatggtgcgtcatcagggcaagatcatgtacgtgggcgacgtgcggagcgtgacacagaagcatatccaggagtggggccctttcgacctggtgatcggcggcagcccttgcaatgacctgagcatcgtgaacccagcccggaagggcctgtacgagggaaccggcagactgttcttcgagttttacagactgctgcacgacgcccggcctaaggaaggcgacgaccggcccttcttttggctgttcgagaatgtggtggccatgggagtcagcgacaagcgggatattagccggttcctggagagcaaccccgtgatgatcgatgccaaggaagtgagcgccgcccaccgggccagatacttctggggcaatctgcctggcatgaacagacccctggccagcaccgtgaacgacaagctggagctgcaggagtgcctggagcacggccggatcgccaagttcagcaaggtgagaaccatcaccacccgaagcaacagcatcaaacaaggcaaggaccagcactttcctgtgttcatgaacgagaaggaggacatcctgtggtgtaccgagatggagagagtgttcgggttcccagtccactacacagatgtcagcaacatgtctagactggccagacagagactgctgggaagaagctggtccgtccctgtgatcagacacctgttcgcccctctgaaggagtacttcgcctgcgtgagcagcggcaacagcaacgccaacagccggggccccagcttctctagcggcctggtgccactgtccctgagagggagccacatgggccccatggagatctacaaaaccgtgagcgcctggaagcggcagcctgtgcgcgtgctgagcctgtttcggaatatcgataaagtcctgaaaagcctgggattcctggagagcggctctggctccggcggtggcaccctgaagtacgtggaggatgtgacaaacgtggtcagacgggatgtggagaagtggggccccttcgatctggtgtacggcagcacccaacccctgggcagctcttgtgaccggtgccctggctggtacatgtttcagttccaccggatcctgcagtacgccctgccgagacaggagtcccagcggccattcttttggattttcatggacaacttgctgctgaccgaggatgaccaggaaactaccactcggttcctgcagaccgaagccgtgaccctgcaggacgtgagaggccgggactaccagaacgccatgcgggtgtggtccaacatccctggactgaaaagcaagcacgcacctctgacccctaaagaagaggagtacctgcaggcccaggtgcggagcagaagcaagctggacgcccctaaggtggatctgctggtgaagaattgcctcctgcccctgagagagtacttcaagtatttcagccagaatagtctgcccctgggcggcccaagcagcggcgcccctcctcccagcggcggcagcccagccggctccccaacctctaccgaggagggcacctctgagtccgccacccccgagagcggccctggcacctccaccgagcccagcgagggcagcgcacccggcagccctgccggcagccccacctccacagaggagggaaccagcaccgagcccagcgaaggcagcgccccaggcaccagcaccgagcctagtgagggcggctctggcggcggcagcgcccaggagattaaacggatcaacaagatcagaagaagacttgtgaaagacagcaacaccaagaaggccggcaagacaggccccatgaaaaccctgctggttagagtgatgacacccgatctgagagagcggctggaaaacctgagaaagaagcctgaaaatatcccccagcccatcagcaatacatctagagccaacctgaataagctgctgaccgattacaccgaaatgaagaaggcgatcctgcatgtgtactgggaagagttccagaaggaccctgtgggcctgatgagccgggtggcccagcctgccagcaagaagatcgatcagaacaagctgaaacctgagatggacgagaagggcaacctgaccaccgccggctttgcctgctctcagtgtggccagcccctgttcgtgtacaagctggagcaggtgtctgagaagggcaaggcttacaccaactacttcggacggtgcaatgtggccgagcacgaaaagctgatcctgctggcccagctgaagcccgagaaggatagcgacgaagccgtgacatatagcctgggaaagtttgggcagagggccctggatttctacagcattcatgtgaccaaggagtccacccaccccgtgaagcccctggcccagatcgccggaaacagatacgcctccggacctgtgggaaaggccctgagcgacgcatgtatgggcacaatcgcctccttcctgtctaagtaccaggacatcatcatcgaacaccagaaggtggtgaagggcaaccagaagagactggagagcctgcgggagctggccggcaaggaaaacctggaataccctagcgtgaccctgccacctcagcctcacaccaaggagggcgttgatgcctacaacgaagtgatcgcccgggtgcgaatgtgggtgaacctgaacctgtggcagaagctgaagctaagcagagatgatgccaagcctctgctgagactgaagggattcccttcctttcctctggtcgagagacaggccaacgaagtggactggtgggacatggtgtgtaacgtgaagaagctgatcaacgagaaaaaggaggatggcaaggtgttttggcagaatctggctggctacaagagacaggaagccctgagaccatacctgagcagcgaggaagatcggaagaagggaaagaaattcgctcggtaccagctgggcgacctgctgctgcacctggaaaagaagcacggcgaggactggggaaaggtgtacgacgaggcctgggagcggattgacaagaaagtggaaggcctgagcaagcacatcaagctggaagaggaacggagaagcgaggacgcccagagcaaggccgccctgaccgactggctgcgggctaaggccagcttcgtgatcgagggcctgaaggaggccgacaaggacgagttctgcagatgcgagctgaagctgcagaagtggtacggggacctgcggggaaagcccttcgccatcgaagccgagaacagcatcctggacatcagcggcttcagcaagcagtacaactgtgccttcatctggcagaaggacggcgtgaagaagctgaacctgtacctgatcatcaactacttcaagggcggcaagctgcggttcaagaagatcaaacctgaagccttcgaagccaacagattctacaccgtgatcaacaaaaagagcggcgagatcgtgcccatggaggtgaacttcaacttcgacgaccccaacctgatcatcctgcctctggcctttggcaagagacagggcagagaattcatctggaacgacctgctgtccctggaaaccggcagcctgaagctggccaacggaagagtgatcgagaagacactgtacaacagaagaacccggcaggatgagcctgccctgttcgtggccctgaccttcgagcggcgggaggtcctggactcctccaatatcaaaccaatgaacctgatcggcgtggcaagaggcgaaaacatccccgccgtgatcgccctgaccgaccccgagggctgcccactgagccggtttaaggatagcctgggaaacccaacccacatcctgagaatcggcgagagctataaggagaagcagcggaccatccaggccaagaaggaggtggagcagcggagagccggcggctacagccggaagtacgccagcaaagccaagaatctggcagacgatatggtgagaaacaccgctagagatctgctgtactacgccgtgacccaggatgccatgctgatcttcgccaacctgagccggggcttcggccggcagggcaagcggaccttcatggccgagagacagtacacacggatggaggactggctgaccgccaagctggcctacgagggcctgagcaagacctacctgtccaagacactggcccagtacacctccaagacatgcagcaactgtgggtttaccatcaccagcgccgactacgacagggtgctggagaagctgaagaagacagcaacaggctggatgaccacaattaacggcaaggagctgaaggtggagggccagattacctactacaacagatacaagagacagaacgtagtcaaggacctgtccgtcgagctggatagactgagcgaagaatctgtgaacaacgacatctcctcctggacaaagggcagaagcggagaagctctgagcctcctgaagaaaagattctcccatagacccgtgcaggagaagttcgtgtgcctgaactgcggcttcgagacacacgcagccgagcaagccgccctgaacatcgccagatcctggctgttcctgcggagccaggagtacaagaaataccagacaaacaagacaaccggcaacaccgataagagagccttcgtcgagacctggcagtccttttaccggaagaagcttaaggaggtgtggaaacctgccgtgcggtctggcggatctggcggaggctccacaagccccctggagagcgtgaccttcgaggacgtggccgtggacttcacccaggaggagtggagcctgctggacaagagccagaagaacctgttcaggaacgtgatgctggagaccgtgacccacctggtgagcgtgggctaccagatcagcaagagcgacgtgatcttccagctggagcagggcaaggagctgtggcccgaggccgccggcggcctgcagggccagagccccgacgaggtgacccccaccagccccaagaaaaagagaaaagtctaagctgccttctgcggggcttgccttctggccatgcccttcttctctcccttgcacctgtacctcttggtctttgaataaagcctgagtaggaaggctagcaaaaaaaaaaaaaaaaaaaaaaaaaaaaaaaaaaaaaaaaaaaaaaaaaaaaaaaaaaaaaaaaaaaaaaaaaaaaaaaa

SEQ ID NO: 4049 - RNA, 5419 nt, synthetic construct
  source 1..5419: mol_type = other RNA
aggaaataagagagaaaagaagagtaagaagaaatataagagccaccatggcccctaagaagaagcgtaaagtgagccgggtgaacggcagcggcagcggcggcggcatgaaccacgaccaggagttcgacccccctaaggtgtaccctcccgtccccgccgagaagagaaagcccatccgggtcctgagcctgttcgatggcatcgccaccggtctgctggtgctgaaggacctgggcatccaggtggataggtacattgcctccgaggtgtgcgaggactccatcaccgtgggaatggtgcgtcatcagggcaagatcatgtacgtgggcgacgtgcggagcgtgacacagaagcatatccaggagtggggccctttcgacctggtgatcggcggcagcccttgcaatgacctgagcatcgtgaacccagcccggaagggcctgtacgagggaaccggcagactgttcttcgagttttacagactgctgcacgacgcccggcctaaggaaggcgacgaccggcccttcttttggctgttcgagaatgtggtggccatgggagtcagcgacaagcgggatattagccggttcctggagagcaaccccgtgatgatcgatgccaaggaagtgagcgccgcccaccgggccagatacttctggggcaatctgcctggcatgaacagacccctggccagcaccgtgaacgacaagctggagctgcaggagtgcctggagcacggccggatcgccaagttcagcaaggtgagaaccatcaccacccgaagcaacagcatcaaacaaggcaaggaccagcactttcctgtgttcatgaacgagaaggaggacatcctgtggtgtaccgagatggagagagtgttcgggttcccagtccactacacagatgtcagcaacatgtctagactggccagacagagactgctgggaagaagctggtccgtccctgtgatcagacacctgttcgcccctctgaaggagtacttcgcctgcgtgagcagcggcaacagcaacgccaacagccggggccccagcttctctagcggcctggtgccactgtccctgagagggagccacatgggccccatggagatctacaaaaccgtgagcgcctggaagcggcagcctgtgcgcgtgctgagcctgtttcggaatatcgataaagtcctgaaaagcctgggattcctggagagcggctctggctccggcggtggcaccctgaagtacgtggaggatgtgacaaacgtggtcagacgggatgtggagaagtggggccccttcgatctggtgtacggcagcacccaacccctgggcagctcttgtgaccggtgccctggctggtacatgtttcagttccaccggatcctgcagtacgccctgccgagacaggagtcccagcggccattcttttggattttcatggacaacttgctgctgaccgaggatgaccaggaaactaccactcggttcctgcagaccgaagccgtgaccctgcaggacgtgagaggccgggactaccagaacgccatgcgggtgtggtccaacatccctggactgaaaagcaagcacgcacctctgacccctaaagaagaggagtacctgcaggcccaggtgcggagcagaagcaagctggacgcccctaaggtggatctgctggtgaagaattgcctcctgcccctgagagagtacttcaagtatttcagccagaatagtctgcccctgggcggcccaagcagcggcgcccctcctcccagcggcggcagcccagccggctccccaacctctaccgaggagggcacctctgagtccgccacccccgagagcggccctggcacctccaccgagcccagcgagggcagcgcacccggcagccctgccggcagccccacctccacagaggagggaaccagcaccgagcccagcgaaggcagcgccccaggcaccagcaccgagcctagtgagggcggctctggcggcggcagcgcccaggagattaaacggatcaacaagatcagaagaagacttgtgaaagacagcaacaccaagaaggccggcaagacaggccccatgaaaaccctgctggttagagtgatgacacccgatctgagagagcggctggaaaacctgagaaagaagcctgaaaatatcccccagcccatcagcaatacatctagagccaacctgaataagctgctgaccgattacaccgaaatgaagaaggcgatcctgcatgtgtactgggaagagttccagaaggaccctgtgggcctgatgagccgggtggcccagcctgccagcaagaagatcgatcagaacaagctgaaacctgagatggacgagaagggcaacctgaccaccgccggctttgcctgctctcagtgtggccagcccctgttcgtgtacaagctggagcaggtgtctgagaagggcaaggcttacaccaactacttcggacggtgcaatgtggccgagcacgaaaagctgatcctgctggcccagctgaagcccgagaaggatagcgacgaagccgtgacatatagcctgggaaagtttgggcagagggccctggatttctacagcattcatgtgaccaaggagtccacccaccccgtgaagcccctggcccagatcgccggaaacagatacgcctccggacctgtgggaaaggccctgagcgacgcatgtatgggcacaatcgcctccttcctgtctaagtaccaggacatcatcatcgaacaccagaaggtggtgaagggcaaccagaagagactggagagcctgcgggagctggccggcaaggaaaacctggaataccctagcgtgaccctgccacctcagcctcacaccaaggagggcgttgatgcctacaacgaagtgatcgcccgggtgcgaatgtgggtgaacctgaacctgtggcagaagctgaagctaagcagagatgatgccaagcctctgctgagactgaagggattcccttcctttcctctggtcgagagacaggccaacgaagtggactggtgggacatggtgtgtaacgtgaagaagctgatcaacgagaaaaaggaggatggcaaggtgttttggcagaatctggctggctacaagagacaggaagccctgagaccatacctgagcagcgaggaagatcggaagaagggaaagaaattcgctcggtaccagctgggcgacctgctgctgcacctggaaaagaagcacggcgaggactggggaaaggtgtacgacgaggcctgggagcggattgacaagaaagtggaaggcctgagcaagcacatcaagctggaagaggaacggagaagcgaggacgcccagagcaaggccgccctgaccgactggctgcgggctaaggccagcttcgtgatcgagggcctgaaggaggccgacaaggacgagttctgcagatgcgagctgaagctgcagaagtggtacggggacctgcggggaaagcccttcgccatcgaagccgagaacagcatcctggacatcagcggcttcagcaagcagtacaactgtgccttcatctggcagaaggacggcgtgaagaagctgaacctgtacctgatcatcaactacttcaagggcggcaagctgcggttcaagaagatcaaacctgaagccttcgaagccaacagattctacaccgtgatcaacaaaaagagcggcgagatcgtgcccatggaggtgaacttcaacttcgacgaccccaacctgatcatcctgcctctggcctttggcaagagacagggcagagaattcatctggaacgacctgctgtccctggaaaccggcagcctgaagctggccaacggaagagtgatcgagaagacactgtacaacagaagaacccggcaggatgagcctgccctgttcgtggccctgaccttcgagcggcgggaggtcctggactcctccaatatcaaaccaatgaacctgatcggcgtggcaagaggcgaaaacatccccgccgtgatcgccctgaccgaccccgagggctgcccactgagccggtttaaggatagcctgggaaacccaacccacatcctgagaatcggcgagagctataaggagaagcagcggaccatccaggccaagaaggaggtggagcagcggagagccggcggctacagccggaagtacgccagcaaagccaagaatctggcagacgatatggtgagaaacaccgctagagatctgctgtactacgccgtgacccaggatgccatgctgatcttcgccaacctgagccggggcttcggccggcagggcaagcggaccttcatggccgagagacagtacacacggatggaggactggctgaccgccaagctggcctacgagggcctgagcaagacctacctgtccaagacactggcccagtacacctccaagacatgcagcaactgtgggtttaccatcaccagcgccgactacgacagggtgctggagaagctgaagaagacagcaacaggctggatgaccacaattaacggcaaggagctgaaggtggagggccagattacctactacaacagatacaagagacagaacgtagtcaaggacctgtccgtcgagctggatagactgagcgaagaatctgtgaacaacgacatctcctcctggacaaagggcagaagcggagaagctctgagcctcctgaagaaaagattctcccatagacccgtgcaggagaagttcgtgtgcctgaactgcggcttcgagacacacgcagccgagcaagccgccctgaacatcgccagatcctggctgttcctgcggagccaggagtacaagaaataccagacaaacaagacaaccggcaacaccgataagagagccttcgtcgagacctggcagtccttttaccggaagaagcttaaggaggtgtggaaacctgccgtgcggtctggcggatctggcggaggctccacaagcatggcccagggcctggtgaccttcagggacgtggccatcgagttcagcctggaggagtggaagtgcctggagcccgcccagagggacctgtacagggaggtgaccctggagaacttcggccacctggccagcctgggcctgagcatcagcaagcccgacgtggtgagcctgctggagcagggcaaggagccctggatgatcgccaacgacgtgaccggcccctggtaccccgacctggagagcaccagccccaagaaaaagagaaaagtctaagctgccttctgcggggcttgccttctggccatgcccttcttctctcccttgcacctgtacctcttggtctttgaataaagcctgagtaggaaggctagcaaaaaaaaaaaaaaaaaaaaaaaaaaaaaaaaaaaaaaaaaaaaaaaaaaaaaaaaaaaaaaaaaaaaaaaaaaaaaaaa

SEQ ID NO: 4050 - RNA, 5419 nt, synthetic construct
  source 1..5419: mol_type = other RNA
aggaaataagagagaaaagaagagtaagaagaaatataagagccaccatggcccctaagaagaagcgtaaagtgagccgggtgaacggcagcggcagcggcggcggcatgaaccacgaccaggagttcgacccccctaaggtgtaccctcccgtccccgccgagaagagaaagcccatccgggtcctgagcctgttcgatggcatcgccaccggtctgctggtgctgaaggacctgggcatccaggtggataggtacattgcctccgaggtgtgcgaggactccatcaccgtgggaatggtgcgtcatcagggcaagatcatgtacgtgggcgacgtgcggagcgtgacacagaagcatatccaggagtggggccctttcgacctggtgatcggcggcagcccttgcaatgacctgagcatcgtgaacccagcccggaagggcctgtacgagggaaccggcagactgttcttcgagttttacagactgctgcacgacgcccggcctaaggaaggcgacgaccggcccttcttttggctgttcgagaatgtggtggccatgggagtcagcgacaagcgggatattagccggttcctggagagcaaccccgtgatgatcgatgccaaggaagtgagcgccgcccaccgggccagatacttctggggcaatctgcctggcatgaacagacccctggccagcaccgtgaacgacaagctggagctgcaggagtgcctggagcacggccggatcgccaagttcagcaaggtgagaaccatcaccacccgaagcaacagcatcaaacaaggcaaggaccagcactttcctgtgttcatgaacgagaaggaggacatcctgtggtgtaccgagatggagagagtgttcgggttcccagtccactacacagatgtcagcaacatgtctagactggccagacagagactgctgggaagaagctggtccgtccctgtgatcagacacctgttcgcccctctgaaggagtacttcgcctgcgtgagcagcggcaacagcaacgccaacagccggggccccagcttctctagcggcctggtgccactgtccctgagagggagccacatgggccccatggagatctacaaaaccgtgagcgcctggaagcggcagcctgtgcgcgtgctgagcctgtttcggaatatcgataaagtcctgaaaagcctgggattcctggagagcggctctggctccggcggtggcaccctgaagtacgtggaggatgtgacaaacgtggtcagacgggatgtggagaagtggggccccttcgatctggtgtacggcagcacccaacccctgggcagctcttgtgaccggtgccctggctggtacatgtttcagttccaccggatcctgcagtacgccctgccgagacaggagtcccagcggccattcttttggattttcatggacaacttgctgctgaccgaggatgaccaggaaactaccactcggttcctgcagaccgaagccgtgaccctgcaggacgtgagaggccgggactaccagaacgccatgcgggtgtggtccaacatccctggactgaaaagcaagcacgcacctctgacccctaaagaagaggagtacctgcaggcccaggtgcggagcagaagcaagctggacgcccctaaggtggatctgctggtgaagaattgcctcctgcccctgagagagtacttcaagtatttcagccagaatagtctgcccctgggcggcccaagcagcggcgcccctcctcccagcggcggcagcccagccggctccccaacctctaccgaggagggcacctctgagtccgccacccccgagagcggccctggcacctccaccgagcccagcgagggcagcgcacccggcagccctgccggcagccccacctccacagaggagggaaccagcaccgagcccagcgaaggcagcgccccaggcaccagcaccgagcctagtgagggcggctctggcggcggcagcgcccaggagattaaacggatcaacaagatcagaagaagacttgtgaaagacagcaacaccaagaaggccggcaagacaggccccatgaaaaccctgctggttagagtgatgacacccgatctgagagagcggctggaaaacctgagaaagaagcctgaaaatatcccccagcccatcagcaatacatctagagccaacctgaataagctgctgaccgattacaccgaaatgaagaaggcgatcctgcatgtgtactgggaagagttccagaaggaccctgtgggcctgatgagccgggtggcccagcctgccagcaagaagatcgatcagaacaagctgaaacctgagatggacgagaagggcaacctgaccaccgccggctttgcctgctctcagtgtggccagcccctgttcgtgtacaagctggagcaggtgtctgagaagggcaaggcttacaccaactacttcggacggtgcaatgtggccgagcacgaaaagctgatcctgctggcccagctgaagcccgagaaggatagcgacgaagccgtgacatatagcctgggaaagtttgggcagagggccctggatttctacagcattcatgtgaccaaggagtccacccaccccgtgaagcccctggcccagatcgccggaaacagatacgcctccggacctgtgggaaaggccctgagcgacgcatgtatgggcacaatcgcctccttcctgtctaagtaccaggacatcatcatcgaacaccagaaggtggtgaagggcaaccagaagagactggagagcctgcgggagctggccggcaaggaaaacctggaataccctagcgtgaccctgccacctcagcctcacaccaaggagggcgttgatgcctacaacgaagtgatcgcccgggtgcgaatgtgggtgaacctgaacctgtggcagaagctgaagctaagcagagatgatgccaagcctctgctgagactgaagggattcccttcctttcctctggtcgagagacaggccaacgaagtggactggtgggacatggtgtgtaacgtgaagaagctgatcaacgagaaaaaggaggatggcaaggtgttttggcagaatctggctggctacaagagacaggaagccctgagaccatacctgagcagcgaggaagatcggaagaagggaaagaaattcgctcggtaccagctgggcgacctgctgctgcacctggaaaagaagcacggcgaggactggggaaaggtgtacgacgaggcctgggagcggattgacaagaaagtggaaggcctgagcaagcacatcaagctggaagaggaacggagaagcgaggacgcccagagcaaggccgccctgaccgactggctgcgggctaaggccagcttcgtgatcgagggcctgaaggaggccgacaaggacgagttctgcagatgcgagctgaagctgcagaagtggtacggggacctgcggggaaagcccttcgccatcgaagccgagaacagcatcctggacatcagcggcttcagcaagcagtacaactgtgccttcatctggcagaaggacggcgtgaagaagctgaacctgtacctgatcatcaactacttcaagggcggcaagctgcggttcaagaagatcaaacctgaagccttcgaagccaacagattctacaccgtgatcaacaaaaagagcggcgagatcgtgcccatggaggtgaacttcaacttcgacgaccccaacctgatcatcctgcctctggcctttggcaagagacagggcagagaattcatctggaacgacctgctgtccctggaaaccggcagcctgaagctggccaacggaagagtgatcgagaagacactgtacaacagaagaacccggcaggatgagcctgccctgttcgtggccctgaccttcgagcggcgggaggtcctggactcctccaatatcaaaccaatgaacctgatcggcgtggcaagaggcgaaaacatccccgccgtgatcgccctgaccgaccccgagggctgcccactgagccggtttaaggatagcctgggaaacccaacccacatcctgagaatcggcgagagctataaggagaagcagcggaccatccaggccaagaaggaggtggagcagcggagagccggcggctacagccggaagtacgccagcaaagccaagaatctggcagacgatatggtgagaaacaccgctagagatctgctgtactacgccgtgacccaggatgccatgctgatcttcgccaacctgagccggggcttcggccggcagggcaagcggaccttcatggccgagagacagtacacacggatggaggactggctgaccgccaagctggcctacgagggcctgagcaagacctacctgtccaagacactggcccagtacacctccaagacatgcagcaactgtgggtttaccatcaccagcgccgactacgacagggtgctggagaagctgaagaagacagcaacaggctggatgaccacaattaacggcaaggagctgaaggtggagggccagattacctactacaacagatacaagagacagaacgtagtcaaggacctgtccgtcgagctggatagactgagcgaagaatctgtgaacaacgacatctcctcctggacaaagggcagaagcggagaagctctgagcctcctgaagaaaagattctcccatagacccgtgcaggagaagttcgtgtgcctgaactgcggcttcgagacacacgcagccgagcaagccgccctgaacatcgccagatcctggctgttcctgcggagccaggagtacaagaaataccagacaaacaagacaaccggcaacaccgataagagagccttcgtcgagacctggcagtccttttaccggaagaagcttaaggaggtgtggaaacctgccgtgcggtctggcggatctggcggaggctccacaagcgcccagaaggtgctgaccttcagggacgtggccatcgagttcagcctggaggagtggaagttcctggaccccgcccagcagaacctgtacagggacgtgatgctggagaactacaggaacctgttcagcatcggcctgaccgtgagcaagcccggcctgatcacctgcctggagcagaggaaggccccctggaacctgaagaggagggaggccgtggacggccacatcttcttcgccgagtacaccagccccaagaaaaagagaaaagtctaagctgccttctgcggggcttgccttctggccatgcccttcttctctcccttgcacctgtacctcttggtctttgaataaagcctgagtaggaaggctagcaaaaaaaaaaaaaaaaaaaaaaaaaaaaaaaaaaaaaaaaaaaaaaaaaaaaaaaaaaaaaaaaaaaaaaaaaaaaaaaa

SEQ ID NO: 4051 - RNA, 5419 nt, synthetic construct
  source 1..5419: mol_type = other RNA
aggaaataagagagaaaagaagagtaagaagaaatataagagccaccatggcccctaagaagaagcgtaaagtgagccgggtgaacggcagcggcagcggcggcggcatgaaccacgaccaggagttcgacccccctaaggtgtaccctcccgtccccgccgagaagagaaagcccatccgggtcctgagcctgttcgatggcatcgccaccggtctgctggtgctgaaggacctgggcatccaggtggataggtacattgcctccgaggtgtgcgaggactccatcaccgtgggaatggtgcgtcatcagggcaagatcatgtacgtgggcgacgtgcggagcgtgacacagaagcatatccaggagtggggccctttcgacctggtgatcggcggcagcccttgcaatgacctgagcatcgtgaacccagcccggaagggcctgtacgagggaaccggcagactgttcttcgagttttacagactgctgcacgacgcccggcctaaggaaggcgacgaccggcccttcttttggctgttcgagaatgtggtggccatgggagtcagcgacaagcgggatattagccggttcctggagagcaaccccgtgatgatcgatgccaaggaagtgagcgccgcccaccgggccagatacttctggggcaatctgcctggcatgaacagacccctggccagcaccgtgaacgacaagctggagctgcaggagtgcctggagcacggccggatcgccaagttcagcaaggtgagaaccatcaccacccgaagcaacagcatcaaacaaggcaaggaccagcactttcctgtgttcatgaacgagaaggaggacatcctgtggtgtaccgagatggagagagtgttcgggttcccagtccactacacagatgtcagcaacatgtctagactggccagacagagactgctgggaagaagctggtccgtccctgtgatcagacacctgttcgcccctctgaaggagtacttcgcctgcgtgagcagcggcaacagcaacgccaacagccggggccccagcttctctagcggcctggtgccactgtccctgagagggagccacatgggccccatggagatctacaaaaccgtgagcgcctggaagcggcagcctgtgcgcgtgctgagcctgtttcggaatatcgataaagtcctgaaaagcctgggattcctggagagcggctctggctccggcggtggcaccctgaagtacgtggaggatgtgacaaacgtggtcagacgggatgtggagaagtggggccccttcgatctggtgtacggcagcacccaacccctgggcagctcttgtgaccggtgccctggctggtacatgtttcagttccaccggatcctgcagtacgccctgccgagacaggagtcccagcggccattcttttggattttcatggacaacttgctgctgaccgaggatgaccaggaaactaccactcggttcctgcagaccgaagccgtgaccctgcaggacgtgagaggccgggactaccagaacgccatgcgggtgtggtccaacatccctggactgaaaagcaagcacgcacctctgacccctaaagaagaggagtacctgcaggcccaggtgcggagcagaagcaagctggacgcccctaaggtggatctgctggtgaagaattgcctcctgcccctgagagagtacttcaagtatttcagccagaatagtctgcccctgggcggcccaagcagcggcgcccctcctcccagcggcggcagcccagccggctccccaacctctaccgaggagggcacctctgagtccgccacccccgagagcggccctggcacctccaccgagcccagcgagggcagcgcacccggcagccctgccggcagccccacctccacagaggagggaaccagcaccgagcccagcgaaggcagcgccccaggcaccagcaccgagcctagtgagggcggctctggcggcggcagcgcccaggagattaaacggatcaacaagatcagaagaagacttgtgaaagacagcaacaccaagaaggccggcaagacaggccccatgaaaaccctgctggttagagtgatgacacccgatctgagagagcggctggaaaacctgagaaagaagcctgaaaatatcccccagcccatcagcaatacatctagagccaacctgaataagctgctgaccgattacaccgaaatgaagaaggcgatcctgcatgtgtactgggaagagttccagaaggaccctgtgggcctgatgagccgggtggcccagcctgccagcaagaagatcgatcagaacaagctgaaacctgagatggacgagaagggcaacctgaccaccgccggctttgcctgctctcagtgtggccagcccctgttcgtgtacaagctggagcaggtgtctgagaagggcaaggcttacaccaactacttcggacggtgcaatgtggccgagcacgaaaagctgatcctgctggcccagctgaagcccgagaaggatagcgacgaagccgtgacatatagcctgggaaagtttgggcagagggccctggatttctacagcattcatgtgaccaaggagtccacccaccccgtgaagcccctggcccagatcgccggaaacagatacgcctccggacctgtgggaaaggccctgagcgacgcatgtatgggcacaatcgcctccttcctgtctaagtaccaggacatcatcatcgaacaccagaaggtggtgaagggcaaccagaagagactggagagcctgcgggagctggccggcaaggaaaacctggaataccctagcgtgaccctgccacctcagcctcacaccaaggagggcgttgatgcctacaacgaagtgatcgcccgggtgcgaatgtgggtgaacctgaacctgtggcagaagctgaagctaagcagagatgatgccaagcctctgctgagactgaagggattcccttcctttcctctggtcgagagacaggccaacgaagtggactggtgggacatggtgtgtaacgtgaagaagctgatcaacgagaaaaaggaggatggcaaggtgttttggcagaatctggctggctacaagagacaggaagccctgagaccatacctgagcagcgaggaagatcggaagaagggaaagaaattcgctcggtaccagctgggcgacctgctgctgcacctggaaaagaagcacggcgaggactggggaaaggtgtacgacgaggcctgggagcggattgacaagaaagtggaaggcctgagcaagcacatcaagctggaagaggaacggagaagcgaggacgcccagagcaaggccgccctgaccgactggctgcgggctaaggccagcttcgtgatcgagggcctgaaggaggccgacaaggacgagttctgcagatgcgagctgaagctgcagaagtggtacggggacctgcggggaaagcccttcgccatcgaagccgagaacagcatcctggacatcagcggcttcagcaagcagtacaactgtgccttcatctggcagaaggacggcgtgaagaagctgaacctgtacctgatcatcaactacttcaagggcggcaagctgcggttcaagaagatcaaacctgaagccttcgaagccaacagattctacaccgtgatcaacaaaaagagcggcgagatcgtgcccatggaggtgaacttcaacttcgacgaccccaacctgatcatcctgcctctggcctttggcaagagacagggcagagaattcatctggaacgacctgctgtccctggaaaccggcagcctgaagctggccaacggaagagtgatcgagaagacactgtacaacagaagaacccggcaggatgagcctgccctgttcgtggccctgaccttcgagcggcgggaggtcctggactcctccaatatcaaaccaatgaacctgatcggcgtggcaagaggcgaaaacatccccgccgtgatcgccctgaccgaccccgagggctgcccactgagccggtttaaggatagcctgggaaacccaacccacatcctgagaatcggcgagagctataaggagaagcagcggaccatccaggccaagaaggaggtggagcagcggagagccggcggctacagccggaagtacgccagcaaagccaagaatctggcagacgatatggtgagaaacaccgctagagatctgctgtactacgccgtgacccaggatgccatgctgatcttcgccaacctgagccggggcttcggccggcagggcaagcggaccttcatggccgagagacagtacacacggatggaggactggctgaccgccaagctggcctacgagggcctgagcaagacctacctgtccaagacactggcccagtacacctccaagacatgcagcaactgtgggtttaccatcaccagcgccgactacgacagggtgctggagaagctgaagaagacagcaacaggctggatgaccacaattaacggcaaggagctgaaggtggagggccagattacctactacaacagatacaagagacagaacgtagtcaaggacctgtccgtcgagctggatagactgagcgaagaatctgtgaacaacgacatctcctcctggacaaagggcagaagcggagaagctctgagcctcctgaagaaaagattctcccatagacccgtgcaggagaagttcgtgtgcctgaactgcggcttcgagacacacgcagccgagcaagccgccctgaacatcgccagatcctggctgttcctgcggagccaggagtacaagaaataccagacaaacaagacaaccggcaacaccgataagagagccttcgtcgagacctggcagtccttttaccggaagaagcttaaggaggtgtggaaacctgccgtgcggtctggcggatctggcggaggctccacaagcaccatgaccaccgtgagcagcaccgccaggccccaggagagcgtggccttcgacgacgtggccgtgtacttcaccaagaaggagtgggccatcatggtgcccgaccagagggccctgtacagggacgtgatgctggagaactacgaggccgtggccttcgtggtgccccccaccagcaagcccgccctgatcagccacctggagcagggcaaggagccctgcttcacccagccccagggcgtgaccagccccaagaaaaagagaaaagtctaagctgccttctgcggggcttgccttctggccatgcccttcttctctcccttgcacctgtacctcttggtctttgaataaagcctgagtaggaaggctagcaaaaaaaaaaaaaaaaaaaaaaaaaaaaaaaaaaaaaaaaaaaaaaaaaaaaaaaaaaaaaaaaaaaaaaaaaaaaaaaa

SEQ ID NO: 4052 - RNA, 5419 nt, synthetic construct
  source 1..5419: mol_type = other RNA
aggaaataagagagaaaagaagagtaagaagaaatataagagccaccatggcccctaagaagaagcgtaaagtgagccgggtgaacggcagcggcagcggcggcggcatgaaccacgaccaggagttcgacccccctaaggtgtaccctcccgtccccgccgagaagagaaagcccatccgggtcctgagcctgttcgatggcatcgccaccggtctgctggtgctgaaggacctgggcatccaggtggataggtacattgcctccgaggtgtgcgaggactccatcaccgtgggaatggtgcgtcatcagggcaagatcatgtacgtgggcgacgtgcggagcgtgacacagaagcatatccaggagtggggccctttcgacctggtgatcggcggcagcccttgcaatgacctgagcatcgtgaacccagcccggaagggcctgtacgagggaaccggcagactgttcttcgagttttacagactgctgcacgacgcccggcctaaggaaggcgacgaccggcccttcttttggctgttcgagaatgtggtggccatgggagtcagcgacaagcgggatattagccggttcctggagagcaaccccgtgatgatcgatgccaaggaagtgagcgccgcccaccgggccagatacttctggggcaatctgcctggcatgaacagacccctggccagcaccgtgaacgacaagctggagctgcaggagtgcctggagcacggccggatcgccaagttcagcaaggtgagaaccatcaccacccgaagcaacagcatcaaacaaggcaaggaccagcactttcctgtgttcatgaacgagaaggaggacatcctgtggtgtaccgagatggagagagtgttcgggttcccagtccactacacagatgtcagcaacatgtctagactggccagacagagactgctgggaagaagctggtccgtccctgtgatcagacacctgttcgcccctctgaaggagtacttcgcctgcgtgagcagcggcaacagcaacgccaacagccggggccccagcttctctagcggcctggtgccactgtccctgagagggagccacatgggccccatggagatctacaaaaccgtgagcgcctggaagcggcagcctgtgcgcgtgctgagcctgtttcggaatatcgataaagtcctgaaaagcctgggattcctggagagcggctctggctccggcggtggcaccctgaagtacgtggaggatgtgacaaacgtggtcagacgggatgtggagaagtggggccccttcgatctggtgtacggcagcacccaacccctgggcagctcttgtgaccggtgccctggctggtacatgtttcagttccaccggatcctgcagtacgccctgccgagacaggagtcccagcggccattcttttggattttcatggacaacttgctgctgaccgaggatgaccaggaaactaccactcggttcctgcagaccgaagccgtgaccctgcaggacgtgagaggccgggactaccagaacgccatgcgggtgtggtccaacatccctggactgaaaagcaagcacgcacctctgacccctaaagaagaggagtacctgcaggcccaggtgcggagcagaagcaagctggacgcccctaaggtggatctgctggtgaagaattgcctcctgcccctgagagagtacttcaagtatttcagccagaatagtctgcccctgggcggcccaagcagcggcgcccctcctcccagcggcggcagcccagccggctccccaacctctaccgaggagggcacctctgagtccgccacccccgagagcggccctggcacctccaccgagcccagcgagggcagcgcacccggcagccctgccggcagccccacctccacagaggagggaaccagcaccgagcccagcgaaggcagcgccccaggcaccagcaccgagcctagtgagggcggctctggcggcggcagcgcccaggagattaaacggatcaacaagatcagaagaagacttgtgaaagacagcaacaccaagaaggccggcaagacaggccccatgaaaaccctgctggttagagtgatgacacccgatctgagagagcggctggaaaacctgagaaagaagcctgaaaatatcccccagcccatcagcaatacatctagagccaacctgaataagctgctgaccgattacaccgaaatgaagaaggcgatcctgcatgtgtactgggaagagttccagaaggaccctgtgggcctgatgagccgggtggcccagcctgccagcaagaagatcgatcagaacaagctgaaacctgagatggacgagaagggcaacctgaccaccgccggctttgcctgctctcagtgtggccagcccctgttcgtgtacaagctggagcaggtgtctgagaagggcaaggcttacaccaactacttcggacggtgcaatgtggccgagcacgaaaagctgatcctgctggcccagctgaagcccgagaaggatagcgacgaagccgtgacatatagcctgggaaagtttgggcagagggccctggatttctacagcattcatgtgaccaaggagtccacccaccccgtgaagcccctggcccagatcgccggaaacagatacgcctccggacctgtgggaaaggccctgagcgacgcatgtatgggcacaatcgcctccttcctgtctaagtaccaggacatcatcatcgaacaccagaaggtggtgaagggcaaccagaagagactggagagcctgcgggagctggccggcaaggaaaacctggaataccctagcgtgaccctgccacctcagcctcacaccaaggagggcgttgatgcctacaacgaagtgatcgcccgggtgcgaatgtgggtgaacctgaacctgtggcagaagctgaagctaagcagagatgatgccaagcctctgctgagactgaagggattcccttcctttcctctggtcgagagacaggccaacgaagtggactggtgggacatggtgtgtaacgtgaagaagctgatcaacgagaaaaaggaggatggcaaggtgttttggcagaatctggctggctacaagagacaggaagccctgagaccatacctgagcagcgaggaagatcggaagaagggaaagaaattcgctcggtaccagctgggcgacctgctgctgcacctggaaaagaagcacggcgaggactggggaaaggtgtacgacgaggcctgggagcggattgacaagaaagtggaaggcctgagcaagcacatcaagctggaagaggaacggagaagcgaggacgcccagagcaaggccgccctgaccgactggctgcgggctaaggccagcttcgtgatcgagggcctgaaggaggccgacaaggacgagttctgcagatgcgagctgaagctgcagaagtggtacggggacctgcggggaaagcccttcgccatcgaagccgagaacagcatcctggacatcagcggcttcagcaagcagtacaactgtgccttcatctggcagaaggacggcgtgaagaagctgaacctgtacctgatcatcaactacttcaagggcggcaagctgcggttcaagaagatcaaacctgaagccttcgaagccaacagattctacaccgtgatcaacaaaaagagcggcgagatcgtgcccatggaggtgaacttcaacttcgacgaccccaacctgatcatcctgcctctggcctttggcaagagacagggcagagaattcatctggaacgacctgctgtccctggaaaccggcagcctgaagctggccaacggaagagtgatcgagaagacactgtacaacagaagaacccggcaggatgagcctgccctgttcgtggccctgaccttcgagcggcgggaggtcctggactcctccaatatcaaaccaatgaacctgatcggcgtggcaagaggcgaaaacatccccgccgtgatcgccctgaccgaccccgagggctgcccactgagccggtttaaggatagcctgggaaacccaacccacatcctgagaatcggcgagagctataaggagaagcagcggaccatccaggccaagaaggaggtggagcagcggagagccggcggctacagccggaagtacgccagcaaagccaagaatctggcagacgatatggtgagaaacaccgctagagatctgctgtactacgccgtgacccaggatgccatgctgatcttcgccaacctgagccggggcttcggccggcagggcaagcggaccttcatggccgagagacagtacacacggatggaggactggctgaccgccaagctggcctacgagggcctgagcaagacctacctgtccaagacactggcccagtacacctccaagacatgcagcaactgtgggtttaccatcaccagcgccgactacgacagggtgctggagaagctgaagaagacagcaacaggctggatgaccacaattaacggcaaggagctgaaggtggagggccagattacctactacaacagatacaagagacagaacgtagtcaaggacctgtccgtcgagctggatagactgagcgaagaatctgtgaacaacgacatctcctcctggacaaagggcagaagcggagaagctctgagcctcctgaagaaaagattctcccatagacccgtgcaggagaagttcgtgtgcctgaactgcggcttcgagacacacgcagccgagcaagccgccctgaacatcgccagatcctggctgttcctgcggagccaggagtacaagaaataccagacaaacaagacaaccggcaacaccgataagagagccttcgtcgagacctggcagtccttttaccggaagaagcttaaggaggtgtggaaacctgccgtgcggtctggcggatctggcggaggctccacaagcatgagccaggtgaccttcagcgacgtggccatcgacttcagccacgaggagtgggcctgcctggacagcgcccagagggacctgtacaaggacgtgatggtgcagaactacgagaacctggtgagcgtgggcctgagcgtgaccaagccctacgtgatcatgctgctggaggacggcaaggagccctggatgatggagaagaagctgagcaaggactgggagagcaggtgggagaacaaggagaccagccccaagaaaaagagaaaagtctaagctgccttctgcggggcttgccttctggccatgcccttcttctctcccttgcacctgtacctcttggtctttgaataaagcctgagtaggaaggctagcaaaaaaaaaaaaaaaaaaaaaaaaaaaaaaaaaaaaaaaaaaaaaaaaaaaaaaaaaaaaaaaaaaaaaaaaaaaaaaaa

SEQ ID NO: 4053 - RNA, 5419 nt, synthetic construct
  source 1..5419: mol_type = other RNA
aggaaataagagagaaaagaagagtaagaagaaatataagagccaccatggcccctaagaagaagcgtaaagtgagccgggtgaacggcagcggcagcggcggcggcatgaaccacgaccaggagttcgacccccctaaggtgtaccctcccgtccccgccgagaagagaaagcccatccgggtcctgagcctgttcgatggcatcgccaccggtctgctggtgctgaaggacctgggcatccaggtggataggtacattgcctccgaggtgtgcgaggactccatcaccgtgggaatggtgcgtcatcagggcaagatcatgtacgtgggcgacgtgcggagcgtgacacagaagcatatccaggagtggggccctttcgacctggtgatcggcggcagcccttgcaatgacctgagcatcgtgaacccagcccggaagggcctgtacgagggaaccggcagactgttcttcgagttttacagactgctgcacgacgcccggcctaaggaaggcgacgaccggcccttcttttggctgttcgagaatgtggtggccatgggagtcagcgacaagcgggatattagccggttcctggagagcaaccccgtgatgatcgatgccaaggaagtgagcgccgcccaccgggccagatacttctggggcaatctgcctggcatgaacagacccctggccagcaccgtgaacgacaagctggagctgcaggagtgcctggagcacggccggatcgccaagttcagcaaggtgagaaccatcaccacccgaagcaacagcatcaaacaaggcaaggaccagcactttcctgtgttcatgaacgagaaggaggacatcctgtggtgtaccgagatggagagagtgttcgggttcccagtccactacacagatgtcagcaacatgtctagactggccagacagagactgctgggaagaagctggtccgtccctgtgatcagacacctgttcgcccctctgaaggagtacttcgcctgcgtgagcagcggcaacagcaacgccaacagccggggccccagcttctctagcggcctggtgccactgtccctgagagggagccacatgggccccatggagatctacaaaaccgtgagcgcctggaagcggcagcctgtgcgcgtgctgagcctgtttcggaatatcgataaagtcctgaaaagcctgggattcctggagagcggctctggctccggcggtggcaccctgaagtacgtggaggatgtgacaaacgtggtcagacgggatgtggagaagtggggccccttcgatctggtgtacggcagcacccaacccctgggcagctcttgtgaccggtgccctggctggtacatgtttcagttccaccggatcctgcagtacgccctgccgagacaggagtcccagcggccattcttttggattttcatggacaacttgctgctgaccgaggatgaccaggaaactaccactcggttcctgcagaccgaagccgtgaccctgcaggacgtgagaggccgggactaccagaacgccatgcgggtgtggtccaacatccctggactgaaaagcaagcacgcacctctgacccctaaagaagaggagtacctgcaggcccaggtgcggagcagaagcaagctggacgcccctaaggtggatctgctggtgaagaattgcctcctgcccctgagagagtacttcaagtatttcagccagaatagtctgcccctgggcggcccaagcagcggcgcccctcctcccagcggcggcagcccagccggctccccaacctctaccgaggagggcacctctgagtccgccacccccgagagcggccctggcacctccaccgagcccagcgagggcagcgcacccggcagccctgccggcagccccacctccacagaggagggaaccagcaccgagcccagcgaaggcagcgccccaggcaccagcaccgagcctagtgagggcggctctggcggcggcagcgcccaggagattaaacggatcaacaagatcagaagaagacttgtgaaagacagcaacaccaagaaggccggcaagacaggccccatgaaaaccctgctggttagagtgatgacacccgatctgagagagcggctggaaaacctgagaaagaagcctgaaaatatcccccagcccatcagcaatacatctagagccaacctgaataagctgctgaccgattacaccgaaatgaagaaggcgatcctgcatgtgtactgggaagagttccagaaggaccctgtgggcctgatgagccgggtggcccagcctgccagcaagaagatcgatcagaacaagctgaaacctgagatggacgagaagggcaacctgaccaccgccggctttgcctgctctcagtgtggccagcccctgttcgtgtacaagctggagcaggtgtctgagaagggcaaggcttacaccaactacttcggacggtgcaatgtggccgagcacgaaaagctgatcctgctggcccagctgaagcccgagaaggatagcgacgaagccgtgacatatagcctgggaaagtttgggcagagggccctggatttctacagcattcatgtgaccaaggagtccacccaccccgtgaagcccctggcccagatcgccggaaacagatacgcctccggacctgtgggaaaggccctgagcgacgcatgtatgggcacaatcgcctccttcctgtctaagtaccaggacatcatcatcgaacaccagaaggtggtgaagggcaaccagaagagactggagagcctgcgggagctggccggcaaggaaaacctggaataccctagcgtgaccctgccacctcagcctcacaccaaggagggcgttgatgcctacaacgaagtgatcgcccgggtgcgaatgtgggtgaacctgaacctgtggcagaagctgaagctaagcagagatgatgccaagcctctgctgagactgaagggattcccttcctttcctctggtcgagagacaggccaacgaagtggactggtgggacatggtgtgtaacgtgaagaagctgatcaacgagaaaaaggaggatggcaaggtgttttggcagaatctggctggctacaagagacaggaagccctgagaccatacctgagcagcgaggaagatcggaagaagggaaagaaattcgctcggtaccagctgggcgacctgctgctgcacctggaaaagaagcacggcgaggactggggaaaggtgtacgacgaggcctgggagcggattgacaagaaagtggaaggcctgagcaagcacatcaagctggaagaggaacggagaagcgaggacgcccagagcaaggccgccctgaccgactggctgcgggctaaggccagcttcgtgatcgagggcctgaaggaggccgacaaggacgagttctgcagatgcgagctgaagctgcagaagtggtacggggacctgcggggaaagcccttcgccatcgaagccgagaacagcatcctggacatcagcggcttcagcaagcagtacaactgtgccttcatctggcagaaggacggcgtgaagaagctgaacctgtacctgatcatcaactacttcaagggcggcaagctgcggttcaagaagatcaaacctgaagccttcgaagccaacagattctacaccgtgatcaacaaaaagagcggcgagatcgtgcccatggaggtgaacttcaacttcgacgaccccaacctgatcatcctgcctctggcctttggcaagagacagggcagagaattcatctggaacgacctgctgtccctggaaaccggcagcctgaagctggccaacggaagagtgatcgagaagacactgtacaacagaagaacccggcaggatgagcctgccctgttcgtggccctgaccttcgagcggcgggaggtcctggactcctccaatatcaaaccaatgaacctgatcggcgtggcaagaggcgaaaacatccccgccgtgatcgccctgaccgaccccgagggctgcccactgagccggtttaaggatagcctgggaaacccaacccacatcctgagaatcggcgagagctataaggagaagcagcggaccatccaggccaagaaggaggtggagcagcggagagccggcggctacagccggaagtacgccagcaaagccaagaatctggcagacgatatggtgagaaacaccgctagagatctgctgtactacgccgtgacccaggatgccatgctgatcttcgccaacctgagccggggcttcggccggcagggcaagcggaccttcatggccgagagacagtacacacggatggaggactggctgaccgccaagctggcctacgagggcctgagcaagacctacctgtccaagacactggcccagtacacctccaagacatgcagcaactgtgggtttaccatcaccagcgccgactacgacagggtgctggagaagctgaagaagacagcaacaggctggatgaccacaattaacggcaaggagctgaaggtggagggccagattacctactacaacagatacaagagacagaacgtagtcaaggacctgtccgtcgagctggatagactgagcgaagaatctgtgaacaacgacatctcctcctggacaaagggcagaagcggagaagctctgagcctcctgaagaaaagattctcccatagacccgtgcaggagaagttcgtgtgcctgaactgcggcttcgagacacacgcagccgagcaagccgccctgaacatcgccagatcctggctgttcctgcggagccaggagtacaagaaataccagacaaacaagacaaccggcaacaccgataagagagccttcgtcgagacctggcagtccttttaccggaagaagcttaaggaggtgtggaaacctgccgtgcggtctggcggatctggcggaggctccacaagcgcccagatgagggtgaccttcgaggacatcgccgtgagcttcagccccgaggagtgggagtacctggaccagggccagaaggagctgtacagggaggtgatgaaggagaactacgagatcctgatcagcctgggctgccccaacctgacccccgagatcatcagcaggatcgagaggggcgaggagccctacatcaggggcgagcccggcagcgaggagagggagaccggcaagagcagctgcaccagccccaagaaaaagagaaaagtctaagctgccttctgcggggcttgccttctggccatgcccttcttctctcccttgcacctgtacctcttggtctttgaataaagcctgagtaggaaggctagcaaaaaaaaaaaaaaaaaaaaaaaaaaaaaaaaaaaaaaaaaaaaaaaaaaaaaaaaaaaaaaaaaaaaaaaaaaaaaaaa

SEQ ID NO: 4054 - RNA, 5419 nt, synthetic construct
  source 1..5419: mol_type = other RNA
aggaaataagagagaaaagaagagtaagaagaaatataagagccaccatggcccctaagaagaagcgtaaagtgagccgggtgaacggcagcggcagcggcggcggcatgaaccacgaccaggagttcgacccccctaaggtgtaccctcccgtccccgccgagaagagaaagcccatccgggtcctgagcctgttcgatggcatcgccaccggtctgctggtgctgaaggacctgggcatccaggtggataggtacattgcctccgaggtgtgcgaggactccatcaccgtgggaatggtgcgtcatcagggcaagatcatgtacgtgggcgacgtgcggagcgtgacacagaagcatatccaggagtggggccctttcgacctggtgatcggcggcagcccttgcaatgacctgagcatcgtgaacccagcccggaagggcctgtacgagggaaccggcagactgttcttcgagttttacagactgctgcacgacgcccggcctaaggaaggcgacgaccggcccttcttttggctgttcgagaatgtggtggccatgggagtcagcgacaagcgggatattagccggttcctggagagcaaccccgtgatgatcgatgccaaggaagtgagcgccgcccaccgggccagatacttctggggcaatctgcctggcatgaacagacccctggccagcaccgtgaacgacaagctggagctgcaggagtgcctggagcacggccggatcgccaagttcagcaaggtgagaaccatcaccacccgaagcaacagcatcaaacaaggcaaggaccagcactttcctgtgttcatgaacgagaaggaggacatcctgtggtgtaccgagatggagagagtgttcgggttcccagtccactacacagatgtcagcaacatgtctagactggccagacagagactgctgggaagaagctggtccgtccctgtgatcagacacctgttcgcccctctgaaggagtacttcgcctgcgtgagcagcggcaacagcaacgccaacagccggggccccagcttctctagcggcctggtgccactgtccctgagagggagccacatgggccccatggagatctacaaaaccgtgagcgcctggaagcggcagcctgtgcgcgtgctgagcctgtttcggaatatcgataaagtcctgaaaagcctgggattcctggagagcggctctggctccggcggtggcaccctgaagtacgtggaggatgtgacaaacgtggtcagacgggatgtggagaagtggggccccttcgatctggtgtacggcagcacccaacccctgggcagctcttgtgaccggtgccctggctggtacatgtttcagttccaccggatcctgcagtacgccctgccgagacaggagtcccagcggccattcttttggattttcatggacaacttgctgctgaccgaggatgaccaggaaactaccactcggttcctgcagaccgaagccgtgaccctgcaggacgtgagaggccgggactaccagaacgccatgcgggtgtggtccaacatccctggactgaaaagcaagcacgcacctctgacccctaaagaagaggagtacctgcaggcccaggtgcggagcagaagcaagctggacgcccctaaggtggatctgctggtgaagaattgcctcctgcccctgagagagtacttcaagtatttcagccagaatagtctgcccctgggcggcccaagcagcggcgcccctcctcccagcggcggcagcccagccggctccccaacctctaccgaggagggcacctctgagtccgccacccccgagagcggccctggcacctccaccgagcccagcgagggcagcgcacccggcagccctgccggcagccccacctccacagaggagggaaccagcaccgagcccagcgaaggcagcgccccaggcaccagcaccgagcctagtgagggcggctctggcggcggcagcgcccaggagattaaacggatcaacaagatcagaagaagacttgtgaaagacagcaacaccaagaaggccggcaagacaggccccatgaaaaccctgctggttagagtgatgacacccgatctgagagagcggctggaaaacctgagaaagaagcctgaaaatatcccccagcccatcagcaatacatctagagccaacctgaataagctgctgaccgattacaccgaaatgaagaaggcgatcctgcatgtgtactgggaagagttccagaaggaccctgtgggcctgatgagccgggtggcccagcctgccagcaagaagatcgatcagaacaagctgaaacctgagatggacgagaagggcaacctgaccaccgccggctttgcctgctctcagtgtggccagcccctgttcgtgtacaagctggagcaggtgtctgagaagggcaaggcttacaccaactacttcggacggtgcaatgtggccgagcacgaaaagctgatcctgctggcccagctgaagcccgagaaggatagcgacgaagccgtgacatatagcctgggaaagtttgggcagagggccctggatttctacagcattcatgtgaccaaggagtccacccaccccgtgaagcccctggcccagatcgccggaaacagatacgcctccggacctgtgggaaaggccctgagcgacgcatgtatgggcacaatcgcctccttcctgtctaagtaccaggacatcatcatcgaacaccagaaggtggtgaagggcaaccagaagagactggagagcctgcgggagctggccggcaaggaaaacctggaataccctagcgtgaccctgccacctcagcctcacaccaaggagggcgttgatgcctacaacgaagtgatcgcccgggtgcgaatgtgggtgaacctgaacctgtggcagaagctgaagctaagcagagatgatgccaagcctctgctgagactgaagggattcccttcctttcctctggtcgagagacaggccaacgaagtggactggtgggacatggtgtgtaacgtgaagaagctgatcaacgagaaaaaggaggatggcaaggtgttttggcagaatctggctggctacaagagacaggaagccctgagaccatacctgagcagcgaggaagatcggaagaagggaaagaaattcgctcggtaccagctgggcgacctgctgctgcacctggaaaagaagcacggcgaggactggggaaaggtgtacgacgaggcctgggagcggattgacaagaaagtggaaggcctgagcaagcacatcaagctggaagaggaacggagaagcgaggacgcccagagcaaggccgccctgaccgactggctgcgggctaaggccagcttcgtgatcgagggcctgaaggaggccgacaaggacgagttctgcagatgcgagctgaagctgcagaagtggtacggggacctgcggggaaagcccttcgccatcgaagccgagaacagcatcctggacatcagcggcttcagcaagcagtacaactgtgccttcatctggcagaaggacggcgtgaagaagctgaacctgtacctgatcatcaactacttcaagggcggcaagctgcggttcaagaagatcaaacctgaagccttcgaagccaacagattctacaccgtgatcaacaaaaagagcggcgagatcgtgcccatggaggtgaacttcaacttcgacgaccccaacctgatcatcctgcctctggcctttggcaagagacagggcagagaattcatctggaacgacctgctgtccctggaaaccggcagcctgaagctggccaacggaagagtgatcgagaagacactgtacaacagaagaacccggcaggatgagcctgccctgttcgtggccctgaccttcgagcggcgggaggtcctggactcctccaatatcaaaccaatgaacctgatcggcgtggcaagaggcgaaaacatccccgccgtgatcgccctgaccgaccccgagggctgcccactgagccggtttaaggatagcctgggaaacccaacccacatcctgagaatcggcgagagctataaggagaagcagcggaccatccaggccaagaaggaggtggagcagcggagagccggcggctacagccggaagtacgccagcaaagccaagaatctggcagacgatatggtgagaaacaccgctagagatctgctgtactacgccgtgacccaggatgccatgctgatcttcgccaacctgagccggggcttcggccggcagggcaagcggaccttcatggccgagagacagtacacacggatggaggactggctgaccgccaagctggcctacgagggcctgagcaagacctacctgtccaagacactggcccagtacacctccaagacatgcagcaactgtgggtttaccatcaccagcgccgactacgacagggtgctggagaagctgaagaagacagcaacaggctggatgaccacaattaacggcaaggagctgaaggtggagggccagattacctactacaacagatacaagagacagaacgtagtcaaggacctgtccgtcgagctggatagactgagcgaagaatctgtgaacaacgacatctcctcctggacaaagggcagaagcggagaagctctgagcctcctgaagaaaagattctcccatagacccgtgcaggagaagttcgtgtgcctgaactgcggcttcgagacacacgcagccgagcaagccgccctgaacatcgccagatcctggctgttcctgcggagccaggagtacaagaaataccagacaaacaagacaaccggcaacaccgataagagagccttcgtcgagacctggcagtccttttaccggaagaagcttaaggaggtgtggaaacctgccgtgcggtctggcggatctggcggaggctccacaagcatggacagcgtggccttcgaggacgtggccgtgaccttcacccaggaggagtgggccctgctggaccccagccagaagaccctgtacagggacgtgatgcaggagaccttcaggaacctggccagcgtgggcaagaagtggaaggcccagaacatgtacgtggagtacgagaacctgaagaggaacctgaggaccttcgtgggcgagaggctgttcgagagcaaggagggccaccagcacggcaccagccccaagaaaaagagaaaagtctaagctgccttctgcggggcttgccttctggccatgcccttcttctctcccttgcacctgtacctcttggtctttgaataaagcctgagtaggaaggctagcaaaaaaaaaaaaaaaaaaaaaaaaaaaaaaaaaaaaaaaaaaaaaaaaaaaaaaaaaaaaaaaaaaaaaaaaaaaaaaaa

SEQ ID NO: 4055 - RNA, 5419 nt, synthetic construct
  source 1..5419: mol_type = other RNA
aggaaataagagagaaaagaagagtaagaagaaatataagagccaccatggcccctaagaagaagcgtaaagtgagccgggtgaacggcagcggcagcggcggcggcatgaaccacgaccaggagttcgacccccctaaggtgtaccctcccgtccccgccgagaagagaaagcccatccgggtcctgagcctgttcgatggcatcgccaccggtctgctggtgctgaaggacctgggcatccaggtggataggtacattgcctccgaggtgtgcgaggactccatcaccgtgggaatggtgcgtcatcagggcaagatcatgtacgtgggcgacgtgcggagcgtgacacagaagcatatccaggagtggggccctttcgacctggtgatcggcggcagcccttgcaatgacctgagcatcgtgaacccagcccggaagggcctgtacgagggaaccggcagactgttcttcgagttttacagactgctgcacgacgcccggcctaaggaaggcgacgaccggcccttcttttggctgttcgagaatgtggtggccatgggagtcagcgacaagcgggatattagccggttcctggagagcaaccccgtgatgatcgatgccaaggaagtgagcgccgcccaccgggccagatacttctggggcaatctgcctggcatgaacagacccctggccagcaccgtgaacgacaagctggagctgcaggagtgcctggagcacggccggatcgccaagttcagcaaggtgagaaccatcaccacccgaagcaacagcatcaaacaaggcaaggaccagcactttcctgtgttcatgaacgagaaggaggacatcctgtggtgtaccgagatggagagagtgttcgggttcccagtccactacacagatgtcagcaacatgtctagactggccagacagagactgctgggaagaagctggtccgtccctgtgatcagacacctgttcgcccctctgaaggagtacttcgcctgcgtgagcagcggcaacagcaacgccaacagccggggccccagcttctctagcggcctggtgccactgtccctgagagggagccacatgggccccatggagatctacaaaaccgtgagcgcctggaagcggcagcctgtgcgcgtgctgagcctgtttcggaatatcgataaagtcctgaaaagcctgggattcctggagagcggctctggctccggcggtggcaccctgaagtacgtggaggatgtgacaaacgtggtcagacgggatgtggagaagtggggccccttcgatctggtgtacggcagcacccaacccctgggcagctcttgtgaccggtgccctggctggtacatgtttcagttccaccggatcctgcagtacgccctgccgagacaggagtcccagcggccattcttttggattttcatggacaacttgctgctgaccgaggatgaccaggaaactaccactcggttcctgcagaccgaagccgtgaccctgcaggacgtgagaggccgggactaccagaacgccatgcgggtgtggtccaacatccctggactgaaaagcaagcacgcacctctgacccctaaagaagaggagtacctgcaggcccaggtgcggagcagaagcaagctggacgcccctaaggtggatctgctggtgaagaattgcctcctgcccctgagagagtacttcaagtatttcagccagaatagtctgcccctgggcggcccaagcagcggcgcccctcctcccagcggcggcagcccagccggctccccaacctctaccgaggagggcacctctgagtccgccacccccgagagcggccctggcacctccaccgagcccagcgagggcagcgcacccggcagccctgccggcagccccacctccacagaggagggaaccagcaccgagcccagcgaaggcagcgccccaggcaccagcaccgagcctagtgagggcggctctggcggcggcagcgcccaggagattaaacggatcaacaagatcagaagaagacttgtgaaagacagcaacaccaagaaggccggcaagacaggccccatgaaaaccctgctggttagagtgatgacacccgatctgagagagcggctggaaaacctgagaaagaagcctgaaaatatcccccagcccatcagcaatacatctagagccaacctgaataagctgctgaccgattacaccgaaatgaagaaggcgatcctgcatgtgtactgggaagagttccagaaggaccctgtgggcctgatgagccgggtggcccagcctgccagcaagaagatcgatcagaacaagctgaaacctgagatggacgagaagggcaacctgaccaccgccggctttgcctgctctcagtgtggccagcccctgttcgtgtacaagctggagcaggtgtctgagaagggcaaggcttacaccaactacttcggacggtgcaatgtggccgagcacgaaaagctgatcctgctggcccagctgaagcccgagaaggatagcgacgaagccgtgacatatagcctgggaaagtttgggcagagggccctggatttctacagcattcatgtgaccaaggagtccacccaccccgtgaagcccctggcccagatcgccggaaacagatacgcctccggacctgtgggaaaggccctgagcgacgcatgtatgggcacaatcgcctccttcctgtctaagtaccaggacatcatcatcgaacaccagaaggtggtgaagggcaaccagaagagactggagagcctgcgggagctggccggcaaggaaaacctggaataccctagcgtgaccctgccacctcagcctcacaccaaggagggcgttgatgcctacaacgaagtgatcgcccgggtgcgaatgtgggtgaacctgaacctgtggcagaagctgaagctaagcagagatgatgccaagcctctgctgagactgaagggattcccttcctttcctctggtcgagagacaggccaacgaagtggactggtgggacatggtgtgtaacgtgaagaagctgatcaacgagaaaaaggaggatggcaaggtgttttggcagaatctggctggctacaagagacaggaagccctgagaccatacctgagcagcgaggaagatcggaagaagggaaagaaattcgctcggtaccagctgggcgacctgctgctgcacctggaaaagaagcacggcgaggactggggaaaggtgtacgacgaggcctgggagcggattgacaagaaagtggaaggcctgagcaagcacatcaagctggaagaggaacggagaagcgaggacgcccagagcaaggccgccctgaccgactggctgcgggctaaggccagcttcgtgatcgagggcctgaaggaggccgacaaggacgagttctgcagatgcgagctgaagctgcagaagtggtacggggacctgcggggaaagcccttcgccatcgaagccgagaacagcatcctggacatcagcggcttcagcaagcagtacaactgtgccttcatctggcagaaggacggcgtgaagaagctgaacctgtacctgatcatcaactacttcaagggcggcaagctgcggttcaagaagatcaaacctgaagccttcgaagccaacagattctacaccgtgatcaacaaaaagagcggcgagatcgtgcccatggaggtgaacttcaacttcgacgaccccaacctgatcatcctgcctctggcctttggcaagagacagggcagagaattcatctggaacgacctgctgtccctggaaaccggcagcctgaagctggccaacggaagagtgatcgagaagacactgtacaacagaagaacccggcaggatgagcctgccctgttcgtggccctgaccttcgagcggcgggaggtcctggactcctccaatatcaaaccaatgaacctgatcggcgtggcaagaggcgaaaacatccccgccgtgatcgccctgaccgaccccgagggctgcccactgagccggtttaaggatagcctgggaaacccaacccacatcctgagaatcggcgagagctataaggagaagcagcggaccatccaggccaagaaggaggtggagcagcggagagccggcggctacagccggaagtacgccagcaaagccaagaatctggcagacgatatggtgagaaacaccgctagagatctgctgtactacgccgtgacccaggatgccatgctgatcttcgccaacctgagccggggcttcggccggcagggcaagcggaccttcatggccgagagacagtacacacggatggaggactggctgaccgccaagctggcctacgagggcctgagcaagacctacctgtccaagacactggcccagtacacctccaagacatgcagcaactgtgggtttaccatcaccagcgccgactacgacagggtgctggagaagctgaagaagacagcaacaggctggatgaccacaattaacggcaaggagctgaaggtggagggccagattacctactacaacagatacaagagacagaacgtagtcaaggacctgtccgtcgagctggatagactgagcgaagaatctgtgaacaacgacatctcctcctggacaaagggcagaagcggagaagctctgagcctcctgaagaaaagattctcccatagacccgtgcaggagaagttcgtgtgcctgaactgcggcttcgagacacacgcagccgagcaagccgccctgaacatcgccagatcctggctgttcctgcggagccaggagtacaagaaataccagacaaacaagacaaccggcaacaccgataagagagccttcgtcgagacctggcagtccttttaccggaagaagcttaaggaggtgtggaaacctgccgtgcggtctggcggatctggcggaggctccacaagcttccagatgcccgtgaccttcgaggaggtggccgtgtacttcacccagggccagggcgccctgctggaccccgcccagagggccctgtacagggacgtgatgcaggagaactacaagatggtgaccagcctgggcttccccctgcccaagcccgagctgatcagcaggctggagcagggcgaggagccctgggtgcccgacctgcaggcctgcgaggagagggagagcctgagcggcaaccacaccagccccaagaaaaagagaaaagtctaagctgccttctgcggggcttgccttctggccatgcccttcttctctcccttgcacctgtacctcttggtctttgaataaagcctgagtaggaaggctagcaaaaaaaaaaaaaaaaaaaaaaaaaaaaaaaaaaaaaaaaaaaaaaaaaaaaaaaaaaaaaaaaaaaaaaaaaaaaaaaa

SEQ ID NO: 4056 - RNA, 5419 nt, synthetic construct
  source 1..5419: mol_type = other RNA
aggaaataagagagaaaagaagagtaagaagaaatataagagccaccatggcccctaagaagaagcgtaaagtgagccgggtgaacggcagcggcagcggcggcggcatgaaccacgaccaggagttcgacccccctaaggtgtaccctcccgtccccgccgagaagagaaagcccatccgggtcctgagcctgttcgatggcatcgccaccggtctgctggtgctgaaggacctgggcatccaggtggataggtacattgcctccgaggtgtgcgaggactccatcaccgtgggaatggtgcgtcatcagggcaagatcatgtacgtgggcgacgtgcggagcgtgacacagaagcatatccaggagtggggccctttcgacctggtgatcggcggcagcccttgcaatgacctgagcatcgtgaacccagcccggaagggcctgtacgagggaaccggcagactgttcttcgagttttacagactgctgcacgacgcccggcctaaggaaggcgacgaccggcccttcttttggctgttcgagaatgtggtggccatgggagtcagcgacaagcgggatattagccggttcctggagagcaaccccgtgatgatcgatgccaaggaagtgagcgccgcccaccgggccagatacttctggggcaatctgcctggcatgaacagacccctggccagcaccgtgaacgacaagctggagctgcaggagtgcctggagcacggccggatcgccaagttcagcaaggtgagaaccatcaccacccgaagcaacagcatcaaacaaggcaaggaccagcactttcctgtgttcatgaacgagaaggaggacatcctgtggtgtaccgagatggagagagtgttcgggttcccagtccactacacagatgtcagcaacatgtctagactggccagacagagactgctgggaagaagctggtccgtccctgtgatcagacacctgttcgcccctctgaaggagtacttcgcctgcgtgagcagcggcaacagcaacgccaacagccggggccccagcttctctagcggcctggtgccactgtccctgagagggagccacatgggccccatggagatctacaaaaccgtgagcgcctggaagcggcagcctgtgcgcgtgctgagcctgtttcggaatatcgataaagtcctgaaaagcctgggattcctggagagcggctctggctccggcggtggcaccctgaagtacgtggaggatgtgacaaacgtggtcagacgggatgtggagaagtggggccccttcgatctggtgtacggcagcacccaacccctgggcagctcttgtgaccggtgccctggctggtacatgtttcagttccaccggatcctgcagtacgccctgccgagacaggagtcccagcggccattcttttggattttcatggacaacttgctgctgaccgaggatgaccaggaaactaccactcggttcctgcagaccgaagccgtgaccctgcaggacgtgagaggccgggactaccagaacgccatgcgggtgtggtccaacatccctggactgaaaagcaagcacgcacctctgacccctaaagaagaggagtacctgcaggcccaggtgcggagcagaagcaagctggacgcccctaaggtggatctgctggtgaagaattgcctcctgcccctgagagagtacttcaagtatttcagccagaatagtctgcccctgggcggcccaagcagcggcgcccctcctcccagcggcggcagcccagccggctccccaacctctaccgaggagggcacctctgagtccgccacccccgagagcggccctggcacctccaccgagcccagcgagggcagcgcacccggcagccctgccggcagccccacctccacagaggagggaaccagcaccgagcccagcgaaggcagcgccccaggcaccagcaccgagcctagtgagggcggctctggcggcggcagcgcccaggagattaaacggatcaacaagatcagaagaagacttgtgaaagacagcaacaccaagaaggccggcaagacaggccccatgaaaaccctgctggttagagtgatgacacccgatctgagagagcggctggaaaacctgagaaagaagcctgaaaatatcccccagcccatcagcaatacatctagagccaacctgaataagctgctgaccgattacaccgaaatgaagaaggcgatcctgcatgtgtactgggaagagttccagaaggaccctgtgggcctgatgagccgggtggcccagcctgccagcaagaagatcgatcagaacaagctgaaacctgagatggacgagaagggcaacctgaccaccgccggctttgcctgctctcagtgtggccagcccctgttcgtgtacaagctggagcaggtgtctgagaagggcaaggcttacaccaactacttcggacggtgcaatgtggccgagcacgaaaagctgatcctgctggcccagctgaagcccgagaaggatagcgacgaagccgtgacatatagcctgggaaagtttgggcagagggccctggatttctacagcattcatgtgaccaaggagtccacccaccccgtgaagcccctggcccagatcgccggaaacagatacgcctccggacctgtgggaaaggccctgagcgacgcatgtatgggcacaatcgcctccttcctgtctaagtaccaggacatcatcatcgaacaccagaaggtggtgaagggcaaccagaagagactggagagcctgcgggagctggccggcaaggaaaacctggaataccctagcgtgaccctgccacctcagcctcacaccaaggagggcgttgatgcctacaacgaagtgatcgcccgggtgcgaatgtgggtgaacctgaacctgtggcagaagctgaagctaagcagagatgatgccaagcctctgctgagactgaagggattcccttcctttcctctggtcgagagacaggccaacgaagtggactggtgggacatggtgtgtaacgtgaagaagctgatcaacgagaaaaaggaggatggcaaggtgttttggcagaatctggctggctacaagagacaggaagccctgagaccatacctgagcagcgaggaagatcggaagaagggaaagaaattcgctcggtaccagctgggcgacctgctgctgcacctggaaaagaagcacggcgaggactggggaaaggtgtacgacgaggcctgggagcggattgacaagaaagtggaaggcctgagcaagcacatcaagctggaagaggaacggagaagcgaggacgcccagagcaaggccgccctgaccgactggctgcgggctaaggccagcttcgtgatcgagggcctgaaggaggccgacaaggacgagttctgcagatgcgagctgaagctgcagaagtggtacggggacctgcggggaaagcccttcgccatcgaagccgagaacagcatcctggacatcagcggcttcagcaagcagtacaactgtgccttcatctggcagaaggacggcgtgaagaagctgaacctgtacctgatcatcaactacttcaagggcggcaagctgcggttcaagaagatcaaacctgaagccttcgaagccaacagattctacaccgtgatcaacaaaaagagcggcgagatcgtgcccatggaggtgaacttcaacttcgacgaccccaacctgatcatcctgcctctggcctttggcaagagacagggcagagaattcatctggaacgacctgctgtccctggaaaccggcagcctgaagctggccaacggaagagtgatcgagaagacactgtacaacagaagaacccggcaggatgagcctgccctgttcgtggccctgaccttcgagcggcgggaggtcctggactcctccaatatcaaaccaatgaacctgatcggcgtggcaagaggcgaaaacatccccgccgtgatcgccctgaccgaccccgagggctgcccactgagccggtttaaggatagcctgggaaacccaacccacatcctgagaatcggcgagagctataaggagaagcagcggaccatccaggccaagaaggaggtggagcagcggagagccggcggctacagccggaagtacgccagcaaagccaagaatctggcagacgatatggtgagaaacaccgctagagatctgctgtactacgccgtgacccaggatgccatgctgatcttcgccaacctgagccggggcttcggccggcagggcaagcggaccttcatggccgagagacagtacacacggatggaggactggctgaccgccaagctggcctacgagggcctgagcaagacctacctgtccaagacactggcccagtacacctccaagacatgcagcaactgtgggtttaccatcaccagcgccgactacgacagggtgctggagaagctgaagaagacagcaacaggctggatgaccacaattaacggcaaggagctgaaggtggagggccagattacctactacaacagatacaagagacagaacgtagtcaaggacctgtccgtcgagctggatagactgagcgaagaatctgtgaacaacgacatctcctcctggacaaagggcagaagcggagaagctctgagcctcctgaagaaaagattctcccatagacccgtgcaggagaagttcgtgtgcctgaactgcggcttcgagacacacgcagccgagcaagccgccctgaacatcgccagatcctggctgttcctgcggagccaggagtacaagaaataccagacaaacaagacaaccggcaacaccgataagagagccttcgtcgagacctggcagtccttttaccggaagaagcttaaggaggtgtggaaacctgccgtgcggtctggcggatctggcggaggctccacaagcatggccaccgccctgaccgaccccgcccaggtgagcgtgaccttcgacgacgtggccgtgaccttcacccaggaggagtggggccagctggacctggcccagaggaccctgtaccaggaggtgatgctggagaactgcggcctgctggtgagcctgggctgccccgtgcccaggcccgagctgatctaccacctggagcacggccaggagccctggaccaggaaggaggacctgagccaggacaccagccccaagaaaaagagaaaagtctaagctgccttctgcggggcttgccttctggccatgcccttcttctctcccttgcacctgtacctcttggtctttgaataaagcctgagtaggaaggctagcaaaaaaaaaaaaaaaaaaaaaaaaaaaaaaaaaaaaaaaaaaaaaaaaaaaaaaaaaaaaaaaaaaaaaaaaaaaaaaaa

SEQ ID NO: 4057 - RNA, 5419 nt, synthetic construct
  source 1..5419: mol_type = other RNA
aggaaataagagagaaaagaagagtaagaagaaatataagagccaccatggcccctaagaagaagcgtaaagtgagccgggtgaacggcagcggcagcggcggcggcatgaaccacgaccaggagttcgacccccctaaggtgtaccctcccgtccccgccgagaagagaaagcccatccgggtcctgagcctgttcgatggcatcgccaccggtctgctggtgctgaaggacctgggcatccaggtggataggtacattgcctccgaggtgtgcgaggactccatcaccgtgggaatggtgcgtcatcagggcaagatcatgtacgtgggcgacgtgcggagcgtgacacagaagcatatccaggagtggggccctttcgacctggtgatcggcggcagcccttgcaatgacctgagcatcgtgaacccagcccggaagggcctgtacgagggaaccggcagactgttcttcgagttttacagactgctgcacgacgcccggcctaaggaaggcgacgaccggcccttcttttggctgttcgagaatgtggtggccatgggagtcagcgacaagcgggatattagccggttcctggagagcaaccccgtgatgatcgatgccaaggaagtgagcgccgcccaccgggccagatacttctggggcaatctgcctggcatgaacagacccctggccagcaccgtgaacgacaagctggagctgcaggagtgcctggagcacggccggatcgccaagttcagcaaggtgagaaccatcaccacccgaagcaacagcatcaaacaaggcaaggaccagcactttcctgtgttcatgaacgagaaggaggacatcctgtggtgtaccgagatggagagagtgttcgggttcccagtccactacacagatgtcagcaacatgtctagactggccagacagagactgctgggaagaagctggtccgtccctgtgatcagacacctgttcgcccctctgaaggagtacttcgcctgcgtgagcagcggcaacagcaacgccaacagccggggccccagcttctctagcggcctggtgccactgtccctgagagggagccacatgggccccatggagatctacaaaaccgtgagcgcctggaagcggcagcctgtgcgcgtgctgagcctgtttcggaatatcgataaagtcctgaaaagcctgggattcctggagagcggctctggctccggcggtggcaccctgaagtacgtggaggatgtgacaaacgtggtcagacgggatgtggagaagtggggccccttcgatctggtgtacggcagcacccaacccctgggcagctcttgtgaccggtgccctggctggtacatgtttcagttccaccggatcctgcagtacgccctgccgagacaggagtcccagcggccattcttttggattttcatggacaacttgctgctgaccgaggatgaccaggaaactaccactcggttcctgcagaccgaagccgtgaccctgcaggacgtgagaggccgggactaccagaacgccatgcgggtgtggtccaacatccctggactgaaaagcaagcacgcacctctgacccctaaagaagaggagtacctgcaggcccaggtgcggagcagaagcaagctggacgcccctaaggtggatctgctggtgaagaattgcctcctgcccctgagagagtacttcaagtatttcagccagaatagtctgcccctgggcggcccaagcagcggcgcccctcctcccagcggcggcagcccagccggctccccaacctctaccgaggagggcacctctgagtccgccacccccgagagcggccctggcacctccaccgagcccagcgagggcagcgcacccggcagccctgccggcagccccacctccacagaggagggaaccagcaccgagcccagcgaaggcagcgccccaggcaccagcaccgagcctagtgagggcggctctggcggcggcagcgcccaggagattaaacggatcaacaagatcagaagaagacttgtgaaagacagcaacaccaagaaggccggcaagacaggccccatgaaaaccctgctggttagagtgatgacacccgatctgagagagcggctggaaaacctgagaaagaagcctgaaaatatcccccagcccatcagcaatacatctagagccaacctgaataagctgctgaccgattacaccgaaatgaagaaggcgatcctgcatgtgtactgggaagagttccagaaggaccctgtgggcctgatgagccgggtggcccagcctgccagcaagaagatcgatcagaacaagctgaaacctgagatggacgagaagggcaacctgaccaccgccggctttgcctgctctcagtgtggccagcccctgttcgtgtacaagctggagcaggtgtctgagaagggcaaggcttacaccaactacttcggacggtgcaatgtggccgagcacgaaaagctgatcctgctggcccagctgaagcccgagaaggatagcgacgaagccgtgacatatagcctgggaaagtttgggcagagggccctggatttctacagcattcatgtgaccaaggagtccacccaccccgtgaagcccctggcccagatcgccggaaacagatacgcctccggacctgtgggaaaggccctgagcgacgcatgtatgggcacaatcgcctccttcctgtctaagtaccaggacatcatcatcgaacaccagaaggtggtgaagggcaaccagaagagactggagagcctgcgggagctggccggcaaggaaaacctggaataccctagcgtgaccctgccacctcagcctcacaccaaggagggcgttgatgcctacaacgaagtgatcgcccgggtgcgaatgtgggtgaacctgaacctgtggcagaagctgaagctaagcagagatgatgccaagcctctgctgagactgaagggattcccttcctttcctctggtcgagagacaggccaacgaagtggactggtgggacatggtgtgtaacgtgaagaagctgatcaacgagaaaaaggaggatggcaaggtgttttggcagaatctggctggctacaagagacaggaagccctgagaccatacctgagcagcgaggaagatcggaagaagggaaagaaattcgctcggtaccagctgggcgacctgctgctgcacctggaaaagaagcacggcgaggactggggaaaggtgtacgacgaggcctgggagcggattgacaagaaagtggaaggcctgagcaagcacatcaagctggaagaggaacggagaagcgaggacgcccagagcaaggccgccctgaccgactggctgcgggctaaggccagcttcgtgatcgagggcctgaaggaggccgacaaggacgagttctgcagatgcgagctgaagctgcagaagtggtacggggacctgcggggaaagcccttcgccatcgaagccgagaacagcatcctggacatcagcggcttcagcaagcagtacaactgtgccttcatctggcagaaggacggcgtgaagaagctgaacctgtacctgatcatcaactacttcaagggcggcaagctgcggttcaagaagatcaaacctgaagccttcgaagccaacagattctacaccgtgatcaacaaaaagagcggcgagatcgtgcccatggaggtgaacttcaacttcgacgaccccaacctgatcatcctgcctctggcctttggcaagagacagggcagagaattcatctggaacgacctgctgtccctggaaaccggcagcctgaagctggccaacggaagagtgatcgagaagacactgtacaacagaagaacccggcaggatgagcctgccctgttcgtggccctgaccttcgagcggcgggaggtcctggactcctccaatatcaaaccaatgaacctgatcggcgtggcaagaggcgaaaacatccccgccgtgatcgccctgaccgaccccgagggctgcccactgagccggtttaaggatagcctgggaaacccaacccacatcctgagaatcggcgagagctataaggagaagcagcggaccatccaggccaagaaggaggtggagcagcggagagccggcggctacagccggaagtacgccagcaaagccaagaatctggcagacgatatggtgagaaacaccgctagagatctgctgtactacgccgtgacccaggatgccatgctgatcttcgccaacctgagccggggcttcggccggcagggcaagcggaccttcatggccgagagacagtacacacggatggaggactggctgaccgccaagctggcctacgagggcctgagcaagacctacctgtccaagacactggcccagtacacctccaagacatgcagcaactgtgggtttaccatcaccagcgccgactacgacagggtgctggagaagctgaagaagacagcaacaggctggatgaccacaattaacggcaaggagctgaaggtggagggccagattacctactacaacagatacaagagacagaacgtagtcaaggacctgtccgtcgagctggatagactgagcgaagaatctgtgaacaacgacatctcctcctggacaaagggcagaagcggagaagctctgagcctcctgaagaaaagattctcccatagacccgtgcaggagaagttcgtgtgcctgaactgcggcttcgagacacacgcagccgagcaagccgccctgaacatcgccagatcctggctgttcctgcggagccaggagtacaagaaataccagacaaacaagacaaccggcaacaccgataagagagccttcgtcgagacctggcagtccttttaccggaagaagcttaaggaggtgtggaaacctgccgtgcggtctggcggatctggcggaggctccacaagcaggcccgagagcgtgaccttcgaggacgtggccgtgtacttcagcgagaacgagtggatcggcctggcccccgcccagagggtgctgtacagggacgtgatgctggagaactacggcgtggtggccagcctggccttccccttccccaagcccgccctgatcagccagctggagaggggcgaggccccctggtgcaaggccccccagggcgccctggacggcgagtgccccaggggcgtgagcaccagccccaagaaaaagagaaaagtctaagctgccttctgcggggcttgccttctggccatgcccttcttctctcccttgcacctgtacctcttggtctttgaataaagcctgagtaggaaggctagcaaaaaaaaaaaaaaaaaaaaaaaaaaaaaaaaaaaaaaaaaaaaaaaaaaaaaaaaaaaaaaaaaaaaaaaaaaaaaaaa

SEQ ID NO: 4058 - RNA, 5419 nt, synthetic construct
  source 1..5419: mol_type = other RNA
aggaaataagagagaaaagaagagtaagaagaaatataagagccaccatggcccctaagaagaagcgtaaagtgagccgggtgaacggcagcggcagcggcggcggcatgaaccacgaccaggagttcgacccccctaaggtgtaccctcccgtccccgccgagaagagaaagcccatccgggtcctgagcctgttcgatggcatcgccaccggtctgctggtgctgaaggacctgggcatccaggtggataggtacattgcctccgaggtgtgcgaggactccatcaccgtgggaatggtgcgtcatcagggcaagatcatgtacgtgggcgacgtgcggagcgtgacacagaagcatatccaggagtggggccctttcgacctggtgatcggcggcagcccttgcaatgacctgagcatcgtgaacccagcccggaagggcctgtacgagggaaccggcagactgttcttcgagttttacagactgctgcacgacgcccggcctaaggaaggcgacgaccggcccttcttttggctgttcgagaatgtggtggccatgggagtcagcgacaagcgggatattagccggttcctggagagcaaccccgtgatgatcgatgccaaggaagtgagcgccgcccaccgggccagatacttctggggcaatctgcctggcatgaacagacccctggccagcaccgtgaacgacaagctggagctgcaggagtgcctggagcacggccggatcgccaagttcagcaaggtgagaaccatcaccacccgaagcaacagcatcaaacaaggcaaggaccagcactttcctgtgttcatgaacgagaaggaggacatcctgtggtgtaccgagatggagagagtgttcgggttcccagtccactacacagatgtcagcaacatgtctagactggccagacagagactgctgggaagaagctggtccgtccctgtgatcagacacctgttcgcccctctgaaggagtacttcgcctgcgtgagcagcggcaacagcaacgccaacagccggggccccagcttctctagcggcctggtgccactgtccctgagagggagccacatgggccccatggagatctacaaaaccgtgagcgcctggaagcggcagcctgtgcgcgtgctgagcctgtttcggaatatcgataaagtcctgaaaagcctgggattcctggagagcggctctggctccggcggtggcaccctgaagtacgtggaggatgtgacaaacgtggtcagacgggatgtggagaagtggggccccttcgatctggtgtacggcagcacccaacccctgggcagctcttgtgaccggtgccctggctggtacatgtttcagttccaccggatcctgcagtacgccctgccgagacaggagtcccagcggccattcttttggattttcatggacaacttgctgctgaccgaggatgaccaggaaactaccactcggttcctgcagaccgaagccgtgaccctgcaggacgtgagaggccgggactaccagaacgccatgcgggtgtggtccaacatccctggactgaaaagcaagcacgcacctctgacccctaaagaagaggagtacctgcaggcccaggtgcggagcagaagcaagctggacgcccctaaggtggatctgctggtgaagaattgcctcctgcccctgagagagtacttcaagtatttcagccagaatagtctgcccctgggcggcccaagcagcggcgcccctcctcccagcggcggcagcccagccggctccccaacctctaccgaggagggcacctctgagtccgccacccccgagagcggccctggcacctccaccgagcccagcgagggcagcgcacccggcagccctgccggcagccccacctccacagaggagggaaccagcaccgagcccagcgaaggcagcgccccaggcaccagcaccgagcctagtgagggcggctctggcggcggcagcgcccaggagattaaacggatcaacaagatcagaagaagacttgtgaaagacagcaacaccaagaaggccggcaagacaggccccatgaaaaccctgctggttagagtgatgacacccgatctgagagagcggctggaaaacctgagaaagaagcctgaaaatatcccccagcccatcagcaatacatctagagccaacctgaataagctgctgaccgattacaccgaaatgaagaaggcgatcctgcatgtgtactgggaagagttccagaaggaccctgtgggcctgatgagccgggtggcccagcctgccagcaagaagatcgatcagaacaagctgaaacctgagatggacgagaagggcaacctgaccaccgccggctttgcctgctctcagtgtggccagcccctgttcgtgtacaagctggagcaggtgtctgagaagggcaaggcttacaccaactacttcggacggtgcaatgtggccgagcacgaaaagctgatcctgctggcccagctgaagcccgagaaggatagcgacgaagccgtgacatatagcctgggaaagtttgggcagagggccctggatttctacagcattcatgtgaccaaggagtccacccaccccgtgaagcccctggcccagatcgccggaaacagatacgcctccggacctgtgggaaaggccctgagcgacgcatgtatgggcacaatcgcctccttcctgtctaagtaccaggacatcatcatcgaacaccagaaggtggtgaagggcaaccagaagagactggagagcctgcgggagctggccggcaaggaaaacctggaataccctagcgtgaccctgccacctcagcctcacaccaaggagggcgttgatgcctacaacgaagtgatcgcccgggtgcgaatgtgggtgaacctgaacctgtggcagaagctgaagctaagcagagatgatgccaagcctctgctgagactgaagggattcccttcctttcctctggtcgagagacaggccaacgaagtggactggtgggacatggtgtgtaacgtgaagaagctgatcaacgagaaaaaggaggatggcaaggtgttttggcagaatctggctggctacaagagacaggaagccctgagaccatacctgagcagcgaggaagatcggaagaagggaaagaaattcgctcggtaccagctgggcgacctgctgctgcacctggaaaagaagcacggcgaggactggggaaaggtgtacgacgaggcctgggagcggattgacaagaaagtggaaggcctgagcaagcacatcaagctggaagaggaacggagaagcgaggacgcccagagcaaggccgccctgaccgactggctgcgggctaaggccagcttcgtgatcgagggcctgaaggaggccgacaaggacgagttctgcagatgcgagctgaagctgcagaagtggtacggggacctgcggggaaagcccttcgccatcgaagccgagaacagcatcctggacatcagcggcttcagcaagcagtacaactgtgccttcatctggcagaaggacggcgtgaagaagctgaacctgtacctgatcatcaactacttcaagggcggcaagctgcggttcaagaagatcaaacctgaagccttcgaagccaacagattctacaccgtgatcaacaaaaagagcggcgagatcgtgcccatggaggtgaacttcaacttcgacgaccccaacctgatcatcctgcctctggcctttggcaagagacagggcagagaattcatctggaacgacctgctgtccctggaaaccggcagcctgaagctggccaacggaagagtgatcgagaagacactgtacaacagaagaacccggcaggatgagcctgccctgttcgtggccctgaccttcgagcggcgggaggtcctggactcctccaatatcaaaccaatgaacctgatcggcgtggcaagaggcgaaaacatccccgccgtgatcgccctgaccgaccccgagggctgcccactgagccggtttaaggatagcctgggaaacccaacccacatcctgagaatcggcgagagctataaggagaagcagcggaccatccaggccaagaaggaggtggagcagcggagagccggcggctacagccggaagtacgccagcaaagccaagaatctggcagacgatatggtgagaaacaccgctagagatctgctgtactacgccgtgacccaggatgccatgctgatcttcgccaacctgagccggggcttcggccggcagggcaagcggaccttcatggccgagagacagtacacacggatggaggactggctgaccgccaagctggcctacgagggcctgagcaagacctacctgtccaagacactggcccagtacacctccaagacatgcagcaactgtgggtttaccatcaccagcgccgactacgacagggtgctggagaagctgaagaagacagcaacaggctggatgaccacaattaacggcaaggagctgaaggtggagggccagattacctactacaacagatacaagagacagaacgtagtcaaggacctgtccgtcgagctggatagactgagcgaagaatctgtgaacaacgacatctcctcctggacaaagggcagaagcggagaagctctgagcctcctgaagaaaagattctcccatagacccgtgcaggagaagttcgtgtgcctgaactgcggcttcgagacacacgcagccgagcaagccgccctgaacatcgccagatcctggctgttcctgcggagccaggagtacaagaaataccagacaaacaagacaaccggcaacaccgataagagagccttcgtcgagacctggcagtccttttaccggaagaagcttaaggaggtgtggaaacctgccgtgcggtctggcggatctggcggaggctccacaagcacccccgagcccgtgaggttcgccgacgtggccgtgtacttcagcctggaggagtggggctgcctgcagcccgcccagagggccctgtacagggacgtgatgagggagacctacggccacctgggcgccctgggcttcaggggcaccaagcccgccctgatcagctgggtggagaaggaggccgagctgtggggccccgacgccagggaccccgaggtgggcgagtgcctgaccgaggccgacaccagccccaagaaaaagagaaaagtctaagctgccttctgcggggcttgccttctggccatgcccttcttctctcccttgcacctgtacctcttggtctttgaataaagcctgagtaggaaggctagcaaaaaaaaaaaaaaaaaaaaaaaaaaaaaaaaaaaaaaaaaaaaaaaaaaaaaaaaaaaaaaaaaaaaaaaaaaaaaaaa

SEQ ID NO: 4059 - RNA, 5419 nt, synthetic construct
  source 1..5419: mol_type = other RNA
aggaaataagagagaaaagaagagtaagaagaaatataagagccaccatggcccctaagaagaagcgtaaagtgagccgggtgaacggcagcggcagcggcggcggcatgaaccacgaccaggagttcgacccccctaaggtgtaccctcccgtccccgccgagaagagaaagcccatccgggtcctgagcctgttcgatggcatcgccaccggtctgctggtgctgaaggacctgggcatccaggtggataggtacattgcctccgaggtgtgcgaggactccatcaccgtgggaatggtgcgtcatcagggcaagatcatgtacgtgggcgacgtgcggagcgtgacacagaagcatatccaggagtggggccctttcgacctggtgatcggcggcagcccttgcaatgacctgagcatcgtgaacccagcccggaagggcctgtacgagggaaccggcagactgttcttcgagttttacagactgctgcacgacgcccggcctaaggaaggcgacgaccggcccttcttttggctgttcgagaatgtggtggccatgggagtcagcgacaagcgggatattagccggttcctggagagcaaccccgtgatgatcgatgccaaggaagtgagcgccgcccaccgggccagatacttctggggcaatctgcctggcatgaacagacccctggccagcaccgtgaacgacaagctggagctgcaggagtgcctggagcacggccggatcgccaagttcagcaaggtgagaaccatcaccacccgaagcaacagcatcaaacaaggcaaggaccagcactttcctgtgttcatgaacgagaaggaggacatcctgtggtgtaccgagatggagagagtgttcgggttcccagtccactacacagatgtcagcaacatgtctagactggccagacagagactgctgggaagaagctggtccgtccctgtgatcagacacctgttcgcccctctgaaggagtacttcgcctgcgtgagcagcggcaacagcaacgccaacagccggggccccagcttctctagcggcctggtgccactgtccctgagagggagccacatgggccccatggagatctacaaaaccgtgagcgcctggaagcggcagcctgtgcgcgtgctgagcctgtttcggaatatcgataaagtcctgaaaagcctgggattcctggagagcggctctggctccggcggtggcaccctgaagtacgtggaggatgtgacaaacgtggtcagacgggatgtggagaagtggggccccttcgatctggtgtacggcagcacccaacccctgggcagctcttgtgaccggtgccctggctggtacatgtttcagttccaccggatcctgcagtacgccctgccgagacaggagtcccagcggccattcttttggattttcatggacaacttgctgctgaccgaggatgaccaggaaactaccactcggttcctgcagaccgaagccgtgaccctgcaggacgtgagaggccgggactaccagaacgccatgcgggtgtggtccaacatccctggactgaaaagcaagcacgcacctctgacccctaaagaagaggagtacctgcaggcccaggtgcggagcagaagcaagctggacgcccctaaggtggatctgctggtgaagaattgcctcctgcccctgagagagtacttcaagtatttcagccagaatagtctgcccctgggcggcccaagcagcggcgcccctcctcccagcggcggcagcccagccggctccccaacctctaccgaggagggcacctctgagtccgccacccccgagagcggccctggcacctccaccgagcccagcgagggcagcgcacccggcagccctgccggcagccccacctccacagaggagggaaccagcaccgagcccagcgaaggcagcgccccaggcaccagcaccgagcctagtgagggcggctctggcggcggcagcgcccaggagattaaacggatcaacaagatcagaagaagacttgtgaaagacagcaacaccaagaaggccggcaagacaggccccatgaaaaccctgctggttagagtgatgacacccgatctgagagagcggctggaaaacctgagaaagaagcctgaaaatatcccccagcccatcagcaatacatctagagccaacctgaataagctgctgaccgattacaccgaaatgaagaaggcgatcctgcatgtgtactgggaagagttccagaaggaccctgtgggcctgatgagccgggtggcccagcctgccagcaagaagatcgatcagaacaagctgaaacctgagatggacgagaagggcaacctgaccaccgccggctttgcctgctctcagtgtggccagcccctgttcgtgtacaagctggagcaggtgtctgagaagggcaaggcttacaccaactacttcggacggtgcaatgtggccgagcacgaaaagctgatcctgctggcccagctgaagcccgagaaggatagcgacgaagccgtgacatatagcctgggaaagtttgggcagagggccctggatttctacagcattcatgtgaccaaggagtccacccaccccgtgaagcccctggcccagatcgccggaaacagatacgcctccggacctgtgggaaaggccctgagcgacgcatgtatgggcacaatcgcctccttcctgtctaagtaccaggacatcatcatcgaacaccagaaggtggtgaagggcaaccagaagagactggagagcctgcgggagctggccggcaaggaaaacctggaataccctagcgtgaccctgccacctcagcctcacaccaaggagggcgttgatgcctacaacgaagtgatcgcccgggtgcgaatgtgggtgaacctgaacctgtggcagaagctgaagctaagcagagatgatgccaagcctctgctgagactgaagggattcccttcctttcctctggtcgagagacaggccaacgaagtggactggtgggacatggtgtgtaacgtgaagaagctgatcaacgagaaaaaggaggatggcaaggtgttttggcagaatctggctggctacaagagacaggaagccctgagaccatacctgagcagcgaggaagatcggaagaagggaaagaaattcgctcggtaccagctgggcgacctgctgctgcacctggaaaagaagcacggcgaggactggggaaaggtgtacgacgaggcctgggagcggattgacaagaaagtggaaggcctgagcaagcacatcaagctggaagaggaacggagaagcgaggacgcccagagcaaggccgccctgaccgactggctgcgggctaaggccagcttcgtgatcgagggcctgaaggaggccgacaaggacgagttctgcagatgcgagctgaagctgcagaagtggtacggggacctgcggggaaagcccttcgccatcgaagccgagaacagcatcctggacatcagcggcttcagcaagcagtacaactgtgccttcatctggcagaaggacggcgtgaagaagctgaacctgtacctgatcatcaactacttcaagggcggcaagctgcggttcaagaagatcaaacctgaagccttcgaagccaacagattctacaccgtgatcaacaaaaagagcggcgagatcgtgcccatggaggtgaacttcaacttcgacgaccccaacctgatcatcctgcctctggcctttggcaagagacagggcagagaattcatctggaacgacctgctgtccctggaaaccggcagcctgaagctggccaacggaagagtgatcgagaagacactgtacaacagaagaacccggcaggatgagcctgccctgttcgtggccctgaccttcgagcggcgggaggtcctggactcctccaatatcaaaccaatgaacctgatcggcgtggcaagaggcgaaaacatccccgccgtgatcgccctgaccgaccccgagggctgcccactgagccggtttaaggatagcctgggaaacccaacccacatcctgagaatcggcgagagctataaggagaagcagcggaccatccaggccaagaaggaggtggagcagcggagagccggcggctacagccggaagtacgccagcaaagccaagaatctggcagacgatatggtgagaaacaccgctagagatctgctgtactacgccgtgacccaggatgccatgctgatcttcgccaacctgagccggggcttcggccggcagggcaagcggaccttcatggccgagagacagtacacacggatggaggactggctgaccgccaagctggcctacgagggcctgagcaagacctacctgtccaagacactggcccagtacacctccaagacatgcagcaactgtgggtttaccatcaccagcgccgactacgacagggtgctggagaagctgaagaagacagcaacaggctggatgaccacaattaacggcaaggagctgaaggtggagggccagattacctactacaacagatacaagagacagaacgtagtcaaggacctgtccgtcgagctggatagactgagcgaagaatctgtgaacaacgacatctcctcctggacaaagggcagaagcggagaagctctgagcctcctgaagaaaagattctcccatagacccgtgcaggagaagttcgtgtgcctgaactgcggcttcgagacacacgcagccgagcaagccgccctgaacatcgccagatcctggctgttcctgcggagccaggagtacaagaaataccagacaaacaagacaaccggcaacaccgataagagagccttcgtcgagacctggcagtccttttaccggaagaagcttaaggaggtgtggaaacctgccgtgcggtctggcggatctggcggaggctccacaagcaccatgaccaccgtgagcagcaccgccaggccccaggagagcgtggccttcgacgacgtggccgtgtacttcaccaagaaggagtgggccatcatggtgcccgaccagagggccctgtacagggacgtgatgctggagaactacgaggccgtggccttcgtggtgccccccaccagcaagcccgccctggtgagccacctggagcagggcaaggagccctgcttcacccagccccagggcgtgaccagccccaagaaaaagagaaaagtctaagctgccttctgcggggcttgccttctggccatgcccttcttctctcccttgcacctgtacctcttggtctttgaataaagcctgagtaggaaggctagcaaaaaaaaaaaaaaaaaaaaaaaaaaaaaaaaaaaaaaaaaaaaaaaaaaaaaaaaaaaaaaaaaaaaaaaaaaaaaaaa

SEQ ID NO: 4060 - RNA, 5419 nt, synthetic construct
  source 1..5419: mol_type = other RNA
aggaaataagagagaaaagaagagtaagaagaaatataagagccaccatggcccctaagaagaagcgtaaagtgagccgggtgaacggcagcggcagcggcggcggcatgaaccacgaccaggagttcgacccccctaaggtgtaccctcccgtccccgccgagaagagaaagcccatccgggtcctgagcctgttcgatggcatcgccaccggtctgctggtgctgaaggacctgggcatccaggtggataggtacattgcctccgaggtgtgcgaggactccatcaccgtgggaatggtgcgtcatcagggcaagatcatgtacgtgggcgacgtgcggagcgtgacacagaagcatatccaggagtggggccctttcgacctggtgatcggcggcagcccttgcaatgacctgagcatcgtgaacccagcccggaagggcctgtacgagggaaccggcagactgttcttcgagttttacagactgctgcacgacgcccggcctaaggaaggcgacgaccggcccttcttttggctgttcgagaatgtggtggccatgggagtcagcgacaagcgggatattagccggttcctggagagcaaccccgtgatgatcgatgccaaggaagtgagcgccgcccaccgggccagatacttctggggcaatctgcctggcatgaacagacccctggccagcaccgtgaacgacaagctggagctgcaggagtgcctggagcacggccggatcgccaagttcagcaaggtgagaaccatcaccacccgaagcaacagcatcaaacaaggcaaggaccagcactttcctgtgttcatgaacgagaaggaggacatcctgtggtgtaccgagatggagagagtgttcgggttcccagtccactacacagatgtcagcaacatgtctagactggccagacagagactgctgggaagaagctggtccgtccctgtgatcagacacctgttcgcccctctgaaggagtacttcgcctgcgtgagcagcggcaacagcaacgccaacagccggggccccagcttctctagcggcctggtgccactgtccctgagagggagccacatgggccccatggagatctacaaaaccgtgagcgcctggaagcggcagcctgtgcgcgtgctgagcctgtttcggaatatcgataaagtcctgaaaagcctgggattcctggagagcggctctggctccggcggtggcaccctgaagtacgtggaggatgtgacaaacgtggtcagacgggatgtggagaagtggggccccttcgatctggtgtacggcagcacccaacccctgggcagctcttgtgaccggtgccctggctggtacatgtttcagttccaccggatcctgcagtacgccctgccgagacaggagtcccagcggccattcttttggattttcatggacaacttgctgctgaccgaggatgaccaggaaactaccactcggttcctgcagaccgaagccgtgaccctgcaggacgtgagaggccgggactaccagaacgccatgcgggtgtggtccaacatccctggactgaaaagcaagcacgcacctctgacccctaaagaagaggagtacctgcaggcccaggtgcggagcagaagcaagctggacgcccctaaggtggatctgctggtgaagaattgcctcctgcccctgagagagtacttcaagtatttcagccagaatagtctgcccctgggcggcccaagcagcggcgcccctcctcccagcggcggcagcccagccggctccccaacctctaccgaggagggcacctctgagtccgccacccccgagagcggccctggcacctccaccgagcccagcgagggcagcgcacccggcagccctgccggcagccccacctccacagaggagggaaccagcaccgagcccagcgaaggcagcgccccaggcaccagcaccgagcctagtgagggcggctctggcggcggcagcgcccaggagattaaacggatcaacaagatcagaagaagacttgtgaaagacagcaacaccaagaaggccggcaagacaggccccatgaaaaccctgctggttagagtgatgacacccgatctgagagagcggctggaaaacctgagaaagaagcctgaaaatatcccccagcccatcagcaatacatctagagccaacctgaataagctgctgaccgattacaccgaaatgaagaaggcgatcctgcatgtgtactgggaagagttccagaaggaccctgtgggcctgatgagccgggtggcccagcctgccagcaagaagatcgatcagaacaagctgaaacctgagatggacgagaagggcaacctgaccaccgccggctttgcctgctctcagtgtggccagcccctgttcgtgtacaagctggagcaggtgtctgagaagggcaaggcttacaccaactacttcggacggtgcaatgtggccgagcacgaaaagctgatcctgctggcccagctgaagcccgagaaggatagcgacgaagccgtgacatatagcctgggaaagtttgggcagagggccctggatttctacagcattcatgtgaccaaggagtccacccaccccgtgaagcccctggcccagatcgccggaaacagatacgcctccggacctgtgggaaaggccctgagcgacgcatgtatgggcacaatcgcctccttcctgtctaagtaccaggacatcatcatcgaacaccagaaggtggtgaagggcaaccagaagagactggagagcctgcgggagctggccggcaaggaaaacctggaataccctagcgtgaccctgccacctcagcctcacaccaaggagggcgttgatgcctacaacgaagtgatcgcccgggtgcgaatgtgggtgaacctgaacctgtggcagaagctgaagctaagcagagatgatgccaagcctctgctgagactgaagggattcccttcctttcctctggtcgagagacaggccaacgaagtggactggtgggacatggtgtgtaacgtgaagaagctgatcaacgagaaaaaggaggatggcaaggtgttttggcagaatctggctggctacaagagacaggaagccctgagaccatacctgagcagcgaggaagatcggaagaagggaaagaaattcgctcggtaccagctgggcgacctgctgctgcacctggaaaagaagcacggcgaggactggggaaaggtgtacgacgaggcctgggagcggattgacaagaaagtggaaggcctgagcaagcacatcaagctggaagaggaacggagaagcgaggacgcccagagcaaggccgccctgaccgactggctgcgggctaaggccagcttcgtgatcgagggcctgaaggaggccgacaaggacgagttctgcagatgcgagctgaagctgcagaagtggtacggggacctgcggggaaagcccttcgccatcgaagccgagaacagcatcctggacatcagcggcttcagcaagcagtacaactgtgccttcatctggcagaaggacggcgtgaagaagctgaacctgtacctgatcatcaactacttcaagggcggcaagctgcggttcaagaagatcaaacctgaagccttcgaagccaacagattctacaccgtgatcaacaaaaagagcggcgagatcgtgcccatggaggtgaacttcaacttcgacgaccccaacctgatcatcctgcctctggcctttggcaagagacagggcagagaattcatctggaacgacctgctgtccctggaaaccggcagcctgaagctggccaacggaagagtgatcgagaagacactgtacaacagaagaacccggcaggatgagcctgccctgttcgtggccctgaccttcgagcggcgggaggtcctggactcctccaatatcaaaccaatgaacctgatcggcgtggcaagaggcgaaaacatccccgccgtgatcgccctgaccgaccccgagggctgcccactgagccggtttaaggatagcctgggaaacccaacccacatcctgagaatcggcgagagctataaggagaagcagcggaccatccaggccaagaaggaggtggagcagcggagagccggcggctacagccggaagtacgccagcaaagccaagaatctggcagacgatatggtgagaaacaccgctagagatctgctgtactacgccgtgacccaggatgccatgctgatcttcgccaacctgagccggggcttcggccggcagggcaagcggaccttcatggccgagagacagtacacacggatggaggactggctgaccgccaagctggcctacgagggcctgagcaagacctacctgtccaagacactggcccagtacacctccaagacatgcagcaactgtgggtttaccatcaccagcgccgactacgacagggtgctggagaagctgaagaagacagcaacaggctggatgaccacaattaacggcaaggagctgaaggtggagggccagattacctactacaacagatacaagagacagaacgtagtcaaggacctgtccgtcgagctggatagactgagcgaagaatctgtgaacaacgacatctcctcctggacaaagggcagaagcggagaagctctgagcctcctgaagaaaagattctcccatagacccgtgcaggagaagttcgtgtgcctgaactgcggcttcgagacacacgcagccgagcaagccgccctgaacatcgccagatcctggctgttcctgcggagccaggagtacaagaaataccagacaaacaagacaaccggcaacaccgataagagagccttcgtcgagacctggcagtccttttaccggaagaagcttaaggaggtgtggaaacctgccgtgcggtctggcggatctggcggaggctccacaagcttccagggccccgtgaccttcagggacgtggccatcgacttcagccaggaggagtggaagtggctgcagcccgcccagagggacctgtacaggtgcgtgatgctggagaactacggccacctggtgagcctgggcctgagcatcagcaagcccgacgtggtgagcctgctggagcagggcaaggagccctggctggagcagggcgacgtgaggaggaacctgttcagcgtgagccagagcaacaccagccccaagaaaaagagaaaagtctaagctgccttctgcggggcttgccttctggccatgcccttcttctctcccttgcacctgtacctcttggtctttgaataaagcctgagtaggaaggctagcaaaaaaaaaaaaaaaaaaaaaaaaaaaaaaaaaaaaaaaaaaaaaaaaaaaaaaaaaaaaaaaaaaaaaaaaaaaaaaaa

SEQ ID NO: 4061 - RNA, 5419 nt, synthetic construct
  source 1..5419: mol_type = other RNA
aggaaataagagagaaaagaagagtaagaagaaatataagagccaccatggcccctaagaagaagcgtaaagtgagccgggtgaacggcagcggcagcggcggcggcatgaaccacgaccaggagttcgacccccctaaggtgtaccctcccgtccccgccgagaagagaaagcccatccgggtcctgagcctgttcgatggcatcgccaccggtctgctggtgctgaaggacctgggcatccaggtggataggtacattgcctccgaggtgtgcgaggactccatcaccgtgggaatggtgcgtcatcagggcaagatcatgtacgtgggcgacgtgcggagcgtgacacagaagcatatccaggagtggggccctttcgacctggtgatcggcggcagcccttgcaatgacctgagcatcgtgaacccagcccggaagggcctgtacgagggaaccggcagactgttcttcgagttttacagactgctgcacgacgcccggcctaaggaaggcgacgaccggcccttcttttggctgttcgagaatgtggtggccatgggagtcagcgacaagcgggatattagccggttcctggagagcaaccccgtgatgatcgatgccaaggaagtgagcgccgcccaccgggccagatacttctggggcaatctgcctggcatgaacagacccctggccagcaccgtgaacgacaagctggagctgcaggagtgcctggagcacggccggatcgccaagttcagcaaggtgagaaccatcaccacccgaagcaacagcatcaaacaaggcaaggaccagcactttcctgtgttcatgaacgagaaggaggacatcctgtggtgtaccgagatggagagagtgttcgggttcccagtccactacacagatgtcagcaacatgtctagactggccagacagagactgctgggaagaagctggtccgtccctgtgatcagacacctgttcgcccctctgaaggagtacttcgcctgcgtgagcagcggcaacagcaacgccaacagccggggccccagcttctctagcggcctggtgccactgtccctgagagggagccacatgggccccatggagatctacaaaaccgtgagcgcctggaagcggcagcctgtgcgcgtgctgagcctgtttcggaatatcgataaagtcctgaaaagcctgggattcctggagagcggctctggctccggcggtggcaccctgaagtacgtggaggatgtgacaaacgtggtcagacgggatgtggagaagtggggccccttcgatctggtgtacggcagcacccaacccctgggcagctcttgtgaccggtgccctggctggtacatgtttcagttccaccggatcctgcagtacgccctgccgagacaggagtcccagcggccattcttttggattttcatggacaacttgctgctgaccgaggatgaccaggaaactaccactcggttcctgcagaccgaagccgtgaccctgcaggacgtgagaggccgggactaccagaacgccatgcgggtgtggtccaacatccctggactgaaaagcaagcacgcacctctgacccctaaagaagaggagtacctgcaggcccaggtgcggagcagaagcaagctggacgcccctaaggtggatctgctggtgaagaattgcctcctgcccctgagagagtacttcaagtatttcagccagaatagtctgcccctgggcggcccaagcagcggcgcccctcctcccagcggcggcagcccagccggctccccaacctctaccgaggagggcacctctgagtccgccacccccgagagcggccctggcacctccaccgagcccagcgagggcagcgcacccggcagccctgccggcagccccacctccacagaggagggaaccagcaccgagcccagcgaaggcagcgccccaggcaccagcaccgagcctagtgagggcggctctggcggcggcagcgcccaggagattaaacggatcaacaagatcagaagaagacttgtgaaagacagcaacaccaagaaggccggcaagacaggccccatgaaaaccctgctggttagagtgatgacacccgatctgagagagcggctggaaaacctgagaaagaagcctgaaaatatcccccagcccatcagcaatacatctagagccaacctgaataagctgctgaccgattacaccgaaatgaagaaggcgatcctgcatgtgtactgggaagagttccagaaggaccctgtgggcctgatgagccgggtggcccagcctgccagcaagaagatcgatcagaacaagctgaaacctgagatggacgagaagggcaacctgaccaccgccggctttgcctgctctcagtgtggccagcccctgttcgtgtacaagctggagcaggtgtctgagaagggcaaggcttacaccaactacttcggacggtgcaatgtggccgagcacgaaaagctgatcctgctggcccagctgaagcccgagaaggatagcgacgaagccgtgacatatagcctgggaaagtttgggcagagggccctggatttctacagcattcatgtgaccaaggagtccacccaccccgtgaagcccctggcccagatcgccggaaacagatacgcctccggacctgtgggaaaggccctgagcgacgcatgtatgggcacaatcgcctccttcctgtctaagtaccaggacatcatcatcgaacaccagaaggtggtgaagggcaaccagaagagactggagagcctgcgggagctggccggcaaggaaaacctggaataccctagcgtgaccctgccacctcagcctcacaccaaggagggcgttgatgcctacaacgaagtgatcgcccgggtgcgaatgtgggtgaacctgaacctgtggcagaagctgaagctaagcagagatgatgccaagcctctgctgagactgaagggattcccttcctttcctctggtcgagagacaggccaacgaagtggactggtgggacatggtgtgtaacgtgaagaagctgatcaacgagaaaaaggaggatggcaaggtgttttggcagaatctggctggctacaagagacaggaagccctgagaccatacctgagcagcgaggaagatcggaagaagggaaagaaattcgctcggtaccagctgggcgacctgctgctgcacctggaaaagaagcacggcgaggactggggaaaggtgtacgacgaggcctgggagcggattgacaagaaagtggaaggcctgagcaagcacatcaagctggaagaggaacggagaagcgaggacgcccagagcaaggccgccctgaccgactggctgcgggctaaggccagcttcgtgatcgagggcctgaaggaggccgacaaggacgagttctgcagatgcgagctgaagctgcagaagtggtacggggacctgcggggaaagcccttcgccatcgaagccgagaacagcatcctggacatcagcggcttcagcaagcagtacaactgtgccttcatctggcagaaggacggcgtgaagaagctgaacctgtacctgatcatcaactacttcaagggcggcaagctgcggttcaagaagatcaaacctgaagccttcgaagccaacagattctacaccgtgatcaacaaaaagagcggcgagatcgtgcccatggaggtgaacttcaacttcgacgaccccaacctgatcatcctgcctctggcctttggcaagagacagggcagagaattcatctggaacgacctgctgtccctggaaaccggcagcctgaagctggccaacggaagagtgatcgagaagacactgtacaacagaagaacccggcaggatgagcctgccctgttcgtggccctgaccttcgagcggcgggaggtcctggactcctccaatatcaaaccaatgaacctgatcggcgtggcaagaggcgaaaacatccccgccgtgatcgccctgaccgaccccgagggctgcccactgagccggtttaaggatagcctgggaaacccaacccacatcctgagaatcggcgagagctataaggagaagcagcggaccatccaggccaagaaggaggtggagcagcggagagccggcggctacagccggaagtacgccagcaaagccaagaatctggcagacgatatggtgagaaacaccgctagagatctgctgtactacgccgtgacccaggatgccatgctgatcttcgccaacctgagccggggcttcggccggcagggcaagcggaccttcatggccgagagacagtacacacggatggaggactggctgaccgccaagctggcctacgagggcctgagcaagacctacctgtccaagacactggcccagtacacctccaagacatgcagcaactgtgggtttaccatcaccagcgccgactacgacagggtgctggagaagctgaagaagacagcaacaggctggatgaccacaattaacggcaaggagctgaaggtggagggccagattacctactacaacagatacaagagacagaacgtagtcaaggacctgtccgtcgagctggatagactgagcgaagaatctgtgaacaacgacatctcctcctggacaaagggcagaagcggagaagctctgagcctcctgaagaaaagattctcccatagacccgtgcaggagaagttcgtgtgcctgaactgcggcttcgagacacacgcagccgagcaagccgccctgaacatcgccagatcctggctgttcctgcggagccaggagtacaagaaataccagacaaacaagacaaccggcaacaccgataagagagccttcgtcgagacctggcagtccttttaccggaagaagcttaaggaggtgtggaaacctgccgtgcggtctggcggatctggcggaggctccacaagcgcccagatgctggtgaccttcaaggacgtggccgtgaccttcacccaggaggagtggaggcagctggacctgacccagaggaccctgtacagggaggtgatgctggagacctgcggcctgctggtgagcctgggccacagggtgcccaagcccgagctggtgcacctgctggagcacggccaggagctgtggaccgtgaagaggggcctgagcgaccccacctgcgccggcgacaggacccagaccagccccaagaaaaagagaaaagtctaagctgccttctgcggggcttgccttctggccatgcccttcttctctcccttgcacctgtacctcttggtctttgaataaagcctgagtaggaaggctagcaaaaaaaaaaaaaaaaaaaaaaaaaaaaaaaaaaaaaaaaaaaaaaaaaaaaaaaaaaaaaaaaaaaaaaaaaaaaaaaa

SEQ ID NO: 4062 - RNA, 5419 nt, synthetic construct
  source 1..5419: mol_type = other RNA
aggaaataagagagaaaagaagagtaagaagaaatataagagccaccatggcccctaagaagaagcgtaaagtgagccgggtgaacggcagcggcagcggcggcggcatgaaccacgaccaggagttcgacccccctaaggtgtaccctcccgtccccgccgagaagagaaagcccatccgggtcctgagcctgttcgatggcatcgccaccggtctgctggtgctgaaggacctgggcatccaggtggataggtacattgcctccgaggtgtgcgaggactccatcaccgtgggaatggtgcgtcatcagggcaagatcatgtacgtgggcgacgtgcggagcgtgacacagaagcatatccaggagtggggccctttcgacctggtgatcggcggcagcccttgcaatgacctgagcatcgtgaacccagcccggaagggcctgtacgagggaaccggcagactgttcttcgagttttacagactgctgcacgacgcccggcctaaggaaggcgacgaccggcccttcttttggctgttcgagaatgtggtggccatgggagtcagcgacaagcgggatattagccggttcctggagagcaaccccgtgatgatcgatgccaaggaagtgagcgccgcccaccgggccagatacttctggggcaatctgcctggcatgaacagacccctggccagcaccgtgaacgacaagctggagctgcaggagtgcctggagcacggccggatcgccaagttcagcaaggtgagaaccatcaccacccgaagcaacagcatcaaacaaggcaaggaccagcactttcctgtgttcatgaacgagaaggaggacatcctgtggtgtaccgagatggagagagtgttcgggttcccagtccactacacagatgtcagcaacatgtctagactggccagacagagactgctgggaagaagctggtccgtccctgtgatcagacacctgttcgcccctctgaaggagtacttcgcctgcgtgagcagcggcaacagcaacgccaacagccggggccccagcttctctagcggcctggtgccactgtccctgagagggagccacatgggccccatggagatctacaaaaccgtgagcgcctggaagcggcagcctgtgcgcgtgctgagcctgtttcggaatatcgataaagtcctgaaaagcctgggattcctggagagcggctctggctccggcggtggcaccctgaagtacgtggaggatgtgacaaacgtggtcagacgggatgtggagaagtggggccccttcgatctggtgtacggcagcacccaacccctgggcagctcttgtgaccggtgccctggctggtacatgtttcagttccaccggatcctgcagtacgccctgccgagacaggagtcccagcggccattcttttggattttcatggacaacttgctgctgaccgaggatgaccaggaaactaccactcggttcctgcagaccgaagccgtgaccctgcaggacgtgagaggccgggactaccagaacgccatgcgggtgtggtccaacatccctggactgaaaagcaagcacgcacctctgacccctaaagaagaggagtacctgcaggcccaggtgcggagcagaagcaagctggacgcccctaaggtggatctgctggtgaagaattgcctcctgcccctgagagagtacttcaagtatttcagccagaatagtctgcccctgggcggcccaagcagcggcgcccctcctcccagcggcggcagcccagccggctccccaacctctaccgaggagggcacctctgagtccgccacccccgagagcggccctggcacctccaccgagcccagcgagggcagcgcacccggcagccctgccggcagccccacctccacagaggagggaaccagcaccgagcccagcgaaggcagcgccccaggcaccagcaccgagcctagtgagggcggctctggcggcggcagcgcccaggagattaaacggatcaacaagatcagaagaagacttgtgaaagacagcaacaccaagaaggccggcaagacaggccccatgaaaaccctgctggttagagtgatgacacccgatctgagagagcggctggaaaacctgagaaagaagcctgaaaatatcccccagcccatcagcaatacatctagagccaacctgaataagctgctgaccgattacaccgaaatgaagaaggcgatcctgcatgtgtactgggaagagttccagaaggaccctgtgggcctgatgagccgggtggcccagcctgccagcaagaagatcgatcagaacaagctgaaacctgagatggacgagaagggcaacctgaccaccgccggctttgcctgctctcagtgtggccagcccctgttcgtgtacaagctggagcaggtgtctgagaagggcaaggcttacaccaactacttcggacggtgcaatgtggccgagcacgaaaagctgatcctgctggcccagctgaagcccgagaaggatagcgacgaagccgtgacatatagcctgggaaagtttgggcagagggccctggatttctacagcattcatgtgaccaaggagtccacccaccccgtgaagcccctggcccagatcgccggaaacagatacgcctccggacctgtgggaaaggccctgagcgacgcatgtatgggcacaatcgcctccttcctgtctaagtaccaggacatcatcatcgaacaccagaaggtggtgaagggcaaccagaagagactggagagcctgcgggagctggccggcaaggaaaacctggaataccctagcgtgaccctgccacctcagcctcacaccaaggagggcgttgatgcctacaacgaagtgatcgcccgggtgcgaatgtgggtgaacctgaacctgtggcagaagctgaagctaagcagagatgatgccaagcctctgctgagactgaagggattcccttcctttcctctggtcgagagacaggccaacgaagtggactggtgggacatggtgtgtaacgtgaagaagctgatcaacgagaaaaaggaggatggcaaggtgttttggcagaatctggctggctacaagagacaggaagccctgagaccatacctgagcagcgaggaagatcggaagaagggaaagaaattcgctcggtaccagctgggcgacctgctgctgcacctggaaaagaagcacggcgaggactggggaaaggtgtacgacgaggcctgggagcggattgacaagaaagtggaaggcctgagcaagcacatcaagctggaagaggaacggagaagcgaggacgcccagagcaaggccgccctgaccgactggctgcgggctaaggccagcttcgtgatcgagggcctgaaggaggccgacaaggacgagttctgcagatgcgagctgaagctgcagaagtggtacggggacctgcggggaaagcccttcgccatcgaagccgagaacagcatcctggacatcagcggcttcagcaagcagtacaactgtgccttcatctggcagaaggacggcgtgaagaagctgaacctgtacctgatcatcaactacttcaagggcggcaagctgcggttcaagaagatcaaacctgaagccttcgaagccaacagattctacaccgtgatcaacaaaaagagcggcgagatcgtgcccatggaggtgaacttcaacttcgacgaccccaacctgatcatcctgcctctggcctttggcaagagacagggcagagaattcatctggaacgacctgctgtccctggaaaccggcagcctgaagctggccaacggaagagtgatcgagaagacactgtacaacagaagaacccggcaggatgagcctgccctgttcgtggccctgaccttcgagcggcgggaggtcctggactcctccaatatcaaaccaatgaacctgatcggcgtggcaagaggcgaaaacatccccgccgtgatcgccctgaccgaccccgagggctgcccactgagccggtttaaggatagcctgggaaacccaacccacatcctgagaatcggcgagagctataaggagaagcagcggaccatccaggccaagaaggaggtggagcagcggagagccggcggctacagccggaagtacgccagcaaagccaagaatctggcagacgatatggtgagaaacaccgctagagatctgctgtactacgccgtgacccaggatgccatgctgatcttcgccaacctgagccggggcttcggccggcagggcaagcggaccttcatggccgagagacagtacacacggatggaggactggctgaccgccaagctggcctacgagggcctgagcaagacctacctgtccaagacactggcccagtacacctccaagacatgcagcaactgtgggtttaccatcaccagcgccgactacgacagggtgctggagaagctgaagaagacagcaacaggctggatgaccacaattaacggcaaggagctgaaggtggagggccagattacctactacaacagatacaagagacagaacgtagtcaaggacctgtccgtcgagctggatagactgagcgaagaatctgtgaacaacgacatctcctcctggacaaagggcagaagcggagaagctctgagcctcctgaagaaaagattctcccatagacccgtgcaggagaagttcgtgtgcctgaactgcggcttcgagacacacgcagccgagcaagccgccctgaacatcgccagatcctggctgttcctgcggagccaggagtacaagaaataccagacaaacaagacaaccggcaacaccgataagagagccttcgtcgagacctggcagtccttttaccggaagaagcttaaggaggtgtggaaacctgccgtgcggtctggcggatctggcggaggctccacaagcaggcccagggccctgaagttcgtggacgtggccgtgtacttcagcagcgaggagtggggctgcctgaggcccgcccagagggccctgtacagggacgtgatgagggagacctacggccacctgggcgccctgggcttccccggccccaagcccgccctgatcagctggatggagcaggagagcgaggcctggagcagcgccgcccaggaccccgagaacggcgagagcctgggcggcgccaggaccagccccaagaaaaagagaaaagtctaagctgccttctgcggggcttgccttctggccatgcccttcttctctcccttgcacctgtacctcttggtctttgaataaagcctgagtaggaaggctagcaaaaaaaaaaaaaaaaaaaaaaaaaaaaaaaaaaaaaaaaaaaaaaaaaaaaaaaaaaaaaaaaaaaaaaaaaaaaaaaa

SEQ ID NO: 4063 - RNA, 5419 nt, synthetic construct
  source 1..5419: mol_type = other RNA
aggaaataagagagaaaagaagagtaagaagaaatataagagccaccatggcccctaagaagaagcgtaaagtgagccgggtgaacggcagcggcagcggcggcggcatgaaccacgaccaggagttcgacccccctaaggtgtaccctcccgtccccgccgagaagagaaagcccatccgggtcctgagcctgttcgatggcatcgccaccggtctgctggtgctgaaggacctgggcatccaggtggataggtacattgcctccgaggtgtgcgaggactccatcaccgtgggaatggtgcgtcatcagggcaagatcatgtacgtgggcgacgtgcggagcgtgacacagaagcatatccaggagtggggccctttcgacctggtgatcggcggcagcccttgcaatgacctgagcatcgtgaacccagcccggaagggcctgtacgagggaaccggcagactgttcttcgagttttacagactgctgcacgacgcccggcctaaggaaggcgacgaccggcccttcttttggctgttcgagaatgtggtggccatgggagtcagcgacaagcgggatattagccggttcctggagagcaaccccgtgatgatcgatgccaaggaagtgagcgccgcccaccgggccagatacttctggggcaatctgcctggcatgaacagacccctggccagcaccgtgaacgacaagctggagctgcaggagtgcctggagcacggccggatcgccaagttcagcaaggtgagaaccatcaccacccgaagcaacagcatcaaacaaggcaaggaccagcactttcctgtgttcatgaacgagaaggaggacatcctgtggtgtaccgagatggagagagtgttcgggttcccagtccactacacagatgtcagcaacatgtctagactggccagacagagactgctgggaagaagctggtccgtccctgtgatcagacacctgttcgcccctctgaaggagtacttcgcctgcgtgagcagcggcaacagcaacgccaacagccggggccccagcttctctagcggcctggtgccactgtccctgagagggagccacatgggccccatggagatctacaaaaccgtgagcgcctggaagcggcagcctgtgcgcgtgctgagcctgtttcggaatatcgataaagtcctgaaaagcctgggattcctggagagcggctctggctccggcggtggcaccctgaagtacgtggaggatgtgacaaacgtggtcagacgggatgtggagaagtggggccccttcgatctggtgtacggcagcacccaacccctgggcagctcttgtgaccggtgccctggctggtacatgtttcagttccaccggatcctgcagtacgccctgccgagacaggagtcccagcggccattcttttggattttcatggacaacttgctgctgaccgaggatgaccaggaaactaccactcggttcctgcagaccgaagccgtgaccctgcaggacgtgagaggccgggactaccagaacgccatgcgggtgtggtccaacatccctggactgaaaagcaagcacgcacctctgacccctaaagaagaggagtacctgcaggcccaggtgcggagcagaagcaagctggacgcccctaaggtggatctgctggtgaagaattgcctcctgcccctgagagagtacttcaagtatttcagccagaatagtctgcccctgggcggcccaagcagcggcgcccctcctcccagcggcggcagcccagccggctccccaacctctaccgaggagggcacctctgagtccgccacccccgagagcggccctggcacctccaccgagcccagcgagggcagcgcacccggcagccctgccggcagccccacctccacagaggagggaaccagcaccgagcccagcgaaggcagcgccccaggcaccagcaccgagcctagtgagggcggctctggcggcggcagcgcccaggagattaaacggatcaacaagatcagaagaagacttgtgaaagacagcaacaccaagaaggccggcaagacaggccccatgaaaaccctgctggttagagtgatgacacccgatctgagagagcggctggaaaacctgagaaagaagcctgaaaatatcccccagcccatcagcaatacatctagagccaacctgaataagctgctgaccgattacaccgaaatgaagaaggcgatcctgcatgtgtactgggaagagttccagaaggaccctgtgggcctgatgagccgggtggcccagcctgccagcaagaagatcgatcagaacaagctgaaacctgagatggacgagaagggcaacctgaccaccgccggctttgcctgctctcagtgtggccagcccctgttcgtgtacaagctggagcaggtgtctgagaagggcaaggcttacaccaactacttcggacggtgcaatgtggccgagcacgaaaagctgatcctgctggcccagctgaagcccgagaaggatagcgacgaagccgtgacatatagcctgggaaagtttgggcagagggccctggatttctacagcattcatgtgaccaaggagtccacccaccccgtgaagcccctggcccagatcgccggaaacagatacgcctccggacctgtgggaaaggccctgagcgacgcatgtatgggcacaatcgcctccttcctgtctaagtaccaggacatcatcatcgaacaccagaaggtggtgaagggcaaccagaagagactggagagcctgcgggagctggccggcaaggaaaacctggaataccctagcgtgaccctgccacctcagcctcacaccaaggagggcgttgatgcctacaacgaagtgatcgcccgggtgcgaatgtgggtgaacctgaacctgtggcagaagctgaagctaagcagagatgatgccaagcctctgctgagactgaagggattcccttcctttcctctggtcgagagacaggccaacgaagtggactggtgggacatggtgtgtaacgtgaagaagctgatcaacgagaaaaaggaggatggcaaggtgttttggcagaatctggctggctacaagagacaggaagccctgagaccatacctgagcagcgaggaagatcggaagaagggaaagaaattcgctcggtaccagctgggcgacctgctgctgcacctggaaaagaagcacggcgaggactggggaaaggtgtacgacgaggcctgggagcggattgacaagaaagtggaaggcctgagcaagcacatcaagctggaagaggaacggagaagcgaggacgcccagagcaaggccgccctgaccgactggctgcgggctaaggccagcttcgtgatcgagggcctgaaggaggccgacaaggacgagttctgcagatgcgagctgaagctgcagaagtggtacggggacctgcggggaaagcccttcgccatcgaagccgagaacagcatcctggacatcagcggcttcagcaagcagtacaactgtgccttcatctggcagaaggacggcgtgaagaagctgaacctgtacctgatcatcaactacttcaagggcggcaagctgcggttcaagaagatcaaacctgaagccttcgaagccaacagattctacaccgtgatcaacaaaaagagcggcgagatcgtgcccatggaggtgaacttcaacttcgacgaccccaacctgatcatcctgcctctggcctttggcaagagacagggcagagaattcatctggaacgacctgctgtccctggaaaccggcagcctgaagctggccaacggaagagtgatcgagaagacactgtacaacagaagaacccggcaggatgagcctgccctgttcgtggccctgaccttcgagcggcgggaggtcctggactcctccaatatcaaaccaatgaacctgatcggcgtggcaagaggcgaaaacatccccgccgtgatcgccctgaccgaccccgagggctgcccactgagccggtttaaggatagcctgggaaacccaacccacatcctgagaatcggcgagagctataaggagaagcagcggaccatccaggccaagaaggaggtggagcagcggagagccggcggctacagccggaagtacgccagcaaagccaagaatctggcagacgatatggtgagaaacaccgctagagatctgctgtactacgccgtgacccaggatgccatgctgatcttcgccaacctgagccggggcttcggccggcagggcaagcggaccttcatggccgagagacagtacacacggatggaggactggctgaccgccaagctggcctacgagggcctgagcaagacctacctgtccaagacactggcccagtacacctccaagacatgcagcaactgtgggtttaccatcaccagcgccgactacgacagggtgctggagaagctgaagaagacagcaacaggctggatgaccacaattaacggcaaggagctgaaggtggagggccagattacctactacaacagatacaagagacagaacgtagtcaaggacctgtccgtcgagctggatagactgagcgaagaatctgtgaacaacgacatctcctcctggacaaagggcagaagcggagaagctctgagcctcctgaagaaaagattctcccatagacccgtgcaggagaagttcgtgtgcctgaactgcggcttcgagacacacgcagccgagcaagccgccctgaacatcgccagatcctggctgttcctgcggagccaggagtacaagaaataccagacaaacaagacaaccggcaacaccgataagagagccttcgtcgagacctggcagtccttttaccggaagaagcttaaggaggtgtggaaacctgccgtgcggtctggcggatctggcggaggctccacaagcttccagggccccgtgaccttcgacgaggtggccgtgtacttcaccaaggaggagtgggccctgctggaccccgcccagagggccctgtacagggacgtgatgcaggagaactacgagaccgtgaccagcctgggcctgcccgtgagcaggcccgacgtgatcagccagatggagcagggcgaggagccctgggccagcgccctgcagggcagcgaggacaggctgatcctgaggggcatctgcaccagccccaagaaaaagagaaaagtctaagctgccttctgcggggcttgccttctggccatgcccttcttctctcccttgcacctgtacctcttggtctttgaataaagcctgagtaggaaggctagcaaaaaaaaaaaaaaaaaaaaaaaaaaaaaaaaaaaaaaaaaaaaaaaaaaaaaaaaaaaaaaaaaaaaaaaaaaaaaaaa

SEQ ID NO: 4064 - RNA, 5419 nt, synthetic construct
  source 1..5419: mol_type = other RNA
aggaaataagagagaaaagaagagtaagaagaaatataagagccaccatggcccctaagaagaagcgtaaagtgagccgggtgaacggcagcggcagcggcggcggcatgaaccacgaccaggagttcgacccccctaaggtgtaccctcccgtccccgccgagaagagaaagcccatccgggtcctgagcctgttcgatggcatcgccaccggtctgctggtgctgaaggacctgggcatccaggtggataggtacattgcctccgaggtgtgcgaggactccatcaccgtgggaatggtgcgtcatcagggcaagatcatgtacgtgggcgacgtgcggagcgtgacacagaagcatatccaggagtggggccctttcgacctggtgatcggcggcagcccttgcaatgacctgagcatcgtgaacccagcccggaagggcctgtacgagggaaccggcagactgttcttcgagttttacagactgctgcacgacgcccggcctaaggaaggcgacgaccggcccttcttttggctgttcgagaatgtggtggccatgggagtcagcgacaagcgggatattagccggttcctggagagcaaccccgtgatgatcgatgccaaggaagtgagcgccgcccaccgggccagatacttctggggcaatctgcctggcatgaacagacccctggccagcaccgtgaacgacaagctggagctgcaggagtgcctggagcacggccggatcgccaagttcagcaaggtgagaaccatcaccacccgaagcaacagcatcaaacaaggcaaggaccagcactttcctgtgttcatgaacgagaaggaggacatcctgtggtgtaccgagatggagagagtgttcgggttcccagtccactacacagatgtcagcaacatgtctagactggccagacagagactgctgggaagaagctggtccgtccctgtgatcagacacctgttcgcccctctgaaggagtacttcgcctgcgtgagcagcggcaacagcaacgccaacagccggggccccagcttctctagcggcctggtgccactgtccctgagagggagccacatgggccccatggagatctacaaaaccgtgagcgcctggaagcggcagcctgtgcgcgtgctgagcctgtttcggaatatcgataaagtcctgaaaagcctgggattcctggagagcggctctggctccggcggtggcaccctgaagtacgtggaggatgtgacaaacgtggtcagacgggatgtggagaagtggggccccttcgatctggtgtacggcagcacccaacccctgggcagctcttgtgaccggtgccctggctggtacatgtttcagttccaccggatcctgcagtacgccctgccgagacaggagtcccagcggccattcttttggattttcatggacaacttgctgctgaccgaggatgaccaggaaactaccactcggttcctgcagaccgaagccgtgaccctgcaggacgtgagaggccgggactaccagaacgccatgcgggtgtggtccaacatccctggactgaaaagcaagcacgcacctctgacccctaaagaagaggagtacctgcaggcccaggtgcggagcagaagcaagctggacgcccctaaggtggatctgctggtgaagaattgcctcctgcccctgagagagtacttcaagtatttcagccagaatagtctgcccctgggcggcccaagcagcggcgcccctcctcccagcggcggcagcccagccggctccccaacctctaccgaggagggcacctctgagtccgccacccccgagagcggccctggcacctccaccgagcccagcgagggcagcgcacccggcagccctgccggcagccccacctccacagaggagggaaccagcaccgagcccagcgaaggcagcgccccaggcaccagcaccgagcctagtgagggcggctctggcggcggcagcgcccaggagattaaacggatcaacaagatcagaagaagacttgtgaaagacagcaacaccaagaaggccggcaagacaggccccatgaaaaccctgctggttagagtgatgacacccgatctgagagagcggctggaaaacctgagaaagaagcctgaaaatatcccccagcccatcagcaatacatctagagccaacctgaataagctgctgaccgattacaccgaaatgaagaaggcgatcctgcatgtgtactgggaagagttccagaaggaccctgtgggcctgatgagccgggtggcccagcctgccagcaagaagatcgatcagaacaagctgaaacctgagatggacgagaagggcaacctgaccaccgccggctttgcctgctctcagtgtggccagcccctgttcgtgtacaagctggagcaggtgtctgagaagggcaaggcttacaccaactacttcggacggtgcaatgtggccgagcacgaaaagctgatcctgctggcccagctgaagcccgagaaggatagcgacgaagccgtgacatatagcctgggaaagtttgggcagagggccctggatttctacagcattcatgtgaccaaggagtccacccaccccgtgaagcccctggcccagatcgccggaaacagatacgcctccggacctgtgggaaaggccctgagcgacgcatgtatgggcacaatcgcctccttcctgtctaagtaccaggacatcatcatcgaacaccagaaggtggtgaagggcaaccagaagagactggagagcctgcgggagctggccggcaaggaaaacctggaataccctagcgtgaccctgccacctcagcctcacaccaaggagggcgttgatgcctacaacgaagtgatcgcccgggtgcgaatgtgggtgaacctgaacctgtggcagaagctgaagctaagcagagatgatgccaagcctctgctgagactgaagggattcccttcctttcctctggtcgagagacaggccaacgaagtggactggtgggacatggtgtgtaacgtgaagaagctgatcaacgagaaaaaggaggatggcaaggtgttttggcagaatctggctggctacaagagacaggaagccctgagaccatacctgagcagcgaggaagatcggaagaagggaaagaaattcgctcggtaccagctgggcgacctgctgctgcacctggaaaagaagcacggcgaggactggggaaaggtgtacgacgaggcctgggagcggattgacaagaaagtggaaggcctgagcaagcacatcaagctggaagaggaacggagaagcgaggacgcccagagcaaggccgccctgaccgactggctgcgggctaaggccagcttcgtgatcgagggcctgaaggaggccgacaaggacgagttctgcagatgcgagctgaagctgcagaagtggtacggggacctgcggggaaagcccttcgccatcgaagccgagaacagcatcctggacatcagcggcttcagcaagcagtacaactgtgccttcatctggcagaaggacggcgtgaagaagctgaacctgtacctgatcatcaactacttcaagggcggcaagctgcggttcaagaagatcaaacctgaagccttcgaagccaacagattctacaccgtgatcaacaaaaagagcggcgagatcgtgcccatggaggtgaacttcaacttcgacgaccccaacctgatcatcctgcctctggcctttggcaagagacagggcagagaattcatctggaacgacctgctgtccctggaaaccggcagcctgaagctggccaacggaagagtgatcgagaagacactgtacaacagaagaacccggcaggatgagcctgccctgttcgtggccctgaccttcgagcggcgggaggtcctggactcctccaatatcaaaccaatgaacctgatcggcgtggcaagaggcgaaaacatccccgccgtgatcgccctgaccgaccccgagggctgcccactgagccggtttaaggatagcctgggaaacccaacccacatcctgagaatcggcgagagctataaggagaagcagcggaccatccaggccaagaaggaggtggagcagcggagagccggcggctacagccggaagtacgccagcaaagccaagaatctggcagacgatatggtgagaaacaccgctagagatctgctgtactacgccgtgacccaggatgccatgctgatcttcgccaacctgagccggggcttcggccggcagggcaagcggaccttcatggccgagagacagtacacacggatggaggactggctgaccgccaagctggcctacgagggcctgagcaagacctacctgtccaagacactggcccagtacacctccaagacatgcagcaactgtgggtttaccatcaccagcgccgactacgacagggtgctggagaagctgaagaagacagcaacaggctggatgaccacaattaacggcaaggagctgaaggtggagggccagattacctactacaacagatacaagagacagaacgtagtcaaggacctgtccgtcgagctggatagactgagcgaagaatctgtgaacaacgacatctcctcctggacaaagggcagaagcggagaagctctgagcctcctgaagaaaagattctcccatagacccgtgcaggagaagttcgtgtgcctgaactgcggcttcgagacacacgcagccgagcaagccgccctgaacatcgccagatcctggctgttcctgcggagccaggagtacaagaaataccagacaaacaagacaaccggcaacaccgataagagagccttcgtcgagacctggcagtccttttaccggaagaagcttaaggaggtgtggaaacctgccgtgcggtctggcggatctggcggaggctccacaagcatgaccatgctgcaggacagcttcagcttcgacgacctgagcgtggacttcacccagaaggagtggcagctgctggaccccagccagaagaacctgtacaaggacgtgatgctggagaactacagcagcctggtgagcctgggctacgaggccatgaagcccgacgtgatcttcaagctggagcagggcgaggagccctggatcggcgacgaggagatccccagcagctggagccccgacatcaccagccccaagaaaaagagaaaagtctaagctgccttctgcggggcttgccttctggccatgcccttcttctctcccttgcacctgtacctcttggtctttgaataaagcctgagtaggaaggctagcaaaaaaaaaaaaaaaaaaaaaaaaaaaaaaaaaaaaaaaaaaaaaaaaaaaaaaaaaaaaaaaaaaaaaaaaaaaaaaaa

SEQ ID NO: 4065 - RNA, 5419 nt, synthetic construct
  source 1..5419: mol_type = other RNA
aggaaataagagagaaaagaagagtaagaagaaatataagagccaccatggcccctaagaagaagcgtaaagtgagccgggtgaacggcagcggcagcggcggcggcatgaaccacgaccaggagttcgacccccctaaggtgtaccctcccgtccccgccgagaagagaaagcccatccgggtcctgagcctgttcgatggcatcgccaccggtctgctggtgctgaaggacctgggcatccaggtggataggtacattgcctccgaggtgtgcgaggactccatcaccgtgggaatggtgcgtcatcagggcaagatcatgtacgtgggcgacgtgcggagcgtgacacagaagcatatccaggagtggggccctttcgacctggtgatcggcggcagcccttgcaatgacctgagcatcgtgaacccagcccggaagggcctgtacgagggaaccggcagactgttcttcgagttttacagactgctgcacgacgcccggcctaaggaaggcgacgaccggcccttcttttggctgttcgagaatgtggtggccatgggagtcagcgacaagcgggatattagccggttcctggagagcaaccccgtgatgatcgatgccaaggaagtgagcgccgcccaccgggccagatacttctggggcaatctgcctggcatgaacagacccctggccagcaccgtgaacgacaagctggagctgcaggagtgcctggagcacggccggatcgccaagttcagcaaggtgagaaccatcaccacccgaagcaacagcatcaaacaaggcaaggaccagcactttcctgtgttcatgaacgagaaggaggacatcctgtggtgtaccgagatggagagagtgttcgggttcccagtccactacacagatgtcagcaacatgtctagactggccagacagagactgctgggaagaagctggtccgtccctgtgatcagacacctgttcgcccctctgaaggagtacttcgcctgcgtgagcagcggcaacagcaacgccaacagccggggccccagcttctctagcggcctggtgccactgtccctgagagggagccacatgggccccatggagatctacaaaaccgtgagcgcctggaagcggcagcctgtgcgcgtgctgagcctgtttcggaatatcgataaagtcctgaaaagcctgggattcctggagagcggctctggctccggcggtggcaccctgaagtacgtggaggatgtgacaaacgtggtcagacgggatgtggagaagtggggccccttcgatctggtgtacggcagcacccaacccctgggcagctcttgtgaccggtgccctggctggtacatgtttcagttccaccggatcctgcagtacgccctgccgagacaggagtcccagcggccattcttttggattttcatggacaacttgctgctgaccgaggatgaccaggaaactaccactcggttcctgcagaccgaagccgtgaccctgcaggacgtgagaggccgggactaccagaacgccatgcgggtgtggtccaacatccctggactgaaaagcaagcacgcacctctgacccctaaagaagaggagtacctgcaggcccaggtgcggagcagaagcaagctggacgcccctaaggtggatctgctggtgaagaattgcctcctgcccctgagagagtacttcaagtatttcagccagaatagtctgcccctgggcggcccaagcagcggcgcccctcctcccagcggcggcagcccagccggctccccaacctctaccgaggagggcacctctgagtccgccacccccgagagcggccctggcacctccaccgagcccagcgagggcagcgcacccggcagccctgccggcagccccacctccacagaggagggaaccagcaccgagcccagcgaaggcagcgccccaggcaccagcaccgagcctagtgagggcggctctggcggcggcagcgcccaggagattaaacggatcaacaagatcagaagaagacttgtgaaagacagcaacaccaagaaggccggcaagacaggccccatgaaaaccctgctggttagagtgatgacacccgatctgagagagcggctggaaaacctgagaaagaagcctgaaaatatcccccagcccatcagcaatacatctagagccaacctgaataagctgctgaccgattacaccgaaatgaagaaggcgatcctgcatgtgtactgggaagagttccagaaggaccctgtgggcctgatgagccgggtggcccagcctgccagcaagaagatcgatcagaacaagctgaaacctgagatggacgagaagggcaacctgaccaccgccggctttgcctgctctcagtgtggccagcccctgttcgtgtacaagctggagcaggtgtctgagaagggcaaggcttacaccaactacttcggacggtgcaatgtggccgagcacgaaaagctgatcctgctggcccagctgaagcccgagaaggatagcgacgaagccgtgacatatagcctgggaaagtttgggcagagggccctggatttctacagcattcatgtgaccaaggagtccacccaccccgtgaagcccctggcccagatcgccggaaacagatacgcctccggacctgtgggaaaggccctgagcgacgcatgtatgggcacaatcgcctccttcctgtctaagtaccaggacatcatcatcgaacaccagaaggtggtgaagggcaaccagaagagactggagagcctgcgggagctggccggcaaggaaaacctggaataccctagcgtgaccctgccacctcagcctcacaccaaggagggcgttgatgcctacaacgaagtgatcgcccgggtgcgaatgtgggtgaacctgaacctgtggcagaagctgaagctaagcagagatgatgccaagcctctgctgagactgaagggattcccttcctttcctctggtcgagagacaggccaacgaagtggactggtgggacatggtgtgtaacgtgaagaagctgatcaacgagaaaaaggaggatggcaaggtgttttggcagaatctggctggctacaagagacaggaagccctgagaccatacctgagcagcgaggaagatcggaagaagggaaagaaattcgctcggtaccagctgggcgacctgctgctgcacctggaaaagaagcacggcgaggactggggaaaggtgtacgacgaggcctgggagcggattgacaagaaagtggaaggcctgagcaagcacatcaagctggaagaggaacggagaagcgaggacgcccagagcaaggccgccctgaccgactggctgcgggctaaggccagcttcgtgatcgagggcctgaaggaggccgacaaggacgagttctgcagatgcgagctgaagctgcagaagtggtacggggacctgcggggaaagcccttcgccatcgaagccgagaacagcatcctggacatcagcggcttcagcaagcagtacaactgtgccttcatctggcagaaggacggcgtgaagaagctgaacctgtacctgatcatcaactacttcaagggcggcaagctgcggttcaagaagatcaaacctgaagccttcgaagccaacagattctacaccgtgatcaacaaaaagagcggcgagatcgtgcccatggaggtgaacttcaacttcgacgaccccaacctgatcatcctgcctctggcctttggcaagagacagggcagagaattcatctggaacgacctgctgtccctggaaaccggcagcctgaagctggccaacggaagagtgatcgagaagacactgtacaacagaagaacccggcaggatgagcctgccctgttcgtggccctgaccttcgagcggcgggaggtcctggactcctccaatatcaaaccaatgaacctgatcggcgtggcaagaggcgaaaacatccccgccgtgatcgccctgaccgaccccgagggctgcccactgagccggtttaaggatagcctgggaaacccaacccacatcctgagaatcggcgagagctataaggagaagcagcggaccatccaggccaagaaggaggtggagcagcggagagccggcggctacagccggaagtacgccagcaaagccaagaatctggcagacgatatggtgagaaacaccgctagagatctgctgtactacgccgtgacccaggatgccatgctgatcttcgccaacctgagccggggcttcggccggcagggcaagcggaccttcatggccgagagacagtacacacggatggaggactggctgaccgccaagctggcctacgagggcctgagcaagacctacctgtccaagacactggcccagtacacctccaagacatgcagcaactgtgggtttaccatcaccagcgccgactacgacagggtgctggagaagctgaagaagacagcaacaggctggatgaccacaattaacggcaaggagctgaaggtggagggccagattacctactacaacagatacaagagacagaacgtagtcaaggacctgtccgtcgagctggatagactgagcgaagaatctgtgaacaacgacatctcctcctggacaaagggcagaagcggagaagctctgagcctcctgaagaaaagattctcccatagacccgtgcaggagaagttcgtgtgcctgaactgcggcttcgagacacacgcagccgagcaagccgccctgaacatcgccagatcctggctgttcctgcggagccaggagtacaagaaataccagacaaacaagacaaccggcaacaccgataagagagccttcgtcgagacctggcagtccttttaccggaagaagcttaaggaggtgtggaaacctgccgtgcggtctggcggatctggcggaggctccacaagcttccccatgcccgtgaccttcgaggaggtggccgtgtacttcacccagggccagggcgccctgctggaccccgcccagagggccctgtacagggacgtgatgcaggagaactacaagatggtgaccagcctggccggcttccccatccccaagcccgacctgatcgcccagctggagaggggcgaggagccctgggtgcccgacctgcaggccgacgaggagagggagagccccaggggcaccaccagccccaagaaaaagagaaaagtctaagctgccttctgcggggcttgccttctggccatgcccttcttctctcccttgcacctgtacctcttggtctttgaataaagcctgagtaggaaggctagcaaaaaaaaaaaaaaaaaaaaaaaaaaaaaaaaaaaaaaaaaaaaaaaaaaaaaaaaaaaaaaaaaaaaaaaaaaaaaaaa

SEQ ID NO: 4066 - RNA, 5419 nt, synthetic construct
  source 1..5419: mol_type = other RNA
aggaaataagagagaaaagaagagtaagaagaaatataagagccaccatggcccctaagaagaagcgtaaagtgagccgggtgaacggcagcggcagcggcggcggcatgaaccacgaccaggagttcgacccccctaaggtgtaccctcccgtccccgccgagaagagaaagcccatccgggtcctgagcctgttcgatggcatcgccaccggtctgctggtgctgaaggacctgggcatccaggtggataggtacattgcctccgaggtgtgcgaggactccatcaccgtgggaatggtgcgtcatcagggcaagatcatgtacgtgggcgacgtgcggagcgtgacacagaagcatatccaggagtggggccctttcgacctggtgatcggcggcagcccttgcaatgacctgagcatcgtgaacccagcccggaagggcctgtacgagggaaccggcagactgttcttcgagttttacagactgctgcacgacgcccggcctaaggaaggcgacgaccggcccttcttttggctgttcgagaatgtggtggccatgggagtcagcgacaagcgggatattagccggttcctggagagcaaccccgtgatgatcgatgccaaggaagtgagcgccgcccaccgggccagatacttctggggcaatctgcctggcatgaacagacccctggccagcaccgtgaacgacaagctggagctgcaggagtgcctggagcacggccggatcgccaagttcagcaaggtgagaaccatcaccacccgaagcaacagcatcaaacaaggcaaggaccagcactttcctgtgttcatgaacgagaaggaggacatcctgtggtgtaccgagatggagagagtgttcgggttcccagtccactacacagatgtcagcaacatgtctagactggccagacagagactgctgggaagaagctggtccgtccctgtgatcagacacctgttcgcccctctgaaggagtacttcgcctgcgtgagcagcggcaacagcaacgccaacagccggggccccagcttctctagcggcctggtgccactgtccctgagagggagccacatgggccccatggagatctacaaaaccgtgagcgcctggaagcggcagcctgtgcgcgtgctgagcctgtttcggaatatcgataaagtcctgaaaagcctgggattcctggagagcggctctggctccggcggtggcaccctgaagtacgtggaggatgtgacaaacgtggtcagacgggatgtggagaagtggggccccttcgatctggtgtacggcagcacccaacccctgggcagctcttgtgaccggtgccctggctggtacatgtttcagttccaccggatcctgcagtacgccctgccgagacaggagtcccagcggccattcttttggattttcatggacaacttgctgctgaccgaggatgaccaggaaactaccactcggttcctgcagaccgaagccgtgaccctgcaggacgtgagaggccgggactaccagaacgccatgcgggtgtggtccaacatccctggactgaaaagcaagcacgcacctctgacccctaaagaagaggagtacctgcaggcccaggtgcggagcagaagcaagctggacgcccctaaggtggatctgctggtgaagaattgcctcctgcccctgagagagtacttcaagtatttcagccagaatagtctgcccctgggcggcccaagcagcggcgcccctcctcccagcggcggcagcccagccggctccccaacctctaccgaggagggcacctctgagtccgccacccccgagagcggccctggcacctccaccgagcccagcgagggcagcgcacccggcagccctgccggcagccccacctccacagaggagggaaccagcaccgagcccagcgaaggcagcgccccaggcaccagcaccgagcctagtgagggcggctctggcggcggcagcgcccaggagattaaacggatcaacaagatcagaagaagacttgtgaaagacagcaacaccaagaaggccggcaagacaggccccatgaaaaccctgctggttagagtgatgacacccgatctgagagagcggctggaaaacctgagaaagaagcctgaaaatatcccccagcccatcagcaatacatctagagccaacctgaataagctgctgaccgattacaccgaaatgaagaaggcgatcctgcatgtgtactgggaagagttccagaaggaccctgtgggcctgatgagccgggtggcccagcctgccagcaagaagatcgatcagaacaagctgaaacctgagatggacgagaagggcaacctgaccaccgccggctttgcctgctctcagtgtggccagcccctgttcgtgtacaagctggagcaggtgtctgagaagggcaaggcttacaccaactacttcggacggtgcaatgtggccgagcacgaaaagctgatcctgctggcccagctgaagcccgagaaggatagcgacgaagccgtgacatatagcctgggaaagtttgggcagagggccctggatttctacagcattcatgtgaccaaggagtccacccaccccgtgaagcccctggcccagatcgccggaaacagatacgcctccggacctgtgggaaaggccctgagcgacgcatgtatgggcacaatcgcctccttcctgtctaagtaccaggacatcatcatcgaacaccagaaggtggtgaagggcaaccagaagagactggagagcctgcgggagctggccggcaaggaaaacctggaataccctagcgtgaccctgccacctcagcctcacaccaaggagggcgttgatgcctacaacgaagtgatcgcccgggtgcgaatgtgggtgaacctgaacctgtggcagaagctgaagctaagcagagatgatgccaagcctctgctgagactgaagggattcccttcctttcctctggtcgagagacaggccaacgaagtggactggtgggacatggtgtgtaacgtgaagaagctgatcaacgagaaaaaggaggatggcaaggtgttttggcagaatctggctggctacaagagacaggaagccctgagaccatacctgagcagcgaggaagatcggaagaagggaaagaaattcgctcggtaccagctgggcgacctgctgctgcacctggaaaagaagcacggcgaggactggggaaaggtgtacgacgaggcctgggagcggattgacaagaaagtggaaggcctgagcaagcacatcaagctggaagaggaacggagaagcgaggacgcccagagcaaggccgccctgaccgactggctgcgggctaaggccagcttcgtgatcgagggcctgaaggaggccgacaaggacgagttctgcagatgcgagctgaagctgcagaagtggtacggggacctgcggggaaagcccttcgccatcgaagccgagaacagcatcctggacatcagcggcttcagcaagcagtacaactgtgccttcatctggcagaaggacggcgtgaagaagctgaacctgtacctgatcatcaactacttcaagggcggcaagctgcggttcaagaagatcaaacctgaagccttcgaagccaacagattctacaccgtgatcaacaaaaagagcggcgagatcgtgcccatggaggtgaacttcaacttcgacgaccccaacctgatcatcctgcctctggcctttggcaagagacagggcagagaattcatctggaacgacctgctgtccctggaaaccggcagcctgaagctggccaacggaagagtgatcgagaagacactgtacaacagaagaacccggcaggatgagcctgccctgttcgtggccctgaccttcgagcggcgggaggtcctggactcctccaatatcaaaccaatgaacctgatcggcgtggcaagaggcgaaaacatccccgccgtgatcgccctgaccgaccccgagggctgcccactgagccggtttaaggatagcctgggaaacccaacccacatcctgagaatcggcgagagctataaggagaagcagcggaccatccaggccaagaaggaggtggagcagcggagagccggcggctacagccggaagtacgccagcaaagccaagaatctggcagacgatatggtgagaaacaccgctagagatctgctgtactacgccgtgacccaggatgccatgctgatcttcgccaacctgagccggggcttcggccggcagggcaagcggaccttcatggccgagagacagtacacacggatggaggactggctgaccgccaagctggcctacgagggcctgagcaagacctacctgtccaagacactggcccagtacacctccaagacatgcagcaactgtgggtttaccatcaccagcgccgactacgacagggtgctggagaagctgaagaagacagcaacaggctggatgaccacaattaacggcaaggagctgaaggtggagggccagattacctactacaacagatacaagagacagaacgtagtcaaggacctgtccgtcgagctggatagactgagcgaagaatctgtgaacaacgacatctcctcctggacaaagggcagaagcggagaagctctgagcctcctgaagaaaagattctcccatagacccgtgcaggagaagttcgtgtgcctgaactgcggcttcgagacacacgcagccgagcaagccgccctgaacatcgccagatcctggctgttcctgcggagccaggagtacaagaaataccagacaaacaagacaaccggcaacaccgataagagagccttcgtcgagacctggcagtccttttaccggaagaagcttaaggaggtgtggaaacctgccgtgcggtctggcggatctggcggaggctccacaagcctgctgaccttcgaggacgtggccgtgttcttcagcgaggaggagtggaagctgctgaaccccacccagaagatcctgtacagcgacgtgatgcaggagaactacgagaccgtgatcagcctgggcctgaagctgaagaacgacaccggcaacgaccagcccatcagcctgagcaccctggagctgcaggccagcggctgcaaggtgctgaggaaggccagggtgaaggtggcccagaagaccaccagccccaagaaaaagagaaaagtctaagctgccttctgcggggcttgccttctggccatgcccttcttctctcccttgcacctgtacctcttggtctttgaataaagcctgagtaggaaggctagcaaaaaaaaaaaaaaaaaaaaaaaaaaaaaaaaaaaaaaaaaaaaaaaaaaaaaaaaaaaaaaaaaaaaaaaaaaaaaaaa

SEQ ID NO: 4067 - RNA, 5419 nt, synthetic construct
  source 1..5419: mol_type = other RNA
aggaaataagagagaaaagaagagtaagaagaaatataagagccaccatggcccctaagaagaagcgtaaagtgagccgggtgaacggcagcggcagcggcggcggcatgaaccacgaccaggagttcgacccccctaaggtgtaccctcccgtccccgccgagaagagaaagcccatccgggtcctgagcctgttcgatggcatcgccaccggtctgctggtgctgaaggacctgggcatccaggtggataggtacattgcctccgaggtgtgcgaggactccatcaccgtgggaatggtgcgtcatcagggcaagatcatgtacgtgggcgacgtgcggagcgtgacacagaagcatatccaggagtggggccctttcgacctggtgatcggcggcagcccttgcaatgacctgagcatcgtgaacccagcccggaagggcctgtacgagggaaccggcagactgttcttcgagttttacagactgctgcacgacgcccggcctaaggaaggcgacgaccggcccttcttttggctgttcgagaatgtggtggccatgggagtcagcgacaagcgggatattagccggttcctggagagcaaccccgtgatgatcgatgccaaggaagtgagcgccgcccaccgggccagatacttctggggcaatctgcctggcatgaacagacccctggccagcaccgtgaacgacaagctggagctgcaggagtgcctggagcacggccggatcgccaagttcagcaaggtgagaaccatcaccacccgaagcaacagcatcaaacaaggcaaggaccagcactttcctgtgttcatgaacgagaaggaggacatcctgtggtgtaccgagatggagagagtgttcgggttcccagtccactacacagatgtcagcaacatgtctagactggccagacagagactgctgggaagaagctggtccgtccctgtgatcagacacctgttcgcccctctgaaggagtacttcgcctgcgtgagcagcggcaacagcaacgccaacagccggggccccagcttctctagcggcctggtgccactgtccctgagagggagccacatgggccccatggagatctacaaaaccgtgagcgcctggaagcggcagcctgtgcgcgtgctgagcctgtttcggaatatcgataaagtcctgaaaagcctgggattcctggagagcggctctggctccggcggtggcaccctgaagtacgtggaggatgtgacaaacgtggtcagacgggatgtggagaagtggggccccttcgatctggtgtacggcagcacccaacccctgggcagctcttgtgaccggtgccctggctggtacatgtttcagttccaccggatcctgcagtacgccctgccgagacaggagtcccagcggccattcttttggattttcatggacaacttgctgctgaccgaggatgaccaggaaactaccactcggttcctgcagaccgaagccgtgaccctgcaggacgtgagaggccgggactaccagaacgccatgcgggtgtggtccaacatccctggactgaaaagcaagcacgcacctctgacccctaaagaagaggagtacctgcaggcccaggtgcggagcagaagcaagctggacgcccctaaggtggatctgctggtgaagaattgcctcctgcccctgagagagtacttcaagtatttcagccagaatagtctgcccctgggcggcccaagcagcggcgcccctcctcccagcggcggcagcccagccggctccccaacctctaccgaggagggcacctctgagtccgccacccccgagagcggccctggcacctccaccgagcccagcgagggcagcgcacccggcagccctgccggcagccccacctccacagaggagggaaccagcaccgagcccagcgaaggcagcgccccaggcaccagcaccgagcctagtgagggcggctctggcggcggcagcgcccaggagattaaacggatcaacaagatcagaagaagacttgtgaaagacagcaacaccaagaaggccggcaagacaggccccatgaaaaccctgctggttagagtgatgacacccgatctgagagagcggctggaaaacctgagaaagaagcctgaaaatatcccccagcccatcagcaatacatctagagccaacctgaataagctgctgaccgattacaccgaaatgaagaaggcgatcctgcatgtgtactgggaagagttccagaaggaccctgtgggcctgatgagccgggtggcccagcctgccagcaagaagatcgatcagaacaagctgaaacctgagatggacgagaagggcaacctgaccaccgccggctttgcctgctctcagtgtggccagcccctgttcgtgtacaagctggagcaggtgtctgagaagggcaaggcttacaccaactacttcggacggtgcaatgtggccgagcacgaaaagctgatcctgctggcccagctgaagcccgagaaggatagcgacgaagccgtgacatatagcctgggaaagtttgggcagagggccctggatttctacagcattcatgtgaccaaggagtccacccaccccgtgaagcccctggcccagatcgccggaaacagatacgcctccggacctgtgggaaaggccctgagcgacgcatgtatgggcacaatcgcctccttcctgtctaagtaccaggacatcatcatcgaacaccagaaggtggtgaagggcaaccagaagagactggagagcctgcgggagctggccggcaaggaaaacctggaataccctagcgtgaccctgccacctcagcctcacaccaaggagggcgttgatgcctacaacgaagtgatcgcccgggtgcgaatgtgggtgaacctgaacctgtggcagaagctgaagctaagcagagatgatgccaagcctctgctgagactgaagggattcccttcctttcctctggtcgagagacaggccaacgaagtggactggtgggacatggtgtgtaacgtgaagaagctgatcaacgagaaaaaggaggatggcaaggtgttttggcagaatctggctggctacaagagacaggaagccctgagaccatacctgagcagcgaggaagatcggaagaagggaaagaaattcgctcggtaccagctgggcgacctgctgctgcacctggaaaagaagcacggcgaggactggggaaaggtgtacgacgaggcctgggagcggattgacaagaaagtggaaggcctgagcaagcacatcaagctggaagaggaacggagaagcgaggacgcccagagcaaggccgccctgaccgactggctgcgggctaaggccagcttcgtgatcgagggcctgaaggaggccgacaaggacgagttctgcagatgcgagctgaagctgcagaagtggtacggggacctgcggggaaagcccttcgccatcgaagccgagaacagcatcctggacatcagcggcttcagcaagcagtacaactgtgccttcatctggcagaaggacggcgtgaagaagctgaacctgtacctgatcatcaactacttcaagggcggcaagctgcggttcaagaagatcaaacctgaagccttcgaagccaacagattctacaccgtgatcaacaaaaagagcggcgagatcgtgcccatggaggtgaacttcaacttcgacgaccccaacctgatcatcctgcctctggcctttggcaagagacagggcagagaattcatctggaacgacctgctgtccctggaaaccggcagcctgaagctggccaacggaagagtgatcgagaagacactgtacaacagaagaacccggcaggatgagcctgccctgttcgtggccctgaccttcgagcggcgggaggtcctggactcctccaatatcaaaccaatgaacctgatcggcgtggcaagaggcgaaaacatccccgccgtgatcgccctgaccgaccccgagggctgcccactgagccggtttaaggatagcctgggaaacccaacccacatcctgagaatcggcgagagctataaggagaagcagcggaccatccaggccaagaaggaggtggagcagcggagagccggcggctacagccggaagtacgccagcaaagccaagaatctggcagacgatatggtgagaaacaccgctagagatctgctgtactacgccgtgacccaggatgccatgctgatcttcgccaacctgagccggggcttcggccggcagggcaagcggaccttcatggccgagagacagtacacacggatggaggactggctgaccgccaagctggcctacgagggcctgagcaagacctacctgtccaagacactggcccagtacacctccaagacatgcagcaactgtgggtttaccatcaccagcgccgactacgacagggtgctggagaagctgaagaagacagcaacaggctggatgaccacaattaacggcaaggagctgaaggtggagggccagattacctactacaacagatacaagagacagaacgtagtcaaggacctgtccgtcgagctggatagactgagcgaagaatctgtgaacaacgacatctcctcctggacaaagggcagaagcggagaagctctgagcctcctgaagaaaagattctcccatagacccgtgcaggagaagttcgtgtgcctgaactgcggcttcgagacacacgcagccgagcaagccgccctgaacatcgccagatcctggctgttcctgcggagccaggagtacaagaaataccagacaaacaagacaaccggcaacaccgataagagagccttcgtcgagacctggcagtccttttaccggaagaagcttaaggaggtgtggaaacctgccgtgcggtctggcggatctggcggaggctccacaagctggaaggagctgctgagcttcgaggacgtggccctgttcttcaccagggaggagtggaaccagctggactgggcccagaaggacctgtacagggacgtgatgctggagaactacaggaacctgatcctgctgggcttccagttccccaagcccgaggtgatctgccagctggagcagtgggaggagccctggatcctggacctgcccagggccggcaccaggaaggccagcggcagcgcctgcaccagccccaagaaaaagagaaaagtctaagctgccttctgcggggcttgccttctggccatgcccttcttctctcccttgcacctgtacctcttggtctttgaataaagcctgagtaggaaggctagcaaaaaaaaaaaaaaaaaaaaaaaaaaaaaaaaaaaaaaaaaaaaaaaaaaaaaaaaaaaaaaaaaaaaaaaaaaaaaaaa

SEQ ID NO: 4068 - RNA, 5419 nt, synthetic construct
  source 1..5419: mol_type = other RNA
aggaaataagagagaaaagaagagtaagaagaaatataagagccaccatggcccctaagaagaagcgtaaagtgagccgggtgaacggcagcggcagcggcggcggcatgaaccacgaccaggagttcgacccccctaaggtgtaccctcccgtccccgccgagaagagaaagcccatccgggtcctgagcctgttcgatggcatcgccaccggtctgctggtgctgaaggacctgggcatccaggtggataggtacattgcctccgaggtgtgcgaggactccatcaccgtgggaatggtgcgtcatcagggcaagatcatgtacgtgggcgacgtgcggagcgtgacacagaagcatatccaggagtggggccctttcgacctggtgatcggcggcagcccttgcaatgacctgagcatcgtgaacccagcccggaagggcctgtacgagggaaccggcagactgttcttcgagttttacagactgctgcacgacgcccggcctaaggaaggcgacgaccggcccttcttttggctgttcgagaatgtggtggccatgggagtcagcgacaagcgggatattagccggttcctggagagcaaccccgtgatgatcgatgccaaggaagtgagcgccgcccaccgggccagatacttctggggcaatctgcctggcatgaacagacccctggccagcaccgtgaacgacaagctggagctgcaggagtgcctggagcacggccggatcgccaagttcagcaaggtgagaaccatcaccacccgaagcaacagcatcaaacaaggcaaggaccagcactttcctgtgttcatgaacgagaaggaggacatcctgtggtgtaccgagatggagagagtgttcgggttcccagtccactacacagatgtcagcaacatgtctagactggccagacagagactgctgggaagaagctggtccgtccctgtgatcagacacctgttcgcccctctgaaggagtacttcgcctgcgtgagcagcggcaacagcaacgccaacagccggggccccagcttctctagcggcctggtgccactgtccctgagagggagccacatgggccccatggagatctacaaaaccgtgagcgcctggaagcggcagcctgtgcgcgtgctgagcctgtttcggaatatcgataaagtcctgaaaagcctgggattcctggagagcggctctggctccggcggtggcaccctgaagtacgtggaggatgtgacaaacgtggtcagacgggatgtggagaagtggggccccttcgatctggtgtacggcagcacccaacccctgggcagctcttgtgaccggtgccctggctggtacatgtttcagttccaccggatcctgcagtacgccctgccgagacaggagtcccagcggccattcttttggattttcatggacaacttgctgctgaccgaggatgaccaggaaactaccactcggttcctgcagaccgaagccgtgaccctgcaggacgtgagaggccgggactaccagaacgccatgcgggtgtggtccaacatccctggactgaaaagcaagcacgcacctctgacccctaaagaagaggagtacctgcaggcccaggtgcggagcagaagcaagctggacgcccctaaggtggatctgctggtgaagaattgcctcctgcccctgagagagtacttcaagtatttcagccagaatagtctgcccctgggcggcccaagcagcggcgcccctcctcccagcggcggcagcccagccggctccccaacctctaccgaggagggcacctctgagtccgccacccccgagagcggccctggcacctccaccgagcccagcgagggcagcgcacccggcagccctgccggcagccccacctccacagaggagggaaccagcaccgagcccagcgaaggcagcgccccaggcaccagcaccgagcctagtgagggcggctctggcggcggcagcgcccaggagattaaacggatcaacaagatcagaagaagacttgtgaaagacagcaacaccaagaaggccggcaagacaggccccatgaaaaccctgctggttagagtgatgacacccgatctgagagagcggctggaaaacctgagaaagaagcctgaaaatatcccccagcccatcagcaatacatctagagccaacctgaataagctgctgaccgattacaccgaaatgaagaaggcgatcctgcatgtgtactgggaagagttccagaaggaccctgtgggcctgatgagccgggtggcccagcctgccagcaagaagatcgatcagaacaagctgaaacctgagatggacgagaagggcaacctgaccaccgccggctttgcctgctctcagtgtggccagcccctgttcgtgtacaagctggagcaggtgtctgagaagggcaaggcttacaccaactacttcggacggtgcaatgtggccgagcacgaaaagctgatcctgctggcccagctgaagcccgagaaggatagcgacgaagccgtgacatatagcctgggaaagtttgggcagagggccctggatttctacagcattcatgtgaccaaggagtccacccaccccgtgaagcccctggcccagatcgccggaaacagatacgcctccggacctgtgggaaaggccctgagcgacgcatgtatgggcacaatcgcctccttcctgtctaagtaccaggacatcatcatcgaacaccagaaggtggtgaagggcaaccagaagagactggagagcctgcgggagctggccggcaaggaaaacctggaataccctagcgtgaccctgccacctcagcctcacaccaaggagggcgttgatgcctacaacgaagtgatcgcccgggtgcgaatgtgggtgaacctgaacctgtggcagaagctgaagctaagcagagatgatgccaagcctctgctgagactgaagggattcccttcctttcctctggtcgagagacaggccaacgaagtggactggtgggacatggtgtgtaacgtgaagaagctgatcaacgagaaaaaggaggatggcaaggtgttttggcagaatctggctggctacaagagacaggaagccctgagaccatacctgagcagcgaggaagatcggaagaagggaaagaaattcgctcggtaccagctgggcgacctgctgctgcacctggaaaagaagcacggcgaggactggggaaaggtgtacgacgaggcctgggagcggattgacaagaaagtggaaggcctgagcaagcacatcaagctggaagaggaacggagaagcgaggacgcccagagcaaggccgccctgaccgactggctgcgggctaaggccagcttcgtgatcgagggcctgaaggaggccgacaaggacgagttctgcagatgcgagctgaagctgcagaagtggtacggggacctgcggggaaagcccttcgccatcgaagccgagaacagcatcctggacatcagcggcttcagcaagcagtacaactgtgccttcatctggcagaaggacggcgtgaagaagctgaacctgtacctgatcatcaactacttcaagggcggcaagctgcggttcaagaagatcaaacctgaagccttcgaagccaacagattctacaccgtgatcaacaaaaagagcggcgagatcgtgcccatggaggtgaacttcaacttcgacgaccccaacctgatcatcctgcctctggcctttggcaagagacagggcagagaattcatctggaacgacctgctgtccctggaaaccggcagcctgaagctggccaacggaagagtgatcgagaagacactgtacaacagaagaacccggcaggatgagcctgccctgttcgtggccctgaccttcgagcggcgggaggtcctggactcctccaatatcaaaccaatgaacctgatcggcgtggcaagaggcgaaaacatccccgccgtgatcgccctgaccgaccccgagggctgcccactgagccggtttaaggatagcctgggaaacccaacccacatcctgagaatcggcgagagctataaggagaagcagcggaccatccaggccaagaaggaggtggagcagcggagagccggcggctacagccggaagtacgccagcaaagccaagaatctggcagacgatatggtgagaaacaccgctagagatctgctgtactacgccgtgacccaggatgccatgctgatcttcgccaacctgagccggggcttcggccggcagggcaagcggaccttcatggccgagagacagtacacacggatggaggactggctgaccgccaagctggcctacgagggcctgagcaagacctacctgtccaagacactggcccagtacacctccaagacatgcagcaactgtgggtttaccatcaccagcgccgactacgacagggtgctggagaagctgaagaagacagcaacaggctggatgaccacaattaacggcaaggagctgaaggtggagggccagattacctactacaacagatacaagagacagaacgtagtcaaggacctgtccgtcgagctggatagactgagcgaagaatctgtgaacaacgacatctcctcctggacaaagggcagaagcggagaagctctgagcctcctgaagaaaagattctcccatagacccgtgcaggagaagttcgtgtgcctgaactgcggcttcgagacacacgcagccgagcaagccgccctgaacatcgccagatcctggctgttcctgcggagccaggagtacaagaaataccagacaaacaagacaaccggcaacaccgataagagagccttcgtcgagacctggcagtccttttaccggaagaagcttaaggaggtgtggaaacctgccgtgcggtctggcggatctggcggaggctccacaagccagggcctgctgaccttcggcgacgtggccatcgagttcagccaggaggagtggaggtgcctgagccacacccagagggagctgtacagggacgtgatgctggagaactacggccacctgctgttcctgggcctgatcgtgagcaagcccgacctggtgagcctgctggagcagaggaaggagccctgggacgtgaagaggaagaagaccgtggtgttcgaccccgccgtgagcagccacggcaccagccccaagaaaaagagaaaagtctaagctgccttctgcggggcttgccttctggccatgcccttcttctctcccttgcacctgtacctcttggtctttgaataaagcctgagtaggaaggctagcaaaaaaaaaaaaaaaaaaaaaaaaaaaaaaaaaaaaaaaaaaaaaaaaaaaaaaaaaaaaaaaaaaaaaaaaaaaaaaaa

SEQ ID NO: 4069 - RNA, 5419 nt, synthetic construct
  source 1..5419: mol_type = other RNA
aggaaataagagagaaaagaagagtaagaagaaatataagagccaccatggcccctaagaagaagcgtaaagtgagccgggtgaacggcagcggcagcggcggcggcatgaaccacgaccaggagttcgacccccctaaggtgtaccctcccgtccccgccgagaagagaaagcccatccgggtcctgagcctgttcgatggcatcgccaccggtctgctggtgctgaaggacctgggcatccaggtggataggtacattgcctccgaggtgtgcgaggactccatcaccgtgggaatggtgcgtcatcagggcaagatcatgtacgtgggcgacgtgcggagcgtgacacagaagcatatccaggagtggggccctttcgacctggtgatcggcggcagcccttgcaatgacctgagcatcgtgaacccagcccggaagggcctgtacgagggaaccggcagactgttcttcgagttttacagactgctgcacgacgcccggcctaaggaaggcgacgaccggcccttcttttggctgttcgagaatgtggtggccatgggagtcagcgacaagcgggatattagccggttcctggagagcaaccccgtgatgatcgatgccaaggaagtgagcgccgcccaccgggccagatacttctggggcaatctgcctggcatgaacagacccctggccagcaccgtgaacgacaagctggagctgcaggagtgcctggagcacggccggatcgccaagttcagcaaggtgagaaccatcaccacccgaagcaacagcatcaaacaaggcaaggaccagcactttcctgtgttcatgaacgagaaggaggacatcctgtggtgtaccgagatggagagagtgttcgggttcccagtccactacacagatgtcagcaacatgtctagactggccagacagagactgctgggaagaagctggtccgtccctgtgatcagacacctgttcgcccctctgaaggagtacttcgcctgcgtgagcagcggcaacagcaacgccaacagccggggccccagcttctctagcggcctggtgccactgtccctgagagggagccacatgggccccatggagatctacaaaaccgtgagcgcctggaagcggcagcctgtgcgcgtgctgagcctgtttcggaatatcgataaagtcctgaaaagcctgggattcctggagagcggctctggctccggcggtggcaccctgaagtacgtggaggatgtgacaaacgtggtcagacgggatgtggagaagtggggccccttcgatctggtgtacggcagcacccaacccctgggcagctcttgtgaccggtgccctggctggtacatgtttcagttccaccggatcctgcagtacgccctgccgagacaggagtcccagcggccattcttttggattttcatggacaacttgctgctgaccgaggatgaccaggaaactaccactcggttcctgcagaccgaagccgtgaccctgcaggacgtgagaggccgggactaccagaacgccatgcgggtgtggtccaacatccctggactgaaaagcaagcacgcacctctgacccctaaagaagaggagtacctgcaggcccaggtgcggagcagaagcaagctggacgcccctaaggtggatctgctggtgaagaattgcctcctgcccctgagagagtacttcaagtatttcagccagaatagtctgcccctgggcggcccaagcagcggcgcccctcctcccagcggcggcagcccagccggctccccaacctctaccgaggagggcacctctgagtccgccacccccgagagcggccctggcacctccaccgagcccagcgagggcagcgcacccggcagccctgccggcagccccacctccacagaggagggaaccagcaccgagcccagcgaaggcagcgccccaggcaccagcaccgagcctagtgagggcggctctggcggcggcagcgcccaggagattaaacggatcaacaagatcagaagaagacttgtgaaagacagcaacaccaagaaggccggcaagacaggccccatgaaaaccctgctggttagagtgatgacacccgatctgagagagcggctggaaaacctgagaaagaagcctgaaaatatcccccagcccatcagcaatacatctagagccaacctgaataagctgctgaccgattacaccgaaatgaagaaggcgatcctgcatgtgtactgggaagagttccagaaggaccctgtgggcctgatgagccgggtggcccagcctgccagcaagaagatcgatcagaacaagctgaaacctgagatggacgagaagggcaacctgaccaccgccggctttgcctgctctcagtgtggccagcccctgttcgtgtacaagctggagcaggtgtctgagaagggcaaggcttacaccaactacttcggacggtgcaatgtggccgagcacgaaaagctgatcctgctggcccagctgaagcccgagaaggatagcgacgaagccgtgacatatagcctgggaaagtttgggcagagggccctggatttctacagcattcatgtgaccaaggagtccacccaccccgtgaagcccctggcccagatcgccggaaacagatacgcctccggacctgtgggaaaggccctgagcgacgcatgtatgggcacaatcgcctccttcctgtctaagtaccaggacatcatcatcgaacaccagaaggtggtgaagggcaaccagaagagactggagagcctgcgggagctggccggcaaggaaaacctggaataccctagcgtgaccctgccacctcagcctcacaccaaggagggcgttgatgcctacaacgaagtgatcgcccgggtgcgaatgtgggtgaacctgaacctgtggcagaagctgaagctaagcagagatgatgccaagcctctgctgagactgaagggattcccttcctttcctctggtcgagagacaggccaacgaagtggactggtgggacatggtgtgtaacgtgaagaagctgatcaacgagaaaaaggaggatggcaaggtgttttggcagaatctggctggctacaagagacaggaagccctgagaccatacctgagcagcgaggaagatcggaagaagggaaagaaattcgctcggtaccagctgggcgacctgctgctgcacctggaaaagaagcacggcgaggactggggaaaggtgtacgacgaggcctgggagcggattgacaagaaagtggaaggcctgagcaagcacatcaagctggaagaggaacggagaagcgaggacgcccagagcaaggccgccctgaccgactggctgcgggctaaggccagcttcgtgatcgagggcctgaaggaggccgacaaggacgagttctgcagatgcgagctgaagctgcagaagtggtacggggacctgcggggaaagcccttcgccatcgaagccgagaacagcatcctggacatcagcggcttcagcaagcagtacaactgtgccttcatctggcagaaggacggcgtgaagaagctgaacctgtacctgatcatcaactacttcaagggcggcaagctgcggttcaagaagatcaaacctgaagccttcgaagccaacagattctacaccgtgatcaacaaaaagagcggcgagatcgtgcccatggaggtgaacttcaacttcgacgaccccaacctgatcatcctgcctctggcctttggcaagagacagggcagagaattcatctggaacgacctgctgtccctggaaaccggcagcctgaagctggccaacggaagagtgatcgagaagacactgtacaacagaagaacccggcaggatgagcctgccctgttcgtggccctgaccttcgagcggcgggaggtcctggactcctccaatatcaaaccaatgaacctgatcggcgtggcaagaggcgaaaacatccccgccgtgatcgccctgaccgaccccgagggctgcccactgagccggtttaaggatagcctgggaaacccaacccacatcctgagaatcggcgagagctataaggagaagcagcggaccatccaggccaagaaggaggtggagcagcggagagccggcggctacagccggaagtacgccagcaaagccaagaatctggcagacgatatggtgagaaacaccgctagagatctgctgtactacgccgtgacccaggatgccatgctgatcttcgccaacctgagccggggcttcggccggcagggcaagcggaccttcatggccgagagacagtacacacggatggaggactggctgaccgccaagctggcctacgagggcctgagcaagacctacctgtccaagacactggcccagtacacctccaagacatgcagcaactgtgggtttaccatcaccagcgccgactacgacagggtgctggagaagctgaagaagacagcaacaggctggatgaccacaattaacggcaaggagctgaaggtggagggccagattacctactacaacagatacaagagacagaacgtagtcaaggacctgtccgtcgagctggatagactgagcgaagaatctgtgaacaacgacatctcctcctggacaaagggcagaagcggagaagctctgagcctcctgaagaaaagattctcccatagacccgtgcaggagaagttcgtgtgcctgaactgcggcttcgagacacacgcagccgagcaagccgccctgaacatcgccagatcctggctgttcctgcggagccaggagtacaagaaataccagacaaacaagacaaccggcaacaccgataagagagccttcgtcgagacctggcagtccttttaccggaagaagcttaaggaggtgtggaaacctgccgtgcggtctggcggatctggcggaggctccacaagcgccaggggcctgatggccttcgaggacgtggccgtgtacttcagccaggaggagtggatgttcctgaacgccgcccagagggccctgtacaggcacgtgatgctggagaacttcgccctggtggacagcatcggccccagcgtgagcaggcccagggtgatcatccagctgcagaggggcgaggagccctgggtgcccaacaggaccatcgccggccccggcaggggcacccacaggaggagcaccagccccaagaaaaagagaaaagtctaagctgccttctgcggggcttgccttctggccatgcccttcttctctcccttgcacctgtacctcttggtctttgaataaagcctgagtaggaaggctagcaaaaaaaaaaaaaaaaaaaaaaaaaaaaaaaaaaaaaaaaaaaaaaaaaaaaaaaaaaaaaaaaaaaaaaaaaaaaaaaa

SEQ ID NO: 4070 - RNA, 5419 nt, synthetic construct
  source 1..5419: mol_type = other RNA
aggaaataagagagaaaagaagagtaagaagaaatataagagccaccatggcccctaagaagaagcgtaaagtgagccgggtgaacggcagcggcagcggcggcggcatgaaccacgaccaggagttcgacccccctaaggtgtaccctcccgtccccgccgagaagagaaagcccatccgggtcctgagcctgttcgatggcatcgccaccggtctgctggtgctgaaggacctgggcatccaggtggataggtacattgcctccgaggtgtgcgaggactccatcaccgtgggaatggtgcgtcatcagggcaagatcatgtacgtgggcgacgtgcggagcgtgacacagaagcatatccaggagtggggccctttcgacctggtgatcggcggcagcccttgcaatgacctgagcatcgtgaacccagcccggaagggcctgtacgagggaaccggcagactgttcttcgagttttacagactgctgcacgacgcccggcctaaggaaggcgacgaccggcccttcttttggctgttcgagaatgtggtggccatgggagtcagcgacaagcgggatattagccggttcctggagagcaaccccgtgatgatcgatgccaaggaagtgagcgccgcccaccgggccagatacttctggggcaatctgcctggcatgaacagacccctggccagcaccgtgaacgacaagctggagctgcaggagtgcctggagcacggccggatcgccaagttcagcaaggtgagaaccatcaccacccgaagcaacagcatcaaacaaggcaaggaccagcactttcctgtgttcatgaacgagaaggaggacatcctgtggtgtaccgagatggagagagtgttcgggttcccagtccactacacagatgtcagcaacatgtctagactggccagacagagactgctgggaagaagctggtccgtccctgtgatcagacacctgttcgcccctctgaaggagtacttcgcctgcgtgagcagcggcaacagcaacgccaacagccggggccccagcttctctagcggcctggtgccactgtccctgagagggagccacatgggccccatggagatctacaaaaccgtgagcgcctggaagcggcagcctgtgcgcgtgctgagcctgtttcggaatatcgataaagtcctgaaaagcctgggattcctggagagcggctctggctccggcggtggcaccctgaagtacgtggaggatgtgacaaacgtggtcagacgggatgtggagaagtggggccccttcgatctggtgtacggcagcacccaacccctgggcagctcttgtgaccggtgccctggctggtacatgtttcagttccaccggatcctgcagtacgccctgccgagacaggagtcccagcggccattcttttggattttcatggacaacttgctgctgaccgaggatgaccaggaaactaccactcggttcctgcagaccgaagccgtgaccctgcaggacgtgagaggccgggactaccagaacgccatgcgggtgtggtccaacatccctggactgaaaagcaagcacgcacctctgacccctaaagaagaggagtacctgcaggcccaggtgcggagcagaagcaagctggacgcccctaaggtggatctgctggtgaagaattgcctcctgcccctgagagagtacttcaagtatttcagccagaatagtctgcccctgggcggcccaagcagcggcgcccctcctcccagcggcggcagcccagccggctccccaacctctaccgaggagggcacctctgagtccgccacccccgagagcggccctggcacctccaccgagcccagcgagggcagcgcacccggcagccctgccggcagccccacctccacagaggagggaaccagcaccgagcccagcgaaggcagcgccccaggcaccagcaccgagcctagtgagggcggctctggcggcggcagcgcccaggagattaaacggatcaacaagatcagaagaagacttgtgaaagacagcaacaccaagaaggccggcaagacaggccccatgaaaaccctgctggttagagtgatgacacccgatctgagagagcggctggaaaacctgagaaagaagcctgaaaatatcccccagcccatcagcaatacatctagagccaacctgaataagctgctgaccgattacaccgaaatgaagaaggcgatcctgcatgtgtactgggaagagttccagaaggaccctgtgggcctgatgagccgggtggcccagcctgccagcaagaagatcgatcagaacaagctgaaacctgagatggacgagaagggcaacctgaccaccgccggctttgcctgctctcagtgtggccagcccctgttcgtgtacaagctggagcaggtgtctgagaagggcaaggcttacaccaactacttcggacggtgcaatgtggccgagcacgaaaagctgatcctgctggcccagctgaagcccgagaaggatagcgacgaagccgtgacatatagcctgggaaagtttgggcagagggccctggatttctacagcattcatgtgaccaaggagtccacccaccccgtgaagcccctggcccagatcgccggaaacagatacgcctccggacctgtgggaaaggccctgagcgacgcatgtatgggcacaatcgcctccttcctgtctaagtaccaggacatcatcatcgaacaccagaaggtggtgaagggcaaccagaagagactggagagcctgcgggagctggccggcaaggaaaacctggaataccctagcgtgaccctgccacctcagcctcacaccaaggagggcgttgatgcctacaacgaagtgatcgcccgggtgcgaatgtgggtgaacctgaacctgtggcagaagctgaagctaagcagagatgatgccaagcctctgctgagactgaagggattcccttcctttcctctggtcgagagacaggccaacgaagtggactggtgggacatggtgtgtaacgtgaagaagctgatcaacgagaaaaaggaggatggcaaggtgttttggcagaatctggctggctacaagagacaggaagccctgagaccatacctgagcagcgaggaagatcggaagaagggaaagaaattcgctcggtaccagctgggcgacctgctgctgcacctggaaaagaagcacggcgaggactggggaaaggtgtacgacgaggcctgggagcggattgacaagaaagtggaaggcctgagcaagcacatcaagctggaagaggaacggagaagcgaggacgcccagagcaaggccgccctgaccgactggctgcgggctaaggccagcttcgtgatcgagggcctgaaggaggccgacaaggacgagttctgcagatgcgagctgaagctgcagaagtggtacggggacctgcggggaaagcccttcgccatcgaagccgagaacagcatcctggacatcagcggcttcagcaagcagtacaactgtgccttcatctggcagaaggacggcgtgaagaagctgaacctgtacctgatcatcaactacttcaagggcggcaagctgcggttcaagaagatcaaacctgaagccttcgaagccaacagattctacaccgtgatcaacaaaaagagcggcgagatcgtgcccatggaggtgaacttcaacttcgacgaccccaacctgatcatcctgcctctggcctttggcaagagacagggcagagaattcatctggaacgacctgctgtccctggaaaccggcagcctgaagctggccaacggaagagtgatcgagaagacactgtacaacagaagaacccggcaggatgagcctgccctgttcgtggccctgaccttcgagcggcgggaggtcctggactcctccaatatcaaaccaatgaacctgatcggcgtggcaagaggcgaaaacatccccgccgtgatcgccctgaccgaccccgagggctgcccactgagccggtttaaggatagcctgggaaacccaacccacatcctgagaatcggcgagagctataaggagaagcagcggaccatccaggccaagaaggaggtggagcagcggagagccggcggctacagccggaagtacgccagcaaagccaagaatctggcagacgatatggtgagaaacaccgctagagatctgctgtactacgccgtgacccaggatgccatgctgatcttcgccaacctgagccggggcttcggccggcagggcaagcggaccttcatggccgagagacagtacacacggatggaggactggctgaccgccaagctggcctacgagggcctgagcaagacctacctgtccaagacactggcccagtacacctccaagacatgcagcaactgtgggtttaccatcaccagcgccgactacgacagggtgctggagaagctgaagaagacagcaacaggctggatgaccacaattaacggcaaggagctgaaggtggagggccagattacctactacaacagatacaagagacagaacgtagtcaaggacctgtccgtcgagctggatagactgagcgaagaatctgtgaacaacgacatctcctcctggacaaagggcagaagcggagaagctctgagcctcctgaagaaaagattctcccatagacccgtgcaggagaagttcgtgtgcctgaactgcggcttcgagacacacgcagccgagcaagccgccctgaacatcgccagatcctggctgttcctgcggagccaggagtacaagaaataccagacaaacaagacaaccggcaacaccgataagagagccttcgtcgagacctggcagtccttttaccggaagaagcttaaggaggtgtggaaacctgccgtgcggtctggcggatctggcggaggctccacaagcgcccaggagagcatgaccttcagggacgtggccgtgttcttcagccaggacgagtggctgcacctggacagcgcccagagggccctgtacagggaggtgatgctggagaactacagcaccctggtgagcctgggcatccccttcagcatgcccaaggtgatccaccagctgcagcagggccaggacccctgcaccgtggagggcgacgtgcccagcaacacctgcctgggcttcaagacctggaccagccccaagaaaaagagaaaagtctaagctgccttctgcggggcttgccttctggccatgcccttcttctctcccttgcacctgtacctcttggtctttgaataaagcctgagtaggaaggctagcaaaaaaaaaaaaaaaaaaaaaaaaaaaaaaaaaaaaaaaaaaaaaaaaaaaaaaaaaaaaaaaaaaaaaaaaaaaaaaaa

SEQ ID NO: 4071 - RNA, 5419 nt, synthetic construct
  source 1..5419: mol_type = other RNA
aggaaataagagagaaaagaagagtaagaagaaatataagagccaccatggcccctaagaagaagcgtaaagtgagccgggtgaacggcagcggcagcggcggcggcatgaaccacgaccaggagttcgacccccctaaggtgtaccctcccgtccccgccgagaagagaaagcccatccgggtcctgagcctgttcgatggcatcgccaccggtctgctggtgctgaaggacctgggcatccaggtggataggtacattgcctccgaggtgtgcgaggactccatcaccgtgggaatggtgcgtcatcagggcaagatcatgtacgtgggcgacgtgcggagcgtgacacagaagcatatccaggagtggggccctttcgacctggtgatcggcggcagcccttgcaatgacctgagcatcgtgaacccagcccggaagggcctgtacgagggaaccggcagactgttcttcgagttttacagactgctgcacgacgcccggcctaaggaaggcgacgaccggcccttcttttggctgttcgagaatgtggtggccatgggagtcagcgacaagcgggatattagccggttcctggagagcaaccccgtgatgatcgatgccaaggaagtgagcgccgcccaccgggccagatacttctggggcaatctgcctggcatgaacagacccctggccagcaccgtgaacgacaagctggagctgcaggagtgcctggagcacggccggatcgccaagttcagcaaggtgagaaccatcaccacccgaagcaacagcatcaaacaaggcaaggaccagcactttcctgtgttcatgaacgagaaggaggacatcctgtggtgtaccgagatggagagagtgttcgggttcccagtccactacacagatgtcagcaacatgtctagactggccagacagagactgctgggaagaagctggtccgtccctgtgatcagacacctgttcgcccctctgaaggagtacttcgcctgcgtgagcagcggcaacagcaacgccaacagccggggccccagcttctctagcggcctggtgccactgtccctgagagggagccacatgggccccatggagatctacaaaaccgtgagcgcctggaagcggcagcctgtgcgcgtgctgagcctgtttcggaatatcgataaagtcctgaaaagcctgggattcctggagagcggctctggctccggcggtggcaccctgaagtacgtggaggatgtgacaaacgtggtcagacgggatgtggagaagtggggccccttcgatctggtgtacggcagcacccaacccctgggcagctcttgtgaccggtgccctggctggtacatgtttcagttccaccggatcctgcagtacgccctgccgagacaggagtcccagcggccattcttttggattttcatggacaacttgctgctgaccgaggatgaccaggaaactaccactcggttcctgcagaccgaagccgtgaccctgcaggacgtgagaggccgggactaccagaacgccatgcgggtgtggtccaacatccctggactgaaaagcaagcacgcacctctgacccctaaagaagaggagtacctgcaggcccaggtgcggagcagaagcaagctggacgcccctaaggtggatctgctggtgaagaattgcctcctgcccctgagagagtacttcaagtatttcagccagaatagtctgcccctgggcggcccaagcagcggcgcccctcctcccagcggcggcagcccagccggctccccaacctctaccgaggagggcacctctgagtccgccacccccgagagcggccctggcacctccaccgagcccagcgagggcagcgcacccggcagccctgccggcagccccacctccacagaggagggaaccagcaccgagcccagcgaaggcagcgccccaggcaccagcaccgagcctagtgagggcggctctggcggcggcagcgcccaggagattaaacggatcaacaagatcagaagaagacttgtgaaagacagcaacaccaagaaggccggcaagacaggccccatgaaaaccctgctggttagagtgatgacacccgatctgagagagcggctggaaaacctgagaaagaagcctgaaaatatcccccagcccatcagcaatacatctagagccaacctgaataagctgctgaccgattacaccgaaatgaagaaggcgatcctgcatgtgtactgggaagagttccagaaggaccctgtgggcctgatgagccgggtggcccagcctgccagcaagaagatcgatcagaacaagctgaaacctgagatggacgagaagggcaacctgaccaccgccggctttgcctgctctcagtgtggccagcccctgttcgtgtacaagctggagcaggtgtctgagaagggcaaggcttacaccaactacttcggacggtgcaatgtggccgagcacgaaaagctgatcctgctggcccagctgaagcccgagaaggatagcgacgaagccgtgacatatagcctgggaaagtttgggcagagggccctggatttctacagcattcatgtgaccaaggagtccacccaccccgtgaagcccctggcccagatcgccggaaacagatacgcctccggacctgtgggaaaggccctgagcgacgcatgtatgggcacaatcgcctccttcctgtctaagtaccaggacatcatcatcgaacaccagaaggtggtgaagggcaaccagaagagactggagagcctgcgggagctggccggcaaggaaaacctggaataccctagcgtgaccctgccacctcagcctcacaccaaggagggcgttgatgcctacaacgaagtgatcgcccgggtgcgaatgtgggtgaacctgaacctgtggcagaagctgaagctaagcagagatgatgccaagcctctgctgagactgaagggattcccttcctttcctctggtcgagagacaggccaacgaagtggactggtgggacatggtgtgtaacgtgaagaagctgatcaacgagaaaaaggaggatggcaaggtgttttggcagaatctggctggctacaagagacaggaagccctgagaccatacctgagcagcgaggaagatcggaagaagggaaagaaattcgctcggtaccagctgggcgacctgctgctgcacctggaaaagaagcacggcgaggactggggaaaggtgtacgacgaggcctgggagcggattgacaagaaagtggaaggcctgagcaagcacatcaagctggaagaggaacggagaagcgaggacgcccagagcaaggccgccctgaccgactggctgcgggctaaggccagcttcgtgatcgagggcctgaaggaggccgacaaggacgagttctgcagatgcgagctgaagctgcagaagtggtacggggacctgcggggaaagcccttcgccatcgaagccgagaacagcatcctggacatcagcggcttcagcaagcagtacaactgtgccttcatctggcagaaggacggcgtgaagaagctgaacctgtacctgatcatcaactacttcaagggcggcaagctgcggttcaagaagatcaaacctgaagccttcgaagccaacagattctacaccgtgatcaacaaaaagagcggcgagatcgtgcccatggaggtgaacttcaacttcgacgaccccaacctgatcatcctgcctctggcctttggcaagagacagggcagagaattcatctggaacgacctgctgtccctggaaaccggcagcctgaagctggccaacggaagagtgatcgagaagacactgtacaacagaagaacccggcaggatgagcctgccctgttcgtggccctgaccttcgagcggcgggaggtcctggactcctccaatatcaaaccaatgaacctgatcggcgtggcaagaggcgaaaacatccccgccgtgatcgccctgaccgaccccgagggctgcccactgagccggtttaaggatagcctgggaaacccaacccacatcctgagaatcggcgagagctataaggagaagcagcggaccatccaggccaagaaggaggtggagcagcggagagccggcggctacagccggaagtacgccagcaaagccaagaatctggcagacgatatggtgagaaacaccgctagagatctgctgtactacgccgtgacccaggatgccatgctgatcttcgccaacctgagccggggcttcggccggcagggcaagcggaccttcatggccgagagacagtacacacggatggaggactggctgaccgccaagctggcctacgagggcctgagcaagacctacctgtccaagacactggcccagtacacctccaagacatgcagcaactgtgggtttaccatcaccagcgccgactacgacagggtgctggagaagctgaagaagacagcaacaggctggatgaccacaattaacggcaaggagctgaaggtggagggccagattacctactacaacagatacaagagacagaacgtagtcaaggacctgtccgtcgagctggatagactgagcgaagaatctgtgaacaacgacatctcctcctggacaaagggcagaagcggagaagctctgagcctcctgaagaaaagattctcccatagacccgtgcaggagaagttcgtgtgcctgaactgcggcttcgagacacacgcagccgagcaagccgccctgaacatcgccagatcctggctgttcctgcggagccaggagtacaagaaataccagacaaacaagacaaccggcaacaccgataagagagccttcgtcgagacctggcagtccttttaccggaagaagcttaaggaggtgtggaaacctgccgtgcggtctggcggatctggcggaggctccacaagcccccagggctgcgccatcagcgaggacgtgttcgtgtacttcagcagggaggagtgggtgctgctggacgaggaccagaggctgctgtacagggacgtgatgctggagaacttcgccctgctggccagcctgggcatcaccagcagcaggagctacctggtgacccagctggagcagggcgaggagccctggatgcccgcccaggtggacatgaccgccgccaccgagaaggaggcccagaagaccagccccaagaaaaagagaaaagtctaagctgccttctgcggggcttgccttctggccatgcccttcttctctcccttgcacctgtacctcttggtctttgaataaagcctgagtaggaaggctagcaaaaaaaaaaaaaaaaaaaaaaaaaaaaaaaaaaaaaaaaaaaaaaaaaaaaaaaaaaaaaaaaaaaaaaaaaaaaaaaa

SEQ ID NO: 4072 - RNA, 5419 nt, synthetic construct
  source 1..5419: mol_type = other RNA
aggaaataagagagaaaagaagagtaagaagaaatataagagccaccatggcccctaagaagaagcgtaaagtgagccgggtgaacggcagcggcagcggcggcggcatgaaccacgaccaggagttcgacccccctaaggtgtaccctcccgtccccgccgagaagagaaagcccatccgggtcctgagcctgttcgatggcatcgccaccggtctgctggtgctgaaggacctgggcatccaggtggataggtacattgcctccgaggtgtgcgaggactccatcaccgtgggaatggtgcgtcatcagggcaagatcatgtacgtgggcgacgtgcggagcgtgacacagaagcatatccaggagtggggccctttcgacctggtgatcggcggcagcccttgcaatgacctgagcatcgtgaacccagcccggaagggcctgtacgagggaaccggcagactgttcttcgagttttacagactgctgcacgacgcccggcctaaggaaggcgacgaccggcccttcttttggctgttcgagaatgtggtggccatgggagtcagcgacaagcgggatattagccggttcctggagagcaaccccgtgatgatcgatgccaaggaagtgagcgccgcccaccgggccagatacttctggggcaatctgcctggcatgaacagacccctggccagcaccgtgaacgacaagctggagctgcaggagtgcctggagcacggccggatcgccaagttcagcaaggtgagaaccatcaccacccgaagcaacagcatcaaacaaggcaaggaccagcactttcctgtgttcatgaacgagaaggaggacatcctgtggtgtaccgagatggagagagtgttcgggttcccagtccactacacagatgtcagcaacatgtctagactggccagacagagactgctgggaagaagctggtccgtccctgtgatcagacacctgttcgcccctctgaaggagtacttcgcctgcgtgagcagcggcaacagcaacgccaacagccggggccccagcttctctagcggcctggtgccactgtccctgagagggagccacatgggccccatggagatctacaaaaccgtgagcgcctggaagcggcagcctgtgcgcgtgctgagcctgtttcggaatatcgataaagtcctgaaaagcctgggattcctggagagcggctctggctccggcggtggcaccctgaagtacgtggaggatgtgacaaacgtggtcagacgggatgtggagaagtggggccccttcgatctggtgtacggcagcacccaacccctgggcagctcttgtgaccggtgccctggctggtacatgtttcagttccaccggatcctgcagtacgccctgccgagacaggagtcccagcggccattcttttggattttcatggacaacttgctgctgaccgaggatgaccaggaaactaccactcggttcctgcagaccgaagccgtgaccctgcaggacgtgagaggccgggactaccagaacgccatgcgggtgtggtccaacatccctggactgaaaagcaagcacgcacctctgacccctaaagaagaggagtacctgcaggcccaggtgcggagcagaagcaagctggacgcccctaaggtggatctgctggtgaagaattgcctcctgcccctgagagagtacttcaagtatttcagccagaatagtctgcccctgggcggcccaagcagcggcgcccctcctcccagcggcggcagcccagccggctccccaacctctaccgaggagggcacctctgagtccgccacccccgagagcggccctggcacctccaccgagcccagcgagggcagcgcacccggcagccctgccggcagccccacctccacagaggagggaaccagcaccgagcccagcgaaggcagcgccccaggcaccagcaccgagcctagtgagggcggctctggcggcggcagcgcccaggagattaaacggatcaacaagatcagaagaagacttgtgaaagacagcaacaccaagaaggccggcaagacaggccccatgaaaaccctgctggttagagtgatgacacccgatctgagagagcggctggaaaacctgagaaagaagcctgaaaatatcccccagcccatcagcaatacatctagagccaacctgaataagctgctgaccgattacaccgaaatgaagaaggcgatcctgcatgtgtactgggaagagttccagaaggaccctgtgggcctgatgagccgggtggcccagcctgccagcaagaagatcgatcagaacaagctgaaacctgagatggacgagaagggcaacctgaccaccgccggctttgcctgctctcagtgtggccagcccctgttcgtgtacaagctggagcaggtgtctgagaagggcaaggcttacaccaactacttcggacggtgcaatgtggccgagcacgaaaagctgatcctgctggcccagctgaagcccgagaaggatagcgacgaagccgtgacatatagcctgggaaagtttgggcagagggccctggatttctacagcattcatgtgaccaaggagtccacccaccccgtgaagcccctggcccagatcgccggaaacagatacgcctccggacctgtgggaaaggccctgagcgacgcatgtatgggcacaatcgcctccttcctgtctaagtaccaggacatcatcatcgaacaccagaaggtggtgaagggcaaccagaagagactggagagcctgcgggagctggccggcaaggaaaacctggaataccctagcgtgaccctgccacctcagcctcacaccaaggagggcgttgatgcctacaacgaagtgatcgcccgggtgcgaatgtgggtgaacctgaacctgtggcagaagctgaagctaagcagagatgatgccaagcctctgctgagactgaagggattcccttcctttcctctggtcgagagacaggccaacgaagtggactggtgggacatggtgtgtaacgtgaagaagctgatcaacgagaaaaaggaggatggcaaggtgttttggcagaatctggctggctacaagagacaggaagccctgagaccatacctgagcagcgaggaagatcggaagaagggaaagaaattcgctcggtaccagctgggcgacctgctgctgcacctggaaaagaagcacggcgaggactggggaaaggtgtacgacgaggcctgggagcggattgacaagaaagtggaaggcctgagcaagcacatcaagctggaagaggaacggagaagcgaggacgcccagagcaaggccgccctgaccgactggctgcgggctaaggccagcttcgtgatcgagggcctgaaggaggccgacaaggacgagttctgcagatgcgagctgaagctgcagaagtggtacggggacctgcggggaaagcccttcgccatcgaagccgagaacagcatcctggacatcagcggcttcagcaagcagtacaactgtgccttcatctggcagaaggacggcgtgaagaagctgaacctgtacctgatcatcaactacttcaagggcggcaagctgcggttcaagaagatcaaacctgaagccttcgaagccaacagattctacaccgtgatcaacaaaaagagcggcgagatcgtgcccatggaggtgaacttcaacttcgacgaccccaacctgatcatcctgcctctggcctttggcaagagacagggcagagaattcatctggaacgacctgctgtccctggaaaccggcagcctgaagctggccaacggaagagtgatcgagaagacactgtacaacagaagaacccggcaggatgagcctgccctgttcgtggccctgaccttcgagcggcgggaggtcctggactcctccaatatcaaaccaatgaacctgatcggcgtggcaagaggcgaaaacatccccgccgtgatcgccctgaccgaccccgagggctgcccactgagccggtttaaggatagcctgggaaacccaacccacatcctgagaatcggcgagagctataaggagaagcagcggaccatccaggccaagaaggaggtggagcagcggagagccggcggctacagccggaagtacgccagcaaagccaagaatctggcagacgatatggtgagaaacaccgctagagatctgctgtactacgccgtgacccaggatgccatgctgatcttcgccaacctgagccggggcttcggccggcagggcaagcggaccttcatggccgagagacagtacacacggatggaggactggctgaccgccaagctggcctacgagggcctgagcaagacctacctgtccaagacactggcccagtacacctccaagacatgcagcaactgtgggtttaccatcaccagcgccgactacgacagggtgctggagaagctgaagaagacagcaacaggctggatgaccacaattaacggcaaggagctgaaggtggagggccagattacctactacaacagatacaagagacagaacgtagtcaaggacctgtccgtcgagctggatagactgagcgaagaatctgtgaacaacgacatctcctcctggacaaagggcagaagcggagaagctctgagcctcctgaagaaaagattctcccatagacccgtgcaggagaagttcgtgtgcctgaactgcggcttcgagacacacgcagccgagcaagccgccctgaacatcgccagatcctggctgttcctgcggagccaggagtacaagaaataccagacaaacaagacaaccggcaacaccgataagagagccttcgtcgagacctggcagtccttttaccggaagaagcttaaggaggtgtggaaacctgccgtgcggtctggcggatctggcggaggctccacaagcgtgcacggcagcgtgaccttcagggacgtggccatcgacttcagccaggaggagtgggagtgcctgcagcccgaccagaggaccctgtacagggacgtgatgctggagaactacagccacctgatcagcctgggcagcagcatcagcaagcccgacgtgatcaccctgctggagcaggagcaggagccctggatggtggtgaggaaggagaccaacaggtggtaccccgacctggagagcaagaccagccccaagaaaaagagaaaagtctaagctgccttctgcggggcttgccttctggccatgcccttcttctctcccttgcacctgtacctcttggtctttgaataaagcctgagtaggaaggctagcaaaaaaaaaaaaaaaaaaaaaaaaaaaaaaaaaaaaaaaaaaaaaaaaaaaaaaaaaaaaaaaaaaaaaaaaaaaaaaaa

SEQ ID NO: 4073 - RNA, 5419 nt, synthetic construct
  source 1..5419: mol_type = other RNA
aggaaataagagagaaaagaagagtaagaagaaatataagagccaccatggcccctaagaagaagcgtaaagtgagccgggtgaacggcagcggcagcggcggcggcatgaaccacgaccaggagttcgacccccctaaggtgtaccctcccgtccccgccgagaagagaaagcccatccgggtcctgagcctgttcgatggcatcgccaccggtctgctggtgctgaaggacctgggcatccaggtggataggtacattgcctccgaggtgtgcgaggactccatcaccgtgggaatggtgcgtcatcagggcaagatcatgtacgtgggcgacgtgcggagcgtgacacagaagcatatccaggagtggggccctttcgacctggtgatcggcggcagcccttgcaatgacctgagcatcgtgaacccagcccggaagggcctgtacgagggaaccggcagactgttcttcgagttttacagactgctgcacgacgcccggcctaaggaaggcgacgaccggcccttcttttggctgttcgagaatgtggtggccatgggagtcagcgacaagcgggatattagccggttcctggagagcaaccccgtgatgatcgatgccaaggaagtgagcgccgcccaccgggccagatacttctggggcaatctgcctggcatgaacagacccctggccagcaccgtgaacgacaagctggagctgcaggagtgcctggagcacggccggatcgccaagttcagcaaggtgagaaccatcaccacccgaagcaacagcatcaaacaaggcaaggaccagcactttcctgtgttcatgaacgagaaggaggacatcctgtggtgtaccgagatggagagagtgttcgggttcccagtccactacacagatgtcagcaacatgtctagactggccagacagagactgctgggaagaagctggtccgtccctgtgatcagacacctgttcgcccctctgaaggagtacttcgcctgcgtgagcagcggcaacagcaacgccaacagccggggccccagcttctctagcggcctggtgccactgtccctgagagggagccacatgggccccatggagatctacaaaaccgtgagcgcctggaagcggcagcctgtgcgcgtgctgagcctgtttcggaatatcgataaagtcctgaaaagcctgggattcctggagagcggctctggctccggcggtggcaccctgaagtacgtggaggatgtgacaaacgtggtcagacgggatgtggagaagtggggccccttcgatctggtgtacggcagcacccaacccctgggcagctcttgtgaccggtgccctggctggtacatgtttcagttccaccggatcctgcagtacgccctgccgagacaggagtcccagcggccattcttttggattttcatggacaacttgctgctgaccgaggatgaccaggaaactaccactcggttcctgcagaccgaagccgtgaccctgcaggacgtgagaggccgggactaccagaacgccatgcgggtgtggtccaacatccctggactgaaaagcaagcacgcacctctgacccctaaagaagaggagtacctgcaggcccaggtgcggagcagaagcaagctggacgcccctaaggtggatctgctggtgaagaattgcctcctgcccctgagagagtacttcaagtatttcagccagaatagtctgcccctgggcggcccaagcagcggcgcccctcctcccagcggcggcagcccagccggctccccaacctctaccgaggagggcacctctgagtccgccacccccgagagcggccctggcacctccaccgagcccagcgagggcagcgcacccggcagccctgccggcagccccacctccacagaggagggaaccagcaccgagcccagcgaaggcagcgccccaggcaccagcaccgagcctagtgagggcggctctggcggcggcagcgcccaggagattaaacggatcaacaagatcagaagaagacttgtgaaagacagcaacaccaagaaggccggcaagacaggccccatgaaaaccctgctggttagagtgatgacacccgatctgagagagcggctggaaaacctgagaaagaagcctgaaaatatcccccagcccatcagcaatacatctagagccaacctgaataagctgctgaccgattacaccgaaatgaagaaggcgatcctgcatgtgtactgggaagagttccagaaggaccctgtgggcctgatgagccgggtggcccagcctgccagcaagaagatcgatcagaacaagctgaaacctgagatggacgagaagggcaacctgaccaccgccggctttgcctgctctcagtgtggccagcccctgttcgtgtacaagctggagcaggtgtctgagaagggcaaggcttacaccaactacttcggacggtgcaatgtggccgagcacgaaaagctgatcctgctggcccagctgaagcccgagaaggatagcgacgaagccgtgacatatagcctgggaaagtttgggcagagggccctggatttctacagcattcatgtgaccaaggagtccacccaccccgtgaagcccctggcccagatcgccggaaacagatacgcctccggacctgtgggaaaggccctgagcgacgcatgtatgggcacaatcgcctccttcctgtctaagtaccaggacatcatcatcgaacaccagaaggtggtgaagggcaaccagaagagactggagagcctgcgggagctggccggcaaggaaaacctggaataccctagcgtgaccctgccacctcagcctcacaccaaggagggcgttgatgcctacaacgaagtgatcgcccgggtgcgaatgtgggtgaacctgaacctgtggcagaagctgaagctaagcagagatgatgccaagcctctgctgagactgaagggattcccttcctttcctctggtcgagagacaggccaacgaagtggactggtgggacatggtgtgtaacgtgaagaagctgatcaacgagaaaaaggaggatggcaaggtgttttggcagaatctggctggctacaagagacaggaagccctgagaccatacctgagcagcgaggaagatcggaagaagggaaagaaattcgctcggtaccagctgggcgacctgctgctgcacctggaaaagaagcacggcgaggactggggaaaggtgtacgacgaggcctgggagcggattgacaagaaagtggaaggcctgagcaagcacatcaagctggaagaggaacggagaagcgaggacgcccagagcaaggccgccctgaccgactggctgcgggctaaggccagcttcgtgatcgagggcctgaaggaggccgacaaggacgagttctgcagatgcgagctgaagctgcagaagtggtacggggacctgcggggaaagcccttcgccatcgaagccgagaacagcatcctggacatcagcggcttcagcaagcagtacaactgtgccttcatctggcagaaggacggcgtgaagaagctgaacctgtacctgatcatcaactacttcaagggcggcaagctgcggttcaagaagatcaaacctgaagccttcgaagccaacagattctacaccgtgatcaacaaaaagagcggcgagatcgtgcccatggaggtgaacttcaacttcgacgaccccaacctgatcatcctgcctctggcctttggcaagagacagggcagagaattcatctggaacgacctgctgtccctggaaaccggcagcctgaagctggccaacggaagagtgatcgagaagacactgtacaacagaagaacccggcaggatgagcctgccctgttcgtggccctgaccttcgagcggcgggaggtcctggactcctccaatatcaaaccaatgaacctgatcggcgtggcaagaggcgaaaacatccccgccgtgatcgccctgaccgaccccgagggctgcccactgagccggtttaaggatagcctgggaaacccaacccacatcctgagaatcggcgagagctataaggagaagcagcggaccatccaggccaagaaggaggtggagcagcggagagccggcggctacagccggaagtacgccagcaaagccaagaatctggcagacgatatggtgagaaacaccgctagagatctgctgtactacgccgtgacccaggatgccatgctgatcttcgccaacctgagccggggcttcggccggcagggcaagcggaccttcatggccgagagacagtacacacggatggaggactggctgaccgccaagctggcctacgagggcctgagcaagacctacctgtccaagacactggcccagtacacctccaagacatgcagcaactgtgggtttaccatcaccagcgccgactacgacagggtgctggagaagctgaagaagacagcaacaggctggatgaccacaattaacggcaaggagctgaaggtggagggccagattacctactacaacagatacaagagacagaacgtagtcaaggacctgtccgtcgagctggatagactgagcgaagaatctgtgaacaacgacatctcctcctggacaaagggcagaagcggagaagctctgagcctcctgaagaaaagattctcccatagacccgtgcaggagaagttcgtgtgcctgaactgcggcttcgagacacacgcagccgagcaagccgccctgaacatcgccagatcctggctgttcctgcggagccaggagtacaagaaataccagacaaacaagacaaccggcaacaccgataagagagccttcgtcgagacctggcagtccttttaccggaagaagcttaaggaggtgtggaaacctgccgtgcggtctggcggatctggcggaggctccacaagcaggcccgagagcgtgaccttcgaggacgtggccatctacttcagcgagaacgagtggaccggcctggcccccgcccagagggccctgtacagggacgtgatgctggagaactacggcgccctggccagcctggccttccccttccccaagcccgccctgatcttccagctggagcagggcgaggccccctggagcagcgccccccagggcgccctggacggcgagggccccaggggcatcagcaccagccccaagaaaaagagaaaagtctaagctgccttctgcggggcttgccttctggccatgcccttcttctctcccttgcacctgtacctcttggtctttgaataaagcctgagtaggaaggctagcaaaaaaaaaaaaaaaaaaaaaaaaaaaaaaaaaaaaaaaaaaaaaaaaaaaaaaaaaaaaaaaaaaaaaaaaaaaaaaaa

SEQ ID NO: 4074 - RNA, 5419 nt, synthetic construct
  source 1..5419: mol_type = other RNA
aggaaataagagagaaaagaagagtaagaagaaatataagagccaccatggcccctaagaagaagcgtaaagtgagccgggtgaacggcagcggcagcggcggcggcatgaaccacgaccaggagttcgacccccctaaggtgtaccctcccgtccccgccgagaagagaaagcccatccgggtcctgagcctgttcgatggcatcgccaccggtctgctggtgctgaaggacctgggcatccaggtggataggtacattgcctccgaggtgtgcgaggactccatcaccgtgggaatggtgcgtcatcagggcaagatcatgtacgtgggcgacgtgcggagcgtgacacagaagcatatccaggagtggggccctttcgacctggtgatcggcggcagcccttgcaatgacctgagcatcgtgaacccagcccggaagggcctgtacgagggaaccggcagactgttcttcgagttttacagactgctgcacgacgcccggcctaaggaaggcgacgaccggcccttcttttggctgttcgagaatgtggtggccatgggagtcagcgacaagcgggatattagccggttcctggagagcaaccccgtgatgatcgatgccaaggaagtgagcgccgcccaccgggccagatacttctggggcaatctgcctggcatgaacagacccctggccagcaccgtgaacgacaagctggagctgcaggagtgcctggagcacggccggatcgccaagttcagcaaggtgagaaccatcaccacccgaagcaacagcatcaaacaaggcaaggaccagcactttcctgtgttcatgaacgagaaggaggacatcctgtggtgtaccgagatggagagagtgttcgggttcccagtccactacacagatgtcagcaacatgtctagactggccagacagagactgctgggaagaagctggtccgtccctgtgatcagacacctgttcgcccctctgaaggagtacttcgcctgcgtgagcagcggcaacagcaacgccaacagccggggccccagcttctctagcggcctggtgccactgtccctgagagggagccacatgggccccatggagatctacaaaaccgtgagcgcctggaagcggcagcctgtgcgcgtgctgagcctgtttcggaatatcgataaagtcctgaaaagcctgggattcctggagagcggctctggctccggcggtggcaccctgaagtacgtggaggatgtgacaaacgtggtcagacgggatgtggagaagtggggccccttcgatctggtgtacggcagcacccaacccctgggcagctcttgtgaccggtgccctggctggtacatgtttcagttccaccggatcctgcagtacgccctgccgagacaggagtcccagcggccattcttttggattttcatggacaacttgctgctgaccgaggatgaccaggaaactaccactcggttcctgcagaccgaagccgtgaccctgcaggacgtgagaggccgggactaccagaacgccatgcgggtgtggtccaacatccctggactgaaaagcaagcacgcacctctgacccctaaagaagaggagtacctgcaggcccaggtgcggagcagaagcaagctggacgcccctaaggtggatctgctggtgaagaattgcctcctgcccctgagagagtacttcaagtatttcagccagaatagtctgcccctgggcggcccaagcagcggcgcccctcctcccagcggcggcagcccagccggctccccaacctctaccgaggagggcacctctgagtccgccacccccgagagcggccctggcacctccaccgagcccagcgagggcagcgcacccggcagccctgccggcagccccacctccacagaggagggaaccagcaccgagcccagcgaaggcagcgccccaggcaccagcaccgagcctagtgagggcggctctggcggcggcagcgcccaggagattaaacggatcaacaagatcagaagaagacttgtgaaagacagcaacaccaagaaggccggcaagacaggccccatgaaaaccctgctggttagagtgatgacacccgatctgagagagcggctggaaaacctgagaaagaagcctgaaaatatcccccagcccatcagcaatacatctagagccaacctgaataagctgctgaccgattacaccgaaatgaagaaggcgatcctgcatgtgtactgggaagagttccagaaggaccctgtgggcctgatgagccgggtggcccagcctgccagcaagaagatcgatcagaacaagctgaaacctgagatggacgagaagggcaacctgaccaccgccggctttgcctgctctcagtgtggccagcccctgttcgtgtacaagctggagcaggtgtctgagaagggcaaggcttacaccaactacttcggacggtgcaatgtggccgagcacgaaaagctgatcctgctggcccagctgaagcccgagaaggatagcgacgaagccgtgacatatagcctgggaaagtttgggcagagggccctggatttctacagcattcatgtgaccaaggagtccacccaccccgtgaagcccctggcccagatcgccggaaacagatacgcctccggacctgtgggaaaggccctgagcgacgcatgtatgggcacaatcgcctccttcctgtctaagtaccaggacatcatcatcgaacaccagaaggtggtgaagggcaaccagaagagactggagagcctgcgggagctggccggcaaggaaaacctggaataccctagcgtgaccctgccacctcagcctcacaccaaggagggcgttgatgcctacaacgaagtgatcgcccgggtgcgaatgtgggtgaacctgaacctgtggcagaagctgaagctaagcagagatgatgccaagcctctgctgagactgaagggattcccttcctttcctctggtcgagagacaggccaacgaagtggactggtgggacatggtgtgtaacgtgaagaagctgatcaacgagaaaaaggaggatggcaaggtgttttggcagaatctggctggctacaagagacaggaagccctgagaccatacctgagcagcgaggaagatcggaagaagggaaagaaattcgctcggtaccagctgggcgacctgctgctgcacctggaaaagaagcacggcgaggactggggaaaggtgtacgacgaggcctgggagcggattgacaagaaagtggaaggcctgagcaagcacatcaagctggaagaggaacggagaagcgaggacgcccagagcaaggccgccctgaccgactggctgcgggctaaggccagcttcgtgatcgagggcctgaaggaggccgacaaggacgagttctgcagatgcgagctgaagctgcagaagtggtacggggacctgcggggaaagcccttcgccatcgaagccgagaacagcatcctggacatcagcggcttcagcaagcagtacaactgtgccttcatctggcagaaggacggcgtgaagaagctgaacctgtacctgatcatcaactacttcaagggcggcaagctgcggttcaagaagatcaaacctgaagccttcgaagccaacagattctacaccgtgatcaacaaaaagagcggcgagatcgtgcccatggaggtgaacttcaacttcgacgaccccaacctgatcatcctgcctctggcctttggcaagagacagggcagagaattcatctggaacgacctgctgtccctggaaaccggcagcctgaagctggccaacggaagagtgatcgagaagacactgtacaacagaagaacccggcaggatgagcctgccctgttcgtggccctgaccttcgagcggcgggaggtcctggactcctccaatatcaaaccaatgaacctgatcggcgtggcaagaggcgaaaacatccccgccgtgatcgccctgaccgaccccgagggctgcccactgagccggtttaaggatagcctgggaaacccaacccacatcctgagaatcggcgagagctataaggagaagcagcggaccatccaggccaagaaggaggtggagcagcggagagccggcggctacagccggaagtacgccagcaaagccaagaatctggcagacgatatggtgagaaacaccgctagagatctgctgtactacgccgtgacccaggatgccatgctgatcttcgccaacctgagccggggcttcggccggcagggcaagcggaccttcatggccgagagacagtacacacggatggaggactggctgaccgccaagctggcctacgagggcctgagcaagacctacctgtccaagacactggcccagtacacctccaagacatgcagcaactgtgggtttaccatcaccagcgccgactacgacagggtgctggagaagctgaagaagacagcaacaggctggatgaccacaattaacggcaaggagctgaaggtggagggccagattacctactacaacagatacaagagacagaacgtagtcaaggacctgtccgtcgagctggatagactgagcgaagaatctgtgaacaacgacatctcctcctggacaaagggcagaagcggagaagctctgagcctcctgaagaaaagattctcccatagacccgtgcaggagaagttcgtgtgcctgaactgcggcttcgagacacacgcagccgagcaagccgccctgaacatcgccagatcctggctgttcctgcggagccaggagtacaagaaataccagacaaacaagacaaccggcaacaccgataagagagccttcgtcgagacctggcagtccttttaccggaagaagcttaaggaggtgtggaaacctgccgtgcggtctggcggatctggcggaggctccacaagcagccagggcagcgtgaccttcggcgacgtggccatcgacttcagcagggaggagtgggagtggctgcagcccgcccagagggacctgtacaggatcgtgatgctggagaactacggccacctggtgagcctgggcctgaacgtgagcaagcccgacgtggtgagcctgctggagcagggcaaggagccctggctgggcaacggcgacgtgaggagggacctgttcagcgtgagcgagagcaacaccagccccaagaaaaagagaaaagtctaagctgccttctgcggggcttgccttctggccatgcccttcttctctcccttgcacctgtacctcttggtctttgaataaagcctgagtaggaaggctagcaaaaaaaaaaaaaaaaaaaaaaaaaaaaaaaaaaaaaaaaaaaaaaaaaaaaaaaaaaaaaaaaaaaaaaaaaaaaaaaa

SEQ ID NO: 4075 - RNA, 5419 nt, synthetic construct
  source 1..5419: mol_type = other RNA
aggaaataagagagaaaagaagagtaagaagaaatataagagccaccatggcccctaagaagaagcgtaaagtgagccgggtgaacggcagcggcagcggcggcggcatgaaccacgaccaggagttcgacccccctaaggtgtaccctcccgtccccgccgagaagagaaagcccatccgggtcctgagcctgttcgatggcatcgccaccggtctgctggtgctgaaggacctgggcatccaggtggataggtacattgcctccgaggtgtgcgaggactccatcaccgtgggaatggtgcgtcatcagggcaagatcatgtacgtgggcgacgtgcggagcgtgacacagaagcatatccaggagtggggccctttcgacctggtgatcggcggcagcccttgcaatgacctgagcatcgtgaacccagcccggaagggcctgtacgagggaaccggcagactgttcttcgagttttacagactgctgcacgacgcccggcctaaggaaggcgacgaccggcccttcttttggctgttcgagaatgtggtggccatgggagtcagcgacaagcgggatattagccggttcctggagagcaaccccgtgatgatcgatgccaaggaagtgagcgccgcccaccgggccagatacttctggggcaatctgcctggcatgaacagacccctggccagcaccgtgaacgacaagctggagctgcaggagtgcctggagcacggccggatcgccaagttcagcaaggtgagaaccatcaccacccgaagcaacagcatcaaacaaggcaaggaccagcactttcctgtgttcatgaacgagaaggaggacatcctgtggtgtaccgagatggagagagtgttcgggttcccagtccactacacagatgtcagcaacatgtctagactggccagacagagactgctgggaagaagctggtccgtccctgtgatcagacacctgttcgcccctctgaaggagtacttcgcctgcgtgagcagcggcaacagcaacgccaacagccggggccccagcttctctagcggcctggtgccactgtccctgagagggagccacatgggccccatggagatctacaaaaccgtgagcgcctggaagcggcagcctgtgcgcgtgctgagcctgtttcggaatatcgataaagtcctgaaaagcctgggattcctggagagcggctctggctccggcggtggcaccctgaagtacgtggaggatgtgacaaacgtggtcagacgggatgtggagaagtggggccccttcgatctggtgtacggcagcacccaacccctgggcagctcttgtgaccggtgccctggctggtacatgtttcagttccaccggatcctgcagtacgccctgccgagacaggagtcccagcggccattcttttggattttcatggacaacttgctgctgaccgaggatgaccaggaaactaccactcggttcctgcagaccgaagccgtgaccctgcaggacgtgagaggccgggactaccagaacgccatgcgggtgtggtccaacatccctggactgaaaagcaagcacgcacctctgacccctaaagaagaggagtacctgcaggcccaggtgcggagcagaagcaagctggacgcccctaaggtggatctgctggtgaagaattgcctcctgcccctgagagagtacttcaagtatttcagccagaatagtctgcccctgggcggcccaagcagcggcgcccctcctcccagcggcggcagcccagccggctccccaacctctaccgaggagggcacctctgagtccgccacccccgagagcggccctggcacctccaccgagcccagcgagggcagcgcacccggcagccctgccggcagccccacctccacagaggagggaaccagcaccgagcccagcgaaggcagcgccccaggcaccagcaccgagcctagtgagggcggctctggcggcggcagcgcccaggagattaaacggatcaacaagatcagaagaagacttgtgaaagacagcaacaccaagaaggccggcaagacaggccccatgaaaaccctgctggttagagtgatgacacccgatctgagagagcggctggaaaacctgagaaagaagcctgaaaatatcccccagcccatcagcaatacatctagagccaacctgaataagctgctgaccgattacaccgaaatgaagaaggcgatcctgcatgtgtactgggaagagttccagaaggaccctgtgggcctgatgagccgggtggcccagcctgccagcaagaagatcgatcagaacaagctgaaacctgagatggacgagaagggcaacctgaccaccgccggctttgcctgctctcagtgtggccagcccctgttcgtgtacaagctggagcaggtgtctgagaagggcaaggcttacaccaactacttcggacggtgcaatgtggccgagcacgaaaagctgatcctgctggcccagctgaagcccgagaaggatagcgacgaagccgtgacatatagcctgggaaagtttgggcagagggccctggatttctacagcattcatgtgaccaaggagtccacccaccccgtgaagcccctggcccagatcgccggaaacagatacgcctccggacctgtgggaaaggccctgagcgacgcatgtatgggcacaatcgcctccttcctgtctaagtaccaggacatcatcatcgaacaccagaaggtggtgaagggcaaccagaagagactggagagcctgcgggagctggccggcaaggaaaacctggaataccctagcgtgaccctgccacctcagcctcacaccaaggagggcgttgatgcctacaacgaagtgatcgcccgggtgcgaatgtgggtgaacctgaacctgtggcagaagctgaagctaagcagagatgatgccaagcctctgctgagactgaagggattcccttcctttcctctggtcgagagacaggccaacgaagtggactggtgggacatggtgtgtaacgtgaagaagctgatcaacgagaaaaaggaggatggcaaggtgttttggcagaatctggctggctacaagagacaggaagccctgagaccatacctgagcagcgaggaagatcggaagaagggaaagaaattcgctcggtaccagctgggcgacctgctgctgcacctggaaaagaagcacggcgaggactggggaaaggtgtacgacgaggcctgggagcggattgacaagaaagtggaaggcctgagcaagcacatcaagctggaagaggaacggagaagcgaggacgcccagagcaaggccgccctgaccgactggctgcgggctaaggccagcttcgtgatcgagggcctgaaggaggccgacaaggacgagttctgcagatgcgagctgaagctgcagaagtggtacggggacctgcggggaaagcccttcgccatcgaagccgagaacagcatcctggacatcagcggcttcagcaagcagtacaactgtgccttcatctggcagaaggacggcgtgaagaagctgaacctgtacctgatcatcaactacttcaagggcggcaagctgcggttcaagaagatcaaacctgaagccttcgaagccaacagattctacaccgtgatcaacaaaaagagcggcgagatcgtgcccatggaggtgaacttcaacttcgacgaccccaacctgatcatcctgcctctggcctttggcaagagacagggcagagaattcatctggaacgacctgctgtccctggaaaccggcagcctgaagctggccaacggaagagtgatcgagaagacactgtacaacagaagaacccggcaggatgagcctgccctgttcgtggccctgaccttcgagcggcgggaggtcctggactcctccaatatcaaaccaatgaacctgatcggcgtggcaagaggcgaaaacatccccgccgtgatcgccctgaccgaccccgagggctgcccactgagccggtttaaggatagcctgggaaacccaacccacatcctgagaatcggcgagagctataaggagaagcagcggaccatccaggccaagaaggaggtggagcagcggagagccggcggctacagccggaagtacgccagcaaagccaagaatctggcagacgatatggtgagaaacaccgctagagatctgctgtactacgccgtgacccaggatgccatgctgatcttcgccaacctgagccggggcttcggccggcagggcaagcggaccttcatggccgagagacagtacacacggatggaggactggctgaccgccaagctggcctacgagggcctgagcaagacctacctgtccaagacactggcccagtacacctccaagacatgcagcaactgtgggtttaccatcaccagcgccgactacgacagggtgctggagaagctgaagaagacagcaacaggctggatgaccacaattaacggcaaggagctgaaggtggagggccagattacctactacaacagatacaagagacagaacgtagtcaaggacctgtccgtcgagctggatagactgagcgaagaatctgtgaacaacgacatctcctcctggacaaagggcagaagcggagaagctctgagcctcctgaagaaaagattctcccatagacccgtgcaggagaagttcgtgtgcctgaactgcggcttcgagacacacgcagccgagcaagccgccctgaacatcgccagatcctggctgttcctgcggagccaggagtacaagaaataccagacaaacaagacaaccggcaacaccgataagagagccttcgtcgagacctggcagtccttttaccggaagaagcttaaggaggtgtggaaacctgccgtgcggtctggcggatctggcggaggctccacaagcgagcccggcgccgtgagcttcgccgacgtggccgtgtacttctgcagggaggagtggggctgcctgaggcccgcccagaggaccctgtacagggacgtgatgagggagacctacggccacctgagcgccctgggcatcggcggcaagaagcccgccctgatcagctgggtggaggaggaggccgagctgtggggccccgccgcccaggaccccgaggtggccaagtgccccacccagaccgacaccagccccaagaaaaagagaaaagtctaagctgccttctgcggggcttgccttctggccatgcccttcttctctcccttgcacctgtacctcttggtctttgaataaagcctgagtaggaaggctagcaaaaaaaaaaaaaaaaaaaaaaaaaaaaaaaaaaaaaaaaaaaaaaaaaaaaaaaaaaaaaaaaaaaaaaaaaaaaaaaa

SEQ ID NO: 4076 - RNA, 5419 nt, synthetic construct
  source 1..5419: mol_type = other RNA
aggaaataagagagaaaagaagagtaagaagaaatataagagccaccatggcccctaagaagaagcgtaaagtgagccgggtgaacggcagcggcagcggcggcggcatgaaccacgaccaggagttcgacccccctaaggtgtaccctcccgtccccgccgagaagagaaagcccatccgggtcctgagcctgttcgatggcatcgccaccggtctgctggtgctgaaggacctgggcatccaggtggataggtacattgcctccgaggtgtgcgaggactccatcaccgtgggaatggtgcgtcatcagggcaagatcatgtacgtgggcgacgtgcggagcgtgacacagaagcatatccaggagtggggccctttcgacctggtgatcggcggcagcccttgcaatgacctgagcatcgtgaacccagcccggaagggcctgtacgagggaaccggcagactgttcttcgagttttacagactgctgcacgacgcccggcctaaggaaggcgacgaccggcccttcttttggctgttcgagaatgtggtggccatgggagtcagcgacaagcgggatattagccggttcctggagagcaaccccgtgatgatcgatgccaaggaagtgagcgccgcccaccgggccagatacttctggggcaatctgcctggcatgaacagacccctggccagcaccgtgaacgacaagctggagctgcaggagtgcctggagcacggccggatcgccaagttcagcaaggtgagaaccatcaccacccgaagcaacagcatcaaacaaggcaaggaccagcactttcctgtgttcatgaacgagaaggaggacatcctgtggtgtaccgagatggagagagtgttcgggttcccagtccactacacagatgtcagcaacatgtctagactggccagacagagactgctgggaagaagctggtccgtccctgtgatcagacacctgttcgcccctctgaaggagtacttcgcctgcgtgagcagcggcaacagcaacgccaacagccggggccccagcttctctagcggcctggtgccactgtccctgagagggagccacatgggccccatggagatctacaaaaccgtgagcgcctggaagcggcagcctgtgcgcgtgctgagcctgtttcggaatatcgataaagtcctgaaaagcctgggattcctggagagcggctctggctccggcggtggcaccctgaagtacgtggaggatgtgacaaacgtggtcagacgggatgtggagaagtggggccccttcgatctggtgtacggcagcacccaacccctgggcagctcttgtgaccggtgccctggctggtacatgtttcagttccaccggatcctgcagtacgccctgccgagacaggagtcccagcggccattcttttggattttcatggacaacttgctgctgaccgaggatgaccaggaaactaccactcggttcctgcagaccgaagccgtgaccctgcaggacgtgagaggccgggactaccagaacgccatgcgggtgtggtccaacatccctggactgaaaagcaagcacgcacctctgacccctaaagaagaggagtacctgcaggcccaggtgcggagcagaagcaagctggacgcccctaaggtggatctgctggtgaagaattgcctcctgcccctgagagagtacttcaagtatttcagccagaatagtctgcccctgggcggcccaagcagcggcgcccctcctcccagcggcggcagcccagccggctccccaacctctaccgaggagggcacctctgagtccgccacccccgagagcggccctggcacctccaccgagcccagcgagggcagcgcacccggcagccctgccggcagccccacctccacagaggagggaaccagcaccgagcccagcgaaggcagcgccccaggcaccagcaccgagcctagtgagggcggctctggcggcggcagcgcccaggagattaaacggatcaacaagatcagaagaagacttgtgaaagacagcaacaccaagaaggccggcaagacaggccccatgaaaaccctgctggttagagtgatgacacccgatctgagagagcggctggaaaacctgagaaagaagcctgaaaatatcccccagcccatcagcaatacatctagagccaacctgaataagctgctgaccgattacaccgaaatgaagaaggcgatcctgcatgtgtactgggaagagttccagaaggaccctgtgggcctgatgagccgggtggcccagcctgccagcaagaagatcgatcagaacaagctgaaacctgagatggacgagaagggcaacctgaccaccgccggctttgcctgctctcagtgtggccagcccctgttcgtgtacaagctggagcaggtgtctgagaagggcaaggcttacaccaactacttcggacggtgcaatgtggccgagcacgaaaagctgatcctgctggcccagctgaagcccgagaaggatagcgacgaagccgtgacatatagcctgggaaagtttgggcagagggccctggatttctacagcattcatgtgaccaaggagtccacccaccccgtgaagcccctggcccagatcgccggaaacagatacgcctccggacctgtgggaaaggccctgagcgacgcatgtatgggcacaatcgcctccttcctgtctaagtaccaggacatcatcatcgaacaccagaaggtggtgaagggcaaccagaagagactggagagcctgcgggagctggccggcaaggaaaacctggaataccctagcgtgaccctgccacctcagcctcacaccaaggagggcgttgatgcctacaacgaagtgatcgcccgggtgcgaatgtgggtgaacctgaacctgtggcagaagctgaagctaagcagagatgatgccaagcctctgctgagactgaagggattcccttcctttcctctggtcgagagacaggccaacgaagtggactggtgggacatggtgtgtaacgtgaagaagctgatcaacgagaaaaaggaggatggcaaggtgttttggcagaatctggctggctacaagagacaggaagccctgagaccatacctgagcagcgaggaagatcggaagaagggaaagaaattcgctcggtaccagctgggcgacctgctgctgcacctggaaaagaagcacggcgaggactggggaaaggtgtacgacgaggcctgggagcggattgacaagaaagtggaaggcctgagcaagcacatcaagctggaagaggaacggagaagcgaggacgcccagagcaaggccgccctgaccgactggctgcgggctaaggccagcttcgtgatcgagggcctgaaggaggccgacaaggacgagttctgcagatgcgagctgaagctgcagaagtggtacggggacctgcggggaaagcccttcgccatcgaagccgagaacagcatcctggacatcagcggcttcagcaagcagtacaactgtgccttcatctggcagaaggacggcgtgaagaagctgaacctgtacctgatcatcaactacttcaagggcggcaagctgcggttcaagaagatcaaacctgaagccttcgaagccaacagattctacaccgtgatcaacaaaaagagcggcgagatcgtgcccatggaggtgaacttcaacttcgacgaccccaacctgatcatcctgcctctggcctttggcaagagacagggcagagaattcatctggaacgacctgctgtccctggaaaccggcagcctgaagctggccaacggaagagtgatcgagaagacactgtacaacagaagaacccggcaggatgagcctgccctgttcgtggccctgaccttcgagcggcgggaggtcctggactcctccaatatcaaaccaatgaacctgatcggcgtggcaagaggcgaaaacatccccgccgtgatcgccctgaccgaccccgagggctgcccactgagccggtttaaggatagcctgggaaacccaacccacatcctgagaatcggcgagagctataaggagaagcagcggaccatccaggccaagaaggaggtggagcagcggagagccggcggctacagccggaagtacgccagcaaagccaagaatctggcagacgatatggtgagaaacaccgctagagatctgctgtactacgccgtgacccaggatgccatgctgatcttcgccaacctgagccggggcttcggccggcagggcaagcggaccttcatggccgagagacagtacacacggatggaggactggctgaccgccaagctggcctacgagggcctgagcaagacctacctgtccaagacactggcccagtacacctccaagacatgcagcaactgtgggtttaccatcaccagcgccgactacgacagggtgctggagaagctgaagaagacagcaacaggctggatgaccacaattaacggcaaggagctgaaggtggagggccagattacctactacaacagatacaagagacagaacgtagtcaaggacctgtccgtcgagctggatagactgagcgaagaatctgtgaacaacgacatctcctcctggacaaagggcagaagcggagaagctctgagcctcctgaagaaaagattctcccatagacccgtgcaggagaagttcgtgtgcctgaactgcggcttcgagacacacgcagccgagcaagccgccctgaacatcgccagatcctggctgttcctgcggagccaggagtacaagaaataccagacaaacaagacaaccggcaacaccgataagagagccttcgtcgagacctggcagtccttttaccggaagaagcttaaggaggtgtggaaacctgccgtgcggtctggcggatctggcggaggctccacaagcgcccagatgctggtgaccttcgaggaggtggccgtgtacttcacccagggccagggcgccctgctgggccccgcccagagggccctgtacagggacgtgatgcaggagaactacgagatggtgaccagcctgggcttcagcctgcccaagcccgagctgatcagcaggctggagaggggcgaggagccctgggtgcccgacctgcaggcctgcgagaagagggagagcctgaggggcgccaggaccagccccaagaaaaagagaaaagtctaagctgccttctgcggggcttgccttctggccatgcccttcttctctcccttgcacctgtacctcttggtctttgaataaagcctgagtaggaaggctagcaaaaaaaaaaaaaaaaaaaaaaaaaaaaaaaaaaaaaaaaaaaaaaaaaaaaaaaaaaaaaaaaaaaaaaaaaaaaaaaa

SEQ ID NO: 4077 - RNA, 5419 nt, synthetic construct
  source 1..5419: mol_type = other RNA
aggaaataagagagaaaagaagagtaagaagaaatataagagccaccatggcccctaagaagaagcgtaaagtgagccgggtgaacggcagcggcagcggcggcggcatgaaccacgaccaggagttcgacccccctaaggtgtaccctcccgtccccgccgagaagagaaagcccatccgggtcctgagcctgttcgatggcatcgccaccggtctgctggtgctgaaggacctgggcatccaggtggataggtacattgcctccgaggtgtgcgaggactccatcaccgtgggaatggtgcgtcatcagggcaagatcatgtacgtgggcgacgtgcggagcgtgacacagaagcatatccaggagtggggccctttcgacctggtgatcggcggcagcccttgcaatgacctgagcatcgtgaacccagcccggaagggcctgtacgagggaaccggcagactgttcttcgagttttacagactgctgcacgacgcccggcctaaggaaggcgacgaccggcccttcttttggctgttcgagaatgtggtggccatgggagtcagcgacaagcgggatattagccggttcctggagagcaaccccgtgatgatcgatgccaaggaagtgagcgccgcccaccgggccagatacttctggggcaatctgcctggcatgaacagacccctggccagcaccgtgaacgacaagctggagctgcaggagtgcctggagcacggccggatcgccaagttcagcaaggtgagaaccatcaccacccgaagcaacagcatcaaacaaggcaaggaccagcactttcctgtgttcatgaacgagaaggaggacatcctgtggtgtaccgagatggagagagtgttcgggttcccagtccactacacagatgtcagcaacatgtctagactggccagacagagactgctgggaagaagctggtccgtccctgtgatcagacacctgttcgcccctctgaaggagtacttcgcctgcgtgagcagcggcaacagcaacgccaacagccggggccccagcttctctagcggcctggtgccactgtccctgagagggagccacatgggccccatggagatctacaaaaccgtgagcgcctggaagcggcagcctgtgcgcgtgctgagcctgtttcggaatatcgataaagtcctgaaaagcctgggattcctggagagcggctctggctccggcggtggcaccctgaagtacgtggaggatgtgacaaacgtggtcagacgggatgtggagaagtggggccccttcgatctggtgtacggcagcacccaacccctgggcagctcttgtgaccggtgccctggctggtacatgtttcagttccaccggatcctgcagtacgccctgccgagacaggagtcccagcggccattcttttggattttcatggacaacttgctgctgaccgaggatgaccaggaaactaccactcggttcctgcagaccgaagccgtgaccctgcaggacgtgagaggccgggactaccagaacgccatgcgggtgtggtccaacatccctggactgaaaagcaagcacgcacctctgacccctaaagaagaggagtacctgcaggcccaggtgcggagcagaagcaagctggacgcccctaaggtggatctgctggtgaagaattgcctcctgcccctgagagagtacttcaagtatttcagccagaatagtctgcccctgggcggcccaagcagcggcgcccctcctcccagcggcggcagcccagccggctccccaacctctaccgaggagggcacctctgagtccgccacccccgagagcggccctggcacctccaccgagcccagcgagggcagcgcacccggcagccctgccggcagccccacctccacagaggagggaaccagcaccgagcccagcgaaggcagcgccccaggcaccagcaccgagcctagtgagggcggctctggcggcggcagcgcccaggagattaaacggatcaacaagatcagaagaagacttgtgaaagacagcaacaccaagaaggccggcaagacaggccccatgaaaaccctgctggttagagtgatgacacccgatctgagagagcggctggaaaacctgagaaagaagcctgaaaatatcccccagcccatcagcaatacatctagagccaacctgaataagctgctgaccgattacaccgaaatgaagaaggcgatcctgcatgtgtactgggaagagttccagaaggaccctgtgggcctgatgagccgggtggcccagcctgccagcaagaagatcgatcagaacaagctgaaacctgagatggacgagaagggcaacctgaccaccgccggctttgcctgctctcagtgtggccagcccctgttcgtgtacaagctggagcaggtgtctgagaagggcaaggcttacaccaactacttcggacggtgcaatgtggccgagcacgaaaagctgatcctgctggcccagctgaagcccgagaaggatagcgacgaagccgtgacatatagcctgggaaagtttgggcagagggccctggatttctacagcattcatgtgaccaaggagtccacccaccccgtgaagcccctggcccagatcgccggaaacagatacgcctccggacctgtgggaaaggccctgagcgacgcatgtatgggcacaatcgcctccttcctgtctaagtaccaggacatcatcatcgaacaccagaaggtggtgaagggcaaccagaagagactggagagcctgcgggagctggccggcaaggaaaacctggaataccctagcgtgaccctgccacctcagcctcacaccaaggagggcgttgatgcctacaacgaagtgatcgcccgggtgcgaatgtgggtgaacctgaacctgtggcagaagctgaagctaagcagagatgatgccaagcctctgctgagactgaagggattcccttcctttcctctggtcgagagacaggccaacgaagtggactggtgggacatggtgtgtaacgtgaagaagctgatcaacgagaaaaaggaggatggcaaggtgttttggcagaatctggctggctacaagagacaggaagccctgagaccatacctgagcagcgaggaagatcggaagaagggaaagaaattcgctcggtaccagctgggcgacctgctgctgcacctggaaaagaagcacggcgaggactggggaaaggtgtacgacgaggcctgggagcggattgacaagaaagtggaaggcctgagcaagcacatcaagctggaagaggaacggagaagcgaggacgcccagagcaaggccgccctgaccgactggctgcgggctaaggccagcttcgtgatcgagggcctgaaggaggccgacaaggacgagttctgcagatgcgagctgaagctgcagaagtggtacggggacctgcggggaaagcccttcgccatcgaagccgagaacagcatcctggacatcagcggcttcagcaagcagtacaactgtgccttcatctggcagaaggacggcgtgaagaagctgaacctgtacctgatcatcaactacttcaagggcggcaagctgcggttcaagaagatcaaacctgaagccttcgaagccaacagattctacaccgtgatcaacaaaaagagcggcgagatcgtgcccatggaggtgaacttcaacttcgacgaccccaacctgatcatcctgcctctggcctttggcaagagacagggcagagaattcatctggaacgacctgctgtccctggaaaccggcagcctgaagctggccaacggaagagtgatcgagaagacactgtacaacagaagaacccggcaggatgagcctgccctgttcgtggccctgaccttcgagcggcgggaggtcctggactcctccaatatcaaaccaatgaacctgatcggcgtggcaagaggcgaaaacatccccgccgtgatcgccctgaccgaccccgagggctgcccactgagccggtttaaggatagcctgggaaacccaacccacatcctgagaatcggcgagagctataaggagaagcagcggaccatccaggccaagaaggaggtggagcagcggagagccggcggctacagccggaagtacgccagcaaagccaagaatctggcagacgatatggtgagaaacaccgctagagatctgctgtactacgccgtgacccaggatgccatgctgatcttcgccaacctgagccggggcttcggccggcagggcaagcggaccttcatggccgagagacagtacacacggatggaggactggctgaccgccaagctggcctacgagggcctgagcaagacctacctgtccaagacactggcccagtacacctccaagacatgcagcaactgtgggtttaccatcaccagcgccgactacgacagggtgctggagaagctgaagaagacagcaacaggctggatgaccacaattaacggcaaggagctgaaggtggagggccagattacctactacaacagatacaagagacagaacgtagtcaaggacctgtccgtcgagctggatagactgagcgaagaatctgtgaacaacgacatctcctcctggacaaagggcagaagcggagaagctctgagcctcctgaagaaaagattctcccatagacccgtgcaggagaagttcgtgtgcctgaactgcggcttcgagacacacgcagccgagcaagccgccctgaacatcgccagatcctggctgttcctgcggagccaggagtacaagaaataccagacaaacaagacaaccggcaacaccgataagagagccttcgtcgagacctggcagtccttttaccggaagaagcttaaggaggtgtggaaacctgccgtgcggtctggcggatctggcggaggctccacaagcggcgccagggtgctggtgagcttcgccgacgtggccgtgtacttcagccccgaggagtggggcaggctgaggcccgagcagagggccctgtacagggacgtgatgagggagacctacggccacctgggcgccctgggcttccccggccccaagcccgccctgatcagctggatggaggaggccgcctgggacagcgaggccaagcccgtgatcaagaggctggaggacgtgggccagccccccaccagccccaagaaaaagagaaaagtctaagctgccttctgcggggcttgccttctggccatgcccttcttctctcccttgcacctgtacctcttggtctttgaataaagcctgagtaggaaggctagcaaaaaaaaaaaaaaaaaaaaaaaaaaaaaaaaaaaaaaaaaaaaaaaaaaaaaaaaaaaaaaaaaaaaaaaaaaaaaaaa

SEQ ID NO: 4078 - RNA, 5419 nt, synthetic construct
  source 1..5419: mol_type = other RNA
aggaaataagagagaaaagaagagtaagaagaaatataagagccaccatggcccctaagaagaagcgtaaagtgagccgggtgaacggcagcggcagcggcggcggcatgaaccacgaccaggagttcgacccccctaaggtgtaccctcccgtccccgccgagaagagaaagcccatccgggtcctgagcctgttcgatggcatcgccaccggtctgctggtgctgaaggacctgggcatccaggtggataggtacattgcctccgaggtgtgcgaggactccatcaccgtgggaatggtgcgtcatcagggcaagatcatgtacgtgggcgacgtgcggagcgtgacacagaagcatatccaggagtggggccctttcgacctggtgatcggcggcagcccttgcaatgacctgagcatcgtgaacccagcccggaagggcctgtacgagggaaccggcagactgttcttcgagttttacagactgctgcacgacgcccggcctaaggaaggcgacgaccggcccttcttttggctgttcgagaatgtggtggccatgggagtcagcgacaagcgggatattagccggttcctggagagcaaccccgtgatgatcgatgccaaggaagtgagcgccgcccaccgggccagatacttctggggcaatctgcctggcatgaacagacccctggccagcaccgtgaacgacaagctggagctgcaggagtgcctggagcacggccggatcgccaagttcagcaaggtgagaaccatcaccacccgaagcaacagcatcaaacaaggcaaggaccagcactttcctgtgttcatgaacgagaaggaggacatcctgtggtgtaccgagatggagagagtgttcgggttcccagtccactacacagatgtcagcaacatgtctagactggccagacagagactgctgggaagaagctggtccgtccctgtgatcagacacctgttcgcccctctgaaggagtacttcgcctgcgtgagcagcggcaacagcaacgccaacagccggggccccagcttctctagcggcctggtgccactgtccctgagagggagccacatgggccccatggagatctacaaaaccgtgagcgcctggaagcggcagcctgtgcgcgtgctgagcctgtttcggaatatcgataaagtcctgaaaagcctgggattcctggagagcggctctggctccggcggtggcaccctgaagtacgtggaggatgtgacaaacgtggtcagacgggatgtggagaagtggggccccttcgatctggtgtacggcagcacccaacccctgggcagctcttgtgaccggtgccctggctggtacatgtttcagttccaccggatcctgcagtacgccctgccgagacaggagtcccagcggccattcttttggattttcatggacaacttgctgctgaccgaggatgaccaggaaactaccactcggttcctgcagaccgaagccgtgaccctgcaggacgtgagaggccgggactaccagaacgccatgcgggtgtggtccaacatccctggactgaaaagcaagcacgcacctctgacccctaaagaagaggagtacctgcaggcccaggtgcggagcagaagcaagctggacgcccctaaggtggatctgctggtgaagaattgcctcctgcccctgagagagtacttcaagtatttcagccagaatagtctgcccctgggcggcccaagcagcggcgcccctcctcccagcggcggcagcccagccggctccccaacctctaccgaggagggcacctctgagtccgccacccccgagagcggccctggcacctccaccgagcccagcgagggcagcgcacccggcagccctgccggcagccccacctccacagaggagggaaccagcaccgagcccagcgaaggcagcgccccaggcaccagcaccgagcctagtgagggcggctctggcggcggcagcgcccaggagattaaacggatcaacaagatcagaagaagacttgtgaaagacagcaacaccaagaaggccggcaagacaggccccatgaaaaccctgctggttagagtgatgacacccgatctgagagagcggctggaaaacctgagaaagaagcctgaaaatatcccccagcccatcagcaatacatctagagccaacctgaataagctgctgaccgattacaccgaaatgaagaaggcgatcctgcatgtgtactgggaagagttccagaaggaccctgtgggcctgatgagccgggtggcccagcctgccagcaagaagatcgatcagaacaagctgaaacctgagatggacgagaagggcaacctgaccaccgccggctttgcctgctctcagtgtggccagcccctgttcgtgtacaagctggagcaggtgtctgagaagggcaaggcttacaccaactacttcggacggtgcaatgtggccgagcacgaaaagctgatcctgctggcccagctgaagcccgagaaggatagcgacgaagccgtgacatatagcctgggaaagtttgggcagagggccctggatttctacagcattcatgtgaccaaggagtccacccaccccgtgaagcccctggcccagatcgccggaaacagatacgcctccggacctgtgggaaaggccctgagcgacgcatgtatgggcacaatcgcctccttcctgtctaagtaccaggacatcatcatcgaacaccagaaggtggtgaagggcaaccagaagagactggagagcctgcgggagctggccggcaaggaaaacctggaataccctagcgtgaccctgccacctcagcctcacaccaaggagggcgttgatgcctacaacgaagtgatcgcccgggtgcgaatgtgggtgaacctgaacctgtggcagaagctgaagctaagcagagatgatgccaagcctctgctgagactgaagggattcccttcctttcctctggtcgagagacaggccaacgaagtggactggtgggacatggtgtgtaacgtgaagaagctgatcaacgagaaaaaggaggatggcaaggtgttttggcagaatctggctggctacaagagacaggaagccctgagaccatacctgagcagcgaggaagatcggaagaagggaaagaaattcgctcggtaccagctgggcgacctgctgctgcacctggaaaagaagcacggcgaggactggggaaaggtgtacgacgaggcctgggagcggattgacaagaaagtggaaggcctgagcaagcacatcaagctggaagaggaacggagaagcgaggacgcccagagcaaggccgccctgaccgactggctgcgggctaaggccagcttcgtgatcgagggcctgaaggaggccgacaaggacgagttctgcagatgcgagctgaagctgcagaagtggtacggggacctgcggggaaagcccttcgccatcgaagccgagaacagcatcctggacatcagcggcttcagcaagcagtacaactgtgccttcatctggcagaaggacggcgtgaagaagctgaacctgtacctgatcatcaactacttcaagggcggcaagctgcggttcaagaagatcaaacctgaagccttcgaagccaacagattctacaccgtgatcaacaaaaagagcggcgagatcgtgcccatggaggtgaacttcaacttcgacgaccccaacctgatcatcctgcctctggcctttggcaagagacagggcagagaattcatctggaacgacctgctgtccctggaaaccggcagcctgaagctggccaacggaagagtgatcgagaagacactgtacaacagaagaacccggcaggatgagcctgccctgttcgtggccctgaccttcgagcggcgggaggtcctggactcctccaatatcaaaccaatgaacctgatcggcgtggcaagaggcgaaaacatccccgccgtgatcgccctgaccgaccccgagggctgcccactgagccggtttaaggatagcctgggaaacccaacccacatcctgagaatcggcgagagctataaggagaagcagcggaccatccaggccaagaaggaggtggagcagcggagagccggcggctacagccggaagtacgccagcaaagccaagaatctggcagacgatatggtgagaaacaccgctagagatctgctgtactacgccgtgacccaggatgccatgctgatcttcgccaacctgagccggggcttcggccggcagggcaagcggaccttcatggccgagagacagtacacacggatggaggactggctgaccgccaagctggcctacgagggcctgagcaagacctacctgtccaagacactggcccagtacacctccaagacatgcagcaactgtgggtttaccatcaccagcgccgactacgacagggtgctggagaagctgaagaagacagcaacaggctggatgaccacaattaacggcaaggagctgaaggtggagggccagattacctactacaacagatacaagagacagaacgtagtcaaggacctgtccgtcgagctggatagactgagcgaagaatctgtgaacaacgacatctcctcctggacaaagggcagaagcggagaagctctgagcctcctgaagaaaagattctcccatagacccgtgcaggagaagttcgtgtgcctgaactgcggcttcgagacacacgcagccgagcaagccgccctgaacatcgccagatcctggctgttcctgcggagccaggagtacaagaaataccagacaaacaagacaaccggcaacaccgataagagagccttcgtcgagacctggcagtccttttaccggaagaagcttaaggaggtgtggaaacctgccgtgcggtctggcggatctggcggaggctccacaagcgcccagaaggtgctgaccttcagggacgtggccatcgagttcagcctggaggagtggaagttcctggaccccgcccagcagaacctgtacagggacgtgatgctggagaactacaggaacctgttcagcatcggcctgaccgtgagcaagcccggcctgatcacctgcctggagcagaggaaggccccctggaacctgaagaggagggaggccgtggacggccaccccgccatgagcagccacaccagccccaagaaaaagagaaaagtctaagctgccttctgcggggcttgccttctggccatgcccttcttctctcccttgcacctgtacctcttggtctttgaataaagcctgagtaggaaggctagcaaaaaaaaaaaaaaaaaaaaaaaaaaaaaaaaaaaaaaaaaaaaaaaaaaaaaaaaaaaaaaaaaaaaaaaaaaaaaaaa

SEQ ID NO: 4079 - RNA, 5419 nt, synthetic construct
  source 1..5419: mol_type = other RNA
aggaaataagagagaaaagaagagtaagaagaaatataagagccaccatggcccctaagaagaagcgtaaagtgagccgggtgaacggcagcggcagcggcggcggcatgaaccacgaccaggagttcgacccccctaaggtgtaccctcccgtccccgccgagaagagaaagcccatccgggtcctgagcctgttcgatggcatcgccaccggtctgctggtgctgaaggacctgggcatccaggtggataggtacattgcctccgaggtgtgcgaggactccatcaccgtgggaatggtgcgtcatcagggcaagatcatgtacgtgggcgacgtgcggagcgtgacacagaagcatatccaggagtggggccctttcgacctggtgatcggcggcagcccttgcaatgacctgagcatcgtgaacccagcccggaagggcctgtacgagggaaccggcagactgttcttcgagttttacagactgctgcacgacgcccggcctaaggaaggcgacgaccggcccttcttttggctgttcgagaatgtggtggccatgggagtcagcgacaagcgggatattagccggttcctggagagcaaccccgtgatgatcgatgccaaggaagtgagcgccgcccaccgggccagatacttctggggcaatctgcctggcatgaacagacccctggccagcaccgtgaacgacaagctggagctgcaggagtgcctggagcacggccggatcgccaagttcagcaaggtgagaaccatcaccacccgaagcaacagcatcaaacaaggcaaggaccagcactttcctgtgttcatgaacgagaaggaggacatcctgtggtgtaccgagatggagagagtgttcgggttcccagtccactacacagatgtcagcaacatgtctagactggccagacagagactgctgggaagaagctggtccgtccctgtgatcagacacctgttcgcccctctgaaggagtacttcgcctgcgtgagcagcggcaacagcaacgccaacagccggggccccagcttctctagcggcctggtgccactgtccctgagagggagccacatgggccccatggagatctacaaaaccgtgagcgcctggaagcggcagcctgtgcgcgtgctgagcctgtttcggaatatcgataaagtcctgaaaagcctgggattcctggagagcggctctggctccggcggtggcaccctgaagtacgtggaggatgtgacaaacgtggtcagacgggatgtggagaagtggggccccttcgatctggtgtacggcagcacccaacccctgggcagctcttgtgaccggtgccctggctggtacatgtttcagttccaccggatcctgcagtacgccctgccgagacaggagtcccagcggccattcttttggattttcatggacaacttgctgctgaccgaggatgaccaggaaactaccactcggttcctgcagaccgaagccgtgaccctgcaggacgtgagaggccgggactaccagaacgccatgcgggtgtggtccaacatccctggactgaaaagcaagcacgcacctctgacccctaaagaagaggagtacctgcaggcccaggtgcggagcagaagcaagctggacgcccctaaggtggatctgctggtgaagaattgcctcctgcccctgagagagtacttcaagtatttcagccagaatagtctgcccctgggcggcccaagcagcggcgcccctcctcccagcggcggcagcccagccggctccccaacctctaccgaggagggcacctctgagtccgccacccccgagagcggccctggcacctccaccgagcccagcgagggcagcgcacccggcagccctgccggcagccccacctccacagaggagggaaccagcaccgagcccagcgaaggcagcgccccaggcaccagcaccgagcctagtgagggcggctctggcggcggcagcgcccaggagattaaacggatcaacaagatcagaagaagacttgtgaaagacagcaacaccaagaaggccggcaagacaggccccatgaaaaccctgctggttagagtgatgacacccgatctgagagagcggctggaaaacctgagaaagaagcctgaaaatatcccccagcccatcagcaatacatctagagccaacctgaataagctgctgaccgattacaccgaaatgaagaaggcgatcctgcatgtgtactgggaagagttccagaaggaccctgtgggcctgatgagccgggtggcccagcctgccagcaagaagatcgatcagaacaagctgaaacctgagatggacgagaagggcaacctgaccaccgccggctttgcctgctctcagtgtggccagcccctgttcgtgtacaagctggagcaggtgtctgagaagggcaaggcttacaccaactacttcggacggtgcaatgtggccgagcacgaaaagctgatcctgctggcccagctgaagcccgagaaggatagcgacgaagccgtgacatatagcctgggaaagtttgggcagagggccctggatttctacagcattcatgtgaccaaggagtccacccaccccgtgaagcccctggcccagatcgccggaaacagatacgcctccggacctgtgggaaaggccctgagcgacgcatgtatgggcacaatcgcctccttcctgtctaagtaccaggacatcatcatcgaacaccagaaggtggtgaagggcaaccagaagagactggagagcctgcgggagctggccggcaaggaaaacctggaataccctagcgtgaccctgccacctcagcctcacaccaaggagggcgttgatgcctacaacgaagtgatcgcccgggtgcgaatgtgggtgaacctgaacctgtggcagaagctgaagctaagcagagatgatgccaagcctctgctgagactgaagggattcccttcctttcctctggtcgagagacaggccaacgaagtggactggtgggacatggtgtgtaacgtgaagaagctgatcaacgagaaaaaggaggatggcaaggtgttttggcagaatctggctggctacaagagacaggaagccctgagaccatacctgagcagcgaggaagatcggaagaagggaaagaaattcgctcggtaccagctgggcgacctgctgctgcacctggaaaagaagcacggcgaggactggggaaaggtgtacgacgaggcctgggagcggattgacaagaaagtggaaggcctgagcaagcacatcaagctggaagaggaacggagaagcgaggacgcccagagcaaggccgccctgaccgactggctgcgggctaaggccagcttcgtgatcgagggcctgaaggaggccgacaaggacgagttctgcagatgcgagctgaagctgcagaagtggtacggggacctgcggggaaagcccttcgccatcgaagccgagaacagcatcctggacatcagcggcttcagcaagcagtacaactgtgccttcatctggcagaaggacggcgtgaagaagctgaacctgtacctgatcatcaactacttcaagggcggcaagctgcggttcaagaagatcaaacctgaagccttcgaagccaacagattctacaccgtgatcaacaaaaagagcggcgagatcgtgcccatggaggtgaacttcaacttcgacgaccccaacctgatcatcctgcctctggcctttggcaagagacagggcagagaattcatctggaacgacctgctgtccctggaaaccggcagcctgaagctggccaacggaagagtgatcgagaagacactgtacaacagaagaacccggcaggatgagcctgccctgttcgtggccctgaccttcgagcggcgggaggtcctggactcctccaatatcaaaccaatgaacctgatcggcgtggcaagaggcgaaaacatccccgccgtgatcgccctgaccgaccccgagggctgcccactgagccggtttaaggatagcctgggaaacccaacccacatcctgagaatcggcgagagctataaggagaagcagcggaccatccaggccaagaaggaggtggagcagcggagagccggcggctacagccggaagtacgccagcaaagccaagaatctggcagacgatatggtgagaaacaccgctagagatctgctgtactacgccgtgacccaggatgccatgctgatcttcgccaacctgagccggggcttcggccggcagggcaagcggaccttcatggccgagagacagtacacacggatggaggactggctgaccgccaagctggcctacgagggcctgagcaagacctacctgtccaagacactggcccagtacacctccaagacatgcagcaactgtgggtttaccatcaccagcgccgactacgacagggtgctggagaagctgaagaagacagcaacaggctggatgaccacaattaacggcaaggagctgaaggtggagggccagattacctactacaacagatacaagagacagaacgtagtcaaggacctgtccgtcgagctggatagactgagcgaagaatctgtgaacaacgacatctcctcctggacaaagggcagaagcggagaagctctgagcctcctgaagaaaagattctcccatagacccgtgcaggagaagttcgtgtgcctgaactgcggcttcgagacacacgcagccgagcaagccgccctgaacatcgccagatcctggctgttcctgcggagccaggagtacaagaaataccagacaaacaagacaaccggcaacaccgataagagagccttcgtcgagacctggcagtccttttaccggaagaagcttaaggaggtgtggaaacctgccgtgcggtctggcggatctggcggaggctccacaagcccccaggacctgatgaccttcgaggacgtggccgtggagttcacccagtgggagtggggccagctggaccccgcccagaaggacctgtacagggtggtgatgctggagaacttcaagaacctggccagcctgggcttccccgtggccaagccctacgtgatcagccagctggagaagggcaaggagccctgcgtgctggagggcgagatcagcaccgactgggagaagaggcccaaggccaagaccagccccaagaaaaagagaaaagtctaagctgccttctgcggggcttgccttctggccatgcccttcttctctcccttgcacctgtacctcttggtctttgaataaagcctgagtaggaaggctagcaaaaaaaaaaaaaaaaaaaaaaaaaaaaaaaaaaaaaaaaaaaaaaaaaaaaaaaaaaaaaaaaaaaaaaaaaaaaaaaa

SEQ ID NO: 4080 - RNA, 5419 nt, synthetic construct
  source 1..5419: mol_type = other RNA
aggaaataagagagaaaagaagagtaagaagaaatataagagccaccatggcccctaagaagaagcgtaaagtgagccgggtgaacggcagcggcagcggcggcggcatgaaccacgaccaggagttcgacccccctaaggtgtaccctcccgtccccgccgagaagagaaagcccatccgggtcctgagcctgttcgatggcatcgccaccggtctgctggtgctgaaggacctgggcatccaggtggataggtacattgcctccgaggtgtgcgaggactccatcaccgtgggaatggtgcgtcatcagggcaagatcatgtacgtgggcgacgtgcggagcgtgacacagaagcatatccaggagtggggccctttcgacctggtgatcggcggcagcccttgcaatgacctgagcatcgtgaacccagcccggaagggcctgtacgagggaaccggcagactgttcttcgagttttacagactgctgcacgacgcccggcctaaggaaggcgacgaccggcccttcttttggctgttcgagaatgtggtggccatgggagtcagcgacaagcgggatattagccggttcctggagagcaaccccgtgatgatcgatgccaaggaagtgagcgccgcccaccgggccagatacttctggggcaatctgcctggcatgaacagacccctggccagcaccgtgaacgacaagctggagctgcaggagtgcctggagcacggccggatcgccaagttcagcaaggtgagaaccatcaccacccgaagcaacagcatcaaacaaggcaaggaccagcactttcctgtgttcatgaacgagaaggaggacatcctgtggtgtaccgagatggagagagtgttcgggttcccagtccactacacagatgtcagcaacatgtctagactggccagacagagactgctgggaagaagctggtccgtccctgtgatcagacacctgttcgcccctctgaaggagtacttcgcctgcgtgagcagcggcaacagcaacgccaacagccggggccccagcttctctagcggcctggtgccactgtccctgagagggagccacatgggccccatggagatctacaaaaccgtgagcgcctggaagcggcagcctgtgcgcgtgctgagcctgtttcggaatatcgataaagtcctgaaaagcctgggattcctggagagcggctctggctccggcggtggcaccctgaagtacgtggaggatgtgacaaacgtggtcagacgggatgtggagaagtggggccccttcgatctggtgtacggcagcacccaacccctgggcagctcttgtgaccggtgccctggctggtacatgtttcagttccaccggatcctgcagtacgccctgccgagacaggagtcccagcggccattcttttggattttcatggacaacttgctgctgaccgaggatgaccaggaaactaccactcggttcctgcagaccgaagccgtgaccctgcaggacgtgagaggccgggactaccagaacgccatgcgggtgtggtccaacatccctggactgaaaagcaagcacgcacctctgacccctaaagaagaggagtacctgcaggcccaggtgcggagcagaagcaagctggacgcccctaaggtggatctgctggtgaagaattgcctcctgcccctgagagagtacttcaagtatttcagccagaatagtctgcccctgggcggcccaagcagcggcgcccctcctcccagcggcggcagcccagccggctccccaacctctaccgaggagggcacctctgagtccgccacccccgagagcggccctggcacctccaccgagcccagcgagggcagcgcacccggcagccctgccggcagccccacctccacagaggagggaaccagcaccgagcccagcgaaggcagcgccccaggcaccagcaccgagcctagtgagggcggctctggcggcggcagcgcccaggagattaaacggatcaacaagatcagaagaagacttgtgaaagacagcaacaccaagaaggccggcaagacaggccccatgaaaaccctgctggttagagtgatgacacccgatctgagagagcggctggaaaacctgagaaagaagcctgaaaatatcccccagcccatcagcaatacatctagagccaacctgaataagctgctgaccgattacaccgaaatgaagaaggcgatcctgcatgtgtactgggaagagttccagaaggaccctgtgggcctgatgagccgggtggcccagcctgccagcaagaagatcgatcagaacaagctgaaacctgagatggacgagaagggcaacctgaccaccgccggctttgcctgctctcagtgtggccagcccctgttcgtgtacaagctggagcaggtgtctgagaagggcaaggcttacaccaactacttcggacggtgcaatgtggccgagcacgaaaagctgatcctgctggcccagctgaagcccgagaaggatagcgacgaagccgtgacatatagcctgggaaagtttgggcagagggccctggatttctacagcattcatgtgaccaaggagtccacccaccccgtgaagcccctggcccagatcgccggaaacagatacgcctccggacctgtgggaaaggccctgagcgacgcatgtatgggcacaatcgcctccttcctgtctaagtaccaggacatcatcatcgaacaccagaaggtggtgaagggcaaccagaagagactggagagcctgcgggagctggccggcaaggaaaacctggaataccctagcgtgaccctgccacctcagcctcacaccaaggagggcgttgatgcctacaacgaagtgatcgcccgggtgcgaatgtgggtgaacctgaacctgtggcagaagctgaagctaagcagagatgatgccaagcctctgctgagactgaagggattcccttcctttcctctggtcgagagacaggccaacgaagtggactggtgggacatggtgtgtaacgtgaagaagctgatcaacgagaaaaaggaggatggcaaggtgttttggcagaatctggctggctacaagagacaggaagccctgagaccatacctgagcagcgaggaagatcggaagaagggaaagaaattcgctcggtaccagctgggcgacctgctgctgcacctggaaaagaagcacggcgaggactggggaaaggtgtacgacgaggcctgggagcggattgacaagaaagtggaaggcctgagcaagcacatcaagctggaagaggaacggagaagcgaggacgcccagagcaaggccgccctgaccgactggctgcgggctaaggccagcttcgtgatcgagggcctgaaggaggccgacaaggacgagttctgcagatgcgagctgaagctgcagaagtggtacggggacctgcggggaaagcccttcgccatcgaagccgagaacagcatcctggacatcagcggcttcagcaagcagtacaactgtgccttcatctggcagaaggacggcgtgaagaagctgaacctgtacctgatcatcaactacttcaagggcggcaagctgcggttcaagaagatcaaacctgaagccttcgaagccaacagattctacaccgtgatcaacaaaaagagcggcgagatcgtgcccatggaggtgaacttcaacttcgacgaccccaacctgatcatcctgcctctggcctttggcaagagacagggcagagaattcatctggaacgacctgctgtccctggaaaccggcagcctgaagctggccaacggaagagtgatcgagaagacactgtacaacagaagaacccggcaggatgagcctgccctgttcgtggccctgaccttcgagcggcgggaggtcctggactcctccaatatcaaaccaatgaacctgatcggcgtggcaagaggcgaaaacatccccgccgtgatcgccctgaccgaccccgagggctgcccactgagccggtttaaggatagcctgggaaacccaacccacatcctgagaatcggcgagagctataaggagaagcagcggaccatccaggccaagaaggaggtggagcagcggagagccggcggctacagccggaagtacgccagcaaagccaagaatctggcagacgatatggtgagaaacaccgctagagatctgctgtactacgccgtgacccaggatgccatgctgatcttcgccaacctgagccggggcttcggccggcagggcaagcggaccttcatggccgagagacagtacacacggatggaggactggctgaccgccaagctggcctacgagggcctgagcaagacctacctgtccaagacactggcccagtacacctccaagacatgcagcaactgtgggtttaccatcaccagcgccgactacgacagggtgctggagaagctgaagaagacagcaacaggctggatgaccacaattaacggcaaggagctgaaggtggagggccagattacctactacaacagatacaagagacagaacgtagtcaaggacctgtccgtcgagctggatagactgagcgaagaatctgtgaacaacgacatctcctcctggacaaagggcagaagcggagaagctctgagcctcctgaagaaaagattctcccatagacccgtgcaggagaagttcgtgtgcctgaactgcggcttcgagacacacgcagccgagcaagccgccctgaacatcgccagatcctggctgttcctgcggagccaggagtacaagaaataccagacaaacaagacaaccggcaacaccgataagagagccttcgtcgagacctggcagtccttttaccggaagaagcttaaggaggtgtggaaacctgccgtgcggtctggcggatctggcggaggctccacaagcagcctggagagcgacctgttcagggacgtggccatcgtgttcagccaggaggagtgggagcagctggcccccgcccagagggacctgtacagggacgtgatgctggagacctacagcaacctggtgagcctgggcctggccatcgccaagcccgacgtgatcagcttcctggagcagggcaaggagccctgggtggtggagaagatgagcaggggcggcctgtgccccgtgctggagagcaggaccagccccaagaaaaagagaaaagtctaagctgccttctgcggggcttgccttctggccatgcccttcttctctcccttgcacctgtacctcttggtctttgaataaagcctgagtaggaaggctagcaaaaaaaaaaaaaaaaaaaaaaaaaaaaaaaaaaaaaaaaaaaaaaaaaaaaaaaaaaaaaaaaaaaaaaaaaaaaaaaa

SEQ ID NO: 4081 - RNA, 5419 nt, synthetic construct
  source 1..5419: mol_type = other RNA
aggaaataagagagaaaagaagagtaagaagaaatataagagccaccatggcccctaagaagaagcgtaaagtgagccgggtgaacggcagcggcagcggcggcggcatgaaccacgaccaggagttcgacccccctaaggtgtaccctcccgtccccgccgagaagagaaagcccatccgggtcctgagcctgttcgatggcatcgccaccggtctgctggtgctgaaggacctgggcatccaggtggataggtacattgcctccgaggtgtgcgaggactccatcaccgtgggaatggtgcgtcatcagggcaagatcatgtacgtgggcgacgtgcggagcgtgacacagaagcatatccaggagtggggccctttcgacctggtgatcggcggcagcccttgcaatgacctgagcatcgtgaacccagcccggaagggcctgtacgagggaaccggcagactgttcttcgagttttacagactgctgcacgacgcccggcctaaggaaggcgacgaccggcccttcttttggctgttcgagaatgtggtggccatgggagtcagcgacaagcgggatattagccggttcctggagagcaaccccgtgatgatcgatgccaaggaagtgagcgccgcccaccgggccagatacttctggggcaatctgcctggcatgaacagacccctggccagcaccgtgaacgacaagctggagctgcaggagtgcctggagcacggccggatcgccaagttcagcaaggtgagaaccatcaccacccgaagcaacagcatcaaacaaggcaaggaccagcactttcctgtgttcatgaacgagaaggaggacatcctgtggtgtaccgagatggagagagtgttcgggttcccagtccactacacagatgtcagcaacatgtctagactggccagacagagactgctgggaagaagctggtccgtccctgtgatcagacacctgttcgcccctctgaaggagtacttcgcctgcgtgagcagcggcaacagcaacgccaacagccggggccccagcttctctagcggcctggtgccactgtccctgagagggagccacatgggccccatggagatctacaaaaccgtgagcgcctggaagcggcagcctgtgcgcgtgctgagcctgtttcggaatatcgataaagtcctgaaaagcctgggattcctggagagcggctctggctccggcggtggcaccctgaagtacgtggaggatgtgacaaacgtggtcagacgggatgtggagaagtggggccccttcgatctggtgtacggcagcacccaacccctgggcagctcttgtgaccggtgccctggctggtacatgtttcagttccaccggatcctgcagtacgccctgccgagacaggagtcccagcggccattcttttggattttcatggacaacttgctgctgaccgaggatgaccaggaaactaccactcggttcctgcagaccgaagccgtgaccctgcaggacgtgagaggccgggactaccagaacgccatgcgggtgtggtccaacatccctggactgaaaagcaagcacgcacctctgacccctaaagaagaggagtacctgcaggcccaggtgcggagcagaagcaagctggacgcccctaaggtggatctgctggtgaagaattgcctcctgcccctgagagagtacttcaagtatttcagccagaatagtctgcccctgggcggcccaagcagcggcgcccctcctcccagcggcggcagcccagccggctccccaacctctaccgaggagggcacctctgagtccgccacccccgagagcggccctggcacctccaccgagcccagcgagggcagcgcacccggcagccctgccggcagccccacctccacagaggagggaaccagcaccgagcccagcgaaggcagcgccccaggcaccagcaccgagcctagtgagggcggctctggcggcggcagcgcccaggagattaaacggatcaacaagatcagaagaagacttgtgaaagacagcaacaccaagaaggccggcaagacaggccccatgaaaaccctgctggttagagtgatgacacccgatctgagagagcggctggaaaacctgagaaagaagcctgaaaatatcccccagcccatcagcaatacatctagagccaacctgaataagctgctgaccgattacaccgaaatgaagaaggcgatcctgcatgtgtactgggaagagttccagaaggaccctgtgggcctgatgagccgggtggcccagcctgccagcaagaagatcgatcagaacaagctgaaacctgagatggacgagaagggcaacctgaccaccgccggctttgcctgctctcagtgtggccagcccctgttcgtgtacaagctggagcaggtgtctgagaagggcaaggcttacaccaactacttcggacggtgcaatgtggccgagcacgaaaagctgatcctgctggcccagctgaagcccgagaaggatagcgacgaagccgtgacatatagcctgggaaagtttgggcagagggccctggatttctacagcattcatgtgaccaaggagtccacccaccccgtgaagcccctggcccagatcgccggaaacagatacgcctccggacctgtgggaaaggccctgagcgacgcatgtatgggcacaatcgcctccttcctgtctaagtaccaggacatcatcatcgaacaccagaaggtggtgaagggcaaccagaagagactggagagcctgcgggagctggccggcaaggaaaacctggaataccctagcgtgaccctgccacctcagcctcacaccaaggagggcgttgatgcctacaacgaagtgatcgcccgggtgcgaatgtgggtgaacctgaacctgtggcagaagctgaagctaagcagagatgatgccaagcctctgctgagactgaagggattcccttcctttcctctggtcgagagacaggccaacgaagtggactggtgggacatggtgtgtaacgtgaagaagctgatcaacgagaaaaaggaggatggcaaggtgttttggcagaatctggctggctacaagagacaggaagccctgagaccatacctgagcagcgaggaagatcggaagaagggaaagaaattcgctcggtaccagctgggcgacctgctgctgcacctggaaaagaagcacggcgaggactggggaaaggtgtacgacgaggcctgggagcggattgacaagaaagtggaaggcctgagcaagcacatcaagctggaagaggaacggagaagcgaggacgcccagagcaaggccgccctgaccgactggctgcgggctaaggccagcttcgtgatcgagggcctgaaggaggccgacaaggacgagttctgcagatgcgagctgaagctgcagaagtggtacggggacctgcggggaaagcccttcgccatcgaagccgagaacagcatcctggacatcagcggcttcagcaagcagtacaactgtgccttcatctggcagaaggacggcgtgaagaagctgaacctgtacctgatcatcaactacttcaagggcggcaagctgcggttcaagaagatcaaacctgaagccttcgaagccaacagattctacaccgtgatcaacaaaaagagcggcgagatcgtgcccatggaggtgaacttcaacttcgacgaccccaacctgatcatcctgcctctggcctttggcaagagacagggcagagaattcatctggaacgacctgctgtccctggaaaccggcagcctgaagctggccaacggaagagtgatcgagaagacactgtacaacagaagaacccggcaggatgagcctgccctgttcgtggccctgaccttcgagcggcgggaggtcctggactcctccaatatcaaaccaatgaacctgatcggcgtggcaagaggcgaaaacatccccgccgtgatcgccctgaccgaccccgagggctgcccactgagccggtttaaggatagcctgggaaacccaacccacatcctgagaatcggcgagagctataaggagaagcagcggaccatccaggccaagaaggaggtggagcagcggagagccggcggctacagccggaagtacgccagcaaagccaagaatctggcagacgatatggtgagaaacaccgctagagatctgctgtactacgccgtgacccaggatgccatgctgatcttcgccaacctgagccggggcttcggccggcagggcaagcggaccttcatggccgagagacagtacacacggatggaggactggctgaccgccaagctggcctacgagggcctgagcaagacctacctgtccaagacactggcccagtacacctccaagacatgcagcaactgtgggtttaccatcaccagcgccgactacgacagggtgctggagaagctgaagaagacagcaacaggctggatgaccacaattaacggcaaggagctgaaggtggagggccagattacctactacaacagatacaagagacagaacgtagtcaaggacctgtccgtcgagctggatagactgagcgaagaatctgtgaacaacgacatctcctcctggacaaagggcagaagcggagaagctctgagcctcctgaagaaaagattctcccatagacccgtgcaggagaagttcgtgtgcctgaactgcggcttcgagacacacgcagccgagcaagccgccctgaacatcgccagatcctggctgttcctgcggagccaggagtacaagaaataccagacaaacaagacaaccggcaacaccgataagagagccttcgtcgagacctggcagtccttttaccggaagaagcttaaggaggtgtggaaacctgccgtgcggtctggcggatctggcggaggctccacaagcatgatgaccgccgtgagcctgaccaccaggccccaggagagcgtggccttcgaggacgtggccgtgtacttcaccaccaaggagtgggccatcatggtgcccgccgagagggccctgtacagggacgtgatgctggagaactacgaggccgtggccttcgtggtgagccccaccagcaagcccgccctggtgagccacctggagcagggcaaggagagctgcttcaccaggccccagggcgtgaccagccccaagaaaaagagaaaagtctaagctgccttctgcggggcttgccttctggccatgcccttcttctctcccttgcacctgtacctcttggtctttgaataaagcctgagtaggaaggctagcaaaaaaaaaaaaaaaaaaaaaaaaaaaaaaaaaaaaaaaaaaaaaaaaaaaaaaaaaaaaaaaaaaaaaaaaaaaaaaaa

SEQ ID NO: 4082 - RNA, 5419 nt, synthetic construct
  source 1..5419: mol_type = other RNA
aggaaataagagagaaaagaagagtaagaagaaatataagagccaccatggcccctaagaagaagcgtaaagtgagccgggtgaacggcagcggcagcggcggcggcatgaaccacgaccaggagttcgacccccctaaggtgtaccctcccgtccccgccgagaagagaaagcccatccgggtcctgagcctgttcgatggcatcgccaccggtctgctggtgctgaaggacctgggcatccaggtggataggtacattgcctccgaggtgtgcgaggactccatcaccgtgggaatggtgcgtcatcagggcaagatcatgtacgtgggcgacgtgcggagcgtgacacagaagcatatccaggagtggggccctttcgacctggtgatcggcggcagcccttgcaatgacctgagcatcgtgaacccagcccggaagggcctgtacgagggaaccggcagactgttcttcgagttttacagactgctgcacgacgcccggcctaaggaaggcgacgaccggcccttcttttggctgttcgagaatgtggtggccatgggagtcagcgacaagcgggatattagccggttcctggagagcaaccccgtgatgatcgatgccaaggaagtgagcgccgcccaccgggccagatacttctggggcaatctgcctggcatgaacagacccctggccagcaccgtgaacgacaagctggagctgcaggagtgcctggagcacggccggatcgccaagttcagcaaggtgagaaccatcaccacccgaagcaacagcatcaaacaaggcaaggaccagcactttcctgtgttcatgaacgagaaggaggacatcctgtggtgtaccgagatggagagagtgttcgggttcccagtccactacacagatgtcagcaacatgtctagactggccagacagagactgctgggaagaagctggtccgtccctgtgatcagacacctgttcgcccctctgaaggagtacttcgcctgcgtgagcagcggcaacagcaacgccaacagccggggccccagcttctctagcggcctggtgccactgtccctgagagggagccacatgggccccatggagatctacaaaaccgtgagcgcctggaagcggcagcctgtgcgcgtgctgagcctgtttcggaatatcgataaagtcctgaaaagcctgggattcctggagagcggctctggctccggcggtggcaccctgaagtacgtggaggatgtgacaaacgtggtcagacgggatgtggagaagtggggccccttcgatctggtgtacggcagcacccaacccctgggcagctcttgtgaccggtgccctggctggtacatgtttcagttccaccggatcctgcagtacgccctgccgagacaggagtcccagcggccattcttttggattttcatggacaacttgctgctgaccgaggatgaccaggaaactaccactcggttcctgcagaccgaagccgtgaccctgcaggacgtgagaggccgggactaccagaacgccatgcgggtgtggtccaacatccctggactgaaaagcaagcacgcacctctgacccctaaagaagaggagtacctgcaggcccaggtgcggagcagaagcaagctggacgcccctaaggtggatctgctggtgaagaattgcctcctgcccctgagagagtacttcaagtatttcagccagaatagtctgcccctgggcggcccaagcagcggcgcccctcctcccagcggcggcagcccagccggctccccaacctctaccgaggagggcacctctgagtccgccacccccgagagcggccctggcacctccaccgagcccagcgagggcagcgcacccggcagccctgccggcagccccacctccacagaggagggaaccagcaccgagcccagcgaaggcagcgccccaggcaccagcaccgagcctagtgagggcggctctggcggcggcagcgcccaggagattaaacggatcaacaagatcagaagaagacttgtgaaagacagcaacaccaagaaggccggcaagacaggccccatgaaaaccctgctggttagagtgatgacacccgatctgagagagcggctggaaaacctgagaaagaagcctgaaaatatcccccagcccatcagcaatacatctagagccaacctgaataagctgctgaccgattacaccgaaatgaagaaggcgatcctgcatgtgtactgggaagagttccagaaggaccctgtgggcctgatgagccgggtggcccagcctgccagcaagaagatcgatcagaacaagctgaaacctgagatggacgagaagggcaacctgaccaccgccggctttgcctgctctcagtgtggccagcccctgttcgtgtacaagctggagcaggtgtctgagaagggcaaggcttacaccaactacttcggacggtgcaatgtggccgagcacgaaaagctgatcctgctggcccagctgaagcccgagaaggatagcgacgaagccgtgacatatagcctgggaaagtttgggcagagggccctggatttctacagcattcatgtgaccaaggagtccacccaccccgtgaagcccctggcccagatcgccggaaacagatacgcctccggacctgtgggaaaggccctgagcgacgcatgtatgggcacaatcgcctccttcctgtctaagtaccaggacatcatcatcgaacaccagaaggtggtgaagggcaaccagaagagactggagagcctgcgggagctggccggcaaggaaaacctggaataccctagcgtgaccctgccacctcagcctcacaccaaggagggcgttgatgcctacaacgaagtgatcgcccgggtgcgaatgtgggtgaacctgaacctgtggcagaagctgaagctaagcagagatgatgccaagcctctgctgagactgaagggattcccttcctttcctctggtcgagagacaggccaacgaagtggactggtgggacatggtgtgtaacgtgaagaagctgatcaacgagaaaaaggaggatggcaaggtgttttggcagaatctggctggctacaagagacaggaagccctgagaccatacctgagcagcgaggaagatcggaagaagggaaagaaattcgctcggtaccagctgggcgacctgctgctgcacctggaaaagaagcacggcgaggactggggaaaggtgtacgacgaggcctgggagcggattgacaagaaagtggaaggcctgagcaagcacatcaagctggaagaggaacggagaagcgaggacgcccagagcaaggccgccctgaccgactggctgcgggctaaggccagcttcgtgatcgagggcctgaaggaggccgacaaggacgagttctgcagatgcgagctgaagctgcagaagtggtacggggacctgcggggaaagcccttcgccatcgaagccgagaacagcatcctggacatcagcggcttcagcaagcagtacaactgtgccttcatctggcagaaggacggcgtgaagaagctgaacctgtacctgatcatcaactacttcaagggcggcaagctgcggttcaagaagatcaaacctgaagccttcgaagccaacagattctacaccgtgatcaacaaaaagagcggcgagatcgtgcccatggaggtgaacttcaacttcgacgaccccaacctgatcatcctgcctctggcctttggcaagagacagggcagagaattcatctggaacgacctgctgtccctggaaaccggcagcctgaagctggccaacggaagagtgatcgagaagacactgtacaacagaagaacccggcaggatgagcctgccctgttcgtggccctgaccttcgagcggcgggaggtcctggactcctccaatatcaaaccaatgaacctgatcggcgtggcaagaggcgaaaacatccccgccgtgatcgccctgaccgaccccgagggctgcccactgagccggtttaaggatagcctgggaaacccaacccacatcctgagaatcggcgagagctataaggagaagcagcggaccatccaggccaagaaggaggtggagcagcggagagccggcggctacagccggaagtacgccagcaaagccaagaatctggcagacgatatggtgagaaacaccgctagagatctgctgtactacgccgtgacccaggatgccatgctgatcttcgccaacctgagccggggcttcggccggcagggcaagcggaccttcatggccgagagacagtacacacggatggaggactggctgaccgccaagctggcctacgagggcctgagcaagacctacctgtccaagacactggcccagtacacctccaagacatgcagcaactgtgggtttaccatcaccagcgccgactacgacagggtgctggagaagctgaagaagacagcaacaggctggatgaccacaattaacggcaaggagctgaaggtggagggccagattacctactacaacagatacaagagacagaacgtagtcaaggacctgtccgtcgagctggatagactgagcgaagaatctgtgaacaacgacatctcctcctggacaaagggcagaagcggagaagctctgagcctcctgaagaaaagattctcccatagacccgtgcaggagaagttcgtgtgcctgaactgcggcttcgagacacacgcagccgagcaagccgccctgaacatcgccagatcctggctgttcctgcggagccaggagtacaagaaataccagacaaacaagacaaccggcaacaccgataagagagccttcgtcgagacctggcagtccttttaccggaagaagcttaaggaggtgtggaaacctgccgtgcggtctggcggatctggcggaggctccacaagcctgaaggccagcgtgagcttcaaggacgtggccgtggagctgacccaggaggagtggcagcacatgggccccgcccagaggaccctgtacagggacgtgatgctggagaactacagccacctggtgagcgtgggctactgcatcttcaagcccgaggtgatcttcaagctggagcagggcgagcagccctggttcctggagcaggagttcagcaaccagagctaccccgaggactacaacatcaccagccccaagaaaaagagaaaagtctaagctgccttctgcggggcttgccttctggccatgcccttcttctctcccttgcacctgtacctcttggtctttgaataaagcctgagtaggaaggctagcaaaaaaaaaaaaaaaaaaaaaaaaaaaaaaaaaaaaaaaaaaaaaaaaaaaaaaaaaaaaaaaaaaaaaaaaaaaaaaaa

SEQ ID NO: 4083 - RNA, 5419 nt, synthetic construct
  source 1..5419: mol_type = other RNA
aggaaataagagagaaaagaagagtaagaagaaatataagagccaccatggcccctaagaagaagcgtaaagtgagccgggtgaacggcagcggcagcggcggcggcatgaaccacgaccaggagttcgacccccctaaggtgtaccctcccgtccccgccgagaagagaaagcccatccgggtcctgagcctgttcgatggcatcgccaccggtctgctggtgctgaaggacctgggcatccaggtggataggtacattgcctccgaggtgtgcgaggactccatcaccgtgggaatggtgcgtcatcagggcaagatcatgtacgtgggcgacgtgcggagcgtgacacagaagcatatccaggagtggggccctttcgacctggtgatcggcggcagcccttgcaatgacctgagcatcgtgaacccagcccggaagggcctgtacgagggaaccggcagactgttcttcgagttttacagactgctgcacgacgcccggcctaaggaaggcgacgaccggcccttcttttggctgttcgagaatgtggtggccatgggagtcagcgacaagcgggatattagccggttcctggagagcaaccccgtgatgatcgatgccaaggaagtgagcgccgcccaccgggccagatacttctggggcaatctgcctggcatgaacagacccctggccagcaccgtgaacgacaagctggagctgcaggagtgcctggagcacggccggatcgccaagttcagcaaggtgagaaccatcaccacccgaagcaacagcatcaaacaaggcaaggaccagcactttcctgtgttcatgaacgagaaggaggacatcctgtggtgtaccgagatggagagagtgttcgggttcccagtccactacacagatgtcagcaacatgtctagactggccagacagagactgctgggaagaagctggtccgtccctgtgatcagacacctgttcgcccctctgaaggagtacttcgcctgcgtgagcagcggcaacagcaacgccaacagccggggccccagcttctctagcggcctggtgccactgtccctgagagggagccacatgggccccatggagatctacaaaaccgtgagcgcctggaagcggcagcctgtgcgcgtgctgagcctgtttcggaatatcgataaagtcctgaaaagcctgggattcctggagagcggctctggctccggcggtggcaccctgaagtacgtggaggatgtgacaaacgtggtcagacgggatgtggagaagtggggccccttcgatctggtgtacggcagcacccaacccctgggcagctcttgtgaccggtgccctggctggtacatgtttcagttccaccggatcctgcagtacgccctgccgagacaggagtcccagcggccattcttttggattttcatggacaacttgctgctgaccgaggatgaccaggaaactaccactcggttcctgcagaccgaagccgtgaccctgcaggacgtgagaggccgggactaccagaacgccatgcgggtgtggtccaacatccctggactgaaaagcaagcacgcacctctgacccctaaagaagaggagtacctgcaggcccaggtgcggagcagaagcaagctggacgcccctaaggtggatctgctggtgaagaattgcctcctgcccctgagagagtacttcaagtatttcagccagaatagtctgcccctgggcggcccaagcagcggcgcccctcctcccagcggcggcagcccagccggctccccaacctctaccgaggagggcacctctgagtccgccacccccgagagcggccctggcacctccaccgagcccagcgagggcagcgcacccggcagccctgccggcagccccacctccacagaggagggaaccagcaccgagcccagcgaaggcagcgccccaggcaccagcaccgagcctagtgagggcggctctggcggcggcagcgcccaggagattaaacggatcaacaagatcagaagaagacttgtgaaagacagcaacaccaagaaggccggcaagacaggccccatgaaaaccctgctggttagagtgatgacacccgatctgagagagcggctggaaaacctgagaaagaagcctgaaaatatcccccagcccatcagcaatacatctagagccaacctgaataagctgctgaccgattacaccgaaatgaagaaggcgatcctgcatgtgtactgggaagagttccagaaggaccctgtgggcctgatgagccgggtggcccagcctgccagcaagaagatcgatcagaacaagctgaaacctgagatggacgagaagggcaacctgaccaccgccggctttgcctgctctcagtgtggccagcccctgttcgtgtacaagctggagcaggtgtctgagaagggcaaggcttacaccaactacttcggacggtgcaatgtggccgagcacgaaaagctgatcctgctggcccagctgaagcccgagaaggatagcgacgaagccgtgacatatagcctgggaaagtttgggcagagggccctggatttctacagcattcatgtgaccaaggagtccacccaccccgtgaagcccctggcccagatcgccggaaacagatacgcctccggacctgtgggaaaggccctgagcgacgcatgtatgggcacaatcgcctccttcctgtctaagtaccaggacatcatcatcgaacaccagaaggtggtgaagggcaaccagaagagactggagagcctgcgggagctggccggcaaggaaaacctggaataccctagcgtgaccctgccacctcagcctcacaccaaggagggcgttgatgcctacaacgaagtgatcgcccgggtgcgaatgtgggtgaacctgaacctgtggcagaagctgaagctaagcagagatgatgccaagcctctgctgagactgaagggattcccttcctttcctctggtcgagagacaggccaacgaagtggactggtgggacatggtgtgtaacgtgaagaagctgatcaacgagaaaaaggaggatggcaaggtgttttggcagaatctggctggctacaagagacaggaagccctgagaccatacctgagcagcgaggaagatcggaagaagggaaagaaattcgctcggtaccagctgggcgacctgctgctgcacctggaaaagaagcacggcgaggactggggaaaggtgtacgacgaggcctgggagcggattgacaagaaagtggaaggcctgagcaagcacatcaagctggaagaggaacggagaagcgaggacgcccagagcaaggccgccctgaccgactggctgcgggctaaggccagcttcgtgatcgagggcctgaaggaggccgacaaggacgagttctgcagatgcgagctgaagctgcagaagtggtacggggacctgcggggaaagcccttcgccatcgaagccgagaacagcatcctggacatcagcggcttcagcaagcagtacaactgtgccttcatctggcagaaggacggcgtgaagaagctgaacctgtacctgatcatcaactacttcaagggcggcaagctgcggttcaagaagatcaaacctgaagccttcgaagccaacagattctacaccgtgatcaacaaaaagagcggcgagatcgtgcccatggaggtgaacttcaacttcgacgaccccaacctgatcatcctgcctctggcctttggcaagagacagggcagagaattcatctggaacgacctgctgtccctggaaaccggcagcctgaagctggccaacggaagagtgatcgagaagacactgtacaacagaagaacccggcaggatgagcctgccctgttcgtggccctgaccttcgagcggcgggaggtcctggactcctccaatatcaaaccaatgaacctgatcggcgtggcaagaggcgaaaacatccccgccgtgatcgccctgaccgaccccgagggctgcccactgagccggtttaaggatagcctgggaaacccaacccacatcctgagaatcggcgagagctataaggagaagcagcggaccatccaggccaagaaggaggtggagcagcggagagccggcggctacagccggaagtacgccagcaaagccaagaatctggcagacgatatggtgagaaacaccgctagagatctgctgtactacgccgtgacccaggatgccatgctgatcttcgccaacctgagccggggcttcggccggcagggcaagcggaccttcatggccgagagacagtacacacggatggaggactggctgaccgccaagctggcctacgagggcctgagcaagacctacctgtccaagacactggcccagtacacctccaagacatgcagcaactgtgggtttaccatcaccagcgccgactacgacagggtgctggagaagctgaagaagacagcaacaggctggatgaccacaattaacggcaaggagctgaaggtggagggccagattacctactacaacagatacaagagacagaacgtagtcaaggacctgtccgtcgagctggatagactgagcgaagaatctgtgaacaacgacatctcctcctggacaaagggcagaagcggagaagctctgagcctcctgaagaaaagattctcccatagacccgtgcaggagaagttcgtgtgcctgaactgcggcttcgagacacacgcagccgagcaagccgccctgaacatcgccagatcctggctgttcctgcggagccaggagtacaagaaataccagacaaacaagacaaccggcaacaccgataagagagccttcgtcgagacctggcagtccttttaccggaagaagcttaaggaggtgtggaaacctgccgtgcggtctggcggatctggcggaggctccacaagcagccagccccccgtgagcttcaaggacgtggtggtgagcttcaccagggaggagtggggccagctggacaccgtgcagaggaccctgtacagggacgtgaccctggagacctgcggccacctggtgagcctgggcctgctgctgcccaacctggacgtgatcagccacctggagaacggcgaggacccctggagggccgagcaggagccccccacccaggactggaagaccaccctggagaagaccagccccaagaaaaagagaaaagtctaagctgccttctgcggggcttgccttctggccatgcccttcttctctcccttgcacctgtacctcttggtctttgaataaagcctgagtaggaaggctagcaaaaaaaaaaaaaaaaaaaaaaaaaaaaaaaaaaaaaaaaaaaaaaaaaaaaaaaaaaaaaaaaaaaaaaaaaaaaaaaa

SEQ ID NO: 4084 - RNA, 5419 nt, synthetic construct
  source 1..5419: mol_type = other RNA
aggaaataagagagaaaagaagagtaagaagaaatataagagccaccatggcccctaagaagaagcgtaaagtgagccgggtgaacggcagcggcagcggcggcggcatgaaccacgaccaggagttcgacccccctaaggtgtaccctcccgtccccgccgagaagagaaagcccatccgggtcctgagcctgttcgatggcatcgccaccggtctgctggtgctgaaggacctgggcatccaggtggataggtacattgcctccgaggtgtgcgaggactccatcaccgtgggaatggtgcgtcatcagggcaagatcatgtacgtgggcgacgtgcggagcgtgacacagaagcatatccaggagtggggccctttcgacctggtgatcggcggcagcccttgcaatgacctgagcatcgtgaacccagcccggaagggcctgtacgagggaaccggcagactgttcttcgagttttacagactgctgcacgacgcccggcctaaggaaggcgacgaccggcccttcttttggctgttcgagaatgtggtggccatgggagtcagcgacaagcgggatattagccggttcctggagagcaaccccgtgatgatcgatgccaaggaagtgagcgccgcccaccgggccagatacttctggggcaatctgcctggcatgaacagacccctggccagcaccgtgaacgacaagctggagctgcaggagtgcctggagcacggccggatcgccaagttcagcaaggtgagaaccatcaccacccgaagcaacagcatcaaacaaggcaaggaccagcactttcctgtgttcatgaacgagaaggaggacatcctgtggtgtaccgagatggagagagtgttcgggttcccagtccactacacagatgtcagcaacatgtctagactggccagacagagactgctgggaagaagctggtccgtccctgtgatcagacacctgttcgcccctctgaaggagtacttcgcctgcgtgagcagcggcaacagcaacgccaacagccggggccccagcttctctagcggcctggtgccactgtccctgagagggagccacatgggccccatggagatctacaaaaccgtgagcgcctggaagcggcagcctgtgcgcgtgctgagcctgtttcggaatatcgataaagtcctgaaaagcctgggattcctggagagcggctctggctccggcggtggcaccctgaagtacgtggaggatgtgacaaacgtggtcagacgggatgtggagaagtggggccccttcgatctggtgtacggcagcacccaacccctgggcagctcttgtgaccggtgccctggctggtacatgtttcagttccaccggatcctgcagtacgccctgccgagacaggagtcccagcggccattcttttggattttcatggacaacttgctgctgaccgaggatgaccaggaaactaccactcggttcctgcagaccgaagccgtgaccctgcaggacgtgagaggccgggactaccagaacgccatgcgggtgtggtccaacatccctggactgaaaagcaagcacgcacctctgacccctaaagaagaggagtacctgcaggcccaggtgcggagcagaagcaagctggacgcccctaaggtggatctgctggtgaagaattgcctcctgcccctgagagagtacttcaagtatttcagccagaatagtctgcccctgggcggcccaagcagcggcgcccctcctcccagcggcggcagcccagccggctccccaacctctaccgaggagggcacctctgagtccgccacccccgagagcggccctggcacctccaccgagcccagcgagggcagcgcacccggcagccctgccggcagccccacctccacagaggagggaaccagcaccgagcccagcgaaggcagcgccccaggcaccagcaccgagcctagtgagggcggctctggcggcggcagcgcccaggagattaaacggatcaacaagatcagaagaagacttgtgaaagacagcaacaccaagaaggccggcaagacaggccccatgaaaaccctgctggttagagtgatgacacccgatctgagagagcggctggaaaacctgagaaagaagcctgaaaatatcccccagcccatcagcaatacatctagagccaacctgaataagctgctgaccgattacaccgaaatgaagaaggcgatcctgcatgtgtactgggaagagttccagaaggaccctgtgggcctgatgagccgggtggcccagcctgccagcaagaagatcgatcagaacaagctgaaacctgagatggacgagaagggcaacctgaccaccgccggctttgcctgctctcagtgtggccagcccctgttcgtgtacaagctggagcaggtgtctgagaagggcaaggcttacaccaactacttcggacggtgcaatgtggccgagcacgaaaagctgatcctgctggcccagctgaagcccgagaaggatagcgacgaagccgtgacatatagcctgggaaagtttgggcagagggccctggatttctacagcattcatgtgaccaaggagtccacccaccccgtgaagcccctggcccagatcgccggaaacagatacgcctccggacctgtgggaaaggccctgagcgacgcatgtatgggcacaatcgcctccttcctgtctaagtaccaggacatcatcatcgaacaccagaaggtggtgaagggcaaccagaagagactggagagcctgcgggagctggccggcaaggaaaacctggaataccctagcgtgaccctgccacctcagcctcacaccaaggagggcgttgatgcctacaacgaagtgatcgcccgggtgcgaatgtgggtgaacctgaacctgtggcagaagctgaagctaagcagagatgatgccaagcctctgctgagactgaagggattcccttcctttcctctggtcgagagacaggccaacgaagtggactggtgggacatggtgtgtaacgtgaagaagctgatcaacgagaaaaaggaggatggcaaggtgttttggcagaatctggctggctacaagagacaggaagccctgagaccatacctgagcagcgaggaagatcggaagaagggaaagaaattcgctcggtaccagctgggcgacctgctgctgcacctggaaaagaagcacggcgaggactggggaaaggtgtacgacgaggcctgggagcggattgacaagaaagtggaaggcctgagcaagcacatcaagctggaagaggaacggagaagcgaggacgcccagagcaaggccgccctgaccgactggctgcgggctaaggccagcttcgtgatcgagggcctgaaggaggccgacaaggacgagttctgcagatgcgagctgaagctgcagaagtggtacggggacctgcggggaaagcccttcgccatcgaagccgagaacagcatcctggacatcagcggcttcagcaagcagtacaactgtgccttcatctggcagaaggacggcgtgaagaagctgaacctgtacctgatcatcaactacttcaagggcggcaagctgcggttcaagaagatcaaacctgaagccttcgaagccaacagattctacaccgtgatcaacaaaaagagcggcgagatcgtgcccatggaggtgaacttcaacttcgacgaccccaacctgatcatcctgcctctggcctttggcaagagacagggcagagaattcatctggaacgacctgctgtccctggaaaccggcagcctgaagctggccaacggaagagtgatcgagaagacactgtacaacagaagaacccggcaggatgagcctgccctgttcgtggccctgaccttcgagcggcgggaggtcctggactcctccaatatcaaaccaatgaacctgatcggcgtggcaagaggcgaaaacatccccgccgtgatcgccctgaccgaccccgagggctgcccactgagccggtttaaggatagcctgggaaacccaacccacatcctgagaatcggcgagagctataaggagaagcagcggaccatccaggccaagaaggaggtggagcagcggagagccggcggctacagccggaagtacgccagcaaagccaagaatctggcagacgatatggtgagaaacaccgctagagatctgctgtactacgccgtgacccaggatgccatgctgatcttcgccaacctgagccggggcttcggccggcagggcaagcggaccttcatggccgagagacagtacacacggatggaggactggctgaccgccaagctggcctacgagggcctgagcaagacctacctgtccaagacactggcccagtacacctccaagacatgcagcaactgtgggtttaccatcaccagcgccgactacgacagggtgctggagaagctgaagaagacagcaacaggctggatgaccacaattaacggcaaggagctgaaggtggagggccagattacctactacaacagatacaagagacagaacgtagtcaaggacctgtccgtcgagctggatagactgagcgaagaatctgtgaacaacgacatctcctcctggacaaagggcagaagcggagaagctctgagcctcctgaagaaaagattctcccatagacccgtgcaggagaagttcgtgtgcctgaactgcggcttcgagacacacgcagccgagcaagccgccctgaacatcgccagatcctggctgttcctgcggagccaggagtacaagaaataccagacaaacaagacaaccggcaacaccgataagagagccttcgtcgagacctggcagtccttttaccggaagaagcttaaggaggtgtggaaacctgccgtgcggtctggcggatctggcggaggctccacaagcgcccagggccaggtgaccttcgaggacgtggccgtgtgcttcagccaggaggagtggggcctgctggacgagacccagaggctgctgtacaggagcgtgatgctggagaccttcagcctgatggccagcctgggcctgaccagcagcaggacccacgacatcagccagctggagaggtggggcgagcccttcctgagcgccagcggcgccatgagggccaccaggcccaccggctgctggcacaccagccccaagaaaaagagaaaagtctaagctgccttctgcggggcttgccttctggccatgcccttcttctctcccttgcacctgtacctcttggtctttgaataaagcctgagtaggaaggctagcaaaaaaaaaaaaaaaaaaaaaaaaaaaaaaaaaaaaaaaaaaaaaaaaaaaaaaaaaaaaaaaaaaaaaaaaaaaaaaaa

SEQ ID NO: 4085 - RNA, 5416 nt, synthetic construct
  source 1..5416: mol_type = other RNA
aggaaataagagagaaaagaagagtaagaagaaatataagagccaccatggcccctaagaagaagcgtaaagtgagccgggtgaacggcagcggcagcggcggcggcatgaaccacgaccaggagttcgacccccctaaggtgtaccctcccgtccccgccgagaagagaaagcccatccgggtcctgagcctgttcgatggcatcgccaccggtctgctggtgctgaaggacctgggcatccaggtggataggtacattgcctccgaggtgtgcgaggactccatcaccgtgggaatggtgcgtcatcagggcaagatcatgtacgtgggcgacgtgcggagcgtgacacagaagcatatccaggagtggggccctttcgacctggtgatcggcggcagcccttgcaatgacctgagcatcgtgaacccagcccggaagggcctgtacgagggaaccggcagactgttcttcgagttttacagactgctgcacgacgcccggcctaaggaaggcgacgaccggcccttcttttggctgttcgagaatgtggtggccatgggagtcagcgacaagcgggatattagccggttcctggagagcaaccccgtgatgatcgatgccaaggaagtgagcgccgcccaccgggccagatacttctggggcaatctgcctggcatgaacagacccctggccagcaccgtgaacgacaagctggagctgcaggagtgcctggagcacggccggatcgccaagttcagcaaggtgagaaccatcaccacccgaagcaacagcatcaaacaaggcaaggaccagcactttcctgtgttcatgaacgagaaggaggacatcctgtggtgtaccgagatggagagagtgttcgggttcccagtccactacacagatgtcagcaacatgtctagactggccagacagagactgctgggaagaagctggtccgtccctgtgatcagacacctgttcgcccctctgaaggagtacttcgcctgcgtgagcagcggcaacagcaacgccaacagccggggccccagcttctctagcggcctggtgccactgtccctgagagggagccacatgggccccatggagatctacaaaaccgtgagcgcctggaagcggcagcctgtgcgcgtgctgagcctgtttcggaatatcgataaagtcctgaaaagcctgggattcctggagagcggctctggctccggcggtggcaccctgaagtacgtggaggatgtgacaaacgtggtcagacgggatgtggagaagtggggccccttcgatctggtgtacggcagcacccaacccctgggcagctcttgtgaccggtgccctggctggtacatgtttcagttccaccggatcctgcagtacgccctgccgagacaggagtcccagcggccattcttttggattttcatggacaacttgctgctgaccgaggatgaccaggaaactaccactcggttcctgcagaccgaagccgtgaccctgcaggacgtgagaggccgggactaccagaacgccatgcgggtgtggtccaacatccctggactgaaaagcaagcacgcacctctgacccctaaagaagaggagtacctgcaggcccaggtgcggagcagaagcaagctggacgcccctaaggtggatctgctggtgaagaattgcctcctgcccctgagagagtacttcaagtatttcagccagaatagtctgcccctgggcggcccaagcagcggcgcccctcctcccagcggcggcagcccagccggctccccaacctctaccgaggagggcacctctgagtccgccacccccgagagcggccctggcacctccaccgagcccagcgagggcagcgcacccggcagccctgccggcagccccacctccacagaggagggaaccagcaccgagcccagcgaaggcagcgccccaggcaccagcaccgagcctagtgagggcggctctggcggcggcagcgcccaggagattaaacggatcaacaagatcagaagaagacttgtgaaagacagcaacaccaagaaggccggcaagacaggccccatgaaaaccctgctggttagagtgatgacacccgatctgagagagcggctggaaaacctgagaaagaagcctgaaaatatcccccagcccatcagcaatacatctagagccaacctgaataagctgctgaccgattacaccgaaatgaagaaggcgatcctgcatgtgtactgggaagagttccagaaggaccctgtgggcctgatgagccgggtggcccagcctgccagcaagaagatcgatcagaacaagctgaaacctgagatggacgagaagggcaacctgaccaccgccggctttgcctgctctcagtgtggccagcccctgttcgtgtacaagctggagcaggtgtctgagaagggcaaggcttacaccaactacttcggacggtgcaatgtggccgagcacgaaaagctgatcctgctggcccagctgaagcccgagaaggatagcgacgaagccgtgacatatagcctgggaaagtttgggcagagggccctggatttctacagcattcatgtgaccaaggagtccacccaccccgtgaagcccctggcccagatcgccggaaacagatacgcctccggacctgtgggaaaggccctgagcgacgcatgtatgggcacaatcgcctccttcctgtctaagtaccaggacatcatcatcgaacaccagaaggtggtgaagggcaaccagaagagactggagagcctgcgggagctggccggcaaggaaaacctggaataccctagcgtgaccctgccacctcagcctcacaccaaggagggcgttgatgcctacaacgaagtgatcgcccgggtgcgaatgtgggtgaacctgaacctgtggcagaagctgaagctaagcagagatgatgccaagcctctgctgagactgaagggattcccttcctttcctctggtcgagagacaggccaacgaagtggactggtgggacatggtgtgtaacgtgaagaagctgatcaacgagaaaaaggaggatggcaaggtgttttggcagaatctggctggctacaagagacaggaagccctgagaccatacctgagcagcgaggaagatcggaagaagggaaagaaattcgctcggtaccagctgggcgacctgctgctgcacctggaaaagaagcacggcgaggactggggaaaggtgtacgacgaggcctgggagcggattgacaagaaagtggaaggcctgagcaagcacatcaagctggaagaggaacggagaagcgaggacgcccagagcaaggccgccctgaccgactggctgcgggctaaggccagcttcgtgatcgagggcctgaaggaggccgacaaggacgagttctgcagatgcgagctgaagctgcagaagtggtacggggacctgcggggaaagcccttcgccatcgaagccgagaacagcatcctggacatcagcggcttcagcaagcagtacaactgtgccttcatctggcagaaggacggcgtgaagaagctgaacctgtacctgatcatcaactacttcaagggcggcaagctgcggttcaagaagatcaaacctgaagccttcgaagccaacagattctacaccgtgatcaacaaaaagagcggcgagatcgtgcccatggaggtgaacttcaacttcgacgaccccaacctgatcatcctgcctctggcctttggcaagagacagggcagagaattcatctggaacgacctgctgtccctggaaaccggcagcctgaagctggccaacggaagagtgatcgagaagacactgtacaacagaagaacccggcaggatgagcctgccctgttcgtggccctgaccttcgagcggcgggaggtcctggactcctccaatatcaaaccaatgaacctgatcggcgtggcaagaggcgaaaacatccccgccgtgatcgccctgaccgaccccgagggctgcccactgagccggtttaaggatagcctgggaaacccaacccacatcctgagaatcggcgagagctataaggagaagcagcggaccatccaggccaagaaggaggtggagcagcggagagccggcggctacagccggaagtacgccagcaaagccaagaatctggcagacgatatggtgagaaacaccgctagagatctgctgtactacgccgtgacccaggatgccatgctgatcttcgccaacctgagccggggcttcggccggcagggcaagcggaccttcatggccgagagacagtacacacggatggaggactggctgaccgccaagctggcctacgagggcctgagcaagacctacctgtccaagacactggcccagtacacctccaagacatgcagcaactgtgggtttaccatcaccagcgccgactacgacagggtgctggagaagctgaagaagacagcaacaggctggatgaccacaattaacggcaaggagctgaaggtggagggccagattacctactacaacagatacaagagacagaacgtagtcaaggacctgtccgtcgagctggatagactgagcgaagaatctgtgaacaacgacatctcctcctggacaaagggcagaagcggagaagctctgagcctcctgaagaaaagattctcccatagacccgtgcaggagaagttcgtgtgcctgaactgcggcttcgagacacacgcagccgagcaagccgccctgaacatcgccagatcctggctgttcctgcggagccaggagtacaagaaataccagacaaacaagacaaccggcaacaccgataagagagccttcgtcgagacctggcagtccttttaccggaagaagcttaaggaggtgtggaaacctgccgtgcggtctggcggatctggcggaggctccacaagcatgggcgagcccctggagttcagggacgtggccatcgagttcagcctggaggagtggcactgcctggacaccgcccagaggaacctgtacagggacgtgatgctggagaactacaggaacctggtgttcctgggcatcgccgtgagcaagcccgacctgatcacctggctggagcagggcaagaagcccctgaccgtgaagggccacgagatgatcgccaccccccccggcaggtgcaagaccagccccaagaaaaagagaaaagtctaagctgccttctgcggggcttgccttctggccatgcccttcttctctcccttgcacctgtacctcttggtctttgaataaagcctgagtaggaaggctagcaaaaaaaaaaaaaaaaaaaaaaaaaaaaaaaaaaaaaaaaaaaaaaaaaaaaaaaaaaaaaaaaaaaaaaaaaaaaaaaa

SEQ ID NO: 4086 - RNA, 5419 nt, synthetic construct
  source 1..5419: mol_type = other RNA
aggaaataagagagaaaagaagagtaagaagaaatataagagccaccatggcccctaagaagaagcgtaaagtgagccgggtgaacggcagcggcagcggcggcggcatgaaccacgaccaggagttcgacccccctaaggtgtaccctcccgtccccgccgagaagagaaagcccatccgggtcctgagcctgttcgatggcatcgccaccggtctgctggtgctgaaggacctgggcatccaggtggataggtacattgcctccgaggtgtgcgaggactccatcaccgtgggaatggtgcgtcatcagggcaagatcatgtacgtgggcgacgtgcggagcgtgacacagaagcatatccaggagtggggccctttcgacctggtgatcggcggcagcccttgcaatgacctgagcatcgtgaacccagcccggaagggcctgtacgagggaaccggcagactgttcttcgagttttacagactgctgcacgacgcccggcctaaggaaggcgacgaccggcccttcttttggctgttcgagaatgtggtggccatgggagtcagcgacaagcgggatattagccggttcctggagagcaaccccgtgatgatcgatgccaaggaagtgagcgccgcccaccgggccagatacttctggggcaatctgcctggcatgaacagacccctggccagcaccgtgaacgacaagctggagctgcaggagtgcctggagcacggccggatcgccaagttcagcaaggtgagaaccatcaccacccgaagcaacagcatcaaacaaggcaaggaccagcactttcctgtgttcatgaacgagaaggaggacatcctgtggtgtaccgagatggagagagtgttcgggttcccagtccactacacagatgtcagcaacatgtctagactggccagacagagactgctgggaagaagctggtccgtccctgtgatcagacacctgttcgcccctctgaaggagtacttcgcctgcgtgagcagcggcaacagcaacgccaacagccggggccccagcttctctagcggcctggtgccactgtccctgagagggagccacatgggccccatggagatctacaaaaccgtgagcgcctggaagcggcagcctgtgcgcgtgctgagcctgtttcggaatatcgataaagtcctgaaaagcctgggattcctggagagcggctctggctccggcggtggcaccctgaagtacgtggaggatgtgacaaacgtggtcagacgggatgtggagaagtggggccccttcgatctggtgtacggcagcacccaacccctgggcagctcttgtgaccggtgccctggctggtacatgtttcagttccaccggatcctgcagtacgccctgccgagacaggagtcccagcggccattcttttggattttcatggacaacttgctgctgaccgaggatgaccaggaaactaccactcggttcctgcagaccgaagccgtgaccctgcaggacgtgagaggccgggactaccagaacgccatgcgggtgtggtccaacatccctggactgaaaagcaagcacgcacctctgacccctaaagaagaggagtacctgcaggcccaggtgcggagcagaagcaagctggacgcccctaaggtggatctgctggtgaagaattgcctcctgcccctgagagagtacttcaagtatttcagccagaatagtctgcccctgggcggcccaagcagcggcgcccctcctcccagcggcggcagcccagccggctccccaacctctaccgaggagggcacctctgagtccgccacccccgagagcggccctggcacctccaccgagcccagcgagggcagcgcacccggcagccctgccggcagccccacctccacagaggagggaaccagcaccgagcccagcgaaggcagcgccccaggcaccagcaccgagcctagtgagggcggctctggcggcggcagcgcccaggagattaaacggatcaacaagatcagaagaagacttgtgaaagacagcaacaccaagaaggccggcaagacaggccccatgaaaaccctgctggttagagtgatgacacccgatctgagagagcggctggaaaacctgagaaagaagcctgaaaatatcccccagcccatcagcaatacatctagagccaacctgaataagctgctgaccgattacaccgaaatgaagaaggcgatcctgcatgtgtactgggaagagttccagaaggaccctgtgggcctgatgagccgggtggcccagcctgccagcaagaagatcgatcagaacaagctgaaacctgagatggacgagaagggcaacctgaccaccgccggctttgcctgctctcagtgtggccagcccctgttcgtgtacaagctggagcaggtgtctgagaagggcaaggcttacaccaactacttcggacggtgcaatgtggccgagcacgaaaagctgatcctgctggcccagctgaagcccgagaaggatagcgacgaagccgtgacatatagcctgggaaagtttgggcagagggccctggatttctacagcattcatgtgaccaaggagtccacccaccccgtgaagcccctggcccagatcgccggaaacagatacgcctccggacctgtgggaaaggccctgagcgacgcatgtatgggcacaatcgcctccttcctgtctaagtaccaggacatcatcatcgaacaccagaaggtggtgaagggcaaccagaagagactggagagcctgcgggagctggccggcaaggaaaacctggaataccctagcgtgaccctgccacctcagcctcacaccaaggagggcgttgatgcctacaacgaagtgatcgcccgggtgcgaatgtgggtgaacctgaacctgtggcagaagctgaagctaagcagagatgatgccaagcctctgctgagactgaagggattcccttcctttcctctggtcgagagacaggccaacgaagtggactggtgggacatggtgtgtaacgtgaagaagctgatcaacgagaaaaaggaggatggcaaggtgttttggcagaatctggctggctacaagagacaggaagccctgagaccatacctgagcagcgaggaagatcggaagaagggaaagaaattcgctcggtaccagctgggcgacctgctgctgcacctggaaaagaagcacggcgaggactggggaaaggtgtacgacgaggcctgggagcggattgacaagaaagtggaaggcctgagcaagcacatcaagctggaagaggaacggagaagcgaggacgcccagagcaaggccgccctgaccgactggctgcgggctaaggccagcttcgtgatcgagggcctgaaggaggccgacaaggacgagttctgcagatgcgagctgaagctgcagaagtggtacggggacctgcggggaaagcccttcgccatcgaagccgagaacagcatcctggacatcagcggcttcagcaagcagtacaactgtgccttcatctggcagaaggacggcgtgaagaagctgaacctgtacctgatcatcaactacttcaagggcggcaagctgcggttcaagaagatcaaacctgaagccttcgaagccaacagattctacaccgtgatcaacaaaaagagcggcgagatcgtgcccatggaggtgaacttcaacttcgacgaccccaacctgatcatcctgcctctggcctttggcaagagacagggcagagaattcatctggaacgacctgctgtccctggaaaccggcagcctgaagctggccaacggaagagtgatcgagaagacactgtacaacagaagaacccggcaggatgagcctgccctgttcgtggccctgaccttcgagcggcgggaggtcctggactcctccaatatcaaaccaatgaacctgatcggcgtggcaagaggcgaaaacatccccgccgtgatcgccctgaccgaccccgagggctgcccactgagccggtttaaggatagcctgggaaacccaacccacatcctgagaatcggcgagagctataaggagaagcagcggaccatccaggccaagaaggaggtggagcagcggagagccggcggctacagccggaagtacgccagcaaagccaagaatctggcagacgatatggtgagaaacaccgctagagatctgctgtactacgccgtgacccaggatgccatgctgatcttcgccaacctgagccggggcttcggccggcagggcaagcggaccttcatggccgagagacagtacacacggatggaggactggctgaccgccaagctggcctacgagggcctgagcaagacctacctgtccaagacactggcccagtacacctccaagacatgcagcaactgtgggtttaccatcaccagcgccgactacgacagggtgctggagaagctgaagaagacagcaacaggctggatgaccacaattaacggcaaggagctgaaggtggagggccagattacctactacaacagatacaagagacagaacgtagtcaaggacctgtccgtcgagctggatagactgagcgaagaatctgtgaacaacgacatctcctcctggacaaagggcagaagcggagaagctctgagcctcctgaagaaaagattctcccatagacccgtgcaggagaagttcgtgtgcctgaactgcggcttcgagacacacgcagccgagcaagccgccctgaacatcgccagatcctggctgttcctgcggagccaggagtacaagaaataccagacaaacaagacaaccggcaacaccgataagagagccttcgtcgagacctggcagtccttttaccggaagaagcttaaggaggtgtggaaacctgccgtgcggtctggcggatctggcggaggctccacaagccccggccaggaggtggtgaccttcaaggacatggccgtggacttcaccagggaggagtggaggctgctgacccccccccagaaggagctgtacaaggaggtgatgctggagaacgccaggaacctgctgagcgtgggcttcgccgtgcccggcgacgtgatcagctacctggagcagagggaggccccctggctgctggagcaggagggcctgaggagctgcagccccggcgacatcagccccaccagccccaagaaaaagagaaaagtctaagctgccttctgcggggcttgccttctggccatgcccttcttctctcccttgcacctgtacctcttggtctttgaataaagcctgagtaggaaggctagcaaaaaaaaaaaaaaaaaaaaaaaaaaaaaaaaaaaaaaaaaaaaaaaaaaaaaaaaaaaaaaaaaaaaaaaaaaaaaaaa

SEQ ID NO: 4087 - RNA, 5419 nt, synthetic construct
  source 1..5419: mol_type = other RNA
aggaaataagagagaaaagaagagtaagaagaaatataagagccaccatggcccctaagaagaagcgtaaagtgagccgggtgaacggcagcggcagcggcggcggcatgaaccacgaccaggagttcgacccccctaaggtgtaccctcccgtccccgccgagaagagaaagcccatccgggtcctgagcctgttcgatggcatcgccaccggtctgctggtgctgaaggacctgggcatccaggtggataggtacattgcctccgaggtgtgcgaggactccatcaccgtgggaatggtgcgtcatcagggcaagatcatgtacgtgggcgacgtgcggagcgtgacacagaagcatatccaggagtggggccctttcgacctggtgatcggcggcagcccttgcaatgacctgagcatcgtgaacccagcccggaagggcctgtacgagggaaccggcagactgttcttcgagttttacagactgctgcacgacgcccggcctaaggaaggcgacgaccggcccttcttttggctgttcgagaatgtggtggccatgggagtcagcgacaagcgggatattagccggttcctggagagcaaccccgtgatgatcgatgccaaggaagtgagcgccgcccaccgggccagatacttctggggcaatctgcctggcatgaacagacccctggccagcaccgtgaacgacaagctggagctgcaggagtgcctggagcacggccggatcgccaagttcagcaaggtgagaaccatcaccacccgaagcaacagcatcaaacaaggcaaggaccagcactttcctgtgttcatgaacgagaaggaggacatcctgtggtgtaccgagatggagagagtgttcgggttcccagtccactacacagatgtcagcaacatgtctagactggccagacagagactgctgggaagaagctggtccgtccctgtgatcagacacctgttcgcccctctgaaggagtacttcgcctgcgtgagcagcggcaacagcaacgccaacagccggggccccagcttctctagcggcctggtgccactgtccctgagagggagccacatgggccccatggagatctacaaaaccgtgagcgcctggaagcggcagcctgtgcgcgtgctgagcctgtttcggaatatcgataaagtcctgaaaagcctgggattcctggagagcggctctggctccggcggtggcaccctgaagtacgtggaggatgtgacaaacgtggtcagacgggatgtggagaagtggggccccttcgatctggtgtacggcagcacccaacccctgggcagctcttgtgaccggtgccctggctggtacatgtttcagttccaccggatcctgcagtacgccctgccgagacaggagtcccagcggccattcttttggattttcatggacaacttgctgctgaccgaggatgaccaggaaactaccactcggttcctgcagaccgaagccgtgaccctgcaggacgtgagaggccgggactaccagaacgccatgcgggtgtggtccaacatccctggactgaaaagcaagcacgcacctctgacccctaaagaagaggagtacctgcaggcccaggtgcggagcagaagcaagctggacgcccctaaggtggatctgctggtgaagaattgcctcctgcccctgagagagtacttcaagtatttcagccagaatagtctgcccctgggcggcccaagcagcggcgcccctcctcccagcggcggcagcccagccggctccccaacctctaccgaggagggcacctctgagtccgccacccccgagagcggccctggcacctccaccgagcccagcgagggcagcgcacccggcagccctgccggcagccccacctccacagaggagggaaccagcaccgagcccagcgaaggcagcgccccaggcaccagcaccgagcctagtgagggcggctctggcggcggcagcgcccaggagattaaacggatcaacaagatcagaagaagacttgtgaaagacagcaacaccaagaaggccggcaagacaggccccatgaaaaccctgctggttagagtgatgacacccgatctgagagagcggctggaaaacctgagaaagaagcctgaaaatatcccccagcccatcagcaatacatctagagccaacctgaataagctgctgaccgattacaccgaaatgaagaaggcgatcctgcatgtgtactgggaagagttccagaaggaccctgtgggcctgatgagccgggtggcccagcctgccagcaagaagatcgatcagaacaagctgaaacctgagatggacgagaagggcaacctgaccaccgccggctttgcctgctctcagtgtggccagcccctgttcgtgtacaagctggagcaggtgtctgagaagggcaaggcttacaccaactacttcggacggtgcaatgtggccgagcacgaaaagctgatcctgctggcccagctgaagcccgagaaggatagcgacgaagccgtgacatatagcctgggaaagtttgggcagagggccctggatttctacagcattcatgtgaccaaggagtccacccaccccgtgaagcccctggcccagatcgccggaaacagatacgcctccggacctgtgggaaaggccctgagcgacgcatgtatgggcacaatcgcctccttcctgtctaagtaccaggacatcatcatcgaacaccagaaggtggtgaagggcaaccagaagagactggagagcctgcgggagctggccggcaaggaaaacctggaataccctagcgtgaccctgccacctcagcctcacaccaaggagggcgttgatgcctacaacgaagtgatcgcccgggtgcgaatgtgggtgaacctgaacctgtggcagaagctgaagctaagcagagatgatgccaagcctctgctgagactgaagggattcccttcctttcctctggtcgagagacaggccaacgaagtggactggtgggacatggtgtgtaacgtgaagaagctgatcaacgagaaaaaggaggatggcaaggtgttttggcagaatctggctggctacaagagacaggaagccctgagaccatacctgagcagcgaggaagatcggaagaagggaaagaaattcgctcggtaccagctgggcgacctgctgctgcacctggaaaagaagcacggcgaggactggggaaaggtgtacgacgaggcctgggagcggattgacaagaaagtggaaggcctgagcaagcacatcaagctggaagaggaacggagaagcgaggacgcccagagcaaggccgccctgaccgactggctgcgggctaaggccagcttcgtgatcgagggcctgaaggaggccgacaaggacgagttctgcagatgcgagctgaagctgcagaagtggtacggggacctgcggggaaagcccttcgccatcgaagccgagaacagcatcctggacatcagcggcttcagcaagcagtacaactgtgccttcatctggcagaaggacggcgtgaagaagctgaacctgtacctgatcatcaactacttcaagggcggcaagctgcggttcaagaagatcaaacctgaagccttcgaagccaacagattctacaccgtgatcaacaaaaagagcggcgagatcgtgcccatggaggtgaacttcaacttcgacgaccccaacctgatcatcctgcctctggcctttggcaagagacagggcagagaattcatctggaacgacctgctgtccctggaaaccggcagcctgaagctggccaacggaagagtgatcgagaagacactgtacaacagaagaacccggcaggatgagcctgccctgttcgtggccctgaccttcgagcggcgggaggtcctggactcctccaatatcaaaccaatgaacctgatcggcgtggcaagaggcgaaaacatccccgccgtgatcgccctgaccgaccccgagggctgcccactgagccggtttaaggatagcctgggaaacccaacccacatcctgagaatcggcgagagctataaggagaagcagcggaccatccaggccaagaaggaggtggagcagcggagagccggcggctacagccggaagtacgccagcaaagccaagaatctggcagacgatatggtgagaaacaccgctagagatctgctgtactacgccgtgacccaggatgccatgctgatcttcgccaacctgagccggggcttcggccggcagggcaagcggaccttcatggccgagagacagtacacacggatggaggactggctgaccgccaagctggcctacgagggcctgagcaagacctacctgtccaagacactggcccagtacacctccaagacatgcagcaactgtgggtttaccatcaccagcgccgactacgacagggtgctggagaagctgaagaagacagcaacaggctggatgaccacaattaacggcaaggagctgaaggtggagggccagattacctactacaacagatacaagagacagaacgtagtcaaggacctgtccgtcgagctggatagactgagcgaagaatctgtgaacaacgacatctcctcctggacaaagggcagaagcggagaagctctgagcctcctgaagaaaagattctcccatagacccgtgcaggagaagttcgtgtgcctgaactgcggcttcgagacacacgcagccgagcaagccgccctgaacatcgccagatcctggctgttcctgcggagccaggagtacaagaaataccagacaaacaagacaaccggcaacaccgataagagagccttcgtcgagacctggcagtccttttaccggaagaagcttaaggaggtgtggaaacctgccgtgcggtctggcggatctggcggaggctccacaagcaagcccaggaccgtgagcttcgccgacgtggccgtgtacttcagcagggaggagtggggctgcctgaggcccgcccagagggccctgtacagggacgtgatgagggagacctacggccacctgggcgccctgggcgtgggcggcagcaagcccgccctgatcagctgggtggaggaggaggccgagctgtgggaccccgccgcccaggaccccgaggtgaccaagtgccccaccgagaccgacaccagccccaagaaaaagagaaaagtctaagctgccttctgcggggcttgccttctggccatgcccttcttctctcccttgcacctgtacctcttggtctttgaataaagcctgagtaggaaggctagcaaaaaaaaaaaaaaaaaaaaaaaaaaaaaaaaaaaaaaaaaaaaaaaaaaaaaaaaaaaaaaaaaaaaaaaaaaaaaaaa

SEQ ID NO: 4088 - RNA, 5419 nt, synthetic construct
  source 1..5419: mol_type = other RNA
aggaaataagagagaaaagaagagtaagaagaaatataagagccaccatggcccctaagaagaagcgtaaagtgagccgggtgaacggcagcggcagcggcggcggcatgaaccacgaccaggagttcgacccccctaaggtgtaccctcccgtccccgccgagaagagaaagcccatccgggtcctgagcctgttcgatggcatcgccaccggtctgctggtgctgaaggacctgggcatccaggtggataggtacattgcctccgaggtgtgcgaggactccatcaccgtgggaatggtgcgtcatcagggcaagatcatgtacgtgggcgacgtgcggagcgtgacacagaagcatatccaggagtggggccctttcgacctggtgatcggcggcagcccttgcaatgacctgagcatcgtgaacccagcccggaagggcctgtacgagggaaccggcagactgttcttcgagttttacagactgctgcacgacgcccggcctaaggaaggcgacgaccggcccttcttttggctgttcgagaatgtggtggccatgggagtcagcgacaagcgggatattagccggttcctggagagcaaccccgtgatgatcgatgccaaggaagtgagcgccgcccaccgggccagatacttctggggcaatctgcctggcatgaacagacccctggccagcaccgtgaacgacaagctggagctgcaggagtgcctggagcacggccggatcgccaagttcagcaaggtgagaaccatcaccacccgaagcaacagcatcaaacaaggcaaggaccagcactttcctgtgttcatgaacgagaaggaggacatcctgtggtgtaccgagatggagagagtgttcgggttcccagtccactacacagatgtcagcaacatgtctagactggccagacagagactgctgggaagaagctggtccgtccctgtgatcagacacctgttcgcccctctgaaggagtacttcgcctgcgtgagcagcggcaacagcaacgccaacagccggggccccagcttctctagcggcctggtgccactgtccctgagagggagccacatgggccccatggagatctacaaaaccgtgagcgcctggaagcggcagcctgtgcgcgtgctgagcctgtttcggaatatcgataaagtcctgaaaagcctgggattcctggagagcggctctggctccggcggtggcaccctgaagtacgtggaggatgtgacaaacgtggtcagacgggatgtggagaagtggggccccttcgatctggtgtacggcagcacccaacccctgggcagctcttgtgaccggtgccctggctggtacatgtttcagttccaccggatcctgcagtacgccctgccgagacaggagtcccagcggccattcttttggattttcatggacaacttgctgctgaccgaggatgaccaggaaactaccactcggttcctgcagaccgaagccgtgaccctgcaggacgtgagaggccgggactaccagaacgccatgcgggtgtggtccaacatccctggactgaaaagcaagcacgcacctctgacccctaaagaagaggagtacctgcaggcccaggtgcggagcagaagcaagctggacgcccctaaggtggatctgctggtgaagaattgcctcctgcccctgagagagtacttcaagtatttcagccagaatagtctgcccctgggcggcccaagcagcggcgcccctcctcccagcggcggcagcccagccggctccccaacctctaccgaggagggcacctctgagtccgccacccccgagagcggccctggcacctccaccgagcccagcgagggcagcgcacccggcagccctgccggcagccccacctccacagaggagggaaccagcaccgagcccagcgaaggcagcgccccaggcaccagcaccgagcctagtgagggcggctctggcggcggcagcgcccaggagattaaacggatcaacaagatcagaagaagacttgtgaaagacagcaacaccaagaaggccggcaagacaggccccatgaaaaccctgctggttagagtgatgacacccgatctgagagagcggctggaaaacctgagaaagaagcctgaaaatatcccccagcccatcagcaatacatctagagccaacctgaataagctgctgaccgattacaccgaaatgaagaaggcgatcctgcatgtgtactgggaagagttccagaaggaccctgtgggcctgatgagccgggtggcccagcctgccagcaagaagatcgatcagaacaagctgaaacctgagatggacgagaagggcaacctgaccaccgccggctttgcctgctctcagtgtggccagcccctgttcgtgtacaagctggagcaggtgtctgagaagggcaaggcttacaccaactacttcggacggtgcaatgtggccgagcacgaaaagctgatcctgctggcccagctgaagcccgagaaggatagcgacgaagccgtgacatatagcctgggaaagtttgggcagagggccctggatttctacagcattcatgtgaccaaggagtccacccaccccgtgaagcccctggcccagatcgccggaaacagatacgcctccggacctgtgggaaaggccctgagcgacgcatgtatgggcacaatcgcctccttcctgtctaagtaccaggacatcatcatcgaacaccagaaggtggtgaagggcaaccagaagagactggagagcctgcgggagctggccggcaaggaaaacctggaataccctagcgtgaccctgccacctcagcctcacaccaaggagggcgttgatgcctacaacgaagtgatcgcccgggtgcgaatgtgggtgaacctgaacctgtggcagaagctgaagctaagcagagatgatgccaagcctctgctgagactgaagggattcccttcctttcctctggtcgagagacaggccaacgaagtggactggtgggacatggtgtgtaacgtgaagaagctgatcaacgagaaaaaggaggatggcaaggtgttttggcagaatctggctggctacaagagacaggaagccctgagaccatacctgagcagcgaggaagatcggaagaagggaaagaaattcgctcggtaccagctgggcgacctgctgctgcacctggaaaagaagcacggcgaggactggggaaaggtgtacgacgaggcctgggagcggattgacaagaaagtggaaggcctgagcaagcacatcaagctggaagaggaacggagaagcgaggacgcccagagcaaggccgccctgaccgactggctgcgggctaaggccagcttcgtgatcgagggcctgaaggaggccgacaaggacgagttctgcagatgcgagctgaagctgcagaagtggtacggggacctgcggggaaagcccttcgccatcgaagccgagaacagcatcctggacatcagcggcttcagcaagcagtacaactgtgccttcatctggcagaaggacggcgtgaagaagctgaacctgtacctgatcatcaactacttcaagggcggcaagctgcggttcaagaagatcaaacctgaagccttcgaagccaacagattctacaccgtgatcaacaaaaagagcggcgagatcgtgcccatggaggtgaacttcaacttcgacgaccccaacctgatcatcctgcctctggcctttggcaagagacagggcagagaattcatctggaacgacctgctgtccctggaaaccggcagcctgaagctggccaacggaagagtgatcgagaagacactgtacaacagaagaacccggcaggatgagcctgccctgttcgtggccctgaccttcgagcggcgggaggtcctggactcctccaatatcaaaccaatgaacctgatcggcgtggcaagaggcgaaaacatccccgccgtgatcgccctgaccgaccccgagggctgcccactgagccggtttaaggatagcctgggaaacccaacccacatcctgagaatcggcgagagctataaggagaagcagcggaccatccaggccaagaaggaggtggagcagcggagagccggcggctacagccggaagtacgccagcaaagccaagaatctggcagacgatatggtgagaaacaccgctagagatctgctgtactacgccgtgacccaggatgccatgctgatcttcgccaacctgagccggggcttcggccggcagggcaagcggaccttcatggccgagagacagtacacacggatggaggactggctgaccgccaagctggcctacgagggcctgagcaagacctacctgtccaagacactggcccagtacacctccaagacatgcagcaactgtgggtttaccatcaccagcgccgactacgacagggtgctggagaagctgaagaagacagcaacaggctggatgaccacaattaacggcaaggagctgaaggtggagggccagattacctactacaacagatacaagagacagaacgtagtcaaggacctgtccgtcgagctggatagactgagcgaagaatctgtgaacaacgacatctcctcctggacaaagggcagaagcggagaagctctgagcctcctgaagaaaagattctcccatagacccgtgcaggagaagttcgtgtgcctgaactgcggcttcgagacacacgcagccgagcaagccgccctgaacatcgccagatcctggctgttcctgcggagccaggagtacaagaaataccagacaaacaagacaaccggcaacaccgataagagagccttcgtcgagacctggcagtccttttaccggaagaagcttaaggaggtgtggaaacctgccgtgcggtctggcggatctggcggaggctccacaagcggccccctgaccttcagggacgtgaccatcgagttcagccacgaggagtggaagtgcctggaccccgcccagaaggccctgtacaaggacgtgatgctggagaactacaggaacctggtgttcctgggcatcacccccaagtgcaccaccaaggagctgccccccatcggcaacaacaacaccggcgagaagttcaggaccgtgaccctggagaggcacgagtgctacgacatcgaggacatcaccagccccaagaaaaagagaaaagtctaagctgccttctgcggggcttgccttctggccatgcccttcttctctcccttgcacctgtacctcttggtctttgaataaagcctgagtaggaaggctagcaaaaaaaaaaaaaaaaaaaaaaaaaaaaaaaaaaaaaaaaaaaaaaaaaaaaaaaaaaaaaaaaaaaaaaaaaaaaaaaa

SEQ ID NO: 4089 - RNA, 5419 nt, synthetic construct
  source 1..5419: mol_type = other RNA
aggaaataagagagaaaagaagagtaagaagaaatataagagccaccatggcccctaagaagaagcgtaaagtgagccgggtgaacggcagcggcagcggcggcggcatgaaccacgaccaggagttcgacccccctaaggtgtaccctcccgtccccgccgagaagagaaagcccatccgggtcctgagcctgttcgatggcatcgccaccggtctgctggtgctgaaggacctgggcatccaggtggataggtacattgcctccgaggtgtgcgaggactccatcaccgtgggaatggtgcgtcatcagggcaagatcatgtacgtgggcgacgtgcggagcgtgacacagaagcatatccaggagtggggccctttcgacctggtgatcggcggcagcccttgcaatgacctgagcatcgtgaacccagcccggaagggcctgtacgagggaaccggcagactgttcttcgagttttacagactgctgcacgacgcccggcctaaggaaggcgacgaccggcccttcttttggctgttcgagaatgtggtggccatgggagtcagcgacaagcgggatattagccggttcctggagagcaaccccgtgatgatcgatgccaaggaagtgagcgccgcccaccgggccagatacttctggggcaatctgcctggcatgaacagacccctggccagcaccgtgaacgacaagctggagctgcaggagtgcctggagcacggccggatcgccaagttcagcaaggtgagaaccatcaccacccgaagcaacagcatcaaacaaggcaaggaccagcactttcctgtgttcatgaacgagaaggaggacatcctgtggtgtaccgagatggagagagtgttcgggttcccagtccactacacagatgtcagcaacatgtctagactggccagacagagactgctgggaagaagctggtccgtccctgtgatcagacacctgttcgcccctctgaaggagtacttcgcctgcgtgagcagcggcaacagcaacgccaacagccggggccccagcttctctagcggcctggtgccactgtccctgagagggagccacatgggccccatggagatctacaaaaccgtgagcgcctggaagcggcagcctgtgcgcgtgctgagcctgtttcggaatatcgataaagtcctgaaaagcctgggattcctggagagcggctctggctccggcggtggcaccctgaagtacgtggaggatgtgacaaacgtggtcagacgggatgtggagaagtggggccccttcgatctggtgtacggcagcacccaacccctgggcagctcttgtgaccggtgccctggctggtacatgtttcagttccaccggatcctgcagtacgccctgccgagacaggagtcccagcggccattcttttggattttcatggacaacttgctgctgaccgaggatgaccaggaaactaccactcggttcctgcagaccgaagccgtgaccctgcaggacgtgagaggccgggactaccagaacgccatgcgggtgtggtccaacatccctggactgaaaagcaagcacgcacctctgacccctaaagaagaggagtacctgcaggcccaggtgcggagcagaagcaagctggacgcccctaaggtggatctgctggtgaagaattgcctcctgcccctgagagagtacttcaagtatttcagccagaatagtctgcccctgggcggcccaagcagcggcgcccctcctcccagcggcggcagcccagccggctccccaacctctaccgaggagggcacctctgagtccgccacccccgagagcggccctggcacctccaccgagcccagcgagggcagcgcacccggcagccctgccggcagccccacctccacagaggagggaaccagcaccgagcccagcgaaggcagcgccccaggcaccagcaccgagcctagtgagggcggctctggcggcggcagcgcccaggagattaaacggatcaacaagatcagaagaagacttgtgaaagacagcaacaccaagaaggccggcaagacaggccccatgaaaaccctgctggttagagtgatgacacccgatctgagagagcggctggaaaacctgagaaagaagcctgaaaatatcccccagcccatcagcaatacatctagagccaacctgaataagctgctgaccgattacaccgaaatgaagaaggcgatcctgcatgtgtactgggaagagttccagaaggaccctgtgggcctgatgagccgggtggcccagcctgccagcaagaagatcgatcagaacaagctgaaacctgagatggacgagaagggcaacctgaccaccgccggctttgcctgctctcagtgtggccagcccctgttcgtgtacaagctggagcaggtgtctgagaagggcaaggcttacaccaactacttcggacggtgcaatgtggccgagcacgaaaagctgatcctgctggcccagctgaagcccgagaaggatagcgacgaagccgtgacatatagcctgggaaagtttgggcagagggccctggatttctacagcattcatgtgaccaaggagtccacccaccccgtgaagcccctggcccagatcgccggaaacagatacgcctccggacctgtgggaaaggccctgagcgacgcatgtatgggcacaatcgcctccttcctgtctaagtaccaggacatcatcatcgaacaccagaaggtggtgaagggcaaccagaagagactggagagcctgcgggagctggccggcaaggaaaacctggaataccctagcgtgaccctgccacctcagcctcacaccaaggagggcgttgatgcctacaacgaagtgatcgcccgggtgcgaatgtgggtgaacctgaacctgtggcagaagctgaagctaagcagagatgatgccaagcctctgctgagactgaagggattcccttcctttcctctggtcgagagacaggccaacgaagtggactggtgggacatggtgtgtaacgtgaagaagctgatcaacgagaaaaaggaggatggcaaggtgttttggcagaatctggctggctacaagagacaggaagccctgagaccatacctgagcagcgaggaagatcggaagaagggaaagaaattcgctcggtaccagctgggcgacctgctgctgcacctggaaaagaagcacggcgaggactggggaaaggtgtacgacgaggcctgggagcggattgacaagaaagtggaaggcctgagcaagcacatcaagctggaagaggaacggagaagcgaggacgcccagagcaaggccgccctgaccgactggctgcgggctaaggccagcttcgtgatcgagggcctgaaggaggccgacaaggacgagttctgcagatgcgagctgaagctgcagaagtggtacggggacctgcggggaaagcccttcgccatcgaagccgagaacagcatcctggacatcagcggcttcagcaagcagtacaactgtgccttcatctggcagaaggacggcgtgaagaagctgaacctgtacctgatcatcaactacttcaagggcggcaagctgcggttcaagaagatcaaacctgaagccttcgaagccaacagattctacaccgtgatcaacaaaaagagcggcgagatcgtgcccatggaggtgaacttcaacttcgacgaccccaacctgatcatcctgcctctggcctttggcaagagacagggcagagaattcatctggaacgacctgctgtccctggaaaccggcagcctgaagctggccaacggaagagtgatcgagaagacactgtacaacagaagaacccggcaggatgagcctgccctgttcgtggccctgaccttcgagcggcgggaggtcctggactcctccaatatcaaaccaatgaacctgatcggcgtggcaagaggcgaaaacatccccgccgtgatcgccctgaccgaccccgagggctgcccactgagccggtttaaggatagcctgggaaacccaacccacatcctgagaatcggcgagagctataaggagaagcagcggaccatccaggccaagaaggaggtggagcagcggagagccggcggctacagccggaagtacgccagcaaagccaagaatctggcagacgatatggtgagaaacaccgctagagatctgctgtactacgccgtgacccaggatgccatgctgatcttcgccaacctgagccggggcttcggccggcagggcaagcggaccttcatggccgagagacagtacacacggatggaggactggctgaccgccaagctggcctacgagggcctgagcaagacctacctgtccaagacactggcccagtacacctccaagacatgcagcaactgtgggtttaccatcaccagcgccgactacgacagggtgctggagaagctgaagaagacagcaacaggctggatgaccacaattaacggcaaggagctgaaggtggagggccagattacctactacaacagatacaagagacagaacgtagtcaaggacctgtccgtcgagctggatagactgagcgaagaatctgtgaacaacgacatctcctcctggacaaagggcagaagcggagaagctctgagcctcctgaagaaaagattctcccatagacccgtgcaggagaagttcgtgtgcctgaactgcggcttcgagacacacgcagccgagcaagccgccctgaacatcgccagatcctggctgttcctgcggagccaggagtacaagaaataccagacaaacaagacaaccggcaacaccgataagagagccttcgtcgagacctggcagtccttttaccggaagaagcttaaggaggtgtggaaacctgccgtgcggtctggcggatctggcggaggctccacaagcttccaggagagcgtgaccttcgaggacgtggccgtgtacttcagcgagaacgagtggatcggcctggcccccgcccagagggtgctgtacagggacgtgatgctggagaactacggcgtggtggccagcctggccttccccttccccaagcccgccctgatcagccagctggagaggggcgaggccccctggtgcaaggccccccagggcgccgtggacggcgagtgccccaggggcgtgagcaccagccccaagaaaaagagaaaagtctaagctgccttctgcggggcttgccttctggccatgcccttcttctctcccttgcacctgtacctcttggtctttgaataaagcctgagtaggaaggctagcaaaaaaaaaaaaaaaaaaaaaaaaaaaaaaaaaaaaaaaaaaaaaaaaaaaaaaaaaaaaaaaaaaaaaaaaaaaaaaaa

SEQ ID NO: 4090 - RNA, 5419 nt, synthetic construct
  source 1..5419: mol_type = other RNA
aggaaataagagagaaaagaagagtaagaagaaatataagagccaccatggcccctaagaagaagcgtaaagtgagccgggtgaacggcagcggcagcggcggcggcatgaaccacgaccaggagttcgacccccctaaggtgtaccctcccgtccccgccgagaagagaaagcccatccgggtcctgagcctgttcgatggcatcgccaccggtctgctggtgctgaaggacctgggcatccaggtggataggtacattgcctccgaggtgtgcgaggactccatcaccgtgggaatggtgcgtcatcagggcaagatcatgtacgtgggcgacgtgcggagcgtgacacagaagcatatccaggagtggggccctttcgacctggtgatcggcggcagcccttgcaatgacctgagcatcgtgaacccagcccggaagggcctgtacgagggaaccggcagactgttcttcgagttttacagactgctgcacgacgcccggcctaaggaaggcgacgaccggcccttcttttggctgttcgagaatgtggtggccatgggagtcagcgacaagcgggatattagccggttcctggagagcaaccccgtgatgatcgatgccaaggaagtgagcgccgcccaccgggccagatacttctggggcaatctgcctggcatgaacagacccctggccagcaccgtgaacgacaagctggagctgcaggagtgcctggagcacggccggatcgccaagttcagcaaggtgagaaccatcaccacccgaagcaacagcatcaaacaaggcaaggaccagcactttcctgtgttcatgaacgagaaggaggacatcctgtggtgtaccgagatggagagagtgttcgggttcccagtccactacacagatgtcagcaacatgtctagactggccagacagagactgctgggaagaagctggtccgtccctgtgatcagacacctgttcgcccctctgaaggagtacttcgcctgcgtgagcagcggcaacagcaacgccaacagccggggccccagcttctctagcggcctggtgccactgtccctgagagggagccacatgggccccatggagatctacaaaaccgtgagcgcctggaagcggcagcctgtgcgcgtgctgagcctgtttcggaatatcgataaagtcctgaaaagcctgggattcctggagagcggctctggctccggcggtggcaccctgaagtacgtggaggatgtgacaaacgtggtcagacgggatgtggagaagtggggccccttcgatctggtgtacggcagcacccaacccctgggcagctcttgtgaccggtgccctggctggtacatgtttcagttccaccggatcctgcagtacgccctgccgagacaggagtcccagcggccattcttttggattttcatggacaacttgctgctgaccgaggatgaccaggaaactaccactcggttcctgcagaccgaagccgtgaccctgcaggacgtgagaggccgggactaccagaacgccatgcgggtgtggtccaacatccctggactgaaaagcaagcacgcacctctgacccctaaagaagaggagtacctgcaggcccaggtgcggagcagaagcaagctggacgcccctaaggtggatctgctggtgaagaattgcctcctgcccctgagagagtacttcaagtatttcagccagaatagtctgcccctgggcggcccaagcagcggcgcccctcctcccagcggcggcagcccagccggctccccaacctctaccgaggagggcacctctgagtccgccacccccgagagcggccctggcacctccaccgagcccagcgagggcagcgcacccggcagccctgccggcagccccacctccacagaggagggaaccagcaccgagcccagcgaaggcagcgccccaggcaccagcaccgagcctagtgagggcggctctggcggcggcagcgcccaggagattaaacggatcaacaagatcagaagaagacttgtgaaagacagcaacaccaagaaggccggcaagacaggccccatgaaaaccctgctggttagagtgatgacacccgatctgagagagcggctggaaaacctgagaaagaagcctgaaaatatcccccagcccatcagcaatacatctagagccaacctgaataagctgctgaccgattacaccgaaatgaagaaggcgatcctgcatgtgtactgggaagagttccagaaggaccctgtgggcctgatgagccgggtggcccagcctgccagcaagaagatcgatcagaacaagctgaaacctgagatggacgagaagggcaacctgaccaccgccggctttgcctgctctcagtgtggccagcccctgttcgtgtacaagctggagcaggtgtctgagaagggcaaggcttacaccaactacttcggacggtgcaatgtggccgagcacgaaaagctgatcctgctggcccagctgaagcccgagaaggatagcgacgaagccgtgacatatagcctgggaaagtttgggcagagggccctggatttctacagcattcatgtgaccaaggagtccacccaccccgtgaagcccctggcccagatcgccggaaacagatacgcctccggacctgtgggaaaggccctgagcgacgcatgtatgggcacaatcgcctccttcctgtctaagtaccaggacatcatcatcgaacaccagaaggtggtgaagggcaaccagaagagactggagagcctgcgggagctggccggcaaggaaaacctggaataccctagcgtgaccctgccacctcagcctcacaccaaggagggcgttgatgcctacaacgaagtgatcgcccgggtgcgaatgtgggtgaacctgaacctgtggcagaagctgaagctaagcagagatgatgccaagcctctgctgagactgaagggattcccttcctttcctctggtcgagagacaggccaacgaagtggactggtgggacatggtgtgtaacgtgaagaagctgatcaacgagaaaaaggaggatggcaaggtgttttggcagaatctggctggctacaagagacaggaagccctgagaccatacctgagcagcgaggaagatcggaagaagggaaagaaattcgctcggtaccagctgggcgacctgctgctgcacctggaaaagaagcacggcgaggactggggaaaggtgtacgacgaggcctgggagcggattgacaagaaagtggaaggcctgagcaagcacatcaagctggaagaggaacggagaagcgaggacgcccagagcaaggccgccctgaccgactggctgcgggctaaggccagcttcgtgatcgagggcctgaaggaggccgacaaggacgagttctgcagatgcgagctgaagctgcagaagtggtacggggacctgcggggaaagcccttcgccatcgaagccgagaacagcatcctggacatcagcggcttcagcaagcagtacaactgtgccttcatctggcagaaggacggcgtgaagaagctgaacctgtacctgatcatcaactacttcaagggcggcaagctgcggttcaagaagatcaaacctgaagccttcgaagccaacagattctacaccgtgatcaacaaaaagagcggcgagatcgtgcccatggaggtgaacttcaacttcgacgaccccaacctgatcatcctgcctctggcctttggcaagagacagggcagagaattcatctggaacgacctgctgtccctggaaaccggcagcctgaagctggccaacggaagagtgatcgagaagacactgtacaacagaagaacccggcaggatgagcctgccctgttcgtggccctgaccttcgagcggcgggaggtcctggactcctccaatatcaaaccaatgaacctgatcggcgtggcaagaggcgaaaacatccccgccgtgatcgccctgaccgaccccgagggctgcccactgagccggtttaaggatagcctgggaaacccaacccacatcctgagaatcggcgagagctataaggagaagcagcggaccatccaggccaagaaggaggtggagcagcggagagccggcggctacagccggaagtacgccagcaaagccaagaatctggcagacgatatggtgagaaacaccgctagagatctgctgtactacgccgtgacccaggatgccatgctgatcttcgccaacctgagccggggcttcggccggcagggcaagcggaccttcatggccgagagacagtacacacggatggaggactggctgaccgccaagctggcctacgagggcctgagcaagacctacctgtccaagacactggcccagtacacctccaagacatgcagcaactgtgggtttaccatcaccagcgccgactacgacagggtgctggagaagctgaagaagacagcaacaggctggatgaccacaattaacggcaaggagctgaaggtggagggccagattacctactacaacagatacaagagacagaacgtagtcaaggacctgtccgtcgagctggatagactgagcgaagaatctgtgaacaacgacatctcctcctggacaaagggcagaagcggagaagctctgagcctcctgaagaaaagattctcccatagacccgtgcaggagaagttcgtgtgcctgaactgcggcttcgagacacacgcagccgagcaagccgccctgaacatcgccagatcctggctgttcctgcggagccaggagtacaagaaataccagacaaacaagacaaccggcaacaccgataagagagccttcgtcgagacctggcagtccttttaccggaagaagcttaaggaggtgtggaaacctgccgtgcggtctggcggatctggcggaggctccacaagcaggcccagggccgtgaagttcgccgacgtggccgtgtacttcagccccgaggagtggggctgcctgaggcccgcccagagggccctgtacagggacgtgatgagggagacctacggccacctgggcgccctgggctgcgccggccccaagcccgccctgatcagctggctggagaggaacaccgacgagtgggagcccgccgccctggaccccagggagtgccccaggggcgtgaccgtgcagaccagccccaagaaaaagagaaaagtctaagctgccttctgcggggcttgccttctggccatgcccttcttctctcccttgcacctgtacctcttggtctttgaataaagcctgagtaggaaggctagcaaaaaaaaaaaaaaaaaaaaaaaaaaaaaaaaaaaaaaaaaaaaaaaaaaaaaaaaaaaaaaaaaaaaaaaaaaaaaaaa

SEQ ID NO: 4091 - RNA, 5419 nt, synthetic construct
  source 1..5419: mol_type = other RNA
aggaaataagagagaaaagaagagtaagaagaaatataagagccaccatggcccctaagaagaagcgtaaagtgagccgggtgaacggcagcggcagcggcggcggcatgaaccacgaccaggagttcgacccccctaaggtgtaccctcccgtccccgccgagaagagaaagcccatccgggtcctgagcctgttcgatggcatcgccaccggtctgctggtgctgaaggacctgggcatccaggtggataggtacattgcctccgaggtgtgcgaggactccatcaccgtgggaatggtgcgtcatcagggcaagatcatgtacgtgggcgacgtgcggagcgtgacacagaagcatatccaggagtggggccctttcgacctggtgatcggcggcagcccttgcaatgacctgagcatcgtgaacccagcccggaagggcctgtacgagggaaccggcagactgttcttcgagttttacagactgctgcacgacgcccggcctaaggaaggcgacgaccggcccttcttttggctgttcgagaatgtggtggccatgggagtcagcgacaagcgggatattagccggttcctggagagcaaccccgtgatgatcgatgccaaggaagtgagcgccgcccaccgggccagatacttctggggcaatctgcctggcatgaacagacccctggccagcaccgtgaacgacaagctggagctgcaggagtgcctggagcacggccggatcgccaagttcagcaaggtgagaaccatcaccacccgaagcaacagcatcaaacaaggcaaggaccagcactttcctgtgttcatgaacgagaaggaggacatcctgtggtgtaccgagatggagagagtgttcgggttcccagtccactacacagatgtcagcaacatgtctagactggccagacagagactgctgggaagaagctggtccgtccctgtgatcagacacctgttcgcccctctgaaggagtacttcgcctgcgtgagcagcggcaacagcaacgccaacagccggggccccagcttctctagcggcctggtgccactgtccctgagagggagccacatgggccccatggagatctacaaaaccgtgagcgcctggaagcggcagcctgtgcgcgtgctgagcctgtttcggaatatcgataaagtcctgaaaagcctgggattcctggagagcggctctggctccggcggtggcaccctgaagtacgtggaggatgtgacaaacgtggtcagacgggatgtggagaagtggggccccttcgatctggtgtacggcagcacccaacccctgggcagctcttgtgaccggtgccctggctggtacatgtttcagttccaccggatcctgcagtacgccctgccgagacaggagtcccagcggccattcttttggattttcatggacaacttgctgctgaccgaggatgaccaggaaactaccactcggttcctgcagaccgaagccgtgaccctgcaggacgtgagaggccgggactaccagaacgccatgcgggtgtggtccaacatccctggactgaaaagcaagcacgcacctctgacccctaaagaagaggagtacctgcaggcccaggtgcggagcagaagcaagctggacgcccctaaggtggatctgctggtgaagaattgcctcctgcccctgagagagtacttcaagtatttcagccagaatagtctgcccctgggcggcccaagcagcggcgcccctcctcccagcggcggcagcccagccggctccccaacctctaccgaggagggcacctctgagtccgccacccccgagagcggccctggcacctccaccgagcccagcgagggcagcgcacccggcagccctgccggcagccccacctccacagaggagggaaccagcaccgagcccagcgaaggcagcgccccaggcaccagcaccgagcctagtgagggcggctctggcggcggcagcgcccaggagattaaacggatcaacaagatcagaagaagacttgtgaaagacagcaacaccaagaaggccggcaagacaggccccatgaaaaccctgctggttagagtgatgacacccgatctgagagagcggctggaaaacctgagaaagaagcctgaaaatatcccccagcccatcagcaatacatctagagccaacctgaataagctgctgaccgattacaccgaaatgaagaaggcgatcctgcatgtgtactgggaagagttccagaaggaccctgtgggcctgatgagccgggtggcccagcctgccagcaagaagatcgatcagaacaagctgaaacctgagatggacgagaagggcaacctgaccaccgccggctttgcctgctctcagtgtggccagcccctgttcgtgtacaagctggagcaggtgtctgagaagggcaaggcttacaccaactacttcggacggtgcaatgtggccgagcacgaaaagctgatcctgctggcccagctgaagcccgagaaggatagcgacgaagccgtgacatatagcctgggaaagtttgggcagagggccctggatttctacagcattcatgtgaccaaggagtccacccaccccgtgaagcccctggcccagatcgccggaaacagatacgcctccggacctgtgggaaaggccctgagcgacgcatgtatgggcacaatcgcctccttcctgtctaagtaccaggacatcatcatcgaacaccagaaggtggtgaagggcaaccagaagagactggagagcctgcgggagctggccggcaaggaaaacctggaataccctagcgtgaccctgccacctcagcctcacaccaaggagggcgttgatgcctacaacgaagtgatcgcccgggtgcgaatgtgggtgaacctgaacctgtggcagaagctgaagctaagcagagatgatgccaagcctctgctgagactgaagggattcccttcctttcctctggtcgagagacaggccaacgaagtggactggtgggacatggtgtgtaacgtgaagaagctgatcaacgagaaaaaggaggatggcaaggtgttttggcagaatctggctggctacaagagacaggaagccctgagaccatacctgagcagcgaggaagatcggaagaagggaaagaaattcgctcggtaccagctgggcgacctgctgctgcacctggaaaagaagcacggcgaggactggggaaaggtgtacgacgaggcctgggagcggattgacaagaaagtggaaggcctgagcaagcacatcaagctggaagaggaacggagaagcgaggacgcccagagcaaggccgccctgaccgactggctgcgggctaaggccagcttcgtgatcgagggcctgaaggaggccgacaaggacgagttctgcagatgcgagctgaagctgcagaagtggtacggggacctgcggggaaagcccttcgccatcgaagccgagaacagcatcctggacatcagcggcttcagcaagcagtacaactgtgccttcatctggcagaaggacggcgtgaagaagctgaacctgtacctgatcatcaactacttcaagggcggcaagctgcggttcaagaagatcaaacctgaagccttcgaagccaacagattctacaccgtgatcaacaaaaagagcggcgagatcgtgcccatggaggtgaacttcaacttcgacgaccccaacctgatcatcctgcctctggcctttggcaagagacagggcagagaattcatctggaacgacctgctgtccctggaaaccggcagcctgaagctggccaacggaagagtgatcgagaagacactgtacaacagaagaacccggcaggatgagcctgccctgttcgtggccctgaccttcgagcggcgggaggtcctggactcctccaatatcaaaccaatgaacctgatcggcgtggcaagaggcgaaaacatccccgccgtgatcgccctgaccgaccccgagggctgcccactgagccggtttaaggatagcctgggaaacccaacccacatcctgagaatcggcgagagctataaggagaagcagcggaccatccaggccaagaaggaggtggagcagcggagagccggcggctacagccggaagtacgccagcaaagccaagaatctggcagacgatatggtgagaaacaccgctagagatctgctgtactacgccgtgacccaggatgccatgctgatcttcgccaacctgagccggggcttcggccggcagggcaagcggaccttcatggccgagagacagtacacacggatggaggactggctgaccgccaagctggcctacgagggcctgagcaagacctacctgtccaagacactggcccagtacacctccaagacatgcagcaactgtgggtttaccatcaccagcgccgactacgacagggtgctggagaagctgaagaagacagcaacaggctggatgaccacaattaacggcaaggagctgaaggtggagggccagattacctactacaacagatacaagagacagaacgtagtcaaggacctgtccgtcgagctggatagactgagcgaagaatctgtgaacaacgacatctcctcctggacaaagggcagaagcggagaagctctgagcctcctgaagaaaagattctcccatagacccgtgcaggagaagttcgtgtgcctgaactgcggcttcgagacacacgcagccgagcaagccgccctgaacatcgccagatcctggctgttcctgcggagccaggagtacaagaaataccagacaaacaagacaaccggcaacaccgataagagagccttcgtcgagacctggcagtccttttaccggaagaagcttaaggaggtgtggaaacctgccgtgcggtctggcggatctggcggaggctccacaagcctgcaggagcccgtgaccttcgccgacgtggccgtgctgttcacccccgaggagtggatgttcctggacagcgcccagaggagcctgtacagggacgtgatgctggagaactacaggaacctggccagcgtgggcgaccagctgggcaagcccagcatgctgagcctgagcgagcccggcgaggagctgtgggcccccgagaggaggaccttccccggcaccaggcccgagccccagcaccagaccagccccaagaaaaagagaaaagtctaagctgccttctgcggggcttgccttctggccatgcccttcttctctcccttgcacctgtacctcttggtctttgaataaagcctgagtaggaaggctagcaaaaaaaaaaaaaaaaaaaaaaaaaaaaaaaaaaaaaaaaaaaaaaaaaaaaaaaaaaaaaaaaaaaaaaaaaaaaaaaa

SEQ ID NO: 4092 - RNA, 5419 nt, synthetic construct
  source 1..5419: mol_type = other RNA
aggaaataagagagaaaagaagagtaagaagaaatataagagccaccatggcccctaagaagaagcgtaaagtgagccgggtgaacggcagcggcagcggcggcggcatgaaccacgaccaggagttcgacccccctaaggtgtaccctcccgtccccgccgagaagagaaagcccatccgggtcctgagcctgttcgatggcatcgccaccggtctgctggtgctgaaggacctgggcatccaggtggataggtacattgcctccgaggtgtgcgaggactccatcaccgtgggaatggtgcgtcatcagggcaagatcatgtacgtgggcgacgtgcggagcgtgacacagaagcatatccaggagtggggccctttcgacctggtgatcggcggcagcccttgcaatgacctgagcatcgtgaacccagcccggaagggcctgtacgagggaaccggcagactgttcttcgagttttacagactgctgcacgacgcccggcctaaggaaggcgacgaccggcccttcttttggctgttcgagaatgtggtggccatgggagtcagcgacaagcgggatattagccggttcctggagagcaaccccgtgatgatcgatgccaaggaagtgagcgccgcccaccgggccagatacttctggggcaatctgcctggcatgaacagacccctggccagcaccgtgaacgacaagctggagctgcaggagtgcctggagcacggccggatcgccaagttcagcaaggtgagaaccatcaccacccgaagcaacagcatcaaacaaggcaaggaccagcactttcctgtgttcatgaacgagaaggaggacatcctgtggtgtaccgagatggagagagtgttcgggttcccagtccactacacagatgtcagcaacatgtctagactggccagacagagactgctgggaagaagctggtccgtccctgtgatcagacacctgttcgcccctctgaaggagtacttcgcctgcgtgagcagcggcaacagcaacgccaacagccggggccccagcttctctagcggcctggtgccactgtccctgagagggagccacatgggccccatggagatctacaaaaccgtgagcgcctggaagcggcagcctgtgcgcgtgctgagcctgtttcggaatatcgataaagtcctgaaaagcctgggattcctggagagcggctctggctccggcggtggcaccctgaagtacgtggaggatgtgacaaacgtggtcagacgggatgtggagaagtggggccccttcgatctggtgtacggcagcacccaacccctgggcagctcttgtgaccggtgccctggctggtacatgtttcagttccaccggatcctgcagtacgccctgccgagacaggagtcccagcggccattcttttggattttcatggacaacttgctgctgaccgaggatgaccaggaaactaccactcggttcctgcagaccgaagccgtgaccctgcaggacgtgagaggccgggactaccagaacgccatgcgggtgtggtccaacatccctggactgaaaagcaagcacgcacctctgacccctaaagaagaggagtacctgcaggcccaggtgcggagcagaagcaagctggacgcccctaaggtggatctgctggtgaagaattgcctcctgcccctgagagagtacttcaagtatttcagccagaatagtctgcccctgggcggcccaagcagcggcgcccctcctcccagcggcggcagcccagccggctccccaacctctaccgaggagggcacctctgagtccgccacccccgagagcggccctggcacctccaccgagcccagcgagggcagcgcacccggcagccctgccggcagccccacctccacagaggagggaaccagcaccgagcccagcgaaggcagcgccccaggcaccagcaccgagcctagtgagggcggctctggcggcggcagcgcccaggagattaaacggatcaacaagatcagaagaagacttgtgaaagacagcaacaccaagaaggccggcaagacaggccccatgaaaaccctgctggttagagtgatgacacccgatctgagagagcggctggaaaacctgagaaagaagcctgaaaatatcccccagcccatcagcaatacatctagagccaacctgaataagctgctgaccgattacaccgaaatgaagaaggcgatcctgcatgtgtactgggaagagttccagaaggaccctgtgggcctgatgagccgggtggcccagcctgccagcaagaagatcgatcagaacaagctgaaacctgagatggacgagaagggcaacctgaccaccgccggctttgcctgctctcagtgtggccagcccctgttcgtgtacaagctggagcaggtgtctgagaagggcaaggcttacaccaactacttcggacggtgcaatgtggccgagcacgaaaagctgatcctgctggcccagctgaagcccgagaaggatagcgacgaagccgtgacatatagcctgggaaagtttgggcagagggccctggatttctacagcattcatgtgaccaaggagtccacccaccccgtgaagcccctggcccagatcgccggaaacagatacgcctccggacctgtgggaaaggccctgagcgacgcatgtatgggcacaatcgcctccttcctgtctaagtaccaggacatcatcatcgaacaccagaaggtggtgaagggcaaccagaagagactggagagcctgcgggagctggccggcaaggaaaacctggaataccctagcgtgaccctgccacctcagcctcacaccaaggagggcgttgatgcctacaacgaagtgatcgcccgggtgcgaatgtgggtgaacctgaacctgtggcagaagctgaagctaagcagagatgatgccaagcctctgctgagactgaagggattcccttcctttcctctggtcgagagacaggccaacgaagtggactggtgggacatggtgtgtaacgtgaagaagctgatcaacgagaaaaaggaggatggcaaggtgttttggcagaatctggctggctacaagagacaggaagccctgagaccatacctgagcagcgaggaagatcggaagaagggaaagaaattcgctcggtaccagctgggcgacctgctgctgcacctggaaaagaagcacggcgaggactggggaaaggtgtacgacgaggcctgggagcggattgacaagaaagtggaaggcctgagcaagcacatcaagctggaagaggaacggagaagcgaggacgcccagagcaaggccgccctgaccgactggctgcgggctaaggccagcttcgtgatcgagggcctgaaggaggccgacaaggacgagttctgcagatgcgagctgaagctgcagaagtggtacggggacctgcggggaaagcccttcgccatcgaagccgagaacagcatcctggacatcagcggcttcagcaagcagtacaactgtgccttcatctggcagaaggacggcgtgaagaagctgaacctgtacctgatcatcaactacttcaagggcggcaagctgcggttcaagaagatcaaacctgaagccttcgaagccaacagattctacaccgtgatcaacaaaaagagcggcgagatcgtgcccatggaggtgaacttcaacttcgacgaccccaacctgatcatcctgcctctggcctttggcaagagacagggcagagaattcatctggaacgacctgctgtccctggaaaccggcagcctgaagctggccaacggaagagtgatcgagaagacactgtacaacagaagaacccggcaggatgagcctgccctgttcgtggccctgaccttcgagcggcgggaggtcctggactcctccaatatcaaaccaatgaacctgatcggcgtggcaagaggcgaaaacatccccgccgtgatcgccctgaccgaccccgagggctgcccactgagccggtttaaggatagcctgggaaacccaacccacatcctgagaatcggcgagagctataaggagaagcagcggaccatccaggccaagaaggaggtggagcagcggagagccggcggctacagccggaagtacgccagcaaagccaagaatctggcagacgatatggtgagaaacaccgctagagatctgctgtactacgccgtgacccaggatgccatgctgatcttcgccaacctgagccggggcttcggccggcagggcaagcggaccttcatggccgagagacagtacacacggatggaggactggctgaccgccaagctggcctacgagggcctgagcaagacctacctgtccaagacactggcccagtacacctccaagacatgcagcaactgtgggtttaccatcaccagcgccgactacgacagggtgctggagaagctgaagaagacagcaacaggctggatgaccacaattaacggcaaggagctgaaggtggagggccagattacctactacaacagatacaagagacagaacgtagtcaaggacctgtccgtcgagctggatagactgagcgaagaatctgtgaacaacgacatctcctcctggacaaagggcagaagcggagaagctctgagcctcctgaagaaaagattctcccatagacccgtgcaggagaagttcgtgtgcctgaactgcggcttcgagacacacgcagccgagcaagccgccctgaacatcgccagatcctggctgttcctgcggagccaggagtacaagaaataccagacaaacaagacaaccggcaacaccgataagagagccttcgtcgagacctggcagtccttttaccggaagaagcttaaggaggtgtggaaacctgccgtgcggtctggcggatctggcggaggctccacaagcatcagggagttcggcggcatgggcgccggcatcgccaacatctggagcttccagggcagcgtgaccttcagggacgtggccatcgacttcagccaggaggagtggaagtggctgcagcccgcccagagggacctgtacaggtgcgtgatgctggagaactacggccacctggtgagcctgggcctgagcatcagcaagcccgacgtggtgagcctgctggagcagggcaaggagccctggctgaccagccccaagaaaaagagaaaagtctaagctgccttctgcggggcttgccttctggccatgcccttcttctctcccttgcacctgtacctcttggtctttgaataaagcctgagtaggaaggctagcaaaaaaaaaaaaaaaaaaaaaaaaaaaaaaaaaaaaaaaaaaaaaaaaaaaaaaaaaaaaaaaaaaaaaaaaaaaaaaaa

SEQ ID NO: 4093 - RNA, 5419 nt, synthetic construct
  source 1..5419: mol_type = other RNA
aggaaataagagagaaaagaagagtaagaagaaatataagagccaccatggcccctaagaagaagcgtaaagtgagccgggtgaacggcagcggcagcggcggcggcatgaaccacgaccaggagttcgacccccctaaggtgtaccctcccgtccccgccgagaagagaaagcccatccgggtcctgagcctgttcgatggcatcgccaccggtctgctggtgctgaaggacctgggcatccaggtggataggtacattgcctccgaggtgtgcgaggactccatcaccgtgggaatggtgcgtcatcagggcaagatcatgtacgtgggcgacgtgcggagcgtgacacagaagcatatccaggagtggggccctttcgacctggtgatcggcggcagcccttgcaatgacctgagcatcgtgaacccagcccggaagggcctgtacgagggaaccggcagactgttcttcgagttttacagactgctgcacgacgcccggcctaaggaaggcgacgaccggcccttcttttggctgttcgagaatgtggtggccatgggagtcagcgacaagcgggatattagccggttcctggagagcaaccccgtgatgatcgatgccaaggaagtgagcgccgcccaccgggccagatacttctggggcaatctgcctggcatgaacagacccctggccagcaccgtgaacgacaagctggagctgcaggagtgcctggagcacggccggatcgccaagttcagcaaggtgagaaccatcaccacccgaagcaacagcatcaaacaaggcaaggaccagcactttcctgtgttcatgaacgagaaggaggacatcctgtggtgtaccgagatggagagagtgttcgggttcccagtccactacacagatgtcagcaacatgtctagactggccagacagagactgctgggaagaagctggtccgtccctgtgatcagacacctgttcgcccctctgaaggagtacttcgcctgcgtgagcagcggcaacagcaacgccaacagccggggccccagcttctctagcggcctggtgccactgtccctgagagggagccacatgggccccatggagatctacaaaaccgtgagcgcctggaagcggcagcctgtgcgcgtgctgagcctgtttcggaatatcgataaagtcctgaaaagcctgggattcctggagagcggctctggctccggcggtggcaccctgaagtacgtggaggatgtgacaaacgtggtcagacgggatgtggagaagtggggccccttcgatctggtgtacggcagcacccaacccctgggcagctcttgtgaccggtgccctggctggtacatgtttcagttccaccggatcctgcagtacgccctgccgagacaggagtcccagcggccattcttttggattttcatggacaacttgctgctgaccgaggatgaccaggaaactaccactcggttcctgcagaccgaagccgtgaccctgcaggacgtgagaggccgggactaccagaacgccatgcgggtgtggtccaacatccctggactgaaaagcaagcacgcacctctgacccctaaagaagaggagtacctgcaggcccaggtgcggagcagaagcaagctggacgcccctaaggtggatctgctggtgaagaattgcctcctgcccctgagagagtacttcaagtatttcagccagaatagtctgcccctgggcggcccaagcagcggcgcccctcctcccagcggcggcagcccagccggctccccaacctctaccgaggagggcacctctgagtccgccacccccgagagcggccctggcacctccaccgagcccagcgagggcagcgcacccggcagccctgccggcagccccacctccacagaggagggaaccagcaccgagcccagcgaaggcagcgccccaggcaccagcaccgagcctagtgagggcggctctggcggcggcagcgcccaggagattaaacggatcaacaagatcagaagaagacttgtgaaagacagcaacaccaagaaggccggcaagacaggccccatgaaaaccctgctggttagagtgatgacacccgatctgagagagcggctggaaaacctgagaaagaagcctgaaaatatcccccagcccatcagcaatacatctagagccaacctgaataagctgctgaccgattacaccgaaatgaagaaggcgatcctgcatgtgtactgggaagagttccagaaggaccctgtgggcctgatgagccgggtggcccagcctgccagcaagaagatcgatcagaacaagctgaaacctgagatggacgagaagggcaacctgaccaccgccggctttgcctgctctcagtgtggccagcccctgttcgtgtacaagctggagcaggtgtctgagaagggcaaggcttacaccaactacttcggacggtgcaatgtggccgagcacgaaaagctgatcctgctggcccagctgaagcccgagaaggatagcgacgaagccgtgacatatagcctgggaaagtttgggcagagggccctggatttctacagcattcatgtgaccaaggagtccacccaccccgtgaagcccctggcccagatcgccggaaacagatacgcctccggacctgtgggaaaggccctgagcgacgcatgtatgggcacaatcgcctccttcctgtctaagtaccaggacatcatcatcgaacaccagaaggtggtgaagggcaaccagaagagactggagagcctgcgggagctggccggcaaggaaaacctggaataccctagcgtgaccctgccacctcagcctcacaccaaggagggcgttgatgcctacaacgaagtgatcgcccgggtgcgaatgtgggtgaacctgaacctgtggcagaagctgaagctaagcagagatgatgccaagcctctgctgagactgaagggattcccttcctttcctctggtcgagagacaggccaacgaagtggactggtgggacatggtgtgtaacgtgaagaagctgatcaacgagaaaaaggaggatggcaaggtgttttggcagaatctggctggctacaagagacaggaagccctgagaccatacctgagcagcgaggaagatcggaagaagggaaagaaattcgctcggtaccagctgggcgacctgctgctgcacctggaaaagaagcacggcgaggactggggaaaggtgtacgacgaggcctgggagcggattgacaagaaagtggaaggcctgagcaagcacatcaagctggaagaggaacggagaagcgaggacgcccagagcaaggccgccctgaccgactggctgcgggctaaggccagcttcgtgatcgagggcctgaaggaggccgacaaggacgagttctgcagatgcgagctgaagctgcagaagtggtacggggacctgcggggaaagcccttcgccatcgaagccgagaacagcatcctggacatcagcggcttcagcaagcagtacaactgtgccttcatctggcagaaggacggcgtgaagaagctgaacctgtacctgatcatcaactacttcaagggcggcaagctgcggttcaagaagatcaaacctgaagccttcgaagccaacagattctacaccgtgatcaacaaaaagagcggcgagatcgtgcccatggaggtgaacttcaacttcgacgaccccaacctgatcatcctgcctctggcctttggcaagagacagggcagagaattcatctggaacgacctgctgtccctggaaaccggcagcctgaagctggccaacggaagagtgatcgagaagacactgtacaacagaagaacccggcaggatgagcctgccctgttcgtggccctgaccttcgagcggcgggaggtcctggactcctccaatatcaaaccaatgaacctgatcggcgtggcaagaggcgaaaacatccccgccgtgatcgccctgaccgaccccgagggctgcccactgagccggtttaaggatagcctgggaaacccaacccacatcctgagaatcggcgagagctataaggagaagcagcggaccatccaggccaagaaggaggtggagcagcggagagccggcggctacagccggaagtacgccagcaaagccaagaatctggcagacgatatggtgagaaacaccgctagagatctgctgtactacgccgtgacccaggatgccatgctgatcttcgccaacctgagccggggcttcggccggcagggcaagcggaccttcatggccgagagacagtacacacggatggaggactggctgaccgccaagctggcctacgagggcctgagcaagacctacctgtccaagacactggcccagtacacctccaagacatgcagcaactgtgggtttaccatcaccagcgccgactacgacagggtgctggagaagctgaagaagacagcaacaggctggatgaccacaattaacggcaaggagctgaaggtggagggccagattacctactacaacagatacaagagacagaacgtagtcaaggacctgtccgtcgagctggatagactgagcgaagaatctgtgaacaacgacatctcctcctggacaaagggcagaagcggagaagctctgagcctcctgaagaaaagattctcccatagacccgtgcaggagaagttcgtgtgcctgaactgcggcttcgagacacacgcagccgagcaagccgccctgaacatcgccagatcctggctgttcctgcggagccaggagtacaagaaataccagacaaacaagacaaccggcaacaccgataagagagccttcgtcgagacctggcagtccttttaccggaagaagcttaaggaggtgtggaaacctgccgtgcggtctggcggatctggcggaggctccacaagcacccagggcctggtgaccttcagggacgtggccatcgagttcagccaggaggagtggaagtgcctggagcccgcccagaaggacctgtacaaggacgtgaccctggagaacttcagcaacctggtgagcctgggcctgagcctgcccaagcccgacgtgatcagcctgctggagcagggcaaggagccctggatggtgatcaacgacatgaccggcccctggtgccccgacctggagagcaggaccagccccaagaaaaagagaaaagtctaagctgccttctgcggggcttgccttctggccatgcccttcttctctcccttgcacctgtacctcttggtctttgaataaagcctgagtaggaaggctagcaaaaaaaaaaaaaaaaaaaaaaaaaaaaaaaaaaaaaaaaaaaaaaaaaaaaaaaaaaaaaaaaaaaaaaaaaaaaaaaa

SEQ ID NO: 4094 - RNA, 5419 nt, synthetic construct
  source 1..5419: mol_type = other RNA
aggaaataagagagaaaagaagagtaagaagaaatataagagccaccatggcccctaagaagaagcgtaaagtgagccgggtgaacggcagcggcagcggcggcggcatgaaccacgaccaggagttcgacccccctaaggtgtaccctcccgtccccgccgagaagagaaagcccatccgggtcctgagcctgttcgatggcatcgccaccggtctgctggtgctgaaggacctgggcatccaggtggataggtacattgcctccgaggtgtgcgaggactccatcaccgtgggaatggtgcgtcatcagggcaagatcatgtacgtgggcgacgtgcggagcgtgacacagaagcatatccaggagtggggccctttcgacctggtgatcggcggcagcccttgcaatgacctgagcatcgtgaacccagcccggaagggcctgtacgagggaaccggcagactgttcttcgagttttacagactgctgcacgacgcccggcctaaggaaggcgacgaccggcccttcttttggctgttcgagaatgtggtggccatgggagtcagcgacaagcgggatattagccggttcctggagagcaaccccgtgatgatcgatgccaaggaagtgagcgccgcccaccgggccagatacttctggggcaatctgcctggcatgaacagacccctggccagcaccgtgaacgacaagctggagctgcaggagtgcctggagcacggccggatcgccaagttcagcaaggtgagaaccatcaccacccgaagcaacagcatcaaacaaggcaaggaccagcactttcctgtgttcatgaacgagaaggaggacatcctgtggtgtaccgagatggagagagtgttcgggttcccagtccactacacagatgtcagcaacatgtctagactggccagacagagactgctgggaagaagctggtccgtccctgtgatcagacacctgttcgcccctctgaaggagtacttcgcctgcgtgagcagcggcaacagcaacgccaacagccggggccccagcttctctagcggcctggtgccactgtccctgagagggagccacatgggccccatggagatctacaaaaccgtgagcgcctggaagcggcagcctgtgcgcgtgctgagcctgtttcggaatatcgataaagtcctgaaaagcctgggattcctggagagcggctctggctccggcggtggcaccctgaagtacgtggaggatgtgacaaacgtggtcagacgggatgtggagaagtggggccccttcgatctggtgtacggcagcacccaacccctgggcagctcttgtgaccggtgccctggctggtacatgtttcagttccaccggatcctgcagtacgccctgccgagacaggagtcccagcggccattcttttggattttcatggacaacttgctgctgaccgaggatgaccaggaaactaccactcggttcctgcagaccgaagccgtgaccctgcaggacgtgagaggccgggactaccagaacgccatgcgggtgtggtccaacatccctggactgaaaagcaagcacgcacctctgacccctaaagaagaggagtacctgcaggcccaggtgcggagcagaagcaagctggacgcccctaaggtggatctgctggtgaagaattgcctcctgcccctgagagagtacttcaagtatttcagccagaatagtctgcccctgggcggcccaagcagcggcgcccctcctcccagcggcggcagcccagccggctccccaacctctaccgaggagggcacctctgagtccgccacccccgagagcggccctggcacctccaccgagcccagcgagggcagcgcacccggcagccctgccggcagccccacctccacagaggagggaaccagcaccgagcccagcgaaggcagcgccccaggcaccagcaccgagcctagtgagggcggctctggcggcggcagcgcccaggagattaaacggatcaacaagatcagaagaagacttgtgaaagacagcaacaccaagaaggccggcaagacaggccccatgaaaaccctgctggttagagtgatgacacccgatctgagagagcggctggaaaacctgagaaagaagcctgaaaatatcccccagcccatcagcaatacatctagagccaacctgaataagctgctgaccgattacaccgaaatgaagaaggcgatcctgcatgtgtactgggaagagttccagaaggaccctgtgggcctgatgagccgggtggcccagcctgccagcaagaagatcgatcagaacaagctgaaacctgagatggacgagaagggcaacctgaccaccgccggctttgcctgctctcagtgtggccagcccctgttcgtgtacaagctggagcaggtgtctgagaagggcaaggcttacaccaactacttcggacggtgcaatgtggccgagcacgaaaagctgatcctgctggcccagctgaagcccgagaaggatagcgacgaagccgtgacatatagcctgggaaagtttgggcagagggccctggatttctacagcattcatgtgaccaaggagtccacccaccccgtgaagcccctggcccagatcgccggaaacagatacgcctccggacctgtgggaaaggccctgagcgacgcatgtatgggcacaatcgcctccttcctgtctaagtaccaggacatcatcatcgaacaccagaaggtggtgaagggcaaccagaagagactggagagcctgcgggagctggccggcaaggaaaacctggaataccctagcgtgaccctgccacctcagcctcacaccaaggagggcgttgatgcctacaacgaagtgatcgcccgggtgcgaatgtgggtgaacctgaacctgtggcagaagctgaagctaagcagagatgatgccaagcctctgctgagactgaagggattcccttcctttcctctggtcgagagacaggccaacgaagtggactggtgggacatggtgtgtaacgtgaagaagctgatcaacgagaaaaaggaggatggcaaggtgttttggcagaatctggctggctacaagagacaggaagccctgagaccatacctgagcagcgaggaagatcggaagaagggaaagaaattcgctcggtaccagctgggcgacctgctgctgcacctggaaaagaagcacggcgaggactggggaaaggtgtacgacgaggcctgggagcggattgacaagaaagtggaaggcctgagcaagcacatcaagctggaagaggaacggagaagcgaggacgcccagagcaaggccgccctgaccgactggctgcgggctaaggccagcttcgtgatcgagggcctgaaggaggccgacaaggacgagttctgcagatgcgagctgaagctgcagaagtggtacggggacctgcggggaaagcccttcgccatcgaagccgagaacagcatcctggacatcagcggcttcagcaagcagtacaactgtgccttcatctggcagaaggacggcgtgaagaagctgaacctgtacctgatcatcaactacttcaagggcggcaagctgcggttcaagaagatcaaacctgaagccttcgaagccaacagattctacaccgtgatcaacaaaaagagcggcgagatcgtgcccatggaggtgaacttcaacttcgacgaccccaacctgatcatcctgcctctggcctttggcaagagacagggcagagaattcatctggaacgacctgctgtccctggaaaccggcagcctgaagctggccaacggaagagtgatcgagaagacactgtacaacagaagaacccggcaggatgagcctgccctgttcgtggccctgaccttcgagcggcgggaggtcctggactcctccaatatcaaaccaatgaacctgatcggcgtggcaagaggcgaaaacatccccgccgtgatcgccctgaccgaccccgagggctgcccactgagccggtttaaggatagcctgggaaacccaacccacatcctgagaatcggcgagagctataaggagaagcagcggaccatccaggccaagaaggaggtggagcagcggagagccggcggctacagccggaagtacgccagcaaagccaagaatctggcagacgatatggtgagaaacaccgctagagatctgctgtactacgccgtgacccaggatgccatgctgatcttcgccaacctgagccggggcttcggccggcagggcaagcggaccttcatggccgagagacagtacacacggatggaggactggctgaccgccaagctggcctacgagggcctgagcaagacctacctgtccaagacactggcccagtacacctccaagacatgcagcaactgtgggtttaccatcaccagcgccgactacgacagggtgctggagaagctgaagaagacagcaacaggctggatgaccacaattaacggcaaggagctgaaggtggagggccagattacctactacaacagatacaagagacagaacgtagtcaaggacctgtccgtcgagctggatagactgagcgaagaatctgtgaacaacgacatctcctcctggacaaagggcagaagcggagaagctctgagcctcctgaagaaaagattctcccatagacccgtgcaggagaagttcgtgtgcctgaactgcggcttcgagacacacgcagccgagcaagccgccctgaacatcgccagatcctggctgttcctgcggagccaggagtacaagaaataccagacaaacaagacaaccggcaacaccgataagagagccttcgtcgagacctggcagtccttttaccggaagaagcttaaggaggtgtggaaacctgccgtgcggtctggcggatctggcggaggctccacaagcggcaggagccccaggaagaccgaccagttctgcaacagcaagaacatggtgcccggcagcgtgaccttcagggacgtggccatcgacttcagccaggaggagtgggagtgcctgcagcccgcccagaggaccctgtacagggacgtgatgctggagaactacagccacctgatcagcctgggcagcagcatcagcaagcccgacgtgatcaccctgctggagcaggagaaggagccctggatgaccagccccaagaaaaagagaaaagtctaagctgccttctgcggggcttgccttctggccatgcccttcttctctcccttgcacctgtacctcttggtctttgaataaagcctgagtaggaaggctagcaaaaaaaaaaaaaaaaaaaaaaaaaaaaaaaaaaaaaaaaaaaaaaaaaaaaaaaaaaaaaaaaaaaaaaaaaaaaaaaa

SEQ ID NO: 4095 - RNA, 5419 nt, synthetic construct
  source 1..5419: mol_type = other RNA
aggaaataagagagaaaagaagagtaagaagaaatataagagccaccatggcccctaagaagaagcgtaaagtgagccgggtgaacggcagcggcagcggcggcggcatgaaccacgaccaggagttcgacccccctaaggtgtaccctcccgtccccgccgagaagagaaagcccatccgggtcctgagcctgttcgatggcatcgccaccggtctgctggtgctgaaggacctgggcatccaggtggataggtacattgcctccgaggtgtgcgaggactccatcaccgtgggaatggtgcgtcatcagggcaagatcatgtacgtgggcgacgtgcggagcgtgacacagaagcatatccaggagtggggccctttcgacctggtgatcggcggcagcccttgcaatgacctgagcatcgtgaacccagcccggaagggcctgtacgagggaaccggcagactgttcttcgagttttacagactgctgcacgacgcccggcctaaggaaggcgacgaccggcccttcttttggctgttcgagaatgtggtggccatgggagtcagcgacaagcgggatattagccggttcctggagagcaaccccgtgatgatcgatgccaaggaagtgagcgccgcccaccgggccagatacttctggggcaatctgcctggcatgaacagacccctggccagcaccgtgaacgacaagctggagctgcaggagtgcctggagcacggccggatcgccaagttcagcaaggtgagaaccatcaccacccgaagcaacagcatcaaacaaggcaaggaccagcactttcctgtgttcatgaacgagaaggaggacatcctgtggtgtaccgagatggagagagtgttcgggttcccagtccactacacagatgtcagcaacatgtctagactggccagacagagactgctgggaagaagctggtccgtccctgtgatcagacacctgttcgcccctctgaaggagtacttcgcctgcgtgagcagcggcaacagcaacgccaacagccggggccccagcttctctagcggcctggtgccactgtccctgagagggagccacatgggccccatggagatctacaaaaccgtgagcgcctggaagcggcagcctgtgcgcgtgctgagcctgtttcggaatatcgataaagtcctgaaaagcctgggattcctggagagcggctctggctccggcggtggcaccctgaagtacgtggaggatgtgacaaacgtggtcagacgggatgtggagaagtggggccccttcgatctggtgtacggcagcacccaacccctgggcagctcttgtgaccggtgccctggctggtacatgtttcagttccaccggatcctgcagtacgccctgccgagacaggagtcccagcggccattcttttggattttcatggacaacttgctgctgaccgaggatgaccaggaaactaccactcggttcctgcagaccgaagccgtgaccctgcaggacgtgagaggccgggactaccagaacgccatgcgggtgtggtccaacatccctggactgaaaagcaagcacgcacctctgacccctaaagaagaggagtacctgcaggcccaggtgcggagcagaagcaagctggacgcccctaaggtggatctgctggtgaagaattgcctcctgcccctgagagagtacttcaagtatttcagccagaatagtctgcccctgggcggcccaagcagcggcgcccctcctcccagcggcggcagcccagccggctccccaacctctaccgaggagggcacctctgagtccgccacccccgagagcggccctggcacctccaccgagcccagcgagggcagcgcacccggcagccctgccggcagccccacctccacagaggagggaaccagcaccgagcccagcgaaggcagcgccccaggcaccagcaccgagcctagtgagggcggctctggcggcggcagcgcccaggagattaaacggatcaacaagatcagaagaagacttgtgaaagacagcaacaccaagaaggccggcaagacaggccccatgaaaaccctgctggttagagtgatgacacccgatctgagagagcggctggaaaacctgagaaagaagcctgaaaatatcccccagcccatcagcaatacatctagagccaacctgaataagctgctgaccgattacaccgaaatgaagaaggcgatcctgcatgtgtactgggaagagttccagaaggaccctgtgggcctgatgagccgggtggcccagcctgccagcaagaagatcgatcagaacaagctgaaacctgagatggacgagaagggcaacctgaccaccgccggctttgcctgctctcagtgtggccagcccctgttcgtgtacaagctggagcaggtgtctgagaagggcaaggcttacaccaactacttcggacggtgcaatgtggccgagcacgaaaagctgatcctgctggcccagctgaagcccgagaaggatagcgacgaagccgtgacatatagcctgggaaagtttgggcagagggccctggatttctacagcattcatgtgaccaaggagtccacccaccccgtgaagcccctggcccagatcgccggaaacagatacgcctccggacctgtgggaaaggccctgagcgacgcatgtatgggcacaatcgcctccttcctgtctaagtaccaggacatcatcatcgaacaccagaaggtggtgaagggcaaccagaagagactggagagcctgcgggagctggccggcaaggaaaacctggaataccctagcgtgaccctgccacctcagcctcacaccaaggagggcgttgatgcctacaacgaagtgatcgcccgggtgcgaatgtgggtgaacctgaacctgtggcagaagctgaagctaagcagagatgatgccaagcctctgctgagactgaagggattcccttcctttcctctggtcgagagacaggccaacgaagtggactggtgggacatggtgtgtaacgtgaagaagctgatcaacgagaaaaaggaggatggcaaggtgttttggcagaatctggctggctacaagagacaggaagccctgagaccatacctgagcagcgaggaagatcggaagaagggaaagaaattcgctcggtaccagctgggcgacctgctgctgcacctggaaaagaagcacggcgaggactggggaaaggtgtacgacgaggcctgggagcggattgacaagaaagtggaaggcctgagcaagcacatcaagctggaagaggaacggagaagcgaggacgcccagagcaaggccgccctgaccgactggctgcgggctaaggccagcttcgtgatcgagggcctgaaggaggccgacaaggacgagttctgcagatgcgagctgaagctgcagaagtggtacggggacctgcggggaaagcccttcgccatcgaagccgagaacagcatcctggacatcagcggcttcagcaagcagtacaactgtgccttcatctggcagaaggacggcgtgaagaagctgaacctgtacctgatcatcaactacttcaagggcggcaagctgcggttcaagaagatcaaacctgaagccttcgaagccaacagattctacaccgtgatcaacaaaaagagcggcgagatcgtgcccatggaggtgaacttcaacttcgacgaccccaacctgatcatcctgcctctggcctttggcaagagacagggcagagaattcatctggaacgacctgctgtccctggaaaccggcagcctgaagctggccaacggaagagtgatcgagaagacactgtacaacagaagaacccggcaggatgagcctgccctgttcgtggccctgaccttcgagcggcgggaggtcctggactcctccaatatcaaaccaatgaacctgatcggcgtggcaagaggcgaaaacatccccgccgtgatcgccctgaccgaccccgagggctgcccactgagccggtttaaggatagcctgggaaacccaacccacatcctgagaatcggcgagagctataaggagaagcagcggaccatccaggccaagaaggaggtggagcagcggagagccggcggctacagccggaagtacgccagcaaagccaagaatctggcagacgatatggtgagaaacaccgctagagatctgctgtactacgccgtgacccaggatgccatgctgatcttcgccaacctgagccggggcttcggccggcagggcaagcggaccttcatggccgagagacagtacacacggatggaggactggctgaccgccaagctggcctacgagggcctgagcaagacctacctgtccaagacactggcccagtacacctccaagacatgcagcaactgtgggtttaccatcaccagcgccgactacgacagggtgctggagaagctgaagaagacagcaacaggctggatgaccacaattaacggcaaggagctgaaggtggagggccagattacctactacaacagatacaagagacagaacgtagtcaaggacctgtccgtcgagctggatagactgagcgaagaatctgtgaacaacgacatctcctcctggacaaagggcagaagcggagaagctctgagcctcctgaagaaaagattctcccatagacccgtgcaggagaagttcgtgtgcctgaactgcggcttcgagacacacgcagccgagcaagccgccctgaacatcgccagatcctggctgttcctgcggagccaggagtacaagaaataccagacaaacaagacaaccggcaacaccgataagagagccttcgtcgagacctggcagtccttttaccggaagaagcttaaggaggtgtggaaacctgccgtgcggtctggcggatctggcggaggctccacaagctgcagccacaggagctgcagggaggaccccggcaccagcgagagcagggagatggaccccgtggccttcgacgacgtggccgtgaacttcacccaggaggagtgggccctgctggacatcagccagaggaagctgtacagggaggtgatgctggagaccttcaggaacctgaccagcatcggcaagaagtggaaggaccagaacatcgagtacgagtaccagaaccccaggaggaacttcaggaccagccccaagaaaaagagaaaagtctaagctgccttctgcggggcttgccttctggccatgcccttcttctctcccttgcacctgtacctcttggtctttgaataaagcctgagtaggaaggctagcaaaaaaaaaaaaaaaaaaaaaaaaaaaaaaaaaaaaaaaaaaaaaaaaaaaaaaaaaaaaaaaaaaaaaaaaaaaaaaaa

SEQ ID NO: 4096 - RNA, 5419 nt, synthetic construct
  source 1..5419: mol_type = other RNA
aggaaataagagagaaaagaagagtaagaagaaatataagagccaccatggcccctaagaagaagcgtaaagtgagccgggtgaacggcagcggcagcggcggcggcatgaaccacgaccaggagttcgacccccctaaggtgtaccctcccgtccccgccgagaagagaaagcccatccgggtcctgagcctgttcgatggcatcgccaccggtctgctggtgctgaaggacctgggcatccaggtggataggtacattgcctccgaggtgtgcgaggactccatcaccgtgggaatggtgcgtcatcagggcaagatcatgtacgtgggcgacgtgcggagcgtgacacagaagcatatccaggagtggggccctttcgacctggtgatcggcggcagcccttgcaatgacctgagcatcgtgaacccagcccggaagggcctgtacgagggaaccggcagactgttcttcgagttttacagactgctgcacgacgcccggcctaaggaaggcgacgaccggcccttcttttggctgttcgagaatgtggtggccatgggagtcagcgacaagcgggatattagccggttcctggagagcaaccccgtgatgatcgatgccaaggaagtgagcgccgcccaccgggccagatacttctggggcaatctgcctggcatgaacagacccctggccagcaccgtgaacgacaagctggagctgcaggagtgcctggagcacggccggatcgccaagttcagcaaggtgagaaccatcaccacccgaagcaacagcatcaaacaaggcaaggaccagcactttcctgtgttcatgaacgagaaggaggacatcctgtggtgtaccgagatggagagagtgttcgggttcccagtccactacacagatgtcagcaacatgtctagactggccagacagagactgctgggaagaagctggtccgtccctgtgatcagacacctgttcgcccctctgaaggagtacttcgcctgcgtgagcagcggcaacagcaacgccaacagccggggccccagcttctctagcggcctggtgccactgtccctgagagggagccacatgggccccatggagatctacaaaaccgtgagcgcctggaagcggcagcctgtgcgcgtgctgagcctgtttcggaatatcgataaagtcctgaaaagcctgggattcctggagagcggctctggctccggcggtggcaccctgaagtacgtggaggatgtgacaaacgtggtcagacgggatgtggagaagtggggccccttcgatctggtgtacggcagcacccaacccctgggcagctcttgtgaccggtgccctggctggtacatgtttcagttccaccggatcctgcagtacgccctgccgagacaggagtcccagcggccattcttttggattttcatggacaacttgctgctgaccgaggatgaccaggaaactaccactcggttcctgcagaccgaagccgtgaccctgcaggacgtgagaggccgggactaccagaacgccatgcgggtgtggtccaacatccctggactgaaaagcaagcacgcacctctgacccctaaagaagaggagtacctgcaggcccaggtgcggagcagaagcaagctggacgcccctaaggtggatctgctggtgaagaattgcctcctgcccctgagagagtacttcaagtatttcagccagaatagtctgcccctgggcggcccaagcagcggcgcccctcctcccagcggcggcagcccagccggctccccaacctctaccgaggagggcacctctgagtccgccacccccgagagcggccctggcacctccaccgagcccagcgagggcagcgcacccggcagccctgccggcagccccacctccacagaggagggaaccagcaccgagcccagcgaaggcagcgccccaggcaccagcaccgagcctagtgagggcggctctggcggcggcagcgcccaggagattaaacggatcaacaagatcagaagaagacttgtgaaagacagcaacaccaagaaggccggcaagacaggccccatgaaaaccctgctggttagagtgatgacacccgatctgagagagcggctggaaaacctgagaaagaagcctgaaaatatcccccagcccatcagcaatacatctagagccaacctgaataagctgctgaccgattacaccgaaatgaagaaggcgatcctgcatgtgtactgggaagagttccagaaggaccctgtgggcctgatgagccgggtggcccagcctgccagcaagaagatcgatcagaacaagctgaaacctgagatggacgagaagggcaacctgaccaccgccggctttgcctgctctcagtgtggccagcccctgttcgtgtacaagctggagcaggtgtctgagaagggcaaggcttacaccaactacttcggacggtgcaatgtggccgagcacgaaaagctgatcctgctggcccagctgaagcccgagaaggatagcgacgaagccgtgacatatagcctgggaaagtttgggcagagggccctggatttctacagcattcatgtgaccaaggagtccacccaccccgtgaagcccctggcccagatcgccggaaacagatacgcctccggacctgtgggaaaggccctgagcgacgcatgtatgggcacaatcgcctccttcctgtctaagtaccaggacatcatcatcgaacaccagaaggtggtgaagggcaaccagaagagactggagagcctgcgggagctggccggcaaggaaaacctggaataccctagcgtgaccctgccacctcagcctcacaccaaggagggcgttgatgcctacaacgaagtgatcgcccgggtgcgaatgtgggtgaacctgaacctgtggcagaagctgaagctaagcagagatgatgccaagcctctgctgagactgaagggattcccttcctttcctctggtcgagagacaggccaacgaagtggactggtgggacatggtgtgtaacgtgaagaagctgatcaacgagaaaaaggaggatggcaaggtgttttggcagaatctggctggctacaagagacaggaagccctgagaccatacctgagcagcgaggaagatcggaagaagggaaagaaattcgctcggtaccagctgggcgacctgctgctgcacctggaaaagaagcacggcgaggactggggaaaggtgtacgacgaggcctgggagcggattgacaagaaagtggaaggcctgagcaagcacatcaagctggaagaggaacggagaagcgaggacgcccagagcaaggccgccctgaccgactggctgcgggctaaggccagcttcgtgatcgagggcctgaaggaggccgacaaggacgagttctgcagatgcgagctgaagctgcagaagtggtacggggacctgcggggaaagcccttcgccatcgaagccgagaacagcatcctggacatcagcggcttcagcaagcagtacaactgtgccttcatctggcagaaggacggcgtgaagaagctgaacctgtacctgatcatcaactacttcaagggcggcaagctgcggttcaagaagatcaaacctgaagccttcgaagccaacagattctacaccgtgatcaacaaaaagagcggcgagatcgtgcccatggaggtgaacttcaacttcgacgaccccaacctgatcatcctgcctctggcctttggcaagagacagggcagagaattcatctggaacgacctgctgtccctggaaaccggcagcctgaagctggccaacggaagagtgatcgagaagacactgtacaacagaagaacccggcaggatgagcctgccctgttcgtggccctgaccttcgagcggcgggaggtcctggactcctccaatatcaaaccaatgaacctgatcggcgtggcaagaggcgaaaacatccccgccgtgatcgccctgaccgaccccgagggctgcccactgagccggtttaaggatagcctgggaaacccaacccacatcctgagaatcggcgagagctataaggagaagcagcggaccatccaggccaagaaggaggtggagcagcggagagccggcggctacagccggaagtacgccagcaaagccaagaatctggcagacgatatggtgagaaacaccgctagagatctgctgtactacgccgtgacccaggatgccatgctgatcttcgccaacctgagccggggcttcggccggcagggcaagcggaccttcatggccgagagacagtacacacggatggaggactggctgaccgccaagctggcctacgagggcctgagcaagacctacctgtccaagacactggcccagtacacctccaagacatgcagcaactgtgggtttaccatcaccagcgccgactacgacagggtgctggagaagctgaagaagacagcaacaggctggatgaccacaattaacggcaaggagctgaaggtggagggccagattacctactacaacagatacaagagacagaacgtagtcaaggacctgtccgtcgagctggatagactgagcgaagaatctgtgaacaacgacatctcctcctggacaaagggcagaagcggagaagctctgagcctcctgaagaaaagattctcccatagacccgtgcaggagaagttcgtgtgcctgaactgcggcttcgagacacacgcagccgagcaagccgccctgaacatcgccagatcctggctgttcctgcggagccaggagtacaagaaataccagacaaacaagacaaccggcaacaccgataagagagccttcgtcgagacctggcagtccttttaccggaagaagcttaaggaggtgtggaaacctgccgtgcggtctggcggatctggcggaggctccacaagcgcccagaggtgggaggccttcgaggacgtggccctgtacttcacccagaaggagtgggagctgctgagggacggcgacaaggtgctgtaccaggagcagatgctgaggaactaccaggccctggtgagcctgggctaccagggccccacccccgacctgatctgcaggatccagaggggcgacatggagctgtgggtgtgcgacgacgaggaccccaaggagagcatgtggagcgagggcctgaccagccccaagaaaaagagaaaagtctaagctgccttctgcggggcttgccttctggccatgcccttcttctctcccttgcacctgtacctcttggtctttgaataaagcctgagtaggaaggctagcaaaaaaaaaaaaaaaaaaaaaaaaaaaaaaaaaaaaaaaaaaaaaaaaaaaaaaaaaaaaaaaaaaaaaaaaaaaaaaaa

SEQ ID NO: 4097 - RNA, 5419 nt, synthetic construct
  source 1..5419: mol_type = other RNA
aggaaataagagagaaaagaagagtaagaagaaatataagagccaccatggcccctaagaagaagcgtaaagtgagccgggtgaacggcagcggcagcggcggcggcatgaaccacgaccaggagttcgacccccctaaggtgtaccctcccgtccccgccgagaagagaaagcccatccgggtcctgagcctgttcgatggcatcgccaccggtctgctggtgctgaaggacctgggcatccaggtggataggtacattgcctccgaggtgtgcgaggactccatcaccgtgggaatggtgcgtcatcagggcaagatcatgtacgtgggcgacgtgcggagcgtgacacagaagcatatccaggagtggggccctttcgacctggtgatcggcggcagcccttgcaatgacctgagcatcgtgaacccagcccggaagggcctgtacgagggaaccggcagactgttcttcgagttttacagactgctgcacgacgcccggcctaaggaaggcgacgaccggcccttcttttggctgttcgagaatgtggtggccatgggagtcagcgacaagcgggatattagccggttcctggagagcaaccccgtgatgatcgatgccaaggaagtgagcgccgcccaccgggccagatacttctggggcaatctgcctggcatgaacagacccctggccagcaccgtgaacgacaagctggagctgcaggagtgcctggagcacggccggatcgccaagttcagcaaggtgagaaccatcaccacccgaagcaacagcatcaaacaaggcaaggaccagcactttcctgtgttcatgaacgagaaggaggacatcctgtggtgtaccgagatggagagagtgttcgggttcccagtccactacacagatgtcagcaacatgtctagactggccagacagagactgctgggaagaagctggtccgtccctgtgatcagacacctgttcgcccctctgaaggagtacttcgcctgcgtgagcagcggcaacagcaacgccaacagccggggccccagcttctctagcggcctggtgccactgtccctgagagggagccacatgggccccatggagatctacaaaaccgtgagcgcctggaagcggcagcctgtgcgcgtgctgagcctgtttcggaatatcgataaagtcctgaaaagcctgggattcctggagagcggctctggctccggcggtggcaccctgaagtacgtggaggatgtgacaaacgtggtcagacgggatgtggagaagtggggccccttcgatctggtgtacggcagcacccaacccctgggcagctcttgtgaccggtgccctggctggtacatgtttcagttccaccggatcctgcagtacgccctgccgagacaggagtcccagcggccattcttttggattttcatggacaacttgctgctgaccgaggatgaccaggaaactaccactcggttcctgcagaccgaagccgtgaccctgcaggacgtgagaggccgggactaccagaacgccatgcgggtgtggtccaacatccctggactgaaaagcaagcacgcacctctgacccctaaagaagaggagtacctgcaggcccaggtgcggagcagaagcaagctggacgcccctaaggtggatctgctggtgaagaattgcctcctgcccctgagagagtacttcaagtatttcagccagaatagtctgcccctgggcggcccaagcagcggcgcccctcctcccagcggcggcagcccagccggctccccaacctctaccgaggagggcacctctgagtccgccacccccgagagcggccctggcacctccaccgagcccagcgagggcagcgcacccggcagccctgccggcagccccacctccacagaggagggaaccagcaccgagcccagcgaaggcagcgccccaggcaccagcaccgagcctagtgagggcggctctggcggcggcagcgcccaggagattaaacggatcaacaagatcagaagaagacttgtgaaagacagcaacaccaagaaggccggcaagacaggccccatgaaaaccctgctggttagagtgatgacacccgatctgagagagcggctggaaaacctgagaaagaagcctgaaaatatcccccagcccatcagcaatacatctagagccaacctgaataagctgctgaccgattacaccgaaatgaagaaggcgatcctgcatgtgtactgggaagagttccagaaggaccctgtgggcctgatgagccgggtggcccagcctgccagcaagaagatcgatcagaacaagctgaaacctgagatggacgagaagggcaacctgaccaccgccggctttgcctgctctcagtgtggccagcccctgttcgtgtacaagctggagcaggtgtctgagaagggcaaggcttacaccaactacttcggacggtgcaatgtggccgagcacgaaaagctgatcctgctggcccagctgaagcccgagaaggatagcgacgaagccgtgacatatagcctgggaaagtttgggcagagggccctggatttctacagcattcatgtgaccaaggagtccacccaccccgtgaagcccctggcccagatcgccggaaacagatacgcctccggacctgtgggaaaggccctgagcgacgcatgtatgggcacaatcgcctccttcctgtctaagtaccaggacatcatcatcgaacaccagaaggtggtgaagggcaaccagaagagactggagagcctgcgggagctggccggcaaggaaaacctggaataccctagcgtgaccctgccacctcagcctcacaccaaggagggcgttgatgcctacaacgaagtgatcgcccgggtgcgaatgtgggtgaacctgaacctgtggcagaagctgaagctaagcagagatgatgccaagcctctgctgagactgaagggattcccttcctttcctctggtcgagagacaggccaacgaagtggactggtgggacatggtgtgtaacgtgaagaagctgatcaacgagaaaaaggaggatggcaaggtgttttggcagaatctggctggctacaagagacaggaagccctgagaccatacctgagcagcgaggaagatcggaagaagggaaagaaattcgctcggtaccagctgggcgacctgctgctgcacctggaaaagaagcacggcgaggactggggaaaggtgtacgacgaggcctgggagcggattgacaagaaagtggaaggcctgagcaagcacatcaagctggaagaggaacggagaagcgaggacgcccagagcaaggccgccctgaccgactggctgcgggctaaggccagcttcgtgatcgagggcctgaaggaggccgacaaggacgagttctgcagatgcgagctgaagctgcagaagtggtacggggacctgcggggaaagcccttcgccatcgaagccgagaacagcatcctggacatcagcggcttcagcaagcagtacaactgtgccttcatctggcagaaggacggcgtgaagaagctgaacctgtacctgatcatcaactacttcaagggcggcaagctgcggttcaagaagatcaaacctgaagccttcgaagccaacagattctacaccgtgatcaacaaaaagagcggcgagatcgtgcccatggaggtgaacttcaacttcgacgaccccaacctgatcatcctgcctctggcctttggcaagagacagggcagagaattcatctggaacgacctgctgtccctggaaaccggcagcctgaagctggccaacggaagagtgatcgagaagacactgtacaacagaagaacccggcaggatgagcctgccctgttcgtggccctgaccttcgagcggcgggaggtcctggactcctccaatatcaaaccaatgaacctgatcggcgtggcaagaggcgaaaacatccccgccgtgatcgccctgaccgaccccgagggctgcccactgagccggtttaaggatagcctgggaaacccaacccacatcctgagaatcggcgagagctataaggagaagcagcggaccatccaggccaagaaggaggtggagcagcggagagccggcggctacagccggaagtacgccagcaaagccaagaatctggcagacgatatggtgagaaacaccgctagagatctgctgtactacgccgtgacccaggatgccatgctgatcttcgccaacctgagccggggcttcggccggcagggcaagcggaccttcatggccgagagacagtacacacggatggaggactggctgaccgccaagctggcctacgagggcctgagcaagacctacctgtccaagacactggcccagtacacctccaagacatgcagcaactgtgggtttaccatcaccagcgccgactacgacagggtgctggagaagctgaagaagacagcaacaggctggatgaccacaattaacggcaaggagctgaaggtggagggccagattacctactacaacagatacaagagacagaacgtagtcaaggacctgtccgtcgagctggatagactgagcgaagaatctgtgaacaacgacatctcctcctggacaaagggcagaagcggagaagctctgagcctcctgaagaaaagattctcccatagacccgtgcaggagaagttcgtgtgcctgaactgcggcttcgagacacacgcagccgagcaagccgccctgaacatcgccagatcctggctgttcctgcggagccaggagtacaagaaataccagacaaacaagacaaccggcaacaccgataagagagccttcgtcgagacctggcagtccttttaccggaagaagcttaaggaggtgtggaaacctgccgtgcggtctggcggatctggcggaggctccacaagccccaaggtgcccgtgagcttcgaggacgtggccatgtacttcaccaagaccgagtggaagctgctggacctgaagcagaggatcctgtacaagcaggtgatgctggagaactacggccacctggtgagcctgggcttcgccttcagcaagcccaggctggtgagccagctggagaggggcgagggcccctgggtggccgacagcctgaggggccaggccgaggccgagagccacgccggcgagaccagccccaagaaaaagagaaaagtctaagctgccttctgcggggcttgccttctggccatgcccttcttctctcccttgcacctgtacctcttggtctttgaataaagcctgagtaggaaggctagcaaaaaaaaaaaaaaaaaaaaaaaaaaaaaaaaaaaaaaaaaaaaaaaaaaaaaaaaaaaaaaaaaaaaaaaaaaaaaaaa

SEQ ID NO: 4098 - RNA, 5419 nt, synthetic construct
  source 1..5419: mol_type = other RNA
aggaaataagagagaaaagaagagtaagaagaaatataagagccaccatggcccctaagaagaagcgtaaagtgagccgggtgaacggcagcggcagcggcggcggcatgaaccacgaccaggagttcgacccccctaaggtgtaccctcccgtccccgccgagaagagaaagcccatccgggtcctgagcctgttcgatggcatcgccaccggtctgctggtgctgaaggacctgggcatccaggtggataggtacattgcctccgaggtgtgcgaggactccatcaccgtgggaatggtgcgtcatcagggcaagatcatgtacgtgggcgacgtgcggagcgtgacacagaagcatatccaggagtggggccctttcgacctggtgatcggcggcagcccttgcaatgacctgagcatcgtgaacccagcccggaagggcctgtacgagggaaccggcagactgttcttcgagttttacagactgctgcacgacgcccggcctaaggaaggcgacgaccggcccttcttttggctgttcgagaatgtggtggccatgggagtcagcgacaagcgggatattagccggttcctggagagcaaccccgtgatgatcgatgccaaggaagtgagcgccgcccaccgggccagatacttctggggcaatctgcctggcatgaacagacccctggccagcaccgtgaacgacaagctggagctgcaggagtgcctggagcacggccggatcgccaagttcagcaaggtgagaaccatcaccacccgaagcaacagcatcaaacaaggcaaggaccagcactttcctgtgttcatgaacgagaaggaggacatcctgtggtgtaccgagatggagagagtgttcgggttcccagtccactacacagatgtcagcaacatgtctagactggccagacagagactgctgggaagaagctggtccgtccctgtgatcagacacctgttcgcccctctgaaggagtacttcgcctgcgtgagcagcggcaacagcaacgccaacagccggggccccagcttctctagcggcctggtgccactgtccctgagagggagccacatgggccccatggagatctacaaaaccgtgagcgcctggaagcggcagcctgtgcgcgtgctgagcctgtttcggaatatcgataaagtcctgaaaagcctgggattcctggagagcggctctggctccggcggtggcaccctgaagtacgtggaggatgtgacaaacgtggtcagacgggatgtggagaagtggggccccttcgatctggtgtacggcagcacccaacccctgggcagctcttgtgaccggtgccctggctggtacatgtttcagttccaccggatcctgcagtacgccctgccgagacaggagtcccagcggccattcttttggattttcatggacaacttgctgctgaccgaggatgaccaggaaactaccactcggttcctgcagaccgaagccgtgaccctgcaggacgtgagaggccgggactaccagaacgccatgcgggtgtggtccaacatccctggactgaaaagcaagcacgcacctctgacccctaaagaagaggagtacctgcaggcccaggtgcggagcagaagcaagctggacgcccctaaggtggatctgctggtgaagaattgcctcctgcccctgagagagtacttcaagtatttcagccagaatagtctgcccctgggcggcccaagcagcggcgcccctcctcccagcggcggcagcccagccggctccccaacctctaccgaggagggcacctctgagtccgccacccccgagagcggccctggcacctccaccgagcccagcgagggcagcgcacccggcagccctgccggcagccccacctccacagaggagggaaccagcaccgagcccagcgaaggcagcgccccaggcaccagcaccgagcctagtgagggcggctctggcggcggcagcgcccaggagattaaacggatcaacaagatcagaagaagacttgtgaaagacagcaacaccaagaaggccggcaagacaggccccatgaaaaccctgctggttagagtgatgacacccgatctgagagagcggctggaaaacctgagaaagaagcctgaaaatatcccccagcccatcagcaatacatctagagccaacctgaataagctgctgaccgattacaccgaaatgaagaaggcgatcctgcatgtgtactgggaagagttccagaaggaccctgtgggcctgatgagccgggtggcccagcctgccagcaagaagatcgatcagaacaagctgaaacctgagatggacgagaagggcaacctgaccaccgccggctttgcctgctctcagtgtggccagcccctgttcgtgtacaagctggagcaggtgtctgagaagggcaaggcttacaccaactacttcggacggtgcaatgtggccgagcacgaaaagctgatcctgctggcccagctgaagcccgagaaggatagcgacgaagccgtgacatatagcctgggaaagtttgggcagagggccctggatttctacagcattcatgtgaccaaggagtccacccaccccgtgaagcccctggcccagatcgccggaaacagatacgcctccggacctgtgggaaaggccctgagcgacgcatgtatgggcacaatcgcctccttcctgtctaagtaccaggacatcatcatcgaacaccagaaggtggtgaagggcaaccagaagagactggagagcctgcgggagctggccggcaaggaaaacctggaataccctagcgtgaccctgccacctcagcctcacaccaaggagggcgttgatgcctacaacgaagtgatcgcccgggtgcgaatgtgggtgaacctgaacctgtggcagaagctgaagctaagcagagatgatgccaagcctctgctgagactgaagggattcccttcctttcctctggtcgagagacaggccaacgaagtggactggtgggacatggtgtgtaacgtgaagaagctgatcaacgagaaaaaggaggatggcaaggtgttttggcagaatctggctggctacaagagacaggaagccctgagaccatacctgagcagcgaggaagatcggaagaagggaaagaaattcgctcggtaccagctgggcgacctgctgctgcacctggaaaagaagcacggcgaggactggggaaaggtgtacgacgaggcctgggagcggattgacaagaaagtggaaggcctgagcaagcacatcaagctggaagaggaacggagaagcgaggacgcccagagcaaggccgccctgaccgactggctgcgggctaaggccagcttcgtgatcgagggcctgaaggaggccgacaaggacgagttctgcagatgcgagctgaagctgcagaagtggtacggggacctgcggggaaagcccttcgccatcgaagccgagaacagcatcctggacatcagcggcttcagcaagcagtacaactgtgccttcatctggcagaaggacggcgtgaagaagctgaacctgtacctgatcatcaactacttcaagggcggcaagctgcggttcaagaagatcaaacctgaagccttcgaagccaacagattctacaccgtgatcaacaaaaagagcggcgagatcgtgcccatggaggtgaacttcaacttcgacgaccccaacctgatcatcctgcctctggcctttggcaagagacagggcagagaattcatctggaacgacctgctgtccctggaaaccggcagcctgaagctggccaacggaagagtgatcgagaagacactgtacaacagaagaacccggcaggatgagcctgccctgttcgtggccctgaccttcgagcggcgggaggtcctggactcctccaatatcaaaccaatgaacctgatcggcgtggcaagaggcgaaaacatccccgccgtgatcgccctgaccgaccccgagggctgcccactgagccggtttaaggatagcctgggaaacccaacccacatcctgagaatcggcgagagctataaggagaagcagcggaccatccaggccaagaaggaggtggagcagcggagagccggcggctacagccggaagtacgccagcaaagccaagaatctggcagacgatatggtgagaaacaccgctagagatctgctgtactacgccgtgacccaggatgccatgctgatcttcgccaacctgagccggggcttcggccggcagggcaagcggaccttcatggccgagagacagtacacacggatggaggactggctgaccgccaagctggcctacgagggcctgagcaagacctacctgtccaagacactggcccagtacacctccaagacatgcagcaactgtgggtttaccatcaccagcgccgactacgacagggtgctggagaagctgaagaagacagcaacaggctggatgaccacaattaacggcaaggagctgaaggtggagggccagattacctactacaacagatacaagagacagaacgtagtcaaggacctgtccgtcgagctggatagactgagcgaagaatctgtgaacaacgacatctcctcctggacaaagggcagaagcggagaagctctgagcctcctgaagaaaagattctcccatagacccgtgcaggagaagttcgtgtgcctgaactgcggcttcgagacacacgcagccgagcaagccgccctgaacatcgccagatcctggctgttcctgcggagccaggagtacaagaaataccagacaaacaagacaaccggcaacaccgataagagagccttcgtcgagacctggcagtccttttaccggaagaagcttaaggaggtgtggaaacctgccgtgcggtctggcggatctggcggaggctccacaagcagccagggcagcgtgagcttcaaggacgtgaccgtgggcttcacccaggaggagtggcagcacctggaccccagccagaagagcctgtacagggacgtgatgctggagaactacagccacctggtgagcgtgggctactgcgtgaccaagcccgagctgatcttcaggctggagcagggcgaggagccctgggtgctggaggaggagttccccaggcccggcttcctggagttctggaagaccaccagccccaagaaaaagagaaaagtctaagctgccttctgcggggcttgccttctggccatgcccttcttctctcccttgcacctgtacctcttggtctttgaataaagcctgagtaggaaggctagcaaaaaaaaaaaaaaaaaaaaaaaaaaaaaaaaaaaaaaaaaaaaaaaaaaaaaaaaaaaaaaaaaaaaaaaaaaaaaaaa

SEQ ID NO: 4099 - RNA, 5419 nt, synthetic construct
  source 1..5419: mol_type = other RNA
aggaaataagagagaaaagaagagtaagaagaaatataagagccaccatggcccctaagaagaagcgtaaagtgagccgggtgaacggcagcggcagcggcggcggcatgaaccacgaccaggagttcgacccccctaaggtgtaccctcccgtccccgccgagaagagaaagcccatccgggtcctgagcctgttcgatggcatcgccaccggtctgctggtgctgaaggacctgggcatccaggtggataggtacattgcctccgaggtgtgcgaggactccatcaccgtgggaatggtgcgtcatcagggcaagatcatgtacgtgggcgacgtgcggagcgtgacacagaagcatatccaggagtggggccctttcgacctggtgatcggcggcagcccttgcaatgacctgagcatcgtgaacccagcccggaagggcctgtacgagggaaccggcagactgttcttcgagttttacagactgctgcacgacgcccggcctaaggaaggcgacgaccggcccttcttttggctgttcgagaatgtggtggccatgggagtcagcgacaagcgggatattagccggttcctggagagcaaccccgtgatgatcgatgccaaggaagtgagcgccgcccaccgggccagatacttctggggcaatctgcctggcatgaacagacccctggccagcaccgtgaacgacaagctggagctgcaggagtgcctggagcacggccggatcgccaagttcagcaaggtgagaaccatcaccacccgaagcaacagcatcaaacaaggcaaggaccagcactttcctgtgttcatgaacgagaaggaggacatcctgtggtgtaccgagatggagagagtgttcgggttcccagtccactacacagatgtcagcaacatgtctagactggccagacagagactgctgggaagaagctggtccgtccctgtgatcagacacctgttcgcccctctgaaggagtacttcgcctgcgtgagcagcggcaacagcaacgccaacagccggggccccagcttctctagcggcctggtgccactgtccctgagagggagccacatgggccccatggagatctacaaaaccgtgagcgcctggaagcggcagcctgtgcgcgtgctgagcctgtttcggaatatcgataaagtcctgaaaagcctgggattcctggagagcggctctggctccggcggtggcaccctgaagtacgtggaggatgtgacaaacgtggtcagacgggatgtggagaagtggggccccttcgatctggtgtacggcagcacccaacccctgggcagctcttgtgaccggtgccctggctggtacatgtttcagttccaccggatcctgcagtacgccctgccgagacaggagtcccagcggccattcttttggattttcatggacaacttgctgctgaccgaggatgaccaggaaactaccactcggttcctgcagaccgaagccgtgaccctgcaggacgtgagaggccgggactaccagaacgccatgcgggtgtggtccaacatccctggactgaaaagcaagcacgcacctctgacccctaaagaagaggagtacctgcaggcccaggtgcggagcagaagcaagctggacgcccctaaggtggatctgctggtgaagaattgcctcctgcccctgagagagtacttcaagtatttcagccagaatagtctgcccctgggcggcccaagcagcggcgcccctcctcccagcggcggcagcccagccggctccccaacctctaccgaggagggcacctctgagtccgccacccccgagagcggccctggcacctccaccgagcccagcgagggcagcgcacccggcagccctgccggcagccccacctccacagaggagggaaccagcaccgagcccagcgaaggcagcgccccaggcaccagcaccgagcctagtgagggcggctctggcggcggcagcgcccaggagattaaacggatcaacaagatcagaagaagacttgtgaaagacagcaacaccaagaaggccggcaagacaggccccatgaaaaccctgctggttagagtgatgacacccgatctgagagagcggctggaaaacctgagaaagaagcctgaaaatatcccccagcccatcagcaatacatctagagccaacctgaataagctgctgaccgattacaccgaaatgaagaaggcgatcctgcatgtgtactgggaagagttccagaaggaccctgtgggcctgatgagccgggtggcccagcctgccagcaagaagatcgatcagaacaagctgaaacctgagatggacgagaagggcaacctgaccaccgccggctttgcctgctctcagtgtggccagcccctgttcgtgtacaagctggagcaggtgtctgagaagggcaaggcttacaccaactacttcggacggtgcaatgtggccgagcacgaaaagctgatcctgctggcccagctgaagcccgagaaggatagcgacgaagccgtgacatatagcctgggaaagtttgggcagagggccctggatttctacagcattcatgtgaccaaggagtccacccaccccgtgaagcccctggcccagatcgccggaaacagatacgcctccggacctgtgggaaaggccctgagcgacgcatgtatgggcacaatcgcctccttcctgtctaagtaccaggacatcatcatcgaacaccagaaggtggtgaagggcaaccagaagagactggagagcctgcgggagctggccggcaaggaaaacctggaataccctagcgtgaccctgccacctcagcctcacaccaaggagggcgttgatgcctacaacgaagtgatcgcccgggtgcgaatgtgggtgaacctgaacctgtggcagaagctgaagctaagcagagatgatgccaagcctctgctgagactgaagggattcccttcctttcctctggtcgagagacaggccaacgaagtggactggtgggacatggtgtgtaacgtgaagaagctgatcaacgagaaaaaggaggatggcaaggtgttttggcagaatctggctggctacaagagacaggaagccctgagaccatacctgagcagcgaggaagatcggaagaagggaaagaaattcgctcggtaccagctgggcgacctgctgctgcacctggaaaagaagcacggcgaggactggggaaaggtgtacgacgaggcctgggagcggattgacaagaaagtggaaggcctgagcaagcacatcaagctggaagaggaacggagaagcgaggacgcccagagcaaggccgccctgaccgactggctgcgggctaaggccagcttcgtgatcgagggcctgaaggaggccgacaaggacgagttctgcagatgcgagctgaagctgcagaagtggtacggggacctgcggggaaagcccttcgccatcgaagccgagaacagcatcctggacatcagcggcttcagcaagcagtacaactgtgccttcatctggcagaaggacggcgtgaagaagctgaacctgtacctgatcatcaactacttcaagggcggcaagctgcggttcaagaagatcaaacctgaagccttcgaagccaacagattctacaccgtgatcaacaaaaagagcggcgagatcgtgcccatggaggtgaacttcaacttcgacgaccccaacctgatcatcctgcctctggcctttggcaagagacagggcagagaattcatctggaacgacctgctgtccctggaaaccggcagcctgaagctggccaacggaagagtgatcgagaagacactgtacaacagaagaacccggcaggatgagcctgccctgttcgtggccctgaccttcgagcggcgggaggtcctggactcctccaatatcaaaccaatgaacctgatcggcgtggcaagaggcgaaaacatccccgccgtgatcgccctgaccgaccccgagggctgcccactgagccggtttaaggatagcctgggaaacccaacccacatcctgagaatcggcgagagctataaggagaagcagcggaccatccaggccaagaaggaggtggagcagcggagagccggcggctacagccggaagtacgccagcaaagccaagaatctggcagacgatatggtgagaaacaccgctagagatctgctgtactacgccgtgacccaggatgccatgctgatcttcgccaacctgagccggggcttcggccggcagggcaagcggaccttcatggccgagagacagtacacacggatggaggactggctgaccgccaagctggcctacgagggcctgagcaagacctacctgtccaagacactggcccagtacacctccaagacatgcagcaactgtgggtttaccatcaccagcgccgactacgacagggtgctggagaagctgaagaagacagcaacaggctggatgaccacaattaacggcaaggagctgaaggtggagggccagattacctactacaacagatacaagagacagaacgtagtcaaggacctgtccgtcgagctggatagactgagcgaagaatctgtgaacaacgacatctcctcctggacaaagggcagaagcggagaagctctgagcctcctgaagaaaagattctcccatagacccgtgcaggagaagttcgtgtgcctgaactgcggcttcgagacacacgcagccgagcaagccgccctgaacatcgccagatcctggctgttcctgcggagccaggagtacaagaaataccagacaaacaagacaaccggcaacaccgataagagagccttcgtcgagacctggcagtccttttaccggaagaagcttaaggaggtgtggaaacctgccgtgcggtctggcggatctggcggaggctccacaagcatgggcctgctgaccttcagggacgtggccatcgagttcagcctggaggagtggcagtgcctggacaccgcccagcagaacctgtacaggaacgtgatgctggagaactacaggaacctggccttcctgggcatcgccgtgagcaagcccgacctgatcacctgcctggagcagggcaaggagccctggaacatgaagaggcacgagatggtggacgagccccccggcgtgtgcccccacttcaccagccccaagaaaaagagaaaagtctaagctgccttctgcggggcttgccttctggccatgcccttcttctctcccttgcacctgtacctcttggtctttgaataaagcctgagtaggaaggctagcaaaaaaaaaaaaaaaaaaaaaaaaaaaaaaaaaaaaaaaaaaaaaaaaaaaaaaaaaaaaaaaaaaaaaaaaaaaaaaaa

SEQ ID NO: 4100 - RNA, 5419 nt, synthetic construct
  source 1..5419: mol_type = other RNA
aggaaataagagagaaaagaagagtaagaagaaatataagagccaccatggcccctaagaagaagcgtaaagtgagccgggtgaacggcagcggcagcggcggcggcatgaaccacgaccaggagttcgacccccctaaggtgtaccctcccgtccccgccgagaagagaaagcccatccgggtcctgagcctgttcgatggcatcgccaccggtctgctggtgctgaaggacctgggcatccaggtggataggtacattgcctccgaggtgtgcgaggactccatcaccgtgggaatggtgcgtcatcagggcaagatcatgtacgtgggcgacgtgcggagcgtgacacagaagcatatccaggagtggggccctttcgacctggtgatcggcggcagcccttgcaatgacctgagcatcgtgaacccagcccggaagggcctgtacgagggaaccggcagactgttcttcgagttttacagactgctgcacgacgcccggcctaaggaaggcgacgaccggcccttcttttggctgttcgagaatgtggtggccatgggagtcagcgacaagcgggatattagccggttcctggagagcaaccccgtgatgatcgatgccaaggaagtgagcgccgcccaccgggccagatacttctggggcaatctgcctggcatgaacagacccctggccagcaccgtgaacgacaagctggagctgcaggagtgcctggagcacggccggatcgccaagttcagcaaggtgagaaccatcaccacccgaagcaacagcatcaaacaaggcaaggaccagcactttcctgtgttcatgaacgagaaggaggacatcctgtggtgtaccgagatggagagagtgttcgggttcccagtccactacacagatgtcagcaacatgtctagactggccagacagagactgctgggaagaagctggtccgtccctgtgatcagacacctgttcgcccctctgaaggagtacttcgcctgcgtgagcagcggcaacagcaacgccaacagccggggccccagcttctctagcggcctggtgccactgtccctgagagggagccacatgggccccatggagatctacaaaaccgtgagcgcctggaagcggcagcctgtgcgcgtgctgagcctgtttcggaatatcgataaagtcctgaaaagcctgggattcctggagagcggctctggctccggcggtggcaccctgaagtacgtggaggatgtgacaaacgtggtcagacgggatgtggagaagtggggccccttcgatctggtgtacggcagcacccaacccctgggcagctcttgtgaccggtgccctggctggtacatgtttcagttccaccggatcctgcagtacgccctgccgagacaggagtcccagcggccattcttttggattttcatggacaacttgctgctgaccgaggatgaccaggaaactaccactcggttcctgcagaccgaagccgtgaccctgcaggacgtgagaggccgggactaccagaacgccatgcgggtgtggtccaacatccctggactgaaaagcaagcacgcacctctgacccctaaagaagaggagtacctgcaggcccaggtgcggagcagaagcaagctggacgcccctaaggtggatctgctggtgaagaattgcctcctgcccctgagagagtacttcaagtatttcagccagaatagtctgcccctgggcggcccaagcagcggcgcccctcctcccagcggcggcagcccagccggctccccaacctctaccgaggagggcacctctgagtccgccacccccgagagcggccctggcacctccaccgagcccagcgagggcagcgcacccggcagccctgccggcagccccacctccacagaggagggaaccagcaccgagcccagcgaaggcagcgccccaggcaccagcaccgagcctagtgagggcggctctggcggcggcagcgcccaggagattaaacggatcaacaagatcagaagaagacttgtgaaagacagcaacaccaagaaggccggcaagacaggccccatgaaaaccctgctggttagagtgatgacacccgatctgagagagcggctggaaaacctgagaaagaagcctgaaaatatcccccagcccatcagcaatacatctagagccaacctgaataagctgctgaccgattacaccgaaatgaagaaggcgatcctgcatgtgtactgggaagagttccagaaggaccctgtgggcctgatgagccgggtggcccagcctgccagcaagaagatcgatcagaacaagctgaaacctgagatggacgagaagggcaacctgaccaccgccggctttgcctgctctcagtgtggccagcccctgttcgtgtacaagctggagcaggtgtctgagaagggcaaggcttacaccaactacttcggacggtgcaatgtggccgagcacgaaaagctgatcctgctggcccagctgaagcccgagaaggatagcgacgaagccgtgacatatagcctgggaaagtttgggcagagggccctggatttctacagcattcatgtgaccaaggagtccacccaccccgtgaagcccctggcccagatcgccggaaacagatacgcctccggacctgtgggaaaggccctgagcgacgcatgtatgggcacaatcgcctccttcctgtctaagtaccaggacatcatcatcgaacaccagaaggtggtgaagggcaaccagaagagactggagagcctgcgggagctggccggcaaggaaaacctggaataccctagcgtgaccctgccacctcagcctcacaccaaggagggcgttgatgcctacaacgaagtgatcgcccgggtgcgaatgtgggtgaacctgaacctgtggcagaagctgaagctaagcagagatgatgccaagcctctgctgagactgaagggattcccttcctttcctctggtcgagagacaggccaacgaagtggactggtgggacatggtgtgtaacgtgaagaagctgatcaacgagaaaaaggaggatggcaaggtgttttggcagaatctggctggctacaagagacaggaagccctgagaccatacctgagcagcgaggaagatcggaagaagggaaagaaattcgctcggtaccagctgggcgacctgctgctgcacctggaaaagaagcacggcgaggactggggaaaggtgtacgacgaggcctgggagcggattgacaagaaagtggaaggcctgagcaagcacatcaagctggaagaggaacggagaagcgaggacgcccagagcaaggccgccctgaccgactggctgcgggctaaggccagcttcgtgatcgagggcctgaaggaggccgacaaggacgagttctgcagatgcgagctgaagctgcagaagtggtacggggacctgcggggaaagcccttcgccatcgaagccgagaacagcatcctggacatcagcggcttcagcaagcagtacaactgtgccttcatctggcagaaggacggcgtgaagaagctgaacctgtacctgatcatcaactacttcaagggcggcaagctgcggttcaagaagatcaaacctgaagccttcgaagccaacagattctacaccgtgatcaacaaaaagagcggcgagatcgtgcccatggaggtgaacttcaacttcgacgaccccaacctgatcatcctgcctctggcctttggcaagagacagggcagagaattcatctggaacgacctgctgtccctggaaaccggcagcctgaagctggccaacggaagagtgatcgagaagacactgtacaacagaagaacccggcaggatgagcctgccctgttcgtggccctgaccttcgagcggcgggaggtcctggactcctccaatatcaaaccaatgaacctgatcggcgtggcaagaggcgaaaacatccccgccgtgatcgccctgaccgaccccgagggctgcccactgagccggtttaaggatagcctgggaaacccaacccacatcctgagaatcggcgagagctataaggagaagcagcggaccatccaggccaagaaggaggtggagcagcggagagccggcggctacagccggaagtacgccagcaaagccaagaatctggcagacgatatggtgagaaacaccgctagagatctgctgtactacgccgtgacccaggatgccatgctgatcttcgccaacctgagccggggcttcggccggcagggcaagcggaccttcatggccgagagacagtacacacggatggaggactggctgaccgccaagctggcctacgagggcctgagcaagacctacctgtccaagacactggcccagtacacctccaagacatgcagcaactgtgggtttaccatcaccagcgccgactacgacagggtgctggagaagctgaagaagacagcaacaggctggatgaccacaattaacggcaaggagctgaaggtggagggccagattacctactacaacagatacaagagacagaacgtagtcaaggacctgtccgtcgagctggatagactgagcgaagaatctgtgaacaacgacatctcctcctggacaaagggcagaagcggagaagctctgagcctcctgaagaaaagattctcccatagacccgtgcaggagaagttcgtgtgcctgaactgcggcttcgagacacacgcagccgagcaagccgccctgaacatcgccagatcctggctgttcctgcggagccaggagtacaagaaataccagacaaacaagacaaccggcaacaccgataagagagccttcgtcgagacctggcagtccttttaccggaagaagcttaaggaggtgtggaaacctgccgtgcggtctggcggatctggcggaggctccacaagcagcaaggtgcccgtgaccttcggcgacctggccatctacttcagccaggaggagtgggagtggctgagccccatccagaaggacctgtacgaggacgtgatgctggagaactaccagaacctggtgagcctgggcctgagcttcaggaggcccaacgtgatcaccctgctggagaagggcagggccccctggatggtggagcccgtgaggaagaggagggtgctggacagcaggagcaagtacaccagccccaagaaaaagagaaaagtctaagctgccttctgcggggcttgccttctggccatgcccttcttctctcccttgcacctgtacctcttggtctttgaataaagcctgagtaggaaggctagcaaaaaaaaaaaaaaaaaaaaaaaaaaaaaaaaaaaaaaaaaaaaaaaaaaaaaaaaaaaaaaaaaaaaaaaaaaaaaaaa

SEQ ID NO: 4101 - RNA, 5419 nt, synthetic construct
  source 1..5419: mol_type = other RNA
aggaaataagagagaaaagaagagtaagaagaaatataagagccaccatggcccctaagaagaagcgtaaagtgagccgggtgaacggcagcggcagcggcggcggcatgaaccacgaccaggagttcgacccccctaaggtgtaccctcccgtccccgccgagaagagaaagcccatccgggtcctgagcctgttcgatggcatcgccaccggtctgctggtgctgaaggacctgggcatccaggtggataggtacattgcctccgaggtgtgcgaggactccatcaccgtgggaatggtgcgtcatcagggcaagatcatgtacgtgggcgacgtgcggagcgtgacacagaagcatatccaggagtggggccctttcgacctggtgatcggcggcagcccttgcaatgacctgagcatcgtgaacccagcccggaagggcctgtacgagggaaccggcagactgttcttcgagttttacagactgctgcacgacgcccggcctaaggaaggcgacgaccggcccttcttttggctgttcgagaatgtggtggccatgggagtcagcgacaagcgggatattagccggttcctggagagcaaccccgtgatgatcgatgccaaggaagtgagcgccgcccaccgggccagatacttctggggcaatctgcctggcatgaacagacccctggccagcaccgtgaacgacaagctggagctgcaggagtgcctggagcacggccggatcgccaagttcagcaaggtgagaaccatcaccacccgaagcaacagcatcaaacaaggcaaggaccagcactttcctgtgttcatgaacgagaaggaggacatcctgtggtgtaccgagatggagagagtgttcgggttcccagtccactacacagatgtcagcaacatgtctagactggccagacagagactgctgggaagaagctggtccgtccctgtgatcagacacctgttcgcccctctgaaggagtacttcgcctgcgtgagcagcggcaacagcaacgccaacagccggggccccagcttctctagcggcctggtgccactgtccctgagagggagccacatgggccccatggagatctacaaaaccgtgagcgcctggaagcggcagcctgtgcgcgtgctgagcctgtttcggaatatcgataaagtcctgaaaagcctgggattcctggagagcggctctggctccggcggtggcaccctgaagtacgtggaggatgtgacaaacgtggtcagacgggatgtggagaagtggggccccttcgatctggtgtacggcagcacccaacccctgggcagctcttgtgaccggtgccctggctggtacatgtttcagttccaccggatcctgcagtacgccctgccgagacaggagtcccagcggccattcttttggattttcatggacaacttgctgctgaccgaggatgaccaggaaactaccactcggttcctgcagaccgaagccgtgaccctgcaggacgtgagaggccgggactaccagaacgccatgcgggtgtggtccaacatccctggactgaaaagcaagcacgcacctctgacccctaaagaagaggagtacctgcaggcccaggtgcggagcagaagcaagctggacgcccctaaggtggatctgctggtgaagaattgcctcctgcccctgagagagtacttcaagtatttcagccagaatagtctgcccctgggcggcccaagcagcggcgcccctcctcccagcggcggcagcccagccggctccccaacctctaccgaggagggcacctctgagtccgccacccccgagagcggccctggcacctccaccgagcccagcgagggcagcgcacccggcagccctgccggcagccccacctccacagaggagggaaccagcaccgagcccagcgaaggcagcgccccaggcaccagcaccgagcctagtgagggcggctctggcggcggcagcgcccaggagattaaacggatcaacaagatcagaagaagacttgtgaaagacagcaacaccaagaaggccggcaagacaggccccatgaaaaccctgctggttagagtgatgacacccgatctgagagagcggctggaaaacctgagaaagaagcctgaaaatatcccccagcccatcagcaatacatctagagccaacctgaataagctgctgaccgattacaccgaaatgaagaaggcgatcctgcatgtgtactgggaagagttccagaaggaccctgtgggcctgatgagccgggtggcccagcctgccagcaagaagatcgatcagaacaagctgaaacctgagatggacgagaagggcaacctgaccaccgccggctttgcctgctctcagtgtggccagcccctgttcgtgtacaagctggagcaggtgtctgagaagggcaaggcttacaccaactacttcggacggtgcaatgtggccgagcacgaaaagctgatcctgctggcccagctgaagcccgagaaggatagcgacgaagccgtgacatatagcctgggaaagtttgggcagagggccctggatttctacagcattcatgtgaccaaggagtccacccaccccgtgaagcccctggcccagatcgccggaaacagatacgcctccggacctgtgggaaaggccctgagcgacgcatgtatgggcacaatcgcctccttcctgtctaagtaccaggacatcatcatcgaacaccagaaggtggtgaagggcaaccagaagagactggagagcctgcgggagctggccggcaaggaaaacctggaataccctagcgtgaccctgccacctcagcctcacaccaaggagggcgttgatgcctacaacgaagtgatcgcccgggtgcgaatgtgggtgaacctgaacctgtggcagaagctgaagctaagcagagatgatgccaagcctctgctgagactgaagggattcccttcctttcctctggtcgagagacaggccaacgaagtggactggtgggacatggtgtgtaacgtgaagaagctgatcaacgagaaaaaggaggatggcaaggtgttttggcagaatctggctggctacaagagacaggaagccctgagaccatacctgagcagcgaggaagatcggaagaagggaaagaaattcgctcggtaccagctgggcgacctgctgctgcacctggaaaagaagcacggcgaggactggggaaaggtgtacgacgaggcctgggagcggattgacaagaaagtggaaggcctgagcaagcacatcaagctggaagaggaacggagaagcgaggacgcccagagcaaggccgccctgaccgactggctgcgggctaaggccagcttcgtgatcgagggcctgaaggaggccgacaaggacgagttctgcagatgcgagctgaagctgcagaagtggtacggggacctgcggggaaagcccttcgccatcgaagccgagaacagcatcctggacatcagcggcttcagcaagcagtacaactgtgccttcatctggcagaaggacggcgtgaagaagctgaacctgtacctgatcatcaactacttcaagggcggcaagctgcggttcaagaagatcaaacctgaagccttcgaagccaacagattctacaccgtgatcaacaaaaagagcggcgagatcgtgcccatggaggtgaacttcaacttcgacgaccccaacctgatcatcctgcctctggcctttggcaagagacagggcagagaattcatctggaacgacctgctgtccctggaaaccggcagcctgaagctggccaacggaagagtgatcgagaagacactgtacaacagaagaacccggcaggatgagcctgccctgttcgtggccctgaccttcgagcggcgggaggtcctggactcctccaatatcaaaccaatgaacctgatcggcgtggcaagaggcgaaaacatccccgccgtgatcgccctgaccgaccccgagggctgcccactgagccggtttaaggatagcctgggaaacccaacccacatcctgagaatcggcgagagctataaggagaagcagcggaccatccaggccaagaaggaggtggagcagcggagagccggcggctacagccggaagtacgccagcaaagccaagaatctggcagacgatatggtgagaaacaccgctagagatctgctgtactacgccgtgacccaggatgccatgctgatcttcgccaacctgagccggggcttcggccggcagggcaagcggaccttcatggccgagagacagtacacacggatggaggactggctgaccgccaagctggcctacgagggcctgagcaagacctacctgtccaagacactggcccagtacacctccaagacatgcagcaactgtgggtttaccatcaccagcgccgactacgacagggtgctggagaagctgaagaagacagcaacaggctggatgaccacaattaacggcaaggagctgaaggtggagggccagattacctactacaacagatacaagagacagaacgtagtcaaggacctgtccgtcgagctggatagactgagcgaagaatctgtgaacaacgacatctcctcctggacaaagggcagaagcggagaagctctgagcctcctgaagaaaagattctcccatagacccgtgcaggagaagttcgtgtgcctgaactgcggcttcgagacacacgcagccgagcaagccgccctgaacatcgccagatcctggctgttcctgcggagccaggagtacaagaaataccagacaaacaagacaaccggcaacaccgataagagagccttcgtcgagacctggcagtccttttaccggaagaagcttaaggaggtgtggaaacctgccgtgcggtctggcggatctggcggaggctccacaagcgcccccctgcccctgaccttcgaggacgtggccgtgtacttcagcgagcaggagtggaggaacctggaggcctggcagaaggagctgtacaagcaggtgatgaggaccaactacgagatcctggtgagcctggacgacggcctgcccaagcccgagctgatcagctggctggagcagggcagggagctgttcaagaactggggcgagagccagaagagcggcaacatcatctgcttcagcgccaccagccccaagaaaaagagaaaagtctaagctgccttctgcggggcttgccttctggccatgcccttcttctctcccttgcacctgtacctcttggtctttgaataaagcctgagtaggaaggctagcaaaaaaaaaaaaaaaaaaaaaaaaaaaaaaaaaaaaaaaaaaaaaaaaaaaaaaaaaaaaaaaaaaaaaaaaaaaaaaaa

SEQ ID NO: 4102 - RNA, 5419 nt, synthetic construct
  source 1..5419: mol_type = other RNA
aggaaataagagagaaaagaagagtaagaagaaatataagagccaccatggcccctaagaagaagcgtaaagtgagccgggtgaacggcagcggcagcggcggcggcatgaaccacgaccaggagttcgacccccctaaggtgtaccctcccgtccccgccgagaagagaaagcccatccgggtcctgagcctgttcgatggcatcgccaccggtctgctggtgctgaaggacctgggcatccaggtggataggtacattgcctccgaggtgtgcgaggactccatcaccgtgggaatggtgcgtcatcagggcaagatcatgtacgtgggcgacgtgcggagcgtgacacagaagcatatccaggagtggggccctttcgacctggtgatcggcggcagcccttgcaatgacctgagcatcgtgaacccagcccggaagggcctgtacgagggaaccggcagactgttcttcgagttttacagactgctgcacgacgcccggcctaaggaaggcgacgaccggcccttcttttggctgttcgagaatgtggtggccatgggagtcagcgacaagcgggatattagccggttcctggagagcaaccccgtgatgatcgatgccaaggaagtgagcgccgcccaccgggccagatacttctggggcaatctgcctggcatgaacagacccctggccagcaccgtgaacgacaagctggagctgcaggagtgcctggagcacggccggatcgccaagttcagcaaggtgagaaccatcaccacccgaagcaacagcatcaaacaaggcaaggaccagcactttcctgtgttcatgaacgagaaggaggacatcctgtggtgtaccgagatggagagagtgttcgggttcccagtccactacacagatgtcagcaacatgtctagactggccagacagagactgctgggaagaagctggtccgtccctgtgatcagacacctgttcgcccctctgaaggagtacttcgcctgcgtgagcagcggcaacagcaacgccaacagccggggccccagcttctctagcggcctggtgccactgtccctgagagggagccacatgggccccatggagatctacaaaaccgtgagcgcctggaagcggcagcctgtgcgcgtgctgagcctgtttcggaatatcgataaagtcctgaaaagcctgggattcctggagagcggctctggctccggcggtggcaccctgaagtacgtggaggatgtgacaaacgtggtcagacgggatgtggagaagtggggccccttcgatctggtgtacggcagcacccaacccctgggcagctcttgtgaccggtgccctggctggtacatgtttcagttccaccggatcctgcagtacgccctgccgagacaggagtcccagcggccattcttttggattttcatggacaacttgctgctgaccgaggatgaccaggaaactaccactcggttcctgcagaccgaagccgtgaccctgcaggacgtgagaggccgggactaccagaacgccatgcgggtgtggtccaacatccctggactgaaaagcaagcacgcacctctgacccctaaagaagaggagtacctgcaggcccaggtgcggagcagaagcaagctggacgcccctaaggtggatctgctggtgaagaattgcctcctgcccctgagagagtacttcaagtatttcagccagaatagtctgcccctgggcggcccaagcagcggcgcccctcctcccagcggcggcagcccagccggctccccaacctctaccgaggagggcacctctgagtccgccacccccgagagcggccctggcacctccaccgagcccagcgagggcagcgcacccggcagccctgccggcagccccacctccacagaggagggaaccagcaccgagcccagcgaaggcagcgccccaggcaccagcaccgagcctagtgagggcggctctggcggcggcagcgcccaggagattaaacggatcaacaagatcagaagaagacttgtgaaagacagcaacaccaagaaggccggcaagacaggccccatgaaaaccctgctggttagagtgatgacacccgatctgagagagcggctggaaaacctgagaaagaagcctgaaaatatcccccagcccatcagcaatacatctagagccaacctgaataagctgctgaccgattacaccgaaatgaagaaggcgatcctgcatgtgtactgggaagagttccagaaggaccctgtgggcctgatgagccgggtggcccagcctgccagcaagaagatcgatcagaacaagctgaaacctgagatggacgagaagggcaacctgaccaccgccggctttgcctgctctcagtgtggccagcccctgttcgtgtacaagctggagcaggtgtctgagaagggcaaggcttacaccaactacttcggacggtgcaatgtggccgagcacgaaaagctgatcctgctggcccagctgaagcccgagaaggatagcgacgaagccgtgacatatagcctgggaaagtttgggcagagggccctggatttctacagcattcatgtgaccaaggagtccacccaccccgtgaagcccctggcccagatcgccggaaacagatacgcctccggacctgtgggaaaggccctgagcgacgcatgtatgggcacaatcgcctccttcctgtctaagtaccaggacatcatcatcgaacaccagaaggtggtgaagggcaaccagaagagactggagagcctgcgggagctggccggcaaggaaaacctggaataccctagcgtgaccctgccacctcagcctcacaccaaggagggcgttgatgcctacaacgaagtgatcgcccgggtgcgaatgtgggtgaacctgaacctgtggcagaagctgaagctaagcagagatgatgccaagcctctgctgagactgaagggattcccttcctttcctctggtcgagagacaggccaacgaagtggactggtgggacatggtgtgtaacgtgaagaagctgatcaacgagaaaaaggaggatggcaaggtgttttggcagaatctggctggctacaagagacaggaagccctgagaccatacctgagcagcgaggaagatcggaagaagggaaagaaattcgctcggtaccagctgggcgacctgctgctgcacctggaaaagaagcacggcgaggactggggaaaggtgtacgacgaggcctgggagcggattgacaagaaagtggaaggcctgagcaagcacatcaagctggaagaggaacggagaagcgaggacgcccagagcaaggccgccctgaccgactggctgcgggctaaggccagcttcgtgatcgagggcctgaaggaggccgacaaggacgagttctgcagatgcgagctgaagctgcagaagtggtacggggacctgcggggaaagcccttcgccatcgaagccgagaacagcatcctggacatcagcggcttcagcaagcagtacaactgtgccttcatctggcagaaggacggcgtgaagaagctgaacctgtacctgatcatcaactacttcaagggcggcaagctgcggttcaagaagatcaaacctgaagccttcgaagccaacagattctacaccgtgatcaacaaaaagagcggcgagatcgtgcccatggaggtgaacttcaacttcgacgaccccaacctgatcatcctgcctctggcctttggcaagagacagggcagagaattcatctggaacgacctgctgtccctggaaaccggcagcctgaagctggccaacggaagagtgatcgagaagacactgtacaacagaagaacccggcaggatgagcctgccctgttcgtggccctgaccttcgagcggcgggaggtcctggactcctccaatatcaaaccaatgaacctgatcggcgtggcaagaggcgaaaacatccccgccgtgatcgccctgaccgaccccgagggctgcccactgagccggtttaaggatagcctgggaaacccaacccacatcctgagaatcggcgagagctataaggagaagcagcggaccatccaggccaagaaggaggtggagcagcggagagccggcggctacagccggaagtacgccagcaaagccaagaatctggcagacgatatggtgagaaacaccgctagagatctgctgtactacgccgtgacccaggatgccatgctgatcttcgccaacctgagccggggcttcggccggcagggcaagcggaccttcatggccgagagacagtacacacggatggaggactggctgaccgccaagctggcctacgagggcctgagcaagacctacctgtccaagacactggcccagtacacctccaagacatgcagcaactgtgggtttaccatcaccagcgccgactacgacagggtgctggagaagctgaagaagacagcaacaggctggatgaccacaattaacggcaaggagctgaaggtggagggccagattacctactacaacagatacaagagacagaacgtagtcaaggacctgtccgtcgagctggatagactgagcgaagaatctgtgaacaacgacatctcctcctggacaaagggcagaagcggagaagctctgagcctcctgaagaaaagattctcccatagacccgtgcaggagaagttcgtgtgcctgaactgcggcttcgagacacacgcagccgagcaagccgccctgaacatcgccagatcctggctgttcctgcggagccaggagtacaagaaataccagacaaacaagacaaccggcaacaccgataagagagccttcgtcgagacctggcagtccttttaccggaagaagcttaaggaggtgtggaaacctgccgtgcggtctggcggatctggcggaggctccacaagcagctacggcagcttcagcttcgaggacgtgaccgtgggcttcacccaggaggagtggcagcacctgggccccgcccagaggatcctgtacagggacgtgatgctggagaactacagccacctggtgagcgtgggctgctgcatccccaagcccgaggtgatcctgaagctggagcagggcgagcagccctggatcctggaggaggagagccccagccagagctaccccggcctgcccaccgacaccagccccaagaaaaagagaaaagtctaagctgccttctgcggggcttgccttctggccatgcccttcttctctcccttgcacctgtacctcttggtctttgaataaagcctgagtaggaaggctagcaaaaaaaaaaaaaaaaaaaaaaaaaaaaaaaaaaaaaaaaaaaaaaaaaaaaaaaaaaaaaaaaaaaaaaaaaaaaaaaa

SEQ ID NO: 4103 - RNA, 5419 nt, synthetic construct
  source 1..5419: mol_type = other RNA
aggaaataagagagaaaagaagagtaagaagaaatataagagccaccatggcccctaagaagaagcgtaaagtgagccgggtgaacggcagcggcagcggcggcggcatgaaccacgaccaggagttcgacccccctaaggtgtaccctcccgtccccgccgagaagagaaagcccatccgggtcctgagcctgttcgatggcatcgccaccggtctgctggtgctgaaggacctgggcatccaggtggataggtacattgcctccgaggtgtgcgaggactccatcaccgtgggaatggtgcgtcatcagggcaagatcatgtacgtgggcgacgtgcggagcgtgacacagaagcatatccaggagtggggccctttcgacctggtgatcggcggcagcccttgcaatgacctgagcatcgtgaacccagcccggaagggcctgtacgagggaaccggcagactgttcttcgagttttacagactgctgcacgacgcccggcctaaggaaggcgacgaccggcccttcttttggctgttcgagaatgtggtggccatgggagtcagcgacaagcgggatattagccggttcctggagagcaaccccgtgatgatcgatgccaaggaagtgagcgccgcccaccgggccagatacttctggggcaatctgcctggcatgaacagacccctggccagcaccgtgaacgacaagctggagctgcaggagtgcctggagcacggccggatcgccaagttcagcaaggtgagaaccatcaccacccgaagcaacagcatcaaacaaggcaaggaccagcactttcctgtgttcatgaacgagaaggaggacatcctgtggtgtaccgagatggagagagtgttcgggttcccagtccactacacagatgtcagcaacatgtctagactggccagacagagactgctgggaagaagctggtccgtccctgtgatcagacacctgttcgcccctctgaaggagtacttcgcctgcgtgagcagcggcaacagcaacgccaacagccggggccccagcttctctagcggcctggtgccactgtccctgagagggagccacatgggccccatggagatctacaaaaccgtgagcgcctggaagcggcagcctgtgcgcgtgctgagcctgtttcggaatatcgataaagtcctgaaaagcctgggattcctggagagcggctctggctccggcggtggcaccctgaagtacgtggaggatgtgacaaacgtggtcagacgggatgtggagaagtggggccccttcgatctggtgtacggcagcacccaacccctgggcagctcttgtgaccggtgccctggctggtacatgtttcagttccaccggatcctgcagtacgccctgccgagacaggagtcccagcggccattcttttggattttcatggacaacttgctgctgaccgaggatgaccaggaaactaccactcggttcctgcagaccgaagccgtgaccctgcaggacgtgagaggccgggactaccagaacgccatgcgggtgtggtccaacatccctggactgaaaagcaagcacgcacctctgacccctaaagaagaggagtacctgcaggcccaggtgcggagcagaagcaagctggacgcccctaaggtggatctgctggtgaagaattgcctcctgcccctgagagagtacttcaagtatttcagccagaatagtctgcccctgggcggcccaagcagcggcgcccctcctcccagcggcggcagcccagccggctccccaacctctaccgaggagggcacctctgagtccgccacccccgagagcggccctggcacctccaccgagcccagcgagggcagcgcacccggcagccctgccggcagccccacctccacagaggagggaaccagcaccgagcccagcgaaggcagcgccccaggcaccagcaccgagcctagtgagggcggctctggcggcggcagcgcccaggagattaaacggatcaacaagatcagaagaagacttgtgaaagacagcaacaccaagaaggccggcaagacaggccccatgaaaaccctgctggttagagtgatgacacccgatctgagagagcggctggaaaacctgagaaagaagcctgaaaatatcccccagcccatcagcaatacatctagagccaacctgaataagctgctgaccgattacaccgaaatgaagaaggcgatcctgcatgtgtactgggaagagttccagaaggaccctgtgggcctgatgagccgggtggcccagcctgccagcaagaagatcgatcagaacaagctgaaacctgagatggacgagaagggcaacctgaccaccgccggctttgcctgctctcagtgtggccagcccctgttcgtgtacaagctggagcaggtgtctgagaagggcaaggcttacaccaactacttcggacggtgcaatgtggccgagcacgaaaagctgatcctgctggcccagctgaagcccgagaaggatagcgacgaagccgtgacatatagcctgggaaagtttgggcagagggccctggatttctacagcattcatgtgaccaaggagtccacccaccccgtgaagcccctggcccagatcgccggaaacagatacgcctccggacctgtgggaaaggccctgagcgacgcatgtatgggcacaatcgcctccttcctgtctaagtaccaggacatcatcatcgaacaccagaaggtggtgaagggcaaccagaagagactggagagcctgcgggagctggccggcaaggaaaacctggaataccctagcgtgaccctgccacctcagcctcacaccaaggagggcgttgatgcctacaacgaagtgatcgcccgggtgcgaatgtgggtgaacctgaacctgtggcagaagctgaagctaagcagagatgatgccaagcctctgctgagactgaagggattcccttcctttcctctggtcgagagacaggccaacgaagtggactggtgggacatggtgtgtaacgtgaagaagctgatcaacgagaaaaaggaggatggcaaggtgttttggcagaatctggctggctacaagagacaggaagccctgagaccatacctgagcagcgaggaagatcggaagaagggaaagaaattcgctcggtaccagctgggcgacctgctgctgcacctggaaaagaagcacggcgaggactggggaaaggtgtacgacgaggcctgggagcggattgacaagaaagtggaaggcctgagcaagcacatcaagctggaagaggaacggagaagcgaggacgcccagagcaaggccgccctgaccgactggctgcgggctaaggccagcttcgtgatcgagggcctgaaggaggccgacaaggacgagttctgcagatgcgagctgaagctgcagaagtggtacggggacctgcggggaaagcccttcgccatcgaagccgagaacagcatcctggacatcagcggcttcagcaagcagtacaactgtgccttcatctggcagaaggacggcgtgaagaagctgaacctgtacctgatcatcaactacttcaagggcggcaagctgcggttcaagaagatcaaacctgaagccttcgaagccaacagattctacaccgtgatcaacaaaaagagcggcgagatcgtgcccatggaggtgaacttcaacttcgacgaccccaacctgatcatcctgcctctggcctttggcaagagacagggcagagaattcatctggaacgacctgctgtccctggaaaccggcagcctgaagctggccaacggaagagtgatcgagaagacactgtacaacagaagaacccggcaggatgagcctgccctgttcgtggccctgaccttcgagcggcgggaggtcctggactcctccaatatcaaaccaatgaacctgatcggcgtggcaagaggcgaaaacatccccgccgtgatcgccctgaccgaccccgagggctgcccactgagccggtttaaggatagcctgggaaacccaacccacatcctgagaatcggcgagagctataaggagaagcagcggaccatccaggccaagaaggaggtggagcagcggagagccggcggctacagccggaagtacgccagcaaagccaagaatctggcagacgatatggtgagaaacaccgctagagatctgctgtactacgccgtgacccaggatgccatgctgatcttcgccaacctgagccggggcttcggccggcagggcaagcggaccttcatggccgagagacagtacacacggatggaggactggctgaccgccaagctggcctacgagggcctgagcaagacctacctgtccaagacactggcccagtacacctccaagacatgcagcaactgtgggtttaccatcaccagcgccgactacgacagggtgctggagaagctgaagaagacagcaacaggctggatgaccacaattaacggcaaggagctgaaggtggagggccagattacctactacaacagatacaagagacagaacgtagtcaaggacctgtccgtcgagctggatagactgagcgaagaatctgtgaacaacgacatctcctcctggacaaagggcagaagcggagaagctctgagcctcctgaagaaaagattctcccatagacccgtgcaggagaagttcgtgtgcctgaactgcggcttcgagacacacgcagccgagcaagccgccctgaacatcgccagatcctggctgttcctgcggagccaggagtacaagaaataccagacaaacaagacaaccggcaacaccgataagagagccttcgtcgagacctggcagtccttttaccggaagaagcttaaggaggtgtggaaacctgccgtgcggtctggcggatctggcggaggctccacaagccccagcggcctggtgaccttcgaggaggtggccgtgtacttcaccagggaggagggcgccctgctggaccccacccagagggccctgtacagggacgtgatgcaggagaactacgagaccgtggtgctgctgggcttccccgtgagcaagcccgacgtgatcagccagctggagaggggcgaggagccctgggtgcccgacctgcagggcagcgagaaggaggtgctgcccagggccgcctgcaccagccccaagaaaaagagaaaagtctaagctgccttctgcggggcttgccttctggccatgcccttcttctctcccttgcacctgtacctcttggtctttgaataaagcctgagtaggaaggctagcaaaaaaaaaaaaaaaaaaaaaaaaaaaaaaaaaaaaaaaaaaaaaaaaaaaaaaaaaaaaaaaaaaaaaaaaaaaaaaaa

SEQ ID NO: 4104 - RNA, 5419 nt, synthetic construct
  source 1..5419: mol_type = other RNA
aggaaataagagagaaaagaagagtaagaagaaatataagagccaccatggcccctaagaagaagcgtaaagtgagccgggtgaacggcagcggcagcggcggcggcatgaaccacgaccaggagttcgacccccctaaggtgtaccctcccgtccccgccgagaagagaaagcccatccgggtcctgagcctgttcgatggcatcgccaccggtctgctggtgctgaaggacctgggcatccaggtggataggtacattgcctccgaggtgtgcgaggactccatcaccgtgggaatggtgcgtcatcagggcaagatcatgtacgtgggcgacgtgcggagcgtgacacagaagcatatccaggagtggggccctttcgacctggtgatcggcggcagcccttgcaatgacctgagcatcgtgaacccagcccggaagggcctgtacgagggaaccggcagactgttcttcgagttttacagactgctgcacgacgcccggcctaaggaaggcgacgaccggcccttcttttggctgttcgagaatgtggtggccatgggagtcagcgacaagcgggatattagccggttcctggagagcaaccccgtgatgatcgatgccaaggaagtgagcgccgcccaccgggccagatacttctggggcaatctgcctggcatgaacagacccctggccagcaccgtgaacgacaagctggagctgcaggagtgcctggagcacggccggatcgccaagttcagcaaggtgagaaccatcaccacccgaagcaacagcatcaaacaaggcaaggaccagcactttcctgtgttcatgaacgagaaggaggacatcctgtggtgtaccgagatggagagagtgttcgggttcccagtccactacacagatgtcagcaacatgtctagactggccagacagagactgctgggaagaagctggtccgtccctgtgatcagacacctgttcgcccctctgaaggagtacttcgcctgcgtgagcagcggcaacagcaacgccaacagccggggccccagcttctctagcggcctggtgccactgtccctgagagggagccacatgggccccatggagatctacaaaaccgtgagcgcctggaagcggcagcctgtgcgcgtgctgagcctgtttcggaatatcgataaagtcctgaaaagcctgggattcctggagagcggctctggctccggcggtggcaccctgaagtacgtggaggatgtgacaaacgtggtcagacgggatgtggagaagtggggccccttcgatctggtgtacggcagcacccaacccctgggcagctcttgtgaccggtgccctggctggtacatgtttcagttccaccggatcctgcagtacgccctgccgagacaggagtcccagcggccattcttttggattttcatggacaacttgctgctgaccgaggatgaccaggaaactaccactcggttcctgcagaccgaagccgtgaccctgcaggacgtgagaggccgggactaccagaacgccatgcgggtgtggtccaacatccctggactgaaaagcaagcacgcacctctgacccctaaagaagaggagtacctgcaggcccaggtgcggagcagaagcaagctggacgcccctaaggtggatctgctggtgaagaattgcctcctgcccctgagagagtacttcaagtatttcagccagaatagtctgcccctgggcggcccaagcagcggcgcccctcctcccagcggcggcagcccagccggctccccaacctctaccgaggagggcacctctgagtccgccacccccgagagcggccctggcacctccaccgagcccagcgagggcagcgcacccggcagccctgccggcagccccacctccacagaggagggaaccagcaccgagcccagcgaaggcagcgccccaggcaccagcaccgagcctagtgagggcggctctggcggcggcagcgcccaggagattaaacggatcaacaagatcagaagaagacttgtgaaagacagcaacaccaagaaggccggcaagacaggccccatgaaaaccctgctggttagagtgatgacacccgatctgagagagcggctggaaaacctgagaaagaagcctgaaaatatcccccagcccatcagcaatacatctagagccaacctgaataagctgctgaccgattacaccgaaatgaagaaggcgatcctgcatgtgtactgggaagagttccagaaggaccctgtgggcctgatgagccgggtggcccagcctgccagcaagaagatcgatcagaacaagctgaaacctgagatggacgagaagggcaacctgaccaccgccggctttgcctgctctcagtgtggccagcccctgttcgtgtacaagctggagcaggtgtctgagaagggcaaggcttacaccaactacttcggacggtgcaatgtggccgagcacgaaaagctgatcctgctggcccagctgaagcccgagaaggatagcgacgaagccgtgacatatagcctgggaaagtttgggcagagggccctggatttctacagcattcatgtgaccaaggagtccacccaccccgtgaagcccctggcccagatcgccggaaacagatacgcctccggacctgtgggaaaggccctgagcgacgcatgtatgggcacaatcgcctccttcctgtctaagtaccaggacatcatcatcgaacaccagaaggtggtgaagggcaaccagaagagactggagagcctgcgggagctggccggcaaggaaaacctggaataccctagcgtgaccctgccacctcagcctcacaccaaggagggcgttgatgcctacaacgaagtgatcgcccgggtgcgaatgtgggtgaacctgaacctgtggcagaagctgaagctaagcagagatgatgccaagcctctgctgagactgaagggattcccttcctttcctctggtcgagagacaggccaacgaagtggactggtgggacatggtgtgtaacgtgaagaagctgatcaacgagaaaaaggaggatggcaaggtgttttggcagaatctggctggctacaagagacaggaagccctgagaccatacctgagcagcgaggaagatcggaagaagggaaagaaattcgctcggtaccagctgggcgacctgctgctgcacctggaaaagaagcacggcgaggactggggaaaggtgtacgacgaggcctgggagcggattgacaagaaagtggaaggcctgagcaagcacatcaagctggaagaggaacggagaagcgaggacgcccagagcaaggccgccctgaccgactggctgcgggctaaggccagcttcgtgatcgagggcctgaaggaggccgacaaggacgagttctgcagatgcgagctgaagctgcagaagtggtacggggacctgcggggaaagcccttcgccatcgaagccgagaacagcatcctggacatcagcggcttcagcaagcagtacaactgtgccttcatctggcagaaggacggcgtgaagaagctgaacctgtacctgatcatcaactacttcaagggcggcaagctgcggttcaagaagatcaaacctgaagccttcgaagccaacagattctacaccgtgatcaacaaaaagagcggcgagatcgtgcccatggaggtgaacttcaacttcgacgaccccaacctgatcatcctgcctctggcctttggcaagagacagggcagagaattcatctggaacgacctgctgtccctggaaaccggcagcctgaagctggccaacggaagagtgatcgagaagacactgtacaacagaagaacccggcaggatgagcctgccctgttcgtggccctgaccttcgagcggcgggaggtcctggactcctccaatatcaaaccaatgaacctgatcggcgtggcaagaggcgaaaacatccccgccgtgatcgccctgaccgaccccgagggctgcccactgagccggtttaaggatagcctgggaaacccaacccacatcctgagaatcggcgagagctataaggagaagcagcggaccatccaggccaagaaggaggtggagcagcggagagccggcggctacagccggaagtacgccagcaaagccaagaatctggcagacgatatggtgagaaacaccgctagagatctgctgtactacgccgtgacccaggatgccatgctgatcttcgccaacctgagccggggcttcggccggcagggcaagcggaccttcatggccgagagacagtacacacggatggaggactggctgaccgccaagctggcctacgagggcctgagcaagacctacctgtccaagacactggcccagtacacctccaagacatgcagcaactgtgggtttaccatcaccagcgccgactacgacagggtgctggagaagctgaagaagacagcaacaggctggatgaccacaattaacggcaaggagctgaaggtggagggccagattacctactacaacagatacaagagacagaacgtagtcaaggacctgtccgtcgagctggatagactgagcgaagaatctgtgaacaacgacatctcctcctggacaaagggcagaagcggagaagctctgagcctcctgaagaaaagattctcccatagacccgtgcaggagaagttcgtgtgcctgaactgcggcttcgagacacacgcagccgagcaagccgccctgaacatcgccagatcctggctgttcctgcggagccaggagtacaagaaataccagacaaacaagacaaccggcaacaccgataagagagccttcgtcgagacctggcagtccttttaccggaagaagcttaaggaggtgtggaaacctgccgtgcggtctggcggatctggcggaggctccacaagcatggccttcagggacgtggccgtggacttcacccaggaggagtggatgctgctgagccccgcccagaggagcctgtacagggaggtgatgctggagaactacagcaacctggtgagcctgggcatccccttcagcaagcccaagctgatcacccagctggagcagggcaaggagacctggagggaggagaggaagtgcccccccgccaacggcccccccgagcccaagcccgagctgcacctgaccagccccaagaaaaagagaaaagtctaagctgccttctgcggggcttgccttctggccatgcccttcttctctcccttgcacctgtacctcttggtctttgaataaagcctgagtaggaaggctagcaaaaaaaaaaaaaaaaaaaaaaaaaaaaaaaaaaaaaaaaaaaaaaaaaaaaaaaaaaaaaaaaaaaaaaaaaaaaaaaa

SEQ ID NO: 4105 - RNA, 5419 nt, synthetic construct
  source 1..5419: mol_type = other RNA
aggaaataagagagaaaagaagagtaagaagaaatataagagccaccatggcccctaagaagaagcgtaaagtgagccgggtgaacggcagcggcagcggcggcggcatgaaccacgaccaggagttcgacccccctaaggtgtaccctcccgtccccgccgagaagagaaagcccatccgggtcctgagcctgttcgatggcatcgccaccggtctgctggtgctgaaggacctgggcatccaggtggataggtacattgcctccgaggtgtgcgaggactccatcaccgtgggaatggtgcgtcatcagggcaagatcatgtacgtgggcgacgtgcggagcgtgacacagaagcatatccaggagtggggccctttcgacctggtgatcggcggcagcccttgcaatgacctgagcatcgtgaacccagcccggaagggcctgtacgagggaaccggcagactgttcttcgagttttacagactgctgcacgacgcccggcctaaggaaggcgacgaccggcccttcttttggctgttcgagaatgtggtggccatgggagtcagcgacaagcgggatattagccggttcctggagagcaaccccgtgatgatcgatgccaaggaagtgagcgccgcccaccgggccagatacttctggggcaatctgcctggcatgaacagacccctggccagcaccgtgaacgacaagctggagctgcaggagtgcctggagcacggccggatcgccaagttcagcaaggtgagaaccatcaccacccgaagcaacagcatcaaacaaggcaaggaccagcactttcctgtgttcatgaacgagaaggaggacatcctgtggtgtaccgagatggagagagtgttcgggttcccagtccactacacagatgtcagcaacatgtctagactggccagacagagactgctgggaagaagctggtccgtccctgtgatcagacacctgttcgcccctctgaaggagtacttcgcctgcgtgagcagcggcaacagcaacgccaacagccggggccccagcttctctagcggcctggtgccactgtccctgagagggagccacatgggccccatggagatctacaaaaccgtgagcgcctggaagcggcagcctgtgcgcgtgctgagcctgtttcggaatatcgataaagtcctgaaaagcctgggattcctggagagcggctctggctccggcggtggcaccctgaagtacgtggaggatgtgacaaacgtggtcagacgggatgtggagaagtggggccccttcgatctggtgtacggcagcacccaacccctgggcagctcttgtgaccggtgccctggctggtacatgtttcagttccaccggatcctgcagtacgccctgccgagacaggagtcccagcggccattcttttggattttcatggacaacttgctgctgaccgaggatgaccaggaaactaccactcggttcctgcagaccgaagccgtgaccctgcaggacgtgagaggccgggactaccagaacgccatgcgggtgtggtccaacatccctggactgaaaagcaagcacgcacctctgacccctaaagaagaggagtacctgcaggcccaggtgcggagcagaagcaagctggacgcccctaaggtggatctgctggtgaagaattgcctcctgcccctgagagagtacttcaagtatttcagccagaatagtctgcccctgggcggcccaagcagcggcgcccctcctcccagcggcggcagcccagccggctccccaacctctaccgaggagggcacctctgagtccgccacccccgagagcggccctggcacctccaccgagcccagcgagggcagcgcacccggcagccctgccggcagccccacctccacagaggagggaaccagcaccgagcccagcgaaggcagcgccccaggcaccagcaccgagcctagtgagggcggctctggcggcggcagcgcccaggagattaaacggatcaacaagatcagaagaagacttgtgaaagacagcaacaccaagaaggccggcaagacaggccccatgaaaaccctgctggttagagtgatgacacccgatctgagagagcggctggaaaacctgagaaagaagcctgaaaatatcccccagcccatcagcaatacatctagagccaacctgaataagctgctgaccgattacaccgaaatgaagaaggcgatcctgcatgtgtactgggaagagttccagaaggaccctgtgggcctgatgagccgggtggcccagcctgccagcaagaagatcgatcagaacaagctgaaacctgagatggacgagaagggcaacctgaccaccgccggctttgcctgctctcagtgtggccagcccctgttcgtgtacaagctggagcaggtgtctgagaagggcaaggcttacaccaactacttcggacggtgcaatgtggccgagcacgaaaagctgatcctgctggcccagctgaagcccgagaaggatagcgacgaagccgtgacatatagcctgggaaagtttgggcagagggccctggatttctacagcattcatgtgaccaaggagtccacccaccccgtgaagcccctggcccagatcgccggaaacagatacgcctccggacctgtgggaaaggccctgagcgacgcatgtatgggcacaatcgcctccttcctgtctaagtaccaggacatcatcatcgaacaccagaaggtggtgaagggcaaccagaagagactggagagcctgcgggagctggccggcaaggaaaacctggaataccctagcgtgaccctgccacctcagcctcacaccaaggagggcgttgatgcctacaacgaagtgatcgcccgggtgcgaatgtgggtgaacctgaacctgtggcagaagctgaagctaagcagagatgatgccaagcctctgctgagactgaagggattcccttcctttcctctggtcgagagacaggccaacgaagtggactggtgggacatggtgtgtaacgtgaagaagctgatcaacgagaaaaaggaggatggcaaggtgttttggcagaatctggctggctacaagagacaggaagccctgagaccatacctgagcagcgaggaagatcggaagaagggaaagaaattcgctcggtaccagctgggcgacctgctgctgcacctggaaaagaagcacggcgaggactggggaaaggtgtacgacgaggcctgggagcggattgacaagaaagtggaaggcctgagcaagcacatcaagctggaagaggaacggagaagcgaggacgcccagagcaaggccgccctgaccgactggctgcgggctaaggccagcttcgtgatcgagggcctgaaggaggccgacaaggacgagttctgcagatgcgagctgaagctgcagaagtggtacggggacctgcggggaaagcccttcgccatcgaagccgagaacagcatcctggacatcagcggcttcagcaagcagtacaactgtgccttcatctggcagaaggacggcgtgaagaagctgaacctgtacctgatcatcaactacttcaagggcggcaagctgcggttcaagaagatcaaacctgaagccttcgaagccaacagattctacaccgtgatcaacaaaaagagcggcgagatcgtgcccatggaggtgaacttcaacttcgacgaccccaacctgatcatcctgcctctggcctttggcaagagacagggcagagaattcatctggaacgacctgctgtccctggaaaccggcagcctgaagctggccaacggaagagtgatcgagaagacactgtacaacagaagaacccggcaggatgagcctgccctgttcgtggccctgaccttcgagcggcgggaggtcctggactcctccaatatcaaaccaatgaacctgatcggcgtggcaagaggcgaaaacatccccgccgtgatcgccctgaccgaccccgagggctgcccactgagccggtttaaggatagcctgggaaacccaacccacatcctgagaatcggcgagagctataaggagaagcagcggaccatccaggccaagaaggaggtggagcagcggagagccggcggctacagccggaagtacgccagcaaagccaagaatctggcagacgatatggtgagaaacaccgctagagatctgctgtactacgccgtgacccaggatgccatgctgatcttcgccaacctgagccggggcttcggccggcagggcaagcggaccttcatggccgagagacagtacacacggatggaggactggctgaccgccaagctggcctacgagggcctgagcaagacctacctgtccaagacactggcccagtacacctccaagacatgcagcaactgtgggtttaccatcaccagcgccgactacgacagggtgctggagaagctgaagaagacagcaacaggctggatgaccacaattaacggcaaggagctgaaggtggagggccagattacctactacaacagatacaagagacagaacgtagtcaaggacctgtccgtcgagctggatagactgagcgaagaatctgtgaacaacgacatctcctcctggacaaagggcagaagcggagaagctctgagcctcctgaagaaaagattctcccatagacccgtgcaggagaagttcgtgtgcctgaactgcggcttcgagacacacgcagccgagcaagccgccctgaacatcgccagatcctggctgttcctgcggagccaggagtacaagaaataccagacaaacaagacaaccggcaacaccgataagagagccttcgtcgagacctggcagtccttttaccggaagaagcttaaggaggtgtggaaacctgccgtgcggtctggcggatctggcggaggctccacaagcatgggcctgctgaccttccaggacgtgaccgtggacttcacccaggaggagtgggagtgcctggacctgggccagaggggcctgtacagggacgtgatgctggagaactacggcaacctggcctgcctgggcctggtggtgagcaagcccgacctggtgaccttcctggagcagatgaaggacccctggaacgtgaggaggatcgagaccgccatctaccccggcatgtgcctgctgaacatcaccagccccaagaaaaagagaaaagtctaagctgccttctgcggggcttgccttctggccatgcccttcttctctcccttgcacctgtacctcttggtctttgaataaagcctgagtaggaaggctagcaaaaaaaaaaaaaaaaaaaaaaaaaaaaaaaaaaaaaaaaaaaaaaaaaaaaaaaaaaaaaaaaaaaaaaaaaaaaaaaa

SEQ ID NO: 4106 - RNA, 5419 nt, synthetic construct
  source 1..5419: mol_type = other RNA
aggaaataagagagaaaagaagagtaagaagaaatataagagccaccatggcccctaagaagaagcgtaaagtgagccgggtgaacggcagcggcagcggcggcggcatgaaccacgaccaggagttcgacccccctaaggtgtaccctcccgtccccgccgagaagagaaagcccatccgggtcctgagcctgttcgatggcatcgccaccggtctgctggtgctgaaggacctgggcatccaggtggataggtacattgcctccgaggtgtgcgaggactccatcaccgtgggaatggtgcgtcatcagggcaagatcatgtacgtgggcgacgtgcggagcgtgacacagaagcatatccaggagtggggccctttcgacctggtgatcggcggcagcccttgcaatgacctgagcatcgtgaacccagcccggaagggcctgtacgagggaaccggcagactgttcttcgagttttacagactgctgcacgacgcccggcctaaggaaggcgacgaccggcccttcttttggctgttcgagaatgtggtggccatgggagtcagcgacaagcgggatattagccggttcctggagagcaaccccgtgatgatcgatgccaaggaagtgagcgccgcccaccgggccagatacttctggggcaatctgcctggcatgaacagacccctggccagcaccgtgaacgacaagctggagctgcaggagtgcctggagcacggccggatcgccaagttcagcaaggtgagaaccatcaccacccgaagcaacagcatcaaacaaggcaaggaccagcactttcctgtgttcatgaacgagaaggaggacatcctgtggtgtaccgagatggagagagtgttcgggttcccagtccactacacagatgtcagcaacatgtctagactggccagacagagactgctgggaagaagctggtccgtccctgtgatcagacacctgttcgcccctctgaaggagtacttcgcctgcgtgagcagcggcaacagcaacgccaacagccggggccccagcttctctagcggcctggtgccactgtccctgagagggagccacatgggccccatggagatctacaaaaccgtgagcgcctggaagcggcagcctgtgcgcgtgctgagcctgtttcggaatatcgataaagtcctgaaaagcctgggattcctggagagcggctctggctccggcggtggcaccctgaagtacgtggaggatgtgacaaacgtggtcagacgggatgtggagaagtggggccccttcgatctggtgtacggcagcacccaacccctgggcagctcttgtgaccggtgccctggctggtacatgtttcagttccaccggatcctgcagtacgccctgccgagacaggagtcccagcggccattcttttggattttcatggacaacttgctgctgaccgaggatgaccaggaaactaccactcggttcctgcagaccgaagccgtgaccctgcaggacgtgagaggccgggactaccagaacgccatgcgggtgtggtccaacatccctggactgaaaagcaagcacgcacctctgacccctaaagaagaggagtacctgcaggcccaggtgcggagcagaagcaagctggacgcccctaaggtggatctgctggtgaagaattgcctcctgcccctgagagagtacttcaagtatttcagccagaatagtctgcccctgggcggcccaagcagcggcgcccctcctcccagcggcggcagcccagccggctccccaacctctaccgaggagggcacctctgagtccgccacccccgagagcggccctggcacctccaccgagcccagcgagggcagcgcacccggcagccctgccggcagccccacctccacagaggagggaaccagcaccgagcccagcgaaggcagcgccccaggcaccagcaccgagcctagtgagggcggctctggcggcggcagcgcccaggagattaaacggatcaacaagatcagaagaagacttgtgaaagacagcaacaccaagaaggccggcaagacaggccccatgaaaaccctgctggttagagtgatgacacccgatctgagagagcggctggaaaacctgagaaagaagcctgaaaatatcccccagcccatcagcaatacatctagagccaacctgaataagctgctgaccgattacaccgaaatgaagaaggcgatcctgcatgtgtactgggaagagttccagaaggaccctgtgggcctgatgagccgggtggcccagcctgccagcaagaagatcgatcagaacaagctgaaacctgagatggacgagaagggcaacctgaccaccgccggctttgcctgctctcagtgtggccagcccctgttcgtgtacaagctggagcaggtgtctgagaagggcaaggcttacaccaactacttcggacggtgcaatgtggccgagcacgaaaagctgatcctgctggcccagctgaagcccgagaaggatagcgacgaagccgtgacatatagcctgggaaagtttgggcagagggccctggatttctacagcattcatgtgaccaaggagtccacccaccccgtgaagcccctggcccagatcgccggaaacagatacgcctccggacctgtgggaaaggccctgagcgacgcatgtatgggcacaatcgcctccttcctgtctaagtaccaggacatcatcatcgaacaccagaaggtggtgaagggcaaccagaagagactggagagcctgcgggagctggccggcaaggaaaacctggaataccctagcgtgaccctgccacctcagcctcacaccaaggagggcgttgatgcctacaacgaagtgatcgcccgggtgcgaatgtgggtgaacctgaacctgtggcagaagctgaagctaagcagagatgatgccaagcctctgctgagactgaagggattcccttcctttcctctggtcgagagacaggccaacgaagtggactggtgggacatggtgtgtaacgtgaagaagctgatcaacgagaaaaaggaggatggcaaggtgttttggcagaatctggctggctacaagagacaggaagccctgagaccatacctgagcagcgaggaagatcggaagaagggaaagaaattcgctcggtaccagctgggcgacctgctgctgcacctggaaaagaagcacggcgaggactggggaaaggtgtacgacgaggcctgggagcggattgacaagaaagtggaaggcctgagcaagcacatcaagctggaagaggaacggagaagcgaggacgcccagagcaaggccgccctgaccgactggctgcgggctaaggccagcttcgtgatcgagggcctgaaggaggccgacaaggacgagttctgcagatgcgagctgaagctgcagaagtggtacggggacctgcggggaaagcccttcgccatcgaagccgagaacagcatcctggacatcagcggcttcagcaagcagtacaactgtgccttcatctggcagaaggacggcgtgaagaagctgaacctgtacctgatcatcaactacttcaagggcggcaagctgcggttcaagaagatcaaacctgaagccttcgaagccaacagattctacaccgtgatcaacaaaaagagcggcgagatcgtgcccatggaggtgaacttcaacttcgacgaccccaacctgatcatcctgcctctggcctttggcaagagacagggcagagaattcatctggaacgacctgctgtccctggaaaccggcagcctgaagctggccaacggaagagtgatcgagaagacactgtacaacagaagaacccggcaggatgagcctgccctgttcgtggccctgaccttcgagcggcgggaggtcctggactcctccaatatcaaaccaatgaacctgatcggcgtggcaagaggcgaaaacatccccgccgtgatcgccctgaccgaccccgagggctgcccactgagccggtttaaggatagcctgggaaacccaacccacatcctgagaatcggcgagagctataaggagaagcagcggaccatccaggccaagaaggaggtggagcagcggagagccggcggctacagccggaagtacgccagcaaagccaagaatctggcagacgatatggtgagaaacaccgctagagatctgctgtactacgccgtgacccaggatgccatgctgatcttcgccaacctgagccggggcttcggccggcagggcaagcggaccttcatggccgagagacagtacacacggatggaggactggctgaccgccaagctggcctacgagggcctgagcaagacctacctgtccaagacactggcccagtacacctccaagacatgcagcaactgtgggtttaccatcaccagcgccgactacgacagggtgctggagaagctgaagaagacagcaacaggctggatgaccacaattaacggcaaggagctgaaggtggagggccagattacctactacaacagatacaagagacagaacgtagtcaaggacctgtccgtcgagctggatagactgagcgaagaatctgtgaacaacgacatctcctcctggacaaagggcagaagcggagaagctctgagcctcctgaagaaaagattctcccatagacccgtgcaggagaagttcgtgtgcctgaactgcggcttcgagacacacgcagccgagcaagccgccctgaacatcgccagatcctggctgttcctgcggagccaggagtacaagaaataccagacaaacaagacaaccggcaacaccgataagagagccttcgtcgagacctggcagtccttttaccggaagaagcttaaggaggtgtggaaacctgccgtgcggtctggcggatctggcggaggctccacaagcatccagggcctgctgaccttcggcgacgtggccgtggccttcaccaggatcgagtggaggcacctggacgccgcccagagggccctgtacagggacgtgatgctggagaactacggcaacctggtgagcgtgggcctgctgagcagcaagcccaagctgatcgcccagctggagcagggcgccgagccctggatggaggtgagggaggcccccagcggcaccagggccgtgcccgactactggaccagccccaagaaaaagagaaaagtctaagctgccttctgcggggcttgccttctggccatgcccttcttctctcccttgcacctgtacctcttggtctttgaataaagcctgagtaggaaggctagcaaaaaaaaaaaaaaaaaaaaaaaaaaaaaaaaaaaaaaaaaaaaaaaaaaaaaaaaaaaaaaaaaaaaaaaaaaaaaaaa

SEQ ID NO: 4107 - RNA, 5419 nt, synthetic construct
  source 1..5419: mol_type = other RNA
aggaaataagagagaaaagaagagtaagaagaaatataagagccaccatggcccctaagaagaagcgtaaagtgagccgggtgaacggcagcggcagcggcggcggcatgaaccacgaccaggagttcgacccccctaaggtgtaccctcccgtccccgccgagaagagaaagcccatccgggtcctgagcctgttcgatggcatcgccaccggtctgctggtgctgaaggacctgggcatccaggtggataggtacattgcctccgaggtgtgcgaggactccatcaccgtgggaatggtgcgtcatcagggcaagatcatgtacgtgggcgacgtgcggagcgtgacacagaagcatatccaggagtggggccctttcgacctggtgatcggcggcagcccttgcaatgacctgagcatcgtgaacccagcccggaagggcctgtacgagggaaccggcagactgttcttcgagttttacagactgctgcacgacgcccggcctaaggaaggcgacgaccggcccttcttttggctgttcgagaatgtggtggccatgggagtcagcgacaagcgggatattagccggttcctggagagcaaccccgtgatgatcgatgccaaggaagtgagcgccgcccaccgggccagatacttctggggcaatctgcctggcatgaacagacccctggccagcaccgtgaacgacaagctggagctgcaggagtgcctggagcacggccggatcgccaagttcagcaaggtgagaaccatcaccacccgaagcaacagcatcaaacaaggcaaggaccagcactttcctgtgttcatgaacgagaaggaggacatcctgtggtgtaccgagatggagagagtgttcgggttcccagtccactacacagatgtcagcaacatgtctagactggccagacagagactgctgggaagaagctggtccgtccctgtgatcagacacctgttcgcccctctgaaggagtacttcgcctgcgtgagcagcggcaacagcaacgccaacagccggggccccagcttctctagcggcctggtgccactgtccctgagagggagccacatgggccccatggagatctacaaaaccgtgagcgcctggaagcggcagcctgtgcgcgtgctgagcctgtttcggaatatcgataaagtcctgaaaagcctgggattcctggagagcggctctggctccggcggtggcaccctgaagtacgtggaggatgtgacaaacgtggtcagacgggatgtggagaagtggggccccttcgatctggtgtacggcagcacccaacccctgggcagctcttgtgaccggtgccctggctggtacatgtttcagttccaccggatcctgcagtacgccctgccgagacaggagtcccagcggccattcttttggattttcatggacaacttgctgctgaccgaggatgaccaggaaactaccactcggttcctgcagaccgaagccgtgaccctgcaggacgtgagaggccgggactaccagaacgccatgcgggtgtggtccaacatccctggactgaaaagcaagcacgcacctctgacccctaaagaagaggagtacctgcaggcccaggtgcggagcagaagcaagctggacgcccctaaggtggatctgctggtgaagaattgcctcctgcccctgagagagtacttcaagtatttcagccagaatagtctgcccctgggcggcccaagcagcggcgcccctcctcccagcggcggcagcccagccggctccccaacctctaccgaggagggcacctctgagtccgccacccccgagagcggccctggcacctccaccgagcccagcgagggcagcgcacccggcagccctgccggcagccccacctccacagaggagggaaccagcaccgagcccagcgaaggcagcgccccaggcaccagcaccgagcctagtgagggcggctctggcggcggcagcgcccaggagattaaacggatcaacaagatcagaagaagacttgtgaaagacagcaacaccaagaaggccggcaagacaggccccatgaaaaccctgctggttagagtgatgacacccgatctgagagagcggctggaaaacctgagaaagaagcctgaaaatatcccccagcccatcagcaatacatctagagccaacctgaataagctgctgaccgattacaccgaaatgaagaaggcgatcctgcatgtgtactgggaagagttccagaaggaccctgtgggcctgatgagccgggtggcccagcctgccagcaagaagatcgatcagaacaagctgaaacctgagatggacgagaagggcaacctgaccaccgccggctttgcctgctctcagtgtggccagcccctgttcgtgtacaagctggagcaggtgtctgagaagggcaaggcttacaccaactacttcggacggtgcaatgtggccgagcacgaaaagctgatcctgctggcccagctgaagcccgagaaggatagcgacgaagccgtgacatatagcctgggaaagtttgggcagagggccctggatttctacagcattcatgtgaccaaggagtccacccaccccgtgaagcccctggcccagatcgccggaaacagatacgcctccggacctgtgggaaaggccctgagcgacgcatgtatgggcacaatcgcctccttcctgtctaagtaccaggacatcatcatcgaacaccagaaggtggtgaagggcaaccagaagagactggagagcctgcgggagctggccggcaaggaaaacctggaataccctagcgtgaccctgccacctcagcctcacaccaaggagggcgttgatgcctacaacgaagtgatcgcccgggtgcgaatgtgggtgaacctgaacctgtggcagaagctgaagctaagcagagatgatgccaagcctctgctgagactgaagggattcccttcctttcctctggtcgagagacaggccaacgaagtggactggtgggacatggtgtgtaacgtgaagaagctgatcaacgagaaaaaggaggatggcaaggtgttttggcagaatctggctggctacaagagacaggaagccctgagaccatacctgagcagcgaggaagatcggaagaagggaaagaaattcgctcggtaccagctgggcgacctgctgctgcacctggaaaagaagcacggcgaggactggggaaaggtgtacgacgaggcctgggagcggattgacaagaaagtggaaggcctgagcaagcacatcaagctggaagaggaacggagaagcgaggacgcccagagcaaggccgccctgaccgactggctgcgggctaaggccagcttcgtgatcgagggcctgaaggaggccgacaaggacgagttctgcagatgcgagctgaagctgcagaagtggtacggggacctgcggggaaagcccttcgccatcgaagccgagaacagcatcctggacatcagcggcttcagcaagcagtacaactgtgccttcatctggcagaaggacggcgtgaagaagctgaacctgtacctgatcatcaactacttcaagggcggcaagctgcggttcaagaagatcaaacctgaagccttcgaagccaacagattctacaccgtgatcaacaaaaagagcggcgagatcgtgcccatggaggtgaacttcaacttcgacgaccccaacctgatcatcctgcctctggcctttggcaagagacagggcagagaattcatctggaacgacctgctgtccctggaaaccggcagcctgaagctggccaacggaagagtgatcgagaagacactgtacaacagaagaacccggcaggatgagcctgccctgttcgtggccctgaccttcgagcggcgggaggtcctggactcctccaatatcaaaccaatgaacctgatcggcgtggcaagaggcgaaaacatccccgccgtgatcgccctgaccgaccccgagggctgcccactgagccggtttaaggatagcctgggaaacccaacccacatcctgagaatcggcgagagctataaggagaagcagcggaccatccaggccaagaaggaggtggagcagcggagagccggcggctacagccggaagtacgccagcaaagccaagaatctggcagacgatatggtgagaaacaccgctagagatctgctgtactacgccgtgacccaggatgccatgctgatcttcgccaacctgagccggggcttcggccggcagggcaagcggaccttcatggccgagagacagtacacacggatggaggactggctgaccgccaagctggcctacgagggcctgagcaagacctacctgtccaagacactggcccagtacacctccaagacatgcagcaactgtgggtttaccatcaccagcgccgactacgacagggtgctggagaagctgaagaagacagcaacaggctggatgaccacaattaacggcaaggagctgaaggtggagggccagattacctactacaacagatacaagagacagaacgtagtcaaggacctgtccgtcgagctggatagactgagcgaagaatctgtgaacaacgacatctcctcctggacaaagggcagaagcggagaagctctgagcctcctgaagaaaagattctcccatagacccgtgcaggagaagttcgtgtgcctgaactgcggcttcgagacacacgcagccgagcaagccgccctgaacatcgccagatcctggctgttcctgcggagccaggagtacaagaaataccagacaaacaagacaaccggcaacaccgataagagagccttcgtcgagacctggcagtccttttaccggaagaagcttaaggaggtgtggaaacctgccgtgcggtctggcggatctggcggaggctccacaagcctgctgaccttcgaggacgtggccctgttcttcaccgaggaggagtggcagctgctggaccccgcccagaagatcctgtactacaacgtgatgcaggagaactacgagaccgtgaccagcctgggcctgaagctgaagaacgacaccggcaacgaccagcccatcagcctgagcaccctggagatccaggccagcggctgcaaggtgctgaggaaggccaggatgaaggtggcccagaagaccaccagccccaagaaaaagagaaaagtctaagctgccttctgcggggcttgccttctggccatgcccttcttctctcccttgcacctgtacctcttggtctttgaataaagcctgagtaggaaggctagcaaaaaaaaaaaaaaaaaaaaaaaaaaaaaaaaaaaaaaaaaaaaaaaaaaaaaaaaaaaaaaaaaaaaaaaaaaaaaaaa

SEQ ID NO: 4108 - RNA, 5419 nt, synthetic construct
  source 1..5419: mol_type = other RNA
aggaaataagagagaaaagaagagtaagaagaaatataagagccaccatggcccctaagaagaagcgtaaagtgagccgggtgaacggcagcggcagcggcggcggcatgaaccacgaccaggagttcgacccccctaaggtgtaccctcccgtccccgccgagaagagaaagcccatccgggtcctgagcctgttcgatggcatcgccaccggtctgctggtgctgaaggacctgggcatccaggtggataggtacattgcctccgaggtgtgcgaggactccatcaccgtgggaatggtgcgtcatcagggcaagatcatgtacgtgggcgacgtgcggagcgtgacacagaagcatatccaggagtggggccctttcgacctggtgatcggcggcagcccttgcaatgacctgagcatcgtgaacccagcccggaagggcctgtacgagggaaccggcagactgttcttcgagttttacagactgctgcacgacgcccggcctaaggaaggcgacgaccggcccttcttttggctgttcgagaatgtggtggccatgggagtcagcgacaagcgggatattagccggttcctggagagcaaccccgtgatgatcgatgccaaggaagtgagcgccgcccaccgggccagatacttctggggcaatctgcctggcatgaacagacccctggccagcaccgtgaacgacaagctggagctgcaggagtgcctggagcacggccggatcgccaagttcagcaaggtgagaaccatcaccacccgaagcaacagcatcaaacaaggcaaggaccagcactttcctgtgttcatgaacgagaaggaggacatcctgtggtgtaccgagatggagagagtgttcgggttcccagtccactacacagatgtcagcaacatgtctagactggccagacagagactgctgggaagaagctggtccgtccctgtgatcagacacctgttcgcccctctgaaggagtacttcgcctgcgtgagcagcggcaacagcaacgccaacagccggggccccagcttctctagcggcctggtgccactgtccctgagagggagccacatgggccccatggagatctacaaaaccgtgagcgcctggaagcggcagcctgtgcgcgtgctgagcctgtttcggaatatcgataaagtcctgaaaagcctgggattcctggagagcggctctggctccggcggtggcaccctgaagtacgtggaggatgtgacaaacgtggtcagacgggatgtggagaagtggggccccttcgatctggtgtacggcagcacccaacccctgggcagctcttgtgaccggtgccctggctggtacatgtttcagttccaccggatcctgcagtacgccctgccgagacaggagtcccagcggccattcttttggattttcatggacaacttgctgctgaccgaggatgaccaggaaactaccactcggttcctgcagaccgaagccgtgaccctgcaggacgtgagaggccgggactaccagaacgccatgcgggtgtggtccaacatccctggactgaaaagcaagcacgcacctctgacccctaaagaagaggagtacctgcaggcccaggtgcggagcagaagcaagctggacgcccctaaggtggatctgctggtgaagaattgcctcctgcccctgagagagtacttcaagtatttcagccagaatagtctgcccctgggcggcccaagcagcggcgcccctcctcccagcggcggcagcccagccggctccccaacctctaccgaggagggcacctctgagtccgccacccccgagagcggccctggcacctccaccgagcccagcgagggcagcgcacccggcagccctgccggcagccccacctccacagaggagggaaccagcaccgagcccagcgaaggcagcgccccaggcaccagcaccgagcctagtgagggcggctctggcggcggcagcgcccaggagattaaacggatcaacaagatcagaagaagacttgtgaaagacagcaacaccaagaaggccggcaagacaggccccatgaaaaccctgctggttagagtgatgacacccgatctgagagagcggctggaaaacctgagaaagaagcctgaaaatatcccccagcccatcagcaatacatctagagccaacctgaataagctgctgaccgattacaccgaaatgaagaaggcgatcctgcatgtgtactgggaagagttccagaaggaccctgtgggcctgatgagccgggtggcccagcctgccagcaagaagatcgatcagaacaagctgaaacctgagatggacgagaagggcaacctgaccaccgccggctttgcctgctctcagtgtggccagcccctgttcgtgtacaagctggagcaggtgtctgagaagggcaaggcttacaccaactacttcggacggtgcaatgtggccgagcacgaaaagctgatcctgctggcccagctgaagcccgagaaggatagcgacgaagccgtgacatatagcctgggaaagtttgggcagagggccctggatttctacagcattcatgtgaccaaggagtccacccaccccgtgaagcccctggcccagatcgccggaaacagatacgcctccggacctgtgggaaaggccctgagcgacgcatgtatgggcacaatcgcctccttcctgtctaagtaccaggacatcatcatcgaacaccagaaggtggtgaagggcaaccagaagagactggagagcctgcgggagctggccggcaaggaaaacctggaataccctagcgtgaccctgccacctcagcctcacaccaaggagggcgttgatgcctacaacgaagtgatcgcccgggtgcgaatgtgggtgaacctgaacctgtggcagaagctgaagctaagcagagatgatgccaagcctctgctgagactgaagggattcccttcctttcctctggtcgagagacaggccaacgaagtggactggtgggacatggtgtgtaacgtgaagaagctgatcaacgagaaaaaggaggatggcaaggtgttttggcagaatctggctggctacaagagacaggaagccctgagaccatacctgagcagcgaggaagatcggaagaagggaaagaaattcgctcggtaccagctgggcgacctgctgctgcacctggaaaagaagcacggcgaggactggggaaaggtgtacgacgaggcctgggagcggattgacaagaaagtggaaggcctgagcaagcacatcaagctggaagaggaacggagaagcgaggacgcccagagcaaggccgccctgaccgactggctgcgggctaaggccagcttcgtgatcgagggcctgaaggaggccgacaaggacgagttctgcagatgcgagctgaagctgcagaagtggtacggggacctgcggggaaagcccttcgccatcgaagccgagaacagcatcctggacatcagcggcttcagcaagcagtacaactgtgccttcatctggcagaaggacggcgtgaagaagctgaacctgtacctgatcatcaactacttcaagggcggcaagctgcggttcaagaagatcaaacctgaagccttcgaagccaacagattctacaccgtgatcaacaaaaagagcggcgagatcgtgcccatggaggtgaacttcaacttcgacgaccccaacctgatcatcctgcctctggcctttggcaagagacagggcagagaattcatctggaacgacctgctgtccctggaaaccggcagcctgaagctggccaacggaagagtgatcgagaagacactgtacaacagaagaacccggcaggatgagcctgccctgttcgtggccctgaccttcgagcggcgggaggtcctggactcctccaatatcaaaccaatgaacctgatcggcgtggcaagaggcgaaaacatccccgccgtgatcgccctgaccgaccccgagggctgcccactgagccggtttaaggatagcctgggaaacccaacccacatcctgagaatcggcgagagctataaggagaagcagcggaccatccaggccaagaaggaggtggagcagcggagagccggcggctacagccggaagtacgccagcaaagccaagaatctggcagacgatatggtgagaaacaccgctagagatctgctgtactacgccgtgacccaggatgccatgctgatcttcgccaacctgagccggggcttcggccggcagggcaagcggaccttcatggccgagagacagtacacacggatggaggactggctgaccgccaagctggcctacgagggcctgagcaagacctacctgtccaagacactggcccagtacacctccaagacatgcagcaactgtgggtttaccatcaccagcgccgactacgacagggtgctggagaagctgaagaagacagcaacaggctggatgaccacaattaacggcaaggagctgaaggtggagggccagattacctactacaacagatacaagagacagaacgtagtcaaggacctgtccgtcgagctggatagactgagcgaagaatctgtgaacaacgacatctcctcctggacaaagggcagaagcggagaagctctgagcctcctgaagaaaagattctcccatagacccgtgcaggagaagttcgtgtgcctgaactgcggcttcgagacacacgcagccgagcaagccgccctgaacatcgccagatcctggctgttcctgcggagccaggagtacaagaaataccagacaaacaagacaaccggcaacaccgataagagagccttcgtcgagacctggcagtccttttaccggaagaagcttaaggaggtgtggaaacctgccgtgcggtctggcggatctggcggaggctccacaagcatccaggagctggtgaccttcaaggacgtggccgtggacttcacccaggaggagtggggcctgctgaacaacccccagaaggagctgtacaaggaggtgatgctggagaacgcccagaacatgctgagcctgggcctgcccgtgcccagggaggacctgttcagctacttcgaggagagggaggccccctggctgctggagcaggagggcctgaggagctgctgcgccgagagggagatcaggaccagccccaagaaaaagagaaaagtctaagctgccttctgcggggcttgccttctggccatgcccttcttctctcccttgcacctgtacctcttggtctttgaataaagcctgagtaggaaggctagcaaaaaaaaaaaaaaaaaaaaaaaaaaaaaaaaaaaaaaaaaaaaaaaaaaaaaaaaaaaaaaaaaaaaaaaaaaaaaaaa

SEQ ID NO: 4109 - RNA, 5419 nt, synthetic construct
  source 1..5419: mol_type = other RNA
aggaaataagagagaaaagaagagtaagaagaaatataagagccaccatggcccctaagaagaagcgtaaagtgagccgggtgaacggcagcggcagcggcggcggcatgaaccacgaccaggagttcgacccccctaaggtgtaccctcccgtccccgccgagaagagaaagcccatccgggtcctgagcctgttcgatggcatcgccaccggtctgctggtgctgaaggacctgggcatccaggtggataggtacattgcctccgaggtgtgcgaggactccatcaccgtgggaatggtgcgtcatcagggcaagatcatgtacgtgggcgacgtgcggagcgtgacacagaagcatatccaggagtggggccctttcgacctggtgatcggcggcagcccttgcaatgacctgagcatcgtgaacccagcccggaagggcctgtacgagggaaccggcagactgttcttcgagttttacagactgctgcacgacgcccggcctaaggaaggcgacgaccggcccttcttttggctgttcgagaatgtggtggccatgggagtcagcgacaagcgggatattagccggttcctggagagcaaccccgtgatgatcgatgccaaggaagtgagcgccgcccaccgggccagatacttctggggcaatctgcctggcatgaacagacccctggccagcaccgtgaacgacaagctggagctgcaggagtgcctggagcacggccggatcgccaagttcagcaaggtgagaaccatcaccacccgaagcaacagcatcaaacaaggcaaggaccagcactttcctgtgttcatgaacgagaaggaggacatcctgtggtgtaccgagatggagagagtgttcgggttcccagtccactacacagatgtcagcaacatgtctagactggccagacagagactgctgggaagaagctggtccgtccctgtgatcagacacctgttcgcccctctgaaggagtacttcgcctgcgtgagcagcggcaacagcaacgccaacagccggggccccagcttctctagcggcctggtgccactgtccctgagagggagccacatgggccccatggagatctacaaaaccgtgagcgcctggaagcggcagcctgtgcgcgtgctgagcctgtttcggaatatcgataaagtcctgaaaagcctgggattcctggagagcggctctggctccggcggtggcaccctgaagtacgtggaggatgtgacaaacgtggtcagacgggatgtggagaagtggggccccttcgatctggtgtacggcagcacccaacccctgggcagctcttgtgaccggtgccctggctggtacatgtttcagttccaccggatcctgcagtacgccctgccgagacaggagtcccagcggccattcttttggattttcatggacaacttgctgctgaccgaggatgaccaggaaactaccactcggttcctgcagaccgaagccgtgaccctgcaggacgtgagaggccgggactaccagaacgccatgcgggtgtggtccaacatccctggactgaaaagcaagcacgcacctctgacccctaaagaagaggagtacctgcaggcccaggtgcggagcagaagcaagctggacgcccctaaggtggatctgctggtgaagaattgcctcctgcccctgagagagtacttcaagtatttcagccagaatagtctgcccctgggcggcccaagcagcggcgcccctcctcccagcggcggcagcccagccggctccccaacctctaccgaggagggcacctctgagtccgccacccccgagagcggccctggcacctccaccgagcccagcgagggcagcgcacccggcagccctgccggcagccccacctccacagaggagggaaccagcaccgagcccagcgaaggcagcgccccaggcaccagcaccgagcctagtgagggcggctctggcggcggcagcgcccaggagattaaacggatcaacaagatcagaagaagacttgtgaaagacagcaacaccaagaaggccggcaagacaggccccatgaaaaccctgctggttagagtgatgacacccgatctgagagagcggctggaaaacctgagaaagaagcctgaaaatatcccccagcccatcagcaatacatctagagccaacctgaataagctgctgaccgattacaccgaaatgaagaaggcgatcctgcatgtgtactgggaagagttccagaaggaccctgtgggcctgatgagccgggtggcccagcctgccagcaagaagatcgatcagaacaagctgaaacctgagatggacgagaagggcaacctgaccaccgccggctttgcctgctctcagtgtggccagcccctgttcgtgtacaagctggagcaggtgtctgagaagggcaaggcttacaccaactacttcggacggtgcaatgtggccgagcacgaaaagctgatcctgctggcccagctgaagcccgagaaggatagcgacgaagccgtgacatatagcctgggaaagtttgggcagagggccctggatttctacagcattcatgtgaccaaggagtccacccaccccgtgaagcccctggcccagatcgccggaaacagatacgcctccggacctgtgggaaaggccctgagcgacgcatgtatgggcacaatcgcctccttcctgtctaagtaccaggacatcatcatcgaacaccagaaggtggtgaagggcaaccagaagagactggagagcctgcgggagctggccggcaaggaaaacctggaataccctagcgtgaccctgccacctcagcctcacaccaaggagggcgttgatgcctacaacgaagtgatcgcccgggtgcgaatgtgggtgaacctgaacctgtggcagaagctgaagctaagcagagatgatgccaagcctctgctgagactgaagggattcccttcctttcctctggtcgagagacaggccaacgaagtggactggtgggacatggtgtgtaacgtgaagaagctgatcaacgagaaaaaggaggatggcaaggtgttttggcagaatctggctggctacaagagacaggaagccctgagaccatacctgagcagcgaggaagatcggaagaagggaaagaaattcgctcggtaccagctgggcgacctgctgctgcacctggaaaagaagcacggcgaggactggggaaaggtgtacgacgaggcctgggagcggattgacaagaaagtggaaggcctgagcaagcacatcaagctggaagaggaacggagaagcgaggacgcccagagcaaggccgccctgaccgactggctgcgggctaaggccagcttcgtgatcgagggcctgaaggaggccgacaaggacgagttctgcagatgcgagctgaagctgcagaagtggtacggggacctgcggggaaagcccttcgccatcgaagccgagaacagcatcctggacatcagcggcttcagcaagcagtacaactgtgccttcatctggcagaaggacggcgtgaagaagctgaacctgtacctgatcatcaactacttcaagggcggcaagctgcggttcaagaagatcaaacctgaagccttcgaagccaacagattctacaccgtgatcaacaaaaagagcggcgagatcgtgcccatggaggtgaacttcaacttcgacgaccccaacctgatcatcctgcctctggcctttggcaagagacagggcagagaattcatctggaacgacctgctgtccctggaaaccggcagcctgaagctggccaacggaagagtgatcgagaagacactgtacaacagaagaacccggcaggatgagcctgccctgttcgtggccctgaccttcgagcggcgggaggtcctggactcctccaatatcaaaccaatgaacctgatcggcgtggcaagaggcgaaaacatccccgccgtgatcgccctgaccgaccccgagggctgcccactgagccggtttaaggatagcctgggaaacccaacccacatcctgagaatcggcgagagctataaggagaagcagcggaccatccaggccaagaaggaggtggagcagcggagagccggcggctacagccggaagtacgccagcaaagccaagaatctggcagacgatatggtgagaaacaccgctagagatctgctgtactacgccgtgacccaggatgccatgctgatcttcgccaacctgagccggggcttcggccggcagggcaagcggaccttcatggccgagagacagtacacacggatggaggactggctgaccgccaagctggcctacgagggcctgagcaagacctacctgtccaagacactggcccagtacacctccaagacatgcagcaactgtgggtttaccatcaccagcgccgactacgacagggtgctggagaagctgaagaagacagcaacaggctggatgaccacaattaacggcaaggagctgaaggtggagggccagattacctactacaacagatacaagagacagaacgtagtcaaggacctgtccgtcgagctggatagactgagcgaagaatctgtgaacaacgacatctcctcctggacaaagggcagaagcggagaagctctgagcctcctgaagaaaagattctcccatagacccgtgcaggagaagttcgtgtgcctgaactgcggcttcgagacacacgcagccgagcaagccgccctgaacatcgccagatcctggctgttcctgcggagccaggagtacaagaaataccagacaaacaagacaaccggcaacaccgataagagagccttcgtcgagacctggcagtccttttaccggaagaagcttaaggaggtgtggaaacctgccgtgcggtctggcggatctggcggaggctccacaagcaggcccagggccgtgaagttcgccgacgtggccgtgtacttcagccccgaggagtgggagtgcctgaggcccgcccagagggccctgtacagggacgtgatgcaggagacctacggccacctgggcgccctgggctgcgccggccccaagcccgccctgatcagctggctggagaggaacaccaacgactgggagctggccgccctggacccccaggagtgccccaggcagatgaccgtgcagaccagccccaagaaaaagagaaaagtctaagctgccttctgcggggcttgccttctggccatgcccttcttctctcccttgcacctgtacctcttggtctttgaataaagcctgagtaggaaggctagcaaaaaaaaaaaaaaaaaaaaaaaaaaaaaaaaaaaaaaaaaaaaaaaaaaaaaaaaaaaaaaaaaaaaaaaaaaaaaaaa

SEQ ID NO: 4110 - RNA, 5419 nt, synthetic construct
  source 1..5419: mol_type = other RNA
aggaaataagagagaaaagaagagtaagaagaaatataagagccaccatggcccctaagaagaagcgtaaagtgagccgggtgaacggcagcggcagcggcggcggcatgaaccacgaccaggagttcgacccccctaaggtgtaccctcccgtccccgccgagaagagaaagcccatccgggtcctgagcctgttcgatggcatcgccaccggtctgctggtgctgaaggacctgggcatccaggtggataggtacattgcctccgaggtgtgcgaggactccatcaccgtgggaatggtgcgtcatcagggcaagatcatgtacgtgggcgacgtgcggagcgtgacacagaagcatatccaggagtggggccctttcgacctggtgatcggcggcagcccttgcaatgacctgagcatcgtgaacccagcccggaagggcctgtacgagggaaccggcagactgttcttcgagttttacagactgctgcacgacgcccggcctaaggaaggcgacgaccggcccttcttttggctgttcgagaatgtggtggccatgggagtcagcgacaagcgggatattagccggttcctggagagcaaccccgtgatgatcgatgccaaggaagtgagcgccgcccaccgggccagatacttctggggcaatctgcctggcatgaacagacccctggccagcaccgtgaacgacaagctggagctgcaggagtgcctggagcacggccggatcgccaagttcagcaaggtgagaaccatcaccacccgaagcaacagcatcaaacaaggcaaggaccagcactttcctgtgttcatgaacgagaaggaggacatcctgtggtgtaccgagatggagagagtgttcgggttcccagtccactacacagatgtcagcaacatgtctagactggccagacagagactgctgggaagaagctggtccgtccctgtgatcagacacctgttcgcccctctgaaggagtacttcgcctgcgtgagcagcggcaacagcaacgccaacagccggggccccagcttctctagcggcctggtgccactgtccctgagagggagccacatgggccccatggagatctacaaaaccgtgagcgcctggaagcggcagcctgtgcgcgtgctgagcctgtttcggaatatcgataaagtcctgaaaagcctgggattcctggagagcggctctggctccggcggtggcaccctgaagtacgtggaggatgtgacaaacgtggtcagacgggatgtggagaagtggggccccttcgatctggtgtacggcagcacccaacccctgggcagctcttgtgaccggtgccctggctggtacatgtttcagttccaccggatcctgcagtacgccctgccgagacaggagtcccagcggccattcttttggattttcatggacaacttgctgctgaccgaggatgaccaggaaactaccactcggttcctgcagaccgaagccgtgaccctgcaggacgtgagaggccgggactaccagaacgccatgcgggtgtggtccaacatccctggactgaaaagcaagcacgcacctctgacccctaaagaagaggagtacctgcaggcccaggtgcggagcagaagcaagctggacgcccctaaggtggatctgctggtgaagaattgcctcctgcccctgagagagtacttcaagtatttcagccagaatagtctgcccctgggcggcccaagcagcggcgcccctcctcccagcggcggcagcccagccggctccccaacctctaccgaggagggcacctctgagtccgccacccccgagagcggccctggcacctccaccgagcccagcgagggcagcgcacccggcagccctgccggcagccccacctccacagaggagggaaccagcaccgagcccagcgaaggcagcgccccaggcaccagcaccgagcctagtgagggcggctctggcggcggcagcgcccaggagattaaacggatcaacaagatcagaagaagacttgtgaaagacagcaacaccaagaaggccggcaagacaggccccatgaaaaccctgctggttagagtgatgacacccgatctgagagagcggctggaaaacctgagaaagaagcctgaaaatatcccccagcccatcagcaatacatctagagccaacctgaataagctgctgaccgattacaccgaaatgaagaaggcgatcctgcatgtgtactgggaagagttccagaaggaccctgtgggcctgatgagccgggtggcccagcctgccagcaagaagatcgatcagaacaagctgaaacctgagatggacgagaagggcaacctgaccaccgccggctttgcctgctctcagtgtggccagcccctgttcgtgtacaagctggagcaggtgtctgagaagggcaaggcttacaccaactacttcggacggtgcaatgtggccgagcacgaaaagctgatcctgctggcccagctgaagcccgagaaggatagcgacgaagccgtgacatatagcctgggaaagtttgggcagagggccctggatttctacagcattcatgtgaccaaggagtccacccaccccgtgaagcccctggcccagatcgccggaaacagatacgcctccggacctgtgggaaaggccctgagcgacgcatgtatgggcacaatcgcctccttcctgtctaagtaccaggacatcatcatcgaacaccagaaggtggtgaagggcaaccagaagagactggagagcctgcgggagctggccggcaaggaaaacctggaataccctagcgtgaccctgccacctcagcctcacaccaaggagggcgttgatgcctacaacgaagtgatcgcccgggtgcgaatgtgggtgaacctgaacctgtggcagaagctgaagctaagcagagatgatgccaagcctctgctgagactgaagggattcccttcctttcctctggtcgagagacaggccaacgaagtggactggtgggacatggtgtgtaacgtgaagaagctgatcaacgagaaaaaggaggatggcaaggtgttttggcagaatctggctggctacaagagacaggaagccctgagaccatacctgagcagcgaggaagatcggaagaagggaaagaaattcgctcggtaccagctgggcgacctgctgctgcacctggaaaagaagcacggcgaggactggggaaaggtgtacgacgaggcctgggagcggattgacaagaaagtggaaggcctgagcaagcacatcaagctggaagaggaacggagaagcgaggacgcccagagcaaggccgccctgaccgactggctgcgggctaaggccagcttcgtgatcgagggcctgaaggaggccgacaaggacgagttctgcagatgcgagctgaagctgcagaagtggtacggggacctgcggggaaagcccttcgccatcgaagccgagaacagcatcctggacatcagcggcttcagcaagcagtacaactgtgccttcatctggcagaaggacggcgtgaagaagctgaacctgtacctgatcatcaactacttcaagggcggcaagctgcggttcaagaagatcaaacctgaagccttcgaagccaacagattctacaccgtgatcaacaaaaagagcggcgagatcgtgcccatggaggtgaacttcaacttcgacgaccccaacctgatcatcctgcctctggcctttggcaagagacagggcagagaattcatctggaacgacctgctgtccctggaaaccggcagcctgaagctggccaacggaagagtgatcgagaagacactgtacaacagaagaacccggcaggatgagcctgccctgttcgtggccctgaccttcgagcggcgggaggtcctggactcctccaatatcaaaccaatgaacctgatcggcgtggcaagaggcgaaaacatccccgccgtgatcgccctgaccgaccccgagggctgcccactgagccggtttaaggatagcctgggaaacccaacccacatcctgagaatcggcgagagctataaggagaagcagcggaccatccaggccaagaaggaggtggagcagcggagagccggcggctacagccggaagtacgccagcaaagccaagaatctggcagacgatatggtgagaaacaccgctagagatctgctgtactacgccgtgacccaggatgccatgctgatcttcgccaacctgagccggggcttcggccggcagggcaagcggaccttcatggccgagagacagtacacacggatggaggactggctgaccgccaagctggcctacgagggcctgagcaagacctacctgtccaagacactggcccagtacacctccaagacatgcagcaactgtgggtttaccatcaccagcgccgactacgacagggtgctggagaagctgaagaagacagcaacaggctggatgaccacaattaacggcaaggagctgaaggtggagggccagattacctactacaacagatacaagagacagaacgtagtcaaggacctgtccgtcgagctggatagactgagcgaagaatctgtgaacaacgacatctcctcctggacaaagggcagaagcggagaagctctgagcctcctgaagaaaagattctcccatagacccgtgcaggagaagttcgtgtgcctgaactgcggcttcgagacacacgcagccgagcaagccgccctgaacatcgccagatcctggctgttcctgcggagccaggagtacaagaaataccagacaaacaagacaaccggcaacaccgataagagagccttcgtcgagacctggcagtccttttaccggaagaagcttaaggaggtgtggaaacctgccgtgcggtctggcggatctggcggaggctccacaagcatgcccgtgaccttcgaggacgtggccgtgaccttcacccaggaggagtggggccagctggaccccgcccagaggaccctgtaccaggaggtgatgctggagacctgcggcctgctggtgagcctgggctgccccctgcccaagcccgagctgttctaccccctggaccacagccccgagctgcacaccctgaagaggggcctgagccccaacagctgccccggcgacagcaccaagcccggcaccagccccaagaaaaagagaaaagtctaagctgccttctgcggggcttgccttctggccatgcccttcttctctcccttgcacctgtacctcttggtctttgaataaagcctgagtaggaaggctagcaaaaaaaaaaaaaaaaaaaaaaaaaaaaaaaaaaaaaaaaaaaaaaaaaaaaaaaaaaaaaaaaaaaaaaaaaaaaaaaa

SEQ ID NO: 4111 - RNA, 5437 nt, synthetic construct
  source 1..5437: mol_type = other RNA
aggaaataagagagaaaagaagagtaagaagaaatataagagccaccatggcccctaagaagaagcgtaaagtgagccgggtgaacggcagcggcagcggcggcggcatgaaccacgaccaggagttcgacccccctaaggtgtaccctcccgtccccgccgagaagagaaagcccatccgggtcctgagcctgttcgatggcatcgccaccggtctgctggtgctgaaggacctgggcatccaggtggataggtacattgcctccgaggtgtgcgaggactccatcaccgtgggaatggtgcgtcatcagggcaagatcatgtacgtgggcgacgtgcggagcgtgacacagaagcatatccaggagtggggccctttcgacctggtgatcggcggcagcccttgcaatgacctgagcatcgtgaacccagcccggaagggcctgtacgagggaaccggcagactgttcttcgagttttacagactgctgcacgacgcccggcctaaggaaggcgacgaccggcccttcttttggctgttcgagaatgtggtggccatgggagtcagcgacaagcgggatattagccggttcctggagagcaaccccgtgatgatcgatgccaaggaagtgagcgccgcccaccgggccagatacttctggggcaatctgcctggcatgaacagacccctggccagcaccgtgaacgacaagctggagctgcaggagtgcctggagcacggccggatcgccaagttcagcaaggtgagaaccatcaccacccgaagcaacagcatcaaacaaggcaaggaccagcactttcctgtgttcatgaacgagaaggaggacatcctgtggtgtaccgagatggagagagtgttcgggttcccagtccactacacagatgtcagcaacatgtctagactggccagacagagactgctgggaagaagctggtccgtccctgtgatcagacacctgttcgcccctctgaaggagtacttcgcctgcgtgagcagcggcaacagcaacgccaacagccggggccccagcttctctagcggcctggtgccactgtccctgagagggagccacatgggccccatggagatctacaaaaccgtgagcgcctggaagcggcagcctgtgcgcgtgctgagcctgtttcggaatatcgataaagtcctgaaaagcctgggattcctggagagcggctctggctccggcggtggcaccctgaagtacgtggaggatgtgacaaacgtggtcagacgggatgtggagaagtggggccccttcgatctggtgtacggcagcacccaacccctgggcagctcttgtgaccggtgccctggctggtacatgtttcagttccaccggatcctgcagtacgccctgccgagacaggagtcccagcggccattcttttggattttcatggacaacttgctgctgaccgaggatgaccaggaaactaccactcggttcctgcagaccgaagccgtgaccctgcaggacgtgagaggccgggactaccagaacgccatgcgggtgtggtccaacatccctggactgaaaagcaagcacgcacctctgacccctaaagaagaggagtacctgcaggcccaggtgcggagcagaagcaagctggacgcccctaaggtggatctgctggtgaagaattgcctcctgcccctgagagagtacttcaagtatttcagccagaatagtctgcccctgggcggcccaagcagcggcgcccctcctcccagcggcggcagcccagccggctccccaacctctaccgaggagggcacctctgagtccgccacccccgagagcggccctggcacctccaccgagcccagcgagggcagcgcacccggcagccctgccggcagccccacctccacagaggagggaaccagcaccgagcccagcgaaggcagcgccccaggcaccagcaccgagcctagtgagggcggctctggcggcggcagcgcccaggagattaaacggatcaacaagatcagaagaagacttgtgaaagacagcaacaccaagaaggccggcaagacaggccccatgaaaaccctgctggttagagtgatgacacccgatctgagagagcggctggaaaacctgagaaagaagcctgaaaatatcccccagcccatcagcaatacatctagagccaacctgaataagctgctgaccgattacaccgaaatgaagaaggcgatcctgcatgtgtactgggaagagttccagaaggaccctgtgggcctgatgagccgggtggcccagcctgccagcaagaagatcgatcagaacaagctgaaacctgagatggacgagaagggcaacctgaccaccgccggctttgcctgctctcagtgtggccagcccctgttcgtgtacaagctggagcaggtgtctgagaagggcaaggcttacaccaactacttcggacggtgcaatgtggccgagcacgaaaagctgatcctgctggcccagctgaagcccgagaaggatagcgacgaagccgtgacatatagcctgggaaagtttgggcagagggccctggatttctacagcattcatgtgaccaaggagtccacccaccccgtgaagcccctggcccagatcgccggaaacagatacgcctccggacctgtgggaaaggccctgagcgacgcatgtatgggcacaatcgcctccttcctgtctaagtaccaggacatcatcatcgaacaccagaaggtggtgaagggcaaccagaagagactggagagcctgcgggagctggccggcaaggaaaacctggaataccctagcgtgaccctgccacctcagcctcacaccaaggagggcgttgatgcctacaacgaagtgatcgcccgggtgcgaatgtgggtgaacctgaacctgtggcagaagctgaagctaagcagagatgatgccaagcctctgctgagactgaagggattcccttcctttcctctggtcgagagacaggccaacgaagtggactggtgggacatggtgtgtaacgtgaagaagctgatcaacgagaaaaaggaggatggcaaggtgttttggcagaatctggctggctacaagagacaggaagccctgagaccatacctgagcagcgaggaagatcggaagaagggaaagaaattcgctcggtaccagctgggcgacctgctgctgcacctggaaaagaagcacggcgaggactggggaaaggtgtacgacgaggcctgggagcggattgacaagaaagtggaaggcctgagcaagcacatcaagctggaagaggaacggagaagcgaggacgcccagagcaaggccgccctgaccgactggctgcgggctaaggccagcttcgtgatcgagggcctgaaggaggccgacaaggacgagttctgcagatgcgagctgaagctgcagaagtggtacggggacctgcggggaaagcccttcgccatcgaagccgagaacagcatcctggacatcagcggcttcagcaagcagtacaactgtgccttcatctggcagaaggacggcgtgaagaagctgaacctgtacctgatcatcaactacttcaagggcggcaagctgcggttcaagaagatcaaacctgaagccttcgaagccaacagattctacaccgtgatcaacaaaaagagcggcgagatcgtgcccatggaggtgaacttcaacttcgacgaccccaacctgatcatcctgcctctggcctttggcaagagacagggcagagaattcatctggaacgacctgctgtccctggaaaccggcagcctgaagctggccaacggaagagtgatcgagaagacactgtacaacagaagaacccggcaggatgagcctgccctgttcgtggccctgaccttcgagcggcgggaggtcctggactcctccaatatcaaaccaatgaacctgatcggcgtggcaagaggcgaaaacatccccgccgtgatcgccctgaccgaccccgagggctgcccactgagccggtttaaggatagcctgggaaacccaacccacatcctgagaatcggcgagagctataaggagaagcagcggaccatccaggccaagaaggaggtggagcagcggagagccggcggctacagccggaagtacgccagcaaagccaagaatctggcagacgatatggtgagaaacaccgctagagatctgctgtactacgccgtgacccaggatgccatgctgatcttcgccaacctgagccggggcttcggccggcagggcaagcggaccttcatggccgagagacagtacacacggatggaggactggctgaccgccaagctggcctacgagggcctgagcaagacctacctgtccaagacactggcccagtacacctccaagacatgcagcaactgtgggtttaccatcaccagcgccgactacgacagggtgctggagaagctgaagaagacagcaacaggctggatgaccacaattaacggcaaggagctgaaggtggagggccagattacctactacaacagatacaagagacagaacgtagtcaaggacctgtccgtcgagctggatagactgagcgaagaatctgtgaacaacgacatctcctcctggacaaagggcagaagcggagaagctctgagcctcctgaagaaaagattctcccatagacccgtgcaggagaagttcgtgtgcctgaactgcggcttcgagacacacgcagccgagcaagccgccctgaacatcgccagatcctggctgttcctgcggagccaggagtacaagaaataccagacaaacaagacaaccggcaacaccgataagagagccttcgtcgagacctggcagtccttttaccggaagaagcttaaggaggtgtggaaacctgccgtgcggtctggcggatctggcggaggctccacaagcgtggccttcgaggacgtggccgtgaacttcacccaggaggagtgggccctgctgaacagcagccagaagaacctgtacagggaggtgatgcaggagacctgcaggaacctggccagcgtgggcagcaagtggaaggaccagaacatcgaggaccacttcgagaagcccggcaagaacatcaggaagcacatggtgcagaagctgtgcgagagcaaggagggcagccagtacggcgaggtggtgagccagatccccaacctgaccagccccaagaaaaagagaaaagtctaagctgccttctgcggggcttgccttctggccatgcccttcttctctcccttgcacctgtacctcttggtctttgaataaagcctgagtaggaaggctagcaaaaaaaaaaaaaaaaaaaaaaaaaaaaaaaaaaaaaaaaaaaaaaaaaaaaaaaaaaaaaaaaaaaaaaaaaaaaaaaa

SEQ ID NO: 4112 - RNA, 5428 nt, synthetic construct
  source 1..5428: mol_type = other RNA
aggaaataagagagaaaagaagagtaagaagaaatataagagccaccatggcccctaagaagaagcgtaaagtgagccgggtgaacggcagcggcagcggcggcggcatgaaccacgaccaggagttcgacccccctaaggtgtaccctcccgtccccgccgagaagagaaagcccatccgggtcctgagcctgttcgatggcatcgccaccggtctgctggtgctgaaggacctgggcatccaggtggataggtacattgcctccgaggtgtgcgaggactccatcaccgtgggaatggtgcgtcatcagggcaagatcatgtacgtgggcgacgtgcggagcgtgacacagaagcatatccaggagtggggccctttcgacctggtgatcggcggcagcccttgcaatgacctgagcatcgtgaacccagcccggaagggcctgtacgagggaaccggcagactgttcttcgagttttacagactgctgcacgacgcccggcctaaggaaggcgacgaccggcccttcttttggctgttcgagaatgtggtggccatgggagtcagcgacaagcgggatattagccggttcctggagagcaaccccgtgatgatcgatgccaaggaagtgagcgccgcccaccgggccagatacttctggggcaatctgcctggcatgaacagacccctggccagcaccgtgaacgacaagctggagctgcaggagtgcctggagcacggccggatcgccaagttcagcaaggtgagaaccatcaccacccgaagcaacagcatcaaacaaggcaaggaccagcactttcctgtgttcatgaacgagaaggaggacatcctgtggtgtaccgagatggagagagtgttcgggttcccagtccactacacagatgtcagcaacatgtctagactggccagacagagactgctgggaagaagctggtccgtccctgtgatcagacacctgttcgcccctctgaaggagtacttcgcctgcgtgagcagcggcaacagcaacgccaacagccggggccccagcttctctagcggcctggtgccactgtccctgagagggagccacatgggccccatggagatctacaaaaccgtgagcgcctggaagcggcagcctgtgcgcgtgctgagcctgtttcggaatatcgataaagtcctgaaaagcctgggattcctggagagcggctctggctccggcggtggcaccctgaagtacgtggaggatgtgacaaacgtggtcagacgggatgtggagaagtggggccccttcgatctggtgtacggcagcacccaacccctgggcagctcttgtgaccggtgccctggctggtacatgtttcagttccaccggatcctgcagtacgccctgccgagacaggagtcccagcggccattcttttggattttcatggacaacttgctgctgaccgaggatgaccaggaaactaccactcggttcctgcagaccgaagccgtgaccctgcaggacgtgagaggccgggactaccagaacgccatgcgggtgtggtccaacatccctggactgaaaagcaagcacgcacctctgacccctaaagaagaggagtacctgcaggcccaggtgcggagcagaagcaagctggacgcccctaaggtggatctgctggtgaagaattgcctcctgcccctgagagagtacttcaagtatttcagccagaatagtctgcccctgggcggcccaagcagcggcgcccctcctcccagcggcggcagcccagccggctccccaacctctaccgaggagggcacctctgagtccgccacccccgagagcggccctggcacctccaccgagcccagcgagggcagcgcacccggcagccctgccggcagccccacctccacagaggagggaaccagcaccgagcccagcgaaggcagcgccccaggcaccagcaccgagcctagtgagggcggctctggcggcggcagcgcccaggagattaaacggatcaacaagatcagaagaagacttgtgaaagacagcaacaccaagaaggccggcaagacaggccccatgaaaaccctgctggttagagtgatgacacccgatctgagagagcggctggaaaacctgagaaagaagcctgaaaatatcccccagcccatcagcaatacatctagagccaacctgaataagctgctgaccgattacaccgaaatgaagaaggcgatcctgcatgtgtactgggaagagttccagaaggaccctgtgggcctgatgagccgggtggcccagcctgccagcaagaagatcgatcagaacaagctgaaacctgagatggacgagaagggcaacctgaccaccgccggctttgcctgctctcagtgtggccagcccctgttcgtgtacaagctggagcaggtgtctgagaagggcaaggcttacaccaactacttcggacggtgcaatgtggccgagcacgaaaagctgatcctgctggcccagctgaagcccgagaaggatagcgacgaagccgtgacatatagcctgggaaagtttgggcagagggccctggatttctacagcattcatgtgaccaaggagtccacccaccccgtgaagcccctggcccagatcgccggaaacagatacgcctccggacctgtgggaaaggccctgagcgacgcatgtatgggcacaatcgcctccttcctgtctaagtaccaggacatcatcatcgaacaccagaaggtggtgaagggcaaccagaagagactggagagcctgcgggagctggccggcaaggaaaacctggaataccctagcgtgaccctgccacctcagcctcacaccaaggagggcgttgatgcctacaacgaagtgatcgcccgggtgcgaatgtgggtgaacctgaacctgtggcagaagctgaagctaagcagagatgatgccaagcctctgctgagactgaagggattcccttcctttcctctggtcgagagacaggccaacgaagtggactggtgggacatggtgtgtaacgtgaagaagctgatcaacgagaaaaaggaggatggcaaggtgttttggcagaatctggctggctacaagagacaggaagccctgagaccatacctgagcagcgaggaagatcggaagaagggaaagaaattcgctcggtaccagctgggcgacctgctgctgcacctggaaaagaagcacggcgaggactggggaaaggtgtacgacgaggcctgggagcggattgacaagaaagtggaaggcctgagcaagcacatcaagctggaagaggaacggagaagcgaggacgcccagagcaaggccgccctgaccgactggctgcgggctaaggccagcttcgtgatcgagggcctgaaggaggccgacaaggacgagttctgcagatgcgagctgaagctgcagaagtggtacggggacctgcggggaaagcccttcgccatcgaagccgagaacagcatcctggacatcagcggcttcagcaagcagtacaactgtgccttcatctggcagaaggacggcgtgaagaagctgaacctgtacctgatcatcaactacttcaagggcggcaagctgcggttcaagaagatcaaacctgaagccttcgaagccaacagattctacaccgtgatcaacaaaaagagcggcgagatcgtgcccatggaggtgaacttcaacttcgacgaccccaacctgatcatcctgcctctggcctttggcaagagacagggcagagaattcatctggaacgacctgctgtccctggaaaccggcagcctgaagctggccaacggaagagtgatcgagaagacactgtacaacagaagaacccggcaggatgagcctgccctgttcgtggccctgaccttcgagcggcgggaggtcctggactcctccaatatcaaaccaatgaacctgatcggcgtggcaagaggcgaaaacatccccgccgtgatcgccctgaccgaccccgagggctgcccactgagccggtttaaggatagcctgggaaacccaacccacatcctgagaatcggcgagagctataaggagaagcagcggaccatccaggccaagaaggaggtggagcagcggagagccggcggctacagccggaagtacgccagcaaagccaagaatctggcagacgatatggtgagaaacaccgctagagatctgctgtactacgccgtgacccaggatgccatgctgatcttcgccaacctgagccggggcttcggccggcagggcaagcggaccttcatggccgagagacagtacacacggatggaggactggctgaccgccaagctggcctacgagggcctgagcaagacctacctgtccaagacactggcccagtacacctccaagacatgcagcaactgtgggtttaccatcaccagcgccgactacgacagggtgctggagaagctgaagaagacagcaacaggctggatgaccacaattaacggcaaggagctgaaggtggagggccagattacctactacaacagatacaagagacagaacgtagtcaaggacctgtccgtcgagctggatagactgagcgaagaatctgtgaacaacgacatctcctcctggacaaagggcagaagcggagaagctctgagcctcctgaagaaaagattctcccatagacccgtgcaggagaagttcgtgtgcctgaactgcggcttcgagacacacgcagccgagcaagccgccctgaacatcgccagatcctggctgttcctgcggagccaggagtacaagaaataccagacaaacaagacaaccggcaacaccgataagagagccttcgtcgagacctggcagtccttttaccggaagaagcttaaggaggtgtggaaacctgccgtgcggtctggcggatctggcggaggctccacaagcctgaccttcgaggacgtggccgtgtacttcagcgaggaggagtggcagctgctggacccccccgagaagaccctgtacaacgacgtgatgcaggacatctacgagaccgtgatcagcctgggcctgaagctgaagaacgacaccggcaacgaccaccccatcagcgtgagcaccagcgagatccagaccagcggctgcaaggtgagcaagaagaccaggatgaagatcgcccagaagaccatgggcagggagaccagccccaagaaaaagagaaaagtctaagctgccttctgcggggcttgccttctggccatgcccttcttctctcccttgcacctgtacctcttggtctttgaataaagcctgagtaggaaggctagcaaaaaaaaaaaaaaaaaaaaaaaaaaaaaaaaaaaaaaaaaaaaaaaaaaaaaaaaaaaaaaaaaaaaaaaaaaaaaaaa

SEQ ID NO: 4113 - RNA, 5419 nt, synthetic construct
  source 1..5419: mol_type = other RNA
aggaaataagagagaaaagaagagtaagaagaaatataagagccaccatggcccctaagaagaagcgtaaagtgagccgggtgaacggcagcggcagcggcggcggcatgaaccacgaccaggagttcgacccccctaaggtgtaccctcccgtccccgccgagaagagaaagcccatccgggtcctgagcctgttcgatggcatcgccaccggtctgctggtgctgaaggacctgggcatccaggtggataggtacattgcctccgaggtgtgcgaggactccatcaccgtgggaatggtgcgtcatcagggcaagatcatgtacgtgggcgacgtgcggagcgtgacacagaagcatatccaggagtggggccctttcgacctggtgatcggcggcagcccttgcaatgacctgagcatcgtgaacccagcccggaagggcctgtacgagggaaccggcagactgttcttcgagttttacagactgctgcacgacgcccggcctaaggaaggcgacgaccggcccttcttttggctgttcgagaatgtggtggccatgggagtcagcgacaagcgggatattagccggttcctggagagcaaccccgtgatgatcgatgccaaggaagtgagcgccgcccaccgggccagatacttctggggcaatctgcctggcatgaacagacccctggccagcaccgtgaacgacaagctggagctgcaggagtgcctggagcacggccggatcgccaagttcagcaaggtgagaaccatcaccacccgaagcaacagcatcaaacaaggcaaggaccagcactttcctgtgttcatgaacgagaaggaggacatcctgtggtgtaccgagatggagagagtgttcgggttcccagtccactacacagatgtcagcaacatgtctagactggccagacagagactgctgggaagaagctggtccgtccctgtgatcagacacctgttcgcccctctgaaggagtacttcgcctgcgtgagcagcggcaacagcaacgccaacagccggggccccagcttctctagcggcctggtgccactgtccctgagagggagccacatgggccccatggagatctacaaaaccgtgagcgcctggaagcggcagcctgtgcgcgtgctgagcctgtttcggaatatcgataaagtcctgaaaagcctgggattcctggagagcggctctggctccggcggtggcaccctgaagtacgtggaggatgtgacaaacgtggtcagacgggatgtggagaagtggggccccttcgatctggtgtacggcagcacccaacccctgggcagctcttgtgaccggtgccctggctggtacatgtttcagttccaccggatcctgcagtacgccctgccgagacaggagtcccagcggccattcttttggattttcatggacaacttgctgctgaccgaggatgaccaggaaactaccactcggttcctgcagaccgaagccgtgaccctgcaggacgtgagaggccgggactaccagaacgccatgcgggtgtggtccaacatccctggactgaaaagcaagcacgcacctctgacccctaaagaagaggagtacctgcaggcccaggtgcggagcagaagcaagctggacgcccctaaggtggatctgctggtgaagaattgcctcctgcccctgagagagtacttcaagtatttcagccagaatagtctgcccctgggcggcccaagcagcggcgcccctcctcccagcggcggcagcccagccggctccccaacctctaccgaggagggcacctctgagtccgccacccccgagagcggccctggcacctccaccgagcccagcgagggcagcgcacccggcagccctgccggcagccccacctccacagaggagggaaccagcaccgagcccagcgaaggcagcgccccaggcaccagcaccgagcctagtgagggcggctctggcggcggcagcgcccaggagattaaacggatcaacaagatcagaagaagacttgtgaaagacagcaacaccaagaaggccggcaagacaggccccatgaaaaccctgctggttagagtgatgacacccgatctgagagagcggctggaaaacctgagaaagaagcctgaaaatatcccccagcccatcagcaatacatctagagccaacctgaataagctgctgaccgattacaccgaaatgaagaaggcgatcctgcatgtgtactgggaagagttccagaaggaccctgtgggcctgatgagccgggtggcccagcctgccagcaagaagatcgatcagaacaagctgaaacctgagatggacgagaagggcaacctgaccaccgccggctttgcctgctctcagtgtggccagcccctgttcgtgtacaagctggagcaggtgtctgagaagggcaaggcttacaccaactacttcggacggtgcaatgtggccgagcacgaaaagctgatcctgctggcccagctgaagcccgagaaggatagcgacgaagccgtgacatatagcctgggaaagtttgggcagagggccctggatttctacagcattcatgtgaccaaggagtccacccaccccgtgaagcccctggcccagatcgccggaaacagatacgcctccggacctgtgggaaaggccctgagcgacgcatgtatgggcacaatcgcctccttcctgtctaagtaccaggacatcatcatcgaacaccagaaggtggtgaagggcaaccagaagagactggagagcctgcgggagctggccggcaaggaaaacctggaataccctagcgtgaccctgccacctcagcctcacaccaaggagggcgttgatgcctacaacgaagtgatcgcccgggtgcgaatgtgggtgaacctgaacctgtggcagaagctgaagctaagcagagatgatgccaagcctctgctgagactgaagggattcccttcctttcctctggtcgagagacaggccaacgaagtggactggtgggacatggtgtgtaacgtgaagaagctgatcaacgagaaaaaggaggatggcaaggtgttttggcagaatctggctggctacaagagacaggaagccctgagaccatacctgagcagcgaggaagatcggaagaagggaaagaaattcgctcggtaccagctgggcgacctgctgctgcacctggaaaagaagcacggcgaggactggggaaaggtgtacgacgaggcctgggagcggattgacaagaaagtggaaggcctgagcaagcacatcaagctggaagaggaacggagaagcgaggacgcccagagcaaggccgccctgaccgactggctgcgggctaaggccagcttcgtgatcgagggcctgaaggaggccgacaaggacgagttctgcagatgcgagctgaagctgcagaagtggtacggggacctgcggggaaagcccttcgccatcgaagccgagaacagcatcctggacatcagcggcttcagcaagcagtacaactgtgccttcatctggcagaaggacggcgtgaagaagctgaacctgtacctgatcatcaactacttcaagggcggcaagctgcggttcaagaagatcaaacctgaagccttcgaagccaacagattctacaccgtgatcaacaaaaagagcggcgagatcgtgcccatggaggtgaacttcaacttcgacgaccccaacctgatcatcctgcctctggcctttggcaagagacagggcagagaattcatctggaacgacctgctgtccctggaaaccggcagcctgaagctggccaacggaagagtgatcgagaagacactgtacaacagaagaacccggcaggatgagcctgccctgttcgtggccctgaccttcgagcggcgggaggtcctggactcctccaatatcaaaccaatgaacctgatcggcgtggcaagaggcgaaaacatccccgccgtgatcgccctgaccgaccccgagggctgcccactgagccggtttaaggatagcctgggaaacccaacccacatcctgagaatcggcgagagctataaggagaagcagcggaccatccaggccaagaaggaggtggagcagcggagagccggcggctacagccggaagtacgccagcaaagccaagaatctggcagacgatatggtgagaaacaccgctagagatctgctgtactacgccgtgacccaggatgccatgctgatcttcgccaacctgagccggggcttcggccggcagggcaagcggaccttcatggccgagagacagtacacacggatggaggactggctgaccgccaagctggcctacgagggcctgagcaagacctacctgtccaagacactggcccagtacacctccaagacatgcagcaactgtgggtttaccatcaccagcgccgactacgacagggtgctggagaagctgaagaagacagcaacaggctggatgaccacaattaacggcaaggagctgaaggtggagggccagattacctactacaacagatacaagagacagaacgtagtcaaggacctgtccgtcgagctggatagactgagcgaagaatctgtgaacaacgacatctcctcctggacaaagggcagaagcggagaagctctgagcctcctgaagaaaagattctcccatagacccgtgcaggagaagttcgtgtgcctgaactgcggcttcgagacacacgcagccgagcaagccgccctgaacatcgccagatcctggctgttcctgcggagccaggagtacaagaaataccagacaaacaagacaaccggcaacaccgataagagagccttcgtcgagacctggcagtccttttaccggaagaagcttaaggaggtgtggaaacctgccgtgcggtctggcggatctggcggaggctccacaagcatgagccaggtgaccttcagcgacgtggccatcgacttcagccacgaggagtgggcctgcctggacagcgcccagagggacctgtacaaggacgtgatggtgcagaactacgagaacctggtgagcgtgggcctgagcatcaccaagccctacgtgatcatgctgctggaggacggcaaggagccctggatgatggagaagaagctgagcaaggtgtaccccttccccctgagccacagcgtgaccagccccaagaaaaagagaaaagtctaagctgccttctgcggggcttgccttctggccatgcccttcttctctcccttgcacctgtacctcttggtctttgaataaagcctgagtaggaaggctagcaaaaaaaaaaaaaaaaaaaaaaaaaaaaaaaaaaaaaaaaaaaaaaaaaaaaaaaaaaaaaaaaaaaaaaaaaaaaaaaa

SEQ ID NO: 4114 - RNA, 5419 nt, synthetic construct
  source 1..5419: mol_type = other RNA
aggaaataagagagaaaagaagagtaagaagaaatataagagccaccatggcccctaagaagaagcgtaaagtgagccgggtgaacggcagcggcagcggcggcggcatgaaccacgaccaggagttcgacccccctaaggtgtaccctcccgtccccgccgagaagagaaagcccatccgggtcctgagcctgttcgatggcatcgccaccggtctgctggtgctgaaggacctgggcatccaggtggataggtacattgcctccgaggtgtgcgaggactccatcaccgtgggaatggtgcgtcatcagggcaagatcatgtacgtgggcgacgtgcggagcgtgacacagaagcatatccaggagtggggccctttcgacctggtgatcggcggcagcccttgcaatgacctgagcatcgtgaacccagcccggaagggcctgtacgagggaaccggcagactgttcttcgagttttacagactgctgcacgacgcccggcctaaggaaggcgacgaccggcccttcttttggctgttcgagaatgtggtggccatgggagtcagcgacaagcgggatattagccggttcctggagagcaaccccgtgatgatcgatgccaaggaagtgagcgccgcccaccgggccagatacttctggggcaatctgcctggcatgaacagacccctggccagcaccgtgaacgacaagctggagctgcaggagtgcctggagcacggccggatcgccaagttcagcaaggtgagaaccatcaccacccgaagcaacagcatcaaacaaggcaaggaccagcactttcctgtgttcatgaacgagaaggaggacatcctgtggtgtaccgagatggagagagtgttcgggttcccagtccactacacagatgtcagcaacatgtctagactggccagacagagactgctgggaagaagctggtccgtccctgtgatcagacacctgttcgcccctctgaaggagtacttcgcctgcgtgagcagcggcaacagcaacgccaacagccggggccccagcttctctagcggcctggtgccactgtccctgagagggagccacatgggccccatggagatctacaaaaccgtgagcgcctggaagcggcagcctgtgcgcgtgctgagcctgtttcggaatatcgataaagtcctgaaaagcctgggattcctggagagcggctctggctccggcggtggcaccctgaagtacgtggaggatgtgacaaacgtggtcagacgggatgtggagaagtggggccccttcgatctggtgtacggcagcacccaacccctgggcagctcttgtgaccggtgccctggctggtacatgtttcagttccaccggatcctgcagtacgccctgccgagacaggagtcccagcggccattcttttggattttcatggacaacttgctgctgaccgaggatgaccaggaaactaccactcggttcctgcagaccgaagccgtgaccctgcaggacgtgagaggccgggactaccagaacgccatgcgggtgtggtccaacatccctggactgaaaagcaagcacgcacctctgacccctaaagaagaggagtacctgcaggcccaggtgcggagcagaagcaagctggacgcccctaaggtggatctgctggtgaagaattgcctcctgcccctgagagagtacttcaagtatttcagccagaatagtctgcccctgggcggcccaagcagcggcgcccctcctcccagcggcggcagcccagccggctccccaacctctaccgaggagggcacctctgagtccgccacccccgagagcggccctggcacctccaccgagcccagcgagggcagcgcacccggcagccctgccggcagccccacctccacagaggagggaaccagcaccgagcccagcgaaggcagcgccccaggcaccagcaccgagcctagtgagggcggctctggcggcggcagcgcccaggagattaaacggatcaacaagatcagaagaagacttgtgaaagacagcaacaccaagaaggccggcaagacaggccccatgaaaaccctgctggttagagtgatgacacccgatctgagagagcggctggaaaacctgagaaagaagcctgaaaatatcccccagcccatcagcaatacatctagagccaacctgaataagctgctgaccgattacaccgaaatgaagaaggcgatcctgcatgtgtactgggaagagttccagaaggaccctgtgggcctgatgagccgggtggcccagcctgccagcaagaagatcgatcagaacaagctgaaacctgagatggacgagaagggcaacctgaccaccgccggctttgcctgctctcagtgtggccagcccctgttcgtgtacaagctggagcaggtgtctgagaagggcaaggcttacaccaactacttcggacggtgcaatgtggccgagcacgaaaagctgatcctgctggcccagctgaagcccgagaaggatagcgacgaagccgtgacatatagcctgggaaagtttgggcagagggccctggatttctacagcattcatgtgaccaaggagtccacccaccccgtgaagcccctggcccagatcgccggaaacagatacgcctccggacctgtgggaaaggccctgagcgacgcatgtatgggcacaatcgcctccttcctgtctaagtaccaggacatcatcatcgaacaccagaaggtggtgaagggcaaccagaagagactggagagcctgcgggagctggccggcaaggaaaacctggaataccctagcgtgaccctgccacctcagcctcacaccaaggagggcgttgatgcctacaacgaagtgatcgcccgggtgcgaatgtgggtgaacctgaacctgtggcagaagctgaagctaagcagagatgatgccaagcctctgctgagactgaagggattcccttcctttcctctggtcgagagacaggccaacgaagtggactggtgggacatggtgtgtaacgtgaagaagctgatcaacgagaaaaaggaggatggcaaggtgttttggcagaatctggctggctacaagagacaggaagccctgagaccatacctgagcagcgaggaagatcggaagaagggaaagaaattcgctcggtaccagctgggcgacctgctgctgcacctggaaaagaagcacggcgaggactggggaaaggtgtacgacgaggcctgggagcggattgacaagaaagtggaaggcctgagcaagcacatcaagctggaagaggaacggagaagcgaggacgcccagagcaaggccgccctgaccgactggctgcgggctaaggccagcttcgtgatcgagggcctgaaggaggccgacaaggacgagttctgcagatgcgagctgaagctgcagaagtggtacggggacctgcggggaaagcccttcgccatcgaagccgagaacagcatcctggacatcagcggcttcagcaagcagtacaactgtgccttcatctggcagaaggacggcgtgaagaagctgaacctgtacctgatcatcaactacttcaagggcggcaagctgcggttcaagaagatcaaacctgaagccttcgaagccaacagattctacaccgtgatcaacaaaaagagcggcgagatcgtgcccatggaggtgaacttcaacttcgacgaccccaacctgatcatcctgcctctggcctttggcaagagacagggcagagaattcatctggaacgacctgctgtccctggaaaccggcagcctgaagctggccaacggaagagtgatcgagaagacactgtacaacagaagaacccggcaggatgagcctgccctgttcgtggccctgaccttcgagcggcgggaggtcctggactcctccaatatcaaaccaatgaacctgatcggcgtggcaagaggcgaaaacatccccgccgtgatcgccctgaccgaccccgagggctgcccactgagccggtttaaggatagcctgggaaacccaacccacatcctgagaatcggcgagagctataaggagaagcagcggaccatccaggccaagaaggaggtggagcagcggagagccggcggctacagccggaagtacgccagcaaagccaagaatctggcagacgatatggtgagaaacaccgctagagatctgctgtactacgccgtgacccaggatgccatgctgatcttcgccaacctgagccggggcttcggccggcagggcaagcggaccttcatggccgagagacagtacacacggatggaggactggctgaccgccaagctggcctacgagggcctgagcaagacctacctgtccaagacactggcccagtacacctccaagacatgcagcaactgtgggtttaccatcaccagcgccgactacgacagggtgctggagaagctgaagaagacagcaacaggctggatgaccacaattaacggcaaggagctgaaggtggagggccagattacctactacaacagatacaagagacagaacgtagtcaaggacctgtccgtcgagctggatagactgagcgaagaatctgtgaacaacgacatctcctcctggacaaagggcagaagcggagaagctctgagcctcctgaagaaaagattctcccatagacccgtgcaggagaagttcgtgtgcctgaactgcggcttcgagacacacgcagccgagcaagccgccctgaacatcgccagatcctggctgttcctgcggagccaggagtacaagaaataccagacaaacaagacaaccggcaacaccgataagagagccttcgtcgagacctggcagtccttttaccggaagaagcttaaggaggtgtggaaacctgccgtgcggtctggcggatctggcggaggctccacaagcacccagatgcaggtgaagttcgacgacatcgccgtgagcttcagccaggaggagtggaagtacctggacgaggagcagaaggagctgtacagggaggtgatgaaggagaactaccagatcctgatcagcctgggcaccggcagcagcaccacccccaagatcatcagccacatcgagaggggcgaggagccctacatcagggacgagcccgtgctggtggagaggaagaccggcaagagcagcaccagccccaagaaaaagagaaaagtctaagctgccttctgcggggcttgccttctggccatgcccttcttctctcccttgcacctgtacctcttggtctttgaataaagcctgagtaggaaggctagcaaaaaaaaaaaaaaaaaaaaaaaaaaaaaaaaaaaaaaaaaaaaaaaaaaaaaaaaaaaaaaaaaaaaaaaaaaaaaaaa

SEQ ID NO: 4115 - RNA, 5419 nt, synthetic construct
  source 1..5419: mol_type = other RNA
aggaaataagagagaaaagaagagtaagaagaaatataagagccaccatggcccctaagaagaagcgtaaagtgagccgggtgaacggcagcggcagcggcggcggcatgaaccacgaccaggagttcgacccccctaaggtgtaccctcccgtccccgccgagaagagaaagcccatccgggtcctgagcctgttcgatggcatcgccaccggtctgctggtgctgaaggacctgggcatccaggtggataggtacattgcctccgaggtgtgcgaggactccatcaccgtgggaatggtgcgtcatcagggcaagatcatgtacgtgggcgacgtgcggagcgtgacacagaagcatatccaggagtggggccctttcgacctggtgatcggcggcagcccttgcaatgacctgagcatcgtgaacccagcccggaagggcctgtacgagggaaccggcagactgttcttcgagttttacagactgctgcacgacgcccggcctaaggaaggcgacgaccggcccttcttttggctgttcgagaatgtggtggccatgggagtcagcgacaagcgggatattagccggttcctggagagcaaccccgtgatgatcgatgccaaggaagtgagcgccgcccaccgggccagatacttctggggcaatctgcctggcatgaacagacccctggccagcaccgtgaacgacaagctggagctgcaggagtgcctggagcacggccggatcgccaagttcagcaaggtgagaaccatcaccacccgaagcaacagcatcaaacaaggcaaggaccagcactttcctgtgttcatgaacgagaaggaggacatcctgtggtgtaccgagatggagagagtgttcgggttcccagtccactacacagatgtcagcaacatgtctagactggccagacagagactgctgggaagaagctggtccgtccctgtgatcagacacctgttcgcccctctgaaggagtacttcgcctgcgtgagcagcggcaacagcaacgccaacagccggggccccagcttctctagcggcctggtgccactgtccctgagagggagccacatgggccccatggagatctacaaaaccgtgagcgcctggaagcggcagcctgtgcgcgtgctgagcctgtttcggaatatcgataaagtcctgaaaagcctgggattcctggagagcggctctggctccggcggtggcaccctgaagtacgtggaggatgtgacaaacgtggtcagacgggatgtggagaagtggggccccttcgatctggtgtacggcagcacccaacccctgggcagctcttgtgaccggtgccctggctggtacatgtttcagttccaccggatcctgcagtacgccctgccgagacaggagtcccagcggccattcttttggattttcatggacaacttgctgctgaccgaggatgaccaggaaactaccactcggttcctgcagaccgaagccgtgaccctgcaggacgtgagaggccgggactaccagaacgccatgcgggtgtggtccaacatccctggactgaaaagcaagcacgcacctctgacccctaaagaagaggagtacctgcaggcccaggtgcggagcagaagcaagctggacgcccctaaggtggatctgctggtgaagaattgcctcctgcccctgagagagtacttcaagtatttcagccagaatagtctgcccctgggcggcccaagcagcggcgcccctcctcccagcggcggcagcccagccggctccccaacctctaccgaggagggcacctctgagtccgccacccccgagagcggccctggcacctccaccgagcccagcgagggcagcgcacccggcagccctgccggcagccccacctccacagaggagggaaccagcaccgagcccagcgaaggcagcgccccaggcaccagcaccgagcctagtgagggcggctctggcggcggcagcgcccaggagattaaacggatcaacaagatcagaagaagacttgtgaaagacagcaacaccaagaaggccggcaagacaggccccatgaaaaccctgctggttagagtgatgacacccgatctgagagagcggctggaaaacctgagaaagaagcctgaaaatatcccccagcccatcagcaatacatctagagccaacctgaataagctgctgaccgattacaccgaaatgaagaaggcgatcctgcatgtgtactgggaagagttccagaaggaccctgtgggcctgatgagccgggtggcccagcctgccagcaagaagatcgatcagaacaagctgaaacctgagatggacgagaagggcaacctgaccaccgccggctttgcctgctctcagtgtggccagcccctgttcgtgtacaagctggagcaggtgtctgagaagggcaaggcttacaccaactacttcggacggtgcaatgtggccgagcacgaaaagctgatcctgctggcccagctgaagcccgagaaggatagcgacgaagccgtgacatatagcctgggaaagtttgggcagagggccctggatttctacagcattcatgtgaccaaggagtccacccaccccgtgaagcccctggcccagatcgccggaaacagatacgcctccggacctgtgggaaaggccctgagcgacgcatgtatgggcacaatcgcctccttcctgtctaagtaccaggacatcatcatcgaacaccagaaggtggtgaagggcaaccagaagagactggagagcctgcgggagctggccggcaaggaaaacctggaataccctagcgtgaccctgccacctcagcctcacaccaaggagggcgttgatgcctacaacgaagtgatcgcccgggtgcgaatgtgggtgaacctgaacctgtggcagaagctgaagctaagcagagatgatgccaagcctctgctgagactgaagggattcccttcctttcctctggtcgagagacaggccaacgaagtggactggtgggacatggtgtgtaacgtgaagaagctgatcaacgagaaaaaggaggatggcaaggtgttttggcagaatctggctggctacaagagacaggaagccctgagaccatacctgagcagcgaggaagatcggaagaagggaaagaaattcgctcggtaccagctgggcgacctgctgctgcacctggaaaagaagcacggcgaggactggggaaaggtgtacgacgaggcctgggagcggattgacaagaaagtggaaggcctgagcaagcacatcaagctggaagaggaacggagaagcgaggacgcccagagcaaggccgccctgaccgactggctgcgggctaaggccagcttcgtgatcgagggcctgaaggaggccgacaaggacgagttctgcagatgcgagctgaagctgcagaagtggtacggggacctgcggggaaagcccttcgccatcgaagccgagaacagcatcctggacatcagcggcttcagcaagcagtacaactgtgccttcatctggcagaaggacggcgtgaagaagctgaacctgtacctgatcatcaactacttcaagggcggcaagctgcggttcaagaagatcaaacctgaagccttcgaagccaacagattctacaccgtgatcaacaaaaagagcggcgagatcgtgcccatggaggtgaacttcaacttcgacgaccccaacctgatcatcctgcctctggcctttggcaagagacagggcagagaattcatctggaacgacctgctgtccctggaaaccggcagcctgaagctggccaacggaagagtgatcgagaagacactgtacaacagaagaacccggcaggatgagcctgccctgttcgtggccctgaccttcgagcggcgggaggtcctggactcctccaatatcaaaccaatgaacctgatcggcgtggcaagaggcgaaaacatccccgccgtgatcgccctgaccgaccccgagggctgcccactgagccggtttaaggatagcctgggaaacccaacccacatcctgagaatcggcgagagctataaggagaagcagcggaccatccaggccaagaaggaggtggagcagcggagagccggcggctacagccggaagtacgccagcaaagccaagaatctggcagacgatatggtgagaaacaccgctagagatctgctgtactacgccgtgacccaggatgccatgctgatcttcgccaacctgagccggggcttcggccggcagggcaagcggaccttcatggccgagagacagtacacacggatggaggactggctgaccgccaagctggcctacgagggcctgagcaagacctacctgtccaagacactggcccagtacacctccaagacatgcagcaactgtgggtttaccatcaccagcgccgactacgacagggtgctggagaagctgaagaagacagcaacaggctggatgaccacaattaacggcaaggagctgaaggtggagggccagattacctactacaacagatacaagagacagaacgtagtcaaggacctgtccgtcgagctggatagactgagcgaagaatctgtgaacaacgacatctcctcctggacaaagggcagaagcggagaagctctgagcctcctgaagaaaagattctcccatagacccgtgcaggagaagttcgtgtgcctgaactgcggcttcgagacacacgcagccgagcaagccgccctgaacatcgccagatcctggctgttcctgcggagccaggagtacaagaaataccagacaaacaagacaaccggcaacaccgataagagagccttcgtcgagacctggcagtccttttaccggaagaagcttaaggaggtgtggaaacctgccgtgcggtctggcggatctggcggaggctccacaagcatgaccctgctgaccttcagggacgtggccatcgagttcagcctggaggagtggaagtgcctggacctggcccagcagaacctgtacagggacgtgatgctggagaactacaggaacctgttcagcatcggcctgaccgtgagcaagcccggcctgatcacctgcctggagcagaggaaggagccctggaacgtgaagaggcaggaggccgtggacggccaccccggctggtgcagcggcgtgaccagccccaagaaaaagagaaaagtctaagctgccttctgcggggcttgccttctggccatgcccttcttctctcccttgcacctgtacctcttggtctttgaataaagcctgagtaggaaggctagcaaaaaaaaaaaaaaaaaaaaaaaaaaaaaaaaaaaaaaaaaaaaaaaaaaaaaaaaaaaaaaaaaaaaaaaaaaaaaaaa

SEQ ID NO: 4116 - RNA, 5449 nt, synthetic construct
  source 1..5449: mol_type = other RNA
aggaaataagagagaaaagaagagtaagaagaaatataagagccaccatggcccctaagaagaagcgtaaagtgagccgggtgaacggcagcggcagcggcggcggcatgaaccacgaccaggagttcgacccccctaaggtgtaccctcccgtccccgccgagaagagaaagcccatccgggtcctgagcctgttcgatggcatcgccaccggtctgctggtgctgaaggacctgggcatccaggtggataggtacattgcctccgaggtgtgcgaggactccatcaccgtgggaatggtgcgtcatcagggcaagatcatgtacgtgggcgacgtgcggagcgtgacacagaagcatatccaggagtggggccctttcgacctggtgatcggcggcagcccttgcaatgacctgagcatcgtgaacccagcccggaagggcctgtacgagggaaccggcagactgttcttcgagttttacagactgctgcacgacgcccggcctaaggaaggcgacgaccggcccttcttttggctgttcgagaatgtggtggccatgggagtcagcgacaagcgggatattagccggttcctggagagcaaccccgtgatgatcgatgccaaggaagtgagcgccgcccaccgggccagatacttctggggcaatctgcctggcatgaacagacccctggccagcaccgtgaacgacaagctggagctgcaggagtgcctggagcacggccggatcgccaagttcagcaaggtgagaaccatcaccacccgaagcaacagcatcaaacaaggcaaggaccagcactttcctgtgttcatgaacgagaaggaggacatcctgtggtgtaccgagatggagagagtgttcgggttcccagtccactacacagatgtcagcaacatgtctagactggccagacagagactgctgggaagaagctggtccgtccctgtgatcagacacctgttcgcccctctgaaggagtacttcgcctgcgtgagcagcggcaacagcaacgccaacagccggggccccagcttctctagcggcctggtgccactgtccctgagagggagccacatgggccccatggagatctacaaaaccgtgagcgcctggaagcggcagcctgtgcgcgtgctgagcctgtttcggaatatcgataaagtcctgaaaagcctgggattcctggagagcggctctggctccggcggtggcaccctgaagtacgtggaggatgtgacaaacgtggtcagacgggatgtggagaagtggggccccttcgatctggtgtacggcagcacccaacccctgggcagctcttgtgaccggtgccctggctggtacatgtttcagttccaccggatcctgcagtacgccctgccgagacaggagtcccagcggccattcttttggattttcatggacaacttgctgctgaccgaggatgaccaggaaactaccactcggttcctgcagaccgaagccgtgaccctgcaggacgtgagaggccgggactaccagaacgccatgcgggtgtggtccaacatccctggactgaaaagcaagcacgcacctctgacccctaaagaagaggagtacctgcaggcccaggtgcggagcagaagcaagctggacgcccctaaggtggatctgctggtgaagaattgcctcctgcccctgagagagtacttcaagtatttcagccagaatagtctgcccctgggcggcccaagcagcggcgcccctcctcccagcggcggcagcccagccggctccccaacctctaccgaggagggcacctctgagtccgccacccccgagagcggccctggcacctccaccgagcccagcgagggcagcgcacccggcagccctgccggcagccccacctccacagaggagggaaccagcaccgagcccagcgaaggcagcgccccaggcaccagcaccgagcctagtgagggcggctctggcggcggcagcgcccaggagattaaacggatcaacaagatcagaagaagacttgtgaaagacagcaacaccaagaaggccggcaagacaggccccatgaaaaccctgctggttagagtgatgacacccgatctgagagagcggctggaaaacctgagaaagaagcctgaaaatatcccccagcccatcagcaatacatctagagccaacctgaataagctgctgaccgattacaccgaaatgaagaaggcgatcctgcatgtgtactgggaagagttccagaaggaccctgtgggcctgatgagccgggtggcccagcctgccagcaagaagatcgatcagaacaagctgaaacctgagatggacgagaagggcaacctgaccaccgccggctttgcctgctctcagtgtggccagcccctgttcgtgtacaagctggagcaggtgtctgagaagggcaaggcttacaccaactacttcggacggtgcaatgtggccgagcacgaaaagctgatcctgctggcccagctgaagcccgagaaggatagcgacgaagccgtgacatatagcctgggaaagtttgggcagagggccctggatttctacagcattcatgtgaccaaggagtccacccaccccgtgaagcccctggcccagatcgccggaaacagatacgcctccggacctgtgggaaaggccctgagcgacgcatgtatgggcacaatcgcctccttcctgtctaagtaccaggacatcatcatcgaacaccagaaggtggtgaagggcaaccagaagagactggagagcctgcgggagctggccggcaaggaaaacctggaataccctagcgtgaccctgccacctcagcctcacaccaaggagggcgttgatgcctacaacgaagtgatcgcccgggtgcgaatgtgggtgaacctgaacctgtggcagaagctgaagctaagcagagatgatgccaagcctctgctgagactgaagggattcccttcctttcctctggtcgagagacaggccaacgaagtggactggtgggacatggtgtgtaacgtgaagaagctgatcaacgagaaaaaggaggatggcaaggtgttttggcagaatctggctggctacaagagacaggaagccctgagaccatacctgagcagcgaggaagatcggaagaagggaaagaaattcgctcggtaccagctgggcgacctgctgctgcacctggaaaagaagcacggcgaggactggggaaaggtgtacgacgaggcctgggagcggattgacaagaaagtggaaggcctgagcaagcacatcaagctggaagaggaacggagaagcgaggacgcccagagcaaggccgccctgaccgactggctgcgggctaaggccagcttcgtgatcgagggcctgaaggaggccgacaaggacgagttctgcagatgcgagctgaagctgcagaagtggtacggggacctgcggggaaagcccttcgccatcgaagccgagaacagcatcctggacatcagcggcttcagcaagcagtacaactgtgccttcatctggcagaaggacggcgtgaagaagctgaacctgtacctgatcatcaactacttcaagggcggcaagctgcggttcaagaagatcaaacctgaagccttcgaagccaacagattctacaccgtgatcaacaaaaagagcggcgagatcgtgcccatggaggtgaacttcaacttcgacgaccccaacctgatcatcctgcctctggcctttggcaagagacagggcagagaattcatctggaacgacctgctgtccctggaaaccggcagcctgaagctggccaacggaagagtgatcgagaagacactgtacaacagaagaacccggcaggatgagcctgccctgttcgtggccctgaccttcgagcggcgggaggtcctggactcctccaatatcaaaccaatgaacctgatcggcgtggcaagaggcgaaaacatccccgccgtgatcgccctgaccgaccccgagggctgcccactgagccggtttaaggatagcctgggaaacccaacccacatcctgagaatcggcgagagctataaggagaagcagcggaccatccaggccaagaaggaggtggagcagcggagagccggcggctacagccggaagtacgccagcaaagccaagaatctggcagacgatatggtgagaaacaccgctagagatctgctgtactacgccgtgacccaggatgccatgctgatcttcgccaacctgagccggggcttcggccggcagggcaagcggaccttcatggccgagagacagtacacacggatggaggactggctgaccgccaagctggcctacgagggcctgagcaagacctacctgtccaagacactggcccagtacacctccaagacatgcagcaactgtgggtttaccatcaccagcgccgactacgacagggtgctggagaagctgaagaagacagcaacaggctggatgaccacaattaacggcaaggagctgaaggtggagggccagattacctactacaacagatacaagagacagaacgtagtcaaggacctgtccgtcgagctggatagactgagcgaagaatctgtgaacaacgacatctcctcctggacaaagggcagaagcggagaagctctgagcctcctgaagaaaagattctcccatagacccgtgcaggagaagttcgtgtgcctgaactgcggcttcgagacacacgcagccgagcaagccgccctgaacatcgccagatcctggctgttcctgcggagccaggagtacaagaaataccagacaaacaagacaaccggcaacaccgataagagagccttcgtcgagacctggcagtccttttaccggaagaagcttaaggaggtgtggaaacctgccgtgcggtctggcggatctggcggaggctccacaagcgtgaccttcgaggacgtggccgtgaacttcaccccccaggagtgggccctgctggaccccagccagaagaacctgtacagggacgtgatgcaggagaccctgaggaacctggccagcgtgggcaagaagtggaaggaccagaacatggaggacgagtgcaagacccccaggaggaacctgaggagcgtggtgggcgagaggctgttcaccagcaaggagggcagccagtgcggcgagaccctgaacctggacagccaccacatgctgaagaagaccagccccaagaaaaagagaaaagtctaagctgccttctgcggggcttgccttctggccatgcccttcttctctcccttgcacctgtacctcttggtctttgaataaagcctgagtaggaaggctagcaaaaaaaaaaaaaaaaaaaaaaaaaaaaaaaaaaaaaaaaaaaaaaaaaaaaaaaaaaaaaaaaaaaaaaaaaaaaaaaa

SEQ ID NO: 4117 - RNA, 5467 nt, synthetic construct
  source 1..5467: mol_type = other RNA
aggaaataagagagaaaagaagagtaagaagaaatataagagccaccatggcccctaagaagaagcgtaaagtgagccgggtgaacggcagcggcagcggcggcggcatgaaccacgaccaggagttcgacccccctaaggtgtaccctcccgtccccgccgagaagagaaagcccatccgggtcctgagcctgttcgatggcatcgccaccggtctgctggtgctgaaggacctgggcatccaggtggataggtacattgcctccgaggtgtgcgaggactccatcaccgtgggaatggtgcgtcatcagggcaagatcatgtacgtgggcgacgtgcggagcgtgacacagaagcatatccaggagtggggccctttcgacctggtgatcggcggcagcccttgcaatgacctgagcatcgtgaacccagcccggaagggcctgtacgagggaaccggcagactgttcttcgagttttacagactgctgcacgacgcccggcctaaggaaggcgacgaccggcccttcttttggctgttcgagaatgtggtggccatgggagtcagcgacaagcgggatattagccggttcctggagagcaaccccgtgatgatcgatgccaaggaagtgagcgccgcccaccgggccagatacttctggggcaatctgcctggcatgaacagacccctggccagcaccgtgaacgacaagctggagctgcaggagtgcctggagcacggccggatcgccaagttcagcaaggtgagaaccatcaccacccgaagcaacagcatcaaacaaggcaaggaccagcactttcctgtgttcatgaacgagaaggaggacatcctgtggtgtaccgagatggagagagtgttcgggttcccagtccactacacagatgtcagcaacatgtctagactggccagacagagactgctgggaagaagctggtccgtccctgtgatcagacacctgttcgcccctctgaaggagtacttcgcctgcgtgagcagcggcaacagcaacgccaacagccggggccccagcttctctagcggcctggtgccactgtccctgagagggagccacatgggccccatggagatctacaaaaccgtgagcgcctggaagcggcagcctgtgcgcgtgctgagcctgtttcggaatatcgataaagtcctgaaaagcctgggattcctggagagcggctctggctccggcggtggcaccctgaagtacgtggaggatgtgacaaacgtggtcagacgggatgtggagaagtggggccccttcgatctggtgtacggcagcacccaacccctgggcagctcttgtgaccggtgccctggctggtacatgtttcagttccaccggatcctgcagtacgccctgccgagacaggagtcccagcggccattcttttggattttcatggacaacttgctgctgaccgaggatgaccaggaaactaccactcggttcctgcagaccgaagccgtgaccctgcaggacgtgagaggccgggactaccagaacgccatgcgggtgtggtccaacatccctggactgaaaagcaagcacgcacctctgacccctaaagaagaggagtacctgcaggcccaggtgcggagcagaagcaagctggacgcccctaaggtggatctgctggtgaagaattgcctcctgcccctgagagagtacttcaagtatttcagccagaatagtctgcccctgggcggcccaagcagcggcgcccctcctcccagcggcggcagcccagccggctccccaacctctaccgaggagggcacctctgagtccgccacccccgagagcggccctggcacctccaccgagcccagcgagggcagcgcacccggcagccctgccggcagccccacctccacagaggagggaaccagcaccgagcccagcgaaggcagcgccccaggcaccagcaccgagcctagtgagggcggctctggcggcggcagcgcccaggagattaaacggatcaacaagatcagaagaagacttgtgaaagacagcaacaccaagaaggccggcaagacaggccccatgaaaaccctgctggttagagtgatgacacccgatctgagagagcggctggaaaacctgagaaagaagcctgaaaatatcccccagcccatcagcaatacatctagagccaacctgaataagctgctgaccgattacaccgaaatgaagaaggcgatcctgcatgtgtactgggaagagttccagaaggaccctgtgggcctgatgagccgggtggcccagcctgccagcaagaagatcgatcagaacaagctgaaacctgagatggacgagaagggcaacctgaccaccgccggctttgcctgctctcagtgtggccagcccctgttcgtgtacaagctggagcaggtgtctgagaagggcaaggcttacaccaactacttcggacggtgcaatgtggccgagcacgaaaagctgatcctgctggcccagctgaagcccgagaaggatagcgacgaagccgtgacatatagcctgggaaagtttgggcagagggccctggatttctacagcattcatgtgaccaaggagtccacccaccccgtgaagcccctggcccagatcgccggaaacagatacgcctccggacctgtgggaaaggccctgagcgacgcatgtatgggcacaatcgcctccttcctgtctaagtaccaggacatcatcatcgaacaccagaaggtggtgaagggcaaccagaagagactggagagcctgcgggagctggccggcaaggaaaacctggaataccctagcgtgaccctgccacctcagcctcacaccaaggagggcgttgatgcctacaacgaagtgatcgcccgggtgcgaatgtgggtgaacctgaacctgtggcagaagctgaagctaagcagagatgatgccaagcctctgctgagactgaagggattcccttcctttcctctggtcgagagacaggccaacgaagtggactggtgggacatggtgtgtaacgtgaagaagctgatcaacgagaaaaaggaggatggcaaggtgttttggcagaatctggctggctacaagagacaggaagccctgagaccatacctgagcagcgaggaagatcggaagaagggaaagaaattcgctcggtaccagctgggcgacctgctgctgcacctggaaaagaagcacggcgaggactggggaaaggtgtacgacgaggcctgggagcggattgacaagaaagtggaaggcctgagcaagcacatcaagctggaagaggaacggagaagcgaggacgcccagagcaaggccgccctgaccgactggctgcgggctaaggccagcttcgtgatcgagggcctgaaggaggccgacaaggacgagttctgcagatgcgagctgaagctgcagaagtggtacggggacctgcggggaaagcccttcgccatcgaagccgagaacagcatcctggacatcagcggcttcagcaagcagtacaactgtgccttcatctggcagaaggacggcgtgaagaagctgaacctgtacctgatcatcaactacttcaagggcggcaagctgcggttcaagaagatcaaacctgaagccttcgaagccaacagattctacaccgtgatcaacaaaaagagcggcgagatcgtgcccatggaggtgaacttcaacttcgacgaccccaacctgatcatcctgcctctggcctttggcaagagacagggcagagaattcatctggaacgacctgctgtccctggaaaccggcagcctgaagctggccaacggaagagtgatcgagaagacactgtacaacagaagaacccggcaggatgagcctgccctgttcgtggccctgaccttcgagcggcgggaggtcctggactcctccaatatcaaaccaatgaacctgatcggcgtggcaagaggcgaaaacatccccgccgtgatcgccctgaccgaccccgagggctgcccactgagccggtttaaggatagcctgggaaacccaacccacatcctgagaatcggcgagagctataaggagaagcagcggaccatccaggccaagaaggaggtggagcagcggagagccggcggctacagccggaagtacgccagcaaagccaagaatctggcagacgatatggtgagaaacaccgctagagatctgctgtactacgccgtgacccaggatgccatgctgatcttcgccaacctgagccggggcttcggccggcagggcaagcggaccttcatggccgagagacagtacacacggatggaggactggctgaccgccaagctggcctacgagggcctgagcaagacctacctgtccaagacactggcccagtacacctccaagacatgcagcaactgtgggtttaccatcaccagcgccgactacgacagggtgctggagaagctgaagaagacagcaacaggctggatgaccacaattaacggcaaggagctgaaggtggagggccagattacctactacaacagatacaagagacagaacgtagtcaaggacctgtccgtcgagctggatagactgagcgaagaatctgtgaacaacgacatctcctcctggacaaagggcagaagcggagaagctctgagcctcctgaagaaaagattctcccatagacccgtgcaggagaagttcgtgtgcctgaactgcggcttcgagacacacgcagccgagcaagccgccctgaacatcgccagatcctggctgttcctgcggagccaggagtacaagaaataccagacaaacaagacaaccggcaacaccgataagagagccttcgtcgagacctggcagtccttttaccggaagaagcttaaggaggtgtggaaacctgccgtgcggtctggcggatctggcggaggctccacaagcgagaagatcgaggacatggccgtgagcctgatcagggaggagtggctgctggaccccagccagaaggacctgaggagggacaacaggaccgagaactacaggaacatgttcagcctgggcggcgagaccaggagcgagaacagggagctggccagcaagcaggtggccagcgccggcgtgcagccccacggcgagaccgccgccaggtgcaacggcgacgtgaccggcgccctggagcacggcgaggccagggacctgctgggcagcagggtggagaggcagagggccaacaccagccccaagaaaaagagaaaagtctaagctgccttctgcggggcttgccttctggccatgcccttcttctctcccttgcacctgtacctcttggtctttgaataaagcctgagtaggaaggctagcaaaaaaaaaaaaaaaaaaaaaaaaaaaaaaaaaaaaaaaaaaaaaaaaaaaaaaaaaaaaaaaaaaaaaaaaaaaaaaaa

SEQ ID NO: 4118 - RNA, 5419 nt, synthetic construct; identical to SEQ ID NO: 2521
  modified_base 1..5419: mod_base = OTHER; note = Each t is m1f
  source 1..5419: mol_type = other RNA

SEQ ID NO: 4119 - RNA, 5419 nt, synthetic construct; identical to SEQ ID NO: 2522
  modified_base 1..5419: mod_base = OTHER; note = Each t is m1f
  source 1..5419: mol_type = other RNA

SEQ ID NO: 4120 - RNA, 5419 nt, synthetic construct; identical to SEQ ID NO: 2523
  modified_base 1..5419: mod_base = OTHER; note = Each t is m1f
  source 1..5419: mol_type = other RNA

SEQ ID NO: 4121 - RNA, 5419 nt, synthetic construct; identical to SEQ ID NO: 2524
  modified_base 1..5419: mod_base = OTHER; note = Each t is m1f
  source 1..5419: mol_type = other RNA

SEQ ID NO: 4122 - RNA, 5419 nt, synthetic construct; identical to SEQ ID NO: 2525
  modified_base 1..5419: mod_base = OTHER; note = Each t is m1f
  source 1..5419: mol_type = other RNA

SEQ ID NO: 4123 - RNA, 5419 nt, synthetic construct; identical to SEQ ID NO: 2526
  modified_base 1..5419: mod_base = OTHER; note = Each t is m1f
  source 1..5419: mol_type = other RNA

SEQ ID NO: 4124 - RNA, 5419 nt, synthetic construct; identical to SEQ ID NO: 2527
  modified_base 1..5419: mod_base = OTHER; note = Each t is m1f
  source 1..5419: mol_type = other RNA

SEQ ID NO: 4125 - RNA, 5419 nt, synthetic construct; identical to SEQ ID NO: 2528
  modified_base 1..5419: mod_base = OTHER; note = Each t is m1f
  source 1..5419: mol_type = other RNA

SEQ ID NO: 4126 - RNA, 5419 nt, synthetic construct; identical to SEQ ID NO: 2529
  modified_base 1..5419: mod_base = OTHER; note = Each t is m1f
  source 1..5419: mol_type = other RNA

SEQ ID NO: 4127 - RNA, 5419 nt, synthetic construct; identical to SEQ ID NO: 2530
  modified_base 1..5419: mod_base = OTHER; note = Each t is m1f
  source 1..5419: mol_type = other RNA

SEQ ID NO: 4128 - RNA, 5419 nt, synthetic construct; identical to SEQ ID NO: 2531
  modified_base 1..5419: mod_base = OTHER; note = Each t is m1f
  source 1..5419: mol_type = other RNA

SEQ ID NO: 4129 - RNA, 5419 nt, synthetic construct; identical to SEQ ID NO: 2532
  modified_base 1..5419: mod_base = OTHER; note = Each t is m1f
  source 1..5419: mol_type = other RNA

SEQ ID NO: 4130 - RNA, 5419 nt, synthetic construct; identical to SEQ ID NO: 2533
  modified_base 1..5419: mod_base = OTHER; note = Each t is m1f
  source 1..5419: mol_type = other RNA

SEQ ID NO: 4131 - RNA, 5419 nt, synthetic construct; identical to SEQ ID NO: 2534
  modified_base 1..5419: mod_base = OTHER; note = Each t is m1f
  source 1..5419: mol_type = other RNA

SEQ ID NO: 4132 - RNA, 5419 nt, synthetic construct; identical to SEQ ID NO: 2535
  modified_base 1..5419: mod_base = OTHER; note = Each t is m1f
  source 1..5419: mol_type = other RNA

SEQ ID NO: 4133 - RNA, 5419 nt, synthetic construct; identical to SEQ ID NO: 2536
  modified_base 1..5419: mod_base = OTHER; note = Each t is m1f
  source 1..5419: mol_type = other RNA

SEQ ID NO: 4134 - RNA, 5419 nt, synthetic construct; identical to SEQ ID NO: 2537
  modified_base 1..5419: mod_base = OTHER; note = Each t is m1f
  source 1..5419: mol_type = other RNA

SEQ ID NO: 4135 - RNA, 5419 nt, synthetic construct; identical to SEQ ID NO: 2538
  modified_base 1..5419: mod_base = OTHER; note = Each t is m1f
  source 1..5419: mol_type = other RNA

SEQ ID NO: 4136 - RNA, 5419 nt, synthetic construct; identical to SEQ ID NO: 2539
  modified_base 1..5419: mod_base = OTHER; note = Each t is m1f
  source 1..5419: mol_type = other RNA

SEQ ID NO: 4137 - RNA, 5419 nt, synthetic construct; identical to SEQ ID NO: 2540
  modified_base 1..5419: mod_base = OTHER; note = Each t is m1f
  source 1..5419: mol_type = other RNA

SEQ ID NO: 4138 - RNA, 5419 nt, synthetic construct; identical to SEQ ID NO: 2541
  modified_base 1..5419: mod_base = OTHER; note = Each t is m1f
  source 1..5419: mol_type = other RNA

SEQ ID NO: 4139 - RNA, 5419 nt, synthetic construct; identical to SEQ ID NO: 2542
  modified_base 1..5419: mod_base = OTHER; note = Each t is m1f
  source 1..5419: mol_type = other RNA

SEQ ID NO: 4140 - RNA, 5419 nt, synthetic construct; identical to SEQ ID NO: 2543
  modified_base 1..5419: mod_base = OTHER; note = Each t is m1f
  source 1..5419: mol_type = other RNA

SEQ ID NO: 4141 - RNA, 5419 nt, synthetic construct; identical to SEQ ID NO: 2544
  modified_base 1..5419: mod_base = OTHER; note = Each t is m1f
  source 1..5419: mol_type = other RNA

SEQ ID NO: 4142 - RNA, 5419 nt, synthetic construct; identical to SEQ ID NO: 2545
  modified_base 1..5419: mod_base = OTHER; note = Each t is m1f
  source 1..5419: mol_type = other RNA

SEQ ID NO: 4143 - RNA, 5419 nt, synthetic construct; identical to SEQ ID NO: 2546
  modified_base 1..5419: mod_base = OTHER; note = Each t is m1f
  source 1..5419: mol_type = other RNA

SEQ ID NO: 4144 - RNA, 5419 nt, synthetic construct; identical to SEQ ID NO: 2547
  modified_base 1..5419: mod_base = OTHER; note = Each t is m1f
  source 1..5419: mol_type = other RNA

SEQ ID NO: 4145 - RNA, 5419 nt, synthetic construct; identical to SEQ ID NO: 2548
  modified_base 1..5419: mod_base = OTHER; note = Each t is m1f
  source 1..5419: mol_type = other RNA

SEQ ID NO: 4146 - RNA, 5419 nt, synthetic construct; identical to SEQ ID NO: 2549
  modified_base 1..5419: mod_base = OTHER; note = Each t is m1f
  source 1..5419: mol_type = other RNA

SEQ ID NO: 4147 - RNA, 5419 nt, synthetic construct; identical to SEQ ID NO: 2550
  modified_base 1..5419: mod_base = OTHER; note = Each t is m1f
  source 1..5419: mol_type = other RNA

SEQ ID NO: 4148 - RNA, 5419 nt, synthetic construct; identical to SEQ ID NO: 2551
  modified_base 1..5419: mod_base = OTHER; note = Each t is m1f
  source 1..5419: mol_type = other RNA

SEQ ID NO: 4149 - RNA, 5419 nt, synthetic construct; identical to SEQ ID NO: 2552
  modified_base 1..5419: mod_base = OTHER; note = Each t is m1f
  source 1..5419: mol_type = other RNA

SEQ ID NO: 4150 - RNA, 5419 nt, synthetic construct; identical to SEQ ID NO: 2553
  modified_base 1..5419: mod_base = OTHER; note = Each t is m1f
  source 1..5419: mol_type = other RNA

SEQ ID NO: 4151 - RNA, 5419 nt, synthetic construct; identical to SEQ ID NO: 2554
  modified_base 1..5419: mod_base = OTHER; note = Each t is m1f
  source 1..5419: mol_type = other RNA

SEQ ID NO: 4152 - RNA, 5419 nt, synthetic construct; identical to SEQ ID NO: 2555
  modified_base 1..5419: mod_base = OTHER; note = Each t is m1f
  source 1..5419: mol_type = other RNA

SEQ ID NO: 4153 - RNA, 5419 nt, synthetic construct; identical to SEQ ID NO: 2556
  modified_base 1..5419: mod_base = OTHER; note = Each t is m1f
  source 1..5419: mol_type = other RNA

SEQ ID NO: 4154 - RNA, 5419 nt, synthetic construct; identical to SEQ ID NO: 2557
  modified_base 1..5419: mod_base = OTHER; note = Each t is m1f
  source 1..5419: mol_type = other RNA

SEQ ID NO: 4155 - RNA, 5419 nt, synthetic construct; identical to SEQ ID NO: 2558
  modified_base 1..5419: mod_base = OTHER; note = Each t is m1f
  source 1..5419: mol_type = other RNA

SEQ ID NO: 4156 - RNA, 5419 nt, synthetic construct; identical to SEQ ID NO: 2559
  modified_base 1..5419: mod_base = OTHER; note = Each t is m1f
  source 1..5419: mol_type = other RNA

SEQ ID NO: 4157 - RNA, 5419 nt, synthetic construct; identical to SEQ ID NO: 2560
  modified_base 1..5419: mod_base = OTHER; note = Each t is m1f
  source 1..5419: mol_type = other RNA

SEQ ID NO: 4158 - RNA, 5419 nt, synthetic construct; identical to SEQ ID NO: 2561
  modified_base 1..5419: mod_base = OTHER; note = Each t is m1f
  source 1..5419: mol_type = other RNA

SEQ ID NO: 4159 - RNA, 5419 nt, synthetic construct; identical to SEQ ID NO: 2562
  modified_base 1..5419: mod_base = OTHER; note = Each t is m1f
  source 1..5419: mol_type = other RNA

SEQ ID NO: 4160 - RNA, 5419 nt, synthetic construct; identical to SEQ ID NO: 2563
  modified_base 1..5419: mod_base = OTHER; note = Each t is m1f
  source 1..5419: mol_type = other RNA

SEQ ID NO: 4161 - RNA, 5419 nt, synthetic construct; identical to SEQ ID NO: 2564
  modified_base 1..5419: mod_base = OTHER; note = Each t is m1f
  source 1..5419: mol_type = other RNA

SEQ ID NO: 4162 - RNA, 5419 nt, synthetic construct; identical to SEQ ID NO: 2565
  modified_base 1..5419: mod_base = OTHER; note = Each t is m1f
  source 1..5419: mol_type = other RNA

SEQ ID NO: 4163 - RNA, 5419 nt, synthetic construct; identical to SEQ ID NO: 2566
  modified_base 1..5419: mod_base = OTHER; note = Each t is m1f
  source 1..5419: mol_type = other RNA

SEQ ID NO: 4164 - RNA, 5419 nt, synthetic construct; identical to SEQ ID NO: 2567
  modified_base 1..5419: mod_base = OTHER; note = Each t is m1f
  source 1..5419: mol_type = other RNA

SEQ ID NO: 4165 - RNA, 5419 nt, synthetic construct; identical to SEQ ID NO: 2568
  modified_base 1..5419: mod_base = OTHER; note = Each t is m1f
  source 1..5419: mol_type = other RNA

SEQ ID NO: 4166 - RNA, 5419 nt, synthetic construct; identical to SEQ ID NO: 2569
  modified_base 1..5419: mod_base = OTHER; note = Each t is m1f
  source 1..5419: mol_type = other RNA

SEQ ID NO: 4167 - RNA, 5419 nt, synthetic construct; identical to SEQ ID NO: 2570
  modified_base 1..5419: mod_base = OTHER; note = Each t is m1f
  source 1..5419: mol_type = other RNA

SEQ ID NO: 4168 - RNA, 5419 nt, synthetic construct; identical to SEQ ID NO: 2571
  modified_base 1..5419: mod_base = OTHER; note = Each t is m1f
  source 1..5419: mol_type = other RNA

SEQ ID NO: 4169 - RNA, 5419 nt, synthetic construct; identical to SEQ ID NO: 2572
  modified_base 1..5419: mod_base = OTHER; note = Each t is m1f
  source 1..5419: mol_type = other RNA

SEQ ID NO: 4170 - RNA, 5419 nt, synthetic construct; identical to SEQ ID NO: 2573
  modified_base 1..5419: mod_base = OTHER; note = Each t is m1f
  source 1..5419: mol_type = other RNA

SEQ ID NO: 4171 - RNA, 5419 nt, synthetic construct; identical to SEQ ID NO: 2574
  modified_base 1..5419: mod_base = OTHER; note = Each t is m1f
  source 1..5419: mol_type = other RNA

SEQ ID NO: 4172 - RNA, 5419 nt, synthetic construct; identical to SEQ ID NO: 2575
  modified_base 1..5419: mod_base = OTHER; note = Each t is m1f
  source 1..5419: mol_type = other RNA

SEQ ID NO: 4173 - RNA, 5428 nt, synthetic construct; identical to SEQ ID NO: 2576
  modified_base 1..5419: mod_base = OTHER; note = Each t is m1f
  source 1..5428: mol_type = other RNA

SEQ ID NO: 4174 - RNA, 5419 nt, synthetic construct; identical to SEQ ID NO: 2577
  modified_base 1..5419: mod_base = OTHER; note = Each t is m1f
  source 1..5419: mol_type = other RNA

SEQ ID NO: 4175 - RNA, 5419 nt, synthetic construct; identical to SEQ ID NO: 2578
  modified_base 1..5419: mod_base = OTHER; note = Each t is m1f
  source 1..5419: mol_type = other RNA

SEQ ID NO: 4176 - RNA, 5419 nt, synthetic construct; identical to SEQ ID NO: 2579
  modified_base 1..5419: mod_base = OTHER; note = Each t is m1f
  source 1..5419: mol_type = other RNA

SEQ ID NO: 4177 - RNA, 5416 nt, synthetic construct; identical to SEQ ID NO: 2580
  modified_base 1..5416: mod_base = OTHER; note = Each t is m1f
  source 1..5416: mol_type = other RNA

SEQ ID NO: 4178 - RNA, 5419 nt, synthetic construct; identical to SEQ ID NO: 2581
  modified_base 1..5419: mod_base = OTHER; note = Each t is m1f
  source 1..5419: mol_type = other RNA

SEQ ID NO: 4179 - RNA, 5419 nt, synthetic construct; identical to SEQ ID NO: 2582
  modified_base 1..5419: mod_base = OTHER; note = Each t is m1f
  source 1..5419: mol_type = other RNA

SEQ ID NO: 4180 - RNA, 5419 nt, synthetic construct; identical to SEQ ID NO: 2583
  modified_base 1..5419: mod_base = OTHER; note = Each t is m1f
  source 1..5419: mol_type = other RNA

SEQ ID NO: 4181 - RNA, 5419 nt, synthetic construct; identical to SEQ ID NO: 2584
  modified_base 1..5419: mod_base = OTHER; note = Each t is m1f
  source 1..5419: mol_type = other RNA

SEQ ID NO: 4182 - RNA, 5419 nt, synthetic construct; identical to SEQ ID NO: 2585
  modified_base 1..5419: mod_base = OTHER; note = Each t is m1f
  source 1..5419: mol_type = other RNA

SEQ ID NO: 4183 - RNA, 5419 nt, synthetic construct; identical to SEQ ID NO: 2586
  modified_base 1..5419: mod_base = OTHER; note = Each t is m1f
  source 1..5419: mol_type = other RNA

SEQ ID NO: 4184 - RNA, 5419 nt, synthetic construct; identical to SEQ ID NO: 2587
  modified_base 1..5419: mod_base = OTHER; note = Each t is m1f
  source 1..5419: mol_type = other RNA

SEQ ID NO: 4185 - RNA, 5419 nt, synthetic construct; identical to SEQ ID NO: 2588
  modified_base 1..5419: mod_base = OTHER; note = Each t is m1f
  source 1..5419: mol_type = other RNA

SEQ ID NO: 4186 - RNA, 5419 nt, synthetic construct; identical to SEQ ID NO: 2589
  modified_base 1..5419: mod_base = OTHER; note = Each t is m1f
  source 1..5419: mol_type = other RNA

SEQ ID NO: 4187 - RNA, 5419 nt, synthetic construct; identical to SEQ ID NO: 2590
  modified_base 1..5419: mod_base = OTHER; note = Each t is m1f
  source 1..5419: mol_type = other RNA

SEQ ID NO: 4188 - RNA, 5419 nt, synthetic construct; identical to SEQ ID NO: 2591
  modified_base 1..5419: mod_base = OTHER; note = Each t is m1f
  source 1..5419: mol_type = other RNA

SEQ ID NO: 4189 - RNA, 5419 nt, synthetic construct; identical to SEQ ID NO: 2592
  modified_base 1..5419: mod_base = OTHER; note = Each t is m1f
  source 1..5419: mol_type = other RNA

SEQ ID NO: 4190 - RNA, 5419 nt, synthetic construct; identical to SEQ ID NO: 2593
  modified_base 1..5419: mod_base = OTHER; note = Each t is m1f
  source 1..5419: mol_type = other RNA

SEQ ID NO: 4191 - RNA, 5419 nt, synthetic construct; identical to SEQ ID NO: 2594
  modified_base 1..5419: mod_base = OTHER; note = Each t is m1f
  source 1..5419: mol_type = other RNA

SEQ ID NO: 4192 - RNA, 5419 nt, synthetic construct; identical to SEQ ID NO: 2595
  modified_base 1..5419: mod_base = OTHER; note = Each t is m1f
  source 1..5419: mol_type = other RNA

SEQ ID NO: 4193 - RNA, 5419 nt, synthetic construct; identical to SEQ ID NO: 2596
  modified_base 1..5419: mod_base = OTHER; note = Each t is m1f
  source 1..5419: mol_type = other RNA

SEQ ID NO: 4194 - RNA, 5419 nt, synthetic construct; identical to SEQ ID NO: 2597
  modified_base 1..5419: mod_base = OTHER; note = Each t is m1f
  source 1..5419: mol_type = other RNA

SEQ ID NO: 4195 - RNA, 5419 nt, synthetic construct; identical to SEQ ID NO: 2598
  modified_base 1..5419: mod_base = OTHER; note = Each t is m1f
  source 1..5419: mol_type = other RNA

SEQ ID NO: 4196 - RNA, 5419 nt, synthetic construct; identical to SEQ ID NO: 2599
  modified_base 1..5419: mod_base = OTHER; note = Each t is m1f
  source 1..5419: mol_type = other RNA

SEQ ID NO: 4197 - RNA, 5419 nt, synthetic construct; identical to SEQ ID NO: 2600
  modified_base 1..5419: mod_base = OTHER; note = Each t is m1f
  source 1..5419: mol_type = other RNA

SEQ ID NO: 4198 - RNA, 5419 nt, synthetic construct; identical to SEQ ID NO: 2601
  modified_base 1..5419: mod_base = OTHER; note = Each t is m1f
  source 1..5419: mol_type = other RNA

SEQ ID NO: 4199 - RNA, 5419 nt, synthetic construct; identical to SEQ ID NO: 2602
  modified_base 1..5419: mod_base = OTHER; note = Each t is m1f
  source 1..5419: mol_type = other RNA

SEQ ID NO: 4200 - RNA, 5419 nt, synthetic construct; identical to SEQ ID NO: 2603
  modified_base 1..5419: mod_base = OTHER; note = Each t is m1f
  source 1..5419: mol_type = other RNA

SEQ ID NO: 4201 - RNA, 5419 nt, synthetic construct; identical to SEQ ID NO: 2604
  modified_base 1..5419: mod_base = OTHER; note = Each t is m1f
  source 1..5419: mol_type = other RNA

SEQ ID NO: 4202 - RNA, 5419 nt, synthetic construct; identical to SEQ ID NO: 2605
  modified_base 1..5419: mod_base = OTHER; note = Each t is m1f
  source 1..5419: mol_type = other RNA

SEQ ID NO: 4203 - RNA, 5419 nt, synthetic construct; identical to SEQ ID NO: 2606
  modified_base 1..5419: mod_base = OTHER; note = Each t is m1f
  source 1..5419: mol_type = other RNA

SEQ ID NO: 4204 - RNA, 5419 nt, synthetic construct; identical to SEQ ID NO: 2607
  modified_base 1..5419: mod_base = OTHER; note = Each t is m1f
  source 1..5419: mol_type = other RNA

SEQ ID NO: 4205 - RNA, 5419 nt, synthetic construct; identical to SEQ ID NO: 2608
  modified_base 1..5419: mod_base = OTHER; note = Each t is m1f
  source 1..5419: mol_type = other RNA

SEQ ID NO: 4206 - RNA, 5419 nt, synthetic construct; identical to SEQ ID NO: 2609
  modified_base 1..5419: mod_base = OTHER; note = Each t is m1f
  source 1..5419: mol_type = other RNA

SEQ ID NO: 4207 - RNA, 5419 nt, synthetic construct; identical to SEQ ID NO: 2610
  modified_base 1..5419: mod_base = OTHER; note = Each t is m1f
  source 1..5419: mol_type = other RNA

SEQ ID NO: 4208 - RNA, 5419 nt, synthetic construct; identical to SEQ ID NO: 2611
  modified_base 1..5419: mod_base = OTHER; note = Each t is m1f
  source 1..5419: mol_type = other RNA

SEQ ID NO: 4209 - RNA, 5419 nt, synthetic construct; identical to SEQ ID NO: 2612
  modified_base 1..5419: mod_base = OTHER; note = Each t is m1f
  source 1..5419: mol_type = other RNA

SEQ ID NO: 4210 - RNA, 5419 nt, synthetic construct; identical to SEQ ID NO: 2613
  modified_base 1..5419: mod_base = OTHER; note = Each t is m1f
  source 1..5419: mol_type = other RNA

SEQ ID NO: 4211 - RNA, 5419 nt, synthetic construct; identical to SEQ ID NO: 2614
  modified_base 1..5419: mod_base = OTHER; note = Each t is m1f
  source 1..5419: mol_type = other RNA

SEQ ID NO: 4212 - RNA, 5419 nt, synthetic construct; identical to SEQ ID NO: 2615
  modified_base 1..5419: mod_base = OTHER; note = Each t is m1f
  source 1..5419: mol_type = other RNA

SEQ ID NO: 4213 - RNA, 5419 nt, synthetic construct; identical to SEQ ID NO: 2616
  modified_base 1..5419: mod_base = OTHER; note = Each t is m1f
  source 1..5419: mol_type = other RNA

SEQ ID NO: 4214 - RNA, 5419 nt, synthetic construct; identical to SEQ ID NO: 2617
  modified_base 1..5419: mod_base = OTHER; note = Each t is m1f
  source 1..5419: mol_type = other RNA

SEQ ID NO: 4215 - RNA, 5419 nt, synthetic construct; identical to SEQ ID NO: 2618
  modified_base 1..5419: mod_base = OTHER; note = Each t is m1f
  source 1..5419: mol_type = other RNA

SEQ ID NO: 4216 - RNA, 5419 nt, synthetic construct; identical to SEQ ID NO: 2619
  modified_base 1..5419: mod_base = OTHER; note = Each t is m1f
  source 1..5419: mol_type = other RNA

SEQ ID NO: 4217 - RNA, 5419 nt, synthetic construct; identical to SEQ ID NO: 2620
  modified_base 1..5419: mod_base = OTHER; note = Each t is m1f
  source 1..5419: mol_type = other RNA

SEQ ID NO: 4218 - RNA, 5419 nt, synthetic construct; identical to SEQ ID NO: 2621
  modified_base 1..5419: mod_base = OTHER; note = Each t is m1f
  source 1..5419: mol_type = other RNA

SEQ ID NO: 4219 - RNA, 5419 nt, synthetic construct; identical to SEQ ID NO: 2622
  modified_base 1..5419: mod_base = OTHER; note = Each t is m1f
  source 1..5419: mol_type = other RNA

SEQ ID NO: 4220 - RNA, 5419 nt, synthetic construct; identical to SEQ ID NO: 2623
  modified_base 1..5419: mod_base = OTHER; note = Each t is m1f
  source 1..5419: mol_type = other RNA

SEQ ID NO: 4221 - RNA, 5419 nt, synthetic construct; identical to SEQ ID NO: 2624
  modified_base 1..5419: mod_base = OTHER; note = Each t is m1f
  source 1..5419: mol_type = other RNA

SEQ ID NO: 4222 - RNA, 5419 nt, synthetic construct; identical to SEQ ID NO: 2625
  modified_base 1..5419: mod_base = OTHER; note = Each t is m1f
  source 1..5419: mol_type = other RNA

SEQ ID NO: 4223 - RNA, 5419 nt, synthetic construct; identical to SEQ ID NO: 2626
  modified_base 1..5419: mod_base = OTHER; note = Each t is m1f
  source 1..5419: mol_type = other RNA

SEQ ID NO: 4224 - RNA, 5419 nt, synthetic construct; identical to SEQ ID NO: 2627
  modified_base 1..5419: mod_base = OTHER; note = Each t is m1f
  source 1..5419: mol_type = other RNA

SEQ ID NO: 4225 - RNA, 5419 nt, synthetic construct; identical to SEQ ID NO: 2628
  modified_base 1..5419: mod_base = OTHER; note = Each t is m1f
  source 1..5419: mol_type = other RNA

SEQ ID NO: 4226 - RNA, 5419 nt, synthetic construct; identical to SEQ ID NO: 2629
  modified_base 1..5419: mod_base = OTHER; note = Each t is m1f
  source 1..5419: mol_type = other RNA

SEQ ID NO: 4227 - RNA, 5419 nt, synthetic construct; identical to SEQ ID NO: 2630
  modified_base 1..5419: mod_base = OTHER; note = Each t is m1f
  source 1..5419: mol_type = other RNA

SEQ ID NO: 4228 - RNA, 5419 nt, synthetic construct; identical to SEQ ID NO: 2631
  modified_base 1..5419: mod_base = OTHER; note = Each t is m1f
  source 1..5419: mol_type = other RNA

SEQ ID NO: 4229 - RNA, 5419 nt, synthetic construct; identical to SEQ ID NO: 2632
  modified_base 1..5419: mod_base = OTHER; note = Each t is m1f
  source 1..5419: mol_type = other RNA

SEQ ID NO: 4230 - RNA, 5419 nt, synthetic construct; identical to SEQ ID NO: 2633
  modified_base 1..5419: mod_base = OTHER; note = Each t is m1f
  source 1..5419: mol_type = other RNA

SEQ ID NO: 4231 - RNA, 5419 nt, synthetic construct; identical to SEQ ID NO: 2634
  modified_base 1..5419: mod_base = OTHER; note = Each t is m1f
  source 1..5419: mol_type = other RNA

SEQ ID NO: 4232 - RNA, 5419 nt, synthetic construct; identical to SEQ ID NO: 2635
  modified_base 1..5419: mod_base = OTHER; note = Each t is m1f
  source 1..5419: mol_type = other RNA

SEQ ID NO: 4233 - RNA, 5419 nt, synthetic construct; identical to SEQ ID NO: 2636
  modified_base 1..5419: mod_base = OTHER; note = Each t is m1f
  source 1..5419: mol_type = other RNA

SEQ ID NO: 4234 - RNA, 5419 nt, synthetic construct; identical to SEQ ID NO: 2637
  modified_base 1..5419: mod_base = OTHER; note = Each t is m1f
  source 1..5419: mol_type = other RNA

SEQ ID NO: 4235 - RNA, 5419 nt, synthetic construct; identical to SEQ ID NO: 2638
  modified_base 1..5419: mod_base = OTHER; note = Each t is m1f
  source 1..5419: mol_type = other RNA

SEQ ID NO: 4236 - RNA, 5419 nt, synthetic construct; identical to SEQ ID NO: 2639
  modified_base 1..5419: mod_base = OTHER; note = Each t is m1f
  source 1..5419: mol_type = other RNA

SEQ ID NO: 4237 - RNA, 5419 nt, synthetic construct; identical to SEQ ID NO: 2640
  modified_base 1..5419: mod_base = OTHER; note = Each t is m1f
  source 1..5419: mol_type = other RNA

SEQ ID NO: 4238 - RNA, 5419 nt, synthetic construct; identical to SEQ ID NO: 2641
  modified_base 1..5419: mod_base = OTHER; note = Each t is m1f
  source 1..5419: mol_type = other RNA

SEQ ID NO: 4239 - RNA, 5419 nt, synthetic construct; identical to SEQ ID NO: 2642
  modified_base 1..5419: mod_base = OTHER; note = Each t is m1f
  source 1..5419: mol_type = other RNA

SEQ ID NO: 4240 - RNA, 5419 nt, synthetic construct; identical to SEQ ID NO: 2643
  modified_base 1..5419: mod_base = OTHER; note = Each t is m1f
  source 1..5419: mol_type = other RNA

SEQ ID NO: 4241 - RNA, 5419 nt, synthetic construct; identical to SEQ ID NO: 2644
  modified_base 1..5419: mod_base = OTHER; note = Each t is m1f
  source 1..5419: mol_type = other RNA

SEQ ID NO: 4242 - RNA, 5419 nt, synthetic construct; identical to SEQ ID NO: 2645
  modified_base 1..5419: mod_base = OTHER; note = Each t is m1f
  source 1..5419: mol_type = other RNA

SEQ ID NO: 4243 - RNA, 5419 nt, synthetic construct; identical to SEQ ID NO: 2646
  modified_base 1..5419: mod_base = OTHER; note = Each t is m1f
  source 1..5419: mol_type = other RNA

SEQ ID NO: 4244 - RNA, 5419 nt, synthetic construct; identical to SEQ ID NO: 2647
  modified_base 1..5419: mod_base = OTHER; note = Each t is m1f
  source 1..5419: mol_type = other RNA

SEQ ID NO: 4245 - RNA, 5419 nt, synthetic construct; identical to SEQ ID NO: 2648
  modified_base 1..5419: mod_base = OTHER; note = Each t is m1f
  source 1..5419: mol_type = other RNA

SEQ ID NO: 4246 - RNA, 5419 nt, synthetic construct; identical to SEQ ID NO: 2649
  modified_base 1..5419: mod_base = OTHER; note = Each t is m1f
  source 1..5419: mol_type = other RNA

SEQ ID NO: 4247 - RNA, 5419 nt, synthetic construct; identical to SEQ ID NO: 2650
  modified_base 1..5419: mod_base = OTHER; note = Each t is m1f
  source 1..5419: mol_type = other RNA

SEQ ID NO: 4248 - RNA, 5419 nt, synthetic construct; identical to SEQ ID NO: 2651
  modified_base 1..5419: mod_base = OTHER; note = Each t is m1f
  source 1..5419: mol_type = other RNA

SEQ ID NO: 4249 - RNA, 5419 nt, synthetic construct; identical to SEQ ID NO: 2652
  modified_base 1..5419: mod_base = OTHER; note = Each t is m1f
  source 1..5419: mol_type = other RNA

SEQ ID NO: 4250 - RNA, 5419 nt, synthetic construct; identical to SEQ ID NO: 2653
  modified_base 1..5419: mod_base = OTHER; note = Each t is m1f
  source 1..5419: mol_type = other RNA

SEQ ID NO: 4251 - RNA, 5419 nt, synthetic construct; identical to SEQ ID NO: 2654
  modified_base 1..5419: mod_base = OTHER; note = Each t is m1f
  source 1..5419: mol_type = other RNA

SEQ ID NO: 4252 - RNA, 5419 nt, synthetic construct; identical to SEQ ID NO: 2655
  modified_base 1..5419: mod_base = OTHER; note = Each t is m1f
  source 1..5419: mol_type = other RNA

SEQ ID NO: 4253 - RNA, 5419 nt, synthetic construct; identical to SEQ ID NO: 2656
  modified_base 1..5419: mod_base = OTHER; note = Each t is m1f
  source 1..5419: mol_type = other RNA

SEQ ID NO: 4254 - RNA, 5419 nt, synthetic construct; identical to SEQ ID NO: 2657
  modified_base 1..5419: mod_base = OTHER; note = Each t is m1f
  source 1..5419: mol_type = other RNA

SEQ ID NO: 4255 - RNA, 5419 nt, synthetic construct; identical to SEQ ID NO: 2658
  modified_base 1..5419: mod_base = OTHER; note = Each t is m1f
  source 1..5419: mol_type = other RNA

SEQ ID NO: 4256 - RNA, 5419 nt, synthetic construct; identical to SEQ ID NO: 2659
  modified_base 1..5419: mod_base = OTHER; note = Each t is m1f
  source 1..5419: mol_type = other RNA

SEQ ID NO: 4257 - RNA, 5419 nt, synthetic construct; identical to SEQ ID NO: 2660
  modified_base 1..5419: mod_base = OTHER; note = Each t is m1f
  source 1..5419: mol_type = other RNA

SEQ ID NO: 4258 - RNA, 5419 nt, synthetic construct; identical to SEQ ID NO: 2661
  modified_base 1..5419: mod_base = OTHER; note = Each t is m1f
  source 1..5419: mol_type = other RNA

SEQ ID NO: 4259 - RNA, 5419 nt, synthetic construct; identical to SEQ ID NO: 2662
  modified_base 1..5419: mod_base = OTHER; note = Each t is m1f
  source 1..5419: mol_type = other RNA

SEQ ID NO: 4260 - RNA, 5419 nt, synthetic construct; identical to SEQ ID NO: 2663
  modified_base 1..5419: mod_base = OTHER; note = Each t is m1f
  source 1..5419: mol_type = other RNA

SEQ ID NO: 4261 - RNA, 5419 nt, synthetic construct; identical to SEQ ID NO: 2664
  modified_base 1..5419: mod_base = OTHER; note = Each t is m1f
  source 1..5419: mol_type = other RNA

SEQ ID NO: 4262 - RNA, 5419 nt, synthetic construct; identical to SEQ ID NO: 2665
  modified_base 1..5419: mod_base = OTHER; note = Each t is m1f
  source 1..5419: mol_type = other RNA

SEQ ID NO: 4263 - RNA, 5419 nt, synthetic construct; identical to SEQ ID NO: 2666
  modified_base 1..5419: mod_base = OTHER; note = Each t is m1f
  source 1..5419: mol_type = other RNA

SEQ ID NO: 4264 - RNA, 5419 nt, synthetic construct; identical to SEQ ID NO: 2667
  modified_base 1..5419: mod_base = OTHER; note = Each t is m1f
  source 1..5419: mol_type = other RNA

SEQ ID NO: 4265 - RNA, 5419 nt, synthetic construct; identical to SEQ ID NO: 2668
  modified_base 1..5419: mod_base = OTHER; note = Each t is m1f
  source 1..5419: mol_type = other RNA

SEQ ID NO: 4266 - RNA, 5419 nt, synthetic construct; identical to SEQ ID NO: 2669
  modified_base 1..5419: mod_base = OTHER; note = Each t is m1f
  source 1..5419: mol_type = other RNA

SEQ ID NO: 4267 - RNA, 5419 nt, synthetic construct; identical to SEQ ID NO: 2670
  modified_base 1..5419: mod_base = OTHER; note = Each t is m1f
  source 1..5419: mol_type = other RNA

SEQ ID NO: 4268 - RNA, 5419 nt, synthetic construct; identical to SEQ ID NO: 2671
  modified_base 1..5419: mod_base = OTHER; note = Each t is m1f
  source 1..5419: mol_type = other RNA

SEQ ID NO: 4269 - RNA, 5419 nt, synthetic construct; identical to SEQ ID NO: 2672
  modified_base 1..5419: mod_base = OTHER; note = Each t is m1f
  source 1..5419: mol_type = other RNA

SEQ ID NO: 4270 - RNA, 5419 nt, synthetic construct; identical to SEQ ID NO: 2673
  modified_base 1..5419: mod_base = OTHER; note = Each t is m1f
  source 1..5419: mol_type = other RNA

SEQ ID NO: 4271 - RNA, 5419 nt, synthetic construct; identical to SEQ ID NO: 2674
  modified_base 1..5419: mod_base = OTHER; note = Each t is m1f
  source 1..5419: mol_type = other RNA

SEQ ID NO: 4272 - RNA, 5419 nt, synthetic construct; identical to SEQ ID NO: 2675
  modified_base 1..5419: mod_base = OTHER; note = Each t is m1f
  source 1..5419: mol_type = other RNA

SEQ ID NO: 4273 - RNA, 5419 nt, synthetic construct; identical to SEQ ID NO: 2676
  modified_base 1..5419: mod_base = OTHER; note = Each t is m1f
  source 1..5419: mol_type = other RNA

SEQ ID NO: 4274 - RNA, 5419 nt, synthetic construct; identical to SEQ ID NO: 2677
  modified_base 1..5419: mod_base = OTHER; note = Each t is m1f
  source 1..5419: mol_type = other RNA

SEQ ID NO: 4275 - RNA, 5419 nt, synthetic construct; identical to SEQ ID NO: 2678
  modified_base 1..5419: mod_base = OTHER; note = Each t is m1f
  source 1..5419: mol_type = other RNA

SEQ ID NO: 4276 - RNA, 5419 nt, synthetic construct; identical to SEQ ID NO: 2679
  modified_base 1..5419: mod_base = OTHER; note = Each t is m1f
  source 1..5419: mol_type = other RNA

SEQ ID NO: 4277 - RNA, 5419 nt, synthetic construct; identical to SEQ ID NO: 2680
  modified_base 1..5419: mod_base = OTHER; note = Each t is m1f
  source 1..5419: mol_type = other RNA

SEQ ID NO: 4278 - RNA, 5419 nt, synthetic construct; identical to SEQ ID NO: 2681
  modified_base 1..5419: mod_base = OTHER; note = Each t is m1f
  source 1..5419: mol_type = other RNA

SEQ ID NO: 4279 - RNA, 5419 nt, synthetic construct; identical to SEQ ID NO: 2682
  modified_base 1..5419: mod_base = OTHER; note = Each t is m1f
  source 1..5419: mol_type = other RNA

SEQ ID NO: 4280 - RNA, 5419 nt, synthetic construct; identical to SEQ ID NO: 2683
  modified_base 1..5419: mod_base = OTHER; note = Each t is m1f
  source 1..5419: mol_type = other RNA

SEQ ID NO: 4281 - RNA, 5416 nt, synthetic construct; identical to SEQ ID NO: 2684
  modified_base 1..5416: mod_base = OTHER; note = Each t is m1f
  source 1..5416: mol_type = other RNA

SEQ ID NO: 4282 - RNA, 5419 nt, synthetic construct; identical to SEQ ID NO: 2685
  modified_base 1..5419: mod_base = OTHER; note = Each t is m1f
  source 1..5419: mol_type = other RNA

SEQ ID NO: 4283 - RNA, 5419 nt, synthetic construct; identical to SEQ ID NO: 2686
  modified_base 1..5419: mod_base = OTHER; note = Each t is m1f
  source 1..5419: mol_type = other RNA

SEQ ID NO: 4284 - RNA, 5419 nt, synthetic construct; identical to SEQ ID NO: 2687
  modified_base 1..5419: mod_base = OTHER; note = Each t is m1f
  source 1..5419: mol_type = other RNA

SEQ ID NO: 4285 - RNA, 5419 nt, synthetic construct; identical to SEQ ID NO: 2688
  modified_base 1..5419: mod_base = OTHER; note = Each t is m1f
  source 1..5419: mol_type = other RNA

SEQ ID NO: 4286 - RNA, 5419 nt, synthetic construct; identical to SEQ ID NO: 2689
  modified_base 1..5419: mod_base = OTHER; note = Each t is m1f
  source 1..5419: mol_type = other RNA

SEQ ID NO: 4287 - RNA, 5419 nt, synthetic construct; identical to SEQ ID NO: 2690
  modified_base 1..5419: mod_base = OTHER; note = Each t is m1f
  source 1..5419: mol_type = other RNA

SEQ ID NO: 4288 - RNA, 5419 nt, synthetic construct; identical to SEQ ID NO: 2691
  modified_base 1..5419: mod_base = OTHER; note = Each t is m1f
  source 1..5419: mol_type = other RNA

SEQ ID NO: 4289 - RNA, 5419 nt, synthetic construct; identical to SEQ ID NO: 2692
  modified_base 1..5419: mod_base = OTHER; note = Each t is m1f
  source 1..5419: mol_type = other RNA

SEQ ID NO: 4290 - RNA, 5419 nt, synthetic construct; identical to SEQ ID NO: 2693
  modified_base 1..5419: mod_base = OTHER; note = Each t is m1f
  source 1..5419: mol_type = other RNA

SEQ ID NO: 4291 - RNA, 5419 nt, synthetic construct; identical to SEQ ID NO: 2694
  modified_base 1..5419: mod_base = OTHER; note = Each t is m1f
  source 1..5419: mol_type = other RNA

SEQ ID NO: 4292 - RNA, 5416 nt, synthetic construct; identical to SEQ ID NO: 2695
  modified_base 1..5416: mod_base = OTHER; note = Each t is m1f
  source 1..5416: mol_type = other RNA

SEQ ID NO: 4293 - RNA, 5419 nt, synthetic construct; identical to SEQ ID NO: 2696
  modified_base 1..5419: mod_base = OTHER; note = Each t is m1f
  source 1..5419: mol_type = other RNA

SEQ ID NO: 4294 - RNA, 5419 nt, synthetic construct; identical to SEQ ID NO: 2697
  modified_base 1..5419: mod_base = OTHER; note = Each t is m1f
  source 1..5419: mol_type = other RNA

SEQ ID NO: 4295 - RNA, 5419 nt, synthetic construct; identical to SEQ ID NO: 2698
  modified_base 1..5419: mod_base = OTHER; note = Each t is m1f
  source 1..5419: mol_type = other RNA

SEQ ID NO: 4296 - RNA, 5419 nt, synthetic construct; identical to SEQ ID NO: 2699
  modified_base 1..5419: mod_base = OTHER; note = Each t is m1f
  source 1..5419: mol_type = other RNA

SEQ ID NO: 4297 - RNA, 5419 nt, synthetic construct; identical to SEQ ID NO: 2700
  modified_base 1..5419: mod_base = OTHER; note = Each t is m1f
  source 1..5419: mol_type = other RNA

SEQ ID NO: 4298 - RNA, 5419 nt, synthetic construct; identical to SEQ ID NO: 2701
  modified_base 1..5419: mod_base = OTHER; note = Each t is m1f
  source 1..5419: mol_type = other RNA

SEQ ID NO: 4299 - RNA, 5419 nt, synthetic construct; identical to SEQ ID NO: 2702
  modified_base 1..5419: mod_base = OTHER; note = Each t is m1f
  source 1..5419: mol_type = other RNA

SEQ ID NO: 4300 - RNA, 5419 nt, synthetic construct; identical to SEQ ID NO: 2703
  modified_base 1..5419: mod_base = OTHER; note = Each t is m1f
  source 1..5419: mol_type = other RNA

SEQ ID NO: 4301 - RNA, 5419 nt, synthetic construct; identical to SEQ ID NO: 2704
  modified_base 1..5419: mod_base = OTHER; note = Each t is m1f
  source 1..5419: mol_type = other RNA

SEQ ID NO: 4302 - RNA, 5419 nt, synthetic construct; identical to SEQ ID NO: 2705
  modified_base 1..5419: mod_base = OTHER; note = Each t is m1f
  source 1..5419: mol_type = other RNA

SEQ ID NO: 4303 - RNA, 5419 nt, synthetic construct; identical to SEQ ID NO: 2706
  modified_base 1..5419: mod_base = OTHER; note = Each t is m1f
  source 1..5419: mol_type = other RNA

SEQ ID NO: 4304 - RNA, 5419 nt, synthetic construct; identical to SEQ ID NO: 2707
  modified_base 1..5419: mod_base = OTHER; note = Each t is m1f
  source 1..5419: mol_type = other RNA

SEQ ID NO: 4305 - RNA, 5419 nt, synthetic construct; identical to SEQ ID NO: 2708
  modified_base 1..5419: mod_base = OTHER; note = Each t is m1f
  source 1..5419: mol_type = other RNA

SEQ ID NO: 4306 - RNA, 5419 nt, synthetic construct; identical to SEQ ID NO: 2709
  modified_base 1..5419: mod_base = OTHER; note = Each t is m1f
  source 1..5419: mol_type = other RNA

SEQ ID NO: 4307 - RNA, 5419 nt, synthetic construct; identical to SEQ ID NO: 2710
  modified_base 1..5419: mod_base = OTHER; note = Each t is m1f
  source 1..5419: mol_type = other RNA

SEQ ID NO: 4308 - RNA, 5419 nt, synthetic construct; identical to SEQ ID NO: 2711
  modified_base 1..5419: mod_base = OTHER; note = Each t is m1f
  source 1..5419: mol_type = other RNA

SEQ ID NO: 4309 - RNA, 5419 nt, synthetic construct; identical to SEQ ID NO: 2712
  modified_base 1..5419: mod_base = OTHER; note = Each t is m1f
  source 1..5419: mol_type = other RNA

SEQ ID NO: 4310 - RNA, 5419 nt, synthetic construct; identical to SEQ ID NO: 2713
  modified_base 1..5419: mod_base = OTHER; note = Each t is m1f
  source 1..5419: mol_type = other RNA

SEQ ID NO: 4311 - RNA, 5419 nt, synthetic construct; identical to SEQ ID NO: 2714
  modified_base 1..5419: mod_base = OTHER; note = Each t is m1f
  source 1..5419: mol_type = other RNA

SEQ ID NO: 4312 - RNA, 5419 nt, synthetic construct; identical to SEQ ID NO: 2715
  modified_base 1..5419: mod_base = OTHER; note = Each t is m1f
  source 1..5419: mol_type = other RNA

SEQ ID NO: 4313 - RNA, 5419 nt, synthetic construct; identical to SEQ ID NO: 2716
  modified_base 1..5419: mod_base = OTHER; note = Each t is m1f
  source 1..5419: mol_type = other RNA

SEQ ID NO: 4314 - RNA, 5419 nt, synthetic construct; identical to SEQ ID NO: 2717
  modified_base 1..5419: mod_base = OTHER; note = Each t is m1f
  source 1..5419: mol_type = other RNA

SEQ ID NO: 4315 - RNA, 5419 nt, synthetic construct; identical to SEQ ID NO: 2718
  modified_base 1..5419: mod_base = OTHER; note = Each t is m1f
  source 1..5419: mol_type = other RNA

SEQ ID NO: 4316 - RNA, 5419 nt, synthetic construct; identical to SEQ ID NO: 2719
  modified_base 1..5419: mod_base = OTHER; note = Each t is m1f
  source 1..5419: mol_type = other RNA

SEQ ID NO: 4317 - RNA, 5419 nt, synthetic construct; identical to SEQ ID NO: 2720
  modified_base 1..5419: mod_base = OTHER; note = Each t is m1f
  source 1..5419: mol_type = other RNA

SEQ ID NO: 4318 - RNA, 5419 nt, synthetic construct; identical to SEQ ID NO: 2721
  modified_base 1..5419: mod_base = OTHER; note = Each t is m1f
  source 1..5419: mol_type = other RNA

SEQ ID NO: 4319 - RNA, 5419 nt, synthetic construct; identical to SEQ ID NO: 2722
  modified_base 1..5419: mod_base = OTHER; note = Each t is m1f
  source 1..5419: mol_type = other RNA

SEQ ID NO: 4320 - RNA, 5416 nt, synthetic construct; identical to SEQ ID NO: 2723
  modified_base 1..5416: mod_base = OTHER; note = Each t is m1f
  source 1..5416: mol_type = other RNA

SEQ ID NO: 4321 - RNA, 5419 nt, synthetic construct; identical to SEQ ID NO: 2724
  modified_base 1..5419: mod_base = OTHER; note = Each t is m1f
  source 1..5419: mol_type = other RNA

SEQ ID NO: 4322 - RNA, 5419 nt, synthetic construct; identical to SEQ ID NO: 2725
  modified_base 1..5419: mod_base = OTHER; note = Each t is m1f
  source 1..5419: mol_type = other RNA

SEQ ID NO: 4323 - RNA, 5419 nt, synthetic construct; identical to SEQ ID NO: 2726
  modified_base 1..5419: mod_base = OTHER; note = Each t is m1f
  source 1..5419: mol_type = other RNA

SEQ ID NO: 4324 - RNA, 5419 nt, synthetic construct; identical to SEQ ID NO: 2727
  modified_base 1..5419: mod_base = OTHER; note = Each t is m1f
  source 1..5419: mol_type = other RNA

SEQ ID NO: 4325 - RNA, 5419 nt, synthetic construct; identical to SEQ ID NO: 2728
  modified_base 1..5419: mod_base = OTHER; note = Each t is m1f
  source 1..5419: mol_type = other RNA

SEQ ID NO: 4326 - RNA, 5419 nt, synthetic construct; identical to SEQ ID NO: 2729
  modified_base 1..5419: mod_base = OTHER; note = Each t is m1f
  source 1..5419: mol_type = other RNA

SEQ ID NO: 4327 - RNA, 5419 nt, synthetic construct; identical to SEQ ID NO: 2730
  modified_base 1..5419: mod_base = OTHER; note = Each t is m1f
  source 1..5419: mol_type = other RNA

SEQ ID NO: 4328 - RNA, 5419 nt, synthetic construct; identical to SEQ ID NO: 2731
  modified_base 1..5419: mod_base = OTHER; note = Each t is m1f
  source 1..5419: mol_type = other RNA

SEQ ID NO: 4329 - RNA, 5419 nt, synthetic construct; identical to SEQ ID NO: 2732
  modified_base 1..5419: mod_base = OTHER; note = Each t is m1f
  source 1..5419: mol_type = other RNA

SEQ ID NO: 4330 - RNA, 5419 nt, synthetic construct; identical to SEQ ID NO: 2733
  modified_base 1..5419: mod_base = OTHER; note = Each t is m1f
  source 1..5419: mol_type = other RNA

SEQ ID NO: 4331 - RNA, 5419 nt, synthetic construct; identical to SEQ ID NO: 2734
  modified_base 1..5419: mod_base = OTHER; note = Each t is m1f
  source 1..5419: mol_type = other RNA

SEQ ID NO: 4332 - RNA, 5419 nt, synthetic construct; identical to SEQ ID NO: 2735
  modified_base 1..5419: mod_base = OTHER; note = Each t is m1f
  source 1..5419: mol_type = other RNA

SEQ ID NO: 4333 - RNA, 5419 nt, synthetic construct; identical to SEQ ID NO: 2736
  modified_base 1..5419: mod_base = OTHER; note = Each t is m1f
  source 1..5419: mol_type = other RNA

SEQ ID NO: 4334 - RNA, 5419 nt, synthetic construct; identical to SEQ ID NO: 2737
  modified_base 1..5419: mod_base = OTHER; note = Each t is m1f
  source 1..5419: mol_type = other RNA

SEQ ID NO: 4335 - RNA, 5419 nt, synthetic construct; identical to SEQ ID NO: 2738
  modified_base 1..5419: mod_base = OTHER; note = Each t is m1f
  source 1..5419: mol_type = other RNA

SEQ ID NO: 4336 - RNA, 5419 nt, synthetic construct; identical to SEQ ID NO: 2739
  modified_base 1..5419: mod_base = OTHER; note = Each t is m1f
  source 1..5419: mol_type = other RNA

SEQ ID NO: 4337 - RNA, 5419 nt, synthetic construct; identical to SEQ ID NO: 2740
  modified_base 1..5419: mod_base = OTHER; note = Each t is m1f
  source 1..5419: mol_type = other RNA

SEQ ID NO: 4338 - RNA, 5419 nt, synthetic construct; identical to SEQ ID NO: 2741
  modified_base 1..5419: mod_base = OTHER; note = Each t is m1f
  source 1..5419: mol_type = other RNA

SEQ ID NO: 4339 - RNA, 5419 nt, synthetic construct; identical to SEQ ID NO: 2742
  modified_base 1..5419: mod_base = OTHER; note = Each t is m1f
  source 1..5419: mol_type = other RNA

SEQ ID NO: 4340 - RNA, 5419 nt, synthetic construct; identical to SEQ ID NO: 2743
  modified_base 1..5419: mod_base = OTHER; note = Each t is m1f
  source 1..5419: mol_type = other RNA

SEQ ID NO: 4341 - RNA, 5419 nt, synthetic construct; identical to SEQ ID NO: 2744
  modified_base 1..5419: mod_base = OTHER; note = Each t is m1f
  source 1..5419: mol_type = other RNA

SEQ ID NO: 4342 - RNA, 5419 nt, synthetic construct; identical to SEQ ID NO: 2745
  modified_base 1..5419: mod_base = OTHER; note = Each t is m1f
  source 1..5419: mol_type = other RNA

SEQ ID NO: 4343 - RNA, 5419 nt, synthetic construct; identical to SEQ ID NO: 2746
  modified_base 1..5419: mod_base = OTHER; note = Each t is m1f
  source 1..5419: mol_type = other RNA

SEQ ID NO: 4344 - RNA, 5419 nt, synthetic construct; identical to SEQ ID NO: 2747
  modified_base 1..5419: mod_base = OTHER; note = Each t is m1f
  source 1..5419: mol_type = other RNA

SEQ ID NO: 4345 - RNA, 5419 nt, synthetic construct; identical to SEQ ID NO: 2748
  modified_base 1..5419: mod_base = OTHER; note = Each t is m1f
  source 1..5419: mol_type = other RNA

SEQ ID NO: 4346 - RNA, 5419 nt, synthetic construct; identical to SEQ ID NO: 2749
  modified_base 1..5419: mod_base = OTHER; note = Each t is m1f
  source 1..5419: mol_type = other RNA

SEQ ID NO: 4347 - RNA, 5419 nt, synthetic construct; identical to SEQ ID NO: 2750
  modified_base 1..5419: mod_base = OTHER; note = Each t is m1f
  source 1..5419: mol_type = other RNA

SEQ ID NO: 4348 - RNA, 5419 nt, synthetic construct; identical to SEQ ID NO: 2751
  modified_base 1..5419: mod_base = OTHER; note = Each t is m1f
  source 1..5419: mol_type = other RNA

SEQ ID NO: 4349 - RNA, 5419 nt, synthetic construct; identical to SEQ ID NO: 2752
  modified_base 1..5419: mod_base = OTHER; note = Each t is m1f
  source 1..5419: mol_type = other RNA

SEQ ID NO: 4350 - RNA, 5419 nt, synthetic construct; identical to SEQ ID NO: 2753
  modified_base 1..5419: mod_base = OTHER; note = Each t is m1f
  source 1..5419: mol_type = other RNA

SEQ ID NO: 4351 - RNA, 5419 nt, synthetic construct; identical to SEQ ID NO: 2754
  modified_base 1..5419: mod_base = OTHER; note = Each t is m1f
  source 1..5419: mol_type = other RNA

SEQ ID NO: 4352 - RNA, 5419 nt, synthetic construct; identical to SEQ ID NO: 2755
  modified_base 1..5419: mod_base = OTHER; note = Each t is m1f
  source 1..5419: mol_type = other RNA

SEQ ID NO: 4353 - RNA, 5419 nt, synthetic construct; identical to SEQ ID NO: 2756
  modified_base 1..5419: mod_base = OTHER; note = Each t is m1f
  source 1..5419: mol_type = other RNA

SEQ ID NO: 4354 - RNA, 5419 nt, synthetic construct; identical to SEQ ID NO: 2757
  modified_base 1..5419: mod_base = OTHER; note = Each t is m1f
  source 1..5419: mol_type = other RNA

SEQ ID NO: 4355 - RNA, 5419 nt, synthetic construct; identical to SEQ ID NO: 2758
  modified_base 1..5419: mod_base = OTHER; note = Each t is m1f
  source 1..5419: mol_type = other RNA

SEQ ID NO: 4356 - RNA, 5419 nt, synthetic construct; identical to SEQ ID NO: 2759
  modified_base 1..5419: mod_base = OTHER; note = Each t is m1f
  source 1..5419: mol_type = other RNA

SEQ ID NO: 4357 - RNA, 5419 nt, synthetic construct; identical to SEQ ID NO: 2760
  modified_base 1..5419: mod_base = OTHER; note = Each t is m1f
  source 1..5419: mol_type = other RNA

SEQ ID NO: 4358 - RNA, 5419 nt, synthetic construct; identical to SEQ ID NO: 2761
  modified_base 1..5419: mod_base = OTHER; note = Each t is m1f
  source 1..5419: mol_type = other RNA

SEQ ID NO: 4359 - RNA, 5419 nt, synthetic construct; identical to SEQ ID NO: 2762
  modified_base 1..5419: mod_base = OTHER; note = Each t is m1f
  source 1..5419: mol_type = other RNA

SEQ ID NO: 4360 - RNA, 5419 nt, synthetic construct; identical to SEQ ID NO: 2763
  modified_base 1..5419: mod_base = OTHER; note = Each t is m1f
  source 1..5419: mol_type = other RNA

SEQ ID NO: 4361 - RNA, 5419 nt, synthetic construct; identical to SEQ ID NO: 2764
  modified_base 1..5419: mod_base = OTHER; note = Each t is m1f
  source 1..5419: mol_type = other RNA

SEQ ID NO: 4362 - RNA, 5419 nt, synthetic construct; identical to SEQ ID NO: 2765
  modified_base 1..5419: mod_base = OTHER; note = Each t is m1f
  source 1..5419: mol_type = other RNA

SEQ ID NO: 4363 - RNA, 5419 nt, synthetic construct; identical to SEQ ID NO: 2766
  modified_base 1..5419: mod_base = OTHER; note = Each t is m1f
  source 1..5419: mol_type = other RNA

SEQ ID NO: 4364 - RNA, 5419 nt, synthetic construct; identical to SEQ ID NO: 2767
  modified_base 1..5419: mod_base = OTHER; note = Each t is m1f
  source 1..5419: mol_type = other RNA

SEQ ID NO: 4365 - RNA, 5419 nt, synthetic construct; identical to SEQ ID NO: 2768
  modified_base 1..5419: mod_base = OTHER; note = Each t is m1f
  source 1..5419: mol_type = other RNA

SEQ ID NO: 4366 - RNA, 5419 nt, synthetic construct; identical to SEQ ID NO: 2769
  modified_base 1..5419: mod_base = OTHER; note = Each t is m1f
  source 1..5419: mol_type = other RNA

SEQ ID NO: 4367 - RNA, 5419 nt, synthetic construct; identical to SEQ ID NO: 2770
  modified_base 1..5419: mod_base = OTHER; note = Each t is m1f
  source 1..5419: mol_type = other RNA

SEQ ID NO: 4368 - RNA, 5419 nt, synthetic construct; identical to SEQ ID NO: 2771
  modified_base 1..5419: mod_base = OTHER; note = Each t is m1f
  source 1..5419: mol_type = other RNA

SEQ ID NO: 4369 - RNA, 5419 nt, synthetic construct; identical to SEQ ID NO: 2772
  modified_base 1..5419: mod_base = OTHER; note = Each t is m1f
  source 1..5419: mol_type = other RNA

SEQ ID NO: 4370 - RNA, 5419 nt, synthetic construct; identical to SEQ ID NO: 2773
  modified_base 1..5419: mod_base = OTHER; note = Each t is m1f
  source 1..5419: mol_type = other RNA

SEQ ID NO: 4371 - RNA, 5419 nt, synthetic construct; identical to SEQ ID NO: 2774
  modified_base 1..5419: mod_base = OTHER; note = Each t is m1f
  source 1..5419: mol_type = other RNA

SEQ ID NO: 4372 - RNA, 5419 nt, synthetic construct; identical to SEQ ID NO: 2775
  modified_base 1..5419: mod_base = OTHER; note = Each t is m1f
  source 1..5419: mol_type = other RNA

SEQ ID NO: 4373 - RNA, 5428 nt, synthetic construct; identical to SEQ ID NO: 2776
  modified_base 1..5419: mod_base = OTHER; note = Each t is m1f
  source 1..5428: mol_type = other RNA

SEQ ID NO: 4374 - RNA, 5419 nt, synthetic construct; identical to SEQ ID NO: 2777
  modified_base 1..5419: mod_base = OTHER; note = Each t is m1f
  source 1..5419: mol_type = other RNA

SEQ ID NO: 4375 - RNA, 5419 nt, synthetic construct; identical to SEQ ID NO: 2778
  modified_base 1..5419: mod_base = OTHER; note = Each t is m1f
  source 1..5419: mol_type = other RNA

SEQ ID NO: 4376 - RNA, 5419 nt, synthetic construct; identical to SEQ ID NO: 2779
  modified_base 1..5419: mod_base = OTHER; note = Each t is m1f
  source 1..5419: mol_type = other RNA

SEQ ID NO: 4377 - RNA, 5419 nt, synthetic construct; identical to SEQ ID NO: 2780
  modified_base 1..5419: mod_base = OTHER; note = Each t is m1f
  source 1..5419: mol_type = other RNA

SEQ ID NO: 4378 - RNA, 5419 nt, synthetic construct; identical to SEQ ID NO: 2781
  modified_base 1..5419: mod_base = OTHER; note = Each t is m1f
  source 1..5419: mol_type = other RNA

SEQ ID NO: 4379 - RNA, 5416 nt, synthetic construct; identical to SEQ ID NO: 2782
  modified_base 1..5416: mod_base = OTHER; note = Each t is m1f
  source 1..5416: mol_type = other RNA

SEQ ID NO: 4380 - RNA, 5419 nt, synthetic construct; identical to SEQ ID NO: 2783
  modified_base 1..5419: mod_base = OTHER; note = Each t is m1f
  source 1..5419: mol_type = other RNA

SEQ ID NO: 4381 - RNA, 5419 nt, synthetic construct; identical to SEQ ID NO: 2784
  modified_base 1..5419: mod_base = OTHER; note = Each t is m1f
  source 1..5419: mol_type = other RNA

SEQ ID NO: 4382 - RNA, 5419 nt, synthetic construct; identical to SEQ ID NO: 2785
  modified_base 1..5419: mod_base = OTHER; note = Each t is m1f
  source 1..5419: mol_type = other RNA

SEQ ID NO: 4383 - RNA, 5419 nt, synthetic construct; identical to SEQ ID NO: 2786
  modified_base 1..5419: mod_base = OTHER; note = Each t is m1f
  source 1..5419: mol_type = other RNA

SEQ ID NO: 4384 - RNA, 5419 nt, synthetic construct; identical to SEQ ID NO: 2787
  modified_base 1..5419: mod_base = OTHER; note = Each t is m1f
  source 1..5419: mol_type = other RNA

SEQ ID NO: 4385 - RNA, 5419 nt, synthetic construct; identical to SEQ ID NO: 2788
  modified_base 1..5419: mod_base = OTHER; note = Each t is m1f
  source 1..5419: mol_type = other RNA

SEQ ID NO: 4386 - RNA, 5437 nt, synthetic construct; identical to SEQ ID NO: 2789
  modified_base 1..5419: mod_base = OTHER; note = Each t is m1f
  source 1..5437: mol_type = other RNA

SEQ ID NO: 4387 - RNA, 5419 nt, synthetic construct; identical to SEQ ID NO: 2790
  modified_base 1..5419: mod_base = OTHER; note = Each t is m1f
  source 1..5419: mol_type = other RNA

SEQ ID NO: 4388 - RNA, 5419 nt, synthetic construct; identical to SEQ ID NO: 2791
  modified_base 1..5419: mod_base = OTHER; note = Each t is m1f
  source 1..5419: mol_type = other RNA

SEQ ID NO: 4389 - RNA, 5419 nt, synthetic construct; identical to SEQ ID NO: 2792
  modified_base 1..5419: mod_base = OTHER; note = Each t is m1f
  source 1..5419: mol_type = other RNA

SEQ ID NO: 4390 - RNA, 5419 nt, synthetic construct; identical to SEQ ID NO: 2793
  modified_base 1..5419: mod_base = OTHER; note = Each t is m1f
  source 1..5419: mol_type = other RNA

SEQ ID NO: 4391 - RNA, 5419 nt, synthetic construct; identical to SEQ ID NO: 2794
  modified_base 1..5419: mod_base = OTHER; note = Each t is m1f
  source 1..5419: mol_type = other RNA

SEQ ID NO: 4392 - RNA, 5419 nt, synthetic construct; identical to SEQ ID NO: 2795
  modified_base 1..5419: mod_base = OTHER; note = Each t is m1f
  source 1..5419: mol_type = other RNA

SEQ ID NO: 4393 - RNA, 5419 nt, synthetic construct; identical to SEQ ID NO: 2796
  modified_base 1..5419: mod_base = OTHER; note = Each t is m1f
  source 1..5419: mol_type = other RNA

SEQ ID NO: 4394 - RNA, 5419 nt, synthetic construct; identical to SEQ ID NO: 2797
  modified_base 1..5419: mod_base = OTHER; note = Each t is m1f
  source 1..5419: mol_type = other RNA

SEQ ID NO: 4395 - RNA, 5419 nt, synthetic construct; identical to SEQ ID NO: 2798
  modified_base 1..5419: mod_base = OTHER; note = Each t is m1f
  source 1..5419: mol_type = other RNA

SEQ ID NO: 4396 - RNA, 5419 nt, synthetic construct; identical to SEQ ID NO: 2799
  modified_base 1..5419: mod_base = OTHER; note = Each t is m1f
  source 1..5419: mol_type = other RNA

SEQ ID NO: 4397 - RNA, 5419 nt, synthetic construct; identical to SEQ ID NO: 2800
  modified_base 1..5419: mod_base = OTHER; note = Each t is m1f
  source 1..5419: mol_type = other RNA

SEQ ID NO: 4398 - RNA, 5419 nt, synthetic construct; identical to SEQ ID NO: 2801
  modified_base 1..5419: mod_base = OTHER; note = Each t is m1f
  source 1..5419: mol_type = other RNA

SEQ ID NO: 4399 - RNA, 5419 nt, synthetic construct; identical to SEQ ID NO: 2802
  modified_base 1..5419: mod_base = OTHER; note = Each t is m1f
  source 1..5419: mol_type = other RNA

SEQ ID NO: 4400 - RNA, 5419 nt, synthetic construct; identical to SEQ ID NO: 2803
  modified_base 1..5419: mod_base = OTHER; note = Each t is m1f
  source 1..5419: mol_type = other RNA

SEQ ID NO: 4401 - RNA, 5419 nt, synthetic construct; identical to SEQ ID NO: 2804
  modified_base 1..5419: mod_base = OTHER; note = Each t is m1f
  source 1..5419: mol_type = other RNA

SEQ ID NO: 4402 - RNA, 5419 nt, synthetic construct; identical to SEQ ID NO: 2805
  modified_base 1..5419: mod_base = OTHER; note = Each t is m1f
  source 1..5419: mol_type = other RNA

SEQ ID NO: 4403 - RNA, 5419 nt, synthetic construct; identical to SEQ ID NO: 2806
  modified_base 1..5419: mod_base = OTHER; note = Each t is m1f
  source 1..5419: mol_type = other RNA

SEQ ID NO: 4404 - RNA, 5419 nt, synthetic construct; identical to SEQ ID NO: 2807
  modified_base 1..5419: mod_base = OTHER; note = Each t is m1f
  source 1..5419: mol_type = other RNA

SEQ ID NO: 4405 - RNA, 5419 nt, synthetic construct; identical to SEQ ID NO: 2808
  modified_base 1..5419: mod_base = OTHER; note = Each t is m1f
  source 1..5419: mol_type = other RNA

SEQ ID NO: 4406 - RNA, 5419 nt, synthetic construct; identical to SEQ ID NO: 2809
  modified_base 1..5419: mod_base = OTHER; note = Each t is m1f
  source 1..5419: mol_type = other RNA

SEQ ID NO: 4407 - RNA, 5419 nt, synthetic construct; identical to SEQ ID NO: 2810
  modified_base 1..5419: mod_base = OTHER; note = Each t is m1f
  source 1..5419: mol_type = other RNA

SEQ ID NO: 4408 - RNA, 5419 nt, synthetic construct; identical to SEQ ID NO: 2811
  modified_base 1..5419: mod_base = OTHER; note = Each t is m1f
  source 1..5419: mol_type = other RNA

SEQ ID NO: 4409 - RNA, 5419 nt, synthetic construct; identical to SEQ ID NO: 2812
  modified_base 1..5419: mod_base = OTHER; note = Each t is m1f
  source 1..5419: mol_type = other RNA

SEQ ID NO: 4410 - RNA, 5419 nt, synthetic construct; identical to SEQ ID NO: 2813
  modified_base 1..5419: mod_base = OTHER; note = Each t is m1f
  source 1..5419: mol_type = other RNA

SEQ ID NO: 4411 - RNA, 5419 nt, synthetic construct; identical to SEQ ID NO: 2814
  modified_base 1..5419: mod_base = OTHER; note = Each t is m1f
  source 1..5419: mol_type = other RNA

SEQ ID NO: 4412 - RNA, 5419 nt, synthetic construct; identical to SEQ ID NO: 2815
  modified_base 1..5419: mod_base = OTHER; note = Each t is m1f
  source 1..5419: mol_type = other RNA

SEQ ID NO: 4413 - RNA, 5419 nt, synthetic construct; identical to SEQ ID NO: 2816
  modified_base 1..5419: mod_base = OTHER; note = Each t is m1f
  source 1..5419: mol_type = other RNA

SEQ ID NO: 4414 - RNA, 5419 nt, synthetic construct; identical to SEQ ID NO: 2817
  modified_base 1..5419: mod_base = OTHER; note = Each t is m1f
  source 1..5419: mol_type = other RNA

SEQ ID NO: 4415 - RNA, 5419 nt, synthetic construct; identical to SEQ ID NO: 2818
  modified_base 1..5419: mod_base = OTHER; note = Each t is m1f
  source 1..5419: mol_type = other RNA

SEQ ID NO: 4416 - RNA, 5419 nt, synthetic construct; identical to SEQ ID NO: 2819
  modified_base 1..5419: mod_base = OTHER; note = Each t is m1f
  source 1..5419: mol_type = other RNA

SEQ ID NO: 4417 - RNA, 5419 nt, synthetic construct; identical to SEQ ID NO: 2820
  modified_base 1..5419: mod_base = OTHER; note = Each t is m1f
  source 1..5419: mol_type = other RNA

SEQ ID NO: 4418 - RNA, 5419 nt, synthetic construct; identical to SEQ ID NO: 2821
  modified_base 1..5419: mod_base = OTHER; note = Each t is m1f
  source 1..5419: mol_type = other RNA

SEQ ID NO: 4419 - RNA, 5437 nt, synthetic construct; identical to SEQ ID NO: 2822
  modified_base 1..5419: mod_base = OTHER; note = Each t is m1f
  source 1..5437: mol_type = other RNA

SEQ ID NO: 4420 - RNA, 5419 nt, synthetic construct; identical to SEQ ID NO: 2823
  modified_base 1..5419: mod_base = OTHER; note = Each t is m1f
  source 1..5419: mol_type = other RNA

SEQ ID NO: 4421 - RNA, 5419 nt, synthetic construct; identical to SEQ ID NO: 2824
  modified_base 1..5419: mod_base = OTHER; note = Each t is m1f
  source 1..5419: mol_type = other RNA

SEQ ID NO: 4422 - RNA, 5419 nt, synthetic construct; identical to SEQ ID NO: 2825
  modified_base 1..5419: mod_base = OTHER; note = Each t is m1f
  source 1..5419: mol_type = other RNA

SEQ ID NO: 4423 - RNA, 5419 nt, synthetic construct; identical to SEQ ID NO: 2826
  modified_base 1..5419: mod_base = OTHER; note = Each t is m1f
  source 1..5419: mol_type = other RNA

SEQ ID NO: 4424 - RNA, 5419 nt, synthetic construct; identical to SEQ ID NO: 2827
  modified_base 1..5419: mod_base = OTHER; note = Each t is m1f
  source 1..5419: mol_type = other RNA

SEQ ID NO: 4425 - RNA, 5419 nt, synthetic construct; identical to SEQ ID NO: 2828
  modified_base 1..5419: mod_base = OTHER; note = Each t is m1f
  source 1..5419: mol_type = other RNA

SEQ ID NO: 4426 - RNA, 5419 nt, synthetic construct; identical to SEQ ID NO: 2829
  modified_base 1..5419: mod_base = OTHER; note = Each t is m1f
  source 1..5419: mol_type = other RNA

SEQ ID NO: 4427 - RNA, 5419 nt, synthetic construct; identical to SEQ ID NO: 2830
  modified_base 1..5419: mod_base = OTHER; note = Each t is m1f
  source 1..5419: mol_type = other RNA

SEQ ID NO: 4428 - RNA, 5428 nt, synthetic construct; identical to SEQ ID NO: 2831
  modified_base 1..5419: mod_base = OTHER; note = Each t is m1f
  source 1..5428: mol_type = other RNA

SEQ ID NO: 4429 - RNA, 5419 nt, synthetic construct; identical to SEQ ID NO: 2832
  modified_base 1..5419: mod_base = OTHER; note = Each t is m1f
  source 1..5419: mol_type = other RNA

SEQ ID NO: 4430 - RNA, 5419 nt, synthetic construct; identical to SEQ ID NO: 2833
  modified_base 1..5419: mod_base = OTHER; note = Each t is m1f
  source 1..5419: mol_type = other RNA

SEQ ID NO: 4431 - RNA, 5419 nt, synthetic construct; identical to SEQ ID NO: 2834
  modified_base 1..5419: mod_base = OTHER; note = Each t is m1f
  source 1..5419: mol_type = other RNA

SEQ ID NO: 4432 - RNA, 5419 nt, synthetic construct; identical to SEQ ID NO: 2835
  modified_base 1..5419: mod_base = OTHER; note = Each t is m1f
  source 1..5419: mol_type = other RNA

SEQ ID NO: 4433 - RNA, 5419 nt, synthetic construct; identical to SEQ ID NO: 2836
  modified_base 1..5419: mod_base = OTHER; note = Each t is m1f
  source 1..5419: mol_type = other RNA

SEQ ID NO: 4434 - RNA, 5419 nt, synthetic construct; identical to SEQ ID NO: 2837
  modified_base 1..5419: mod_base = OTHER; note = Each t is m1f
  source 1..5419: mol_type = other RNA

SEQ ID NO: 4435 - RNA, 5419 nt, synthetic construct; identical to SEQ ID NO: 2838
  modified_base 1..5419: mod_base = OTHER; note = Each t is m1f
  source 1..5419: mol_type = other RNA

SEQ ID NO: 4436 - RNA, 5416 nt, synthetic construct; identical to SEQ ID NO: 2839
  modified_base 1..5416: mod_base = OTHER; note = Each t is m1f
  source 1..5416: mol_type = other RNA

SEQ ID NO: 4437 - RNA, 5419 nt, synthetic construct; identical to SEQ ID NO: 2840
  modified_base 1..5419: mod_base = OTHER; note = Each t is m1f
  source 1..5419: mol_type = other RNA

SEQ ID NO: 4438 - RNA, 5419 nt, synthetic construct; identical to SEQ ID NO: 2841
  modified_base 1..5419: mod_base = OTHER; note = Each t is m1f
  source 1..5419: mol_type = other RNA

SEQ ID NO: 4439 - RNA, 5419 nt, synthetic construct; identical to SEQ ID NO: 2842
  modified_base 1..5419: mod_base = OTHER; note = Each t is m1f
  source 1..5419: mol_type = other RNA

SEQ ID NO: 4440 - RNA, 5419 nt, synthetic construct; identical to SEQ ID NO: 2843
  modified_base 1..5419: mod_base = OTHER; note = Each t is m1f
  source 1..5419: mol_type = other RNA

SEQ ID NO: 4441 - RNA, 5419 nt, synthetic construct; identical to SEQ ID NO: 2844
  modified_base 1..5419: mod_base = OTHER; note = Each t is m1f
  source 1..5419: mol_type = other RNA

SEQ ID NO: 4442 - RNA, 5419 nt, synthetic construct; identical to SEQ ID NO: 2845
  modified_base 1..5419: mod_base = OTHER; note = Each t is m1f
  source 1..5419: mol_type = other RNA

SEQ ID NO: 4443 - RNA, 5419 nt, synthetic construct; identical to SEQ ID NO: 2846
  modified_base 1..5419: mod_base = OTHER; note = Each t is m1f
  source 1..5419: mol_type = other RNA

SEQ ID NO: 4444 - RNA, 5419 nt, synthetic construct; identical to SEQ ID NO: 2847
  modified_base 1..5419: mod_base = OTHER; note = Each t is m1f
  source 1..5419: mol_type = other RNA

SEQ ID NO: 4445 - RNA, 5419 nt, synthetic construct; identical to SEQ ID NO: 2848
  modified_base 1..5419: mod_base = OTHER; note = Each t is m1f
  source 1..5419: mol_type = other RNA

SEQ ID NO: 4446 - RNA, 5419 nt, synthetic construct; identical to SEQ ID NO: 2849
  modified_base 1..5419: mod_base = OTHER; note = Each t is m1f
  source 1..5419: mol_type = other RNA

SEQ ID NO: 4447 - RNA, 5419 nt, synthetic construct; identical to SEQ ID NO: 2850
  modified_base 1..5419: mod_base = OTHER; note = Each t is m1f
  source 1..5419: mol_type = other RNA

SEQ ID NO: 4448 - RNA, 5419 nt, synthetic construct; identical to SEQ ID NO: 2851
  modified_base 1..5419: mod_base = OTHER; note = Each t is m1f
  source 1..5419: mol_type = other RNA

SEQ ID NO: 4449 - RNA, 5419 nt, synthetic construct; identical to SEQ ID NO: 2852
  modified_base 1..5419: mod_base = OTHER; note = Each t is m1f
  source 1..5419: mol_type = other RNA

SEQ ID NO: 4450 - RNA, 5419 nt, synthetic construct; identical to SEQ ID NO: 2853
  modified_base 1..5419: mod_base = OTHER; note = Each t is m1f
  source 1..5419: mol_type = other RNA

SEQ ID NO: 4451 - RNA, 5419 nt, synthetic construct; identical to SEQ ID NO: 2854
  modified_base 1..5419: mod_base = OTHER; note = Each t is m1f
  source 1..5419: mol_type = other RNA

SEQ ID NO: 4452 - RNA, 5419 nt, synthetic construct; identical to SEQ ID NO: 2855
  modified_base 1..5419: mod_base = OTHER; note = Each t is m1f
  source 1..5419: mol_type = other RNA

SEQ ID NO: 4453 - RNA, 5419 nt, synthetic construct; identical to SEQ ID NO: 2856
  modified_base 1..5419: mod_base = OTHER; note = Each t is m1f
  source 1..5419: mol_type = other RNA

SEQ ID NO: 4454 - RNA, 5419 nt, synthetic construct; identical to SEQ ID NO: 2857
  modified_base 1..5419: mod_base = OTHER; note = Each t is m1f
  source 1..5419: mol_type = other RNA

SEQ ID NO: 4455 - RNA, 5419 nt, synthetic construct; identical to SEQ ID NO: 2858
  modified_base 1..5419: mod_base = OTHER; note = Each t is m1f
  source 1..5419: mol_type = other RNA

SEQ ID NO: 4456 - RNA, 5419 nt, synthetic construct; identical to SEQ ID NO: 2859
  modified_base 1..5419: mod_base = OTHER; note = Each t is m1f
  source 1..5419: mol_type = other RNA

SEQ ID NO: 4457 - RNA, 5419 nt, synthetic construct; identical to SEQ ID NO: 2860
  modified_base 1..5419: mod_base = OTHER; note = Each t is m1f
  source 1..5419: mol_type = other RNA

SEQ ID NO: 4458 - RNA, 5419 nt, synthetic construct; identical to SEQ ID NO: 2861
  modified_base 1..5419: mod_base = OTHER; note = Each t is m1f
  source 1..5419: mol_type = other RNA

SEQ ID NO: 4459 - RNA, 5419 nt, synthetic construct; identical to SEQ ID NO: 2862
  modified_base 1..5419: mod_base = OTHER; note = Each t is m1f
  source 1..5419: mol_type = other RNA

SEQ ID NO: 4460 - RNA, 5419 nt, synthetic construct; identical to SEQ ID NO: 2863
  modified_base 1..5419: mod_base = OTHER; note = Each t is m1f
  source 1..5419: mol_type = other RNA

SEQ ID NO: 4461 - RNA, 5419 nt, synthetic construct; identical to SEQ ID NO: 2864
  modified_base 1..5419: mod_base = OTHER; note = Each t is m1f
  source 1..5419: mol_type = other RNA

SEQ ID NO: 4462 - RNA, 5419 nt, synthetic construct; identical to SEQ ID NO: 2865
  modified_base 1..5419: mod_base = OTHER; note = Each t is m1f
  source 1..5419: mol_type = other RNA

SEQ ID NO: 4463 - RNA, 5419 nt, synthetic construct; identical to SEQ ID NO: 2866
  modified_base 1..5419: mod_base = OTHER; note = Each t is m1f
  source 1..5419: mol_type = other RNA

SEQ ID NO: 4464 - RNA, 5419 nt, synthetic construct; identical to SEQ ID NO: 2867
  modified_base 1..5419: mod_base = OTHER; note = Each t is m1f
  source 1..5419: mol_type = other RNA

SEQ ID NO: 4465 - RNA, 5419 nt, synthetic construct; identical to SEQ ID NO: 2868
  modified_base 1..5419: mod_base = OTHER; note = Each t is m1f
  source 1..5419: mol_type = other RNA

SEQ ID NO: 4466 - RNA, 5419 nt, synthetic construct; identical to SEQ ID NO: 2869
  modified_base 1..5419: mod_base = OTHER; note = Each t is m1f
  source 1..5419: mol_type = other RNA

SEQ ID NO: 4467 - RNA, 5419 nt, synthetic construct; identical to SEQ ID NO: 2870
  modified_base 1..5419: mod_base = OTHER; note = Each t is m1f
  source 1..5419: mol_type = other RNA

SEQ ID NO: 4468 - RNA, 5419 nt, synthetic construct; identical to SEQ ID NO: 2871
  modified_base 1..5419: mod_base = OTHER; note = Each t is m1f
  source 1..5419: mol_type = other RNA

SEQ ID NO: 4469 - RNA, 5419 nt, synthetic construct; identical to SEQ ID NO: 2872
  modified_base 1..5419: mod_base = OTHER; note = Each t is m1f
  source 1..5419: mol_type = other RNA

SEQ ID NO: 4470 - RNA, 5455 nt, synthetic construct; identical to SEQ ID NO: 2873
  modified_base 1..5419: mod_base = OTHER; note = Each t is m1f
  source 1..5455: mol_type = other RNA

SEQ ID NO: 4471 - RNA, 5419 nt, synthetic construct; identical to SEQ ID NO: 2874
  modified_base 1..5419: mod_base = OTHER; note = Each t is m1f
  source 1..5419: mol_type = other RNA

SEQ ID NO: 4472 - RNA, 5419 nt, synthetic construct; identical to SEQ ID NO: 2875
  modified_base 1..5419: mod_base = OTHER; note = Each t is m1f
  source 1..5419: mol_type = other RNA

SEQ ID NO: 4473 - RNA, 5419 nt, synthetic construct; identical to SEQ ID NO: 2876
  modified_base 1..5419: mod_base = OTHER; note = Each t is m1f
  source 1..5419: mol_type = other RNA

SEQ ID NO: 4474 - RNA, 5419 nt, synthetic construct; identical to SEQ ID NO: 2877
  modified_base 1..5419: mod_base = OTHER; note = Each t is m1f
  source 1..5419: mol_type = other RNA

SEQ ID NO: 4475 - RNA, 5419 nt, synthetic construct; identical to SEQ ID NO: 2878
  modified_base 1..5419: mod_base = OTHER; note = Each t is m1f
  source 1..5419: mol_type = other RNA

SEQ ID NO: 4476 - RNA, 5419 nt, synthetic construct; identical to SEQ ID NO: 2879
  modified_base 1..5419: mod_base = OTHER; note = Each t is m1f
  source 1..5419: mol_type = other RNA

SEQ ID NO: 4477 - RNA, 5419 nt, synthetic construct; identical to SEQ ID NO: 2880
  modified_base 1..5419: mod_base = OTHER; note = Each t is m1f
  source 1..5419: mol_type = other RNA

SEQ ID NO: 4478 - RNA, 5419 nt, synthetic construct; identical to SEQ ID NO: 2881
  modified_base 1..5419: mod_base = OTHER; note = Each t is m1f
  source 1..5419: mol_type = other RNA

SEQ ID NO: 4479 - RNA, 5419 nt, synthetic construct; identical to SEQ ID NO: 2882
  modified_base 1..5419: mod_base = OTHER; note = Each t is m1f
  source 1..5419: mol_type = other RNA

SEQ ID NO: 4480 - RNA, 5419 nt, synthetic construct; identical to SEQ ID NO: 2883
  modified_base 1..5419: mod_base = OTHER; note = Each t is m1f
  source 1..5419: mol_type = other RNA

SEQ ID NO: 4481 - RNA, 5419 nt, synthetic construct; identical to SEQ ID NO: 2884
  modified_base 1..5419: mod_base = OTHER; note = Each t is m1f
  source 1..5419: mol_type = other RNA

SEQ ID NO: 4482 - RNA, 5419 nt, synthetic construct; identical to SEQ ID NO: 2885
  modified_base 1..5419: mod_base = OTHER; note = Each t is m1f
  source 1..5419: mol_type = other RNA

SEQ ID NO: 4483 - RNA, 5419 nt, synthetic construct; identical to SEQ ID NO: 2886
  modified_base 1..5419: mod_base = OTHER; note = Each t is m1f
  source 1..5419: mol_type = other RNA

SEQ ID NO: 4484 - RNA, 5419 nt, synthetic construct; identical to SEQ ID NO: 2887
  modified_base 1..5419: mod_base = OTHER; note = Each t is m1f
  source 1..5419: mol_type = other RNA

SEQ ID NO: 4485 - RNA, 5419 nt, synthetic construct; identical to SEQ ID NO: 2888
  modified_base 1..5419: mod_base = OTHER; note = Each t is m1f
  source 1..5419: mol_type = other RNA

SEQ ID NO: 4486 - RNA, 5419 nt, synthetic construct; identical to SEQ ID NO: 2889
  modified_base 1..5419: mod_base = OTHER; note = Each t is m1f
  source 1..5419: mol_type = other RNA

SEQ ID NO: 4487 - RNA, 5419 nt, synthetic construct; identical to SEQ ID NO: 2890
  modified_base 1..5419: mod_base = OTHER; note = Each t is m1f
  source 1..5419: mol_type = other RNA

SEQ ID NO: 4488 - RNA, 5419 nt, synthetic construct; identical to SEQ ID NO: 2891
  modified_base 1..5419: mod_base = OTHER; note = Each t is m1f
  source 1..5419: mol_type = other RNA

SEQ ID NO: 4489 - RNA, 5419 nt, synthetic construct; identical to SEQ ID NO: 2892
  modified_base 1..5419: mod_base = OTHER; note = Each t is m1f
  source 1..5419: mol_type = other RNA

SEQ ID NO: 4490 - RNA, 5419 nt, synthetic construct; identical to SEQ ID NO: 2893
  modified_base 1..5419: mod_base = OTHER; note = Each t is m1f
  source 1..5419: mol_type = other RNA

SEQ ID NO: 4491 - RNA, 5419 nt, synthetic construct; identical to SEQ ID NO: 2894
  modified_base 1..5419: mod_base = OTHER; note = Each t is m1f
  source 1..5419: mol_type = other RNA

SEQ ID NO: 4492 - RNA, 5419 nt, synthetic construct; identical to SEQ ID NO: 2895
  modified_base 1..5419: mod_base = OTHER; note = Each t is m1f
  source 1..5419: mol_type = other RNA

SEQ ID NO: 4493 - RNA, 5419 nt, synthetic construct; identical to SEQ ID NO: 2896
  modified_base 1..5419: mod_base = OTHER; note = Each t is m1f
  source 1..5419: mol_type = other RNA

SEQ ID NO: 4494 - RNA, 5419 nt, synthetic construct; identical to SEQ ID NO: 2897
  modified_base 1..5419: mod_base = OTHER; note = Each t is m1f
  source 1..5419: mol_type = other RNA

SEQ ID NO: 4495 - RNA, 5419 nt, synthetic construct; identical to SEQ ID NO: 2898
  modified_base 1..5419: mod_base = OTHER; note = Each t is m1f
  source 1..5419: mol_type = other RNA

SEQ ID NO: 4496 - RNA, 5419 nt, synthetic construct; identical to SEQ ID NO: 2899
  modified_base 1..5419: mod_base = OTHER; note = Each t is m1f
  source 1..5419: mol_type = other RNA

SEQ ID NO: 4497 - RNA, 5419 nt, synthetic construct; identical to SEQ ID NO: 2900
  modified_base 1..5419: mod_base = OTHER; note = Each t is m1f
  source 1..5419: mol_type = other RNA

SEQ ID NO: 4498 - RNA, 5419 nt, synthetic construct; identical to SEQ ID NO: 2901
  modified_base 1..5419: mod_base = OTHER; note = Each t is m1f
  source 1..5419: mol_type = other RNA

SEQ ID NO: 4499 - RNA, 5419 nt, synthetic construct; identical to SEQ ID NO: 2902
  modified_base 1..5419: mod_base = OTHER; note = Each t is m1f
  source 1..5419: mol_type = other RNA

SEQ ID NO: 4500 - RNA, 5419 nt, synthetic construct; identical to SEQ ID NO: 2903
  modified_base 1..5419: mod_base = OTHER; note = Each t is m1f
  source 1..5419: mol_type = other RNA

SEQ ID NO: 4501 - RNA, 5419 nt, synthetic construct; identical to SEQ ID NO: 2904
  modified_base 1..5419: mod_base = OTHER; note = Each t is m1f
  source 1..5419: mol_type = other RNA

SEQ ID NO: 4502 - RNA, 5419 nt, synthetic construct; identical to SEQ ID NO: 2905
  modified_base 1..5419: mod_base = OTHER; note = Each t is m1f
  source 1..5419: mol_type = other RNA

SEQ ID NO: 4503 - RNA, 5419 nt, synthetic construct; identical to SEQ ID NO: 2906
  modified_base 1..5419: mod_base = OTHER; note = Each t is m1f
  source 1..5419: mol_type = other RNA

SEQ ID NO: 4504 - RNA, 5419 nt, synthetic construct; identical to SEQ ID NO: 2907
  modified_base 1..5419: mod_base = OTHER; note = Each t is m1f
  source 1..5419: mol_type = other RNA

SEQ ID NO: 4505 - RNA, 5419 nt, synthetic construct; identical to SEQ ID NO: 2908
  modified_base 1..5419: mod_base = OTHER; note = Each t is m1f
  source 1..5419: mol_type = other RNA

SEQ ID NO: 4506 - RNA, 5419 nt, synthetic construct; identical to SEQ ID NO: 2909
  modified_base 1..5419: mod_base = OTHER; note = Each t is m1f
  source 1..5419: mol_type = other RNA

SEQ ID NO: 4507 - RNA, 5419 nt, synthetic construct; identical to SEQ ID NO: 2910
  modified_base 1..5419: mod_base = OTHER; note = Each t is m1f
  source 1..5419: mol_type = other RNA

SEQ ID NO: 4508 - RNA, 5419 nt, synthetic construct; identical to SEQ ID NO: 2911
  modified_base 1..5419: mod_base = OTHER; note = Each t is m1f
  source 1..5419: mol_type = other RNA

SEQ ID NO: 4509 - RNA, 5419 nt, synthetic construct; identical to SEQ ID NO: 2912
  modified_base 1..5419: mod_base = OTHER; note = Each t is m1f
  source 1..5419: mol_type = other RNA

SEQ ID NO: 4510 - RNA, 5419 nt, synthetic construct; identical to SEQ ID NO: 2913
  modified_base 1..5419: mod_base = OTHER; note = Each t is m1f
  source 1..5419: mol_type = other RNA

SEQ ID NO: 4511 - RNA, 5419 nt, synthetic construct; identical to SEQ ID NO: 2914
  modified_base 1..5419: mod_base = OTHER; note = Each t is m1f
  source 1..5419: mol_type = other RNA

SEQ ID NO: 4512 - RNA, 5419 nt, synthetic construct; identical to SEQ ID NO: 2915
  modified_base 1..5419: mod_base = OTHER; note = Each t is m1f
  source 1..5419: mol_type = other RNA

SEQ ID NO: 4513 - RNA, 5419 nt, synthetic construct; identical to SEQ ID NO: 2916
  modified_base 1..5419: mod_base = OTHER; note = Each t is m1f
  source 1..5419: mol_type = other RNA

SEQ ID NO: 4514 - RNA, 5419 nt, synthetic construct; identical to SEQ ID NO: 2917
  modified_base 1..5419: mod_base = OTHER; note = Each t is m1f
  source 1..5419: mol_type = other RNA

SEQ ID NO: 4515 - RNA, 5419 nt, synthetic construct; identical to SEQ ID NO: 2918
  modified_base 1..5419: mod_base = OTHER; note = Each t is m1f
  source 1..5419: mol_type = other RNA

SEQ ID NO: 4516 - RNA, 5419 nt, synthetic construct; identical to SEQ ID NO: 2919
  modified_base 1..5419: mod_base = OTHER; note = Each t is m1f
  source 1..5419: mol_type = other RNA

SEQ ID NO: 4517 - RNA, 5428 nt, synthetic construct; identical to SEQ ID NO: 2920
  modified_base 1..5419: mod_base = OTHER; note = Each t is m1f
  source 1..5428: mol_type = other RNA

SEQ ID NO: 4518 - RNA, 5419 nt, synthetic construct; identical to SEQ ID NO: 2921
  modified_base 1..5419: mod_base = OTHER; note = Each t is m1f
  source 1..5419: mol_type = other RNA

SEQ ID NO: 4519 - RNA, 5419 nt, synthetic construct; identical to SEQ ID NO: 2922
  modified_base 1..5419: mod_base = OTHER; note = Each t is m1f
  source 1..5419: mol_type = other RNA

SEQ ID NO: 4520 - RNA, 5419 nt, synthetic construct; identical to SEQ ID NO: 2923
  modified_base 1..5419: mod_base = OTHER; note = Each t is m1f
  source 1..5419: mol_type = other RNA

SEQ ID NO: 4521 - RNA, 5419 nt, synthetic construct; identical to SEQ ID NO: 2924
  modified_base 1..5419: mod_base = OTHER; note = Each t is m1f
  source 1..5419: mol_type = other RNA

SEQ ID NO: 4522 - RNA, 5419 nt, synthetic construct; identical to SEQ ID NO: 2925
  modified_base 1..5419: mod_base = OTHER; note = Each t is m1f
  source 1..5419: mol_type = other RNA

SEQ ID NO: 4523 - RNA, 5419 nt, synthetic construct; identical to SEQ ID NO: 2926
  modified_base 1..5419: mod_base = OTHER; note = Each t is m1f
  source 1..5419: mol_type = other RNA

SEQ ID NO: 4524 - RNA, 5419 nt, synthetic construct; identical to SEQ ID NO: 2927
  modified_base 1..5419: mod_base = OTHER; note = Each t is m1f
  source 1..5419: mol_type = other RNA

SEQ ID NO: 4525 - RNA, 5419 nt, synthetic construct; identical to SEQ ID NO: 2928
  modified_base 1..5419: mod_base = OTHER; note = Each t is m1f
  source 1..5419: mol_type = other RNA

SEQ ID NO: 4526 - RNA, 5419 nt, synthetic construct; identical to SEQ ID NO: 2929
  modified_base 1..5419: mod_base = OTHER; note = Each t is m1f
  source 1..5419: mol_type = other RNA

SEQ ID NO: 4527 - RNA, 5419 nt, synthetic construct; identical to SEQ ID NO: 2930
  modified_base 1..5419: mod_base = OTHER; note = Each t is m1f
  source 1..5419: mol_type = other RNA

SEQ ID NO: 4528 - RNA, 5419 nt, synthetic construct; identical to SEQ ID NO: 2931
  modified_base 1..5419: mod_base = OTHER; note = Each t is m1f
  source 1..5419: mol_type = other RNA

SEQ ID NO: 4529 - RNA, 5419 nt, synthetic construct; identical to SEQ ID NO: 2932
  modified_base 1..5419: mod_base = OTHER; note = Each t is m1f
  source 1..5419: mol_type = other RNA

SEQ ID NO: 4530 - RNA, 5419 nt, synthetic construct; identical to SEQ ID NO: 2933
  modified_base 1..5419: mod_base = OTHER; note = Each t is m1f
  source 1..5419: mol_type = other RNA

SEQ ID NO: 4531 - RNA, 5419 nt, synthetic construct; identical to SEQ ID NO: 2934
  modified_base 1..5419: mod_base = OTHER; note = Each t is m1f
  source 1..5419: mol_type = other RNA

SEQ ID NO: 4532 - RNA, 5419 nt, synthetic construct; identical to SEQ ID NO: 2935
  modified_base 1..5419: mod_base = OTHER; note = Each t is m1f
  source 1..5419: mol_type = other RNA

SEQ ID NO: 4533 - RNA, 5419 nt, synthetic construct; identical to SEQ ID NO: 2936
  modified_base 1..5419: mod_base = OTHER; note = Each t is m1f
  source 1..5419: mol_type = other RNA

SEQ ID NO: 4534 - RNA, 5419 nt, synthetic construct; identical to SEQ ID NO: 2937
  modified_base 1..5419: mod_base = OTHER; note = Each t is m1f
  source 1..5419: mol_type = other RNA

SEQ ID NO: 4535 - RNA, 5419 nt, synthetic construct; identical to SEQ ID NO: 2938
  modified_base 1..5419: mod_base = OTHER; note = Each t is m1f
  source 1..5419: mol_type = other RNA

SEQ ID NO: 4536 - RNA, 5419 nt, synthetic construct; identical to SEQ ID NO: 2939
  modified_base 1..5419: mod_base = OTHER; note = Each t is m1f
  source 1..5419: mol_type = other RNA

SEQ ID NO: 4537 - RNA, 5419 nt, synthetic construct; identical to SEQ ID NO: 2940
  modified_base 1..5419: mod_base = OTHER; note = Each t is m1f
  source 1..5419: mol_type = other RNA

SEQ ID NO: 4538 - RNA, 5419 nt, synthetic construct; identical to SEQ ID NO: 2941
  modified_base 1..5419: mod_base = OTHER; note = Each t is m1f
  source 1..5419: mol_type = other RNA

SEQ ID NO: 4539 - RNA, 5419 nt, synthetic construct; identical to SEQ ID NO: 2942
  modified_base 1..5419: mod_base = OTHER; note = Each t is m1f
  source 1..5419: mol_type = other RNA

SEQ ID NO: 4540 - RNA, 5419 nt, synthetic construct; identical to SEQ ID NO: 2943
  modified_base 1..5419: mod_base = OTHER; note = Each t is m1f
  source 1..5419: mol_type = other RNA

SEQ ID NO: 4541 - RNA, 5419 nt, synthetic construct; identical to SEQ ID NO: 2944
  modified_base 1..5419: mod_base = OTHER; note = Each t is m1f
  source 1..5419: mol_type = other RNA

SEQ ID NO: 4542 - RNA, 5419 nt, synthetic construct; identical to SEQ ID NO: 2945
  modified_base 1..5419: mod_base = OTHER; note = Each t is m1f
  source 1..5419: mol_type = other RNA

SEQ ID NO: 4543 - RNA, 5419 nt, synthetic construct; identical to SEQ ID NO: 2946
  modified_base 1..5419: mod_base = OTHER; note = Each t is m1f
  source 1..5419: mol_type = other RNA

SEQ ID NO: 4544 - RNA, 5419 nt, synthetic construct; identical to SEQ ID NO: 2947
  modified_base 1..5419: mod_base = OTHER; note = Each t is m1f
  source 1..5419: mol_type = other RNA

SEQ ID NO: 4545 - RNA, 5419 nt, synthetic construct; identical to SEQ ID NO: 2948
  modified_base 1..5419: mod_base = OTHER; note = Each t is m1f
  source 1..5419: mol_type = other RNA

SEQ ID NO: 4546 - RNA, 5419 nt, synthetic construct; identical to SEQ ID NO: 2949
  modified_base 1..5419: mod_base = OTHER; note = Each t is m1f
  source 1..5419: mol_type = other RNA

SEQ ID NO: 4547 - RNA, 5419 nt, synthetic construct; identical to SEQ ID NO: 2950
  modified_base 1..5419: mod_base = OTHER; note = Each t is m1f
  source 1..5419: mol_type = other RNA

SEQ ID NO: 4548 - RNA, 5419 nt, synthetic construct; identical to SEQ ID NO: 2951
  modified_base 1..5419: mod_base = OTHER; note = Each t is m1f
  source 1..5419: mol_type = other RNA

SEQ ID NO: 4549 - RNA, 5419 nt, synthetic construct; identical to SEQ ID NO: 2952
  modified_base 1..5419: mod_base = OTHER; note = Each t is m1f
  source 1..5419: mol_type = other RNA

SEQ ID NO: 4550 - RNA, 5419 nt, synthetic construct; identical to SEQ ID NO: 2953
  modified_base 1..5419: mod_base = OTHER; note = Each t is m1f
  source 1..5419: mol_type = other RNA

SEQ ID NO: 4551 - RNA, 5419 nt, synthetic construct; identical to SEQ ID NO: 2954
  modified_base 1..5419: mod_base = OTHER; note = Each t is m1f
  source 1..5419: mol_type = other RNA

SEQ ID NO: 4552 - RNA, 5419 nt, synthetic construct; identical to SEQ ID NO: 2955
  modified_base 1..5419: mod_base = OTHER; note = Each t is m1f
  source 1..5419: mol_type = other RNA

SEQ ID NO: 4553 - RNA, 5419 nt, synthetic construct; identical to SEQ ID NO: 2956
  modified_base 1..5419: mod_base = OTHER; note = Each t is m1f
  source 1..5419: mol_type = other RNA

SEQ ID NO: 4554 - RNA, 5419 nt, synthetic construct; identical to SEQ ID NO: 2957
  modified_base 1..5419: mod_base = OTHER; note = Each t is m1f
  source 1..5419: mol_type = other RNA

SEQ ID NO: 4555 - RNA, 5419 nt, synthetic construct; identical to SEQ ID NO: 2958
  modified_base 1..5419: mod_base = OTHER; note = Each t is m1f
  source 1..5419: mol_type = other RNA

SEQ ID NO: 4556 - RNA, 5419 nt, synthetic construct; identical to SEQ ID NO: 2959
  modified_base 1..5419: mod_base = OTHER; note = Each t is m1f
  source 1..5419: mol_type = other RNA

SEQ ID NO: 4557 - RNA, 5419 nt, synthetic construct; identical to SEQ ID NO: 2960
  modified_base 1..5419: mod_base = OTHER; note = Each t is m1f
  source 1..5419: mol_type = other RNA

SEQ ID NO: 4558 - RNA, 5419 nt, synthetic construct; identical to SEQ ID NO: 2961
  modified_base 1..5419: mod_base = OTHER; note = Each t is m1f
  source 1..5419: mol_type = other RNA

SEQ ID NO: 4559 - RNA, 5419 nt, synthetic construct; identical to SEQ ID NO: 2962
  modified_base 1..5419: mod_base = OTHER; note = Each t is m1f
  source 1..5419: mol_type = other RNA

SEQ ID NO: 4560 - RNA, 5419 nt, synthetic construct; identical to SEQ ID NO: 2963
  modified_base 1..5419: mod_base = OTHER; note = Each t is m1f
  source 1..5419: mol_type = other RNA

SEQ ID NO: 4561 - RNA, 5419 nt, synthetic construct; identical to SEQ ID NO: 2964
  modified_base 1..5419: mod_base = OTHER; note = Each t is m1f
  source 1..5419: mol_type = other RNA

SEQ ID NO: 4562 - RNA, 5419 nt, synthetic construct; identical to SEQ ID NO: 2965
  modified_base 1..5419: mod_base = OTHER; note = Each t is m1f
  source 1..5419: mol_type = other RNA

SEQ ID NO: 4563 - RNA, 5419 nt, synthetic construct; identical to SEQ ID NO: 2966
  modified_base 1..5419: mod_base = OTHER; note = Each t is m1f
  source 1..5419: mol_type = other RNA

SEQ ID NO: 4564 - RNA, 5419 nt, synthetic construct; identical to SEQ ID NO: 2967
  modified_base 1..5419: mod_base = OTHER; note = Each t is m1f
  source 1..5419: mol_type = other RNA

SEQ ID NO: 4565 - RNA, 5419 nt, synthetic construct; identical to SEQ ID NO: 2968
  modified_base 1..5419: mod_base = OTHER; note = Each t is m1f
  source 1..5419: mol_type = other RNA

SEQ ID NO: 4566 - RNA, 5419 nt, synthetic construct; identical to SEQ ID NO: 2969
  modified_base 1..5419: mod_base = OTHER; note = Each t is m1f
  source 1..5419: mol_type = other RNA

SEQ ID NO: 4567 - RNA, 5419 nt, synthetic construct; identical to SEQ ID NO: 2970
  modified_base 1..5419: mod_base = OTHER; note = Each t is m1f
  source 1..5419: mol_type = other RNA

SEQ ID NO: 4568 - RNA, 5419 nt, synthetic construct; identical to SEQ ID NO: 2971
  modified_base 1..5419: mod_base = OTHER; note = Each t is m1f
  source 1..5419: mol_type = other RNA

SEQ ID NO: 4569 - RNA, 5419 nt, synthetic construct; identical to SEQ ID NO: 2972
  modified_base 1..5419: mod_base = OTHER; note = Each t is m1f
  source 1..5419: mol_type = other RNA

SEQ ID NO: 4570 - RNA, 5419 nt, synthetic construct; identical to SEQ ID NO: 2973
  modified_base 1..5419: mod_base = OTHER; note = Each t is m1f
  source 1..5419: mol_type = other RNA

SEQ ID NO: 4571 - RNA, 5419 nt, synthetic construct; identical to SEQ ID NO: 2974
  modified_base 1..5419: mod_base = OTHER; note = Each t is m1f
  source 1..5419: mol_type = other RNA

SEQ ID NO: 4572 - RNA, 5419 nt, synthetic construct; identical to SEQ ID NO: 2975
  modified_base 1..5419: mod_base = OTHER; note = Each t is m1f
  source 1..5419: mol_type = other RNA

SEQ ID NO: 4573 - RNA, 5419 nt, synthetic construct; identical to SEQ ID NO: 2976
  modified_base 1..5419: mod_base = OTHER; note = Each t is m1f
  source 1..5419: mol_type = other RNA

SEQ ID NO: 4574 - RNA, 5419 nt, synthetic construct; identical to SEQ ID NO: 2977
  modified_base 1..5419: mod_base = OTHER; note = Each t is m1f
  source 1..5419: mol_type = other RNA

SEQ ID NO: 4575 - RNA, 5419 nt, synthetic construct; identical to SEQ ID NO: 2978
  modified_base 1..5419: mod_base = OTHER; note = Each t is m1f
  source 1..5419: mol_type = other RNA

SEQ ID NO: 4576 - RNA, 5419 nt, synthetic construct; identical to SEQ ID NO: 2979
  modified_base 1..5419: mod_base = OTHER; note = Each t is m1f
  source 1..5419: mol_type = other RNA

SEQ ID NO: 4577 - RNA, 5419 nt, synthetic construct; identical to SEQ ID NO: 2980
  modified_base 1..5419: mod_base = OTHER; note = Each t is m1f
  source 1..5419: mol_type = other RNA

SEQ ID NO: 4578 - RNA, 5419 nt, synthetic construct; identical to SEQ ID NO: 2981
  modified_base 1..5419: mod_base = OTHER; note = Each t is m1f
  source 1..5419: mol_type = other RNA

SEQ ID NO: 4579 - RNA, 5419 nt, synthetic construct; identical to SEQ ID NO: 2982
  modified_base 1..5419: mod_base = OTHER; note = Each t is m1f
  source 1..5419: mol_type = other RNA

SEQ ID NO: 4580 - RNA, 5419 nt, synthetic construct; identical to SEQ ID NO: 2983
  modified_base 1..5419: mod_base = OTHER; note = Each t is m1f
  source 1..5419: mol_type = other RNA

SEQ ID NO: 4581 - RNA, 5419 nt, synthetic construct; identical to SEQ ID NO: 2984
  modified_base 1..5419: mod_base = OTHER; note = Each t is m1f
  source 1..5419: mol_type = other RNA

SEQ ID NO: 4582 - RNA, 5419 nt, synthetic construct; identical to SEQ ID NO: 2985
  modified_base 1..5419: mod_base = OTHER; note = Each t is m1f
  source 1..5419: mol_type = other RNA

SEQ ID NO: 4583 - RNA, 5419 nt, synthetic construct; identical to SEQ ID NO: 2986
  modified_base 1..5419: mod_base = OTHER; note = Each t is m1f
  source 1..5419: mol_type = other RNA

SEQ ID NO: 4584 - RNA, 5419 nt, synthetic construct; identical to SEQ ID NO: 2987
  modified_base 1..5419: mod_base = OTHER; note = Each t is m1f
  source 1..5419: mol_type = other RNA

SEQ ID NO: 4585 - RNA, 5419 nt, synthetic construct; identical to SEQ ID NO: 2988
  modified_base 1..5419: mod_base = OTHER; note = Each t is m1f
  source 1..5419: mol_type = other RNA

SEQ ID NO: 4586 - RNA, 5419 nt, synthetic construct; identical to SEQ ID NO: 2989
  modified_base 1..5419: mod_base = OTHER; note = Each t is m1f
  source 1..5419: mol_type = other RNA

SEQ ID NO: 4587 - RNA, 5419 nt, synthetic construct; identical to SEQ ID NO: 2990
  modified_base 1..5419: mod_base = OTHER; note = Each t is m1f
  source 1..5419: mol_type = other RNA

SEQ ID NO: 4588 - RNA, 5419 nt, synthetic construct; identical to SEQ ID NO: 2991
  modified_base 1..5419: mod_base = OTHER; note = Each t is m1f
  source 1..5419: mol_type = other RNA

SEQ ID NO: 4589 - RNA, 5419 nt, synthetic construct; identical to SEQ ID NO: 2992
  modified_base 1..5419: mod_base = OTHER; note = Each t is m1f
  source 1..5419: mol_type = other RNA

SEQ ID NO: 4590 - RNA, 5419 nt, synthetic construct; identical to SEQ ID NO: 2993
  modified_base 1..5419: mod_base = OTHER; note = Each t is m1f
  source 1..5419: mol_type = other RNA

SEQ ID NO: 4591 - RNA, 5419 nt, synthetic construct; identical to SEQ ID NO: 2994
  modified_base 1..5419: mod_base = OTHER; note = Each t is m1f
  source 1..5419: mol_type = other RNA

SEQ ID NO: 4592 - RNA, 5419 nt, synthetic construct; identical to SEQ ID NO: 2995
  modified_base 1..5419: mod_base = OTHER; note = Each t is m1f
  source 1..5419: mol_type = other RNA

SEQ ID NO: 4593 - RNA, 5419 nt, synthetic construct; identical to SEQ ID NO: 2996
  modified_base 1..5419: mod_base = OTHER; note = Each t is m1f
  source 1..5419: mol_type = other RNA

SEQ ID NO: 4594 - RNA, 5419 nt, synthetic construct; identical to SEQ ID NO: 2997
  modified_base 1..5419: mod_base = OTHER; note = Each t is m1f
  source 1..5419: mol_type = other RNA

SEQ ID NO: 4595 - RNA, 5419 nt, synthetic construct; identical to SEQ ID NO: 2998
  modified_base 1..5419: mod_base = OTHER; note = Each t is m1f
  source 1..5419: mol_type = other RNA

SEQ ID NO: 4596 - RNA, 5419 nt, synthetic construct; identical to SEQ ID NO: 2999
  modified_base 1..5419: mod_base = OTHER; note = Each t is m1f
  source 1..5419: mol_type = other RNA

SEQ ID NO: 4597 - RNA, 5419 nt, synthetic construct; identical to SEQ ID NO: 3000
  modified_base 1..5419: mod_base = OTHER; note = Each t is m1f
  source 1..5419: mol_type = other RNA

SEQ ID NO: 4598 - RNA, 5419 nt, synthetic construct; identical to SEQ ID NO: 3001
  modified_base 1..5419: mod_base = OTHER; note = Each t is m1f
  source 1..5419: mol_type = other RNA

SEQ ID NO: 4599 - RNA, 5419 nt, synthetic construct; identical to SEQ ID NO: 3002
  modified_base 1..5419: mod_base = OTHER; note = Each t is m1f
  source 1..5419: mol_type = other RNA

SEQ ID NO: 4600 - RNA, 5419 nt, synthetic construct; identical to SEQ ID NO: 3003
  modified_base 1..5419: mod_base = OTHER; note = Each t is m1f
  source 1..5419: mol_type = other RNA

SEQ ID NO: 4601 - RNA, 5419 nt, synthetic construct; identical to SEQ ID NO: 3004
  modified_base 1..5419: mod_base = OTHER; note = Each t is m1f
  source 1..5419: mol_type = other RNA

SEQ ID NO: 4602 - RNA, 5419 nt, synthetic construct; identical to SEQ ID NO: 3005
  modified_base 1..5419: mod_base = OTHER; note = Each t is m1f
  source 1..5419: mol_type = other RNA

SEQ ID NO: 4603 - RNA, 5419 nt, synthetic construct; identical to SEQ ID NO: 3006
  modified_base 1..5419: mod_base = OTHER; note = Each t is m1f
  source 1..5419: mol_type = other RNA

SEQ ID NO: 4604 - RNA, 5419 nt, synthetic construct; identical to SEQ ID NO: 3007
  modified_base 1..5419: mod_base = OTHER; note = Each t is m1f
  source 1..5419: mol_type = other RNA

SEQ ID NO: 4605 - RNA, 5419 nt, synthetic construct; identical to SEQ ID NO: 3008
  modified_base 1..5419: mod_base = OTHER; note = Each t is m1f
  source 1..5419: mol_type = other RNA

SEQ ID NO: 4606 - RNA, 5419 nt, synthetic construct; identical to SEQ ID NO: 3009
  modified_base 1..5419: mod_base = OTHER; note = Each t is m1f
  source 1..5419: mol_type = other RNA

SEQ ID NO: 4607 - RNA, 5419 nt, synthetic construct; identical to SEQ ID NO: 3010
  modified_base 1..5419: mod_base = OTHER; note = Each t is m1f
  source 1..5419: mol_type = other RNA

SEQ ID NO: 4608 - RNA, 5419 nt, synthetic construct; identical to SEQ ID NO: 3011
  modified_base 1..5419: mod_base = OTHER; note = Each t is m1f
  source 1..5419: mol_type = other RNA

SEQ ID NO: 4609 - RNA, 5419 nt, synthetic construct; identical to SEQ ID NO: 3012
  modified_base 1..5419: mod_base = OTHER; note = Each t is m1f
  source 1..5419: mol_type = other RNA

SEQ ID NO: 4610 - RNA, 5419 nt, synthetic construct; identical to SEQ ID NO: 3013
  modified_base 1..5419: mod_base = OTHER; note = Each t is m1f
  source 1..5419: mol_type = other RNA

SEQ ID NO: 4611 - RNA, 5419 nt, synthetic construct; identical to SEQ ID NO: 3014
  modified_base 1..5419: mod_base = OTHER; note = Each t is m1f
  source 1..5419: mol_type = other RNA

SEQ ID NO: 4612 - RNA, 5419 nt, synthetic construct; identical to SEQ ID NO: 3015
  modified_base 1..5419: mod_base = OTHER; note = Each t is m1f
  source 1..5419: mol_type = other RNA

SEQ ID NO: 4613 - RNA, 5419 nt, synthetic construct; identical to SEQ ID NO: 3016
  modified_base 1..5419: mod_base = OTHER; note = Each t is m1f
  source 1..5419: mol_type = other RNA

SEQ ID NO: 4614 - RNA, 5419 nt, synthetic construct; identical to SEQ ID NO: 3017
  modified_base 1..5419: mod_base = OTHER; note = Each t is m1f
  source 1..5419: mol_type = other RNA

SEQ ID NO: 4615 - RNA, 5419 nt, synthetic construct; identical to SEQ ID NO: 3018
  modified_base 1..5419: mod_base = OTHER; note = Each t is m1f
  source 1..5419: mol_type = other RNA

SEQ ID NO: 4616 - RNA, 5419 nt, synthetic construct; identical to SEQ ID NO: 3019
  modified_base 1..5419: mod_base = OTHER; note = Each t is m1f
  source 1..5419: mol_type = other RNA

SEQ ID NO: 4617 - RNA, 5419 nt, synthetic construct; identical to SEQ ID NO: 3020
  modified_base 1..5419: mod_base = OTHER; note = Each t is m1f
  source 1..5419: mol_type = other RNA

SEQ ID NO: 4618 - RNA, 5419 nt, synthetic construct; identical to SEQ ID NO: 3021
  modified_base 1..5419: mod_base = OTHER; note = Each t is m1f
  source 1..5419: mol_type = other RNA

SEQ ID NO: 4619 - RNA, 5419 nt, synthetic construct; identical to SEQ ID NO: 3022
  modified_base 1..5419: mod_base = OTHER; note = Each t is m1f
  source 1..5419: mol_type = other RNA

SEQ ID NO: 4620 - RNA, 5419 nt, synthetic construct; identical to SEQ ID NO: 3023
  modified_base 1..5419: mod_base = OTHER; note = Each t is m1f
  source 1..5419: mol_type = other RNA

SEQ ID NO: 4621 - RNA, 5419 nt, synthetic construct; identical to SEQ ID NO: 3024
  modified_base 1..5419: mod_base = OTHER; note = Each t is m1f
  source 1..5419: mol_type = other RNA

SEQ ID NO: 4622 - RNA, 5419 nt, synthetic construct; identical to SEQ ID NO: 3025
  modified_base 1..5419: mod_base = OTHER; note = Each t is m1f
  source 1..5419: mol_type = other RNA

SEQ ID NO: 4623 - RNA, 5419 nt, synthetic construct; identical to SEQ ID NO: 3026
  modified_base 1..5419: mod_base = OTHER; note = Each t is m1f
  source 1..5419: mol_type = other RNA

SEQ ID NO: 4624 - RNA, 5419 nt, synthetic construct; identical to SEQ ID NO: 3027
  modified_base 1..5419: mod_base = OTHER; note = Each t is m1f
  source 1..5419: mol_type = other RNA

SEQ ID NO: 4625 - RNA, 5419 nt, synthetic construct; identical to SEQ ID NO: 3028
  modified_base 1..5419: mod_base = OTHER; note = Each t is m1f
  source 1..5419: mol_type = other RNA

SEQ ID NO: 4626 - RNA, 5419 nt, synthetic construct; identical to SEQ ID NO: 3029
  modified_base 1..5419: mod_base = OTHER; note = Each t is m1f
  source 1..5419: mol_type = other RNA

SEQ ID NO: 4627 - RNA, 5419 nt, synthetic construct; identical to SEQ ID NO: 3030
  modified_base 1..5419: mod_base = OTHER; note = Each t is m1f
  source 1..5419: mol_type = other RNA

SEQ ID NO: 4628 - RNA, 5419 nt, synthetic construct; identical to SEQ ID NO: 3031
  modified_base 1..5419: mod_base = OTHER; note = Each t is m1f
  source 1..5419: mol_type = other RNA

SEQ ID NO: 4629 - RNA, 5419 nt, synthetic construct; identical to SEQ ID NO: 3032
  modified_base 1..5419: mod_base = OTHER; note = Each t is m1f
  source 1..5419: mol_type = other RNA

SEQ ID NO: 4630 - RNA, 5419 nt, synthetic construct; identical to SEQ ID NO: 3033
  modified_base 1..5419: mod_base = OTHER; note = Each t is m1f
  source 1..5419: mol_type = other RNA

SEQ ID NO: 4631 - RNA, 5419 nt, synthetic construct; identical to SEQ ID NO: 3034
  modified_base 1..5419: mod_base = OTHER; note = Each t is m1f
  source 1..5419: mol_type = other RNA

SEQ ID NO: 4632 - RNA, 5419 nt, synthetic construct; identical to SEQ ID NO: 3035
  modified_base 1..5419: mod_base = OTHER; note = Each t is m1f
  source 1..5419: mol_type = other RNA

SEQ ID NO: 4633 - RNA, 5419 nt, synthetic construct; identical to SEQ ID NO: 3036
  modified_base 1..5419: mod_base = OTHER; note = Each t is m1f
  source 1..5419: mol_type = other RNA

SEQ ID NO: 4634 - RNA, 5419 nt, synthetic construct; identical to SEQ ID NO: 3037
  modified_base 1..5419: mod_base = OTHER; note = Each t is m1f
  source 1..5419: mol_type = other RNA

SEQ ID NO: 4635 - RNA, 5419 nt, synthetic construct; identical to SEQ ID NO: 3038
  modified_base 1..5419: mod_base = OTHER; note = Each t is m1f
  source 1..5419: mol_type = other RNA

SEQ ID NO: 4636 - RNA, 5419 nt, synthetic construct; identical to SEQ ID NO: 3039
  modified_base 1..5419: mod_base = OTHER; note = Each t is m1f
  source 1..5419: mol_type = other RNA

SEQ ID NO: 4637 - RNA, 5416 nt, synthetic construct; identical to SEQ ID NO: 3040
  modified_base 1..5416: mod_base = OTHER; note = Each t is m1f
  source 1..5416: mol_type = other RNA

SEQ ID NO: 4638 - RNA, 5419 nt, synthetic construct; identical to SEQ ID NO: 3041
  modified_base 1..5419: mod_base = OTHER; note = Each t is m1f
  source 1..5419: mol_type = other RNA

SEQ ID NO: 4639 - RNA, 5419 nt, synthetic construct; identical to SEQ ID NO: 3042
  modified_base 1..5419: mod_base = OTHER; note = Each t is m1f
  source 1..5419: mol_type = other RNA

SEQ ID NO: 4640 - RNA, 5419 nt, synthetic construct; identical to SEQ ID NO: 3043
  modified_base 1..5419: mod_base = OTHER; note = Each t is m1f
  source 1..5419: mol_type = other RNA

SEQ ID NO: 4641 - RNA, 5419 nt, synthetic construct; identical to SEQ ID NO: 3044
  modified_base 1..5419: mod_base = OTHER; note = Each t is m1f
  source 1..5419: mol_type = other RNA

SEQ ID NO: 4642 - RNA, 5419 nt, synthetic construct; identical to SEQ ID NO: 3045
  modified_base 1..5419: mod_base = OTHER; note = Each t is m1f
  source 1..5419: mol_type = other RNA

SEQ ID NO: 4643 - RNA, 5419 nt, synthetic construct; identical to SEQ ID NO: 3046
  modified_base 1..5419: mod_base = OTHER; note = Each t is m1f
  source 1..5419: mol_type = other RNA

SEQ ID NO: 4644 - RNA, 5419 nt, synthetic construct; identical to SEQ ID NO: 3047
  modified_base 1..5419: mod_base = OTHER; note = Each t is m1f
  source 1..5419: mol_type = other RNA

SEQ ID NO: 4645 - RNA, 5419 nt, synthetic construct; identical to SEQ ID NO: 3048
  modified_base 1..5419: mod_base = OTHER; note = Each t is m1f
  source 1..5419: mol_type = other RNA

SEQ ID NO: 4646 - RNA, 5419 nt, synthetic construct; identical to SEQ ID NO: 3049
  modified_base 1..5419: mod_base = OTHER; note = Each t is m1f
  source 1..5419: mol_type = other RNA

SEQ ID NO: 4647 - RNA, 5419 nt, synthetic construct; identical to SEQ ID NO: 3050
  modified_base 1..5419: mod_base = OTHER; note = Each t is m1f
  source 1..5419: mol_type = other RNA

SEQ ID NO: 4648 - RNA, 5419 nt, synthetic construct; identical to SEQ ID NO: 3051
  modified_base 1..5419: mod_base = OTHER; note = Each t is m1f
  source 1..5419: mol_type = other RNA

SEQ ID NO: 4649 - RNA, 5419 nt, synthetic construct; identical to SEQ ID NO: 3052
  modified_base 1..5419: mod_base = OTHER; note = Each t is m1f
  source 1..5419: mol_type = other RNA

SEQ ID NO: 4650 - RNA, 5419 nt, synthetic construct; identical to SEQ ID NO: 3053
  modified_base 1..5419: mod_base = OTHER; note = Each t is m1f
  source 1..5419: mol_type = other RNA

SEQ ID NO: 4651 - RNA, 5419 nt, synthetic construct; identical to SEQ ID NO: 3054
  modified_base 1..5419: mod_base = OTHER; note = Each t is m1f
  source 1..5419: mol_type = other RNA

SEQ ID NO: 4652 - RNA, 5419 nt, synthetic construct; identical to SEQ ID NO: 3055
  modified_base 1..5419: mod_base = OTHER; note = Each t is m1f
  source 1..5419: mol_type = other RNA

SEQ ID NO: 4653 - RNA, 5419 nt, synthetic construct; identical to SEQ ID NO: 3056
  modified_base 1..5419: mod_base = OTHER; note = Each t is m1f
  source 1..5419: mol_type = other RNA

SEQ ID NO: 4654 - RNA, 5419 nt, synthetic construct; identical to SEQ ID NO: 3057
  modified_base 1..5419: mod_base = OTHER; note = Each t is m1f
  source 1..5419: mol_type = other RNA

SEQ ID NO: 4655 - RNA, 5419 nt, synthetic construct; identical to SEQ ID NO: 3058
  modified_base 1..5419: mod_base = OTHER; note = Each t is m1f
  source 1..5419: mol_type = other RNA

SEQ ID NO: 4656 - RNA, 5419 nt, synthetic construct; identical to SEQ ID NO: 3059
  modified_base 1..5419: mod_base = OTHER; note = Each t is m1f
  source 1..5419: mol_type = other RNA

SEQ ID NO: 4657 - RNA, 5419 nt, synthetic construct; identical to SEQ ID NO: 3060
  modified_base 1..5419: mod_base = OTHER; note = Each t is m1f
  source 1..5419: mol_type = other RNA

SEQ ID NO: 4658 - RNA, 5419 nt, synthetic construct; identical to SEQ ID NO: 3061
  modified_base 1..5419: mod_base = OTHER; note = Each t is m1f
  source 1..5419: mol_type = other RNA

SEQ ID NO: 4659 - RNA, 5419 nt, synthetic construct; identical to SEQ ID NO: 3062
  modified_base 1..5419: mod_base = OTHER; note = Each t is m1f
  source 1..5419: mol_type = other RNA

SEQ ID NO: 4660 - RNA, 5419 nt, synthetic construct; identical to SEQ ID NO: 3063
  modified_base 1..5419: mod_base = OTHER; note = Each t is m1f
  source 1..5419: mol_type = other RNA

SEQ ID NO: 4661 - RNA, 5419 nt, synthetic construct; identical to SEQ ID NO: 3064
  modified_base 1..5419: mod_base = OTHER; note = Each t is m1f
  source 1..5419: mol_type = other RNA

SEQ ID NO: 4662 - RNA, 5419 nt, synthetic construct; identical to SEQ ID NO: 3065
  modified_base 1..5419: mod_base = OTHER; note = Each t is m1f
  source 1..5419: mol_type = other RNA

SEQ ID NO: 4663 - RNA, 5419 nt, synthetic construct; identical to SEQ ID NO: 3066
  modified_base 1..5419: mod_base = OTHER; note = Each t is m1f
  source 1..5419: mol_type = other RNA

SEQ ID NO: 4664 - RNA, 5419 nt, synthetic construct; identical to SEQ ID NO: 3067
  modified_base 1..5419: mod_base = OTHER; note = Each t is m1f
  source 1..5419: mol_type = other RNA

SEQ ID NO: 4665 - RNA, 5419 nt, synthetic construct; identical to SEQ ID NO: 3068
  modified_base 1..5419: mod_base = OTHER; note = Each t is m1f
  source 1..5419: mol_type = other RNA

SEQ ID NO: 4666 - RNA, 5419 nt, synthetic construct; identical to SEQ ID NO: 3069
  modified_base 1..5419: mod_base = OTHER; note = Each t is m1f
  source 1..5419: mol_type = other RNA

SEQ ID NO: 4667 - RNA, 5419 nt, synthetic construct; identical to SEQ ID NO: 3070
  modified_base 1..5419: mod_base = OTHER; note = Each t is m1f
  source 1..5419: mol_type = other RNA

SEQ ID NO: 4668 - RNA, 5419 nt, synthetic construct; identical to SEQ ID NO: 3071
  modified_base 1..5419: mod_base = OTHER; note = Each t is m1f
  source 1..5419: mol_type = other RNA

SEQ ID NO: 4669 - RNA, 5419 nt, synthetic construct; identical to SEQ ID NO: 3072
  modified_base 1..5419: mod_base = OTHER; note = Each t is m1f
  source 1..5419: mol_type = other RNA

SEQ ID NO: 4670 - RNA, 5419 nt, synthetic construct; identical to SEQ ID NO: 3073
  modified_base 1..5419: mod_base = OTHER; note = Each t is m1f
  source 1..5419: mol_type = other RNA

SEQ ID NO: 4671 - RNA, 5419 nt, synthetic construct; identical to SEQ ID NO: 3074
  modified_base 1..5419: mod_base = OTHER; note = Each t is m1f
  source 1..5419: mol_type = other RNA

SEQ ID NO: 4672 - RNA, 5419 nt, synthetic construct; identical to SEQ ID NO: 3075
  modified_base 1..5419: mod_base = OTHER; note = Each t is m1f
  source 1..5419: mol_type = other RNA

SEQ ID NO: 4673 - RNA, 5419 nt, synthetic construct; identical to SEQ ID NO: 3076
  modified_base 1..5419: mod_base = OTHER; note = Each t is m1f
  source 1..5419: mol_type = other RNA

SEQ ID NO: 4674 - RNA, 5419 nt, synthetic construct; identical to SEQ ID NO: 3077
  modified_base 1..5419: mod_base = OTHER; note = Each t is m1f
  source 1..5419: mol_type = other RNA

SEQ ID NO: 4675 - RNA, 5419 nt, synthetic construct; identical to SEQ ID NO: 3078
  modified_base 1..5419: mod_base = OTHER; note = Each t is m1f
  source 1..5419: mol_type = other RNA

SEQ ID NO: 4676 - RNA, 5419 nt, synthetic construct; identical to SEQ ID NO: 3079
  modified_base 1..5419: mod_base = OTHER; note = Each t is m1f
  source 1..5419: mol_type = other RNA

SEQ ID NO: 4677 - RNA, 5419 nt, synthetic construct; identical to SEQ ID NO: 3080
  modified_base 1..5419: mod_base = OTHER; note = Each t is m1f
  source 1..5419: mol_type = other RNA

SEQ ID NO: 4678 - RNA, 5419 nt, synthetic construct; identical to SEQ ID NO: 3081
  modified_base 1..5419: mod_base = OTHER; note = Each t is m1f
  source 1..5419: mol_type = other RNA

SEQ ID NO: 4679 - RNA, 5419 nt, synthetic construct; identical to SEQ ID NO: 3082
  modified_base 1..5419: mod_base = OTHER; note = Each t is m1f
  source 1..5419: mol_type = other RNA

SEQ ID NO: 4680 - RNA, 5419 nt, synthetic construct; identical to SEQ ID NO: 3083
  modified_base 1..5419: mod_base = OTHER; note = Each t is m1f
  source 1..5419: mol_type = other RNA

SEQ ID NO: 4681 - RNA, 5419 nt, synthetic construct; identical to SEQ ID NO: 3084
  modified_base 1..5419: mod_base = OTHER; note = Each t is m1f
  source 1..5419: mol_type = other RNA

SEQ ID NO: 4682 - RNA, 5419 nt, synthetic construct; identical to SEQ ID NO: 3085
  modified_base 1..5419: mod_base = OTHER; note = Each t is m1f
  source 1..5419: mol_type = other RNA

SEQ ID NO: 4683 - RNA, 5419 nt, synthetic construct; identical to SEQ ID NO: 3086
  modified_base 1..5419: mod_base = OTHER; note = Each t is m1f
  source 1..5419: mol_type = other RNA

SEQ ID NO: 4684 - RNA, 5419 nt, synthetic construct; identical to SEQ ID NO: 3087
  modified_base 1..5419: mod_base = OTHER; note = Each t is m1f
  source 1..5419: mol_type = other RNA

SEQ ID NO: 4685 - RNA, 5419 nt, synthetic construct; identical to SEQ ID NO: 3088
  modified_base 1..5419: mod_base = OTHER; note = Each t is m1f
  source 1..5419: mol_type = other RNA

SEQ ID NO: 4686 - RNA, 5419 nt, synthetic construct; identical to SEQ ID NO: 3089
  modified_base 1..5419: mod_base = OTHER; note = Each t is m1f
  source 1..5419: mol_type = other RNA

SEQ ID NO: 4687 - RNA, 5419 nt, synthetic construct; identical to SEQ ID NO: 3090
  modified_base 1..5419: mod_base = OTHER; note = Each t is m1f
  source 1..5419: mol_type = other RNA

SEQ ID NO: 4688 - RNA, 5419 nt, synthetic construct; identical to SEQ ID NO: 3091
  modified_base 1..5419: mod_base = OTHER; note = Each t is m1f
  source 1..5419: mol_type = other RNA

SEQ ID NO: 4689 - RNA, 5419 nt, synthetic construct; identical to SEQ ID NO: 3092
  modified_base 1..5419: mod_base = OTHER; note = Each t is m1f
  source 1..5419: mol_type = other RNA

SEQ ID NO: 4690 - RNA, 5419 nt, synthetic construct; identical to SEQ ID NO: 3093
  modified_base 1..5419: mod_base = OTHER; note = Each t is m1f
  source 1..5419: mol_type = other RNA

SEQ ID NO: 4691 - RNA, 5419 nt, synthetic construct; identical to SEQ ID NO: 3094
  modified_base 1..5419: mod_base = OTHER; note = Each t is m1f
  source 1..5419: mol_type = other RNA

SEQ ID NO: 4692 - RNA, 5419 nt, synthetic construct; identical to SEQ ID NO: 3095
  modified_base 1..5419: mod_base = OTHER; note = Each t is m1f
  source 1..5419: mol_type = other RNA

SEQ ID NO: 4693 - RNA, 5419 nt, synthetic construct; identical to SEQ ID NO: 3096
  modified_base 1..5419: mod_base = OTHER; note = Each t is m1f
  source 1..5419: mol_type = other RNA

SEQ ID NO: 4694 - RNA, 5419 nt, synthetic construct; identical to SEQ ID NO: 3097
  modified_base 1..5419: mod_base = OTHER; note = Each t is m1f
  source 1..5419: mol_type = other RNA

SEQ ID NO: 4695 - RNA, 5419 nt, synthetic construct; identical to SEQ ID NO: 3098
  modified_base 1..5419: mod_base = OTHER; note = Each t is m1f
  source 1..5419: mol_type = other RNA

SEQ ID NO: 4696 - RNA, 5419 nt, synthetic construct; identical to SEQ ID NO: 3099
  modified_base 1..5419: mod_base = OTHER; note = Each t is m1f
  source 1..5419: mol_type = other RNA

SEQ ID NO: 4697 - RNA, 5419 nt, synthetic construct; identical to SEQ ID NO: 3100
  modified_base 1..5419: mod_base = OTHER; note = Each t is m1f
  source 1..5419: mol_type = other RNA

SEQ ID NO: 4698 - RNA, 5419 nt, synthetic construct; identical to SEQ ID NO: 3101
  modified_base 1..5419: mod_base = OTHER; note = Each t is m1f
  source 1..5419: mol_type = other RNA

SEQ ID NO: 4699 - RNA, 5419 nt, synthetic construct; identical to SEQ ID NO: 3102
  modified_base 1..5419: mod_base = OTHER; note = Each t is m1f
  source 1..5419: mol_type = other RNA

SEQ ID NO: 4700 - RNA, 5419 nt, synthetic construct; identical to SEQ ID NO: 3103
  modified_base 1..5419: mod_base = OTHER; note = Each t is m1f
  source 1..5419: mol_type = other RNA

SEQ ID NO: 4701 - RNA, 5419 nt, synthetic construct; identical to SEQ ID NO: 3104
  modified_base 1..5419: mod_base = OTHER; note = Each t is m1f
  source 1..5419: mol_type = other RNA

SEQ ID NO: 4702 - RNA, 5419 nt, synthetic construct; identical to SEQ ID NO: 3105
  modified_base 1..5419: mod_base = OTHER; note = Each t is m1f
  source 1..5419: mol_type = other RNA

SEQ ID NO: 4703 - RNA, 5419 nt, synthetic construct; identical to SEQ ID NO: 3106
  modified_base 1..5419: mod_base = OTHER; note = Each t is m1f
  source 1..5419: mol_type = other RNA

SEQ ID NO: 4704 - RNA, 5419 nt, synthetic construct; identical to SEQ ID NO: 3107
  modified_base 1..5419: mod_base = OTHER; note = Each t is m1f
  source 1..5419: mol_type = other RNA

SEQ ID NO: 4705 - RNA, 5419 nt, synthetic construct; identical to SEQ ID NO: 3108
  modified_base 1..5419: mod_base = OTHER; note = Each t is m1f
  source 1..5419: mol_type = other RNA

SEQ ID NO: 4706 - RNA, 5452 nt, synthetic construct; identical to SEQ ID NO: 3109
  modified_base 1..5419: mod_base = OTHER; note = Each t is m1f
  source 1..5452: mol_type = other RNA

SEQ ID NO: 4707 - RNA, 5419 nt, synthetic construct; identical to SEQ ID NO: 3110
  modified_base 1..5419: mod_base = OTHER; note = Each t is m1f
  source 1..5419: mol_type = other RNA

SEQ ID NO: 4708 - RNA, 5419 nt, synthetic construct; identical to SEQ ID NO: 3111
  modified_base 1..5419: mod_base = OTHER; note = Each t is m1f
  source 1..5419: mol_type = other RNA

SEQ ID NO: 4709 - RNA, 5419 nt, synthetic construct; identical to SEQ ID NO: 3112
  modified_base 1..5419: mod_base = OTHER; note = Each t is m1f
  source 1..5419: mol_type = other RNA

SEQ ID NO: 4710 - RNA, 5419 nt, synthetic construct; identical to SEQ ID NO: 3113
  modified_base 1..5419: mod_base = OTHER; note = Each t is m1f
  source 1..5419: mol_type = other RNA

SEQ ID NO: 4711 - RNA, 5419 nt, synthetic construct; identical to SEQ ID NO: 3114
  modified_base 1..5419: mod_base = OTHER; note = Each t is m1f
  source 1..5419: mol_type = other RNA

SEQ ID NO: 4712 - RNA, 5419 nt, synthetic construct; identical to SEQ ID NO: 3115
  modified_base 1..5419: mod_base = OTHER; note = Each t is m1f
  source 1..5419: mol_type = other RNA

SEQ ID NO: 4713 - RNA, 5419 nt, synthetic construct; identical to SEQ ID NO: 3116
  modified_base 1..5419: mod_base = OTHER; note = Each t is m1f
  source 1..5419: mol_type = other RNA

SEQ ID NO: 4714 - RNA, 5419 nt, synthetic construct; identical to SEQ ID NO: 3117
  modified_base 1..5419: mod_base = OTHER; note = Each t is m1f
  source 1..5419: mol_type = other RNA

SEQ ID NO: 4715 - RNA, 5419 nt, synthetic construct; identical to SEQ ID NO: 3118
  modified_base 1..5419: mod_base = OTHER; note = Each t is m1f
  source 1..5419: mol_type = other RNA

SEQ ID NO: 4716 - RNA, 5419 nt, synthetic construct; identical to SEQ ID NO: 3119
  modified_base 1..5419: mod_base = OTHER; note = Each t is m1f
  source 1..5419: mol_type = other RNA

SEQ ID NO: 4717 - RNA, 5419 nt, synthetic construct; identical to SEQ ID NO: 3120
  modified_base 1..5419: mod_base = OTHER; note = Each t is m1f
  source 1..5419: mol_type = other RNA

SEQ ID NO: 4718 - RNA, 5419 nt, synthetic construct; identical to SEQ ID NO: 3121
  modified_base 1..5419: mod_base = OTHER; note = Each t is m1f
  source 1..5419: mol_type = other RNA

SEQ ID NO: 4719 - RNA, 5419 nt, synthetic construct; identical to SEQ ID NO: 3122
  modified_base 1..5419: mod_base = OTHER; note = Each t is m1f
  source 1..5419: mol_type = other RNA

SEQ ID NO: 4720 - RNA, 5419 nt, synthetic construct; identical to SEQ ID NO: 3123
  modified_base 1..5419: mod_base = OTHER; note = Each t is m1f
  source 1..5419: mol_type = other RNA

SEQ ID NO: 4721 - RNA, 5419 nt, synthetic construct; identical to SEQ ID NO: 3124
  modified_base 1..5419: mod_base = OTHER; note = Each t is m1f
  source 1..5419: mol_type = other RNA

SEQ ID NO: 4722 - RNA, 5419 nt, synthetic construct; identical to SEQ ID NO: 3125
  modified_base 1..5419: mod_base = OTHER; note = Each t is m1f
  source 1..5419: mol_type = other RNA

SEQ ID NO: 4723 - RNA, 5419 nt, synthetic construct; identical to SEQ ID NO: 3126
  modified_base 1..5419: mod_base = OTHER; note = Each t is m1f
  source 1..5419: mol_type = other RNA

SEQ ID NO: 4724 - RNA, 5419 nt, synthetic construct; identical to SEQ ID NO: 3127
  modified_base 1..5419: mod_base = OTHER; note = Each t is m1f
  source 1..5419: mol_type = other RNA

SEQ ID NO: 4725 - RNA, 5419 nt, synthetic construct; identical to SEQ ID NO: 3128
  modified_base 1..5419: mod_base = OTHER; note = Each t is m1f
  source 1..5419: mol_type = other RNA

SEQ ID NO: 4726 - RNA, 5419 nt, synthetic construct; identical to SEQ ID NO: 3129
  modified_base 1..5419: mod_base = OTHER; note = Each t is m1f
  source 1..5419: mol_type = other RNA

SEQ ID NO: 4727 - RNA, 5419 nt, synthetic construct; identical to SEQ ID NO: 3130
  modified_base 1..5419: mod_base = OTHER; note = Each t is m1f
  source 1..5419: mol_type = other RNA

SEQ ID NO: 4728 - RNA, 5419 nt, synthetic construct; identical to SEQ ID NO: 3131
  modified_base 1..5419: mod_base = OTHER; note = Each t is m1f
  source 1..5419: mol_type = other RNA

SEQ ID NO: 4729 - RNA, 5419 nt, synthetic construct; identical to SEQ ID NO: 3132
  modified_base 1..5419: mod_base = OTHER; note = Each t is m1f
  source 1..5419: mol_type = other RNA

SEQ ID NO: 4730 - RNA, 5419 nt, synthetic construct; identical to SEQ ID NO: 3133
  modified_base 1..5419: mod_base = OTHER; note = Each t is m1f
  source 1..5419: mol_type = other RNA

SEQ ID NO: 4731 - RNA, 5419 nt, synthetic construct; identical to SEQ ID NO: 3134
  modified_base 1..5419: mod_base = OTHER; note = Each t is m1f
  source 1..5419: mol_type = other RNA

SEQ ID NO: 4732 - RNA, 5419 nt, synthetic construct; identical to SEQ ID NO: 3135
  modified_base 1..5419: mod_base = OTHER; note = Each t is m1f
  source 1..5419: mol_type = other RNA

SEQ ID NO: 4733 - RNA, 5419 nt, synthetic construct; identical to SEQ ID NO: 3136
  modified_base 1..5419: mod_base = OTHER; note = Each t is m1f
  source 1..5419: mol_type = other RNA

SEQ ID NO: 4734 - RNA, 5419 nt, synthetic construct; identical to SEQ ID NO: 3137
  modified_base 1..5419: mod_base = OTHER; note = Each t is m1f
  source 1..5419: mol_type = other RNA

SEQ ID NO: 4735 - RNA, 5419 nt, synthetic construct; identical to SEQ ID NO: 3138
  modified_base 1..5419: mod_base = OTHER; note = Each t is m1f
  source 1..5419: mol_type = other RNA

SEQ ID NO: 4736 - RNA, 5419 nt, synthetic construct; identical to SEQ ID NO: 3139
  modified_base 1..5419: mod_base = OTHER; note = Each t is m1f
  source 1..5419: mol_type = other RNA

SEQ ID NO: 4737 - RNA, 5419 nt, synthetic construct; identical to SEQ ID NO: 3140
  modified_base 1..5419: mod_base = OTHER; note = Each t is m1f
  source 1..5419: mol_type = other RNA

SEQ ID NO: 4738 - RNA, 5419 nt, synthetic construct; identical to SEQ ID NO: 3141
  modified_base 1..5419: mod_base = OTHER; note = Each t is m1f
  source 1..5419: mol_type = other RNA

SEQ ID NO: 4739 - RNA, 5419 nt, synthetic construct; identical to SEQ ID NO: 3142
  modified_base 1..5419: mod_base = OTHER; note = Each t is m1f
  source 1..5419: mol_type = other RNA

SEQ ID NO: 4740 - RNA, 5419 nt, synthetic construct; identical to SEQ ID NO: 3143
  modified_base 1..5419: mod_base = OTHER; note = Each t is m1f
  source 1..5419: mol_type = other RNA

SEQ ID NO: 4741 - RNA, 5419 nt, synthetic construct; identical to SEQ ID NO: 3144
  modified_base 1..5419: mod_base = OTHER; note = Each t is m1f
  source 1..5419: mol_type = other RNA

SEQ ID NO: 4742 - RNA, 5419 nt, synthetic construct; identical to SEQ ID NO: 3145
  modified_base 1..5419: mod_base = OTHER; note = Each t is m1f
  source 1..5419: mol_type = other RNA

SEQ ID NO: 4743 - RNA, 5419 nt, synthetic construct; identical to SEQ ID NO: 3146
  modified_base 1..5419: mod_base = OTHER; note = Each t is m1f
  source 1..5419: mol_type = other RNA

SEQ ID NO: 4744 - RNA, 5419 nt, synthetic construct; identical to SEQ ID NO: 3147
  modified_base 1..5419: mod_base = OTHER; note = Each t is m1f
  source 1..5419: mol_type = other RNA

SEQ ID NO: 4745 - RNA, 5419 nt, synthetic construct; identical to SEQ ID NO: 3148
  modified_base 1..5419: mod_base = OTHER; note = Each t is m1f
  source 1..5419: mol_type = other RNA

SEQ ID NO: 4746 - RNA, 5419 nt, synthetic construct; identical to SEQ ID NO: 3149
  modified_base 1..5419: mod_base = OTHER; note = Each t is m1f
  source 1..5419: mol_type = other RNA

SEQ ID NO: 4747 - RNA, 5419 nt, synthetic construct; identical to SEQ ID NO: 3150
  modified_base 1..5419: mod_base = OTHER; note = Each t is m1f
  source 1..5419: mol_type = other RNA

SEQ ID NO: 4748 - RNA, 5419 nt, synthetic construct; identical to SEQ ID NO: 3151
  modified_base 1..5419: mod_base = OTHER; note = Each t is m1f
  source 1..5419: mol_type = other RNA

SEQ ID NO: 4749 - RNA, 5419 nt, synthetic construct; identical to SEQ ID NO: 3152
  modified_base 1..5419: mod_base = OTHER; note = Each t is m1f
  source 1..5419: mol_type = other RNA

SEQ ID NO: 4750 - RNA, 5419 nt, synthetic construct; identical to SEQ ID NO: 3153
  modified_base 1..5419: mod_base = OTHER; note = Each t is m1f
  source 1..5419: mol_type = other RNA

SEQ ID NO: 4751 - RNA, 5419 nt, synthetic construct; identical to SEQ ID NO: 3154
  modified_base 1..5419: mod_base = OTHER; note = Each t is m1f
  source 1..5419: mol_type = other RNA

SEQ ID NO: 4752 - RNA, 5419 nt, synthetic construct; identical to SEQ ID NO: 3155
  modified_base 1..5419: mod_base = OTHER; note = Each t is m1f
  source 1..5419: mol_type = other RNA

SEQ ID NO: 4753 - RNA, 5419 nt, synthetic construct; identical to SEQ ID NO: 3156
  modified_base 1..5419: mod_base = OTHER; note = Each t is m1f
  source 1..5419: mol_type = other RNA

SEQ ID NO: 4754 - RNA, 5419 nt, synthetic construct; identical to SEQ ID NO: 3157
  modified_base 1..5419: mod_base = OTHER; note = Each t is m1f
  source 1..5419: mol_type = other RNA

SEQ ID NO: 4755 - RNA, 5419 nt, synthetic construct; identical to SEQ ID NO: 3158
  modified_base 1..5419: mod_base = OTHER; note = Each t is m1f
  source 1..5419: mol_type = other RNA

SEQ ID NO: 4756 - RNA, 5419 nt, synthetic construct; identical to SEQ ID NO: 3159
  modified_base 1..5419: mod_base = OTHER; note = Each t is m1f
  source 1..5419: mol_type = other RNA

SEQ ID NO: 4757 - RNA, 5419 nt, synthetic construct; identical to SEQ ID NO: 3160
  modified_base 1..5419: mod_base = OTHER; note = Each t is m1f
  source 1..5419: mol_type = other RNA

SEQ ID NO: 4758 - RNA, 5419 nt, synthetic construct; identical to SEQ ID NO: 3161
  modified_base 1..5419: mod_base = OTHER; note = Each t is m1f
  source 1..5419: mol_type = other RNA

SEQ ID NO: 4759 - RNA, 5419 nt, synthetic construct; identical to SEQ ID NO: 3162
  modified_base 1..5419: mod_base = OTHER; note = Each t is m1f
  source 1..5419: mol_type = other RNA

SEQ ID NO: 4760 - RNA, 5419 nt, synthetic construct; identical to SEQ ID NO: 3163
  modified_base 1..5419: mod_base = OTHER; note = Each t is m1f
  source 1..5419: mol_type = other RNA

SEQ ID NO: 4761 - RNA, 5419 nt, synthetic construct; identical to SEQ ID NO: 3164
  modified_base 1..5419: mod_base = OTHER; note = Each t is m1f
  source 1..5419: mol_type = other RNA

SEQ ID NO: 4762 - RNA, 5419 nt, synthetic construct; identical to SEQ ID NO: 3165
  modified_base 1..5419: mod_base = OTHER; note = Each t is m1f
  source 1..5419: mol_type = other RNA

SEQ ID NO: 4763 - RNA, 5419 nt, synthetic construct; identical to SEQ ID NO: 3166
  modified_base 1..5419: mod_base = OTHER; note = Each t is m1f
  source 1..5419: mol_type = other RNA

SEQ ID NO: 4764 - RNA, 5419 nt, synthetic construct; identical to SEQ ID NO: 3167
  modified_base 1..5419: mod_base = OTHER; note = Each t is m1f
  source 1..5419: mol_type = other RNA

SEQ ID NO: 4765 - RNA, 5419 nt, synthetic construct; identical to SEQ ID NO: 3168
  modified_base 1..5419: mod_base = OTHER; note = Each t is m1f
  source 1..5419: mol_type = other RNA

SEQ ID NO: 4766 - RNA, 5419 nt, synthetic construct; identical to SEQ ID NO: 3169
  modified_base 1..5419: mod_base = OTHER; note = Each t is m1f
  source 1..5419: mol_type = other RNA

SEQ ID NO: 4767 - RNA, 5419 nt, synthetic construct; identical to SEQ ID NO: 3170
  modified_base 1..5419: mod_base = OTHER; note = Each t is m1f
  source 1..5419: mol_type = other RNA

SEQ ID NO: 4768 - RNA, 5419 nt, synthetic construct; identical to SEQ ID NO: 3171
  modified_base 1..5419: mod_base = OTHER; note = Each t is m1f
  source 1..5419: mol_type = other RNA

SEQ ID NO: 4769 - RNA, 5419 nt, synthetic construct; identical to SEQ ID NO: 3172
  modified_base 1..5419: mod_base = OTHER; note = Each t is m1f
  source 1..5419: mol_type = other RNA

SEQ ID NO: 4770 - RNA, 5419 nt, synthetic construct; identical to SEQ ID NO: 3173
  modified_base 1..5419: mod_base = OTHER; note = Each t is m1f
  source 1..5419: mol_type = other RNA

SEQ ID NO: 4771 - RNA, 5419 nt, synthetic construct; identical to SEQ ID NO: 3174
  modified_base 1..5419: mod_base = OTHER; note = Each t is m1f
  source 1..5419: mol_type = other RNA

SEQ ID NO: 4772 - RNA, 5419 nt, synthetic construct; identical to SEQ ID NO: 3175
  modified_base 1..5419: mod_base = OTHER; note = Each t is m1f
  source 1..5419: mol_type = other RNA

SEQ ID NO: 4773 - RNA, 5419 nt, synthetic construct; identical to SEQ ID NO: 3176
  modified_base 1..5419: mod_base = OTHER; note = Each t is m1f
  source 1..5419: mol_type = other RNA

SEQ ID NO: 4774 - RNA, 5419 nt, synthetic construct; identical to SEQ ID NO: 3177
  modified_base 1..5419: mod_base = OTHER; note = Each t is m1f
  source 1..5419: mol_type = other RNA

SEQ ID NO: 4775 - RNA, 5419 nt, synthetic construct; identical to SEQ ID NO: 3178
  modified_base 1..5419: mod_base = OTHER; note = Each t is m1f
  source 1..5419: mol_type = other RNA

SEQ ID NO: 4776 - RNA, 5428 nt, synthetic construct; identical to SEQ ID NO: 3179
  modified_base 1..5419: mod_base = OTHER; note = Each t is m1f
  source 1..5428: mol_type = other RNA

SEQ ID NO: 4777 - RNA, 5428 nt, synthetic construct; identical to SEQ ID NO: 3180
  modified_base 1..5419: mod_base = OTHER; note = Each t is m1f
  source 1..5428: mol_type = other RNA

SEQ ID NO: 4778 - RNA, 5419 nt, synthetic construct; identical to SEQ ID NO: 3181
  modified_base 1..5419: mod_base = OTHER; note = Each t is m1f
  source 1..5419: mol_type = other RNA

SEQ ID NO: 4779 - RNA, 5419 nt, synthetic construct; identical to SEQ ID NO: 3182
  modified_base 1..5419: mod_base = OTHER; note = Each t is m1f
  source 1..5419: mol_type = other RNA

SEQ ID NO: 4780 - RNA, 5419 nt, synthetic construct; identical to SEQ ID NO: 3183
  modified_base 1..5419: mod_base = OTHER; note = Each t is m1f
  source 1..5419: mol_type = other RNA

SEQ ID NO: 4781 - RNA, 5419 nt, synthetic construct; identical to SEQ ID NO: 3184
  modified_base 1..5419: mod_base = OTHER; note = Each t is m1f
  source 1..5419: mol_type = other RNA

SEQ ID NO: 4782 - RNA, 5419 nt, synthetic construct; identical to SEQ ID NO: 3185
  modified_base 1..5419: mod_base = OTHER; note = Each t is m1f
  source 1..5419: mol_type = other RNA

SEQ ID NO: 4783 - RNA, 5419 nt, synthetic construct; identical to SEQ ID NO: 3186
  modified_base 1..5419: mod_base = OTHER; note = Each t is m1f
  source 1..5419: mol_type = other RNA

SEQ ID NO: 4784 - RNA, 5419 nt, synthetic construct; identical to SEQ ID NO: 3187
  modified_base 1..5419: mod_base = OTHER; note = Each t is m1f
  source 1..5419: mol_type = other RNA

SEQ ID NO: 4785 - RNA, 5419 nt, synthetic construct; identical to SEQ ID NO: 3188
  modified_base 1..5419: mod_base = OTHER; note = Each t is m1f
  source 1..5419: mol_type = other RNA

SEQ ID NO: 4786 - RNA, 5419 nt, synthetic construct; identical to SEQ ID NO: 3189
  modified_base 1..5419: mod_base = OTHER; note = Each t is m1f
  source 1..5419: mol_type = other RNA

SEQ ID NO: 4787 - RNA, 5419 nt, synthetic construct; identical to SEQ ID NO: 3190
  modified_base 1..5419: mod_base = OTHER; note = Each t is m1f
  source 1..5419: mol_type = other RNA

SEQ ID NO: 4788 - RNA, 5419 nt, synthetic construct; identical to SEQ ID NO: 3191
  modified_base 1..5419: mod_base = OTHER; note = Each t is m1f
  source 1..5419: mol_type = other RNA

SEQ ID NO: 4789 - RNA, 5419 nt, synthetic construct; identical to SEQ ID NO: 3192
  modified_base 1..5419: mod_base = OTHER; note = Each t is m1f
  source 1..5419: mol_type = other RNA

SEQ ID NO: 4790 - RNA, 5419 nt, synthetic construct; identical to SEQ ID NO: 3193
  modified_base 1..5419: mod_base = OTHER; note = Each t is m1f
  source 1..5419: mol_type = other RNA

SEQ ID NO: 4791 - RNA, 5419 nt, synthetic construct; identical to SEQ ID NO: 3194
  modified_base 1..5419: mod_base = OTHER; note = Each t is m1f
  source 1..5419: mol_type = other RNA

SEQ ID NO: 4792 - RNA, 5419 nt, synthetic construct; identical to SEQ ID NO: 3195
  modified_base 1..5419: mod_base = OTHER; note = Each t is m1f
  source 1..5419: mol_type = other RNA

SEQ ID NO: 4793 - RNA, 5419 nt, synthetic construct; identical to SEQ ID NO: 3196
  modified_base 1..5419: mod_base = OTHER; note = Each t is m1f
  source 1..5419: mol_type = other RNA

SEQ ID NO: 4794 - RNA, 5419 nt, synthetic construct; identical to SEQ ID NO: 3197
  modified_base 1..5419: mod_base = OTHER; note = Each t is m1f
  source 1..5419: mol_type = other RNA

SEQ ID NO: 4795 - RNA, 5419 nt, synthetic construct; identical to SEQ ID NO: 3198
  modified_base 1..5419: mod_base = OTHER; note = Each t is m1f
  source 1..5419: mol_type = other RNA

SEQ ID NO: 4796 - RNA, 5419 nt, synthetic construct; identical to SEQ ID NO: 3199
  modified_base 1..5419: mod_base = OTHER; note = Each t is m1f
  source 1..5419: mol_type = other RNA

SEQ ID NO: 4797 - RNA, 5419 nt, synthetic construct; identical to SEQ ID NO: 3200
  modified_base 1..5419: mod_base = OTHER; note = Each t is m1f
  source 1..5419: mol_type = other RNA

SEQ ID NO: 4798 - RNA, 5419 nt, synthetic construct; identical to SEQ ID NO: 3201
  modified_base 1..5419: mod_base = OTHER; note = Each t is m1f
  source 1..5419: mol_type = other RNA

SEQ ID NO: 4799 - RNA, 5419 nt, synthetic construct; identical to SEQ ID NO: 3202
  modified_base 1..5419: mod_base = OTHER; note = Each t is m1f
  source 1..5419: mol_type = other RNA

SEQ ID NO: 4800 - RNA, 5419 nt, synthetic construct; identical to SEQ ID NO: 3203
  modified_base 1..5419: mod_base = OTHER; note = Each t is m1f
  source 1..5419: mol_type = other RNA

SEQ ID NO: 4801 - RNA, 5419 nt, synthetic construct; identical to SEQ ID NO: 3204
  modified_base 1..5419: mod_base = OTHER; note = Each t is m1f
  source 1..5419: mol_type = other RNA

SEQ ID NO: 4802 - RNA, 5419 nt, synthetic construct; identical to SEQ ID NO: 3205
  modified_base 1..5419: mod_base = OTHER; note = Each t is m1f
  source 1..5419: mol_type = other RNA

SEQ ID NO: 4803 - RNA, 5419 nt, synthetic construct; identical to SEQ ID NO: 3206
  modified_base 1..5419: mod_base = OTHER; note = Each t is m1f
  source 1..5419: mol_type = other RNA

SEQ ID NO: 4804 - RNA, 5419 nt, synthetic construct; identical to SEQ ID NO: 3207
  modified_base 1..5419: mod_base = OTHER; note = Each t is m1f
  source 1..5419: mol_type = other RNA

SEQ ID NO: 4805 - RNA, 5419 nt, synthetic construct; identical to SEQ ID NO: 3208
  modified_base 1..5419: mod_base = OTHER; note = Each t is m1f
  source 1..5419: mol_type = other RNA

SEQ ID NO: 4806 - RNA, 5419 nt, synthetic construct; identical to SEQ ID NO: 3209
  modified_base 1..5419: mod_base = OTHER; note = Each t is m1f
  source 1..5419: mol_type = other RNA

SEQ ID NO: 4807 - RNA, 5419 nt, synthetic construct; identical to SEQ ID NO: 3210
  modified_base 1..5419: mod_base = OTHER; note = Each t is m1f
  source 1..5419: mol_type = other RNA

SEQ ID NO: 4808 - RNA, 5419 nt, synthetic construct; identical to SEQ ID NO: 3211
  modified_base 1..5419: mod_base = OTHER; note = Each t is m1f
  source 1..5419: mol_type = other RNA

SEQ ID NO: 4809 - RNA, 5419 nt, synthetic construct; identical to SEQ ID NO: 3212
  modified_base 1..5419: mod_base = OTHER; note = Each t is m1f
  source 1..5419: mol_type = other RNA

SEQ ID NO: 4810 - RNA, 5419 nt, synthetic construct; identical to SEQ ID NO: 3213
  modified_base 1..5419: mod_base = OTHER; note = Each t is m1f
  source 1..5419: mol_type = other RNA

SEQ ID NO: 4811 - RNA, 5419 nt, synthetic construct; identical to SEQ ID NO: 3214
  modified_base 1..5419: mod_base = OTHER; note = Each t is m1f
  source 1..5419: mol_type = other RNA

SEQ ID NO: 4812 - RNA, 5419 nt, synthetic construct; identical to SEQ ID NO: 3215
  modified_base 1..5419: mod_base = OTHER; note = Each t is m1f
  source 1..5419: mol_type = other RNA

SEQ ID NO: 4813 - RNA, 5419 nt, synthetic construct; identical to SEQ ID NO: 3216
  modified_base 1..5419: mod_base = OTHER; note = Each t is m1f
  source 1..5419: mol_type = other RNA

SEQ ID NO: 4814 - RNA, 5419 nt, synthetic construct; identical to SEQ ID NO: 3217
  modified_base 1..5419: mod_base = OTHER; note = Each t is m1f
  source 1..5419: mol_type = other RNA

SEQ ID NO: 4815 - RNA, 5419 nt, synthetic construct; identical to SEQ ID NO: 3218
  modified_base 1..5419: mod_base = OTHER; note = Each t is m1f
  source 1..5419: mol_type = other RNA

SEQ ID NO: 4816 - RNA, 5419 nt, synthetic construct; identical to SEQ ID NO: 3219
  modified_base 1..5419: mod_base = OTHER; note = Each t is m1f
  source 1..5419: mol_type = other RNA

SEQ ID NO: 4817 - RNA, 5419 nt, synthetic construct; identical to SEQ ID NO: 3220
  modified_base 1..5419: mod_base = OTHER; note = Each t is m1f
  source 1..5419: mol_type = other RNA

SEQ ID NO: 4818 - RNA, 5419 nt, synthetic construct; identical to SEQ ID NO: 3221
  modified_base 1..5419: mod_base = OTHER; note = Each t is m1f
  source 1..5419: mol_type = other RNA

SEQ ID NO: 4819 - RNA, 5419 nt, synthetic construct; identical to SEQ ID NO: 3222
  modified_base 1..5419: mod_base = OTHER; note = Each t is m1f
  source 1..5419: mol_type = other RNA

SEQ ID NO: 4820 - RNA, 5419 nt, synthetic construct; identical to SEQ ID NO: 3223
  modified_base 1..5419: mod_base = OTHER; note = Each t is m1f
  source 1..5419: mol_type = other RNA

SEQ ID NO: 4821 - RNA, 5419 nt, synthetic construct; identical to SEQ ID NO: 3224
  modified_base 1..5419: mod_base = OTHER; note = Each t is m1f
  source 1..5419: mol_type = other RNA

SEQ ID NO: 4822 - RNA, 5419 nt, synthetic construct; identical to SEQ ID NO: 3225
  modified_base 1..5419: mod_base = OTHER; note = Each t is m1f
  source 1..5419: mol_type = other RNA

SEQ ID NO: 4823 - RNA, 5446 nt, synthetic construct; identical to SEQ ID NO: 3226
  modified_base 1..5419: mod_base = OTHER; note = Each t is m1f
  source 1..5446: mol_type = other RNA

SEQ ID NO: 4824 - RNA, 5419 nt, synthetic construct; identical to SEQ ID NO: 3227
  modified_base 1..5419: mod_base = OTHER; note = Each t is m1f
  source 1..5419: mol_type = other RNA

SEQ ID NO: 4825 - RNA, 5419 nt, synthetic construct; identical to SEQ ID NO: 3228
  modified_base 1..5419: mod_base = OTHER; note = Each t is m1f
  source 1..5419: mol_type = other RNA

SEQ ID NO: 4826 - RNA, 5419 nt, synthetic construct; identical to SEQ ID NO: 3229
  modified_base 1..5419: mod_base = OTHER; note = Each t is m1f
  source 1..5419: mol_type = other RNA

SEQ ID NO: 4827 - RNA, 5419 nt, synthetic construct; identical to SEQ ID NO: 3230
  modified_base 1..5419: mod_base = OTHER; note = Each t is m1f
  source 1..5419: mol_type = other RNA

SEQ ID NO: 4828 - RNA, 5419 nt, synthetic construct; identical to SEQ ID NO: 3231
  modified_base 1..5419: mod_base = OTHER; note = Each t is m1f
  source 1..5419: mol_type = other RNA

SEQ ID NO: 4829 - RNA, 5419 nt, synthetic construct; identical to SEQ ID NO: 3232
  modified_base 1..5419: mod_base = OTHER; note = Each t is m1f
  source 1..5419: mol_type = other RNA

SEQ ID NO: 4830 - RNA, 5419 nt, synthetic construct; identical to SEQ ID NO: 3233
  modified_base 1..5419: mod_base = OTHER; note = Each t is m1f
  source 1..5419: mol_type = other RNA

SEQ ID NO: 4831 - RNA, 5419 nt, synthetic construct; identical to SEQ ID NO: 3234
  modified_base 1..5419: mod_base = OTHER; note = Each t is m1f
  source 1..5419: mol_type = other RNA

SEQ ID NO: 4832 - RNA, 5419 nt, synthetic construct; identical to SEQ ID NO: 3235
  modified_base 1..5419: mod_base = OTHER; note = Each t is m1f
  source 1..5419: mol_type = other RNA

SEQ ID NO: 4833 - RNA, 5419 nt, synthetic construct; identical to SEQ ID NO: 3236
  modified_base 1..5419: mod_base = OTHER; note = Each t is m1f
  source 1..5419: mol_type = other RNA

SEQ ID NO: 4834 - RNA, 5419 nt, synthetic construct; identical to SEQ ID NO: 3237
  modified_base 1..5419: mod_base = OTHER; note = Each t is m1f
  source 1..5419: mol_type = other RNA

SEQ ID NO: 4835 - RNA, 5419 nt, synthetic construct; identical to SEQ ID NO: 3238
  modified_base 1..5419: mod_base = OTHER; note = Each t is m1f
  source 1..5419: mol_type = other RNA

SEQ ID NO: 4836 - RNA, 5419 nt, synthetic construct; identical to SEQ ID NO: 3239
  modified_base 1..5419: mod_base = OTHER; note = Each t is m1f
  source 1..5419: mol_type = other RNA

SEQ ID NO: 4837 - RNA, 5419 nt, synthetic construct; identical to SEQ ID NO: 3240
  modified_base 1..5419: mod_base = OTHER; note = Each t is m1f
  source 1..5419: mol_type = other RNA

SEQ ID NO: 4838 - RNA, 5419 nt, synthetic construct; identical to SEQ ID NO: 3241
  modified_base 1..5419: mod_base = OTHER; note = Each t is m1f
  source 1..5419: mol_type = other RNA

SEQ ID NO: 4839 - RNA, 5419 nt, synthetic construct; identical to SEQ ID NO: 3242
  modified_base 1..5419: mod_base = OTHER; note = Each t is m1f
  source 1..5419: mol_type = other RNA

SEQ ID NO: 4840 - RNA, 5419 nt, synthetic construct; identical to SEQ ID NO: 3243
  modified_base 1..5419: mod_base = OTHER; note = Each t is m1f
  source 1..5419: mol_type = other RNA

SEQ ID NO: 4841 - RNA, 5419 nt, synthetic construct; identical to SEQ ID NO: 3244
  modified_base 1..5419: mod_base = OTHER; note = Each t is m1f
  source 1..5419: mol_type = other RNA

SEQ ID NO: 4842 - RNA, 5419 nt, synthetic construct; identical to SEQ ID NO: 3245
  modified_base 1..5419: mod_base = OTHER; note = Each t is m1f
  source 1..5419: mol_type = other RNA

SEQ ID NO: 4843 - RNA, 5419 nt, synthetic construct; identical to SEQ ID NO: 3246
  modified_base 1..5419: mod_base = OTHER; note = Each t is m1f
  source 1..5419: mol_type = other RNA

SEQ ID NO: 4844 - RNA, 5419 nt, synthetic construct; identical to SEQ ID NO: 3247
  modified_base 1..5419: mod_base = OTHER; note = Each t is m1f
  source 1..5419: mol_type = other RNA

SEQ ID NO: 4845 - RNA, 5419 nt, synthetic construct; identical to SEQ ID NO: 3248
  modified_base 1..5419: mod_base = OTHER; note = Each t is m1f
  source 1..5419: mol_type = other RNA

SEQ ID NO: 4846 - RNA, 5419 nt, synthetic construct; identical to SEQ ID NO: 3249
  modified_base 1..5419: mod_base = OTHER; note = Each t is m1f
  source 1..5419: mol_type = other RNA

SEQ ID NO: 4847 - RNA, 5419 nt, synthetic construct; identical to SEQ ID NO: 3250
  modified_base 1..5419: mod_base = OTHER; note = Each t is m1f
  source 1..5419: mol_type = other RNA

SEQ ID NO: 4848 - RNA, 5419 nt, synthetic construct; identical to SEQ ID NO: 3251
  modified_base 1..5419: mod_base = OTHER; note = Each t is m1f
  source 1..5419: mol_type = other RNA

SEQ ID NO: 4849 - RNA, 5419 nt, synthetic construct; identical to SEQ ID NO: 3252
  modified_base 1..5419: mod_base = OTHER; note = Each t is m1f
  source 1..5419: mol_type = other RNA

SEQ ID NO: 4850 - RNA, 5455 nt, synthetic construct; identical to SEQ ID NO: 3253
  modified_base 1..5419: mod_base = OTHER; note = Each t is m1f
  source 1..5455: mol_type = other RNA

SEQ ID NO: 4851 - RNA, 5419 nt, synthetic construct; identical to SEQ ID NO: 3254
  modified_base 1..5419: mod_base = OTHER; note = Each t is m1f
  source 1..5419: mol_type = other RNA

SEQ ID NO: 4852 - RNA, 5419 nt, synthetic construct; identical to SEQ ID NO: 3255
  modified_base 1..5419: mod_base = OTHER; note = Each t is m1f
  source 1..5419: mol_type = other RNA

SEQ ID NO: 4853 - RNA, 5419 nt, synthetic construct; identical to SEQ ID NO: 3256
  modified_base 1..5419: mod_base = OTHER; note = Each t is m1f
  source 1..5419: mol_type = other RNA

SEQ ID NO: 4854 - RNA, 5419 nt, synthetic construct; identical to SEQ ID NO: 3257
  modified_base 1..5419: mod_base = OTHER; note = Each t is m1f
  source 1..5419: mol_type = other RNA

SEQ ID NO: 4855 - RNA, 5419 nt, synthetic construct; identical to SEQ ID NO: 3258
  modified_base 1..5419: mod_base = OTHER; note = Each t is m1f
  source 1..5419: mol_type = other RNA

SEQ ID NO: 4856 - RNA, 5419 nt, synthetic construct; identical to SEQ ID NO: 3259
  modified_base 1..5419: mod_base = OTHER; note = Each t is m1f
  source 1..5419: mol_type = other RNA

SEQ ID NO: 4857 - RNA, 5419 nt, synthetic construct; identical to SEQ ID NO: 3260
  modified_base 1..5419: mod_base = OTHER; note = Each t is m1f
  source 1..5419: mol_type = other RNA

SEQ ID NO: 4858 - RNA, 5419 nt, synthetic construct; identical to SEQ ID NO: 3261
  modified_base 1..5419: mod_base = OTHER; note = Each t is m1f
  source 1..5419: mol_type = other RNA

SEQ ID NO: 4859 - RNA, 5419 nt, synthetic construct; identical to SEQ ID NO: 3262
  modified_base 1..5419: mod_base = OTHER; note = Each t is m1f
  source 1..5419: mol_type = other RNA

SEQ ID NO: 4860 - RNA, 5419 nt, synthetic construct; identical to SEQ ID NO: 3263
  modified_base 1..5419: mod_base = OTHER; note = Each t is m1f
  source 1..5419: mol_type = other RNA

SEQ ID NO: 4861 - RNA, 5419 nt, synthetic construct; identical to SEQ ID NO: 3264
  modified_base 1..5419: mod_base = OTHER; note = Each t is m1f
  source 1..5419: mol_type = other RNA

SEQ ID NO: 4862 - RNA, 5419 nt, synthetic construct; identical to SEQ ID NO: 3265
  modified_base 1..5419: mod_base = OTHER; note = Each t is m1f
  source 1..5419: mol_type = other RNA

SEQ ID NO: 4863 - RNA, 5419 nt, synthetic construct; identical to SEQ ID NO: 3266
  modified_base 1..5419: mod_base = OTHER; note = Each t is m1f
  source 1..5419: mol_type = other RNA

SEQ ID NO: 4864 - RNA, 5419 nt, synthetic construct; identical to SEQ ID NO: 3267
  modified_base 1..5419: mod_base = OTHER; note = Each t is m1f
  source 1..5419: mol_type = other RNA

SEQ ID NO: 4865 - RNA, 5419 nt, synthetic construct; identical to SEQ ID NO: 3268
  modified_base 1..5419: mod_base = OTHER; note = Each t is m1f
  source 1..5419: mol_type = other RNA

SEQ ID NO: 4866 - RNA, 5419 nt, synthetic construct; identical to SEQ ID NO: 3269
  modified_base 1..5419: mod_base = OTHER; note = Each t is m1f
  source 1..5419: mol_type = other RNA

SEQ ID NO: 4867 - RNA, 5419 nt, synthetic construct; identical to SEQ ID NO: 3270
  modified_base 1..5419: mod_base = OTHER; note = Each t is m1f
  source 1..5419: mol_type = other RNA

SEQ ID NO: 4868 - RNA, 5419 nt, synthetic construct; identical to SEQ ID NO: 3271
  modified_base 1..5419: mod_base = OTHER; note = Each t is m1f
  source 1..5419: mol_type = other RNA

SEQ ID NO: 4869 - RNA, 5419 nt, synthetic construct; identical to SEQ ID NO: 3272
  modified_base 1..5419: mod_base = OTHER; note = Each t is m1f
  source 1..5419: mol_type = other RNA

SEQ ID NO: 4870 - RNA, 5419 nt, synthetic construct; identical to SEQ ID NO: 3273
  modified_base 1..5419: mod_base = OTHER; note = Each t is m1f
  source 1..5419: mol_type = other RNA

SEQ ID NO: 4871 - RNA, 5419 nt, synthetic construct; identical to SEQ ID NO: 3274
  modified_base 1..5419: mod_base = OTHER; note = Each t is m1f
  source 1..5419: mol_type = other RNA

SEQ ID NO: 4872 - RNA, 5419 nt, synthetic construct; identical to SEQ ID NO: 3275
  modified_base 1..5419: mod_base = OTHER; note = Each t is m1f
  source 1..5419: mol_type = other RNA

SEQ ID NO: 4873 - RNA, 5419 nt, synthetic construct; identical to SEQ ID NO: 3276
  modified_base 1..5419: mod_base = OTHER; note = Each t is m1f
  source 1..5419: mol_type = other RNA

SEQ ID NO: 4874 - RNA, 5419 nt, synthetic construct; identical to SEQ ID NO: 3277
  modified_base 1..5419: mod_base = OTHER; note = Each t is m1f
  source 1..5419: mol_type = other RNA

SEQ ID NO: 4875 - RNA, 5419 nt, synthetic construct; identical to SEQ ID NO: 3278
  modified_base 1..5419: mod_base = OTHER; note = Each t is m1f
  source 1..5419: mol_type = other RNA

SEQ ID NO: 4876 - RNA, 5419 nt, synthetic construct; identical to SEQ ID NO: 3279
  modified_base 1..5419: mod_base = OTHER; note = Each t is m1f
  source 1..5419: mol_type = other RNA

SEQ ID NO: 4877 - RNA, 5419 nt, synthetic construct; identical to SEQ ID NO: 3280
  modified_base 1..5419: mod_base = OTHER; note = Each t is m1f
  source 1..5419: mol_type = other RNA

SEQ ID NO: 4878 - RNA, 5419 nt, synthetic construct; identical to SEQ ID NO: 3281
  modified_base 1..5419: mod_base = OTHER; note = Each t is m1f
  source 1..5419: mol_type = other RNA

SEQ ID NO: 4879 - RNA, 5419 nt, synthetic construct; identical to SEQ ID NO: 3282
  modified_base 1..5419: mod_base = OTHER; note = Each t is m1f
  source 1..5419: mol_type = other RNA

SEQ ID NO: 4880 - RNA, 5419 nt, synthetic construct; identical to SEQ ID NO: 3283
  modified_base 1..5419: mod_base = OTHER; note = Each t is m1f
  source 1..5419: mol_type = other RNA

SEQ ID NO: 4881 - RNA, 5419 nt, synthetic construct; identical to SEQ ID NO: 3284
  modified_base 1..5419: mod_base = OTHER; note = Each t is m1f
  source 1..5419: mol_type = other RNA

SEQ ID NO: 4882 - RNA, 5419 nt, synthetic construct; identical to SEQ ID NO: 3285
  modified_base 1..5419: mod_base = OTHER; note = Each t is m1f
  source 1..5419: mol_type = other RNA

SEQ ID NO: 4883 - RNA, 5419 nt, synthetic construct; identical to SEQ ID NO: 3286
  modified_base 1..5419: mod_base = OTHER; note = Each t is m1f
  source 1..5419: mol_type = other RNA

SEQ ID NO: 4884 - RNA, 5419 nt, synthetic construct; identical to SEQ ID NO: 3287
  modified_base 1..5419: mod_base = OTHER; note = Each t is m1f
  source 1..5419: mol_type = other RNA

SEQ ID NO: 4885 - RNA, 5419 nt, synthetic construct; identical to SEQ ID NO: 3288
  modified_base 1..5419: mod_base = OTHER; note = Each t is m1f
  source 1..5419: mol_type = other RNA

SEQ ID NO: 4886 - RNA, 5419 nt, synthetic construct; identical to SEQ ID NO: 3289
  modified_base 1..5419: mod_base = OTHER; note = Each t is m1f
  source 1..5419: mol_type = other RNA

SEQ ID NO: 4887 - RNA, 5419 nt, synthetic construct; identical to SEQ ID NO: 3290
  modified_base 1..5419: mod_base = OTHER; note = Each t is m1f
  source 1..5419: mol_type = other RNA

SEQ ID NO: 4888 - RNA, 5419 nt, synthetic construct; identical to SEQ ID NO: 3291
  modified_base 1..5419: mod_base = OTHER; note = Each t is m1f
  source 1..5419: mol_type = other RNA

SEQ ID NO: 4889 - RNA, 5419 nt, synthetic construct; identical to SEQ ID NO: 3292
  modified_base 1..5419: mod_base = OTHER; note = Each t is m1f
  source 1..5419: mol_type = other RNA

SEQ ID NO: 4890 - RNA, 5419 nt, synthetic construct; identical to SEQ ID NO: 3293
  modified_base 1..5419: mod_base = OTHER; note = Each t is m1f
  source 1..5419: mol_type = other RNA

SEQ ID NO: 4891 - RNA, 5419 nt, synthetic construct; identical to SEQ ID NO: 3294
  modified_base 1..5419: mod_base = OTHER; note = Each t is m1f
  source 1..5419: mol_type = other RNA

SEQ ID NO: 4892 - RNA, 5419 nt, synthetic construct; identical to SEQ ID NO: 3295
  modified_base 1..5419: mod_base = OTHER; note = Each t is m1f
  source 1..5419: mol_type = other RNA

SEQ ID NO: 4893 - RNA, 5419 nt, synthetic construct; identical to SEQ ID NO: 3296
  modified_base 1..5419: mod_base = OTHER; note = Each t is m1f
  source 1..5419: mol_type = other RNA

SEQ ID NO: 4894 - RNA, 5419 nt, synthetic construct; identical to SEQ ID NO: 3297
  modified_base 1..5419: mod_base = OTHER; note = Each t is m1f
  source 1..5419: mol_type = other RNA

SEQ ID NO: 4895 - RNA, 5419 nt, synthetic construct; identical to SEQ ID NO: 3298
  modified_base 1..5419: mod_base = OTHER; note = Each t is m1f
  source 1..5419: mol_type = other RNA

SEQ ID NO: 4896 - RNA, 5419 nt, synthetic construct; identical to SEQ ID NO: 3299
  modified_base 1..5419: mod_base = OTHER; note = Each t is m1f
  source 1..5419: mol_type = other RNA

SEQ ID NO: 4897 - RNA, 5419 nt, synthetic construct; identical to SEQ ID NO: 3300
  modified_base 1..5419: mod_base = OTHER; note = Each t is m1f
  source 1..5419: mol_type = other RNA

SEQ ID NO: 4898 - RNA, 5419 nt, synthetic construct; identical to SEQ ID NO: 3301
  modified_base 1..5419: mod_base = OTHER; note = Each t is m1f
  source 1..5419: mol_type = other RNA

SEQ ID NO: 4899 - RNA, 5419 nt, synthetic construct; identical to SEQ ID NO: 3302
  modified_base 1..5419: mod_base = OTHER; note = Each t is m1f
  source 1..5419: mol_type = other RNA

SEQ ID NO: 4900 - RNA, 5419 nt, synthetic construct; identical to SEQ ID NO: 3303
  modified_base 1..5419: mod_base = OTHER; note = Each t is m1f
  source 1..5419: mol_type = other RNA

SEQ ID NO: 4901 - RNA, 5419 nt, synthetic construct; identical to SEQ ID NO: 3304
  modified_base 1..5419: mod_base = OTHER; note = Each t is m1f
  source 1..5419: mol_type = other RNA

SEQ ID NO: 4902 - RNA, 5419 nt, synthetic construct; identical to SEQ ID NO: 3305
  modified_base 1..5419: mod_base = OTHER; note = Each t is m1f
  source 1..5419: mol_type = other RNA

SEQ ID NO: 4903 - RNA, 5419 nt, synthetic construct; identical to SEQ ID NO: 3306
  modified_base 1..5419: mod_base = OTHER; note = Each t is m1f
  source 1..5419: mol_type = other RNA

SEQ ID NO: 4904 - RNA, 5419 nt, synthetic construct; identical to SEQ ID NO: 3307
  modified_base 1..5419: mod_base = OTHER; note = Each t is m1f
  source 1..5419: mol_type = other RNA

SEQ ID NO: 4905 - RNA, 5419 nt, synthetic construct; identical to SEQ ID NO: 3308
  modified_base 1..5419: mod_base = OTHER; note = Each t is m1f
  source 1..5419: mol_type = other RNA

SEQ ID NO: 4906 - RNA, 5419 nt, synthetic construct; identical to SEQ ID NO: 3309
  modified_base 1..5419: mod_base = OTHER; note = Each t is m1f
  source 1..5419: mol_type = other RNA

SEQ ID NO: 4907 - RNA, 5419 nt, synthetic construct; identical to SEQ ID NO: 3310
  modified_base 1..5419: mod_base = OTHER; note = Each t is m1f
  source 1..5419: mol_type = other RNA

SEQ ID NO: 4908 - RNA, 5419 nt, synthetic construct; identical to SEQ ID NO: 3311
  modified_base 1..5419: mod_base = OTHER; note = Each t is m1f
  source 1..5419: mol_type = other RNA

SEQ ID NO: 4909 - RNA, 5419 nt, synthetic construct; identical to SEQ ID NO: 3312
  modified_base 1..5419: mod_base = OTHER; note = Each t is m1f
  source 1..5419: mol_type = other RNA

SEQ ID NO: 4910 - RNA, 5419 nt, synthetic construct; identical to SEQ ID NO: 3313
  modified_base 1..5419: mod_base = OTHER; note = Each t is m1f
  source 1..5419: mol_type = other RNA

SEQ ID NO: 4911 - RNA, 5416 nt, synthetic construct; identical to SEQ ID NO: 3314
  modified_base 1..5416: mod_base = OTHER; note = Each t is m1f
  source 1..5416: mol_type = other RNA

SEQ ID NO: 4912 - RNA, 5419 nt, synthetic construct; identical to SEQ ID NO: 3315
  modified_base 1..5419: mod_base = OTHER; note = Each t is m1f
  source 1..5419: mol_type = other RNA

SEQ ID NO: 4913 - RNA, 5419 nt, synthetic construct; identical to SEQ ID NO: 3316
  modified_base 1..5419: mod_base = OTHER; note = Each t is m1f
  source 1..5419: mol_type = other RNA

SEQ ID NO: 4914 - RNA, 5419 nt, synthetic construct; identical to SEQ ID NO: 3317
  modified_base 1..5419: mod_base = OTHER; note = Each t is m1f
  source 1..5419: mol_type = other RNA

SEQ ID NO: 4915 - RNA, 5416 nt, synthetic construct; identical to SEQ ID NO: 3318
  modified_base 1..5416: mod_base = OTHER; note = Each t is m1f
  source 1..5416: mol_type = other RNA

SEQ ID NO: 4916 - RNA, 5419 nt, synthetic construct; identical to SEQ ID NO: 3319
  modified_base 1..5419: mod_base = OTHER; note = Each t is m1f
  source 1..5419: mol_type = other RNA

SEQ ID NO: 4917 - RNA, 5419 nt, synthetic construct; identical to SEQ ID NO: 3320
  modified_base 1..5419: mod_base = OTHER; note = Each t is m1f
  source 1..5419: mol_type = other RNA

SEQ ID NO: 4918 - RNA, 5419 nt, synthetic construct; identical to SEQ ID NO: 3321
  modified_base 1..5419: mod_base = OTHER; note = Each t is m1f
  source 1..5419: mol_type = other RNA

SEQ ID NO: 4919 - RNA, 5419 nt, synthetic construct; identical to SEQ ID NO: 3322
  modified_base 1..5419: mod_base = OTHER; note = Each t is m1f
  source 1..5419: mol_type = other RNA

SEQ ID NO: 4920 - RNA, 5419 nt, synthetic construct; identical to SEQ ID NO: 3323
  modified_base 1..5419: mod_base = OTHER; note = Each t is m1f
  source 1..5419: mol_type = other RNA

SEQ ID NO: 4921 - RNA, 5419 nt, synthetic construct; identical to SEQ ID NO: 3324
  modified_base 1..5419: mod_base = OTHER; note = Each t is m1f
  source 1..5419: mol_type = other RNA

SEQ ID NO: 4922 - RNA, 5419 nt, synthetic construct; identical to SEQ ID NO: 3325
  modified_base 1..5419: mod_base = OTHER; note = Each t is m1f
  source 1..5419: mol_type = other RNA

SEQ ID NO: 4923 - RNA, 5419 nt, synthetic construct; identical to SEQ ID NO: 3326
  modified_base 1..5419: mod_base = OTHER; note = Each t is m1f
  source 1..5419: mol_type = other RNA

SEQ ID NO: 4924 - RNA, 5419 nt, synthetic construct; identical to SEQ ID NO: 3327
  modified_base 1..5419: mod_base = OTHER; note = Each t is m1f
  source 1..5419: mol_type = other RNA

SEQ ID NO: 4925 - RNA, 5419 nt, synthetic construct; identical to SEQ ID NO: 3328
  modified_base 1..5419: mod_base = OTHER; note = Each t is m1f
  source 1..5419: mol_type = other RNA

SEQ ID NO: 4926 - RNA, 5419 nt, synthetic construct; identical to SEQ ID NO: 3329
  modified_base 1..5419: mod_base = OTHER; note = Each t is m1f
  source 1..5419: mol_type = other RNA

SEQ ID NO: 4927 - RNA, 5419 nt, synthetic construct; identical to SEQ ID NO: 3330
  modified_base 1..5419: mod_base = OTHER; note = Each t is m1f
  source 1..5419: mol_type = other RNA

SEQ ID NO: 4928 - RNA, 5419 nt, synthetic construct; identical to SEQ ID NO: 3331
  modified_base 1..5419: mod_base = OTHER; note = Each t is m1f
  source 1..5419: mol_type = other RNA

SEQ ID NO: 4929 - RNA, 5419 nt, synthetic construct; identical to SEQ ID NO: 3332
  modified_base 1..5419: mod_base = OTHER; note = Each t is m1f
  source 1..5419: mol_type = other RNA

SEQ ID NO: 4930 - RNA, 5416 nt, synthetic construct; identical to SEQ ID NO: 3333
  modified_base 1..5416: mod_base = OTHER; note = Each t is m1f
  source 1..5416: mol_type = other RNA

SEQ ID NO: 4931 - RNA, 5419 nt, synthetic construct; identical to SEQ ID NO: 3334
  modified_base 1..5419: mod_base = OTHER; note = Each t is m1f
  source 1..5419: mol_type = other RNA

SEQ ID NO: 4932 - RNA, 5419 nt, synthetic construct; identical to SEQ ID NO: 3335
  modified_base 1..5419: mod_base = OTHER; note = Each t is m1f
  source 1..5419: mol_type = other RNA

SEQ ID NO: 4933 - RNA, 5419 nt, synthetic construct; identical to SEQ ID NO: 3336
  modified_base 1..5419: mod_base = OTHER; note = Each t is m1f
  source 1..5419: mol_type = other RNA

SEQ ID NO: 4934 - RNA, 5419 nt, synthetic construct; identical to SEQ ID NO: 3337
  modified_base 1..5419: mod_base = OTHER; note = Each t is m1f
  source 1..5419: mol_type = other RNA

SEQ ID NO: 4935 - RNA, 5419 nt, synthetic construct; identical to SEQ ID NO: 3338
  modified_base 1..5419: mod_base = OTHER; note = Each t is m1f
  source 1..5419: mol_type = other RNA

SEQ ID NO: 4936 - RNA, 5419 nt, synthetic construct; identical to SEQ ID NO: 3339
  modified_base 1..5419: mod_base = OTHER; note = Each t is m1f
  source 1..5419: mol_type = other RNA

SEQ ID NO: 4937 - RNA, 5419 nt, synthetic construct; identical to SEQ ID NO: 3340
  modified_base 1..5419: mod_base = OTHER; note = Each t is m1f
  source 1..5419: mol_type = other RNA

SEQ ID NO: 4938 - RNA, 5419 nt, synthetic construct; identical to SEQ ID NO: 3341
  modified_base 1..5419: mod_base = OTHER; note = Each t is m1f
  source 1..5419: mol_type = other RNA

SEQ ID NO: 4939 - RNA, 5419 nt, synthetic construct; identical to SEQ ID NO: 3342
  modified_base 1..5419: mod_base = OTHER; note = Each t is m1f
  source 1..5419: mol_type = other RNA

SEQ ID NO: 4940 - RNA, 5419 nt, synthetic construct; identical to SEQ ID NO: 3343
  modified_base 1..5419: mod_base = OTHER; note = Each t is m1f
  source 1..5419: mol_type = other RNA

SEQ ID NO: 4941 - RNA, 5419 nt, synthetic construct; identical to SEQ ID NO: 3344
  modified_base 1..5419: mod_base = OTHER; note = Each t is m1f
  source 1..5419: mol_type = other RNA

SEQ ID NO: 4942 - RNA, 5419 nt, synthetic construct; identical to SEQ ID NO: 3345
  modified_base 1..5419: mod_base = OTHER; note = Each t is m1f
  source 1..5419: mol_type = other RNA

SEQ ID NO: 4943 - RNA, 5419 nt, synthetic construct; identical to SEQ ID NO: 3346
  modified_base 1..5419: mod_base = OTHER; note = Each t is m1f
  source 1..5419: mol_type = other RNA

SEQ ID NO: 4944 - RNA, 5419 nt, synthetic construct; identical to SEQ ID NO: 3347
  modified_base 1..5419: mod_base = OTHER; note = Each t is m1f
  source 1..5419: mol_type = other RNA

SEQ ID NO: 4945 - RNA, 5419 nt, synthetic construct; identical to SEQ ID NO: 3348
  modified_base 1..5419: mod_base = OTHER; note = Each t is m1f
  source 1..5419: mol_type = other RNA

SEQ ID NO: 4946 - RNA, 5425 nt, synthetic construct; identical to SEQ ID NO: 3349
  modified_base 1..5419: mod_base = OTHER; note = Each t is m1f
  source 1..5425: mol_type = other RNA

SEQ ID NO: 4947 - RNA, 5419 nt, synthetic construct; identical to SEQ ID NO: 3350
  modified_base 1..5419: mod_base = OTHER; note = Each t is m1f
  source 1..5419: mol_type = other RNA

SEQ ID NO: 4948 - RNA, 5419 nt, synthetic construct; identical to SEQ ID NO: 3351
  modified_base 1..5419: mod_base = OTHER; note = Each t is m1f
  source 1..5419: mol_type = other RNA

SEQ ID NO: 4949 - RNA, 5419 nt, synthetic construct; identical to SEQ ID NO: 3352
  modified_base 1..5419: mod_base = OTHER; note = Each t is m1f
  source 1..5419: mol_type = other RNA

SEQ ID NO: 4950 - RNA, 5419 nt, synthetic construct; identical to SEQ ID NO: 3353
  modified_base 1..5419: mod_base = OTHER; note = Each t is m1f
  source 1..5419: mol_type = other RNA

SEQ ID NO: 4951 - RNA, 5419 nt, synthetic construct; identical to SEQ ID NO: 3354
  modified_base 1..5419: mod_base = OTHER; note = Each t is m1f
  source 1..5419: mol_type = other RNA

SEQ ID NO: 4952 - RNA, 5419 nt, synthetic construct; identical to SEQ ID NO: 3355
  modified_base 1..5419: mod_base = OTHER; note = Each t is m1f
  source 1..5419: mol_type = other RNA

SEQ ID NO: 4953 - RNA, 5419 nt, synthetic construct; identical to SEQ ID NO: 3356
  modified_base 1..5419: mod_base = OTHER; note = Each t is m1f
  source 1..5419: mol_type = other RNA

SEQ ID NO: 4954 - RNA, 5419 nt, synthetic construct; identical to SEQ ID NO: 3357
  modified_base 1..5419: mod_base = OTHER; note = Each t is m1f
  source 1..5419: mol_type = other RNA

SEQ ID NO: 4955 - RNA, 5419 nt, synthetic construct; identical to SEQ ID NO: 3358
  modified_base 1..5419: mod_base = OTHER; note = Each t is m1f
  source 1..5419: mol_type = other RNA

SEQ ID NO: 4956 - RNA, 5419 nt, synthetic construct; identical to SEQ ID NO: 3359
  modified_base 1..5419: mod_base = OTHER; note = Each t is m1f
  source 1..5419: mol_type = other RNA

SEQ ID NO: 4957 - RNA, 5419 nt, synthetic construct; identical to SEQ ID NO: 3360
  modified_base 1..5419: mod_base = OTHER; note = Each t is m1f
  source 1..5419: mol_type = other RNA

SEQ ID NO: 4958 - RNA, 5419 nt, synthetic construct; identical to SEQ ID NO: 3361
  modified_base 1..5419: mod_base = OTHER; note = Each t is m1f
  source 1..5419: mol_type = other RNA

SEQ ID NO: 4959 - RNA, 5419 nt, synthetic construct; identical to SEQ ID NO: 3362
  modified_base 1..5419: mod_base = OTHER; note = Each t is m1f
  source 1..5419: mol_type = other RNA

SEQ ID NO: 4960 - RNA, 5419 nt, synthetic construct; identical to SEQ ID NO: 3363
  modified_base 1..5419: mod_base = OTHER; note = Each t is m1f
  source 1..5419: mol_type = other RNA

SEQ ID NO: 4961 - RNA, 5419 nt, synthetic construct; identical to SEQ ID NO: 3364
  modified_base 1..5419: mod_base = OTHER; note = Each t is m1f
  source 1..5419: mol_type = other RNA

SEQ ID NO: 4962 - RNA, 5419 nt, synthetic construct; identical to SEQ ID NO: 3365
  modified_base 1..5419: mod_base = OTHER; note = Each t is m1f
  source 1..5419: mol_type = other RNA

SEQ ID NO: 4963 - RNA, 5419 nt, synthetic construct; identical to SEQ ID NO: 3366
  modified_base 1..5419: mod_base = OTHER; note = Each t is m1f
  source 1..5419: mol_type = other RNA

SEQ ID NO: 4964 - RNA, 5419 nt, synthetic construct; identical to SEQ ID NO: 3367
  modified_base 1..5419: mod_base = OTHER; note = Each t is m1f
  source 1..5419: mol_type = other RNA

SEQ ID NO: 4965 - RNA, 5419 nt, synthetic construct; identical to SEQ ID NO: 3368
  modified_base 1..5419: mod_base = OTHER; note = Each t is m1f
  source 1..5419: mol_type = other RNA

SEQ ID NO: 4966 - RNA, 5419 nt, synthetic construct; identical to SEQ ID NO: 3369
  modified_base 1..5419: mod_base = OTHER; note = Each t is m1f
  source 1..5419: mol_type = other RNA

SEQ ID NO: 4967 - RNA, 5419 nt, synthetic construct; identical to SEQ ID NO: 3370
  modified_base 1..5419: mod_base = OTHER; note = Each t is m1f
  source 1..5419: mol_type = other RNA

SEQ ID NO: 4968 - RNA, 5419 nt, synthetic construct; identical to SEQ ID NO: 3371
  modified_base 1..5419: mod_base = OTHER; note = Each t is m1f
  source 1..5419: mol_type = other RNA

SEQ ID NO: 4969 - RNA, 5419 nt, synthetic construct; identical to SEQ ID NO: 3372
  modified_base 1..5419: mod_base = OTHER; note = Each t is m1f
  source 1..5419: mol_type = other RNA

SEQ ID NO: 4970 - RNA, 5419 nt, synthetic construct; identical to SEQ ID NO: 3373
  modified_base 1..5419: mod_base = OTHER; note = Each t is m1f
  source 1..5419: mol_type = other RNA

SEQ ID NO: 4971 - RNA, 5419 nt, synthetic construct; identical to SEQ ID NO: 3374
  modified_base 1..5419: mod_base = OTHER; note = Each t is m1f
  source 1..5419: mol_type = other RNA

SEQ ID NO: 4972 - RNA, 5419 nt, synthetic construct; identical to SEQ ID NO: 3375
  modified_base 1..5419: mod_base = OTHER; note = Each t is m1f
  source 1..5419: mol_type = other RNA

SEQ ID NO: 4973 - RNA, 5419 nt, synthetic construct; identical to SEQ ID NO: 3376
  modified_base 1..5419: mod_base = OTHER; note = Each t is m1f
  source 1..5419: mol_type = other RNA

SEQ ID NO: 4974 - RNA, 5419 nt, synthetic construct; identical to SEQ ID NO: 3377
  modified_base 1..5419: mod_base = OTHER; note = Each t is m1f
  source 1..5419: mol_type = other RNA

SEQ ID NO: 4975 - RNA, 5419 nt, synthetic construct; identical to SEQ ID NO: 3378
  modified_base 1..5419: mod_base = OTHER; note = Each t is m1f
  source 1..5419: mol_type = other RNA

SEQ ID NO: 4976 - RNA, 5419 nt, synthetic construct; identical to SEQ ID NO: 3379
  modified_base 1..5419: mod_base = OTHER; note = Each t is m1f
  source 1..5419: mol_type = other RNA

SEQ ID NO: 4977 - RNA, 5419 nt, synthetic construct; identical to SEQ ID NO: 3380
  modified_base 1..5419: mod_base = OTHER; note = Each t is m1f
  source 1..5419: mol_type = other RNA

SEQ ID NO: 4978 - RNA, 5419 nt, synthetic construct; identical to SEQ ID NO: 3381
  modified_base 1..5419: mod_base = OTHER; note = Each t is m1f
  source 1..5419: mol_type = other RNA

SEQ ID NO: 4979 - RNA, 5419 nt, synthetic construct; identical to SEQ ID NO: 3382
  modified_base 1..5419: mod_base = OTHER; note = Each t is m1f
  source 1..5419: mol_type = other RNA

SEQ ID NO: 4980 - RNA, 5419 nt, synthetic construct; identical to SEQ ID NO: 3383
  modified_base 1..5419: mod_base = OTHER; note = Each t is m1f
  source 1..5419: mol_type = other RNA

SEQ ID NO: 4981 - RNA, 5419 nt, synthetic construct; identical to SEQ ID NO: 3384
  modified_base 1..5419: mod_base = OTHER; note = Each t is m1f
  source 1..5419: mol_type = other RNA

SEQ ID NO: 4982 - RNA, 5419 nt, synthetic construct; identical to SEQ ID NO: 3385
  modified_base 1..5419: mod_base = OTHER; note = Each t is m1f
  source 1..5419: mol_type = other RNA

SEQ ID NO: 4983 - RNA, 5419 nt, synthetic construct; identical to SEQ ID NO: 3386
  modified_base 1..5419: mod_base = OTHER; note = Each t is m1f
  source 1..5419: mol_type = other RNA

SEQ ID NO: 4984 - RNA, 5419 nt, synthetic construct; identical to SEQ ID NO: 3387
  modified_base 1..5419: mod_base = OTHER; note = Each t is m1f
  source 1..5419: mol_type = other RNA

SEQ ID NO: 4985 - RNA, 5419 nt, synthetic construct; identical to SEQ ID NO: 3388
  modified_base 1..5419: mod_base = OTHER; note = Each t is m1f
  source 1..5419: mol_type = other RNA

SEQ ID NO: 4986 - RNA, 5419 nt, synthetic construct; identical to SEQ ID NO: 3389
  modified_base 1..5419: mod_base = OTHER; note = Each t is m1f
  source 1..5419: mol_type = other RNA

SEQ ID NO: 4987 - RNA, 5419 nt, synthetic construct; identical to SEQ ID NO: 3390
  modified_base 1..5419: mod_base = OTHER; note = Each t is m1f
  source 1..5419: mol_type = other RNA

SEQ ID NO: 4988 - RNA, 5419 nt, synthetic construct; identical to SEQ ID NO: 3391
  modified_base 1..5419: mod_base = OTHER; note = Each t is m1f
  source 1..5419: mol_type = other RNA

SEQ ID NO: 4989 - RNA, 5419 nt, synthetic construct; identical to SEQ ID NO: 3392
  modified_base 1..5419: mod_base = OTHER; note = Each t is m1f
  source 1..5419: mol_type = other RNA

SEQ ID NO: 4990 - RNA, 5419 nt, synthetic construct; identical to SEQ ID NO: 3393
  modified_base 1..5419: mod_base = OTHER; note = Each t is m1f
  source 1..5419: mol_type = other RNA

SEQ ID NO: 4991 - RNA, 5419 nt, synthetic construct; identical to SEQ ID NO: 3394
  modified_base 1..5419: mod_base = OTHER; note = Each t is m1f
  source 1..5419: mol_type = other RNA

SEQ ID NO: 4992 - RNA, 5419 nt, synthetic construct; identical to SEQ ID NO: 3395
  modified_base 1..5419: mod_base = OTHER; note = Each t is m1f
  source 1..5419: mol_type = other RNA

SEQ ID NO: 4993 - RNA, 5419 nt, synthetic construct; identical to SEQ ID NO: 3396
  modified_base 1..5419: mod_base = OTHER; note = Each t is m1f
  source 1..5419: mol_type = other RNA

SEQ ID NO: 4994 - RNA, 5452 nt, synthetic construct; identical to SEQ ID NO: 3397
  modified_base 1..5419: mod_base = OTHER; note = Each t is m1f
  source 1..5452: mol_type = other RNA

SEQ ID NO: 4995 - RNA, 5419 nt, synthetic construct; identical to SEQ ID NO: 3398
  modified_base 1..5419: mod_base = OTHER; note = Each t is m1f
  source 1..5419: mol_type = other RNA

SEQ ID NO: 4996 - RNA, 5419 nt, synthetic construct; identical to SEQ ID NO: 3399
  modified_base 1..5419: mod_base = OTHER; note = Each t is m1f
  source 1..5419: mol_type = other RNA

SEQ ID NO: 4997 - RNA, 5419 nt, synthetic construct; identical to SEQ ID NO: 3400
  modified_base 1..5419: mod_base = OTHER; note = Each t is m1f
  source 1..5419: mol_type = other RNA

SEQ ID NO: 4998 - RNA, 5419 nt, synthetic construct; identical to SEQ ID NO: 3401
  modified_base 1..5419: mod_base = OTHER; note = Each t is m1f
  source 1..5419: mol_type = other RNA

SEQ ID NO: 4999 - RNA, 5419 nt, synthetic construct; identical to SEQ ID NO: 3402
  modified_base 1..5419: mod_base = OTHER; note = Each t is m1f
  source 1..5419: mol_type = other RNA

SEQ ID NO: 5000 - RNA, 5419 nt, synthetic construct; identical to SEQ ID NO: 3403
  modified_base 1..5419: mod_base = OTHER; note = Each t is m1f
  source 1..5419: mol_type = other RNA

SEQ ID NO: 5001 - RNA, 5419 nt, synthetic construct; identical to SEQ ID NO: 3404
  modified_base 1..5419: mod_base = OTHER; note = Each t is m1f
  source 1..5419: mol_type = other RNA

SEQ ID NO: 5002 - RNA, 5419 nt, synthetic construct; identical to SEQ ID NO: 3405
  modified_base 1..5419: mod_base = OTHER; note = Each t is m1f
  source 1..5419: mol_type = other RNA

SEQ ID NO: 5003 - RNA, 5419 nt, synthetic construct; identical to SEQ ID NO: 3406
  modified_base 1..5419: mod_base = OTHER; note = Each t is m1f
  source 1..5419: mol_type = other RNA

SEQ ID NO: 5004 - RNA, 5419 nt, synthetic construct; identical to SEQ ID NO: 3407
  modified_base 1..5419: mod_base = OTHER; note = Each t is m1f
  source 1..5419: mol_type = other RNA

SEQ ID NO: 5005 - RNA, 5419 nt, synthetic construct; identical to SEQ ID NO: 3408
  modified_base 1..5419: mod_base = OTHER; note = Each t is m1f
  source 1..5419: mol_type = other RNA

SEQ ID NO: 5006 - RNA, 5419 nt, synthetic construct; identical to SEQ ID NO: 3409
  modified_base 1..5419: mod_base = OTHER; note = Each t is m1f
  source 1..5419: mol_type = other RNA

SEQ ID NO: 5007 - RNA, 5419 nt, synthetic construct; identical to SEQ ID NO: 3410
  modified_base 1..5419: mod_base = OTHER; note = Each t is m1f
  source 1..5419: mol_type = other RNA

SEQ ID NO: 5008 - RNA, 5419 nt, synthetic construct; identical to SEQ ID NO: 3411
  modified_base 1..5419: mod_base = OTHER; note = Each t is m1f
  source 1..5419: mol_type = other RNA

SEQ ID NO: 5009 - RNA, 5419 nt, synthetic construct; identical to SEQ ID NO: 3412
  modified_base 1..5419: mod_base = OTHER; note = Each t is m1f
  source 1..5419: mol_type = other RNA

SEQ ID NO: 5010 - RNA, 5419 nt, synthetic construct; identical to SEQ ID NO: 3413
  modified_base 1..5419: mod_base = OTHER; note = Each t is m1f
  source 1..5419: mol_type = other RNA

SEQ ID NO: 5011 - RNA, 5419 nt, synthetic construct; identical to SEQ ID NO: 3414
  modified_base 1..5419: mod_base = OTHER; note = Each t is m1f
  source 1..5419: mol_type = other RNA

SEQ ID NO: 5012 - RNA, 5419 nt, synthetic construct; identical to SEQ ID NO: 3415
  modified_base 1..5419: mod_base = OTHER; note = Each t is m1f
  source 1..5419: mol_type = other RNA

SEQ ID NO: 5013 - RNA, 5428 nt, synthetic construct; identical to SEQ ID NO: 3416
  modified_base 1..5419: mod_base = OTHER; note = Each t is m1f
  source 1..5428: mol_type = other RNA

SEQ ID NO: 5014 - RNA, 5419 nt, synthetic construct; identical to SEQ ID NO: 3417
  modified_base 1..5419: mod_base = OTHER; note = Each t is m1f
  source 1..5419: mol_type = other RNA

SEQ ID NO: 5015 - RNA, 5419 nt, synthetic construct; identical to SEQ ID NO: 3418
  modified_base 1..5419: mod_base = OTHER; note = Each t is m1f
  source 1..5419: mol_type = other RNA

SEQ ID NO: 5016 - RNA, 5419 nt, synthetic construct; identical to SEQ ID NO: 3419
  modified_base 1..5419: mod_base = OTHER; note = Each t is m1f
  source 1..5419: mol_type = other RNA

SEQ ID NO: 5017 - RNA, 5419 nt, synthetic construct; identical to SEQ ID NO: 3420
  modified_base 1..5419: mod_base = OTHER; note = Each t is m1f
  source 1..5419: mol_type = other RNA

SEQ ID NO: 5018 - RNA, 5419 nt, synthetic construct; identical to SEQ ID NO: 3421
  modified_base 1..5419: mod_base = OTHER; note = Each t is m1f
  source 1..5419: mol_type = other RNA

SEQ ID NO: 5019 - RNA, 5419 nt, synthetic construct; identical to SEQ ID NO: 3422
  modified_base 1..5419: mod_base = OTHER; note = Each t is m1f
  source 1..5419: mol_type = other RNA

SEQ ID NO: 5020 - RNA, 5419 nt, synthetic construct; identical to SEQ ID NO: 3423
  modified_base 1..5419: mod_base = OTHER; note = Each t is m1f
  source 1..5419: mol_type = other RNA

SEQ ID NO: 5021 - RNA, 5419 nt, synthetic construct; identical to SEQ ID NO: 3424
  modified_base 1..5419: mod_base = OTHER; note = Each t is m1f
  source 1..5419: mol_type = other RNA

SEQ ID NO: 5022 - RNA, 5419 nt, synthetic construct; identical to SEQ ID NO: 3425
  modified_base 1..5419: mod_base = OTHER; note = Each t is m1f
  source 1..5419: mol_type = other RNA

SEQ ID NO: 5023 - RNA, 5419 nt, synthetic construct; identical to SEQ ID NO: 3426
  modified_base 1..5419: mod_base = OTHER; note = Each t is m1f
  source 1..5419: mol_type = other RNA

SEQ ID NO: 5024 - RNA, 5419 nt, synthetic construct; identical to SEQ ID NO: 3427
  modified_base 1..5419: mod_base = OTHER; note = Each t is m1f
  source 1..5419: mol_type = other RNA

SEQ ID NO: 5025 - RNA, 5419 nt, synthetic construct; identical to SEQ ID NO: 3428
  modified_base 1..5419: mod_base = OTHER; note = Each t is m1f
  source 1..5419: mol_type = other RNA

SEQ ID NO: 5026 - RNA, 5419 nt, synthetic construct; identical to SEQ ID NO: 3429
  modified_base 1..5419: mod_base = OTHER; note = Each t is m1f
  source 1..5419: mol_type = other RNA

SEQ ID NO: 5027 - RNA, 5419 nt, synthetic construct; identical to SEQ ID NO: 3430
  modified_base 1..5419: mod_base = OTHER; note = Each t is m1f
  source 1..5419: mol_type = other RNA

SEQ ID NO: 5028 - RNA, 5416 nt, synthetic construct; identical to SEQ ID NO: 3431
  modified_base 1..5416: mod_base = OTHER; note = Each t is m1f
  source 1..5416: mol_type = other RNA

SEQ ID NO: 5029 - RNA, 5419 nt, synthetic construct; identical to SEQ ID NO: 3432
  modified_base 1..5419: mod_base = OTHER; note = Each t is m1f
  source 1..5419: mol_type = other RNA

SEQ ID NO: 5030 - RNA, 5419 nt, synthetic construct; identical to SEQ ID NO: 3433
  modified_base 1..5419: mod_base = OTHER; note = Each t is m1f
  source 1..5419: mol_type = other RNA

SEQ ID NO: 5031 - RNA, 5419 nt, synthetic construct; identical to SEQ ID NO: 3434
  modified_base 1..5419: mod_base = OTHER; note = Each t is m1f
  source 1..5419: mol_type = other RNA

SEQ ID NO: 5032 - RNA, 5419 nt, synthetic construct; identical to SEQ ID NO: 3435
  modified_base 1..5419: mod_base = OTHER; note = Each t is m1f
  source 1..5419: mol_type = other RNA

SEQ ID NO: 5033 - RNA, 5419 nt, synthetic construct; identical to SEQ ID NO: 3436
  modified_base 1..5419: mod_base = OTHER; note = Each t is m1f
  source 1..5419: mol_type = other RNA

SEQ ID NO: 5034 - RNA, 5419 nt, synthetic construct; identical to SEQ ID NO: 3437
  modified_base 1..5419: mod_base = OTHER; note = Each t is m1f
  source 1..5419: mol_type = other RNA

SEQ ID NO: 5035 - RNA, 5419 nt, synthetic construct; identical to SEQ ID NO: 3438
  modified_base 1..5419: mod_base = OTHER; note = Each t is m1f
  source 1..5419: mol_type = other RNA

SEQ ID NO: 5036 - RNA, 5419 nt, synthetic construct; identical to SEQ ID NO: 3439
  modified_base 1..5419: mod_base = OTHER; note = Each t is m1f
  source 1..5419: mol_type = other RNA

SEQ ID NO: 5037 - RNA, 5419 nt, synthetic construct; identical to SEQ ID NO: 3440
  modified_base 1..5419: mod_base = OTHER; note = Each t is m1f
  source 1..5419: mol_type = other RNA

SEQ ID NO: 5038 - RNA, 5419 nt, synthetic construct; identical to SEQ ID NO: 3441
  modified_base 1..5419: mod_base = OTHER; note = Each t is m1f
  source 1..5419: mol_type = other RNA

SEQ ID NO: 5039 - RNA, 5419 nt, synthetic construct; identical to SEQ ID NO: 3442
  modified_base 1..5419: mod_base = OTHER; note = Each t is m1f
  source 1..5419: mol_type = other RNA

SEQ ID NO: 5040 - RNA, 5419 nt, synthetic construct; identical to SEQ ID NO: 3443
  modified_base 1..5419: mod_base = OTHER; note = Each t is m1f
  source 1..5419: mol_type = other RNA

SEQ ID NO: 5041 - RNA, 5455 nt, synthetic construct; identical to SEQ ID NO: 3444
  modified_base 1..5419: mod_base = OTHER; note = Each t is m1f
  source 1..5455: mol_type = other RNA

SEQ ID NO: 5042 - RNA, 5419 nt, synthetic construct; identical to SEQ ID NO: 3445
  modified_base 1..5419: mod_base = OTHER; note = Each t is m1f
  source 1..5419: mol_type = other RNA

SEQ ID NO: 5043 - RNA, 5419 nt, synthetic construct; identical to SEQ ID NO: 3446
  modified_base 1..5419: mod_base = OTHER; note = Each t is m1f
  source 1..5419: mol_type = other RNA

SEQ ID NO: 5044 - RNA, 5419 nt, synthetic construct; identical to SEQ ID NO: 3447
  modified_base 1..5419: mod_base = OTHER; note = Each t is m1f
  source 1..5419: mol_type = other RNA

SEQ ID NO: 5045 - RNA, 5419 nt, synthetic construct; identical to SEQ ID NO: 3448
  modified_base 1..5419: mod_base = OTHER; note = Each t is m1f
  source 1..5419: mol_type = other RNA

SEQ ID NO: 5046 - RNA, 5419 nt, synthetic construct; identical to SEQ ID NO: 3449
  modified_base 1..5419: mod_base = OTHER; note = Each t is m1f
  source 1..5419: mol_type = other RNA

SEQ ID NO: 5047 - RNA, 5419 nt, synthetic construct; identical to SEQ ID NO: 3450
  modified_base 1..5419: mod_base = OTHER; note = Each t is m1f
  source 1..5419: mol_type = other RNA

SEQ ID NO: 5048 - RNA, 5419 nt, synthetic construct; identical to SEQ ID NO: 3451
  modified_base 1..5419: mod_base = OTHER; note = Each t is m1f
  source 1..5419: mol_type = other RNA

SEQ ID NO: 5049 - RNA, 5419 nt, synthetic construct; identical to SEQ ID NO: 3452
  modified_base 1..5419: mod_base = OTHER; note = Each t is m1f
  source 1..5419: mol_type = other RNA

SEQ ID NO: 5050 - RNA, 5419 nt, synthetic construct; identical to SEQ ID NO: 3453
  modified_base 1..5419: mod_base = OTHER; note = Each t is m1f
  source 1..5419: mol_type = other RNA

SEQ ID NO: 5051 - RNA, 5419 nt, synthetic construct; identical to SEQ ID NO: 3454
  modified_base 1..5419: mod_base = OTHER; note = Each t is m1f
  source 1..5419: mol_type = other RNA

SEQ ID NO: 5052 - RNA, 5419 nt, synthetic construct; identical to SEQ ID NO: 3455
  modified_base 1..5419: mod_base = OTHER; note = Each t is m1f
  source 1..5419: mol_type = other RNA

SEQ ID NO: 5053 - RNA, 5419 nt, synthetic construct; identical to SEQ ID NO: 3456
  modified_base 1..5419: mod_base = OTHER; note = Each t is m1f
  source 1..5419: mol_type = other RNA

SEQ ID NO: 5054 - RNA, 5419 nt, synthetic construct; identical to SEQ ID NO: 3457
  modified_base 1..5419: mod_base = OTHER; note = Each t is m1f
  source 1..5419: mol_type = other RNA

SEQ ID NO: 5055 - RNA, 5419 nt, synthetic construct; identical to SEQ ID NO: 3458
  modified_base 1..5419: mod_base = OTHER; note = Each t is m1f
  source 1..5419: mol_type = other RNA

SEQ ID NO: 5056 - RNA, 5419 nt, synthetic construct; identical to SEQ ID NO: 3459
  modified_base 1..5419: mod_base = OTHER; note = Each t is m1f
  source 1..5419: mol_type = other RNA

SEQ ID NO: 5057 - RNA, 5419 nt, synthetic construct; identical to SEQ ID NO: 3460
  modified_base 1..5419: mod_base = OTHER; note = Each t is m1f
  source 1..5419: mol_type = other RNA

SEQ ID NO: 5058 - RNA, 5419 nt, synthetic construct; identical to SEQ ID NO: 3461
  modified_base 1..5419: mod_base = OTHER; note = Each t is m1f
  source 1..5419: mol_type = other RNA

SEQ ID NO: 5059 - RNA, 5419 nt, synthetic construct; identical to SEQ ID NO: 3462
  modified_base 1..5419: mod_base = OTHER; note = Each t is m1f
  source 1..5419: mol_type = other RNA

SEQ ID NO: 5060 - RNA, 5419 nt, synthetic construct; identical to SEQ ID NO: 3463
  modified_base 1..5419: mod_base = OTHER; note = Each t is m1f
  source 1..5419: mol_type = other RNA

SEQ ID NO: 5061 - RNA, 5419 nt, synthetic construct; identical to SEQ ID NO: 3464
  modified_base 1..5419: mod_base = OTHER; note = Each t is m1f
  source 1..5419: mol_type = other RNA

SEQ ID NO: 5062 - RNA, 5419 nt, synthetic construct; identical to SEQ ID NO: 3465
  modified_base 1..5419: mod_base = OTHER; note = Each t is m1f
  source 1..5419: mol_type = other RNA

SEQ ID NO: 5063 - RNA, 5419 nt, synthetic construct; identical to SEQ ID NO: 3466
  modified_base 1..5419: mod_base = OTHER; note = Each t is m1f
  source 1..5419: mol_type = other RNA

SEQ ID NO: 5064 - RNA, 5419 nt, synthetic construct; identical to SEQ ID NO: 3467
  modified_base 1..5419: mod_base = OTHER; note = Each t is m1f
  source 1..5419: mol_type = other RNA

SEQ ID NO: 5065 - RNA, 5419 nt, synthetic construct; identical to SEQ ID NO: 3468
  modified_base 1..5419: mod_base = OTHER; note = Each t is m1f
  source 1..5419: mol_type = other RNA

SEQ ID NO: 5066 - RNA, 5419 nt, synthetic construct; identical to SEQ ID NO: 3469
  modified_base 1..5419: mod_base = OTHER; note = Each t is m1f
  source 1..5419: mol_type = other RNA

SEQ ID NO: 5067 - RNA, 5419 nt, synthetic construct; identical to SEQ ID NO: 3470
  modified_base 1..5419: mod_base = OTHER; note = Each t is m1f
  source 1..5419: mol_type = other RNA

SEQ ID NO: 5068 - RNA, 5419 nt, synthetic construct; identical to SEQ ID NO: 3471
  modified_base 1..5419: mod_base = OTHER; note = Each t is m1f
  source 1..5419: mol_type = other RNA

SEQ ID NO: 5069 - RNA, 5419 nt, synthetic construct; identical to SEQ ID NO: 3472
  modified_base 1..5419: mod_base = OTHER; note = Each t is m1f
  source 1..5419: mol_type = other RNA

SEQ ID NO: 5070 - RNA, 5419 nt, synthetic construct; identical to SEQ ID NO: 3473
  modified_base 1..5419: mod_base = OTHER; note = Each t is m1f
  source 1..5419: mol_type = other RNA

SEQ ID NO: 5071 - RNA, 5419 nt, synthetic construct; identical to SEQ ID NO: 3474
  modified_base 1..5419: mod_base = OTHER; note = Each t is m1f
  source 1..5419: mol_type = other RNA

SEQ ID NO: 5072 - RNA, 5419 nt, synthetic construct; identical to SEQ ID NO: 3475
  modified_base 1..5419: mod_base = OTHER; note = Each t is m1f
  source 1..5419: mol_type = other RNA

SEQ ID NO: 5073 - RNA, 5419 nt, synthetic construct; identical to SEQ ID NO: 3476
  modified_base 1..5419: mod_base = OTHER; note = Each t is m1f
  source 1..5419: mol_type = other RNA

SEQ ID NO: 5074 - RNA, 5419 nt, synthetic construct; identical to SEQ ID NO: 3477
  modified_base 1..5419: mod_base = OTHER; note = Each t is m1f
  source 1..5419: mol_type = other RNA

SEQ ID NO: 5075 - RNA, 5419 nt, synthetic construct; identical to SEQ ID NO: 3478
  modified_base 1..5419: mod_base = OTHER; note = Each t is m1f
  source 1..5419: mol_type = other RNA

SEQ ID NO: 5076 - RNA, 5419 nt, synthetic construct; identical to SEQ ID NO: 3479
  modified_base 1..5419: mod_base = OTHER; note = Each t is m1f
  source 1..5419: mol_type = other RNA

SEQ ID NO: 5077 - RNA, 5419 nt, synthetic construct; identical to SEQ ID NO: 3480
  modified_base 1..5419: mod_base = OTHER; note = Each t is m1f
  source 1..5419: mol_type = other RNA

SEQ ID NO: 5078 - RNA, 5419 nt, synthetic construct; identical to SEQ ID NO: 3481
  modified_base 1..5419: mod_base = OTHER; note = Each t is m1f
  source 1..5419: mol_type = other RNA

SEQ ID NO: 5079 - RNA, 5419 nt, synthetic construct; identical to SEQ ID NO: 3482
  modified_base 1..5419: mod_base = OTHER; note = Each t is m1f
  source 1..5419: mol_type = other RNA

SEQ ID NO: 5080 - RNA, 5419 nt, synthetic construct; identical to SEQ ID NO: 3483
  modified_base 1..5419: mod_base = OTHER; note = Each t is m1f
  source 1..5419: mol_type = other RNA

SEQ ID NO: 5081 - RNA, 5419 nt, synthetic construct; identical to SEQ ID NO: 3484
  modified_base 1..5419: mod_base = OTHER; note = Each t is m1f
  source 1..5419: mol_type = other RNA

SEQ ID NO: 5082 - RNA, 5419 nt, synthetic construct; identical to SEQ ID NO: 3485
  modified_base 1..5419: mod_base = OTHER; note = Each t is m1f
  source 1..5419: mol_type = other RNA

SEQ ID NO: 5083 - RNA, 5419 nt, synthetic construct; identical to SEQ ID NO: 3486
  modified_base 1..5419: mod_base = OTHER; note = Each t is m1f
  source 1..5419: mol_type = other RNA

SEQ ID NO: 5084 - RNA, 5419 nt, synthetic construct; identical to SEQ ID NO: 3487
  modified_base 1..5419: mod_base = OTHER; note = Each t is m1f
  source 1..5419: mol_type = other RNA

SEQ ID NO: 5085 - RNA, 5419 nt, synthetic construct; identical to SEQ ID NO: 3488
  modified_base 1..5419: mod_base = OTHER; note = Each t is m1f
  source 1..5419: mol_type = other RNA

SEQ ID NO: 5086 - RNA, 5419 nt, synthetic construct; identical to SEQ ID NO: 3489
  modified_base 1..5419: mod_base = OTHER; note = Each t is m1f
  source 1..5419: mol_type = other RNA

SEQ ID NO: 5087 - RNA, 5419 nt, synthetic construct; identical to SEQ ID NO: 3490
  modified_base 1..5419: mod_base = OTHER; note = Each t is m1f
  source 1..5419: mol_type = other RNA

SEQ ID NO: 5088 - RNA, 5419 nt, synthetic construct; identical to SEQ ID NO: 3491
  modified_base 1..5419: mod_base = OTHER; note = Each t is m1f
  source 1..5419: mol_type = other RNA

SEQ ID NO: 5089 - RNA, 5419 nt, synthetic construct; identical to SEQ ID NO: 3492
  modified_base 1..5419: mod_base = OTHER; note = Each t is m1f
  source 1..5419: mol_type = other RNA

SEQ ID NO: 5090 - RNA, 5419 nt, synthetic construct; identical to SEQ ID NO: 3493
  modified_base 1..5419: mod_base = OTHER; note = Each t is m1f
  source 1..5419: mol_type = other RNA

SEQ ID NO: 5091 - RNA, 5419 nt, synthetic construct; identical to SEQ ID NO: 3494
  modified_base 1..5419: mod_base = OTHER; note = Each t is m1f
  source 1..5419: mol_type = other RNA

SEQ ID NO: 5092 - RNA, 5419 nt, synthetic construct; identical to SEQ ID NO: 3495
  modified_base 1..5419: mod_base = OTHER; note = Each t is m1f
  source 1..5419: mol_type = other RNA

SEQ ID NO: 5093 - RNA, 5419 nt, synthetic construct; identical to SEQ ID NO: 3496
  modified_base 1..5419: mod_base = OTHER; note = Each t is m1f
  source 1..5419: mol_type = other RNA

SEQ ID NO: 5094 - RNA, 5419 nt, synthetic construct; identical to SEQ ID NO: 3497
  modified_base 1..5419: mod_base = OTHER; note = Each t is m1f
  source 1..5419: mol_type = other RNA

SEQ ID NO: 5095 - RNA, 5419 nt, synthetic construct; identical to SEQ ID NO: 3498
  modified_base 1..5419: mod_base = OTHER; note = Each t is m1f
  source 1..5419: mol_type = other RNA

SEQ ID NO: 5096 - RNA, 5419 nt, synthetic construct; identical to SEQ ID NO: 3499
  modified_base 1..5419: mod_base = OTHER; note = Each t is m1f
  source 1..5419: mol_type = other RNA

SEQ ID NO: 5097 - RNA, 5419 nt, synthetic construct; identical to SEQ ID NO: 3500
  modified_base 1..5419: mod_base = OTHER; note = Each t is m1f
  source 1..5419: mol_type = other RNA

SEQ ID NO: 5098 - RNA, 5419 nt, synthetic construct; identical to SEQ ID NO: 3501
  modified_base 1..5419: mod_base = OTHER; note = Each t is m1f
  source 1..5419: mol_type = other RNA

SEQ ID NO: 5099 - RNA, 5419 nt, synthetic construct; identical to SEQ ID NO: 3502
  modified_base 1..5419: mod_base = OTHER; note = Each t is m1f
  source 1..5419: mol_type = other RNA

SEQ ID NO: 5100 - RNA, 5419 nt, synthetic construct; identical to SEQ ID NO: 3503
  modified_base 1..5419: mod_base = OTHER; note = Each t is m1f
  source 1..5419: mol_type = other RNA

SEQ ID NO: 5101 - RNA, 5419 nt, synthetic construct; identical to SEQ ID NO: 3504
  modified_base 1..5419: mod_base = OTHER; note = Each t is m1f
  source 1..5419: mol_type = other RNA

SEQ ID NO: 5102 - RNA, 5419 nt, synthetic construct; identical to SEQ ID NO: 3505
  modified_base 1..5419: mod_base = OTHER; note = Each t is m1f
  source 1..5419: mol_type = other RNA

SEQ ID NO: 5103 - RNA, 5419 nt, synthetic construct; identical to SEQ ID NO: 3506
  modified_base 1..5419: mod_base = OTHER; note = Each t is m1f
  source 1..5419: mol_type = other RNA

SEQ ID NO: 5104 - RNA, 5419 nt, synthetic construct; identical to SEQ ID NO: 3507
  modified_base 1..5419: mod_base = OTHER; note = Each t is m1f
  source 1..5419: mol_type = other RNA

SEQ ID NO: 5105 - RNA, 5419 nt, synthetic construct; identical to SEQ ID NO: 3508
  modified_base 1..5419: mod_base = OTHER; note = Each t is m1f
  source 1..5419: mol_type = other RNA

SEQ ID NO: 5106 - RNA, 5419 nt, synthetic construct; identical to SEQ ID NO: 3509
  modified_base 1..5419: mod_base = OTHER; note = Each t is m1f
  source 1..5419: mol_type = other RNA

SEQ ID NO: 5107 - RNA, 5419 nt, synthetic construct; identical to SEQ ID NO: 3510
  modified_base 1..5419: mod_base = OTHER; note = Each t is m1f
  source 1..5419: mol_type = other RNA

SEQ ID NO: 5108 - RNA, 5419 nt, synthetic construct; identical to SEQ ID NO: 3511
  modified_base 1..5419: mod_base = OTHER; note = Each t is m1f
  source 1..5419: mol_type = other RNA

SEQ ID NO: 5109 - RNA, 5419 nt, synthetic construct; identical to SEQ ID NO: 3512
  modified_base 1..5419: mod_base = OTHER; note = Each t is m1f
  source 1..5419: mol_type = other RNA

SEQ ID NO: 5110 - RNA, 5419 nt, synthetic construct; identical to SEQ ID NO: 3513
  modified_base 1..5419: mod_base = OTHER; note = Each t is m1f
  source 1..5419: mol_type = other RNA

SEQ ID NO: 5111 - RNA, 5419 nt, synthetic construct; identical to SEQ ID NO: 3514
  modified_base 1..5419: mod_base = OTHER; note = Each t is m1f
  source 1..5419: mol_type = other RNA

SEQ ID NO: 5112 - RNA, 5419 nt, synthetic construct; identical to SEQ ID NO: 3515
  modified_base 1..5419: mod_base = OTHER; note = Each t is m1f
  source 1..5419: mol_type = other RNA

SEQ ID NO: 5113 - RNA, 5419 nt, synthetic construct; identical to SEQ ID NO: 3516
  modified_base 1..5419: mod_base = OTHER; note = Each t is m1f
  source 1..5419: mol_type = other RNA

SEQ ID NO: 5114 - RNA, 5419 nt, synthetic construct; identical to SEQ ID NO: 3517
  modified_base 1..5419: mod_base = OTHER; note = Each t is m1f
  source 1..5419: mol_type = other RNA

SEQ ID NO: 5115 - RNA, 5419 nt, synthetic construct; identical to SEQ ID NO: 3518
  modified_base 1..5419: mod_base = OTHER; note = Each t is m1f
  source 1..5419: mol_type = other RNA

SEQ ID NO: 5116 - RNA, 5419 nt, synthetic construct; identical to SEQ ID NO: 3519
  modified_base 1..5419: mod_base = OTHER; note = Each t is m1f
  source 1..5419: mol_type = other RNA

SEQ ID NO: 5117 - RNA, 5419 nt, synthetic construct; identical to SEQ ID NO: 3520
  modified_base 1..5419: mod_base = OTHER; note = Each t is m1f
  source 1..5419: mol_type = other RNA

SEQ ID NO: 5118 - RNA, 5419 nt, synthetic construct; identical to SEQ ID NO: 3521
  modified_base 1..5419: mod_base = OTHER; note = Each t is m1f
  source 1..5419: mol_type = other RNA

SEQ ID NO: 5119 - RNA, 5419 nt, synthetic construct; identical to SEQ ID NO: 3522
  modified_base 1..5419: mod_base = OTHER; note = Each t is m1f
  source 1..5419: mol_type = other RNA

SEQ ID NO: 5120 - RNA, 5419 nt, synthetic construct; identical to SEQ ID NO: 3523
  modified_base 1..5419: mod_base = OTHER; note = Each t is m1f
  source 1..5419: mol_type = other RNA

SEQ ID NO: 5121 - RNA, 5419 nt, synthetic construct; identical to SEQ ID NO: 3524
  modified_base 1..5419: mod_base = OTHER; note = Each t is m1f
  source 1..5419: mol_type = other RNA

SEQ ID NO: 5122 - RNA, 5419 nt, synthetic construct; identical to SEQ ID NO: 3525
  modified_base 1..5419: mod_base = OTHER; note = Each t is m1f
  source 1..5419: mol_type = other RNA

SEQ ID NO: 5123 - RNA, 5419 nt, synthetic construct; identical to SEQ ID NO: 3526
  modified_base 1..5419: mod_base = OTHER; note = Each t is m1f
  source 1..5419: mol_type = other RNA

SEQ ID NO: 5124 - RNA, 5419 nt, synthetic construct; identical to SEQ ID NO: 3527
  modified_base 1..5419: mod_base = OTHER; note = Each t is m1f
  source 1..5419: mol_type = other RNA

SEQ ID NO: 5125 - RNA, 5419 nt, synthetic construct; identical to SEQ ID NO: 3528
  modified_base 1..5419: mod_base = OTHER; note = Each t is m1f
  source 1..5419: mol_type = other RNA

SEQ ID NO: 5126 - RNA, 5419 nt, synthetic construct; identical to SEQ ID NO: 3529
  modified_base 1..5419: mod_base = OTHER; note = Each t is m1f
  source 1..5419: mol_type = other RNA

SEQ ID NO: 5127 - RNA, 5419 nt, synthetic construct; identical to SEQ ID NO: 3530
  modified_base 1..5419: mod_base = OTHER; note = Each t is m1f
  source 1..5419: mol_type = other RNA

SEQ ID NO: 5128 - RNA, 5419 nt, synthetic construct; identical to SEQ ID NO: 3531
  modified_base 1..5419: mod_base = OTHER; note = Each t is m1f
  source 1..5419: mol_type = other RNA

SEQ ID NO: 5129 - RNA, 5419 nt, synthetic construct; identical to SEQ ID NO: 3532
  modified_base 1..5419: mod_base = OTHER; note = Each t is m1f
  source 1..5419: mol_type = other RNA

SEQ ID NO: 5130 - RNA, 5419 nt, synthetic construct; identical to SEQ ID NO: 3533
  modified_base 1..5419: mod_base = OTHER; note = Each t is m1f
  source 1..5419: mol_type = other RNA

SEQ ID NO: 5131 - RNA, 5419 nt, synthetic construct; identical to SEQ ID NO: 3534
  modified_base 1..5419: mod_base = OTHER; note = Each t is m1f
  source 1..5419: mol_type = other RNA

SEQ ID NO: 5132 - RNA, 5419 nt, synthetic construct; identical to SEQ ID NO: 3535
  modified_base 1..5419: mod_base = OTHER; note = Each t is m1f
  source 1..5419: mol_type = other RNA

SEQ ID NO: 5133 - RNA, 5419 nt, synthetic construct; identical to SEQ ID NO: 3536
  modified_base 1..5419: mod_base = OTHER; note = Each t is m1f
  source 1..5419: mol_type = other RNA

SEQ ID NO: 5134 - RNA, 5419 nt, synthetic construct; identical to SEQ ID NO: 3537
  modified_base 1..5419: mod_base = OTHER; note = Each t is m1f
  source 1..5419: mol_type = other RNA

SEQ ID NO: 5135 - RNA, 5419 nt, synthetic construct; identical to SEQ ID NO: 3538
  modified_base 1..5419: mod_base = OTHER; note = Each t is m1f
  source 1..5419: mol_type = other RNA

SEQ ID NO: 5136 - RNA, 5419 nt, synthetic construct; identical to SEQ ID NO: 3539
  modified_base 1..5419: mod_base = OTHER; note = Each t is m1f
  source 1..5419: mol_type = other RNA

SEQ ID NO: 5137 - RNA, 5425 nt, synthetic construct; identical to SEQ ID NO: 3540
  modified_base 1..5419: mod_base = OTHER; note = Each t is m1f
  source 1..5425: mol_type = other RNA

SEQ ID NO: 5138 - RNA, 5419 nt, synthetic construct; identical to SEQ ID NO: 3541
  modified_base 1..5419: mod_base = OTHER; note = Each t is m1f
  source 1..5419: mol_type = other RNA

SEQ ID NO: 5139 - RNA, 5419 nt, synthetic construct; identical to SEQ ID NO: 3542
  modified_base 1..5419: mod_base = OTHER; note = Each t is m1f
  source 1..5419: mol_type = other RNA

SEQ ID NO: 5140 - RNA, 5419 nt, synthetic construct; identical to SEQ ID NO: 3543
  modified_base 1..5419: mod_base = OTHER; note = Each t is m1f
  source 1..5419: mol_type = other RNA

SEQ ID NO: 5141 - RNA, 5419 nt, synthetic construct; identical to SEQ ID NO: 3544
  modified_base 1..5419: mod_base = OTHER; note = Each t is m1f
  source 1..5419: mol_type = other RNA

SEQ ID NO: 5142 - RNA, 5419 nt, synthetic construct; identical to SEQ ID NO: 3545
  modified_base 1..5419: mod_base = OTHER; note = Each t is m1f
  source 1..5419: mol_type = other RNA

SEQ ID NO: 5143 - RNA, 5419 nt, synthetic construct; identical to SEQ ID NO: 3546
  modified_base 1..5419: mod_base = OTHER; note = Each t is m1f
  source 1..5419: mol_type = other RNA

SEQ ID NO: 5144 - RNA, 5419 nt, synthetic construct; identical to SEQ ID NO: 3547
  modified_base 1..5419: mod_base = OTHER; note = Each t is m1f
  source 1..5419: mol_type = other RNA

SEQ ID NO: 5145 - RNA, 5419 nt, synthetic construct; identical to SEQ ID NO: 3548
  modified_base 1..5419: mod_base = OTHER; note = Each t is m1f
  source 1..5419: mol_type = other RNA

SEQ ID NO: 5146 - RNA, 5419 nt, synthetic construct; identical to SEQ ID NO: 3549
  modified_base 1..5419: mod_base = OTHER; note = Each t is m1f
  source 1..5419: mol_type = other RNA

SEQ ID NO: 5147 - RNA, 5419 nt, synthetic construct; identical to SEQ ID NO: 3550
  modified_base 1..5419: mod_base = OTHER; note = Each t is m1f
  source 1..5419: mol_type = other RNA

SEQ ID NO: 5148 - RNA, 5419 nt, synthetic construct; identical to SEQ ID NO: 3551
  modified_base 1..5419: mod_base = OTHER; note = Each t is m1f
  source 1..5419: mol_type = other RNA

SEQ ID NO: 5149 - RNA, 5419 nt, synthetic construct; identical to SEQ ID NO: 3552
  modified_base 1..5419: mod_base = OTHER; note = Each t is m1f
  source 1..5419: mol_type = other RNA

SEQ ID NO: 5150 - RNA, 5419 nt, synthetic construct; identical to SEQ ID NO: 3553
  modified_base 1..5419: mod_base = OTHER; note = Each t is m1f
  source 1..5419: mol_type = other RNA

SEQ ID NO: 5151 - RNA, 5419 nt, synthetic construct; identical to SEQ ID NO: 3554
  modified_base 1..5419: mod_base = OTHER; note = Each t is m1f
  source 1..5419: mol_type = other RNA

SEQ ID NO: 5152 - RNA, 5419 nt, synthetic construct; identical to SEQ ID NO: 3555
  modified_base 1..5419: mod_base = OTHER; note = Each t is m1f
  source 1..5419: mol_type = other RNA

SEQ ID NO: 5153 - RNA, 5419 nt, synthetic construct; identical to SEQ ID NO: 3556
  modified_base 1..5419: mod_base = OTHER; note = Each t is m1f
  source 1..5419: mol_type = other RNA

SEQ ID NO: 5154 - RNA, 5419 nt, synthetic construct; identical to SEQ ID NO: 3557
  modified_base 1..5419: mod_base = OTHER; note = Each t is m1f
  source 1..5419: mol_type = other RNA

SEQ ID NO: 5155 - RNA, 5419 nt, synthetic construct; identical to SEQ ID NO: 3558
  modified_base 1..5419: mod_base = OTHER; note = Each t is m1f
  source 1..5419: mol_type = other RNA

SEQ ID NO: 5156 - RNA, 5419 nt, synthetic construct; identical to SEQ ID NO: 3559
  modified_base 1..5419: mod_base = OTHER; note = Each t is m1f
  source 1..5419: mol_type = other RNA

SEQ ID NO: 5157 - RNA, 5419 nt, synthetic construct; identical to SEQ ID NO: 3560
  modified_base 1..5419: mod_base = OTHER; note = Each t is m1f
  source 1..5419: mol_type = other RNA

SEQ ID NO: 5158 - RNA, 5419 nt, synthetic construct; identical to SEQ ID NO: 3561
  modified_base 1..5419: mod_base = OTHER; note = Each t is m1f
  source 1..5419: mol_type = other RNA

SEQ ID NO: 5159 - RNA, 5419 nt, synthetic construct; identical to SEQ ID NO: 3562
  modified_base 1..5419: mod_base = OTHER; note = Each t is m1f
  source 1..5419: mol_type = other RNA

SEQ ID NO: 5160 - RNA, 5419 nt, synthetic construct; identical to SEQ ID NO: 3563
  modified_base 1..5419: mod_base = OTHER; note = Each t is m1f
  source 1..5419: mol_type = other RNA

SEQ ID NO: 5161 - RNA, 5419 nt, synthetic construct; identical to SEQ ID NO: 3564
  modified_base 1..5419: mod_base = OTHER; note = Each t is m1f
  source 1..5419: mol_type = other RNA

SEQ ID NO: 5162 - RNA, 5419 nt, synthetic construct; identical to SEQ ID NO: 3565
  modified_base 1..5419: mod_base = OTHER; note = Each t is m1f
  source 1..5419: mol_type = other RNA

SEQ ID NO: 5163 - RNA, 5443 nt, synthetic construct; identical to SEQ ID NO: 3566
  modified_base 1..5419: mod_base = OTHER; note = Each t is m1f
  source 1..5443: mol_type = other RNA

SEQ ID NO: 5164 - RNA, 5419 nt, synthetic construct; identical to SEQ ID NO: 3567
  modified_base 1..5419: mod_base = OTHER; note = Each t is m1f
  source 1..5419: mol_type = other RNA

SEQ ID NO: 5165 - RNA, 5419 nt, synthetic construct; identical to SEQ ID NO: 3568
  modified_base 1..5419: mod_base = OTHER; note = Each t is m1f
  source 1..5419: mol_type = other RNA

SEQ ID NO: 5166 - RNA, 5419 nt, synthetic construct; identical to SEQ ID NO: 3569
  modified_base 1..5419: mod_base = OTHER; note = Each t is m1f
  source 1..5419: mol_type = other RNA

SEQ ID NO: 5167 - RNA, 5419 nt, synthetic construct; identical to SEQ ID NO: 3570
  modified_base 1..5419: mod_base = OTHER; note = Each t is m1f
  source 1..5419: mol_type = other RNA

SEQ ID NO: 5168 - RNA, 5416 nt, synthetic construct; identical to SEQ ID NO: 3571
  modified_base 1..5416: mod_base = OTHER; note = Each t is m1f
  source 1..5416: mol_type = other RNA

SEQ ID NO: 5169 - RNA, 5419 nt, synthetic construct; identical to SEQ ID NO: 3572
  modified_base 1..5419: mod_base = OTHER; note = Each t is m1f
  source 1..5419: mol_type = other RNA

SEQ ID NO: 5170 - RNA, 5419 nt, synthetic construct; identical to SEQ ID NO: 3573
  modified_base 1..5419: mod_base = OTHER; note = Each t is m1f
  source 1..5419: mol_type = other RNA

SEQ ID NO: 5171 - RNA, 5419 nt, synthetic construct; identical to SEQ ID NO: 3574
  modified_base 1..5419: mod_base = OTHER; note = Each t is m1f
  source 1..5419: mol_type = other RNA

SEQ ID NO: 5172 - RNA, 5419 nt, synthetic construct; identical to SEQ ID NO: 3575
  modified_base 1..5419: mod_base = OTHER; note = Each t is m1f
  source 1..5419: mol_type = other RNA

SEQ ID NO: 5173 - RNA, 5419 nt, synthetic construct; identical to SEQ ID NO: 3576
  modified_base 1..5419: mod_base = OTHER; note = Each t is m1f
  source 1..5419: mol_type = other RNA

SEQ ID NO: 5174 - RNA, 5419 nt, synthetic construct; identical to SEQ ID NO: 3577
  modified_base 1..5419: mod_base = OTHER; note = Each t is m1f
  source 1..5419: mol_type = other RNA

SEQ ID NO: 5175 - RNA, 5419 nt, synthetic construct; identical to SEQ ID NO: 3578
  modified_base 1..5419: mod_base = OTHER; note = Each t is m1f
  source 1..5419: mol_type = other RNA

SEQ ID NO: 5176 - RNA, 5419 nt, synthetic construct; identical to SEQ ID NO: 3579
  modified_base 1..5419: mod_base = OTHER; note = Each t is m1f
  source 1..5419: mol_type = other RNA

SEQ ID NO: 5177 - RNA, 5419 nt, synthetic construct; identical to SEQ ID NO: 3580
  modified_base 1..5419: mod_base = OTHER; note = Each t is m1f
  source 1..5419: mol_type = other RNA

SEQ ID NO: 5178 - RNA, 5419 nt, synthetic construct; identical to SEQ ID NO: 3581
  modified_base 1..5419: mod_base = OTHER; note = Each t is m1f
  source 1..5419: mol_type = other RNA

SEQ ID NO: 5179 - RNA, 5419 nt, synthetic construct; identical to SEQ ID NO: 3582
  modified_base 1..5419: mod_base = OTHER; note = Each t is m1f
  source 1..5419: mol_type = other RNA

SEQ ID NO: 5180 - RNA, 5419 nt, synthetic construct; identical to SEQ ID NO: 3583
  modified_base 1..5419: mod_base = OTHER; note = Each t is m1f
  source 1..5419: mol_type = other RNA

SEQ ID NO: 5181 - RNA, 5419 nt, synthetic construct; identical to SEQ ID NO: 3584
  modified_base 1..5419: mod_base = OTHER; note = Each t is m1f
  source 1..5419: mol_type = other RNA

SEQ ID NO: 5182 - RNA, 5419 nt, synthetic construct; identical to SEQ ID NO: 3585
  modified_base 1..5419: mod_base = OTHER; note = Each t is m1f
  source 1..5419: mol_type = other RNA

SEQ ID NO: 5183 - RNA, 5419 nt, synthetic construct; identical to SEQ ID NO: 3586
  modified_base 1..5419: mod_base = OTHER; note = Each t is m1f
  source 1..5419: mol_type = other RNA

SEQ ID NO: 5184 - RNA, 5419 nt, synthetic construct; identical to SEQ ID NO: 3587
  modified_base 1..5419: mod_base = OTHER; note = Each t is m1f
  source 1..5419: mol_type = other RNA

SEQ ID NO: 5185 - RNA, 5419 nt, synthetic construct; identical to SEQ ID NO: 3588
  modified_base 1..5419: mod_base = OTHER; note = Each t is m1f
  source 1..5419: mol_type = other RNA

SEQ ID NO: 5186 - RNA, 5419 nt, synthetic construct; identical to SEQ ID NO: 3589
  modified_base 1..5419: mod_base = OTHER; note = Each t is m1f
  source 1..5419: mol_type = other RNA

SEQ ID NO: 5187 - RNA, 5419 nt, synthetic construct; identical to SEQ ID NO: 3590
  modified_base 1..5419: mod_base = OTHER; note = Each t is m1f
  source 1..5419: mol_type = other RNA

SEQ ID NO: 5188 - RNA, 5419 nt, synthetic construct; identical to SEQ ID NO: 3591
  modified_base 1..5419: mod_base = OTHER; note = Each t is m1f
  source 1..5419: mol_type = other RNA

SEQ ID NO: 5189 - RNA, 5419 nt, synthetic construct; identical to SEQ ID NO: 3592
  modified_base 1..5419: mod_base = OTHER; note = Each t is m1f
  source 1..5419: mol_type = other RNA

SEQ ID NO: 5190 - RNA, 5419 nt, synthetic construct; identical to SEQ ID NO: 3593
  modified_base 1..5419: mod_base = OTHER; note = Each t is m1f
  source 1..5419: mol_type = other RNA

SEQ ID NO: 5191 - RNA, 5419 nt, synthetic construct; identical to SEQ ID NO: 3594
  modified_base 1..5419: mod_base = OTHER; note = Each t is m1f
  source 1..5419: mol_type = other RNA

SEQ ID NO: 5192 - RNA, 5419 nt, synthetic construct; identical to SEQ ID NO: 3595
  modified_base 1..5419: mod_base = OTHER; note = Each t is m1f
  source 1..5419: mol_type = other RNA

SEQ ID NO: 5193 - RNA, 5419 nt, synthetic construct; identical to SEQ ID NO: 3596
  modified_base 1..5419: mod_base = OTHER; note = Each t is m1f
  source 1..5419: mol_type = other RNA

SEQ ID NO: 5194 - RNA, 5419 nt, synthetic construct; identical to SEQ ID NO: 3597
  modified_base 1..5419: mod_base = OTHER; note = Each t is m1f
  source 1..5419: mol_type = other RNA

SEQ ID NO: 5195 - RNA, 5419 nt, synthetic construct; identical to SEQ ID NO: 3598
  modified_base 1..5419: mod_base = OTHER; note = Each t is m1f
  source 1..5419: mol_type = other RNA

SEQ ID NO: 5196 - RNA, 5419 nt, synthetic construct; identical to SEQ ID NO: 3599
  modified_base 1..5419: mod_base = OTHER; note = Each t is m1f
  source 1..5419: mol_type = other RNA

SEQ ID NO: 5197 - RNA, 5419 nt, synthetic construct; identical to SEQ ID NO: 3600
  modified_base 1..5419: mod_base = OTHER; note = Each t is m1f
  source 1..5419: mol_type = other RNA

SEQ ID NO: 5198 - RNA, 5419 nt, synthetic construct; identical to SEQ ID NO: 3601
  modified_base 1..5419: mod_base = OTHER; note = Each t is m1f
  source 1..5419: mol_type = other RNA

SEQ ID NO: 5199 - RNA, 5419 nt, synthetic construct; identical to SEQ ID NO: 3602
  modified_base 1..5419: mod_base = OTHER; note = Each t is m1f
  source 1..5419: mol_type = other RNA

SEQ ID NO: 5200 - RNA, 5419 nt, synthetic construct; identical to SEQ ID NO: 3603
  modified_base 1..5419: mod_base = OTHER; note = Each t is m1f
  source 1..5419: mol_type = other RNA

SEQ ID NO: 5201 - RNA, 5419 nt, synthetic construct; identical to SEQ ID NO: 3604
  modified_base 1..5419: mod_base = OTHER; note = Each t is m1f
  source 1..5419: mol_type = other RNA

SEQ ID NO: 5202 - RNA, 5419 nt, synthetic construct; identical to SEQ ID NO: 3605
  modified_base 1..5419: mod_base = OTHER; note = Each t is m1f
  source 1..5419: mol_type = other RNA

SEQ ID NO: 5203 - RNA, 5419 nt, synthetic construct; identical to SEQ ID NO: 3606
  modified_base 1..5419: mod_base = OTHER; note = Each t is m1f
  source 1..5419: mol_type = other RNA

SEQ ID NO: 5204 - RNA, 5419 nt, synthetic construct; identical to SEQ ID NO: 3607
  modified_base 1..5419: mod_base = OTHER; note = Each t is m1f
  source 1..5419: mol_type = other RNA

SEQ ID NO: 5205 - RNA, 5419 nt, synthetic construct; identical to SEQ ID NO: 3608
  modified_base 1..5419: mod_base = OTHER; note = Each t is m1f
  source 1..5419: mol_type = other RNA

SEQ ID NO: 5206 - RNA, 5419 nt, synthetic construct; identical to SEQ ID NO: 3609
  modified_base 1..5419: mod_base = OTHER; note = Each t is m1f
  source 1..5419: mol_type = other RNA

SEQ ID NO: 5207 - RNA, 5419 nt, synthetic construct; identical to SEQ ID NO: 3610
  modified_base 1..5419: mod_base = OTHER; note = Each t is m1f
  source 1..5419: mol_type = other RNA

SEQ ID NO: 5208 - RNA, 5419 nt, synthetic construct; identical to SEQ ID NO: 3611
  modified_base 1..5419: mod_base = OTHER; note = Each t is m1f
  source 1..5419: mol_type = other RNA

SEQ ID NO: 5209 - RNA, 5419 nt, synthetic construct; identical to SEQ ID NO: 3612
  modified_base 1..5419: mod_base = OTHER; note = Each t is m1f
  source 1..5419: mol_type = other RNA

SEQ ID NO: 5210 - RNA, 5419 nt, synthetic construct; identical to SEQ ID NO: 3613
  modified_base 1..5419: mod_base = OTHER; note = Each t is m1f
  source 1..5419: mol_type = other RNA

SEQ ID NO: 5211 - RNA, 5419 nt, synthetic construct; identical to SEQ ID NO: 3614
  modified_base 1..5419: mod_base = OTHER; note = Each t is m1f
  source 1..5419: mol_type = other RNA

SEQ ID NO: 5212 - RNA, 5419 nt, synthetic construct; identical to SEQ ID NO: 3615
  modified_base 1..5419: mod_base = OTHER; note = Each t is m1f
  source 1..5419: mol_type = other RNA

SEQ ID NO: 5213 - RNA, 5419 nt, synthetic construct; identical to SEQ ID NO: 3616
  modified_base 1..5419: mod_base = OTHER; note = Each t is m1f
  source 1..5419: mol_type = other RNA

SEQ ID NO: 5214 - RNA, 5419 nt, synthetic construct; identical to SEQ ID NO: 3617
  modified_base 1..5419: mod_base = OTHER; note = Each t is m1f
  source 1..5419: mol_type = other RNA

SEQ ID NO: 5215 - RNA, 5419 nt, synthetic construct; identical to SEQ ID NO: 3618
  modified_base 1..5419: mod_base = OTHER; note = Each t is m1f
  source 1..5419: mol_type = other RNA

SEQ ID NO: 5216 - RNA, 5419 nt, synthetic construct; identical to SEQ ID NO: 3619
  modified_base 1..5419: mod_base = OTHER; note = Each t is m1f
  source 1..5419: mol_type = other RNA

SEQ ID NO: 5217 - RNA, 5419 nt, synthetic construct; identical to SEQ ID NO: 3620
  modified_base 1..5419: mod_base = OTHER; note = Each t is m1f
  source 1..5419: mol_type = other RNA

SEQ ID NO: 5218 - RNA, 5419 nt, synthetic construct; identical to SEQ ID NO: 3621
  modified_base 1..5419: mod_base = OTHER; note = Each t is m1f
  source 1..5419: mol_type = other RNA

SEQ ID NO: 5219 - RNA, 5419 nt, synthetic construct; identical to SEQ ID NO: 3622
  modified_base 1..5419: mod_base = OTHER; note = Each t is m1f
  source 1..5419: mol_type = other RNA

SEQ ID NO: 5220 - RNA, 5419 nt, synthetic construct; identical to SEQ ID NO: 3623
  modified_base 1..5419: mod_base = OTHER; note = Each t is m1f
  source 1..5419: mol_type = other RNA

SEQ ID NO: 5221 - RNA, 5419 nt, synthetic construct; identical to SEQ ID NO: 3624
  modified_base 1..5419: mod_base = OTHER; note = Each t is m1f
  source 1..5419: mol_type = other RNA

SEQ ID NO: 5222 - RNA, 5419 nt, synthetic construct; identical to SEQ ID NO: 3625
  modified_base 1..5419: mod_base = OTHER; note = Each t is m1f
  source 1..5419: mol_type = other RNA

SEQ ID NO: 5223 - RNA, 5419 nt, synthetic construct; identical to SEQ ID NO: 3626
  modified_base 1..5419: mod_base = OTHER; note = Each t is m1f
  source 1..5419: mol_type = other RNA

SEQ ID NO: 5224 - RNA, 5419 nt, synthetic construct; identical to SEQ ID NO: 3627
  modified_base 1..5419: mod_base = OTHER; note = Each t is m1f
  source 1..5419: mol_type = other RNA

SEQ ID NO: 5225 - RNA, 5419 nt, synthetic construct; identical to SEQ ID NO: 3628
  modified_base 1..5419: mod_base = OTHER; note = Each t is m1f
  source 1..5419: mol_type = other RNA

SEQ ID NO: 5226 - RNA, 5419 nt, synthetic construct; identical to SEQ ID NO: 3629
  modified_base 1..5419: mod_base = OTHER; note = Each t is m1f
  source 1..5419: mol_type = other RNA

SEQ ID NO: 5227 - RNA, 5419 nt, synthetic construct; identical to SEQ ID NO: 3630
  modified_base 1..5419: mod_base = OTHER; note = Each t is m1f
  source 1..5419: mol_type = other RNA

SEQ ID NO: 5228 - RNA, 5419 nt, synthetic construct; identical to SEQ ID NO: 3631
  modified_base 1..5419: mod_base = OTHER; note = Each t is m1f
  source 1..5419: mol_type = other RNA

SEQ ID NO: 5229 - RNA, 5419 nt, synthetic construct; identical to SEQ ID NO: 3632
  modified_base 1..5419: mod_base = OTHER; note = Each t is m1f
  source 1..5419: mol_type = other RNA

SEQ ID NO: 5230 - RNA, 5419 nt, synthetic construct; identical to SEQ ID NO: 3633
  modified_base 1..5419: mod_base = OTHER; note = Each t is m1f
  source 1..5419: mol_type = other RNA

SEQ ID NO: 5231 - RNA, 5419 nt, synthetic construct; identical to SEQ ID NO: 3634
  modified_base 1..5419: mod_base = OTHER; note = Each t is m1f
  source 1..5419: mol_type = other RNA

SEQ ID NO: 5232 - RNA, 5419 nt, synthetic construct; identical to SEQ ID NO: 3635
  modified_base 1..5419: mod_base = OTHER; note = Each t is m1f
  source 1..5419: mol_type = other RNA

SEQ ID NO: 5233 - RNA, 5419 nt, synthetic construct; identical to SEQ ID NO: 3636
  modified_base 1..5419: mod_base = OTHER; note = Each t is m1f
  source 1..5419: mol_type = other RNA

SEQ ID NO: 5234 - RNA, 5419 nt, synthetic construct; identical to SEQ ID NO: 3637
  modified_base 1..5419: mod_base = OTHER; note = Each t is m1f
  source 1..5419: mol_type = other RNA

SEQ ID NO: 5235 - RNA, 5419 nt, synthetic construct; identical to SEQ ID NO: 3638
  modified_base 1..5419: mod_base = OTHER; note = Each t is m1f
  source 1..5419: mol_type = other RNA

SEQ ID NO: 5236 - RNA, 5419 nt, synthetic construct; identical to SEQ ID NO: 3639
  modified_base 1..5419: mod_base = OTHER; note = Each t is m1f
  source 1..5419: mol_type = other RNA

SEQ ID NO: 5237 - RNA, 5419 nt, synthetic construct; identical to SEQ ID NO: 3640
  modified_base 1..5419: mod_base = OTHER; note = Each t is m1f
  source 1..5419: mol_type = other RNA

SEQ ID NO: 5238 - RNA, 5419 nt, synthetic construct; identical to SEQ ID NO: 3641
  modified_base 1..5419: mod_base = OTHER; note = Each t is m1f
  source 1..5419: mol_type = other RNA

SEQ ID NO: 5239 - RNA, 5419 nt, synthetic construct; identical to SEQ ID NO: 3642
  modified_base 1..5419: mod_base = OTHER; note = Each t is m1f
  source 1..5419: mol_type = other RNA

SEQ ID NO: 5240 - RNA, 5419 nt, synthetic construct; identical to SEQ ID NO: 3643
  modified_base 1..5419: mod_base = OTHER; note = Each t is m1f
  source 1..5419: mol_type = other RNA

SEQ ID NO: 5241 - RNA, 5419 nt, synthetic construct; identical to SEQ ID NO: 3644
  modified_base 1..5419: mod_base = OTHER; note = Each t is m1f
  source 1..5419: mol_type = other RNA

SEQ ID NO: 5242 - RNA, 5419 nt, synthetic construct; identical to SEQ ID NO: 3645
  modified_base 1..5419: mod_base = OTHER; note = Each t is m1f
  source 1..5419: mol_type = other RNA

SEQ ID NO: 5243 - RNA, 5419 nt, synthetic construct; identical to SEQ ID NO: 3646
  modified_base 1..5419: mod_base = OTHER; note = Each t is m1f
  source 1..5419: mol_type = other RNA

SEQ ID NO: 5244 - RNA, 5419 nt, synthetic construct; identical to SEQ ID NO: 3647
  modified_base 1..5419: mod_base = OTHER; note = Each t is m1f
  source 1..5419: mol_type = other RNA

SEQ ID NO: 5245 - RNA, 5419 nt, synthetic construct; identical to SEQ ID NO: 3648
  modified_base 1..5419: mod_base = OTHER; note = Each t is m1f
  source 1..5419: mol_type = other RNA

SEQ ID NO: 5246 - RNA, 5419 nt, synthetic construct; identical to SEQ ID NO: 3649
  modified_base 1..5419: mod_base = OTHER; note = Each t is m1f
  source 1..5419: mol_type = other RNA

SEQ ID NO: 5247 - RNA, 5419 nt, synthetic construct; identical to SEQ ID NO: 3650
  modified_base 1..5419: mod_base = OTHER; note = Each t is m1f
  source 1..5419: mol_type = other RNA

SEQ ID NO: 5248 - RNA, 5419 nt, synthetic construct; identical to SEQ ID NO: 3651
  modified_base 1..5419: mod_base = OTHER; note = Each t is m1f
  source 1..5419: mol_type = other RNA

SEQ ID NO: 5249 - RNA, 5419 nt, synthetic construct; identical to SEQ ID NO: 3652
  modified_base 1..5419: mod_base = OTHER; note = Each t is m1f
  source 1..5419: mol_type = other RNA

SEQ ID NO: 5250 - RNA, 5419 nt, synthetic construct; identical to SEQ ID NO: 3653
  modified_base 1..5419: mod_base = OTHER; note = Each t is m1f
  source 1..5419: mol_type = other RNA

SEQ ID NO: 5251 - RNA, 5419 nt, synthetic construct; identical to SEQ ID NO: 3654
  modified_base 1..5419: mod_base = OTHER; note = Each t is m1f
  source 1..5419: mol_type = other RNA

SEQ ID NO: 5252 - RNA, 5419 nt, synthetic construct; identical to SEQ ID NO: 3655
  modified_base 1..5419: mod_base = OTHER; note = Each t is m1f
  source 1..5419: mol_type = other RNA

SEQ ID NO: 5253 - RNA, 5419 nt, synthetic construct; identical to SEQ ID NO: 3656
  modified_base 1..5419: mod_base = OTHER; note = Each t is m1f
  source 1..5419: mol_type = other RNA

SEQ ID NO: 5254 - RNA, 5419 nt, synthetic construct; identical to SEQ ID NO: 3657
  modified_base 1..5419: mod_base = OTHER; note = Each t is m1f
  source 1..5419: mol_type = other RNA

SEQ ID NO: 5255 - RNA, 5419 nt, synthetic construct; identical to SEQ ID NO: 3658
  modified_base 1..5419: mod_base = OTHER; note = Each t is m1f
  source 1..5419: mol_type = other RNA

SEQ ID NO: 5256 - RNA, 5419 nt, synthetic construct; identical to SEQ ID NO: 3659
  modified_base 1..5419: mod_base = OTHER; note = Each t is m1f
  source 1..5419: mol_type = other RNA

SEQ ID NO: 5257 - RNA, 5419 nt, synthetic construct; identical to SEQ ID NO: 3660
  modified_base 1..5419: mod_base = OTHER; note = Each t is m1f
  source 1..5419: mol_type = other RNA

SEQ ID NO: 5258 - RNA, 5419 nt, synthetic construct; identical to SEQ ID NO: 3661
  modified_base 1..5419: mod_base = OTHER; note = Each t is m1f
  source 1..5419: mol_type = other RNA

SEQ ID NO: 5259 - RNA, 5419 nt, synthetic construct; identical to SEQ ID NO: 3662
  modified_base 1..5419: mod_base = OTHER; note = Each t is m1f
  source 1..5419: mol_type = other RNA

SEQ ID NO: 5260 - RNA, 5419 nt, synthetic construct; identical to SEQ ID NO: 3663
  modified_base 1..5419: mod_base = OTHER; note = Each t is m1f
  source 1..5419: mol_type = other RNA

SEQ ID NO: 5261 - RNA, 5419 nt, synthetic construct; identical to SEQ ID NO: 3664
  modified_base 1..5419: mod_base = OTHER; note = Each t is m1f
  source 1..5419: mol_type = other RNA

SEQ ID NO: 5262 - RNA, 5419 nt, synthetic construct; identical to SEQ ID NO: 3665
  modified_base 1..5419: mod_base = OTHER; note = Each t is m1f
  source 1..5419: mol_type = other RNA

SEQ ID NO: 5263 - RNA, 5419 nt, synthetic construct; identical to SEQ ID NO: 3666
  modified_base 1..5419: mod_base = OTHER; note = Each t is m1f
  source 1..5419: mol_type = other RNA

SEQ ID NO: 5264 - RNA, 5419 nt, synthetic construct; identical to SEQ ID NO: 3667
  modified_base 1..5419: mod_base = OTHER; note = Each t is m1f
  source 1..5419: mol_type = other RNA

SEQ ID NO: 5265 - RNA, 5419 nt, synthetic construct; identical to SEQ ID NO: 3668
  modified_base 1..5419: mod_base = OTHER; note = Each t is m1f
  source 1..5419: mol_type = other RNA

SEQ ID NO: 5266 - RNA, 5419 nt, synthetic construct; identical to SEQ ID NO: 3669
  modified_base 1..5419: mod_base = OTHER; note = Each t is m1f
  source 1..5419: mol_type = other RNA

SEQ ID NO: 5267 - RNA, 5419 nt, synthetic construct; identical to SEQ ID NO: 3670
  modified_base 1..5419: mod_base = OTHER; note = Each t is m1f
  source 1..5419: mol_type = other RNA

SEQ ID NO: 5268 - RNA, 5419 nt, synthetic construct; identical to SEQ ID NO: 3671
  modified_base 1..5419: mod_base = OTHER; note = Each t is m1f
  source 1..5419: mol_type = other RNA

SEQ ID NO: 5269 - RNA, 5419 nt, synthetic construct; identical to SEQ ID NO: 3672
  modified_base 1..5419: mod_base = OTHER; note = Each t is m1f
  source 1..5419: mol_type = other RNA

SEQ ID NO: 5270 - RNA, 5419 nt, synthetic construct; identical to SEQ ID NO: 3673
  modified_base 1..5419: mod_base = OTHER; note = Each t is m1f
  source 1..5419: mol_type = other RNA

SEQ ID NO: 5271 - RNA, 5419 nt, synthetic construct; identical to SEQ ID NO: 3674
  modified_base 1..5419: mod_base = OTHER; note = Each t is m1f
  source 1..5419: mol_type = other RNA

SEQ ID NO: 5272 - RNA, 5419 nt, synthetic construct; identical to SEQ ID NO: 3675
  modified_base 1..5419: mod_base = OTHER; note = Each t is m1f
  source 1..5419: mol_type = other RNA

SEQ ID NO: 5273 - RNA, 5419 nt, synthetic construct; identical to SEQ ID NO: 3676
  modified_base 1..5419: mod_base = OTHER; note = Each t is m1f
  source 1..5419: mol_type = other RNA

SEQ ID NO: 5274 - RNA, 5419 nt, synthetic construct; identical to SEQ ID NO: 3677
  modified_base 1..5419: mod_base = OTHER; note = Each t is m1f
  source 1..5419: mol_type = other RNA

SEQ ID NO: 5275 - RNA, 5452 nt, synthetic construct; identical to SEQ ID NO: 3678
  modified_base 1..5419: mod_base = OTHER; note = Each t is m1f
  source 1..5452: mol_type = other RNA

SEQ ID NO: 5276 - RNA, 5419 nt, synthetic construct; identical to SEQ ID NO: 3679
  modified_base 1..5419: mod_base = OTHER; note = Each t is m1f
  source 1..5419: mol_type = other RNA

SEQ ID NO: 5277 - RNA, 5416 nt, synthetic construct; identical to SEQ ID NO: 3680
  modified_base 1..5416: mod_base = OTHER; note = Each t is m1f
  source 1..5416: mol_type = other RNA

SEQ ID NO: 5278 - RNA, 5419 nt, synthetic construct; identical to SEQ ID NO: 3681
  modified_base 1..5419: mod_base = OTHER; note = Each t is m1f
  source 1..5419: mol_type = other RNA

SEQ ID NO: 5279 - RNA, 5419 nt, synthetic construct; identical to SEQ ID NO: 3682
  modified_base 1..5419: mod_base = OTHER; note = Each t is m1f
  source 1..5419: mol_type = other RNA

SEQ ID NO: 5280 - RNA, 5419 nt, synthetic construct; identical to SEQ ID NO: 3683
  modified_base 1..5419: mod_base = OTHER; note = Each t is m1f
  source 1..5419: mol_type = other RNA

SEQ ID NO: 5281 - RNA, 5419 nt, synthetic construct; identical to SEQ ID NO: 3684
  modified_base 1..5419: mod_base = OTHER; note = Each t is m1f
  source 1..5419: mol_type = other RNA

SEQ ID NO: 5282 - RNA, 5419 nt, synthetic construct; identical to SEQ ID NO: 3685
  modified_base 1..5419: mod_base = OTHER; note = Each t is m1f
  source 1..5419: mol_type = other RNA

SEQ ID NO: 5283 - RNA, 5419 nt, synthetic construct; identical to SEQ ID NO: 3686
  modified_base 1..5419: mod_base = OTHER; note = Each t is m1f
  source 1..5419: mol_type = other RNA

SEQ ID NO: 5284 - RNA, 5419 nt, synthetic construct; identical to SEQ ID NO: 3687
  modified_base 1..5419: mod_base = OTHER; note = Each t is m1f
  source 1..5419: mol_type = other RNA

SEQ ID NO: 5285 - RNA, 5419 nt, synthetic construct; identical to SEQ ID NO: 3688
  modified_base 1..5419: mod_base = OTHER; note = Each t is m1f
  source 1..5419: mol_type = other RNA

SEQ ID NO: 5286 - RNA, 5419 nt, synthetic construct; identical to SEQ ID NO: 3689
  modified_base 1..5419: mod_base = OTHER; note = Each t is m1f
  source 1..5419: mol_type = other RNA

SEQ ID NO: 5287 - RNA, 5419 nt, synthetic construct; identical to SEQ ID NO: 3690
  modified_base 1..5419: mod_base = OTHER; note = Each t is m1f
  source 1..5419: mol_type = other RNA

SEQ ID NO: 5288 - RNA, 5419 nt, synthetic construct; identical to SEQ ID NO: 3691
  modified_base 1..5419: mod_base = OTHER; note = Each t is m1f
  source 1..5419: mol_type = other RNA

SEQ ID NO: 5289 - RNA, 5419 nt, synthetic construct; identical to SEQ ID NO: 3692
  modified_base 1..5419: mod_base = OTHER; note = Each t is m1f
  source 1..5419: mol_type = other RNA

SEQ ID NO: 5290 - RNA, 5419 nt, synthetic construct; identical to SEQ ID NO: 3693
  modified_base 1..5419: mod_base = OTHER; note = Each t is m1f
  source 1..5419: mol_type = other RNA

SEQ ID NO: 5291 - RNA, 5419 nt, synthetic construct; identical to SEQ ID NO: 3694
  modified_base 1..5419: mod_base = OTHER; note = Each t is m1f
  source 1..5419: mol_type = other RNA

SEQ ID NO: 5292 - RNA, 5419 nt, synthetic construct; identical to SEQ ID NO: 3695
  modified_base 1..5419: mod_base = OTHER; note = Each t is m1f
  source 1..5419: mol_type = other RNA

SEQ ID NO: 5293 - RNA, 5422 nt, synthetic construct; identical to SEQ ID NO: 3696
  modified_base 1..5419: mod_base = OTHER; note = Each t is m1f
  source 1..5422: mol_type = other RNA

SEQ ID NO: 5294 - RNA, 5419 nt, synthetic construct; identical to SEQ ID NO: 3697
  modified_base 1..5419: mod_base = OTHER; note = Each t is m1f
  source 1..5419: mol_type = other RNA

SEQ ID NO: 5295 - RNA, 5419 nt, synthetic construct; identical to SEQ ID NO: 3698
  modified_base 1..5419: mod_base = OTHER; note = Each t is m1f
  source 1..5419: mol_type = other RNA

SEQ ID NO: 5296 - RNA, 5419 nt, synthetic construct; identical to SEQ ID NO: 3699
  modified_base 1..5419: mod_base = OTHER; note = Each t is m1f
  source 1..5419: mol_type = other RNA

SEQ ID NO: 5297 - RNA, 5419 nt, synthetic construct; identical to SEQ ID NO: 3700
  modified_base 1..5419: mod_base = OTHER; note = Each t is m1f
  source 1..5419: mol_type = other RNA

SEQ ID NO: 5298 - RNA, 5419 nt, synthetic construct; identical to SEQ ID NO: 3701
  modified_base 1..5419: mod_base = OTHER; note = Each t is m1f
  source 1..5419: mol_type = other RNA

SEQ ID NO: 5299 - RNA, 5419 nt, synthetic construct; identical to SEQ ID NO: 3702
  modified_base 1..5419: mod_base = OTHER; note = Each t is m1f
  source 1..5419: mol_type = other RNA

SEQ ID NO: 5300 - RNA, 5419 nt, synthetic construct; identical to SEQ ID NO: 3703
  modified_base 1..5419: mod_base = OTHER; note = Each t is m1f
  source 1..5419: mol_type = other RNA

SEQ ID NO: 5301 - RNA, 5419 nt, synthetic construct; identical to SEQ ID NO: 3704
  modified_base 1..5419: mod_base = OTHER; note = Each t is m1f
  source 1..5419: mol_type = other RNA

SEQ ID NO: 5302 - RNA, 5419 nt, synthetic construct; identical to SEQ ID NO: 3705
  modified_base 1..5419: mod_base = OTHER; note = Each t is m1f
  source 1..5419: mol_type = other RNA

SEQ ID NO: 5303 - RNA, 5419 nt, synthetic construct; identical to SEQ ID NO: 3706
  modified_base 1..5419: mod_base = OTHER; note = Each t is m1f
  source 1..5419: mol_type = other RNA

SEQ ID NO: 5304 - RNA, 5419 nt, synthetic construct; identical to SEQ ID NO: 3707
  modified_base 1..5419: mod_base = OTHER; note = Each t is m1f
  source 1..5419: mol_type = other RNA

SEQ ID NO: 5305 - RNA, 5419 nt, synthetic construct; identical to SEQ ID NO: 3708
  modified_base 1..5419: mod_base = OTHER; note = Each t is m1f
  source 1..5419: mol_type = other RNA

SEQ ID NO: 5306 - RNA, 5419 nt, synthetic construct; identical to SEQ ID NO: 3709
  modified_base 1..5419: mod_base = OTHER; note = Each t is m1f
  source 1..5419: mol_type = other RNA

SEQ ID NO: 5307 - RNA, 5419 nt, synthetic construct; identical to SEQ ID NO: 3710
  modified_base 1..5419: mod_base = OTHER; note = Each t is m1f
  source 1..5419: mol_type = other RNA

SEQ ID NO: 5308 - RNA, 5419 nt, synthetic construct; identical to SEQ ID NO: 3711
  modified_base 1..5419: mod_base = OTHER; note = Each t is m1f
  source 1..5419: mol_type = other RNA

SEQ ID NO: 5309 - RNA, 5419 nt, synthetic construct; identical to SEQ ID NO: 3712
  modified_base 1..5419: mod_base = OTHER; note = Each t is m1f
  source 1..5419: mol_type = other RNA

SEQ ID NO: 5310 - RNA, 5419 nt, synthetic construct; identical to SEQ ID NO: 3713
  modified_base 1..5419: mod_base = OTHER; note = Each t is m1f
  source 1..5419: mol_type = other RNA

SEQ ID NO: 5311 - RNA, 5419 nt, synthetic construct; identical to SEQ ID NO: 3714
  modified_base 1..5419: mod_base = OTHER; note = Each t is m1f
  source 1..5419: mol_type = other RNA

SEQ ID NO: 5312 - RNA, 5419 nt, synthetic construct; identical to SEQ ID NO: 3715
  modified_base 1..5419: mod_base = OTHER; note = Each t is m1f
  source 1..5419: mol_type = other RNA

SEQ ID NO: 5313 - RNA, 5419 nt, synthetic construct; identical to SEQ ID NO: 3716
  modified_base 1..5419: mod_base = OTHER; note = Each t is m1f
  source 1..5419: mol_type = other RNA

SEQ ID NO: 5314 - RNA, 5419 nt, synthetic construct; identical to SEQ ID NO: 3717
  modified_base 1..5419: mod_base = OTHER; note = Each t is m1f
  source 1..5419: mol_type = other RNA

SEQ ID NO: 5315 - RNA, 5419 nt, synthetic construct; identical to SEQ ID NO: 3718
  modified_base 1..5419: mod_base = OTHER; note = Each t is m1f
  source 1..5419: mol_type = other RNA

SEQ ID NO: 5316 - RNA, 5419 nt, synthetic construct; identical to SEQ ID NO: 3719
  modified_base 1..5419: mod_base = OTHER; note = Each t is m1f
  source 1..5419: mol_type = other RNA

SEQ ID NO: 5317 - RNA, 5419 nt, synthetic construct; identical to SEQ ID NO: 3720
  modified_base 1..5419: mod_base = OTHER; note = Each t is m1f
  source 1..5419: mol_type = other RNA

SEQ ID NO: 5318 - RNA, 5419 nt, synthetic construct; identical to SEQ ID NO: 3721
  modified_base 1..5419: mod_base = OTHER; note = Each t is m1f
  source 1..5419: mol_type = other RNA

SEQ ID NO: 5319 - RNA, 5419 nt, synthetic construct; identical to SEQ ID NO: 3722
  modified_base 1..5419: mod_base = OTHER; note = Each t is m1f
  source 1..5419: mol_type = other RNA

SEQ ID NO: 5320 - RNA, 5419 nt, synthetic construct; identical to SEQ ID NO: 3723
  modified_base 1..5419: mod_base = OTHER; note = Each t is m1f
  source 1..5419: mol_type = other RNA

SEQ ID NO: 5321 - RNA, 5419 nt, synthetic construct; identical to SEQ ID NO: 3724
  modified_base 1..5419: mod_base = OTHER; note = Each t is m1f
  source 1..5419: mol_type = other RNA

SEQ ID NO: 5322 - RNA, 5419 nt, synthetic construct; identical to SEQ ID NO: 3725
  modified_base 1..5419: mod_base = OTHER; note = Each t is m1f
  source 1..5419: mol_type = other RNA

SEQ ID NO: 5323 - RNA, 5419 nt, synthetic construct; identical to SEQ ID NO: 3726
  modified_base 1..5419: mod_base = OTHER; note = Each t is m1f
  source 1..5419: mol_type = other RNA

SEQ ID NO: 5324 - RNA, 5419 nt, synthetic construct; identical to SEQ ID NO: 3727
  modified_base 1..5419: mod_base = OTHER; note = Each t is m1f
  source 1..5419: mol_type = other RNA

SEQ ID NO: 5325 - RNA, 5419 nt, synthetic construct; identical to SEQ ID NO: 3728
  modified_base 1..5419: mod_base = OTHER; note = Each t is m1f
  source 1..5419: mol_type = other RNA

SEQ ID NO: 5326 - RNA, 5419 nt, synthetic construct; identical to SEQ ID NO: 3729
  modified_base 1..5419: mod_base = OTHER; note = Each t is m1f
  source 1..5419: mol_type = other RNA

SEQ ID NO: 5327 - RNA, 5419 nt, synthetic construct; identical to SEQ ID NO: 3730
  modified_base 1..5419: mod_base = OTHER; note = Each t is m1f
  source 1..5419: mol_type = other RNA

SEQ ID NO: 5328 - RNA, 5419 nt, synthetic construct; identical to SEQ ID NO: 3731
  modified_base 1..5419: mod_base = OTHER; note = Each t is m1f
  source 1..5419: mol_type = other RNA

SEQ ID NO: 5329 - RNA, 5419 nt, synthetic construct; identical to SEQ ID NO: 3732
  modified_base 1..5419: mod_base = OTHER; note = Each t is m1f
  source 1..5419: mol_type = other RNA

SEQ ID NO: 5330 - RNA, 5419 nt, synthetic construct; identical to SEQ ID NO: 3733
  modified_base 1..5419: mod_base = OTHER; note = Each t is m1f
  source 1..5419: mol_type = other RNA

SEQ ID NO: 5331 - RNA, 5419 nt, synthetic construct; identical to SEQ ID NO: 3734
  modified_base 1..5419: mod_base = OTHER; note = Each t is m1f
  source 1..5419: mol_type = other RNA

SEQ ID NO: 5332 - RNA, 5419 nt, synthetic construct; identical to SEQ ID NO: 3735
  modified_base 1..5419: mod_base = OTHER; note = Each t is m1f
  source 1..5419: mol_type = other RNA

SEQ ID NO: 5333 - RNA, 5419 nt, synthetic construct; identical to SEQ ID NO: 3736
  modified_base 1..5419: mod_base = OTHER; note = Each t is m1f
  source 1..5419: mol_type = other RNA

SEQ ID NO: 5334 - RNA, 5419 nt, synthetic construct; identical to SEQ ID NO: 3737
  modified_base 1..5419: mod_base = OTHER; note = Each t is m1f
  source 1..5419: mol_type = other RNA

SEQ ID NO: 5335 - RNA, 5419 nt, synthetic construct; identical to SEQ ID NO: 3738
  modified_base 1..5419: mod_base = OTHER; note = Each t is m1f
  source 1..5419: mol_type = other RNA

SEQ ID NO: 5336 - RNA, 5419 nt, synthetic construct; identical to SEQ ID NO: 3739
  modified_base 1..5419: mod_base = OTHER; note = Each t is m1f
  source 1..5419: mol_type = other RNA

SEQ ID NO: 5337 - RNA, 5419 nt, synthetic construct; identical to SEQ ID NO: 3740
  modified_base 1..5419: mod_base = OTHER; note = Each t is m1f
  source 1..5419: mol_type = other RNA

SEQ ID NO: 5338 - RNA, 5419 nt, synthetic construct; identical to SEQ ID NO: 3741
  modified_base 1..5419: mod_base = OTHER; note = Each t is m1f
  source 1..5419: mol_type = other RNA

SEQ ID NO: 5339 - RNA, 5419 nt, synthetic construct; identical to SEQ ID NO: 3742
  modified_base 1..5419: mod_base = OTHER; note = Each t is m1f
  source 1..5419: mol_type = other RNA

SEQ ID NO: 5340 - RNA, 5419 nt, synthetic construct; identical to SEQ ID NO: 3743
  modified_base 1..5419: mod_base = OTHER; note = Each t is m1f
  source 1..5419: mol_type = other RNA

SEQ ID NO: 5341 - RNA, 5419 nt, synthetic construct; identical to SEQ ID NO: 3744
  modified_base 1..5419: mod_base = OTHER; note = Each t is m1f
  source 1..5419: mol_type = other RNA

SEQ ID NO: 5342 - RNA, 5419 nt, synthetic construct; identical to SEQ ID NO: 3745
  modified_base 1..5419: mod_base = OTHER; note = Each t is m1f
  source 1..5419: mol_type = other RNA

SEQ ID NO: 5343 - RNA, 5419 nt, synthetic construct; identical to SEQ ID NO: 3746
  modified_base 1..5419: mod_base = OTHER; note = Each t is m1f
  source 1..5419: mol_type = other RNA

SEQ ID NO: 5344 - RNA, 5416 nt, synthetic construct; identical to SEQ ID NO: 3747
  modified_base 1..5416: mod_base = OTHER; note = Each t is m1f
  source 1..5416: mol_type = other RNA

SEQ ID NO: 5345 - RNA, 5419 nt, synthetic construct; identical to SEQ ID NO: 3748
  modified_base 1..5419: mod_base = OTHER; note = Each t is m1f
  source 1..5419: mol_type = other RNA

SEQ ID NO: 5346 - RNA, 5419 nt, synthetic construct; identical to SEQ ID NO: 3749
  modified_base 1..5419: mod_base = OTHER; note = Each t is m1f
  source 1..5419: mol_type = other RNA

SEQ ID NO: 5347 - RNA, 5419 nt, synthetic construct; identical to SEQ ID NO: 3750
  modified_base 1..5419: mod_base = OTHER; note = Each t is m1f
  source 1..5419: mol_type = other RNA

SEQ ID NO: 5348 - RNA, 5419 nt, synthetic construct; identical to SEQ ID NO: 3751
  modified_base 1..5419: mod_base = OTHER; note = Each t is m1f
  source 1..5419: mol_type = other RNA

SEQ ID NO: 5349 - RNA, 5419 nt, synthetic construct; identical to SEQ ID NO: 3752
  modified_base 1..5419: mod_base = OTHER; note = Each t is m1f
  source 1..5419: mol_type = other RNA

SEQ ID NO: 5350 - RNA, 5419 nt, synthetic construct; identical to SEQ ID NO: 3753
  modified_base 1..5419: mod_base = OTHER; note = Each t is m1f
  source 1..5419: mol_type = other RNA

SEQ ID NO: 5351 - RNA, 5419 nt, synthetic construct; identical to SEQ ID NO: 3754
  modified_base 1..5419: mod_base = OTHER; note = Each t is m1f
  source 1..5419: mol_type = other RNA

SEQ ID NO: 5352 - RNA, 5419 nt, synthetic construct; identical to SEQ ID NO: 3755
  modified_base 1..5419: mod_base = OTHER; note = Each t is m1f
  source 1..5419: mol_type = other RNA

SEQ ID NO: 5353 - RNA, 5419 nt, synthetic construct; identical to SEQ ID NO: 3756
  modified_base 1..5419: mod_base = OTHER; note = Each t is m1f
  source 1..5419: mol_type = other RNA

SEQ ID NO: 5354 - RNA, 5419 nt, synthetic construct; identical to SEQ ID NO: 3757
  modified_base 1..5419: mod_base = OTHER; note = Each t is m1f
  source 1..5419: mol_type = other RNA

SEQ ID NO: 5355 - RNA, 5419 nt, synthetic construct; identical to SEQ ID NO: 3758
  modified_base 1..5419: mod_base = OTHER; note = Each t is m1f
  source 1..5419: mol_type = other RNA

SEQ ID NO: 5356 - RNA, 5419 nt, synthetic construct; identical to SEQ ID NO: 3759
  modified_base 1..5419: mod_base = OTHER; note = Each t is m1f
  source 1..5419: mol_type = other RNA

SEQ ID NO: 5357 - RNA, 5419 nt, synthetic construct; identical to SEQ ID NO: 3760
  modified_base 1..5419: mod_base = OTHER; note = Each t is m1f
  source 1..5419: mol_type = other RNA

SEQ ID NO: 5358 - RNA, 5419 nt, synthetic construct; identical to SEQ ID NO: 3761
  modified_base 1..5419: mod_base = OTHER; note = Each t is m1f
  source 1..5419: mol_type = other RNA

SEQ ID NO: 5359 - RNA, 5419 nt, synthetic construct; identical to SEQ ID NO: 3762
  modified_base 1..5419: mod_base = OTHER; note = Each t is m1f
  source 1..5419: mol_type = other RNA

SEQ ID NO: 5360 - RNA, 5419 nt, synthetic construct; identical to SEQ ID NO: 3763
  modified_base 1..5419: mod_base = OTHER; note = Each t is m1f
  source 1..5419: mol_type = other RNA

SEQ ID NO: 5361 - RNA, 5419 nt, synthetic construct; identical to SEQ ID NO: 3764
  modified_base 1..5419: mod_base = OTHER; note = Each t is m1f
  source 1..5419: mol_type = other RNA

SEQ ID NO: 5362 - RNA, 5419 nt, synthetic construct; identical to SEQ ID NO: 3765
  modified_base 1..5419: mod_base = OTHER; note = Each t is m1f
  source 1..5419: mol_type = other RNA

SEQ ID NO: 5363 - RNA, 5419 nt, synthetic construct; identical to SEQ ID NO: 3766
  modified_base 1..5419: mod_base = OTHER; note = Each t is m1f
  source 1..5419: mol_type = other RNA

SEQ ID NO: 5364 - RNA, 5419 nt, synthetic construct; identical to SEQ ID NO: 3767
  modified_base 1..5419: mod_base = OTHER; note = Each t is m1f
  source 1..5419: mol_type = other RNA

SEQ ID NO: 5365 - RNA, 5419 nt, synthetic construct; identical to SEQ ID NO: 3768
  modified_base 1..5419: mod_base = OTHER; note = Each t is m1f
  source 1..5419: mol_type = other RNA

SEQ ID NO: 5366 - RNA, 5419 nt, synthetic construct; identical to SEQ ID NO: 3769
  modified_base 1..5419: mod_base = OTHER; note = Each t is m1f
  source 1..5419: mol_type = other RNA

SEQ ID NO: 5367 - RNA, 5419 nt, synthetic construct; identical to SEQ ID NO: 3770
  modified_base 1..5419: mod_base = OTHER; note = Each t is m1f
  source 1..5419: mol_type = other RNA

SEQ ID NO: 5368 - RNA, 5419 nt, synthetic construct; identical to SEQ ID NO: 3771
  modified_base 1..5419: mod_base = OTHER; note = Each t is m1f
  source 1..5419: mol_type = other RNA

SEQ ID NO: 5369 - RNA, 5419 nt, synthetic construct; identical to SEQ ID NO: 3772
  modified_base 1..5419: mod_base = OTHER; note = Each t is m1f
  source 1..5419: mol_type = other RNA

SEQ ID NO: 5370 - RNA, 5419 nt, synthetic construct; identical to SEQ ID NO: 3773
  modified_base 1..5419: mod_base = OTHER; note = Each t is m1f
  source 1..5419: mol_type = other RNA

SEQ ID NO: 5371 - RNA, 5419 nt, synthetic construct; identical to SEQ ID NO: 3774
  modified_base 1..5419: mod_base = OTHER; note = Each t is m1f
  source 1..5419: mol_type = other RNA

SEQ ID NO: 5372 - RNA, 5419 nt, synthetic construct; identical to SEQ ID NO: 3775
  modified_base 1..5419: mod_base = OTHER; note = Each t is m1f
  source 1..5419: mol_type = other RNA

SEQ ID NO: 5373 - RNA, 5419 nt, synthetic construct; identical to SEQ ID NO: 3776
  modified_base 1..5419: mod_base = OTHER; note = Each t is m1f
  source 1..5419: mol_type = other RNA

SEQ ID NO: 5374 - RNA, 5419 nt, synthetic construct; identical to SEQ ID NO: 3777
  modified_base 1..5419: mod_base = OTHER; note = Each t is m1f
  source 1..5419: mol_type = other RNA

SEQ ID NO: 5375 - RNA, 5419 nt, synthetic construct; identical to SEQ ID NO: 3778
  modified_base 1..5419: mod_base = OTHER; note = Each t is m1f
  source 1..5419: mol_type = other RNA

SEQ ID NO: 5376 - RNA, 5419 nt, synthetic construct; identical to SEQ ID NO: 3779
  modified_base 1..5419: mod_base = OTHER; note = Each t is m1f
  source 1..5419: mol_type = other RNA

SEQ ID NO: 5377 - RNA, 5419 nt, synthetic construct; identical to SEQ ID NO: 3780
  modified_base 1..5419: mod_base = OTHER; note = Each t is m1f
  source 1..5419: mol_type = other RNA

SEQ ID NO: 5378 - RNA, 5419 nt, synthetic construct; identical to SEQ ID NO: 3781
  modified_base 1..5419: mod_base = OTHER; note = Each t is m1f
  source 1..5419: mol_type = other RNA

SEQ ID NO: 5379 - RNA, 5419 nt, synthetic construct; identical to SEQ ID NO: 3782
  modified_base 1..5419: mod_base = OTHER; note = Each t is m1f
  source 1..5419: mol_type = other RNA

SEQ ID NO: 5380 - RNA, 5419 nt, synthetic construct; identical to SEQ ID NO: 3783
  modified_base 1..5419: mod_base = OTHER; note = Each t is m1f
  source 1..5419: mol_type = other RNA

SEQ ID NO: 5381 - RNA, 5419 nt, synthetic construct; identical to SEQ ID NO: 3784
  modified_base 1..5419: mod_base = OTHER; note = Each t is m1f
  source 1..5419: mol_type = other RNA

SEQ ID NO: 5382 - RNA, 5419 nt, synthetic construct; identical to SEQ ID NO: 3785
  modified_base 1..5419: mod_base = OTHER; note = Each t is m1f
  source 1..5419: mol_type = other RNA

SEQ ID NO: 5383 - RNA, 5419 nt, synthetic construct; identical to SEQ ID NO: 3786
  modified_base 1..5419: mod_base = OTHER; note = Each t is m1f
  source 1..5419: mol_type = other RNA

SEQ ID NO: 5384 - RNA, 5419 nt, synthetic construct; identical to SEQ ID NO: 3787
  modified_base 1..5419: mod_base = OTHER; note = Each t is m1f
  source 1..5419: mol_type = other RNA

SEQ ID NO: 5385 - RNA, 5419 nt, synthetic construct; identical to SEQ ID NO: 3788
  modified_base 1..5419: mod_base = OTHER; note = Each t is m1f
  source 1..5419: mol_type = other RNA

SEQ ID NO: 5386 - RNA, 5419 nt, synthetic construct; identical to SEQ ID NO: 3789
  modified_base 1..5419: mod_base = OTHER; note = Each t is m1f
  source 1..5419: mol_type = other RNA

SEQ ID NO: 5387 - RNA, 5419 nt, synthetic construct; identical to SEQ ID NO: 3790
  modified_base 1..5419: mod_base = OTHER; note = Each t is m1f
  source 1..5419: mol_type = other RNA

SEQ ID NO: 5388 - RNA, 5419 nt, synthetic construct; identical to SEQ ID NO: 3791
  modified_base 1..5419: mod_base = OTHER; note = Each t is m1f
  source 1..5419: mol_type = other RNA

SEQ ID NO: 5389 - RNA, 5419 nt, synthetic construct; identical to SEQ ID NO: 3792
  modified_base 1..5419: mod_base = OTHER; note = Each t is m1f
  source 1..5419: mol_type = other RNA

SEQ ID NO: 5390 - RNA, 5419 nt, synthetic construct; identical to SEQ ID NO: 3793
  modified_base 1..5419: mod_base = OTHER; note = Each t is m1f
  source 1..5419: mol_type = other RNA

SEQ ID NO: 5391 - RNA, 5419 nt, synthetic construct; identical to SEQ ID NO: 3794
  modified_base 1..5419: mod_base = OTHER; note = Each t is m1f
  source 1..5419: mol_type = other RNA

SEQ ID NO: 5392 - RNA, 5419 nt, synthetic construct; identical to SEQ ID NO: 3795
  modified_base 1..5419: mod_base = OTHER; note = Each t is m1f
  source 1..5419: mol_type = other RNA

SEQ ID NO: 5393 - RNA, 5419 nt, synthetic construct; identical to SEQ ID NO: 3796
  modified_base 1..5419: mod_base = OTHER; note = Each t is m1f
  source 1..5419: mol_type = other RNA

SEQ ID NO: 5394 - RNA, 5419 nt, synthetic construct; identical to SEQ ID NO: 3797
  modified_base 1..5419: mod_base = OTHER; note = Each t is m1f
  source 1..5419: mol_type = other RNA

SEQ ID NO: 5395 - RNA, 5419 nt, synthetic construct; identical to SEQ ID NO: 3798
  modified_base 1..5419: mod_base = OTHER; note = Each t is m1f
  source 1..5419: mol_type = other RNA

SEQ ID NO: 5396 - RNA, 5416 nt, synthetic construct; identical to SEQ ID NO: 3799
  modified_base 1..5416: mod_base = OTHER; note = Each t is m1f
  source 1..5416: mol_type = other RNA

SEQ ID NO: 5397 - RNA, 5419 nt, synthetic construct; identical to SEQ ID NO: 3800
  modified_base 1..5419: mod_base = OTHER; note = Each t is m1f
  source 1..5419: mol_type = other RNA

SEQ ID NO: 5398 - RNA, 5419 nt, synthetic construct; identical to SEQ ID NO: 3801
  modified_base 1..5419: mod_base = OTHER; note = Each t is m1f
  source 1..5419: mol_type = other RNA

SEQ ID NO: 5399 - RNA, 5419 nt, synthetic construct; identical to SEQ ID NO: 3802
  modified_base 1..5419: mod_base = OTHER; note = Each t is m1f
  source 1..5419: mol_type = other RNA

SEQ ID NO: 5400 - RNA, 5419 nt, synthetic construct; identical to SEQ ID NO: 3803
  modified_base 1..5419: mod_base = OTHER; note = Each t is m1f
  source 1..5419: mol_type = other RNA

SEQ ID NO: 5401 - RNA, 5419 nt, synthetic construct; identical to SEQ ID NO: 3804
  modified_base 1..5419: mod_base = OTHER; note = Each t is m1f
  source 1..5419: mol_type = other RNA

SEQ ID NO: 5402 - RNA, 5419 nt, synthetic construct; identical to SEQ ID NO: 3805
  modified_base 1..5419: mod_base = OTHER; note = Each t is m1f
  source 1..5419: mol_type = other RNA

SEQ ID NO: 5403 - RNA, 5419 nt, synthetic construct; identical to SEQ ID NO: 3806
  modified_base 1..5419: mod_base = OTHER; note = Each t is m1f
  source 1..5419: mol_type = other RNA

SEQ ID NO: 5404 - RNA, 5419 nt, synthetic construct; identical to SEQ ID NO: 3807
  modified_base 1..5419: mod_base = OTHER; note = Each t is m1f
  source 1..5419: mol_type = other RNA

SEQ ID NO: 5405 - RNA, 5419 nt, synthetic construct; identical to SEQ ID NO: 3808
  modified_base 1..5419: mod_base = OTHER; note = Each t is m1f
  source 1..5419: mol_type = other RNA

SEQ ID NO: 5406 - RNA, 5419 nt, synthetic construct; identical to SEQ ID NO: 3809
  modified_base 1..5419: mod_base = OTHER; note = Each t is m1f
  source 1..5419: mol_type = other RNA

SEQ ID NO: 5407 - RNA, 5419 nt, synthetic construct; identical to SEQ ID NO: 3810
  modified_base 1..5419: mod_base = OTHER; note = Each t is m1f
  source 1..5419: mol_type = other RNA

SEQ ID NO: 5408 - RNA, 5419 nt, synthetic construct; identical to SEQ ID NO: 3811
  modified_base 1..5419: mod_base = OTHER; note = Each t is m1f
  source 1..5419: mol_type = other RNA

SEQ ID NO: 5409 - RNA, 5419 nt, synthetic construct; identical to SEQ ID NO: 3812
  modified_base 1..5419: mod_base = OTHER; note = Each t is m1f
  source 1..5419: mol_type = other RNA

SEQ ID NO: 5410 - RNA, 5419 nt, synthetic construct; identical to SEQ ID NO: 3813
  modified_base 1..5419: mod_base = OTHER; note = Each t is m1f
  source 1..5419: mol_type = other RNA

SEQ ID NO: 5411 - RNA, 5419 nt, synthetic construct; identical to SEQ ID NO: 3814
  modified_base 1..5419: mod_base = OTHER; note = Each t is m1f
  source 1..5419: mol_type = other RNA

SEQ ID NO: 5412 - RNA, 5419 nt, synthetic construct; identical to SEQ ID NO: 3815
  modified_base 1..5419: mod_base = OTHER; note = Each t is m1f
  source 1..5419: mol_type = other RNA

SEQ ID NO: 5413 - RNA, 5419 nt, synthetic construct; identical to SEQ ID NO: 3816
  modified_base 1..5419: mod_base = OTHER; note = Each t is m1f
  source 1..5419: mol_type = other RNA

SEQ ID NO: 5414 - RNA, 5419 nt, synthetic construct; identical to SEQ ID NO: 3817
  modified_base 1..5419: mod_base = OTHER; note = Each t is m1f
  source 1..5419: mol_type = other RNA

SEQ ID NO: 5415 - RNA, 5419 nt, synthetic construct; identical to SEQ ID NO: 3818
  modified_base 1..5419: mod_base = OTHER; note = Each t is m1f
  source 1..5419: mol_type = other RNA

SEQ ID NO: 5416 - RNA, 5419 nt, synthetic construct; identical to SEQ ID NO: 3819
  modified_base 1..5419: mod_base = OTHER; note = Each t is m1f
  source 1..5419: mol_type = other RNA

SEQ ID NO: 5417 - RNA, 5419 nt, synthetic construct; identical to SEQ ID NO: 3820
  modified_base 1..5419: mod_base = OTHER; note = Each t is m1f
  source 1..5419: mol_type = other RNA

SEQ ID NO: 5418 - RNA, 5419 nt, synthetic construct; identical to SEQ ID NO: 3821
  modified_base 1..5419: mod_base = OTHER; note = Each t is m1f
  source 1..5419: mol_type = other RNA

SEQ ID NO: 5419 - RNA, 5419 nt, synthetic construct; identical to SEQ ID NO: 3822
  modified_base 1..5419: mod_base = OTHER; note = Each t is m1f
  source 1..5419: mol_type = other RNA

SEQ ID NO: 5420 - RNA, 5419 nt, synthetic construct; identical to SEQ ID NO: 3823
  modified_base 1..5419: mod_base = OTHER; note = Each t is m1f
  source 1..5419: mol_type = other RNA

SEQ ID NO: 5421 - RNA, 5419 nt, synthetic construct; identical to SEQ ID NO: 3824
  modified_base 1..5419: mod_base = OTHER; note = Each t is m1f
  source 1..5419: mol_type = other RNA

SEQ ID NO: 5422 - RNA, 5419 nt, synthetic construct; identical to SEQ ID NO: 3825
  modified_base 1..5419: mod_base = OTHER; note = Each t is m1f
  source 1..5419: mol_type = other RNA

SEQ ID NO: 5423 - RNA, 5419 nt, synthetic construct; identical to SEQ ID NO: 3826
  modified_base 1..5419: mod_base = OTHER; note = Each t is m1f
  source 1..5419: mol_type = other RNA

SEQ ID NO: 5424 - RNA, 5419 nt, synthetic construct; identical to SEQ ID NO: 3827
  modified_base 1..5419: mod_base = OTHER; note = Each t is m1f
  source 1..5419: mol_type = other RNA

SEQ ID NO: 5425 - RNA, 5419 nt, synthetic construct; identical to SEQ ID NO: 3828
  modified_base 1..5419: mod_base = OTHER; note = Each t is m1f
  source 1..5419: mol_type = other RNA

SEQ ID NO: 5426 - RNA, 5419 nt, synthetic construct; identical to SEQ ID NO: 3829
  modified_base 1..5419: mod_base = OTHER; note = Each t is m1f
  source 1..5419: mol_type = other RNA

SEQ ID NO: 5427 - RNA, 5419 nt, synthetic construct; identical to SEQ ID NO: 3830
  modified_base 1..5419: mod_base = OTHER; note = Each t is m1f
  source 1..5419: mol_type = other RNA

SEQ ID NO: 5428 - RNA, 5419 nt, synthetic construct; identical to SEQ ID NO: 3831
  modified_base 1..5419: mod_base = OTHER; note = Each t is m1f
  source 1..5419: mol_type = other RNA

SEQ ID NO: 5429 - RNA, 5419 nt, synthetic construct; identical to SEQ ID NO: 3832
  modified_base 1..5419: mod_base = OTHER; note = Each t is m1f
  source 1..5419: mol_type = other RNA

SEQ ID NO: 5430 - RNA, 5419 nt, synthetic construct; identical to SEQ ID NO: 3833
  modified_base 1..5419: mod_base = OTHER; note = Each t is m1f
  source 1..5419: mol_type = other RNA

SEQ ID NO: 5431 - RNA, 5419 nt, synthetic construct; identical to SEQ ID NO: 3834
  modified_base 1..5419: mod_base = OTHER; note = Each t is m1f
  source 1..5419: mol_type = other RNA

SEQ ID NO: 5432 - RNA, 5419 nt, synthetic construct; identical to SEQ ID NO: 3835
  modified_base 1..5419: mod_base = OTHER; note = Each t is m1f
  source 1..5419: mol_type = other RNA

SEQ ID NO: 5433 - RNA, 5419 nt, synthetic construct; identical to SEQ ID NO: 3836
  modified_base 1..5419: mod_base = OTHER; note = Each t is m1f
  source 1..5419: mol_type = other RNA

SEQ ID NO: 5434 - RNA, 5419 nt, synthetic construct; identical to SEQ ID NO: 3837
  modified_base 1..5419: mod_base = OTHER; note = Each t is m1f
  source 1..5419: mol_type = other RNA

SEQ ID NO: 5435 - RNA, 5425 nt, synthetic construct; identical to SEQ ID NO: 3838
  modified_base 1..5419: mod_base = OTHER; note = Each t is m1f
  source 1..5425: mol_type = other RNA

SEQ ID NO: 5436 - RNA, 5419 nt, synthetic construct; identical to SEQ ID NO: 3839
  modified_base 1..5419: mod_base = OTHER; note = Each t is m1f
  source 1..5419: mol_type = other RNA

SEQ ID NO: 5437 - RNA, 5419 nt, synthetic construct; identical to SEQ ID NO: 3840
  modified_base 1..5419: mod_base = OTHER; note = Each t is m1f
  source 1..5419: mol_type = other RNA

SEQ ID NO: 5438 - RNA, 5419 nt, synthetic construct; identical to SEQ ID NO: 3841
  modified_base 1..5419: mod_base = OTHER; note = Each t is m1f
  source 1..5419: mol_type = other RNA

SEQ ID NO: 5439 - RNA, 5419 nt, synthetic construct; identical to SEQ ID NO: 3842
  modified_base 1..5419: mod_base = OTHER; note = Each t is m1f
  source 1..5419: mol_type = other RNA

SEQ ID NO: 5440 - RNA, 5419 nt, synthetic construct; identical to SEQ ID NO: 3843
  modified_base 1..5419: mod_base = OTHER; note = Each t is m1f
  source 1..5419: mol_type = other RNA

SEQ ID NO: 5441 - RNA, 5419 nt, synthetic construct; identical to SEQ ID NO: 3844
  modified_base 1..5419: mod_base = OTHER; note = Each t is m1f
  source 1..5419: mol_type = other RNA

SEQ ID NO: 5442 - RNA, 5419 nt, synthetic construct; identical to SEQ ID NO: 3845
  modified_base 1..5419: mod_base = OTHER; note = Each t is m1f
  source 1..5419: mol_type = other RNA

SEQ ID NO: 5443 - RNA, 5419 nt, synthetic construct; identical to SEQ ID NO: 3846
  modified_base 1..5419: mod_base = OTHER; note = Each t is m1f
  source 1..5419: mol_type = other RNA

SEQ ID NO: 5444 - RNA, 5419 nt, synthetic construct; identical to SEQ ID NO: 3847
  modified_base 1..5419: mod_base = OTHER; note = Each t is m1f
  source 1..5419: mol_type = other RNA

SEQ ID NO: 5445 - RNA, 5419 nt, synthetic construct; identical to SEQ ID NO: 3848
  modified_base 1..5419: mod_base = OTHER; note = Each t is m1f
  source 1..5419: mol_type = other RNA

SEQ ID NO: 5446 - RNA, 5419 nt, synthetic construct; identical to SEQ ID NO: 3849
  modified_base 1..5419: mod_base = OTHER; note = Each t is m1f
  source 1..5419: mol_type = other RNA

SEQ ID NO: 5447 - RNA, 5419 nt, synthetic construct; identical to SEQ ID NO: 3850
  modified_base 1..5419: mod_base = OTHER; note = Each t is m1f
  source 1..5419: mol_type = other RNA

SEQ ID NO: 5448 - RNA, 5419 nt, synthetic construct; identical to SEQ ID NO: 3851
  modified_base 1..5419: mod_base = OTHER; note = Each t is m1f
  source 1..5419: mol_type = other RNA

SEQ ID NO: 5449 - RNA, 5419 nt, synthetic construct; identical to SEQ ID NO: 3852
  modified_base 1..5419: mod_base = OTHER; note = Each t is m1f
  source 1..5419: mol_type = other RNA

SEQ ID NO: 5450 - RNA, 5419 nt, synthetic construct; identical to SEQ ID NO: 3853
  modified_base 1..5419: mod_base = OTHER; note = Each t is m1f
  source 1..5419: mol_type = other RNA

SEQ ID NO: 5451 - RNA, 5416 nt, synthetic construct; identical to SEQ ID NO: 3854
  modified_base 1..5416: mod_base = OTHER; note = Each t is m1f
  source 1..5416: mol_type = other RNA

SEQ ID NO: 5452 - RNA, 5419 nt, synthetic construct; identical to SEQ ID NO: 3855
  modified_base 1..5419: mod_base = OTHER; note = Each t is m1f
  source 1..5419: mol_type = other RNA

SEQ ID NO: 5453 - RNA, 5419 nt, synthetic construct; identical to SEQ ID NO: 3856
  modified_base 1..5419: mod_base = OTHER; note = Each t is m1f
  source 1..5419: mol_type = other RNA

SEQ ID NO: 5454 - RNA, 5419 nt, synthetic construct; identical to SEQ ID NO: 3857
  modified_base 1..5419: mod_base = OTHER; note = Each t is m1f
  source 1..5419: mol_type = other RNA

SEQ ID NO: 5455 - RNA, 5419 nt, synthetic construct; identical to SEQ ID NO: 3858
  modified_base 1..5419: mod_base = OTHER; note = Each t is m1f
  source 1..5419: mol_type = other RNA

SEQ ID NO: 5456 - RNA, 5419 nt, synthetic construct; identical to SEQ ID NO: 3859
  modified_base 1..5419: mod_base = OTHER; note = Each t is m1f
  source 1..5419: mol_type = other RNA

SEQ ID NO: 5457 - RNA, 5419 nt, synthetic construct; identical to SEQ ID NO: 3860
  modified_base 1..5419: mod_base = OTHER; note = Each t is m1f
  source 1..5419: mol_type = other RNA

SEQ ID NO: 5458 - RNA, 5419 nt, synthetic construct; identical to SEQ ID NO: 3861
  modified_base 1..5419: mod_base = OTHER; note = Each t is m1f
  source 1..5419: mol_type = other RNA

SEQ ID NO: 5459 - RNA, 5419 nt, synthetic construct; identical to SEQ ID NO: 3862
  modified_base 1..5419: mod_base = OTHER; note = Each t is m1f
  source 1..5419: mol_type = other RNA

SEQ ID NO: 5460 - RNA, 5455 nt, synthetic construct; identical to SEQ ID NO: 3863
  modified_base 1..5419: mod_base = OTHER; note = Each t is m1f
  source 1..5455: mol_type = other RNA

SEQ ID NO: 5461 - RNA, 5419 nt, synthetic construct; identical to SEQ ID NO: 3864
  modified_base 1..5419: mod_base = OTHER; note = Each t is m1f
  source 1..5419: mol_type = other RNA

SEQ ID NO: 5462 - RNA, 5419 nt, synthetic construct; identical to SEQ ID NO: 3865
  modified_base 1..5419: mod_base = OTHER; note = Each t is m1f
  source 1..5419: mol_type = other RNA

SEQ ID NO: 5463 - RNA, 5419 nt, synthetic construct; identical to SEQ ID NO: 3866
  modified_base 1..5419: mod_base = OTHER; note = Each t is m1f
  source 1..5419: mol_type = other RNA

SEQ ID NO: 5464 - RNA, 5419 nt, synthetic construct; identical to SEQ ID NO: 3867
  modified_base 1..5419: mod_base = OTHER; note = Each t is m1f
  source 1..5419: mol_type = other RNA

SEQ ID NO: 5465 - RNA, 5419 nt, synthetic construct; identical to SEQ ID NO: 3868
  modified_base 1..5419: mod_base = OTHER; note = Each t is m1f
  source 1..5419: mol_type = other RNA

SEQ ID NO: 5466 - RNA, 5419 nt, synthetic construct; identical to SEQ ID NO: 3869
  modified_base 1..5419: mod_base = OTHER; note = Each t is m1f
  source 1..5419: mol_type = other RNA

SEQ ID NO: 5467 - RNA, 5419 nt, synthetic construct; identical to SEQ ID NO: 3870
  modified_base 1..5419: mod_base = OTHER; note = Each t is m1f
  source 1..5419: mol_type = other RNA

SEQ ID NO: 5468 - RNA, 5419 nt, synthetic construct; identical to SEQ ID NO: 3871
  modified_base 1..5419: mod_base = OTHER; note = Each t is m1f
  source 1..5419: mol_type = other RNA

SEQ ID NO: 5469 - RNA, 5419 nt, synthetic construct; identical to SEQ ID NO: 3872
  modified_base 1..5419: mod_base = OTHER; note = Each t is m1f
  source 1..5419: mol_type = other RNA

SEQ ID NO: 5470 - RNA, 5419 nt, synthetic construct; identical to SEQ ID NO: 3873
  modified_base 1..5419: mod_base = OTHER; note = Each t is m1f
  source 1..5419: mol_type = other RNA

SEQ ID NO: 5471 - RNA, 5518 nt, synthetic construct; identical to SEQ ID NO: 3874
  modified_base 1..5419: mod_base = OTHER; note = Each t is m1f
  source 1..5518: mol_type = other RNA

SEQ ID NO: 5472 - RNA, 5419 nt, synthetic construct; identical to SEQ ID NO: 3875
  modified_base 1..5419: mod_base = OTHER; note = Each t is m1f
  source 1..5419: mol_type = other RNA

SEQ ID NO: 5473 - RNA, 5419 nt, synthetic construct; identical to SEQ ID NO: 3876
  modified_base 1..5419: mod_base = OTHER; note = Each t is m1f
  source 1..5419: mol_type = other RNA

SEQ ID NO: 5474 - RNA, 5419 nt, synthetic construct; identical to SEQ ID NO: 3877
  modified_base 1..5419: mod_base = OTHER; note = Each t is m1f
  source 1..5419: mol_type = other RNA

SEQ ID NO: 5475 - RNA, 5419 nt, synthetic construct; identical to SEQ ID NO: 3878
  modified_base 1..5419: mod_base = OTHER; note = Each t is m1f
  source 1..5419: mol_type = other RNA

SEQ ID NO: 5476 - RNA, 5419 nt, synthetic construct; identical to SEQ ID NO: 3879
  modified_base 1..5419: mod_base = OTHER; note = Each t is m1f
  source 1..5419: mol_type = other RNA

SEQ ID NO: 5477 - RNA, 5419 nt, synthetic construct; identical to SEQ ID NO: 3880
  modified_base 1..5419: mod_base = OTHER; note = Each t is m1f
  source 1..5419: mol_type = other RNA

SEQ ID NO: 5478 - RNA, 5419 nt, synthetic construct; identical to SEQ ID NO: 3881
  modified_base 1..5419: mod_base = OTHER; note = Each t is m1f
  source 1..5419: mol_type = other RNA

SEQ ID NO: 5479 - RNA, 5419 nt, synthetic construct; identical to SEQ ID NO: 3882
  modified_base 1..5419: mod_base = OTHER; note = Each t is m1f
  source 1..5419: mol_type = other RNA

SEQ ID NO: 5480 - RNA, 5419 nt, synthetic construct; identical to SEQ ID NO: 3883
  modified_base 1..5419: mod_base = OTHER; note = Each t is m1f
  source 1..5419: mol_type = other RNA

SEQ ID NO: 5481 - RNA, 5419 nt, synthetic construct; identical to SEQ ID NO: 3884
  modified_base 1..5419: mod_base = OTHER; note = Each t is m1f
  source 1..5419: mol_type = other RNA

SEQ ID NO: 5482 - RNA, 5419 nt, synthetic construct; identical to SEQ ID NO: 3885
  modified_base 1..5419: mod_base = OTHER; note = Each t is m1f
  source 1..5419: mol_type = other RNA

SEQ ID NO: 5483 - RNA, 5419 nt, synthetic construct; identical to SEQ ID NO: 3886
  modified_base 1..5419: mod_base = OTHER; note = Each t is m1f
  source 1..5419: mol_type = other RNA

SEQ ID NO: 5484 - RNA, 5419 nt, synthetic construct; identical to SEQ ID NO: 3887
  modified_base 1..5419: mod_base = OTHER; note = Each t is m1f
  source 1..5419: mol_type = other RNA

SEQ ID NO: 5485 - RNA, 5419 nt, synthetic construct; identical to SEQ ID NO: 3888
  modified_base 1..5419: mod_base = OTHER; note = Each t is m1f
  source 1..5419: mol_type = other RNA

SEQ ID NO: 5486 - RNA, 5419 nt, synthetic construct; identical to SEQ ID NO: 3889
  modified_base 1..5419: mod_base = OTHER; note = Each t is m1f
  source 1..5419: mol_type = other RNA

SEQ ID NO: 5487 - RNA, 5419 nt, synthetic construct; identical to SEQ ID NO: 3890
  modified_base 1..5419: mod_base = OTHER; note = Each t is m1f
  source 1..5419: mol_type = other RNA

SEQ ID NO: 5488 - RNA, 5416 nt, synthetic construct; identical to SEQ ID NO: 3891
  modified_base 1..5416: mod_base = OTHER; note = Each t is m1f
  source 1..5416: mol_type = other RNA

SEQ ID NO: 5489 - RNA, 5419 nt, synthetic construct; identical to SEQ ID NO: 3892
  modified_base 1..5419: mod_base = OTHER; note = Each t is m1f
  source 1..5419: mol_type = other RNA

SEQ ID NO: 5490 - RNA, 5419 nt, synthetic construct; identical to SEQ ID NO: 3893
  modified_base 1..5419: mod_base = OTHER; note = Each t is m1f
  source 1..5419: mol_type = other RNA

SEQ ID NO: 5491 - RNA, 5419 nt, synthetic construct; identical to SEQ ID NO: 3894
  modified_base 1..5419: mod_base = OTHER; note = Each t is m1f
  source 1..5419: mol_type = other RNA

SEQ ID NO: 5492 - RNA, 5419 nt, synthetic construct; identical to SEQ ID NO: 3895
  modified_base 1..5419: mod_base = OTHER; note = Each t is m1f
  source 1..5419: mol_type = other RNA

SEQ ID NO: 5493 - RNA, 5419 nt, synthetic construct; identical to SEQ ID NO: 3896
  modified_base 1..5419: mod_base = OTHER; note = Each t is m1f
  source 1..5419: mol_type = other RNA

SEQ ID NO: 5494 - RNA, 5419 nt, synthetic construct; identical to SEQ ID NO: 3897
  modified_base 1..5419: mod_base = OTHER; note = Each t is m1f
  source 1..5419: mol_type = other RNA

SEQ ID NO: 5495 - RNA, 5419 nt, synthetic construct; identical to SEQ ID NO: 3898
  modified_base 1..5419: mod_base = OTHER; note = Each t is m1f
  source 1..5419: mol_type = other RNA

SEQ ID NO: 5496 - RNA, 5419 nt, synthetic construct; identical to SEQ ID NO: 3899
  modified_base 1..5419: mod_base = OTHER; note = Each t is m1f
  source 1..5419: mol_type = other RNA

SEQ ID NO: 5497 - RNA, 5419 nt, synthetic construct; identical to SEQ ID NO: 3900
  modified_base 1..5419: mod_base = OTHER; note = Each t is m1f
  source 1..5419: mol_type = other RNA

SEQ ID NO: 5498 - RNA, 5419 nt, synthetic construct; identical to SEQ ID NO: 3901
  modified_base 1..5419: mod_base = OTHER; note = Each t is m1f
  source 1..5419: mol_type = other RNA

SEQ ID NO: 5499 - RNA, 5419 nt, synthetic construct; identical to SEQ ID NO: 3902
  modified_base 1..5419: mod_base = OTHER; note = Each t is m1f
  source 1..5419: mol_type = other RNA

SEQ ID NO: 5500 - RNA, 5419 nt, synthetic construct; identical to SEQ ID NO: 3903
  modified_base 1..5419: mod_base = OTHER; note = Each t is m1f
  source 1..5419: mol_type = other RNA

SEQ ID NO: 5501 - RNA, 5419 nt, synthetic construct; identical to SEQ ID NO: 3904
  modified_base 1..5419: mod_base = OTHER; note = Each t is m1f
  source 1..5419: mol_type = other RNA

SEQ ID NO: 5502 - RNA, 5419 nt, synthetic construct; identical to SEQ ID NO: 3905
  modified_base 1..5419: mod_base = OTHER; note = Each t is m1f
  source 1..5419: mol_type = other RNA

SEQ ID NO: 5503 - RNA, 5419 nt, synthetic construct; identical to SEQ ID NO: 3906
  modified_base 1..5419: mod_base = OTHER; note = Each t is m1f
  source 1..5419: mol_type = other RNA

SEQ ID NO: 5504 - RNA, 5419 nt, synthetic construct; identical to SEQ ID NO: 3907
  modified_base 1..5419: mod_base = OTHER; note = Each t is m1f
  source 1..5419: mol_type = other RNA

SEQ ID NO: 5505 - RNA, 5419 nt, synthetic construct; identical to SEQ ID NO: 3908
  modified_base 1..5419: mod_base = OTHER; note = Each t is m1f
  source 1..5419: mol_type = other RNA

SEQ ID NO: 5506 - RNA, 5419 nt, synthetic construct; identical to SEQ ID NO: 3909
  modified_base 1..5419: mod_base = OTHER; note = Each t is m1f
  source 1..5419: mol_type = other RNA

SEQ ID NO: 5507 - RNA, 5419 nt, synthetic construct; identical to SEQ ID NO: 3910
  modified_base 1..5419: mod_base = OTHER; note = Each t is m1f
  source 1..5419: mol_type = other RNA

SEQ ID NO: 5508 - RNA, 5419 nt, synthetic construct; identical to SEQ ID NO: 3911
  modified_base 1..5419: mod_base = OTHER; note = Each t is m1f
  source 1..5419: mol_type = other RNA

SEQ ID NO: 5509 - RNA, 5419 nt, synthetic construct; identical to SEQ ID NO: 3912
  modified_base 1..5419: mod_base = OTHER; note = Each t is m1f
  source 1..5419: mol_type = other RNA

SEQ ID NO: 5510 - RNA, 5419 nt, synthetic construct; identical to SEQ ID NO: 3913
  modified_base 1..5419: mod_base = OTHER; note = Each t is m1f
  source 1..5419: mol_type = other RNA

SEQ ID NO: 5511 - RNA, 5419 nt, synthetic construct; identical to SEQ ID NO: 3914
  modified_base 1..5419: mod_base = OTHER; note = Each t is m1f
  source 1..5419: mol_type = other RNA

SEQ ID NO: 5512 - RNA, 5419 nt, synthetic construct; identical to SEQ ID NO: 3915
  modified_base 1..5419: mod_base = OTHER; note = Each t is m1f
  source 1..5419: mol_type = other RNA

SEQ ID NO: 5513 - RNA, 5419 nt, synthetic construct; identical to SEQ ID NO: 3916
  modified_base 1..5419: mod_base = OTHER; note = Each t is m1f
  source 1..5419: mol_type = other RNA

SEQ ID NO: 5514 - RNA, 5419 nt, synthetic construct; identical to SEQ ID NO: 3917
  modified_base 1..5419: mod_base = OTHER; note = Each t is m1f
  source 1..5419: mol_type = other RNA

SEQ ID NO: 5515 - RNA, 5419 nt, synthetic construct; identical to SEQ ID NO: 3918
  modified_base 1..5419: mod_base = OTHER; note = Each t is m1f
  source 1..5419: mol_type = other RNA

SEQ ID NO: 5516 - RNA, 5419 nt, synthetic construct; identical to SEQ ID NO: 3919
  modified_base 1..5419: mod_base = OTHER; note = Each t is m1f
  source 1..5419: mol_type = other RNA

SEQ ID NO: 5517 - RNA, 5419 nt, synthetic construct; identical to SEQ ID NO: 3920
  modified_base 1..5419: mod_base = OTHER; note = Each t is m1f
  source 1..5419: mol_type = other RNA

SEQ ID NO: 5518 - RNA, 5419 nt, synthetic construct; identical to SEQ ID NO: 3921
  modified_base 1..5419: mod_base = OTHER; note = Each t is m1f
  source 1..5419: mol_type = other RNA

SEQ ID NO: 5519 - RNA, 5419 nt, synthetic construct; identical to SEQ ID NO: 3922
  modified_base 1..5419: mod_base = OTHER; note = Each t is m1f
  source 1..5419: mol_type = other RNA

SEQ ID NO: 5520 - RNA, 5419 nt, synthetic construct; identical to SEQ ID NO: 3923
  modified_base 1..5419: mod_base = OTHER; note = Each t is m1f
  source 1..5419: mol_type = other RNA

SEQ ID NO: 5521 - RNA, 5419 nt, synthetic construct; identical to SEQ ID NO: 3924
  modified_base 1..5419: mod_base = OTHER; note = Each t is m1f
  source 1..5419: mol_type = other RNA

SEQ ID NO: 5522 - RNA, 5419 nt, synthetic construct; identical to SEQ ID NO: 3925
  modified_base 1..5419: mod_base = OTHER; note = Each t is m1f
  source 1..5419: mol_type = other RNA

SEQ ID NO: 5523 - RNA, 5419 nt, synthetic construct; identical to SEQ ID NO: 3926
  modified_base 1..5419: mod_base = OTHER; note = Each t is m1f
  source 1..5419: mol_type = other RNA

SEQ ID NO: 5524 - RNA, 5419 nt, synthetic construct; identical to SEQ ID NO: 3927
  modified_base 1..5419: mod_base = OTHER; note = Each t is m1f
  source 1..5419: mol_type = other RNA

SEQ ID NO: 5525 - RNA, 5419 nt, synthetic construct; identical to SEQ ID NO: 3928
  modified_base 1..5419: mod_base = OTHER; note = Each t is m1f
  source 1..5419: mol_type = other RNA

SEQ ID NO: 5526 - RNA, 5419 nt, synthetic construct; identical to SEQ ID NO: 3929
  modified_base 1..5419: mod_base = OTHER; note = Each t is m1f
  source 1..5419: mol_type = other RNA

SEQ ID NO: 5527 - RNA, 5437 nt, synthetic construct; identical to SEQ ID NO: 3930
  modified_base 1..5419: mod_base = OTHER; note = Each t is m1f
  source 1..5437: mol_type = other RNA

SEQ ID NO: 5528 - RNA, 5419 nt, synthetic construct; identical to SEQ ID NO: 3931
  modified_base 1..5419: mod_base = OTHER; note = Each t is m1f
  source 1..5419: mol_type = other RNA

SEQ ID NO: 5529 - RNA, 5419 nt, synthetic construct; identical to SEQ ID NO: 3932
  modified_base 1..5419: mod_base = OTHER; note = Each t is m1f
  source 1..5419: mol_type = other RNA

SEQ ID NO: 5530 - RNA, 5419 nt, synthetic construct; identical to SEQ ID NO: 3933
  modified_base 1..5419: mod_base = OTHER; note = Each t is m1f
  source 1..5419: mol_type = other RNA

SEQ ID NO: 5531 - RNA, 5419 nt, synthetic construct; identical to SEQ ID NO: 3934
  modified_base 1..5419: mod_base = OTHER; note = Each t is m1f
  source 1..5419: mol_type = other RNA

SEQ ID NO: 5532 - RNA, 5419 nt, synthetic construct; identical to SEQ ID NO: 3935
  modified_base 1..5419: mod_base = OTHER; note = Each t is m1f
  source 1..5419: mol_type = other RNA

SEQ ID NO: 5533 - RNA, 5419 nt, synthetic construct; identical to SEQ ID NO: 3936
  modified_base 1..5419: mod_base = OTHER; note = Each t is m1f
  source 1..5419: mol_type = other RNA

SEQ ID NO: 5534 - RNA, 5416 nt, synthetic construct; identical to SEQ ID NO: 3937
  modified_base 1..5416: mod_base = OTHER; note = Each t is m1f
  source 1..5416: mol_type = other RNA

SEQ ID NO: 5535 - RNA, 5419 nt, synthetic construct; identical to SEQ ID NO: 3938
  modified_base 1..5419: mod_base = OTHER; note = Each t is m1f
  source 1..5419: mol_type = other RNA

SEQ ID NO: 5536 - RNA, 5419 nt, synthetic construct; identical to SEQ ID NO: 3939
  modified_base 1..5419: mod_base = OTHER; note = Each t is m1f
  source 1..5419: mol_type = other RNA

SEQ ID NO: 5537 - RNA, 5419 nt, synthetic construct; identical to SEQ ID NO: 3940
  modified_base 1..5419: mod_base = OTHER; note = Each t is m1f
  source 1..5419: mol_type = other RNA

SEQ ID NO: 5538 - RNA, 5419 nt, synthetic construct; identical to SEQ ID NO: 3941
  modified_base 1..5419: mod_base = OTHER; note = Each t is m1f
  source 1..5419: mol_type = other RNA

SEQ ID NO: 5539 - RNA, 5419 nt, synthetic construct; identical to SEQ ID NO: 3942
  modified_base 1..5419: mod_base = OTHER; note = Each t is m1f
  source 1..5419: mol_type = other RNA

SEQ ID NO: 5540 - RNA, 5419 nt, synthetic construct; identical to SEQ ID NO: 3943
  modified_base 1..5419: mod_base = OTHER; note = Each t is m1f
  source 1..5419: mol_type = other RNA

SEQ ID NO: 5541 - RNA, 5419 nt, synthetic construct; identical to SEQ ID NO: 3944
  modified_base 1..5419: mod_base = OTHER; note = Each t is m1f
  source 1..5419: mol_type = other RNA

SEQ ID NO: 5542 - RNA, 5419 nt, synthetic construct; identical to SEQ ID NO: 3945
  modified_base 1..5419: mod_base = OTHER; note = Each t is m1f
  source 1..5419: mol_type = other RNA

SEQ ID NO: 5543 - RNA, 5416 nt, synthetic construct; identical to SEQ ID NO: 3946
  modified_base 1..5416: mod_base = OTHER; note = Each t is m1f
  source 1..5416: mol_type = other RNA

SEQ ID NO: 5544 - RNA, 5419 nt, synthetic construct; identical to SEQ ID NO: 3947
  modified_base 1..5419: mod_base = OTHER; note = Each t is m1f
  source 1..5419: mol_type = other RNA

SEQ ID NO: 5545 - RNA, 5419 nt, synthetic construct; identical to SEQ ID NO: 3948
  modified_base 1..5419: mod_base = OTHER; note = Each t is m1f
  source 1..5419: mol_type = other RNA

SEQ ID NO: 5546 - RNA, 5428 nt, synthetic construct; identical to SEQ ID NO: 3949
  modified_base 1..5419: mod_base = OTHER; note = Each t is m1f
  source 1..5428: mol_type = other RNA

SEQ ID NO: 5547 - RNA, 5419 nt, synthetic construct; identical to SEQ ID NO: 3950
  modified_base 1..5419: mod_base = OTHER; note = Each t is m1f
  source 1..5419: mol_type = other RNA

SEQ ID NO: 5548 - RNA, 5416 nt, synthetic construct; identical to SEQ ID NO: 3951
  modified_base 1..5416: mod_base = OTHER; note = Each t is m1f
  source 1..5416: mol_type = other RNA

SEQ ID NO: 5549 - RNA, 5419 nt, synthetic construct; identical to SEQ ID NO: 3952
  modified_base 1..5419: mod_base = OTHER; note = Each t is m1f
  source 1..5419: mol_type = other RNA

SEQ ID NO: 5550 - RNA, 5419 nt, synthetic construct; identical to SEQ ID NO: 3953
  modified_base 1..5419: mod_base = OTHER; note = Each t is m1f
  source 1..5419: mol_type = other RNA

SEQ ID NO: 5551 - RNA, 5419 nt, synthetic construct; identical to SEQ ID NO: 3954
  modified_base 1..5419: mod_base = OTHER; note = Each t is m1f
  source 1..5419: mol_type = other RNA

SEQ ID NO: 5552 - RNA, 5419 nt, synthetic construct; identical to SEQ ID NO: 3955
  modified_base 1..5419: mod_base = OTHER; note = Each t is m1f
  source 1..5419: mol_type = other RNA

SEQ ID NO: 5553 - RNA, 5419 nt, synthetic construct; identical to SEQ ID NO: 3956
  modified_base 1..5419: mod_base = OTHER; note = Each t is m1f
  source 1..5419: mol_type = other RNA

SEQ ID NO: 5554 - RNA, 5419 nt, synthetic construct; identical to SEQ ID NO: 3957
  modified_base 1..5419: mod_base = OTHER; note = Each t is m1f
  source 1..5419: mol_type = other RNA

SEQ ID NO: 5555 - RNA, 5419 nt, synthetic construct; identical to SEQ ID NO: 3958
  modified_base 1..5419: mod_base = OTHER; note = Each t is m1f
  source 1..5419: mol_type = other RNA

SEQ ID NO: 5556 - RNA, 5419 nt, synthetic construct; identical to SEQ ID NO: 3959
  modified_base 1..5419: mod_base = OTHER; note = Each t is m1f
  source 1..5419: mol_type = other RNA

SEQ ID NO: 5557 - RNA, 5419 nt, synthetic construct; identical to SEQ ID NO: 3960
  modified_base 1..5419: mod_base = OTHER; note = Each t is m1f
  source 1..5419: mol_type = other RNA

SEQ ID NO: 5558 - RNA, 5419 nt, synthetic construct; identical to SEQ ID NO: 3961
  modified_base 1..5419: mod_base = OTHER; note = Each t is m1f
  source 1..5419: mol_type = other RNA

SEQ ID NO: 5559 - RNA, 5419 nt, synthetic construct; identical to SEQ ID NO: 3962
  modified_base 1..5419: mod_base = OTHER; note = Each t is m1f
  source 1..5419: mol_type = other RNA

SEQ ID NO: 5560 - RNA, 5419 nt, synthetic construct; identical to SEQ ID NO: 3963
  modified_base 1..5419: mod_base = OTHER; note = Each t is m1f
  source 1..5419: mol_type = other RNA

SEQ ID NO: 5561 - RNA, 5419 nt, synthetic construct; identical to SEQ ID NO: 3964
  modified_base 1..5419: mod_base = OTHER; note = Each t is m1f
  source 1..5419: mol_type = other RNA

SEQ ID NO: 5562 - RNA, 5428 nt, synthetic construct; identical to SEQ ID NO: 3965
  modified_base 1..5419: mod_base = OTHER; note = Each t is m1f
  source 1..5428: mol_type = other RNA

SEQ ID NO: 5563 - RNA, 5419 nt, synthetic construct; identical to SEQ ID NO: 3966
  modified_base 1..5419: mod_base = OTHER; note = Each t is m1f
  source 1..5419: mol_type = other RNA

SEQ ID NO: 5564 - RNA, 5419 nt, synthetic construct; identical to SEQ ID NO: 3967
  modified_base 1..5419: mod_base = OTHER; note = Each t is m1f
  source 1..5419: mol_type = other RNA

SEQ ID NO: 5565 - RNA, 5419 nt, synthetic construct; identical to SEQ ID NO: 3968
  modified_base 1..5419: mod_base = OTHER; note = Each t is m1f
  source 1..5419: mol_type = other RNA

SEQ ID NO: 5566 - RNA, 5419 nt, synthetic construct; identical to SEQ ID NO: 3969
  modified_base 1..5419: mod_base = OTHER; note = Each t is m1f
  source 1..5419: mol_type = other RNA

SEQ ID NO: 5567 - RNA, 5419 nt, synthetic construct; identical to SEQ ID NO: 3970
  modified_base 1..5419: mod_base = OTHER; note = Each t is m1f
  source 1..5419: mol_type = other RNA

SEQ ID NO: 5568 - RNA, 5419 nt, synthetic construct; identical to SEQ ID NO: 3971
  modified_base 1..5419: mod_base = OTHER; note = Each t is m1f
  source 1..5419: mol_type = other RNA

SEQ ID NO: 5569 - RNA, 5419 nt, synthetic construct; identical to SEQ ID NO: 3972
  modified_base 1..5419: mod_base = OTHER; note = Each t is m1f
  source 1..5419: mol_type = other RNA

SEQ ID NO: 5570 - RNA, 5419 nt, synthetic construct; identical to SEQ ID NO: 3973
  modified_base 1..5419: mod_base = OTHER; note = Each t is m1f
  source 1..5419: mol_type = other RNA

SEQ ID NO: 5571 - RNA, 5419 nt, synthetic construct; identical to SEQ ID NO: 3974
  modified_base 1..5419: mod_base = OTHER; note = Each t is m1f
  source 1..5419: mol_type = other RNA

SEQ ID NO: 5572 - RNA, 5419 nt, synthetic construct; identical to SEQ ID NO: 3975
  modified_base 1..5419: mod_base = OTHER; note = Each t is m1f
  source 1..5419: mol_type = other RNA

SEQ ID NO: 5573 - RNA, 5419 nt, synthetic construct; identical to SEQ ID NO: 3976
  modified_base 1..5419: mod_base = OTHER; note = Each t is m1f
  source 1..5419: mol_type = other RNA

SEQ ID NO: 5574 - RNA, 5419 nt, synthetic construct; identical to SEQ ID NO: 3977
  modified_base 1..5419: mod_base = OTHER; note = Each t is m1f
  source 1..5419: mol_type = other RNA

SEQ ID NO: 5575 - RNA, 5419 nt, synthetic construct; identical to SEQ ID NO: 3978
  modified_base 1..5419: mod_base = OTHER; note = Each t is m1f
  source 1..5419: mol_type = other RNA

SEQ ID NO: 5576 - RNA, 5419 nt, synthetic construct; identical to SEQ ID NO: 3979
  modified_base 1..5419: mod_base = OTHER; note = Each t is m1f
  source 1..5419: mol_type = other RNA

SEQ ID NO: 5577 - RNA, 5419 nt, synthetic construct; identical to SEQ ID NO: 3980
  modified_base 1..5419: mod_base = OTHER; note = Each t is m1f
  source 1..5419: mol_type = other RNA

SEQ ID NO: 5578 - RNA, 5419 nt, synthetic construct; identical to SEQ ID NO: 3981
  modified_base 1..5419: mod_base = OTHER; note = Each t is m1f
  source 1..5419: mol_type = other RNA

SEQ ID NO: 5579 - RNA, 5419 nt, synthetic construct; identical to SEQ ID NO: 3982
  modified_base 1..5419: mod_base = OTHER; note = Each t is m1f
  source 1..5419: mol_type = other RNA

SEQ ID NO: 5580 - RNA, 5419 nt, synthetic construct; identical to SEQ ID NO: 3983
  modified_base 1..5419: mod_base = OTHER; note = Each t is m1f
  source 1..5419: mol_type = other RNA

SEQ ID NO: 5581 - RNA, 5419 nt, synthetic construct; identical to SEQ ID NO: 3984
  modified_base 1..5419: mod_base = OTHER; note = Each t is m1f
  source 1..5419: mol_type = other RNA

SEQ ID NO: 5582 - RNA, 5419 nt, synthetic construct; identical to SEQ ID NO: 3985
  modified_base 1..5419: mod_base = OTHER; note = Each t is m1f
  source 1..5419: mol_type = other RNA

SEQ ID NO: 5583 - RNA, 5419 nt, synthetic construct; identical to SEQ ID NO: 3986
  modified_base 1..5419: mod_base = OTHER; note = Each t is m1f
  source 1..5419: mol_type = other RNA

SEQ ID NO: 5584 - RNA, 5419 nt, synthetic construct; identical to SEQ ID NO: 3987
  modified_base 1..5419: mod_base = OTHER; note = Each t is m1f
  source 1..5419: mol_type = other RNA

SEQ ID NO: 5585 - RNA, 5419 nt, synthetic construct; identical to SEQ ID NO: 3988
  modified_base 1..5419: mod_base = OTHER; note = Each t is m1f
  source 1..5419: mol_type = other RNA

SEQ ID NO: 5586 - RNA, 5419 nt, synthetic construct; identical to SEQ ID NO: 3989
  modified_base 1..5419: mod_base = OTHER; note = Each t is m1f
  source 1..5419: mol_type = other RNA

SEQ ID NO: 5587 - RNA, 5419 nt, synthetic construct; identical to SEQ ID NO: 3990
  modified_base 1..5419: mod_base = OTHER; note = Each t is m1f
  source 1..5419: mol_type = other RNA

SEQ ID NO: 5588 - RNA, 5419 nt, synthetic construct; identical to SEQ ID NO: 3991
  modified_base 1..5419: mod_base = OTHER; note = Each t is m1f
  source 1..5419: mol_type = other RNA

SEQ ID NO: 5589 - RNA, 5419 nt, synthetic construct; identical to SEQ ID NO: 3992
  modified_base 1..5419: mod_base = OTHER; note = Each t is m1f
  source 1..5419: mol_type = other RNA

SEQ ID NO: 5590 - RNA, 5419 nt, synthetic construct; identical to SEQ ID NO: 3993
  modified_base 1..5419: mod_base = OTHER; note = Each t is m1f
  source 1..5419: mol_type = other RNA

SEQ ID NO: 5591 - RNA, 5419 nt, synthetic construct; identical to SEQ ID NO: 3994
  modified_base 1..5419: mod_base = OTHER; note = Each t is m1f
  source 1..5419: mol_type = other RNA

SEQ ID NO: 5592 - RNA, 5419 nt, synthetic construct; identical to SEQ ID NO: 3995
  modified_base 1..5419: mod_base = OTHER; note = Each t is m1f
  source 1..5419: mol_type = other RNA

SEQ ID NO: 5593 - RNA, 5419 nt, synthetic construct; identical to SEQ ID NO: 3996
  modified_base 1..5419: mod_base = OTHER; note = Each t is m1f
  source 1..5419: mol_type = other RNA

SEQ ID NO: 5594 - RNA, 5419 nt, synthetic construct; identical to SEQ ID NO: 3997
  modified_base 1..5419: mod_base = OTHER; note = Each t is m1f
  source 1..5419: mol_type = other RNA

SEQ ID NO: 5595 - RNA, 5419 nt, synthetic construct; identical to SEQ ID NO: 3998
  modified_base 1..5419: mod_base = OTHER; note = Each t is m1f
  source 1..5419: mol_type = other RNA

SEQ ID NO: 5596 - RNA, 5419 nt, synthetic construct; identical to SEQ ID NO: 3999
  modified_base 1..5419: mod_base = OTHER; note = Each t is m1f
  source 1..5419: mol_type = other RNA

SEQ ID NO: 5597 - RNA, 5419 nt, synthetic construct; identical to SEQ ID NO: 4000
  modified_base 1..5419: mod_base = OTHER; note = Each t is m1f
  source 1..5419: mol_type = other RNA

SEQ ID NO: 5598 - RNA, 5419 nt, synthetic construct; identical to SEQ ID NO: 4001
  modified_base 1..5419: mod_base = OTHER; note = Each t is m1f
  source 1..5419: mol_type = other RNA

SEQ ID NO: 5599 - RNA, 5419 nt, synthetic construct; identical to SEQ ID NO: 4002
  modified_base 1..5419: mod_base = OTHER; note = Each t is m1f
  source 1..5419: mol_type = other RNA

SEQ ID NO: 5600 - RNA, 5419 nt, synthetic construct; identical to SEQ ID NO: 4003
  modified_base 1..5419: mod_base = OTHER; note = Each t is m1f
  source 1..5419: mol_type = other RNA

SEQ ID NO: 5601 - RNA, 5419 nt, synthetic construct; identical to SEQ ID NO: 4004
  modified_base 1..5419: mod_base = OTHER; note = Each t is m1f
  source 1..5419: mol_type = other RNA

SEQ ID NO: 5602 - RNA, 5419 nt, synthetic construct; identical to SEQ ID NO: 4005
  modified_base 1..5419: mod_base = OTHER; note = Each t is m1f
  source 1..5419: mol_type = other RNA

SEQ ID NO: 5603 - RNA, 5419 nt, synthetic construct; identical to SEQ ID NO: 4006
  modified_base 1..5419: mod_base = OTHER; note = Each t is m1f
  source 1..5419: mol_type = other RNA

SEQ ID NO: 5604 - RNA, 5419 nt, synthetic construct; identical to SEQ ID NO: 4007
  modified_base 1..5419: mod_base = OTHER; note = Each t is m1f
  source 1..5419: mol_type = other RNA

SEQ ID NO: 5605 - RNA, 5419 nt, synthetic construct; identical to SEQ ID NO: 4008
  modified_base 1..5419: mod_base = OTHER; note = Each t is m1f
  source 1..5419: mol_type = other RNA

SEQ ID NO: 5606 - RNA, 5419 nt, synthetic construct; identical to SEQ ID NO: 4009
  modified_base 1..5419: mod_base = OTHER; note = Each t is m1f
  source 1..5419: mol_type = other RNA

SEQ ID NO: 5607 - RNA, 5419 nt, synthetic construct; identical to SEQ ID NO: 4010
  modified_base 1..5419: mod_base = OTHER; note = Each t is m1f
  source 1..5419: mol_type = other RNA

SEQ ID NO: 5608 - RNA, 5419 nt, synthetic construct; identical to SEQ ID NO: 4011
  modified_base 1..5419: mod_base = OTHER; note = Each t is m1f
  source 1..5419: mol_type = other RNA

SEQ ID NO: 5609 - RNA, 5419 nt, synthetic construct; identical to SEQ ID NO: 4012
  modified_base 1..5419: mod_base = OTHER; note = Each t is m1f
  source 1..5419: mol_type = other RNA

SEQ ID NO: 5610 - RNA, 5419 nt, synthetic construct; identical to SEQ ID NO: 4013
  modified_base 1..5419: mod_base = OTHER; note = Each t is m1f
  source 1..5419: mol_type = other RNA

SEQ ID NO: 5611 - RNA, 5419 nt, synthetic construct; identical to SEQ ID NO: 4014
  modified_base 1..5419: mod_base = OTHER; note = Each t is m1f
  source 1..5419: mol_type = other RNA

SEQ ID NO: 5612 - RNA, 5419 nt, synthetic construct; identical to SEQ ID NO: 4015
  modified_base 1..5419: mod_base = OTHER; note = Each t is m1f
  source 1..5419: mol_type = other RNA

SEQ ID NO: 5613 - RNA, 5419 nt, synthetic construct; identical to SEQ ID NO: 4016
  modified_base 1..5419: mod_base = OTHER; note = Each t is m1f
  source 1..5419: mol_type = other RNA

SEQ ID NO: 5614 - RNA, 5419 nt, synthetic construct; identical to SEQ ID NO: 4017
  modified_base 1..5419: mod_base = OTHER; note = Each t is m1f
  source 1..5419: mol_type = other RNA

SEQ ID NO: 5615 - RNA, 5419 nt, synthetic construct; identical to SEQ ID NO: 4018
  modified_base 1..5419: mod_base = OTHER; note = Each t is m1f
  source 1..5419: mol_type = other RNA

SEQ ID NO: 5616 - RNA, 5419 nt, synthetic construct; identical to SEQ ID NO: 4019
  modified_base 1..5419: mod_base = OTHER; note = Each t is m1f
  source 1..5419: mol_type = other RNA

SEQ ID NO: 5617 - RNA, 5419 nt, synthetic construct; identical to SEQ ID NO: 4020
  modified_base 1..5419: mod_base = OTHER; note = Each t is m1f
  source 1..5419: mol_type = other RNA

SEQ ID NO: 5618 - RNA, 5419 nt, synthetic construct; identical to SEQ ID NO: 4021
  modified_base 1..5419: mod_base = OTHER; note = Each t is m1f
  source 1..5419: mol_type = other RNA

SEQ ID NO: 5619 - RNA, 5419 nt, synthetic construct; identical to SEQ ID NO: 4022
  modified_base 1..5419: mod_base = OTHER; note = Each t is m1f
  source 1..5419: mol_type = other RNA

SEQ ID NO: 5620 - RNA, 5419 nt, synthetic construct; identical to SEQ ID NO: 4023
  modified_base 1..5419: mod_base = OTHER; note = Each t is m1f
  source 1..5419: mol_type = other RNA

SEQ ID NO: 5621 - RNA, 5419 nt, synthetic construct; identical to SEQ ID NO: 4024
  modified_base 1..5419: mod_base = OTHER; note = Each t is m1f
  source 1..5419: mol_type = other RNA

SEQ ID NO: 5622 - RNA, 5419 nt, synthetic construct; identical to SEQ ID NO: 4025
  modified_base 1..5419: mod_base = OTHER; note = Each t is m1f
  source 1..5419: mol_type = other RNA

SEQ ID NO: 5623 - RNA, 5419 nt, synthetic construct; identical to SEQ ID NO: 4026
  modified_base 1..5419: mod_base = OTHER; note = Each t is m1f
  source 1..5419: mol_type = other RNA

SEQ ID NO: 5624 - RNA, 5419 nt, synthetic construct; identical to SEQ ID NO: 4027
  modified_base 1..5419: mod_base = OTHER; note = Each t is m1f
  source 1..5419: mol_type = other RNA

SEQ ID NO: 5625 - RNA, 5419 nt, synthetic construct; identical to SEQ ID NO: 4028
  modified_base 1..5419: mod_base = OTHER; note = Each t is m1f
  source 1..5419: mol_type = other RNA

SEQ ID NO: 5626 - RNA, 5419 nt, synthetic construct; identical to SEQ ID NO: 4029
  modified_base 1..5419: mod_base = OTHER; note = Each t is m1f
  source 1..5419: mol_type = other RNA

SEQ ID NO: 5627 - RNA, 5419 nt, synthetic construct; identical to SEQ ID NO: 4030
  modified_base 1..5419: mod_base = OTHER; note = Each t is m1f
  source 1..5419: mol_type = other RNA

SEQ ID NO: 5628 - RNA, 5419 nt, synthetic construct; identical to SEQ ID NO: 4031
  modified_base 1..5419: mod_base = OTHER; note = Each t is m1f
  source 1..5419: mol_type = other RNA

SEQ ID NO: 5629 - RNA, 5419 nt, synthetic construct; identical to SEQ ID NO: 4032
  modified_base 1..5419: mod_base = OTHER; note = Each t is m1f
  source 1..5419: mol_type = other RNA

SEQ ID NO: 5630 - RNA, 5419 nt, synthetic construct; identical to SEQ ID NO: 4033
  modified_base 1..5419: mod_base = OTHER; note = Each t is m1f
  source 1..5419: mol_type = other RNA

SEQ ID NO: 5631 - RNA, 5419 nt, synthetic construct; identical to SEQ ID NO: 4034
  modified_base 1..5419: mod_base = OTHER; note = Each t is m1f
  source 1..5419: mol_type = other RNA

SEQ ID NO: 5632 - RNA, 5419 nt, synthetic construct; identical to SEQ ID NO: 4035
  modified_base 1..5419: mod_base = OTHER; note = Each t is m1f
  source 1..5419: mol_type = other RNA

SEQ ID NO: 5633 - RNA, 5419 nt, synthetic construct; identical to SEQ ID NO: 4036
  modified_base 1..5419: mod_base = OTHER; note = Each t is m1f
  source 1..5419: mol_type = other RNA

SEQ ID NO: 5634 - RNA, 5419 nt, synthetic construct; identical to SEQ ID NO: 4037
  modified_base 1..5419: mod_base = OTHER; note = Each t is m1f
  source 1..5419: mol_type = other RNA

SEQ ID NO: 5635 - RNA, 5419 nt, synthetic construct; identical to SEQ ID NO: 4038
  modified_base 1..5419: mod_base = OTHER; note = Each t is m1f
  source 1..5419: mol_type = other RNA

SEQ ID NO: 5636 - RNA, 5419 nt, synthetic construct; identical to SEQ ID NO: 4039
  modified_base 1..5419: mod_base = OTHER; note = Each t is m1f
  source 1..5419: mol_type = other RNA

SEQ ID NO: 5637 - RNA, 5419 nt, synthetic construct; identical to SEQ ID NO: 4040
  modified_base 1..5419: mod_base = OTHER; note = Each t is m1f
  source 1..5419: mol_type = other RNA

SEQ ID NO: 5638 - RNA, 5419 nt, synthetic construct; identical to SEQ ID NO: 4041
  modified_base 1..5419: mod_base = OTHER; note = Each t is m1f
  source 1..5419: mol_type = other RNA

SEQ ID NO: 5639 - RNA, 5419 nt, synthetic construct; identical to SEQ ID NO: 4042
  modified_base 1..5419: mod_base = OTHER; note = Each t is m1f
  source 1..5419: mol_type = other RNA

SEQ ID NO: 5640 - RNA, 5419 nt, synthetic construct; identical to SEQ ID NO: 4043
  modified_base 1..5419: mod_base = OTHER; note = Each t is m1f
  source 1..5419: mol_type = other RNA

SEQ ID NO: 5641 - RNA, 5419 nt, synthetic construct; identical to SEQ ID NO: 4044
  modified_base 1..5419: mod_base = OTHER; note = Each t is m1f
  source 1..5419: mol_type = other RNA

SEQ ID NO: 5642 - RNA, 5419 nt, synthetic construct; identical to SEQ ID NO: 4045
  modified_base 1..5419: mod_base = OTHER; note = Each t is m1f
  source 1..5419: mol_type = other RNA

SEQ ID NO: 5643 - RNA, 5419 nt, synthetic construct; identical to SEQ ID NO: 4046
  modified_base 1..5419: mod_base = OTHER; note = Each t is m1f
  source 1..5419: mol_type = other RNA

SEQ ID NO: 5644 - RNA, 5419 nt, synthetic construct; identical to SEQ ID NO: 4047
  modified_base 1..5419: mod_base = OTHER; note = Each t is m1f
  source 1..5419: mol_type = other RNA

SEQ ID NO: 5645 - RNA, 5419 nt, synthetic construct; identical to SEQ ID NO: 4048
  modified_base 1..5419: mod_base = OTHER; note = Each t is m1f
  source 1..5419: mol_type = other RNA

SEQ ID NO: 5646 - RNA, 5419 nt, synthetic construct; identical to SEQ ID NO: 4049
  modified_base 1..5419: mod_base = OTHER; note = Each t is m1f
  source 1..5419: mol_type = other RNA

SEQ ID NO: 5647 - RNA, 5419 nt, synthetic construct; identical to SEQ ID NO: 4050
  modified_base 1..5419: mod_base = OTHER; note = Each t is m1f
  source 1..5419: mol_type = other RNA

SEQ ID NO: 5648 - RNA, 5419 nt, synthetic construct; identical to SEQ ID NO: 4051
  modified_base 1..5419: mod_base = OTHER; note = Each t is m1f
  source 1..5419: mol_type = other RNA

SEQ ID NO: 5649 - RNA, 5419 nt, synthetic construct; identical to SEQ ID NO: 4052
  modified_base 1..5419: mod_base = OTHER; note = Each t is m1f
  source 1..5419: mol_type = other RNA

SEQ ID NO: 5650 - RNA, 5419 nt, synthetic construct; identical to SEQ ID NO: 4053
  modified_base 1..5419: mod_base = OTHER; note = Each t is m1f
  source 1..5419: mol_type = other RNA

SEQ ID NO: 5651 - RNA, 5419 nt, synthetic construct; identical to SEQ ID NO: 4054
  modified_base 1..5419: mod_base = OTHER; note = Each t is m1f
  source 1..5419: mol_type = other RNA

SEQ ID NO: 5652 - RNA, 5419 nt, synthetic construct; identical to SEQ ID NO: 4055
  modified_base 1..5419: mod_base = OTHER; note = Each t is m1f
  source 1..5419: mol_type = other RNA

SEQ ID NO: 5653 - RNA, 5419 nt, synthetic construct; identical to SEQ ID NO: 4056
  modified_base 1..5419: mod_base = OTHER; note = Each t is m1f
  source 1..5419: mol_type = other RNA

SEQ ID NO: 5654 - RNA, 5419 nt, synthetic construct; identical to SEQ ID NO: 4057
  modified_base 1..5419: mod_base = OTHER; note = Each t is m1f
  source 1..5419: mol_type = other RNA

SEQ ID NO: 5655 - RNA, 5419 nt, synthetic construct; identical to SEQ ID NO: 4058
  modified_base 1..5419: mod_base = OTHER; note = Each t is m1f
  source 1..5419: mol_type = other RNA

SEQ ID NO: 5656 - RNA, 5419 nt, synthetic construct; identical to SEQ ID NO: 4059
  modified_base 1..5419: mod_base = OTHER; note = Each t is m1f
  source 1..5419: mol_type = other RNA

SEQ ID NO: 5657 - RNA, 5419 nt, synthetic construct; identical to SEQ ID NO: 4060
  modified_base 1..5419: mod_base = OTHER; note = Each t is m1f
  source 1..5419: mol_type = other RNA

SEQ ID NO: 5658 - RNA, 5419 nt, synthetic construct; identical to SEQ ID NO: 4061
  modified_base 1..5419: mod_base = OTHER; note = Each t is m1f
  source 1..5419: mol_type = other RNA

SEQ ID NO: 5659 - RNA, 5419 nt, synthetic construct; identical to SEQ ID NO: 4062
  modified_base 1..5419: mod_base = OTHER; note = Each t is m1f
  source 1..5419: mol_type = other RNA

SEQ ID NO: 5660 - RNA, 5419 nt, synthetic construct; identical to SEQ ID NO: 4063
  modified_base 1..5419: mod_base = OTHER; note = Each t is m1f
  source 1..5419: mol_type = other RNA

SEQ ID NO: 5661 - RNA, 5419 nt, synthetic construct; identical to SEQ ID NO: 4064
  modified_base 1..5419: mod_base = OTHER; note = Each t is m1f
  source 1..5419: mol_type = other RNA

SEQ ID NO: 5662 - RNA, 5419 nt, synthetic construct; identical to SEQ ID NO: 4065
  modified_base 1..5419: mod_base = OTHER; note = Each t is m1f
  source 1..5419: mol_type = other RNA

SEQ ID NO: 5663 - RNA, 5419 nt, synthetic construct; identical to SEQ ID NO: 4066
  modified_base 1..5419: mod_base = OTHER; note = Each t is m1f
  source 1..5419: mol_type = other RNA

SEQ ID NO: 5664 - RNA, 5419 nt, synthetic construct; identical to SEQ ID NO: 4067
  modified_base 1..5419: mod_base = OTHER; note = Each t is m1f
  source 1..5419: mol_type = other RNA

SEQ ID NO: 5665 - RNA, 5419 nt, synthetic construct; identical to SEQ ID NO: 4068
  modified_base 1..5419: mod_base = OTHER; note = Each t is m1f
  source 1..5419: mol_type = other RNA

SEQ ID NO: 5666 - RNA, 5419 nt, synthetic construct; identical to SEQ ID NO: 4069
  modified_base 1..5419: mod_base = OTHER; note = Each t is m1f
  source 1..5419: mol_type = other RNA

SEQ ID NO: 5667 - RNA, 5419 nt, synthetic construct; identical to SEQ ID NO: 4070
  modified_base 1..5419: mod_base = OTHER; note = Each t is m1f
  source 1..5419: mol_type = other RNA

SEQ ID NO: 5668 - RNA, 5419 nt, synthetic construct; identical to SEQ ID NO: 4071
  modified_base 1..5419: mod_base = OTHER; note = Each t is m1f
  source 1..5419: mol_type = other RNA

SEQ ID NO: 5669 - RNA, 5419 nt, synthetic construct; identical to SEQ ID NO: 4072
  modified_base 1..5419: mod_base = OTHER; note = Each t is m1f
  source 1..5419: mol_type = other RNA

SEQ ID NO: 5670 - RNA, 5419 nt, synthetic construct; identical to SEQ ID NO: 4073
  modified_base 1..5419: mod_base = OTHER; note = Each t is m1f
  source 1..5419: mol_type = other RNA

SEQ ID NO: 5671 - RNA, 5419 nt, synthetic construct; identical to SEQ ID NO: 4074
  modified_base 1..5419: mod_base = OTHER; note = Each t is m1f
  source 1..5419: mol_type = other RNA

SEQ ID NO: 5672 - RNA, 5419 nt, synthetic construct; identical to SEQ ID NO: 4075
  modified_base 1..5419: mod_base = OTHER; note = Each t is m1f
  source 1..5419: mol_type = other RNA

SEQ ID NO: 5673 - RNA, 5419 nt, synthetic construct; identical to SEQ ID NO: 4076
  modified_base 1..5419: mod_base = OTHER; note = Each t is m1f
  source 1..5419: mol_type = other RNA

SEQ ID NO: 5674 - RNA, 5419 nt, synthetic construct; identical to SEQ ID NO: 4077
  modified_base 1..5419: mod_base = OTHER; note = Each t is m1f
  source 1..5419: mol_type = other RNA

SEQ ID NO: 5675 - RNA, 5419 nt, synthetic construct; identical to SEQ ID NO: 4078
  modified_base 1..5419: mod_base = OTHER; note = Each t is m1f
  source 1..5419: mol_type = other RNA

SEQ ID NO: 5676 - RNA, 5419 nt, synthetic construct; identical to SEQ ID NO: 4079
  modified_base 1..5419: mod_base = OTHER; note = Each t is m1f
  source 1..5419: mol_type = other RNA

SEQ ID NO: 5677 - RNA, 5419 nt, synthetic construct; identical to SEQ ID NO: 4080
  modified_base 1..5419: mod_base = OTHER; note = Each t is m1f
  source 1..5419: mol_type = other RNA

SEQ ID NO: 5678 - RNA, 5419 nt, synthetic construct; identical to SEQ ID NO: 4081
  modified_base 1..5419: mod_base = OTHER; note = Each t is m1f
  source 1..5419: mol_type = other RNA

SEQ ID NO: 5679 - RNA, 5419 nt, synthetic construct; identical to SEQ ID NO: 4082
  modified_base 1..5419: mod_base = OTHER; note = Each t is m1f
  source 1..5419: mol_type = other RNA

SEQ ID NO: 5680 - RNA, 5419 nt, synthetic construct; identical to SEQ ID NO: 4083
  modified_base 1..5419: mod_base = OTHER; note = Each t is m1f
  source 1..5419: mol_type = other RNA

SEQ ID NO: 5681 - RNA, 5419 nt, synthetic construct; identical to SEQ ID NO: 4084
  modified_base 1..5419: mod_base = OTHER; note = Each t is m1f
  source 1..5419: mol_type = other RNA

SEQ ID NO: 5682 - RNA, 5416 nt, synthetic construct; identical to SEQ ID NO: 4085
  modified_base 1..5416: mod_base = OTHER; note = Each t is m1f
  source 1..5416: mol_type = other RNA

SEQ ID NO: 5683 - RNA, 5419 nt, synthetic construct; identical to SEQ ID NO: 4086
  modified_base 1..5419: mod_base = OTHER; note = Each t is m1f
  source 1..5419: mol_type = other RNA

SEQ ID NO: 5684 - RNA, 5419 nt, synthetic construct; identical to SEQ ID NO: 4087
  modified_base 1..5419: mod_base = OTHER; note = Each t is m1f
  source 1..5419: mol_type = other RNA

SEQ ID NO: 5685 - RNA, 5419 nt, synthetic construct; identical to SEQ ID NO: 4088
  modified_base 1..5419: mod_base = OTHER; note = Each t is m1f
  source 1..5419: mol_type = other RNA

SEQ ID NO: 5686 - RNA, 5419 nt, synthetic construct; identical to SEQ ID NO: 4089
  modified_base 1..5419: mod_base = OTHER; note = Each t is m1f
  source 1..5419: mol_type = other RNA

SEQ ID NO: 5687 - RNA, 5419 nt, synthetic construct; identical to SEQ ID NO: 4090
  modified_base 1..5419: mod_base = OTHER; note = Each t is m1f
  source 1..5419: mol_type = other RNA

SEQ ID NO: 5688 - RNA, 5419 nt, synthetic construct; identical to SEQ ID NO: 4091
  modified_base 1..5419: mod_base = OTHER; note = Each t is m1f
  source 1..5419: mol_type = other RNA

SEQ ID NO: 5689 - RNA, 5419 nt, synthetic construct; identical to SEQ ID NO: 4092
  modified_base 1..5419: mod_base = OTHER; note = Each t is m1f
  source 1..5419: mol_type = other RNA

SEQ ID NO: 5690 - RNA, 5419 nt, synthetic construct; identical to SEQ ID NO: 4093
  modified_base 1..5419: mod_base = OTHER; note = Each t is m1f
  source 1..5419: mol_type = other RNA

SEQ ID NO: 5691 - RNA, 5419 nt, synthetic construct; identical to SEQ ID NO: 4094
  modified_base 1..5419: mod_base = OTHER; note = Each t is m1f
  source 1..5419: mol_type = other RNA

SEQ ID NO: 5692 - RNA, 5419 nt, synthetic construct; identical to SEQ ID NO: 4095
  modified_base 1..5419: mod_base = OTHER; note = Each t is m1f
  source 1..5419: mol_type = other RNA

SEQ ID NO: 5693 - RNA, 5419 nt, synthetic construct; identical to SEQ ID NO: 4096
  modified_base 1..5419: mod_base = OTHER; note = Each t is m1f
  source 1..5419: mol_type = other RNA

SEQ ID NO: 5694 - RNA, 5419 nt, synthetic construct; identical to SEQ ID NO: 4097
  modified_base 1..5419: mod_base = OTHER; note = Each t is m1f
  source 1..5419: mol_type = other RNA

SEQ ID NO: 5695 - RNA, 5419 nt, synthetic construct; identical to SEQ ID NO: 4098
  modified_base 1..5419: mod_base = OTHER; note = Each t is m1f
  source 1..5419: mol_type = other RNA

SEQ ID NO: 5696 - RNA, 5419 nt, synthetic construct; identical to SEQ ID NO: 4099
  modified_base 1..5419: mod_base = OTHER; note = Each t is m1f
  source 1..5419: mol_type = other RNA

SEQ ID NO: 5697 - RNA, 5419 nt, synthetic construct; identical to SEQ ID NO: 4100
  modified_base 1..5419: mod_base = OTHER; note = Each t is m1f
  source 1..5419: mol_type = other RNA

SEQ ID NO: 5698 - RNA, 5419 nt, synthetic construct; identical to SEQ ID NO: 4101
  modified_base 1..5419: mod_base = OTHER; note = Each t is m1f
  source 1..5419: mol_type = other RNA

SEQ ID NO: 5699 - RNA, 5419 nt, synthetic construct; identical to SEQ ID NO: 4102
  modified_base 1..5419: mod_base = OTHER; note = Each t is m1f
  source 1..5419: mol_type = other RNA

SEQ ID NO: 5700 - RNA, 5419 nt, synthetic construct; identical to SEQ ID NO: 4103
  modified_base 1..5419: mod_base = OTHER; note = Each t is m1f
  source 1..5419: mol_type = other RNA

SEQ ID NO: 5701 - RNA, 5419 nt, synthetic construct; identical to SEQ ID NO: 4104
  modified_base 1..5419: mod_base = OTHER; note = Each t is m1f
  source 1..5419: mol_type = other RNA

SEQ ID NO: 5702 - RNA, 5419 nt, synthetic construct; identical to SEQ ID NO: 4105
  modified_base 1..5419: mod_base = OTHER; note = Each t is m1f
  source 1..5419: mol_type = other RNA

SEQ ID NO: 5703 - RNA, 5419 nt, synthetic construct; identical to SEQ ID NO: 4106
  modified_base 1..5419: mod_base = OTHER; note = Each t is m1f
  source 1..5419: mol_type = other RNA

SEQ ID NO: 5704 - RNA, 5419 nt, synthetic construct; identical to SEQ ID NO: 4107
  modified_base 1..5419: mod_base = OTHER; note = Each t is m1f
  source 1..5419: mol_type = other RNA

SEQ ID NO: 5705 - RNA, 5419 nt, synthetic construct; identical to SEQ ID NO: 4108
  modified_base 1..5419: mod_base = OTHER; note = Each t is m1f
  source 1..5419: mol_type = other RNA

SEQ ID NO: 5706 - RNA, 5419 nt, synthetic construct; identical to SEQ ID NO: 4109
  modified_base 1..5419: mod_base = OTHER; note = Each t is m1f
  source 1..5419: mol_type = other RNA

SEQ ID NO: 5707 - RNA, 5419 nt, synthetic construct; identical to SEQ ID NO: 4110
  modified_base 1..5419: mod_base = OTHER; note = Each t is m1f
  source 1..5419: mol_type = other RNA

SEQ ID NO: 5708 - RNA, 5437 nt, synthetic construct; identical to SEQ ID NO: 4111
  modified_base 1..5437: mod_base = OTHER; note = Each t is m1f
  source 1..5437: mol_type = other RNA

SEQ ID NO: 5709 - RNA, 5428 nt, synthetic construct; identical to SEQ ID NO: 4112
  modified_base 1..5428: mod_base = OTHER; note = Each t is m1f
  source 1..5428: mol_type = other RNA

SEQ ID NO: 5710 - RNA, 5419 nt, synthetic construct; identical to SEQ ID NO: 4113
  modified_base 1..5419: mod_base = OTHER; note = Each t is m1f
  source 1..5419: mol_type = other RNA

SEQ ID NO: 5711 - RNA, 5419 nt, synthetic construct; identical to SEQ ID NO: 4114
  modified_base 1..5419: mod_base = OTHER; note = Each t is m1f
  source 1..5419: mol_type = other RNA

SEQ ID NO: 5712 - RNA, 5419 nt, synthetic construct; identical to SEQ ID NO: 4115
  modified_base 1..5419: mod_base = OTHER; note = Each t is m1f
  source 1..5419: mol_type = other RNA

SEQ ID NO: 5713 - RNA, 5449 nt, synthetic construct; identical to SEQ ID NO: 4116
  modified_base 1..5449: mod_base = OTHER; note = Each t is m1f
  source 1..5449: mol_type = other RNA

SEQ ID NO: 5714 - RNA, 5467 nt, synthetic construct; identical to SEQ ID NO: 4117
  modified_base 1..5467: mod_base = OTHER; note = Each t is m1f
  source 1..5467: mol_type = other RNA

SEQ ID NO: 5715 - RNA, 5797 nt, synthetic construct
  source 1..5797: mol_type = other RNA
aggaaataagagagaaaagaagagtaagaagaaatataagagccaccatggcccctaagaagaagcgtaaagtgagccggatggaacgcctcgtctacgaggtgcggcagaagtgcagaaacatcgaggacatctgcatctcctgcggatctctgaacgtgaccctggagcacccactgttcatcggcggcatgtgccagaactgtaaaaactgttttctggagtgtgcctatcaatacgacgatgacggctaccagagctactgcaccatctgttgcggcggaagagaggtgctgatgtgtggaaataacaactgctgccggtgcttctgcgtggaatgcgtggacctgctggtgggccccggcgccgcccaggccgctattaaggaagatccttggaactgctacatgtgcggccacaagggcacatacggcctgctgagacggagagaggactggcctagcagactgcagatgttcttcgccaataaccacgaccaggagttcgacccccctaaggtgtaccctcccgtccccgccgagaagagaaagcccatccgggtcctgagcctgttcgatggcatcgccaccggtctgctggtgctgaaggacctgggcatccaggtggataggtacattgcctccgaggtgtgcgaggactccatcaccgtgggaatggtgcgtcatcagggcaagatcatgtacgtgggcgacgtgcggagcgtgacacagaagcatatccaggagtggggccctttcgacctggtgatcggcggcagcccttgcaatgacctgagcatcgtgaacccagcccggaagggcctgtacgagggaaccggcagactgttcttcgagttttacagactgctgcacgacgcccggcctaaggaaggcgacgaccggcccttcttttggctgttcgagaatgtggtggccatgggagtcagcgacaagcgggatattagccggttcctggagagcaaccccgtgatgatcgatgccaaggaagtgagcgccgcccaccgggccagatacttctggggcaatctgcctggcatgaacagacccctggccagcaccgtgaacgacaagctggagctgcaggagtgcctggagcacggccggatcgccaagttcagcaaggtgagaaccatcaccacccgaagcaacagcatcaaacaaggcaaggaccagcactttcctgtgttcatgaacgagaaggaggacatcctgtggtgtaccgagatggagagagtgttcgggttcccagtccactacacagatgtcagcaacatgtctagactggccagacagagactgctgggaagaagctggtccgtccctgtgatcagacacctgttcgcccctctgaaggagtacttcgcctgcgtgagcagcggcaacagcaacgccaacagccggggccccagcttctctagcggcctggtgccactgtccctgagagggagccacatgggccccatggagatctacaaaaccgtgagcgcctggaagcggcagcctgtgcgcgtgctgagcctgtttcggaatatcgataaagtcctgaaaagcctgggattcctggagagcggctctggctccggcggtggcaccctgaagtacgtggaggatgtgacaaacgtggtcagacgggatgtggagaagtggggccccttcgatctggtgtacggcagcacccaacccctgggcagctcttgtgaccggtgccctggctggtacatgtttcagttccaccggatcctgcagtacgccctgccgagacaggagtcccagcggccattcttttggattttcatggacaacttgctgctgaccgaggatgaccaggaaactaccactcggttcctgcagaccgaagccgtgaccctgcaggacgtgagaggccgggactaccagaacgccatgcgggtgtggtccaacatccctggactgaaaagcaagcacgcacctctgacccctaaagaagaggagtacctgcaggcccaggtgcggagcagaagcaagctggacgcccctaaggtggatctgctggtgaagaattgcctcctgcccctgagagagtacttcaagtatttcagccagaatagtctgcccctgggcggcccaagcagcggcgcccctcctcccagcggcggcagcccagccggctccccaacctctaccgaggagggcacctctgagtccgccacccccgagagcggccctggcacctccaccgagcccagcgagggcagcgcacccggcagccctgccggcagccccacctccacagaggagggaaccagcaccgagcccagcgaaggcagcgccccaggcaccagcaccgagcctagtgagggcggctctggcggcggcagcgcccaggagattaaacggatcaacaagatcagaagaagacttgtgaaagacagcaacaccaagaaggccggcaagacaggccccatgaaaaccctgctggttagagtgatgacacccgatctgagagagcggctggaaaacctgagaaagaagcctgaaaatatcccccagcccatcagcaatacatctagagccaacctgaataagctgctgaccgattacaccgaaatgaagaaggcgatcctgcatgtgtactgggaagagttccagaaggaccctgtgggcctgatgagccgggtggcccagcctgccagcaagaagatcgatcagaacaagctgaaacctgagatggacgagaagggcaacctgaccaccgccggctttgcctgctctcagtgtggccagcccctgttcgtgtacaagctggagcaggtgtctgagaagggcaaggcttacaccaactacttcggacggtgcaatgtggccgagcacgaaaagctgatcctgctggcccagctgaagcccgagaaggatagcgacgaagccgtgacatatagcctgggaaagtttgggcagagggccctggatttctacagcattcatgtgaccaaggagtccacccaccccgtgaagcccctggcccagatcgccggaaacagatacgcctccggacctgtgggaaaggccctgagcgacgcatgtatgggcacaatcgcctccttcctgtctaagtaccaggacatcatcatcgaacaccagaaggtggtgaagggcaaccagaagagactggagagcctgcgggagctggccggcaaggaaaacctggaataccctagcgtgaccctgccacctcagcctcacaccaaggagggcgttgatgcctacaacgaagtgatcgcccgggtgcgaatgtgggtgaacctgaacctgtggcagaagctgaagctaagcagagatgatgccaagcctctgctgagactgaagggattcccttcctttcctctggtcgagagacaggccaacgaagtggactggtgggacatggtgtgtaacgtgaagaagctgatcaacgagaaaaaggaggatggcaaggtgttttggcagaatctggctggctacaagagacaggaagccctgagaccatacctgagcagcgaggaagatcggaagaagggaaagaaattcgctcggtaccagctgggcgacctgctgctgcacctggaaaagaagcacggcgaggactggggaaaggtgtacgacgaggcctgggagcggattgacaagaaagtggaaggcctgagcaagcacatcaagctggaagaggaacggagaagcgaggacgcccagagcaaggccgccctgaccgactggctgcgggctaaggccagcttcgtgatcgagggcctgaaggaggccgacaaggacgagttctgcagatgcgagctgaagctgcagaagtggtacggggacctgcggggaaagcccttcgccatcgaagccgagaacagcatcctggacatcagcggcttcagcaagcagtacaactgtgccttcatctggcagaaggacggcgtgaagaagctgaacctgtacctgatcatcaactacttcaagggcggcaagctgcggttcaagaagatcaaacctgaagccttcgaagccaacagattctacaccgtgatcaacaaaaagagcggcgagatcgtgcccatggaggtgaacttcaacttcgacgaccccaacctgatcatcctgcctctggcctttggcaagagacagggcagagaattcatctggaacgacctgctgtccctggaaaccggcagcctgaagctggccaacggaagagtgatcgagaagacactgtacaacagaagaacccggcaggatgagcctgccctgttcgtggccctgaccttcgagcggcgggaggtcctggactcctccaatatcaaaccaatgaacctgatcggcgtggcaagaggcgaaaacatccccgccgtgatcgccctgaccgaccccgagggctgcccactgagccggtttaaggatagcctgggaaacccaacccacatcctgagaatcggcgagagctataaggagaagcagcggaccatccaggccaagaaggaggtggagcagcggagagccggcggctacagccggaagtacgccagcaaagccaagaatctggcagacgatatggtgagaaacaccgctagagatctgctgtactacgccgtgacccaggatgccatgctgatcttcgccaacctgagccggggcttcggccggcagggcaagcggaccttcatggccgagagacagtacacacggatggaggactggctgaccgccaagctggcctacgagggcctgagcaagacctacctgtccaagacactggcccagtacacctccaagacatgcagcaactgtgggtttaccatcaccagcgccgactacgacagggtgctggagaagctgaagaagacagcaacaggctggatgaccacaattaacggcaaggagctgaaggtggagggccagattacctactacaacagatacaagagacagaacgtagtcaaggacctgtccgtcgagctggatagactgagcgaagaatctgtgaacaacgacatctcctcctggacaaagggcagaagcggagaagctctgagcctcctgaagaaaagattctcccatagacccgtgcaggagaagttcgtgtgcctgaactgcggcttcgagacacacgcagccgagcaagccgccctgaacatcgccagatcctggctgttcctgcggagccaggagtacaagaaataccagacaaacaagacaaccggcaacaccgataagagagccttcgtcgagacctggcagtccttttaccggaagaagcttaaggaggtgtggaaacctgccgtgcggtctggcggatctggcggaggctccacaagcagccagagccccctgaccttcggcgacgtggccgtggagttcagcggcgaggagtgggcctggctggacagcgcccagaggagcctgcacaggagcgtgatgctggagaactacaggaacctggccagcctgggcctgtgcctgagcaagcccgagatgatcagcagcctggagcagaggaaggagccctgggccgtgaagaggaagagcaccaggggcatgcaccccgacagccagaccctgaccagccccaagaaaaagagaaaagtctaagctgccttctgcggggcttgccttctggccatgcccttcttctctcccttgcacctgtacctcttggtctttgaataaagcctgagtaggaaggctagcaaaaaaaaaaaaaaaaaaaaaaaaaaaaaaaaaaaaaaaaaaaaaaaaaaaaaaaaaaaaaaaaaaaaaaaaaaaaaaaa

SEQ ID NO: 5716 - RNA, 5797 nt, synthetic construct
  source 1..5797: mol_type = other RNA
aggaaataagagagaaaagaagagtaagaagaaatataagagccaccatggcccctaagaagaagcgtaaagtgagccggatggaacgcctcgtctacgaggtgcggcagaagtgcagaaacatcgaggacatctgcatctcctgcggatctctgaacgtgaccctggagcacccactgttcatcggcggcatgtgccagaactgtaaaaactgttttctggagtgtgcctatcaatacgacgatgacggctaccagagctactgcaccatctgttgcggcggaagagaggtgctgatgtgtggaaataacaactgctgccggtgcttctgcgtggaatgcgtggacctgctggtgggccccggcgccgcccaggccgctattaaggaagatccttggaactgctacatgtgcggccacaagggcacatacggcctgctgagacggagagaggactggcctagcagactgcagatgttcttcgccaataaccacgaccaggagttcgacccccctaaggtgtaccctcccgtccccgccgagaagagaaagcccatccgggtcctgagcctgttcgatggcatcgccaccggtctgctggtgctgaaggacctgggcatccaggtggataggtacattgcctccgaggtgtgcgaggactccatcaccgtgggaatggtgcgtcatcagggcaagatcatgtacgtgggcgacgtgcggagcgtgacacagaagcatatccaggagtggggccctttcgacctggtgatcggcggcagcccttgcaatgacctgagcatcgtgaacccagcccggaagggcctgtacgagggaaccggcagactgttcttcgagttttacagactgctgcacgacgcccggcctaaggaaggcgacgaccggcccttcttttggctgttcgagaatgtggtggccatgggagtcagcgacaagcgggatattagccggttcctggagagcaaccccgtgatgatcgatgccaaggaagtgagcgccgcccaccgggccagatacttctggggcaatctgcctggcatgaacagacccctggccagcaccgtgaacgacaagctggagctgcaggagtgcctggagcacggccggatcgccaagttcagcaaggtgagaaccatcaccacccgaagcaacagcatcaaacaaggcaaggaccagcactttcctgtgttcatgaacgagaaggaggacatcctgtggtgtaccgagatggagagagtgttcgggttcccagtccactacacagatgtcagcaacatgtctagactggccagacagagactgctgggaagaagctggtccgtccctgtgatcagacacctgttcgcccctctgaaggagtacttcgcctgcgtgagcagcggcaacagcaacgccaacagccggggccccagcttctctagcggcctggtgccactgtccctgagagggagccacatgggccccatggagatctacaaaaccgtgagcgcctggaagcggcagcctgtgcgcgtgctgagcctgtttcggaatatcgataaagtcctgaaaagcctgggattcctggagagcggctctggctccggcggtggcaccctgaagtacgtggaggatgtgacaaacgtggtcagacgggatgtggagaagtggggccccttcgatctggtgtacggcagcacccaacccctgggcagctcttgtgaccggtgccctggctggtacatgtttcagttccaccggatcctgcagtacgccctgccgagacaggagtcccagcggccattcttttggattttcatggacaacttgctgctgaccgaggatgaccaggaaactaccactcggttcctgcagaccgaagccgtgaccctgcaggacgtgagaggccgggactaccagaacgccatgcgggtgtggtccaacatccctggactgaaaagcaagcacgcacctctgacccctaaagaagaggagtacctgcaggcccaggtgcggagcagaagcaagctggacgcccctaaggtggatctgctggtgaagaattgcctcctgcccctgagagagtacttcaagtatttcagccagaatagtctgcccctgggcggcccaagcagcggcgcccctcctcccagcggcggcagcccagccggctccccaacctctaccgaggagggcacctctgagtccgccacccccgagagcggccctggcacctccaccgagcccagcgagggcagcgcacccggcagccctgccggcagccccacctccacagaggagggaaccagcaccgagcccagcgaaggcagcgccccaggcaccagcaccgagcctagtgagggcggctctggcggcggcagcgcccaggagattaaacggatcaacaagatcagaagaagacttgtgaaagacagcaacaccaagaaggccggcaagacaggccccatgaaaaccctgctggttagagtgatgacacccgatctgagagagcggctggaaaacctgagaaagaagcctgaaaatatcccccagcccatcagcaatacatctagagccaacctgaataagctgctgaccgattacaccgaaatgaagaaggcgatcctgcatgtgtactgggaagagttccagaaggaccctgtgggcctgatgagccgggtggcccagcctgccagcaagaagatcgatcagaacaagctgaaacctgagatggacgagaagggcaacctgaccaccgccggctttgcctgctctcagtgtggccagcccctgttcgtgtacaagctggagcaggtgtctgagaagggcaaggcttacaccaactacttcggacggtgcaatgtggccgagcacgaaaagctgatcctgctggcccagctgaagcccgagaaggatagcgacgaagccgtgacatatagcctgggaaagtttgggcagagggccctggatttctacagcattcatgtgaccaaggagtccacccaccccgtgaagcccctggcccagatcgccggaaacagatacgcctccggacctgtgggaaaggccctgagcgacgcatgtatgggcacaatcgcctccttcctgtctaagtaccaggacatcatcatcgaacaccagaaggtggtgaagggcaaccagaagagactggagagcctgcgggagctggccggcaaggaaaacctggaataccctagcgtgaccctgccacctcagcctcacaccaaggagggcgttgatgcctacaacgaagtgatcgcccgggtgcgaatgtgggtgaacctgaacctgtggcagaagctgaagctaagcagagatgatgccaagcctctgctgagactgaagggattcccttcctttcctctggtcgagagacaggccaacgaagtggactggtgggacatggtgtgtaacgtgaagaagctgatcaacgagaaaaaggaggatggcaaggtgttttggcagaatctggctggctacaagagacaggaagccctgagaccatacctgagcagcgaggaagatcggaagaagggaaagaaattcgctcggtaccagctgggcgacctgctgctgcacctggaaaagaagcacggcgaggactggggaaaggtgtacgacgaggcctgggagcggattgacaagaaagtggaaggcctgagcaagcacatcaagctggaagaggaacggagaagcgaggacgcccagagcaaggccgccctgaccgactggctgcgggctaaggccagcttcgtgatcgagggcctgaaggaggccgacaaggacgagttctgcagatgcgagctgaagctgcagaagtggtacggggacctgcggggaaagcccttcgccatcgaagccgagaacagcatcctggacatcagcggcttcagcaagcagtacaactgtgccttcatctggcagaaggacggcgtgaagaagctgaacctgtacctgatcatcaactacttcaagggcggcaagctgcggttcaagaagatcaaacctgaagccttcgaagccaacagattctacaccgtgatcaacaaaaagagcggcgagatcgtgcccatggaggtgaacttcaacttcgacgaccccaacctgatcatcctgcctctggcctttggcaagagacagggcagagaattcatctggaacgacctgctgtccctggaaaccggcagcctgaagctggccaacggaagagtgatcgagaagacactgtacaacagaagaacccggcaggatgagcctgccctgttcgtggccctgaccttcgagcggcgggaggtcctggactcctccaatatcaaaccaatgaacctgatcggcgtggcaagaggcgaaaacatccccgccgtgatcgccctgaccgaccccgagggctgcccactgagccggtttaaggatagcctgggaaacccaacccacatcctgagaatcggcgagagctataaggagaagcagcggaccatccaggccaagaaggaggtggagcagcggagagccggcggctacagccggaagtacgccagcaaagccaagaatctggcagacgatatggtgagaaacaccgctagagatctgctgtactacgccgtgacccaggatgccatgctgatcttcgccaacctgagccggggcttcggccggcagggcaagcggaccttcatggccgagagacagtacacacggatggaggactggctgaccgccaagctggcctacgagggcctgagcaagacctacctgtccaagacactggcccagtacacctccaagacatgcagcaactgtgggtttaccatcaccagcgccgactacgacagggtgctggagaagctgaagaagacagcaacaggctggatgaccacaattaacggcaaggagctgaaggtggagggccagattacctactacaacagatacaagagacagaacgtagtcaaggacctgtccgtcgagctggatagactgagcgaagaatctgtgaacaacgacatctcctcctggacaaagggcagaagcggagaagctctgagcctcctgaagaaaagattctcccatagacccgtgcaggagaagttcgtgtgcctgaactgcggcttcgagacacacgcagccgagcaagccgccctgaacatcgccagatcctggctgttcctgcggagccaggagtacaagaaataccagacaaacaagacaaccggcaacaccgataagagagccttcgtcgagacctggcagtccttttaccggaagaagcttaaggaggtgtggaaacctgccgtgcggtctggcggatctggcggaggctccacaagcagccagagccccctgaccttcggcgacgtggccgtggagttcagcggcgaggagtgggcctggctggacagcgcccagaggagcctgcacaggagcgtgatgctggagaactacaggaacctggccagcctgggcctgtgcctgagcaagcccgagatgatcagcagcctggagcagaggaaggagccctgggccgtgaagaggaagagcaccaggggcatgaggcccgacagccagaccctgaccagccccaagaaaaagagaaaagtctaagctgccttctgcggggcttgccttctggccatgcccttcttctctcccttgcacctgtacctcttggtctttgaataaagcctgagtaggaaggctagcaaaaaaaaaaaaaaaaaaaaaaaaaaaaaaaaaaaaaaaaaaaaaaaaaaaaaaaaaaaaaaaaaaaaaaaaaaaaaaaa

SEQ ID NO: 5717 - RNA, 5797 nt, synthetic construct
  source 1..5797: mol_type = other RNA
aggaaataagagagaaaagaagagtaagaagaaatataagagccaccatggcccctaagaagaagcgtaaagtgagccggatggaacgcctcgtctacgaggtgcggcagaagtgcagaaacatcgaggacatctgcatctcctgcggatctctgaacgtgaccctggagcacccactgttcatcggcggcatgtgccagaactgtaaaaactgttttctggagtgtgcctatcaatacgacgatgacggctaccagagctactgcaccatctgttgcggcggaagagaggtgctgatgtgtggaaataacaactgctgccggtgcttctgcgtggaatgcgtggacctgctggtgggccccggcgccgcccaggccgctattaaggaagatccttggaactgctacatgtgcggccacaagggcacatacggcctgctgagacggagagaggactggcctagcagactgcagatgttcttcgccaataaccacgaccaggagttcgacccccctaaggtgtaccctcccgtccccgccgagaagagaaagcccatccgggtcctgagcctgttcgatggcatcgccaccggtctgctggtgctgaaggacctgggcatccaggtggataggtacattgcctccgaggtgtgcgaggactccatcaccgtgggaatggtgcgtcatcagggcaagatcatgtacgtgggcgacgtgcggagcgtgacacagaagcatatccaggagtggggccctttcgacctggtgatcggcggcagcccttgcaatgacctgagcatcgtgaacccagcccggaagggcctgtacgagggaaccggcagactgttcttcgagttttacagactgctgcacgacgcccggcctaaggaaggcgacgaccggcccttcttttggctgttcgagaatgtggtggccatgggagtcagcgacaagcgggatattagccggttcctggagagcaaccccgtgatgatcgatgccaaggaagtgagcgccgcccaccgggccagatacttctggggcaatctgcctggcatgaacagacccctggccagcaccgtgaacgacaagctggagctgcaggagtgcctggagcacggccggatcgccaagttcagcaaggtgagaaccatcaccacccgaagcaacagcatcaaacaaggcaaggaccagcactttcctgtgttcatgaacgagaaggaggacatcctgtggtgtaccgagatggagagagtgttcgggttcccagtccactacacagatgtcagcaacatgtctagactggccagacagagactgctgggaagaagctggtccgtccctgtgatcagacacctgttcgcccctctgaaggagtacttcgcctgcgtgagcagcggcaacagcaacgccaacagccggggccccagcttctctagcggcctggtgccactgtccctgagagggagccacatgggccccatggagatctacaaaaccgtgagcgcctggaagcggcagcctgtgcgcgtgctgagcctgtttcggaatatcgataaagtcctgaaaagcctgggattcctggagagcggctctggctccggcggtggcaccctgaagtacgtggaggatgtgacaaacgtggtcagacgggatgtggagaagtggggccccttcgatctggtgtacggcagcacccaacccctgggcagctcttgtgaccggtgccctggctggtacatgtttcagttccaccggatcctgcagtacgccctgccgagacaggagtcccagcggccattcttttggattttcatggacaacttgctgctgaccgaggatgaccaggaaactaccactcggttcctgcagaccgaagccgtgaccctgcaggacgtgagaggccgggactaccagaacgccatgcgggtgtggtccaacatccctggactgaaaagcaagcacgcacctctgacccctaaagaagaggagtacctgcaggcccaggtgcggagcagaagcaagctggacgcccctaaggtggatctgctggtgaagaattgcctcctgcccctgagagagtacttcaagtatttcagccagaatagtctgcccctgggcggcccaagcagcggcgcccctcctcccagcggcggcagcccagccggctccccaacctctaccgaggagggcacctctgagtccgccacccccgagagcggccctggcacctccaccgagcccagcgagggcagcgcacccggcagccctgccggcagccccacctccacagaggagggaaccagcaccgagcccagcgaaggcagcgccccaggcaccagcaccgagcctagtgagggcggctctggcggcggcagcgcccaggagattaaacggatcaacaagatcagaagaagacttgtgaaagacagcaacaccaagaaggccggcaagacaggccccatgaaaaccctgctggttagagtgatgacacccgatctgagagagcggctggaaaacctgagaaagaagcctgaaaatatcccccagcccatcagcaatacatctagagccaacctgaataagctgctgaccgattacaccgaaatgaagaaggcgatcctgcatgtgtactgggaagagttccagaaggaccctgtgggcctgatgagccgggtggcccagcctgccagcaagaagatcgatcagaacaagctgaaacctgagatggacgagaagggcaacctgaccaccgccggctttgcctgctctcagtgtggccagcccctgttcgtgtacaagctggagcaggtgtctgagaagggcaaggcttacaccaactacttcggacggtgcaatgtggccgagcacgaaaagctgatcctgctggcccagctgaagcccgagaaggatagcgacgaagccgtgacatatagcctgggaaagtttgggcagagggccctggatttctacagcattcatgtgaccaaggagtccacccaccccgtgaagcccctggcccagatcgccggaaacagatacgcctccggacctgtgggaaaggccctgagcgacgcatgtatgggcacaatcgcctccttcctgtctaagtaccaggacatcatcatcgaacaccagaaggtggtgaagggcaaccagaagagactggagagcctgcgggagctggccggcaaggaaaacctggaataccctagcgtgaccctgccacctcagcctcacaccaaggagggcgttgatgcctacaacgaagtgatcgcccgggtgcgaatgtgggtgaacctgaacctgtggcagaagctgaagctaagcagagatgatgccaagcctctgctgagactgaagggattcccttcctttcctctggtcgagagacaggccaacgaagtggactggtgggacatggtgtgtaacgtgaagaagctgatcaacgagaaaaaggaggatggcaaggtgttttggcagaatctggctggctacaagagacaggaagccctgagaccatacctgagcagcgaggaagatcggaagaagggaaagaaattcgctcggtaccagctgggcgacctgctgctgcacctggaaaagaagcacggcgaggactggggaaaggtgtacgacgaggcctgggagcggattgacaagaaagtggaaggcctgagcaagcacatcaagctggaagaggaacggagaagcgaggacgcccagagcaaggccgccctgaccgactggctgcgggctaaggccagcttcgtgatcgagggcctgaaggaggccgacaaggacgagttctgcagatgcgagctgaagctgcagaagtggtacggggacctgcggggaaagcccttcgccatcgaagccgagaacagcatcctggacatcagcggcttcagcaagcagtacaactgtgccttcatctggcagaaggacggcgtgaagaagctgaacctgtacctgatcatcaactacttcaagggcggcaagctgcggttcaagaagatcaaacctgaagccttcgaagccaacagattctacaccgtgatcaacaaaaagagcggcgagatcgtgcccatggaggtgaacttcaacttcgacgaccccaacctgatcatcctgcctctggcctttggcaagagacagggcagagaattcatctggaacgacctgctgtccctggaaaccggcagcctgaagctggccaacggaagagtgatcgagaagacactgtacaacagaagaacccggcaggatgagcctgccctgttcgtggccctgaccttcgagcggcgggaggtcctggactcctccaatatcaaaccaatgaacctgatcggcgtggcaagaggcgaaaacatccccgccgtgatcgccctgaccgaccccgagggctgcccactgagccggtttaaggatagcctgggaaacccaacccacatcctgagaatcggcgagagctataaggagaagcagcggaccatccaggccaagaaggaggtggagcagcggagagccggcggctacagccggaagtacgccagcaaagccaagaatctggcagacgatatggtgagaaacaccgctagagatctgctgtactacgccgtgacccaggatgccatgctgatcttcgccaacctgagccggggcttcggccggcagggcaagcggaccttcatggccgagagacagtacacacggatggaggactggctgaccgccaagctggcctacgagggcctgagcaagacctacctgtccaagacactggcccagtacacctccaagacatgcagcaactgtgggtttaccatcaccagcgccgactacgacagggtgctggagaagctgaagaagacagcaacaggctggatgaccacaattaacggcaaggagctgaaggtggagggccagattacctactacaacagatacaagagacagaacgtagtcaaggacctgtccgtcgagctggatagactgagcgaagaatctgtgaacaacgacatctcctcctggacaaagggcagaagcggagaagctctgagcctcctgaagaaaagattctcccatagacccgtgcaggagaagttcgtgtgcctgaactgcggcttcgagacacacgcagccgagcaagccgccctgaacatcgccagatcctggctgttcctgcggagccaggagtacaagaaataccagacaaacaagacaaccggcaacaccgataagagagccttcgtcgagacctggcagtccttttaccggaagaagcttaaggaggtgtggaaacctgccgtgcggtctggcggatctggcggaggctccacaagcatggccttcgaggacgtggccgtgtacttcagccaggaggagtggggcctgctggacaccgcccagagggccctgtacaggagggtgatgctggacaacttcgccctggtggccagcctgggcctgagcaccagcaggcccagggtggtgatccagctggagaggggcgaggagccctgggtgcccagcggcaccgacaccaccctgagcaggaccacctacaggaggaggaaccccggcagcaccagccccaagaaaaagagaaaagtctaagctgccttctgcggggcttgccttctggccatgcccttcttctctcccttgcacctgtacctcttggtctttgaataaagcctgagtaggaaggctagcaaaaaaaaaaaaaaaaaaaaaaaaaaaaaaaaaaaaaaaaaaaaaaaaaaaaaaaaaaaaaaaaaaaaaaaaaaaaaaaa

SEQ ID NO: 5718 - RNA, 5797 nt, synthetic construct
  source 1..5797: mol_type = other RNA
aggaaataagagagaaaagaagagtaagaagaaatataagagccaccatggcccctaagaagaagcgtaaagtgagccggatggaacgcctcgtctacgaggtgcggcagaagtgcagaaacatcgaggacatctgcatctcctgcggatctctgaacgtgaccctggagcacccactgttcatcggcggcatgtgccagaactgtaaaaactgttttctggagtgtgcctatcaatacgacgatgacggctaccagagctactgcaccatctgttgcggcggaagagaggtgctgatgtgtggaaataacaactgctgccggtgcttctgcgtggaatgcgtggacctgctggtgggccccggcgccgcccaggccgctattaaggaagatccttggaactgctacatgtgcggccacaagggcacatacggcctgctgagacggagagaggactggcctagcagactgcagatgttcttcgccaataaccacgaccaggagttcgacccccctaaggtgtaccctcccgtccccgccgagaagagaaagcccatccgggtcctgagcctgttcgatggcatcgccaccggtctgctggtgctgaaggacctgggcatccaggtggataggtacattgcctccgaggtgtgcgaggactccatcaccgtgggaatggtgcgtcatcagggcaagatcatgtacgtgggcgacgtgcggagcgtgacacagaagcatatccaggagtggggccctttcgacctggtgatcggcggcagcccttgcaatgacctgagcatcgtgaacccagcccggaagggcctgtacgagggaaccggcagactgttcttcgagttttacagactgctgcacgacgcccggcctaaggaaggcgacgaccggcccttcttttggctgttcgagaatgtggtggccatgggagtcagcgacaagcgggatattagccggttcctggagagcaaccccgtgatgatcgatgccaaggaagtgagcgccgcccaccgggccagatacttctggggcaatctgcctggcatgaacagacccctggccagcaccgtgaacgacaagctggagctgcaggagtgcctggagcacggccggatcgccaagttcagcaaggtgagaaccatcaccacccgaagcaacagcatcaaacaaggcaaggaccagcactttcctgtgttcatgaacgagaaggaggacatcctgtggtgtaccgagatggagagagtgttcgggttcccagtccactacacagatgtcagcaacatgtctagactggccagacagagactgctgggaagaagctggtccgtccctgtgatcagacacctgttcgcccctctgaaggagtacttcgcctgcgtgagcagcggcaacagcaacgccaacagccggggccccagcttctctagcggcctggtgccactgtccctgagagggagccacatgggccccatggagatctacaaaaccgtgagcgcctggaagcggcagcctgtgcgcgtgctgagcctgtttcggaatatcgataaagtcctgaaaagcctgggattcctggagagcggctctggctccggcggtggcaccctgaagtacgtggaggatgtgacaaacgtggtcagacgggatgtggagaagtggggccccttcgatctggtgtacggcagcacccaacccctgggcagctcttgtgaccggtgccctggctggtacatgtttcagttccaccggatcctgcagtacgccctgccgagacaggagtcccagcggccattcttttggattttcatggacaacttgctgctgaccgaggatgaccaggaaactaccactcggttcctgcagaccgaagccgtgaccctgcaggacgtgagaggccgggactaccagaacgccatgcgggtgtggtccaacatccctggactgaaaagcaagcacgcacctctgacccctaaagaagaggagtacctgcaggcccaggtgcggagcagaagcaagctggacgcccctaaggtggatctgctggtgaagaattgcctcctgcccctgagagagtacttcaagtatttcagccagaatagtctgcccctgggcggcccaagcagcggcgcccctcctcccagcggcggcagcccagccggctccccaacctctaccgaggagggcacctctgagtccgccacccccgagagcggccctggcacctccaccgagcccagcgagggcagcgcacccggcagccctgccggcagccccacctccacagaggagggaaccagcaccgagcccagcgaaggcagcgccccaggcaccagcaccgagcctagtgagggcggctctggcggcggcagcgcccaggagattaaacggatcaacaagatcagaagaagacttgtgaaagacagcaacaccaagaaggccggcaagacaggccccatgaaaaccctgctggttagagtgatgacacccgatctgagagagcggctggaaaacctgagaaagaagcctgaaaatatcccccagcccatcagcaatacatctagagccaacctgaataagctgctgaccgattacaccgaaatgaagaaggcgatcctgcatgtgtactgggaagagttccagaaggaccctgtgggcctgatgagccgggtggcccagcctgccagcaagaagatcgatcagaacaagctgaaacctgagatggacgagaagggcaacctgaccaccgccggctttgcctgctctcagtgtggccagcccctgttcgtgtacaagctggagcaggtgtctgagaagggcaaggcttacaccaactacttcggacggtgcaatgtggccgagcacgaaaagctgatcctgctggcccagctgaagcccgagaaggatagcgacgaagccgtgacatatagcctgggaaagtttgggcagagggccctggatttctacagcattcatgtgaccaaggagtccacccaccccgtgaagcccctggcccagatcgccggaaacagatacgcctccggacctgtgggaaaggccctgagcgacgcatgtatgggcacaatcgcctccttcctgtctaagtaccaggacatcatcatcgaacaccagaaggtggtgaagggcaaccagaagagactggagagcctgcgggagctggccggcaaggaaaacctggaataccctagcgtgaccctgccacctcagcctcacaccaaggagggcgttgatgcctacaacgaagtgatcgcccgggtgcgaatgtgggtgaacctgaacctgtggcagaagctgaagctaagcagagatgatgccaagcctctgctgagactgaagggattcccttcctttcctctggtcgagagacaggccaacgaagtggactggtgggacatggtgtgtaacgtgaagaagctgatcaacgagaaaaaggaggatggcaaggtgttttggcagaatctggctggctacaagagacaggaagccctgagaccatacctgagcagcgaggaagatcggaagaagggaaagaaattcgctcggtaccagctgggcgacctgctgctgcacctggaaaagaagcacggcgaggactggggaaaggtgtacgacgaggcctgggagcggattgacaagaaagtggaaggcctgagcaagcacatcaagctggaagaggaacggagaagcgaggacgcccagagcaaggccgccctgaccgactggctgcgggctaaggccagcttcgtgatcgagggcctgaaggaggccgacaaggacgagttctgcagatgcgagctgaagctgcagaagtggtacggggacctgcggggaaagcccttcgccatcgaagccgagaacagcatcctggacatcagcggcttcagcaagcagtacaactgtgccttcatctggcagaaggacggcgtgaagaagctgaacctgtacctgatcatcaactacttcaagggcggcaagctgcggttcaagaagatcaaacctgaagccttcgaagccaacagattctacaccgtgatcaacaaaaagagcggcgagatcgtgcccatggaggtgaacttcaacttcgacgaccccaacctgatcatcctgcctctggcctttggcaagagacagggcagagaattcatctggaacgacctgctgtccctggaaaccggcagcctgaagctggccaacggaagagtgatcgagaagacactgtacaacagaagaacccggcaggatgagcctgccctgttcgtggccctgaccttcgagcggcgggaggtcctggactcctccaatatcaaaccaatgaacctgatcggcgtggcaagaggcgaaaacatccccgccgtgatcgccctgaccgaccccgagggctgcccactgagccggtttaaggatagcctgggaaacccaacccacatcctgagaatcggcgagagctataaggagaagcagcggaccatccaggccaagaaggaggtggagcagcggagagccggcggctacagccggaagtacgccagcaaagccaagaatctggcagacgatatggtgagaaacaccgctagagatctgctgtactacgccgtgacccaggatgccatgctgatcttcgccaacctgagccggggcttcggccggcagggcaagcggaccttcatggccgagagacagtacacacggatggaggactggctgaccgccaagctggcctacgagggcctgagcaagacctacctgtccaagacactggcccagtacacctccaagacatgcagcaactgtgggtttaccatcaccagcgccgactacgacagggtgctggagaagctgaagaagacagcaacaggctggatgaccacaattaacggcaaggagctgaaggtggagggccagattacctactacaacagatacaagagacagaacgtagtcaaggacctgtccgtcgagctggatagactgagcgaagaatctgtgaacaacgacatctcctcctggacaaagggcagaagcggagaagctctgagcctcctgaagaaaagattctcccatagacccgtgcaggagaagttcgtgtgcctgaactgcggcttcgagacacacgcagccgagcaagccgccctgaacatcgccagatcctggctgttcctgcggagccaggagtacaagaaataccagacaaacaagacaaccggcaacaccgataagagagccttcgtcgagacctggcagtccttttaccggaagaagcttaaggaggtgtggaaacctgccgtgcggtctggcggatctggcggaggctccacaagcagccagagcagcgtgaccttcggcgacgtggccgtggacttcagccaggacgagtgggcctggctggacgccacccagaggagcctgtacaggagcgtgatgctggagaactacaggaacctggtgagcctgggcctgtgcagcagcaagcccgacatgatcagcagcctggagcagaggaaggagccctggaccgtgaagaggaagctgcccggcggcggctgccccgacccccaggccgtgaccagccccaagaaaaagagaaaagtctaagctgccttctgcggggcttgccttctggccatgcccttcttctctcccttgcacctgtacctcttggtctttgaataaagcctgagtaggaaggctagcaaaaaaaaaaaaaaaaaaaaaaaaaaaaaaaaaaaaaaaaaaaaaaaaaaaaaaaaaaaaaaaaaaaaaaaaaaaaaaaa

SEQ ID NO: 5719 - RNA, 5797 nt, synthetic construct
  source 1..5797: mol_type = other RNA
aggaaataagagagaaaagaagagtaagaagaaatataagagccaccatggcccctaagaagaagcgtaaagtgagccggatggaacgcctcgtctacgaggtgcggcagaagtgcagaaacatcgaggacatctgcatctcctgcggatctctgaacgtgaccctggagcacccactgttcatcggcggcatgtgccagaactgtaaaaactgttttctggagtgtgcctatcaatacgacgatgacggctaccagagctactgcaccatctgttgcggcggaagagaggtgctgatgtgtggaaataacaactgctgccggtgcttctgcgtggaatgcgtggacctgctggtgggccccggcgccgcccaggccgctattaaggaagatccttggaactgctacatgtgcggccacaagggcacatacggcctgctgagacggagagaggactggcctagcagactgcagatgttcttcgccaataaccacgaccaggagttcgacccccctaaggtgtaccctcccgtccccgccgagaagagaaagcccatccgggtcctgagcctgttcgatggcatcgccaccggtctgctggtgctgaaggacctgggcatccaggtggataggtacattgcctccgaggtgtgcgaggactccatcaccgtgggaatggtgcgtcatcagggcaagatcatgtacgtgggcgacgtgcggagcgtgacacagaagcatatccaggagtggggccctttcgacctggtgatcggcggcagcccttgcaatgacctgagcatcgtgaacccagcccggaagggcctgtacgagggaaccggcagactgttcttcgagttttacagactgctgcacgacgcccggcctaaggaaggcgacgaccggcccttcttttggctgttcgagaatgtggtggccatgggagtcagcgacaagcgggatattagccggttcctggagagcaaccccgtgatgatcgatgccaaggaagtgagcgccgcccaccgggccagatacttctggggcaatctgcctggcatgaacagacccctggccagcaccgtgaacgacaagctggagctgcaggagtgcctggagcacggccggatcgccaagttcagcaaggtgagaaccatcaccacccgaagcaacagcatcaaacaaggcaaggaccagcactttcctgtgttcatgaacgagaaggaggacatcctgtggtgtaccgagatggagagagtgttcgggttcccagtccactacacagatgtcagcaacatgtctagactggccagacagagactgctgggaagaagctggtccgtccctgtgatcagacacctgttcgcccctctgaaggagtacttcgcctgcgtgagcagcggcaacagcaacgccaacagccggggccccagcttctctagcggcctggtgccactgtccctgagagggagccacatgggccccatggagatctacaaaaccgtgagcgcctggaagcggcagcctgtgcgcgtgctgagcctgtttcggaatatcgataaagtcctgaaaagcctgggattcctggagagcggctctggctccggcggtggcaccctgaagtacgtggaggatgtgacaaacgtggtcagacgggatgtggagaagtggggccccttcgatctggtgtacggcagcacccaacccctgggcagctcttgtgaccggtgccctggctggtacatgtttcagttccaccggatcctgcagtacgccctgccgagacaggagtcccagcggccattcttttggattttcatggacaacttgctgctgaccgaggatgaccaggaaactaccactcggttcctgcagaccgaagccgtgaccctgcaggacgtgagaggccgggactaccagaacgccatgcgggtgtggtccaacatccctggactgaaaagcaagcacgcacctctgacccctaaagaagaggagtacctgcaggcccaggtgcggagcagaagcaagctggacgcccctaaggtggatctgctggtgaagaattgcctcctgcccctgagagagtacttcaagtatttcagccagaatagtctgcccctgggcggcccaagcagcggcgcccctcctcccagcggcggcagcccagccggctccccaacctctaccgaggagggcacctctgagtccgccacccccgagagcggccctggcacctccaccgagcccagcgagggcagcgcacccggcagccctgccggcagccccacctccacagaggagggaaccagcaccgagcccagcgaaggcagcgccccaggcaccagcaccgagcctagtgagggcggctctggcggcggcagcgcccaggagattaaacggatcaacaagatcagaagaagacttgtgaaagacagcaacaccaagaaggccggcaagacaggccccatgaaaaccctgctggttagagtgatgacacccgatctgagagagcggctggaaaacctgagaaagaagcctgaaaatatcccccagcccatcagcaatacatctagagccaacctgaataagctgctgaccgattacaccgaaatgaagaaggcgatcctgcatgtgtactgggaagagttccagaaggaccctgtgggcctgatgagccgggtggcccagcctgccagcaagaagatcgatcagaacaagctgaaacctgagatggacgagaagggcaacctgaccaccgccggctttgcctgctctcagtgtggccagcccctgttcgtgtacaagctggagcaggtgtctgagaagggcaaggcttacaccaactacttcggacggtgcaatgtggccgagcacgaaaagctgatcctgctggcccagctgaagcccgagaaggatagcgacgaagccgtgacatatagcctgggaaagtttgggcagagggccctggatttctacagcattcatgtgaccaaggagtccacccaccccgtgaagcccctggcccagatcgccggaaacagatacgcctccggacctgtgggaaaggccctgagcgacgcatgtatgggcacaatcgcctccttcctgtctaagtaccaggacatcatcatcgaacaccagaaggtggtgaagggcaaccagaagagactggagagcctgcgggagctggccggcaaggaaaacctggaataccctagcgtgaccctgccacctcagcctcacaccaaggagggcgttgatgcctacaacgaagtgatcgcccgggtgcgaatgtgggtgaacctgaacctgtggcagaagctgaagctaagcagagatgatgccaagcctctgctgagactgaagggattcccttcctttcctctggtcgagagacaggccaacgaagtggactggtgggacatggtgtgtaacgtgaagaagctgatcaacgagaaaaaggaggatggcaaggtgttttggcagaatctggctggctacaagagacaggaagccctgagaccatacctgagcagcgaggaagatcggaagaagggaaagaaattcgctcggtaccagctgggcgacctgctgctgcacctggaaaagaagcacggcgaggactggggaaaggtgtacgacgaggcctgggagcggattgacaagaaagtggaaggcctgagcaagcacatcaagctggaagaggaacggagaagcgaggacgcccagagcaaggccgccctgaccgactggctgcgggctaaggccagcttcgtgatcgagggcctgaaggaggccgacaaggacgagttctgcagatgcgagctgaagctgcagaagtggtacggggacctgcggggaaagcccttcgccatcgaagccgagaacagcatcctggacatcagcggcttcagcaagcagtacaactgtgccttcatctggcagaaggacggcgtgaagaagctgaacctgtacctgatcatcaactacttcaagggcggcaagctgcggttcaagaagatcaaacctgaagccttcgaagccaacagattctacaccgtgatcaacaaaaagagcggcgagatcgtgcccatggaggtgaacttcaacttcgacgaccccaacctgatcatcctgcctctggcctttggcaagagacagggcagagaattcatctggaacgacctgctgtccctggaaaccggcagcctgaagctggccaacggaagagtgatcgagaagacactgtacaacagaagaacccggcaggatgagcctgccctgttcgtggccctgaccttcgagcggcgggaggtcctggactcctccaatatcaaaccaatgaacctgatcggcgtggcaagaggcgaaaacatccccgccgtgatcgccctgaccgaccccgagggctgcccactgagccggtttaaggatagcctgggaaacccaacccacatcctgagaatcggcgagagctataaggagaagcagcggaccatccaggccaagaaggaggtggagcagcggagagccggcggctacagccggaagtacgccagcaaagccaagaatctggcagacgatatggtgagaaacaccgctagagatctgctgtactacgccgtgacccaggatgccatgctgatcttcgccaacctgagccggggcttcggccggcagggcaagcggaccttcatggccgagagacagtacacacggatggaggactggctgaccgccaagctggcctacgagggcctgagcaagacctacctgtccaagacactggcccagtacacctccaagacatgcagcaactgtgggtttaccatcaccagcgccgactacgacagggtgctggagaagctgaagaagacagcaacaggctggatgaccacaattaacggcaaggagctgaaggtggagggccagattacctactacaacagatacaagagacagaacgtagtcaaggacctgtccgtcgagctggatagactgagcgaagaatctgtgaacaacgacatctcctcctggacaaagggcagaagcggagaagctctgagcctcctgaagaaaagattctcccatagacccgtgcaggagaagttcgtgtgcctgaactgcggcttcgagacacacgcagccgagcaagccgccctgaacatcgccagatcctggctgttcctgcggagccaggagtacaagaaataccagacaaacaagacaaccggcaacaccgataagagagccttcgtcgagacctggcagtccttttaccggaagaagcttaaggaggtgtggaaacctgccgtgcggtctggcggatctggcggaggctccacaagcagccagggcagcgtgaccttcagggacgtggccatcgacttcagccaggaggagtggaagtggctgcagcccgcccagagggacctgtacaggagggtgatgctggagaactacggccacctggtgagcctgggcctgagcatcagcaagcccgacgtggtgagcctgctggagcagggcaaggagccctggctgggcaagaggaacgtgaagagggacctgttcagcgccagcgagagcagcaccagccccaagaaaaagagaaaagtctaagctgccttctgcggggcttgccttctggccatgcccttcttctctcccttgcacctgtacctcttggtctttgaataaagcctgagtaggaaggctagcaaaaaaaaaaaaaaaaaaaaaaaaaaaaaaaaaaaaaaaaaaaaaaaaaaaaaaaaaaaaaaaaaaaaaaaaaaaaaaaa

SEQ ID NO: 5720 - RNA, 5797 nt, synthetic construct
  source 1..5797: mol_type = other RNA
aggaaataagagagaaaagaagagtaagaagaaatataagagccaccatggcccctaagaagaagcgtaaagtgagccggatggaacgcctcgtctacgaggtgcggcagaagtgcagaaacatcgaggacatctgcatctcctgcggatctctgaacgtgaccctggagcacccactgttcatcggcggcatgtgccagaactgtaaaaactgttttctggagtgtgcctatcaatacgacgatgacggctaccagagctactgcaccatctgttgcggcggaagagaggtgctgatgtgtggaaataacaactgctgccggtgcttctgcgtggaatgcgtggacctgctggtgggccccggcgccgcccaggccgctattaaggaagatccttggaactgctacatgtgcggccacaagggcacatacggcctgctgagacggagagaggactggcctagcagactgcagatgttcttcgccaataaccacgaccaggagttcgacccccctaaggtgtaccctcccgtccccgccgagaagagaaagcccatccgggtcctgagcctgttcgatggcatcgccaccggtctgctggtgctgaaggacctgggcatccaggtggataggtacattgcctccgaggtgtgcgaggactccatcaccgtgggaatggtgcgtcatcagggcaagatcatgtacgtgggcgacgtgcggagcgtgacacagaagcatatccaggagtggggccctttcgacctggtgatcggcggcagcccttgcaatgacctgagcatcgtgaacccagcccggaagggcctgtacgagggaaccggcagactgttcttcgagttttacagactgctgcacgacgcccggcctaaggaaggcgacgaccggcccttcttttggctgttcgagaatgtggtggccatgggagtcagcgacaagcgggatattagccggttcctggagagcaaccccgtgatgatcgatgccaaggaagtgagcgccgcccaccgggccagatacttctggggcaatctgcctggcatgaacagacccctggccagcaccgtgaacgacaagctggagctgcaggagtgcctggagcacggccggatcgccaagttcagcaaggtgagaaccatcaccacccgaagcaacagcatcaaacaaggcaaggaccagcactttcctgtgttcatgaacgagaaggaggacatcctgtggtgtaccgagatggagagagtgttcgggttcccagtccactacacagatgtcagcaacatgtctagactggccagacagagactgctgggaagaagctggtccgtccctgtgatcagacacctgttcgcccctctgaaggagtacttcgcctgcgtgagcagcggcaacagcaacgccaacagccggggccccagcttctctagcggcctggtgccactgtccctgagagggagccacatgggccccatggagatctacaaaaccgtgagcgcctggaagcggcagcctgtgcgcgtgctgagcctgtttcggaatatcgataaagtcctgaaaagcctgggattcctggagagcggctctggctccggcggtggcaccctgaagtacgtggaggatgtgacaaacgtggtcagacgggatgtggagaagtggggccccttcgatctggtgtacggcagcacccaacccctgggcagctcttgtgaccggtgccctggctggtacatgtttcagttccaccggatcctgcagtacgccctgccgagacaggagtcccagcggccattcttttggattttcatggacaacttgctgctgaccgaggatgaccaggaaactaccactcggttcctgcagaccgaagccgtgaccctgcaggacgtgagaggccgggactaccagaacgccatgcgggtgtggtccaacatccctggactgaaaagcaagcacgcacctctgacccctaaagaagaggagtacctgcaggcccaggtgcggagcagaagcaagctggacgcccctaaggtggatctgctggtgaagaattgcctcctgcccctgagagagtacttcaagtatttcagccagaatagtctgcccctgggcggcccaagcagcggcgcccctcctcccagcggcggcagcccagccggctccccaacctctaccgaggagggcacctctgagtccgccacccccgagagcggccctggcacctccaccgagcccagcgagggcagcgcacccggcagccctgccggcagccccacctccacagaggagggaaccagcaccgagcccagcgaaggcagcgccccaggcaccagcaccgagcctagtgagggcggctctggcggcggcagcgcccaggagattaaacggatcaacaagatcagaagaagacttgtgaaagacagcaacaccaagaaggccggcaagacaggccccatgaaaaccctgctggttagagtgatgacacccgatctgagagagcggctggaaaacctgagaaagaagcctgaaaatatcccccagcccatcagcaatacatctagagccaacctgaataagctgctgaccgattacaccgaaatgaagaaggcgatcctgcatgtgtactgggaagagttccagaaggaccctgtgggcctgatgagccgggtggcccagcctgccagcaagaagatcgatcagaacaagctgaaacctgagatggacgagaagggcaacctgaccaccgccggctttgcctgctctcagtgtggccagcccctgttcgtgtacaagctggagcaggtgtctgagaagggcaaggcttacaccaactacttcggacggtgcaatgtggccgagcacgaaaagctgatcctgctggcccagctgaagcccgagaaggatagcgacgaagccgtgacatatagcctgggaaagtttgggcagagggccctggatttctacagcattcatgtgaccaaggagtccacccaccccgtgaagcccctggcccagatcgccggaaacagatacgcctccggacctgtgggaaaggccctgagcgacgcatgtatgggcacaatcgcctccttcctgtctaagtaccaggacatcatcatcgaacaccagaaggtggtgaagggcaaccagaagagactggagagcctgcgggagctggccggcaaggaaaacctggaataccctagcgtgaccctgccacctcagcctcacaccaaggagggcgttgatgcctacaacgaagtgatcgcccgggtgcgaatgtgggtgaacctgaacctgtggcagaagctgaagctaagcagagatgatgccaagcctctgctgagactgaagggattcccttcctttcctctggtcgagagacaggccaacgaagtggactggtgggacatggtgtgtaacgtgaagaagctgatcaacgagaaaaaggaggatggcaaggtgttttggcagaatctggctggctacaagagacaggaagccctgagaccatacctgagcagcgaggaagatcggaagaagggaaagaaattcgctcggtaccagctgggcgacctgctgctgcacctggaaaagaagcacggcgaggactggggaaaggtgtacgacgaggcctgggagcggattgacaagaaagtggaaggcctgagcaagcacatcaagctggaagaggaacggagaagcgaggacgcccagagcaaggccgccctgaccgactggctgcgggctaaggccagcttcgtgatcgagggcctgaaggaggccgacaaggacgagttctgcagatgcgagctgaagctgcagaagtggtacggggacctgcggggaaagcccttcgccatcgaagccgagaacagcatcctggacatcagcggcttcagcaagcagtacaactgtgccttcatctggcagaaggacggcgtgaagaagctgaacctgtacctgatcatcaactacttcaagggcggcaagctgcggttcaagaagatcaaacctgaagccttcgaagccaacagattctacaccgtgatcaacaaaaagagcggcgagatcgtgcccatggaggtgaacttcaacttcgacgaccccaacctgatcatcctgcctctggcctttggcaagagacagggcagagaattcatctggaacgacctgctgtccctggaaaccggcagcctgaagctggccaacggaagagtgatcgagaagacactgtacaacagaagaacccggcaggatgagcctgccctgttcgtggccctgaccttcgagcggcgggaggtcctggactcctccaatatcaaaccaatgaacctgatcggcgtggcaagaggcgaaaacatccccgccgtgatcgccctgaccgaccccgagggctgcccactgagccggtttaaggatagcctgggaaacccaacccacatcctgagaatcggcgagagctataaggagaagcagcggaccatccaggccaagaaggaggtggagcagcggagagccggcggctacagccggaagtacgccagcaaagccaagaatctggcagacgatatggtgagaaacaccgctagagatctgctgtactacgccgtgacccaggatgccatgctgatcttcgccaacctgagccggggcttcggccggcagggcaagcggaccttcatggccgagagacagtacacacggatggaggactggctgaccgccaagctggcctacgagggcctgagcaagacctacctgtccaagacactggcccagtacacctccaagacatgcagcaactgtgggtttaccatcaccagcgccgactacgacagggtgctggagaagctgaagaagacagcaacaggctggatgaccacaattaacggcaaggagctgaaggtggagggccagattacctactacaacagatacaagagacagaacgtagtcaaggacctgtccgtcgagctggatagactgagcgaagaatctgtgaacaacgacatctcctcctggacaaagggcagaagcggagaagctctgagcctcctgaagaaaagattctcccatagacccgtgcaggagaagttcgtgtgcctgaactgcggcttcgagacacacgcagccgagcaagccgccctgaacatcgccagatcctggctgttcctgcggagccaggagtacaagaaataccagacaaacaagacaaccggcaacaccgataagagagccttcgtcgagacctggcagtccttttaccggaagaagcttaaggaggtgtggaaacctgccgtgcggtctggcggatctggcggaggctccacaagcatggccttcgaggacgtggccgtgtacttcagccaggaggagtggggcctgctggacaccgcccagagggccctgtacaggagggtgatgctggacaacttcgccctggtggccagcctgggcctgagcaccaccaggcccagggtggtgatccagctggagaggggcgaggagccctgggtgcccagcggcaccgacatgaccatgagcaggaacgcccacaggaggaggaaccccggcagcaccagccccaagaaaaagagaaaagtctaagctgccttctgcggggcttgccttctggccatgcccttcttctctcccttgcacctgtacctcttggtctttgaataaagcctgagtaggaaggctagcaaaaaaaaaaaaaaaaaaaaaaaaaaaaaaaaaaaaaaaaaaaaaaaaaaaaaaaaaaaaaaaaaaaaaaaaaaaaaaaa

SEQ ID NO: 5721 - RNA, 5797 nt, synthetic construct
  source 1..5797: mol_type = other RNA
aggaaataagagagaaaagaagagtaagaagaaatataagagccaccatggcccctaagaagaagcgtaaagtgagccggatggaacgcctcgtctacgaggtgcggcagaagtgcagaaacatcgaggacatctgcatctcctgcggatctctgaacgtgaccctggagcacccactgttcatcggcggcatgtgccagaactgtaaaaactgttttctggagtgtgcctatcaatacgacgatgacggctaccagagctactgcaccatctgttgcggcggaagagaggtgctgatgtgtggaaataacaactgctgccggtgcttctgcgtggaatgcgtggacctgctggtgggccccggcgccgcccaggccgctattaaggaagatccttggaactgctacatgtgcggccacaagggcacatacggcctgctgagacggagagaggactggcctagcagactgcagatgttcttcgccaataaccacgaccaggagttcgacccccctaaggtgtaccctcccgtccccgccgagaagagaaagcccatccgggtcctgagcctgttcgatggcatcgccaccggtctgctggtgctgaaggacctgggcatccaggtggataggtacattgcctccgaggtgtgcgaggactccatcaccgtgggaatggtgcgtcatcagggcaagatcatgtacgtgggcgacgtgcggagcgtgacacagaagcatatccaggagtggggccctttcgacctggtgatcggcggcagcccttgcaatgacctgagcatcgtgaacccagcccggaagggcctgtacgagggaaccggcagactgttcttcgagttttacagactgctgcacgacgcccggcctaaggaaggcgacgaccggcccttcttttggctgttcgagaatgtggtggccatgggagtcagcgacaagcgggatattagccggttcctggagagcaaccccgtgatgatcgatgccaaggaagtgagcgccgcccaccgggccagatacttctggggcaatctgcctggcatgaacagacccctggccagcaccgtgaacgacaagctggagctgcaggagtgcctggagcacggccggatcgccaagttcagcaaggtgagaaccatcaccacccgaagcaacagcatcaaacaaggcaaggaccagcactttcctgtgttcatgaacgagaaggaggacatcctgtggtgtaccgagatggagagagtgttcgggttcccagtccactacacagatgtcagcaacatgtctagactggccagacagagactgctgggaagaagctggtccgtccctgtgatcagacacctgttcgcccctctgaaggagtacttcgcctgcgtgagcagcggcaacagcaacgccaacagccggggccccagcttctctagcggcctggtgccactgtccctgagagggagccacatgggccccatggagatctacaaaaccgtgagcgcctggaagcggcagcctgtgcgcgtgctgagcctgtttcggaatatcgataaagtcctgaaaagcctgggattcctggagagcggctctggctccggcggtggcaccctgaagtacgtggaggatgtgacaaacgtggtcagacgggatgtggagaagtggggccccttcgatctggtgtacggcagcacccaacccctgggcagctcttgtgaccggtgccctggctggtacatgtttcagttccaccggatcctgcagtacgccctgccgagacaggagtcccagcggccattcttttggattttcatggacaacttgctgctgaccgaggatgaccaggaaactaccactcggttcctgcagaccgaagccgtgaccctgcaggacgtgagaggccgggactaccagaacgccatgcgggtgtggtccaacatccctggactgaaaagcaagcacgcacctctgacccctaaagaagaggagtacctgcaggcccaggtgcggagcagaagcaagctggacgcccctaaggtggatctgctggtgaagaattgcctcctgcccctgagagagtacttcaagtatttcagccagaatagtctgcccctgggcggcccaagcagcggcgcccctcctcccagcggcggcagcccagccggctccccaacctctaccgaggagggcacctctgagtccgccacccccgagagcggccctggcacctccaccgagcccagcgagggcagcgcacccggcagccctgccggcagccccacctccacagaggagggaaccagcaccgagcccagcgaaggcagcgccccaggcaccagcaccgagcctagtgagggcggctctggcggcggcagcgcccaggagattaaacggatcaacaagatcagaagaagacttgtgaaagacagcaacaccaagaaggccggcaagacaggccccatgaaaaccctgctggttagagtgatgacacccgatctgagagagcggctggaaaacctgagaaagaagcctgaaaatatcccccagcccatcagcaatacatctagagccaacctgaataagctgctgaccgattacaccgaaatgaagaaggcgatcctgcatgtgtactgggaagagttccagaaggaccctgtgggcctgatgagccgggtggcccagcctgccagcaagaagatcgatcagaacaagctgaaacctgagatggacgagaagggcaacctgaccaccgccggctttgcctgctctcagtgtggccagcccctgttcgtgtacaagctggagcaggtgtctgagaagggcaaggcttacaccaactacttcggacggtgcaatgtggccgagcacgaaaagctgatcctgctggcccagctgaagcccgagaaggatagcgacgaagccgtgacatatagcctgggaaagtttgggcagagggccctggatttctacagcattcatgtgaccaaggagtccacccaccccgtgaagcccctggcccagatcgccggaaacagatacgcctccggacctgtgggaaaggccctgagcgacgcatgtatgggcacaatcgcctccttcctgtctaagtaccaggacatcatcatcgaacaccagaaggtggtgaagggcaaccagaagagactggagagcctgcgggagctggccggcaaggaaaacctggaataccctagcgtgaccctgccacctcagcctcacaccaaggagggcgttgatgcctacaacgaagtgatcgcccgggtgcgaatgtgggtgaacctgaacctgtggcagaagctgaagctaagcagagatgatgccaagcctctgctgagactgaagggattcccttcctttcctctggtcgagagacaggccaacgaagtggactggtgggacatggtgtgtaacgtgaagaagctgatcaacgagaaaaaggaggatggcaaggtgttttggcagaatctggctggctacaagagacaggaagccctgagaccatacctgagcagcgaggaagatcggaagaagggaaagaaattcgctcggtaccagctgggcgacctgctgctgcacctggaaaagaagcacggcgaggactggggaaaggtgtacgacgaggcctgggagcggattgacaagaaagtggaaggcctgagcaagcacatcaagctggaagaggaacggagaagcgaggacgcccagagcaaggccgccctgaccgactggctgcgggctaaggccagcttcgtgatcgagggcctgaaggaggccgacaaggacgagttctgcagatgcgagctgaagctgcagaagtggtacggggacctgcggggaaagcccttcgccatcgaagccgagaacagcatcctggacatcagcggcttcagcaagcagtacaactgtgccttcatctggcagaaggacggcgtgaagaagctgaacctgtacctgatcatcaactacttcaagggcggcaagctgcggttcaagaagatcaaacctgaagccttcgaagccaacagattctacaccgtgatcaacaaaaagagcggcgagatcgtgcccatggaggtgaacttcaacttcgacgaccccaacctgatcatcctgcctctggcctttggcaagagacagggcagagaattcatctggaacgacctgctgtccctggaaaccggcagcctgaagctggccaacggaagagtgatcgagaagacactgtacaacagaagaacccggcaggatgagcctgccctgttcgtggccctgaccttcgagcggcgggaggtcctggactcctccaatatcaaaccaatgaacctgatcggcgtggcaagaggcgaaaacatccccgccgtgatcgccctgaccgaccccgagggctgcccactgagccggtttaaggatagcctgggaaacccaacccacatcctgagaatcggcgagagctataaggagaagcagcggaccatccaggccaagaaggaggtggagcagcggagagccggcggctacagccggaagtacgccagcaaagccaagaatctggcagacgatatggtgagaaacaccgctagagatctgctgtactacgccgtgacccaggatgccatgctgatcttcgccaacctgagccggggcttcggccggcagggcaagcggaccttcatggccgagagacagtacacacggatggaggactggctgaccgccaagctggcctacgagggcctgagcaagacctacctgtccaagacactggcccagtacacctccaagacatgcagcaactgtgggtttaccatcaccagcgccgactacgacagggtgctggagaagctgaagaagacagcaacaggctggatgaccacaattaacggcaaggagctgaaggtggagggccagattacctactacaacagatacaagagacagaacgtagtcaaggacctgtccgtcgagctggatagactgagcgaagaatctgtgaacaacgacatctcctcctggacaaagggcagaagcggagaagctctgagcctcctgaagaaaagattctcccatagacccgtgcaggagaagttcgtgtgcctgaactgcggcttcgagacacacgcagccgagcaagccgccctgaacatcgccagatcctggctgttcctgcggagccaggagtacaagaaataccagacaaacaagacaaccggcaacaccgataagagagccttcgtcgagacctggcagtccttttaccggaagaagcttaaggaggtgtggaaacctgccgtgcggtctggcggatctggcggaggctccacaagcaagcccggcgccgtgagcttcgccgacgtggccgtgtacttcagccccgaggagtggggctgcctgaggcccgcccagagggccctgtacagggacgtgatgagggagacctacggccacctgggcgccctgggcttccccggccccaagcccgccctgatcagctggatggagcaggagagcgaggcctggagcagcgccgcccaggaccccgagaagggcgagaacctgggcggcgccaggaccagccccaagaaaaagagaaaagtctaagctgccttctgcggggcttgccttctggccatgcccttcttctctcccttgcacctgtacctcttggtctttgaataaagcctgagtaggaaggctagcaaaaaaaaaaaaaaaaaaaaaaaaaaaaaaaaaaaaaaaaaaaaaaaaaaaaaaaaaaaaaaaaaaaaaaaaaaaaaaaa

SEQ ID NO: 5722 - RNA, 5797 nt, synthetic construct
  source 1..5797: mol_type = other RNA
aggaaataagagagaaaagaagagtaagaagaaatataagagccaccatggcccctaagaagaagcgtaaagtgagccggatggaacgcctcgtctacgaggtgcggcagaagtgcagaaacatcgaggacatctgcatctcctgcggatctctgaacgtgaccctggagcacccactgttcatcggcggcatgtgccagaactgtaaaaactgttttctggagtgtgcctatcaatacgacgatgacggctaccagagctactgcaccatctgttgcggcggaagagaggtgctgatgtgtggaaataacaactgctgccggtgcttctgcgtggaatgcgtggacctgctggtgggccccggcgccgcccaggccgctattaaggaagatccttggaactgctacatgtgcggccacaagggcacatacggcctgctgagacggagagaggactggcctagcagactgcagatgttcttcgccaataaccacgaccaggagttcgacccccctaaggtgtaccctcccgtccccgccgagaagagaaagcccatccgggtcctgagcctgttcgatggcatcgccaccggtctgctggtgctgaaggacctgggcatccaggtggataggtacattgcctccgaggtgtgcgaggactccatcaccgtgggaatggtgcgtcatcagggcaagatcatgtacgtgggcgacgtgcggagcgtgacacagaagcatatccaggagtggggccctttcgacctggtgatcggcggcagcccttgcaatgacctgagcatcgtgaacccagcccggaagggcctgtacgagggaaccggcagactgttcttcgagttttacagactgctgcacgacgcccggcctaaggaaggcgacgaccggcccttcttttggctgttcgagaatgtggtggccatgggagtcagcgacaagcgggatattagccggttcctggagagcaaccccgtgatgatcgatgccaaggaagtgagcgccgcccaccgggccagatacttctggggcaatctgcctggcatgaacagacccctggccagcaccgtgaacgacaagctggagctgcaggagtgcctggagcacggccggatcgccaagttcagcaaggtgagaaccatcaccacccgaagcaacagcatcaaacaaggcaaggaccagcactttcctgtgttcatgaacgagaaggaggacatcctgtggtgtaccgagatggagagagtgttcgggttcccagtccactacacagatgtcagcaacatgtctagactggccagacagagactgctgggaagaagctggtccgtccctgtgatcagacacctgttcgcccctctgaaggagtacttcgcctgcgtgagcagcggcaacagcaacgccaacagccggggccccagcttctctagcggcctggtgccactgtccctgagagggagccacatgggccccatggagatctacaaaaccgtgagcgcctggaagcggcagcctgtgcgcgtgctgagcctgtttcggaatatcgataaagtcctgaaaagcctgggattcctggagagcggctctggctccggcggtggcaccctgaagtacgtggaggatgtgacaaacgtggtcagacgggatgtggagaagtggggccccttcgatctggtgtacggcagcacccaacccctgggcagctcttgtgaccggtgccctggctggtacatgtttcagttccaccggatcctgcagtacgccctgccgagacaggagtcccagcggccattcttttggattttcatggacaacttgctgctgaccgaggatgaccaggaaactaccactcggttcctgcagaccgaagccgtgaccctgcaggacgtgagaggccgggactaccagaacgccatgcgggtgtggtccaacatccctggactgaaaagcaagcacgcacctctgacccctaaagaagaggagtacctgcaggcccaggtgcggagcagaagcaagctggacgcccctaaggtggatctgctggtgaagaattgcctcctgcccctgagagagtacttcaagtatttcagccagaatagtctgcccctgggcggcccaagcagcggcgcccctcctcccagcggcggcagcccagccggctccccaacctctaccgaggagggcacctctgagtccgccacccccgagagcggccctggcacctccaccgagcccagcgagggcagcgcacccggcagccctgccggcagccccacctccacagaggagggaaccagcaccgagcccagcgaaggcagcgccccaggcaccagcaccgagcctagtgagggcggctctggcggcggcagcgcccaggagattaaacggatcaacaagatcagaagaagacttgtgaaagacagcaacaccaagaaggccggcaagacaggccccatgaaaaccctgctggttagagtgatgacacccgatctgagagagcggctggaaaacctgagaaagaagcctgaaaatatcccccagcccatcagcaatacatctagagccaacctgaataagctgctgaccgattacaccgaaatgaagaaggcgatcctgcatgtgtactgggaagagttccagaaggaccctgtgggcctgatgagccgggtggcccagcctgccagcaagaagatcgatcagaacaagctgaaacctgagatggacgagaagggcaacctgaccaccgccggctttgcctgctctcagtgtggccagcccctgttcgtgtacaagctggagcaggtgtctgagaagggcaaggcttacaccaactacttcggacggtgcaatgtggccgagcacgaaaagctgatcctgctggcccagctgaagcccgagaaggatagcgacgaagccgtgacatatagcctgggaaagtttgggcagagggccctggatttctacagcattcatgtgaccaaggagtccacccaccccgtgaagcccctggcccagatcgccggaaacagatacgcctccggacctgtgggaaaggccctgagcgacgcatgtatgggcacaatcgcctccttcctgtctaagtaccaggacatcatcatcgaacaccagaaggtggtgaagggcaaccagaagagactggagagcctgcgggagctggccggcaaggaaaacctggaataccctagcgtgaccctgccacctcagcctcacaccaaggagggcgttgatgcctacaacgaagtgatcgcccgggtgcgaatgtgggtgaacctgaacctgtggcagaagctgaagctaagcagagatgatgccaagcctctgctgagactgaagggattcccttcctttcctctggtcgagagacaggccaacgaagtggactggtgggacatggtgtgtaacgtgaagaagctgatcaacgagaaaaaggaggatggcaaggtgttttggcagaatctggctggctacaagagacaggaagccctgagaccatacctgagcagcgaggaagatcggaagaagggaaagaaattcgctcggtaccagctgggcgacctgctgctgcacctggaaaagaagcacggcgaggactggggaaaggtgtacgacgaggcctgggagcggattgacaagaaagtggaaggcctgagcaagcacatcaagctggaagaggaacggagaagcgaggacgcccagagcaaggccgccctgaccgactggctgcgggctaaggccagcttcgtgatcgagggcctgaaggaggccgacaaggacgagttctgcagatgcgagctgaagctgcagaagtggtacggggacctgcggggaaagcccttcgccatcgaagccgagaacagcatcctggacatcagcggcttcagcaagcagtacaactgtgccttcatctggcagaaggacggcgtgaagaagctgaacctgtacctgatcatcaactacttcaagggcggcaagctgcggttcaagaagatcaaacctgaagccttcgaagccaacagattctacaccgtgatcaacaaaaagagcggcgagatcgtgcccatggaggtgaacttcaacttcgacgaccccaacctgatcatcctgcctctggcctttggcaagagacagggcagagaattcatctggaacgacctgctgtccctggaaaccggcagcctgaagctggccaacggaagagtgatcgagaagacactgtacaacagaagaacccggcaggatgagcctgccctgttcgtggccctgaccttcgagcggcgggaggtcctggactcctccaatatcaaaccaatgaacctgatcggcgtggcaagaggcgaaaacatccccgccgtgatcgccctgaccgaccccgagggctgcccactgagccggtttaaggatagcctgggaaacccaacccacatcctgagaatcggcgagagctataaggagaagcagcggaccatccaggccaagaaggaggtggagcagcggagagccggcggctacagccggaagtacgccagcaaagccaagaatctggcagacgatatggtgagaaacaccgctagagatctgctgtactacgccgtgacccaggatgccatgctgatcttcgccaacctgagccggggcttcggccggcagggcaagcggaccttcatggccgagagacagtacacacggatggaggactggctgaccgccaagctggcctacgagggcctgagcaagacctacctgtccaagacactggcccagtacacctccaagacatgcagcaactgtgggtttaccatcaccagcgccgactacgacagggtgctggagaagctgaagaagacagcaacaggctggatgaccacaattaacggcaaggagctgaaggtggagggccagattacctactacaacagatacaagagacagaacgtagtcaaggacctgtccgtcgagctggatagactgagcgaagaatctgtgaacaacgacatctcctcctggacaaagggcagaagcggagaagctctgagcctcctgaagaaaagattctcccatagacccgtgcaggagaagttcgtgtgcctgaactgcggcttcgagacacacgcagccgagcaagccgccctgaacatcgccagatcctggctgttcctgcggagccaggagtacaagaaataccagacaaacaagacaaccggcaacaccgataagagagccttcgtcgagacctggcagtccttttaccggaagaagcttaaggaggtgtggaaacctgccgtgcggtctggcggatctggcggaggctccacaagcaagcccggcgccgtgagcttcgccgacgtggccgtgtacttcagccccgaggagtggggctgcctgaggcccgcccagagggccctgtacagggacgtgatgagggagacctacggccacctgggcgccctgggcttccccggccccaagcccgccctgatcagctggatggagcaggagagcgaggcctggagccccgccgcccaggaccccgagaagggcgagaggctgggcggcgccaggaccagccccaagaaaaagagaaaagtctaagctgccttctgcggggcttgccttctggccatgcccttcttctctcccttgcacctgtacctcttggtctttgaataaagcctgagtaggaaggctagcaaaaaaaaaaaaaaaaaaaaaaaaaaaaaaaaaaaaaaaaaaaaaaaaaaaaaaaaaaaaaaaaaaaaaaaaaaaaaaaa

SEQ ID NO: 5723 - RNA, 5797 nt, synthetic construct
  source 1..5797: mol_type = other RNA
aggaaataagagagaaaagaagagtaagaagaaatataagagccaccatggcccctaagaagaagcgtaaagtgagccggatggaacgcctcgtctacgaggtgcggcagaagtgcagaaacatcgaggacatctgcatctcctgcggatctctgaacgtgaccctggagcacccactgttcatcggcggcatgtgccagaactgtaaaaactgttttctggagtgtgcctatcaatacgacgatgacggctaccagagctactgcaccatctgttgcggcggaagagaggtgctgatgtgtggaaataacaactgctgccggtgcttctgcgtggaatgcgtggacctgctggtgggccccggcgccgcccaggccgctattaaggaagatccttggaactgctacatgtgcggccacaagggcacatacggcctgctgagacggagagaggactggcctagcagactgcagatgttcttcgccaataaccacgaccaggagttcgacccccctaaggtgtaccctcccgtccccgccgagaagagaaagcccatccgggtcctgagcctgttcgatggcatcgccaccggtctgctggtgctgaaggacctgggcatccaggtggataggtacattgcctccgaggtgtgcgaggactccatcaccgtgggaatggtgcgtcatcagggcaagatcatgtacgtgggcgacgtgcggagcgtgacacagaagcatatccaggagtggggccctttcgacctggtgatcggcggcagcccttgcaatgacctgagcatcgtgaacccagcccggaagggcctgtacgagggaaccggcagactgttcttcgagttttacagactgctgcacgacgcccggcctaaggaaggcgacgaccggcccttcttttggctgttcgagaatgtggtggccatgggagtcagcgacaagcgggatattagccggttcctggagagcaaccccgtgatgatcgatgccaaggaagtgagcgccgcccaccgggccagatacttctggggcaatctgcctggcatgaacagacccctggccagcaccgtgaacgacaagctggagctgcaggagtgcctggagcacggccggatcgccaagttcagcaaggtgagaaccatcaccacccgaagcaacagcatcaaacaaggcaaggaccagcactttcctgtgttcatgaacgagaaggaggacatcctgtggtgtaccgagatggagagagtgttcgggttcccagtccactacacagatgtcagcaacatgtctagactggccagacagagactgctgggaagaagctggtccgtccctgtgatcagacacctgttcgcccctctgaaggagtacttcgcctgcgtgagcagcggcaacagcaacgccaacagccggggccccagcttctctagcggcctggtgccactgtccctgagagggagccacatgggccccatggagatctacaaaaccgtgagcgcctggaagcggcagcctgtgcgcgtgctgagcctgtttcggaatatcgataaagtcctgaaaagcctgggattcctggagagcggctctggctccggcggtggcaccctgaagtacgtggaggatgtgacaaacgtggtcagacgggatgtggagaagtggggccccttcgatctggtgtacggcagcacccaacccctgggcagctcttgtgaccggtgccctggctggtacatgtttcagttccaccggatcctgcagtacgccctgccgagacaggagtcccagcggccattcttttggattttcatggacaacttgctgctgaccgaggatgaccaggaaactaccactcggttcctgcagaccgaagccgtgaccctgcaggacgtgagaggccgggactaccagaacgccatgcgggtgtggtccaacatccctggactgaaaagcaagcacgcacctctgacccctaaagaagaggagtacctgcaggcccaggtgcggagcagaagcaagctggacgcccctaaggtggatctgctggtgaagaattgcctcctgcccctgagagagtacttcaagtatttcagccagaatagtctgcccctgggcggcccaagcagcggcgcccctcctcccagcggcggcagcccagccggctccccaacctctaccgaggagggcacctctgagtccgccacccccgagagcggccctggcacctccaccgagcccagcgagggcagcgcacccggcagccctgccggcagccccacctccacagaggagggaaccagcaccgagcccagcgaaggcagcgccccaggcaccagcaccgagcctagtgagggcggctctggcggcggcagcgcccaggagattaaacggatcaacaagatcagaagaagacttgtgaaagacagcaacaccaagaaggccggcaagacaggccccatgaaaaccctgctggttagagtgatgacacccgatctgagagagcggctggaaaacctgagaaagaagcctgaaaatatcccccagcccatcagcaatacatctagagccaacctgaataagctgctgaccgattacaccgaaatgaagaaggcgatcctgcatgtgtactgggaagagttccagaaggaccctgtgggcctgatgagccgggtggcccagcctgccagcaagaagatcgatcagaacaagctgaaacctgagatggacgagaagggcaacctgaccaccgccggctttgcctgctctcagtgtggccagcccctgttcgtgtacaagctggagcaggtgtctgagaagggcaaggcttacaccaactacttcggacggtgcaatgtggccgagcacgaaaagctgatcctgctggcccagctgaagcccgagaaggatagcgacgaagccgtgacatatagcctgggaaagtttgggcagagggccctggatttctacagcattcatgtgaccaaggagtccacccaccccgtgaagcccctggcccagatcgccggaaacagatacgcctccggacctgtgggaaaggccctgagcgacgcatgtatgggcacaatcgcctccttcctgtctaagtaccaggacatcatcatcgaacaccagaaggtggtgaagggcaaccagaagagactggagagcctgcgggagctggccggcaaggaaaacctggaataccctagcgtgaccctgccacctcagcctcacaccaaggagggcgttgatgcctacaacgaagtgatcgcccgggtgcgaatgtgggtgaacctgaacctgtggcagaagctgaagctaagcagagatgatgccaagcctctgctgagactgaagggattcccttcctttcctctggtcgagagacaggccaacgaagtggactggtgggacatggtgtgtaacgtgaagaagctgatcaacgagaaaaaggaggatggcaaggtgttttggcagaatctggctggctacaagagacaggaagccctgagaccatacctgagcagcgaggaagatcggaagaagggaaagaaattcgctcggtaccagctgggcgacctgctgctgcacctggaaaagaagcacggcgaggactggggaaaggtgtacgacgaggcctgggagcggattgacaagaaagtggaaggcctgagcaagcacatcaagctggaagaggaacggagaagcgaggacgcccagagcaaggccgccctgaccgactggctgcgggctaaggccagcttcgtgatcgagggcctgaaggaggccgacaaggacgagttctgcagatgcgagctgaagctgcagaagtggtacggggacctgcggggaaagcccttcgccatcgaagccgagaacagcatcctggacatcagcggcttcagcaagcagtacaactgtgccttcatctggcagaaggacggcgtgaagaagctgaacctgtacctgatcatcaactacttcaagggcggcaagctgcggttcaagaagatcaaacctgaagccttcgaagccaacagattctacaccgtgatcaacaaaaagagcggcgagatcgtgcccatggaggtgaacttcaacttcgacgaccccaacctgatcatcctgcctctggcctttggcaagagacagggcagagaattcatctggaacgacctgctgtccctggaaaccggcagcctgaagctggccaacggaagagtgatcgagaagacactgtacaacagaagaacccggcaggatgagcctgccctgttcgtggccctgaccttcgagcggcgggaggtcctggactcctccaatatcaaaccaatgaacctgatcggcgtggcaagaggcgaaaacatccccgccgtgatcgccctgaccgaccccgagggctgcccactgagccggtttaaggatagcctgggaaacccaacccacatcctgagaatcggcgagagctataaggagaagcagcggaccatccaggccaagaaggaggtggagcagcggagagccggcggctacagccggaagtacgccagcaaagccaagaatctggcagacgatatggtgagaaacaccgctagagatctgctgtactacgccgtgacccaggatgccatgctgatcttcgccaacctgagccggggcttcggccggcagggcaagcggaccttcatggccgagagacagtacacacggatggaggactggctgaccgccaagctggcctacgagggcctgagcaagacctacctgtccaagacactggcccagtacacctccaagacatgcagcaactgtgggtttaccatcaccagcgccgactacgacagggtgctggagaagctgaagaagacagcaacaggctggatgaccacaattaacggcaaggagctgaaggtggagggccagattacctactacaacagatacaagagacagaacgtagtcaaggacctgtccgtcgagctggatagactgagcgaagaatctgtgaacaacgacatctcctcctggacaaagggcagaagcggagaagctctgagcctcctgaagaaaagattctcccatagacccgtgcaggagaagttcgtgtgcctgaactgcggcttcgagacacacgcagccgagcaagccgccctgaacatcgccagatcctggctgttcctgcggagccaggagtacaagaaataccagacaaacaagacaaccggcaacaccgataagagagccttcgtcgagacctggcagtccttttaccggaagaagcttaaggaggtgtggaaacctgccgtgcggtctggcggatctggcggaggctccacaagcatggtgagcttcgaggacgtggccgtgctgctgagccaggaggagtgggactgcctgatccccgcccagaggggcctgtacagggacgtgatgctggagacctacggcaacctggtgagcctgggcctgcaggccagcaagcccgacgtgatcagcaggctggagcagggcgacgagccctggaccacccacaccctgaggatgcagggcagctggagctggaggcacaagagggagggctgcaccagccccaagaaaaagagaaaagtctaagctgccttctgcggggcttgccttctggccatgcccttcttctctcccttgcacctgtacctcttggtctttgaataaagcctgagtaggaaggctagcaaaaaaaaaaaaaaaaaaaaaaaaaaaaaaaaaaaaaaaaaaaaaaaaaaaaaaaaaaaaaaaaaaaaaaaaaaaaaaaa

SEQ ID NO: 5724 - RNA, 5797 nt, synthetic construct
  source 1..5797: mol_type = other RNA
aggaaataagagagaaaagaagagtaagaagaaatataagagccaccatggcccctaagaagaagcgtaaagtgagccggatggaacgcctcgtctacgaggtgcggcagaagtgcagaaacatcgaggacatctgcatctcctgcggatctctgaacgtgaccctggagcacccactgttcatcggcggcatgtgccagaactgtaaaaactgttttctggagtgtgcctatcaatacgacgatgacggctaccagagctactgcaccatctgttgcggcggaagagaggtgctgatgtgtggaaataacaactgctgccggtgcttctgcgtggaatgcgtggacctgctggtgggccccggcgccgcccaggccgctattaaggaagatccttggaactgctacatgtgcggccacaagggcacatacggcctgctgagacggagagaggactggcctagcagactgcagatgttcttcgccaataaccacgaccaggagttcgacccccctaaggtgtaccctcccgtccccgccgagaagagaaagcccatccgggtcctgagcctgttcgatggcatcgccaccggtctgctggtgctgaaggacctgggcatccaggtggataggtacattgcctccgaggtgtgcgaggactccatcaccgtgggaatggtgcgtcatcagggcaagatcatgtacgtgggcgacgtgcggagcgtgacacagaagcatatccaggagtggggccctttcgacctggtgatcggcggcagcccttgcaatgacctgagcatcgtgaacccagcccggaagggcctgtacgagggaaccggcagactgttcttcgagttttacagactgctgcacgacgcccggcctaaggaaggcgacgaccggcccttcttttggctgttcgagaatgtggtggccatgggagtcagcgacaagcgggatattagccggttcctggagagcaaccccgtgatgatcgatgccaaggaagtgagcgccgcccaccgggccagatacttctggggcaatctgcctggcatgaacagacccctggccagcaccgtgaacgacaagctggagctgcaggagtgcctggagcacggccggatcgccaagttcagcaaggtgagaaccatcaccacccgaagcaacagcatcaaacaaggcaaggaccagcactttcctgtgttcatgaacgagaaggaggacatcctgtggtgtaccgagatggagagagtgttcgggttcccagtccactacacagatgtcagcaacatgtctagactggccagacagagactgctgggaagaagctggtccgtccctgtgatcagacacctgttcgcccctctgaaggagtacttcgcctgcgtgagcagcggcaacagcaacgccaacagccggggccccagcttctctagcggcctggtgccactgtccctgagagggagccacatgggccccatggagatctacaaaaccgtgagcgcctggaagcggcagcctgtgcgcgtgctgagcctgtttcggaatatcgataaagtcctgaaaagcctgggattcctggagagcggctctggctccggcggtggcaccctgaagtacgtggaggatgtgacaaacgtggtcagacgggatgtggagaagtggggccccttcgatctggtgtacggcagcacccaacccctgggcagctcttgtgaccggtgccctggctggtacatgtttcagttccaccggatcctgcagtacgccctgccgagacaggagtcccagcggccattcttttggattttcatggacaacttgctgctgaccgaggatgaccaggaaactaccactcggttcctgcagaccgaagccgtgaccctgcaggacgtgagaggccgggactaccagaacgccatgcgggtgtggtccaacatccctggactgaaaagcaagcacgcacctctgacccctaaagaagaggagtacctgcaggcccaggtgcggagcagaagcaagctggacgcccctaaggtggatctgctggtgaagaattgcctcctgcccctgagagagtacttcaagtatttcagccagaatagtctgcccctgggcggcccaagcagcggcgcccctcctcccagcggcggcagcccagccggctccccaacctctaccgaggagggcacctctgagtccgccacccccgagagcggccctggcacctccaccgagcccagcgagggcagcgcacccggcagccctgccggcagccccacctccacagaggagggaaccagcaccgagcccagcgaaggcagcgccccaggcaccagcaccgagcctagtgagggcggctctggcggcggcagcgcccaggagattaaacggatcaacaagatcagaagaagacttgtgaaagacagcaacaccaagaaggccggcaagacaggccccatgaaaaccctgctggttagagtgatgacacccgatctgagagagcggctggaaaacctgagaaagaagcctgaaaatatcccccagcccatcagcaatacatctagagccaacctgaataagctgctgaccgattacaccgaaatgaagaaggcgatcctgcatgtgtactgggaagagttccagaaggaccctgtgggcctgatgagccgggtggcccagcctgccagcaagaagatcgatcagaacaagctgaaacctgagatggacgagaagggcaacctgaccaccgccggctttgcctgctctcagtgtggccagcccctgttcgtgtacaagctggagcaggtgtctgagaagggcaaggcttacaccaactacttcggacggtgcaatgtggccgagcacgaaaagctgatcctgctggcccagctgaagcccgagaaggatagcgacgaagccgtgacatatagcctgggaaagtttgggcagagggccctggatttctacagcattcatgtgaccaaggagtccacccaccccgtgaagcccctggcccagatcgccggaaacagatacgcctccggacctgtgggaaaggccctgagcgacgcatgtatgggcacaatcgcctccttcctgtctaagtaccaggacatcatcatcgaacaccagaaggtggtgaagggcaaccagaagagactggagagcctgcgggagctggccggcaaggaaaacctggaataccctagcgtgaccctgccacctcagcctcacaccaaggagggcgttgatgcctacaacgaagtgatcgcccgggtgcgaatgtgggtgaacctgaacctgtggcagaagctgaagctaagcagagatgatgccaagcctctgctgagactgaagggattcccttcctttcctctggtcgagagacaggccaacgaagtggactggtgggacatggtgtgtaacgtgaagaagctgatcaacgagaaaaaggaggatggcaaggtgttttggcagaatctggctggctacaagagacaggaagccctgagaccatacctgagcagcgaggaagatcggaagaagggaaagaaattcgctcggtaccagctgggcgacctgctgctgcacctggaaaagaagcacggcgaggactggggaaaggtgtacgacgaggcctgggagcggattgacaagaaagtggaaggcctgagcaagcacatcaagctggaagaggaacggagaagcgaggacgcccagagcaaggccgccctgaccgactggctgcgggctaaggccagcttcgtgatcgagggcctgaaggaggccgacaaggacgagttctgcagatgcgagctgaagctgcagaagtggtacggggacctgcggggaaagcccttcgccatcgaagccgagaacagcatcctggacatcagcggcttcagcaagcagtacaactgtgccttcatctggcagaaggacggcgtgaagaagctgaacctgtacctgatcatcaactacttcaagggcggcaagctgcggttcaagaagatcaaacctgaagccttcgaagccaacagattctacaccgtgatcaacaaaaagagcggcgagatcgtgcccatggaggtgaacttcaacttcgacgaccccaacctgatcatcctgcctctggcctttggcaagagacagggcagagaattcatctggaacgacctgctgtccctggaaaccggcagcctgaagctggccaacggaagagtgatcgagaagacactgtacaacagaagaacccggcaggatgagcctgccctgttcgtggccctgaccttcgagcggcgggaggtcctggactcctccaatatcaaaccaatgaacctgatcggcgtggcaagaggcgaaaacatccccgccgtgatcgccctgaccgaccccgagggctgcccactgagccggtttaaggatagcctgggaaacccaacccacatcctgagaatcggcgagagctataaggagaagcagcggaccatccaggccaagaaggaggtggagcagcggagagccggcggctacagccggaagtacgccagcaaagccaagaatctggcagacgatatggtgagaaacaccgctagagatctgctgtactacgccgtgacccaggatgccatgctgatcttcgccaacctgagccggggcttcggccggcagggcaagcggaccttcatggccgagagacagtacacacggatggaggactggctgaccgccaagctggcctacgagggcctgagcaagacctacctgtccaagacactggcccagtacacctccaagacatgcagcaactgtgggtttaccatcaccagcgccgactacgacagggtgctggagaagctgaagaagacagcaacaggctggatgaccacaattaacggcaaggagctgaaggtggagggccagattacctactacaacagatacaagagacagaacgtagtcaaggacctgtccgtcgagctggatagactgagcgaagaatctgtgaacaacgacatctcctcctggacaaagggcagaagcggagaagctctgagcctcctgaagaaaagattctcccatagacccgtgcaggagaagttcgtgtgcctgaactgcggcttcgagacacacgcagccgagcaagccgccctgaacatcgccagatcctggctgttcctgcggagccaggagtacaagaaataccagacaaacaagacaaccggcaacaccgataagagagccttcgtcgagacctggcagtccttttaccggaagaagcttaaggaggtgtggaaacctgccgtgcggtctggcggatctggcggaggctccacaagccaggccgaggtgaccttcgaggacgtggccgtgctgttcagcagggaggagtggggcaggctgggccccgcccagaggggcctgtacagggacgtgatgctggagacctacaggaacctggtgagcctgggcgccggccccgccggccccaagcccggcgtgatcacccagctggagaggggcgacgagccctgggtgctggacgcccagggcgccaagggcaaggagaggctgagggtgagcaccagccccaagaaaaagagaaaagtctaagctgccttctgcggggcttgccttctggccatgcccttcttctctcccttgcacctgtacctcttggtctttgaataaagcctgagtaggaaggctagcaaaaaaaaaaaaaaaaaaaaaaaaaaaaaaaaaaaaaaaaaaaaaaaaaaaaaaaaaaaaaaaaaaaaaaaaaaaaaaaa

SEQ ID NO: 5725 - RNA, 5797 nt, synthetic construct
  source 1..5797: mol_type = other RNA
aggaaataagagagaaaagaagagtaagaagaaatataagagccaccatggcccctaagaagaagcgtaaagtgagccggatggaacgcctcgtctacgaggtgcggcagaagtgcagaaacatcgaggacatctgcatctcctgcggatctctgaacgtgaccctggagcacccactgttcatcggcggcatgtgccagaactgtaaaaactgttttctggagtgtgcctatcaatacgacgatgacggctaccagagctactgcaccatctgttgcggcggaagagaggtgctgatgtgtggaaataacaactgctgccggtgcttctgcgtggaatgcgtggacctgctggtgggccccggcgccgcccaggccgctattaaggaagatccttggaactgctacatgtgcggccacaagggcacatacggcctgctgagacggagagaggactggcctagcagactgcagatgttcttcgccaataaccacgaccaggagttcgacccccctaaggtgtaccctcccgtccccgccgagaagagaaagcccatccgggtcctgagcctgttcgatggcatcgccaccggtctgctggtgctgaaggacctgggcatccaggtggataggtacattgcctccgaggtgtgcgaggactccatcaccgtgggaatggtgcgtcatcagggcaagatcatgtacgtgggcgacgtgcggagcgtgacacagaagcatatccaggagtggggccctttcgacctggtgatcggcggcagcccttgcaatgacctgagcatcgtgaacccagcccggaagggcctgtacgagggaaccggcagactgttcttcgagttttacagactgctgcacgacgcccggcctaaggaaggcgacgaccggcccttcttttggctgttcgagaatgtggtggccatgggagtcagcgacaagcgggatattagccggttcctggagagcaaccccgtgatgatcgatgccaaggaagtgagcgccgcccaccgggccagatacttctggggcaatctgcctggcatgaacagacccctggccagcaccgtgaacgacaagctggagctgcaggagtgcctggagcacggccggatcgccaagttcagcaaggtgagaaccatcaccacccgaagcaacagcatcaaacaaggcaaggaccagcactttcctgtgttcatgaacgagaaggaggacatcctgtggtgtaccgagatggagagagtgttcgggttcccagtccactacacagatgtcagcaacatgtctagactggccagacagagactgctgggaagaagctggtccgtccctgtgatcagacacctgttcgcccctctgaaggagtacttcgcctgcgtgagcagcggcaacagcaacgccaacagccggggccccagcttctctagcggcctggtgccactgtccctgagagggagccacatgggccccatggagatctacaaaaccgtgagcgcctggaagcggcagcctgtgcgcgtgctgagcctgtttcggaatatcgataaagtcctgaaaagcctgggattcctggagagcggctctggctccggcggtggcaccctgaagtacgtggaggatgtgacaaacgtggtcagacgggatgtggagaagtggggccccttcgatctggtgtacggcagcacccaacccctgggcagctcttgtgaccggtgccctggctggtacatgtttcagttccaccggatcctgcagtacgccctgccgagacaggagtcccagcggccattcttttggattttcatggacaacttgctgctgaccgaggatgaccaggaaactaccactcggttcctgcagaccgaagccgtgaccctgcaggacgtgagaggccgggactaccagaacgccatgcgggtgtggtccaacatccctggactgaaaagcaagcacgcacctctgacccctaaagaagaggagtacctgcaggcccaggtgcggagcagaagcaagctggacgcccctaaggtggatctgctggtgaagaattgcctcctgcccctgagagagtacttcaagtatttcagccagaatagtctgcccctgggcggcccaagcagcggcgcccctcctcccagcggcggcagcccagccggctccccaacctctaccgaggagggcacctctgagtccgccacccccgagagcggccctggcacctccaccgagcccagcgagggcagcgcacccggcagccctgccggcagccccacctccacagaggagggaaccagcaccgagcccagcgaaggcagcgccccaggcaccagcaccgagcctagtgagggcggctctggcggcggcagcgcccaggagattaaacggatcaacaagatcagaagaagacttgtgaaagacagcaacaccaagaaggccggcaagacaggccccatgaaaaccctgctggttagagtgatgacacccgatctgagagagcggctggaaaacctgagaaagaagcctgaaaatatcccccagcccatcagcaatacatctagagccaacctgaataagctgctgaccgattacaccgaaatgaagaaggcgatcctgcatgtgtactgggaagagttccagaaggaccctgtgggcctgatgagccgggtggcccagcctgccagcaagaagatcgatcagaacaagctgaaacctgagatggacgagaagggcaacctgaccaccgccggctttgcctgctctcagtgtggccagcccctgttcgtgtacaagctggagcaggtgtctgagaagggcaaggcttacaccaactacttcggacggtgcaatgtggccgagcacgaaaagctgatcctgctggcccagctgaagcccgagaaggatagcgacgaagccgtgacatatagcctgggaaagtttgggcagagggccctggatttctacagcattcatgtgaccaaggagtccacccaccccgtgaagcccctggcccagatcgccggaaacagatacgcctccggacctgtgggaaaggccctgagcgacgcatgtatgggcacaatcgcctccttcctgtctaagtaccaggacatcatcatcgaacaccagaaggtggtgaagggcaaccagaagagactggagagcctgcgggagctggccggcaaggaaaacctggaataccctagcgtgaccctgccacctcagcctcacaccaaggagggcgttgatgcctacaacgaagtgatcgcccgggtgcgaatgtgggtgaacctgaacctgtggcagaagctgaagctaagcagagatgatgccaagcctctgctgagactgaagggattcccttcctttcctctggtcgagagacaggccaacgaagtggactggtgggacatggtgtgtaacgtgaagaagctgatcaacgagaaaaaggaggatggcaaggtgttttggcagaatctggctggctacaagagacaggaagccctgagaccatacctgagcagcgaggaagatcggaagaagggaaagaaattcgctcggtaccagctgggcgacctgctgctgcacctggaaaagaagcacggcgaggactggggaaaggtgtacgacgaggcctgggagcggattgacaagaaagtggaaggcctgagcaagcacatcaagctggaagaggaacggagaagcgaggacgcccagagcaaggccgccctgaccgactggctgcgggctaaggccagcttcgtgatcgagggcctgaaggaggccgacaaggacgagttctgcagatgcgagctgaagctgcagaagtggtacggggacctgcggggaaagcccttcgccatcgaagccgagaacagcatcctggacatcagcggcttcagcaagcagtacaactgtgccttcatctggcagaaggacggcgtgaagaagctgaacctgtacctgatcatcaactacttcaagggcggcaagctgcggttcaagaagatcaaacctgaagccttcgaagccaacagattctacaccgtgatcaacaaaaagagcggcgagatcgtgcccatggaggtgaacttcaacttcgacgaccccaacctgatcatcctgcctctggcctttggcaagagacagggcagagaattcatctggaacgacctgctgtccctggaaaccggcagcctgaagctggccaacggaagagtgatcgagaagacactgtacaacagaagaacccggcaggatgagcctgccctgttcgtggccctgaccttcgagcggcgggaggtcctggactcctccaatatcaaaccaatgaacctgatcggcgtggcaagaggcgaaaacatccccgccgtgatcgccctgaccgaccccgagggctgcccactgagccggtttaaggatagcctgggaaacccaacccacatcctgagaatcggcgagagctataaggagaagcagcggaccatccaggccaagaaggaggtggagcagcggagagccggcggctacagccggaagtacgccagcaaagccaagaatctggcagacgatatggtgagaaacaccgctagagatctgctgtactacgccgtgacccaggatgccatgctgatcttcgccaacctgagccggggcttcggccggcagggcaagcggaccttcatggccgagagacagtacacacggatggaggactggctgaccgccaagctggcctacgagggcctgagcaagacctacctgtccaagacactggcccagtacacctccaagacatgcagcaactgtgggtttaccatcaccagcgccgactacgacagggtgctggagaagctgaagaagacagcaacaggctggatgaccacaattaacggcaaggagctgaaggtggagggccagattacctactacaacagatacaagagacagaacgtagtcaaggacctgtccgtcgagctggatagactgagcgaagaatctgtgaacaacgacatctcctcctggacaaagggcagaagcggagaagctctgagcctcctgaagaaaagattctcccatagacccgtgcaggagaagttcgtgtgcctgaactgcggcttcgagacacacgcagccgagcaagccgccctgaacatcgccagatcctggctgttcctgcggagccaggagtacaagaaataccagacaaacaagacaaccggcaacaccgataagagagccttcgtcgagacctggcagtccttttaccggaagaagcttaaggaggtgtggaaacctgccgtgcggtctggcggatctggcggaggctccacaagcagccaggagagcgtggccttcgaggacgtggccgtgtacttcaccaccaaggagtgggccatcatggtgcccgccgagagggccctgtacagggacgtgatgctggagaactacgaggccgtggccttcgtggtgccccccaccagcaagcccgccctggtgagccacctggagcagggcaaggagagctgcttcatcaggccccagggcgtgctgagcaggagcgactggagggccggcctgaccagccccaagaaaaagagaaaagtctaagctgccttctgcggggcttgccttctggccatgcccttcttctctcccttgcacctgtacctcttggtctttgaataaagcctgagtaggaaggctagcaaaaaaaaaaaaaaaaaaaaaaaaaaaaaaaaaaaaaaaaaaaaaaaaaaaaaaaaaaaaaaaaaaaaaaaaaaaaaaaa

SEQ ID NO: 5726 - RNA, 5797 nt, synthetic construct
  source 1..5797: mol_type = other RNA
aggaaataagagagaaaagaagagtaagaagaaatataagagccaccatggcccctaagaagaagcgtaaagtgagccggatggaacgcctcgtctacgaggtgcggcagaagtgcagaaacatcgaggacatctgcatctcctgcggatctctgaacgtgaccctggagcacccactgttcatcggcggcatgtgccagaactgtaaaaactgttttctggagtgtgcctatcaatacgacgatgacggctaccagagctactgcaccatctgttgcggcggaagagaggtgctgatgtgtggaaataacaactgctgccggtgcttctgcgtggaatgcgtggacctgctggtgggccccggcgccgcccaggccgctattaaggaagatccttggaactgctacatgtgcggccacaagggcacatacggcctgctgagacggagagaggactggcctagcagactgcagatgttcttcgccaataaccacgaccaggagttcgacccccctaaggtgtaccctcccgtccccgccgagaagagaaagcccatccgggtcctgagcctgttcgatggcatcgccaccggtctgctggtgctgaaggacctgggcatccaggtggataggtacattgcctccgaggtgtgcgaggactccatcaccgtgggaatggtgcgtcatcagggcaagatcatgtacgtgggcgacgtgcggagcgtgacacagaagcatatccaggagtggggccctttcgacctggtgatcggcggcagcccttgcaatgacctgagcatcgtgaacccagcccggaagggcctgtacgagggaaccggcagactgttcttcgagttttacagactgctgcacgacgcccggcctaaggaaggcgacgaccggcccttcttttggctgttcgagaatgtggtggccatgggagtcagcgacaagcgggatattagccggttcctggagagcaaccccgtgatgatcgatgccaaggaagtgagcgccgcccaccgggccagatacttctggggcaatctgcctggcatgaacagacccctggccagcaccgtgaacgacaagctggagctgcaggagtgcctggagcacggccggatcgccaagttcagcaaggtgagaaccatcaccacccgaagcaacagcatcaaacaaggcaaggaccagcactttcctgtgttcatgaacgagaaggaggacatcctgtggtgtaccgagatggagagagtgttcgggttcccagtccactacacagatgtcagcaacatgtctagactggccagacagagactgctgggaagaagctggtccgtccctgtgatcagacacctgttcgcccctctgaaggagtacttcgcctgcgtgagcagcggcaacagcaacgccaacagccggggccccagcttctctagcggcctggtgccactgtccctgagagggagccacatgggccccatggagatctacaaaaccgtgagcgcctggaagcggcagcctgtgcgcgtgctgagcctgtttcggaatatcgataaagtcctgaaaagcctgggattcctggagagcggctctggctccggcggtggcaccctgaagtacgtggaggatgtgacaaacgtggtcagacgggatgtggagaagtggggccccttcgatctggtgtacggcagcacccaacccctgggcagctcttgtgaccggtgccctggctggtacatgtttcagttccaccggatcctgcagtacgccctgccgagacaggagtcccagcggccattcttttggattttcatggacaacttgctgctgaccgaggatgaccaggaaactaccactcggttcctgcagaccgaagccgtgaccctgcaggacgtgagaggccgggactaccagaacgccatgcgggtgtggtccaacatccctggactgaaaagcaagcacgcacctctgacccctaaagaagaggagtacctgcaggcccaggtgcggagcagaagcaagctggacgcccctaaggtggatctgctggtgaagaattgcctcctgcccctgagagagtacttcaagtatttcagccagaatagtctgcccctgggcggcccaagcagcggcgcccctcctcccagcggcggcagcccagccggctccccaacctctaccgaggagggcacctctgagtccgccacccccgagagcggccctggcacctccaccgagcccagcgagggcagcgcacccggcagccctgccggcagccccacctccacagaggagggaaccagcaccgagcccagcgaaggcagcgccccaggcaccagcaccgagcctagtgagggcggctctggcggcggcagcgcccaggagattaaacggatcaacaagatcagaagaagacttgtgaaagacagcaacaccaagaaggccggcaagacaggccccatgaaaaccctgctggttagagtgatgacacccgatctgagagagcggctggaaaacctgagaaagaagcctgaaaatatcccccagcccatcagcaatacatctagagccaacctgaataagctgctgaccgattacaccgaaatgaagaaggcgatcctgcatgtgtactgggaagagttccagaaggaccctgtgggcctgatgagccgggtggcccagcctgccagcaagaagatcgatcagaacaagctgaaacctgagatggacgagaagggcaacctgaccaccgccggctttgcctgctctcagtgtggccagcccctgttcgtgtacaagctggagcaggtgtctgagaagggcaaggcttacaccaactacttcggacggtgcaatgtggccgagcacgaaaagctgatcctgctggcccagctgaagcccgagaaggatagcgacgaagccgtgacatatagcctgggaaagtttgggcagagggccctggatttctacagcattcatgtgaccaaggagtccacccaccccgtgaagcccctggcccagatcgccggaaacagatacgcctccggacctgtgggaaaggccctgagcgacgcatgtatgggcacaatcgcctccttcctgtctaagtaccaggacatcatcatcgaacaccagaaggtggtgaagggcaaccagaagagactggagagcctgcgggagctggccggcaaggaaaacctggaataccctagcgtgaccctgccacctcagcctcacaccaaggagggcgttgatgcctacaacgaagtgatcgcccgggtgcgaatgtgggtgaacctgaacctgtggcagaagctgaagctaagcagagatgatgccaagcctctgctgagactgaagggattcccttcctttcctctggtcgagagacaggccaacgaagtggactggtgggacatggtgtgtaacgtgaagaagctgatcaacgagaaaaaggaggatggcaaggtgttttggcagaatctggctggctacaagagacaggaagccctgagaccatacctgagcagcgaggaagatcggaagaagggaaagaaattcgctcggtaccagctgggcgacctgctgctgcacctggaaaagaagcacggcgaggactggggaaaggtgtacgacgaggcctgggagcggattgacaagaaagtggaaggcctgagcaagcacatcaagctggaagaggaacggagaagcgaggacgcccagagcaaggccgccctgaccgactggctgcgggctaaggccagcttcgtgatcgagggcctgaaggaggccgacaaggacgagttctgcagatgcgagctgaagctgcagaagtggtacggggacctgcggggaaagcccttcgccatcgaagccgagaacagcatcctggacatcagcggcttcagcaagcagtacaactgtgccttcatctggcagaaggacggcgtgaagaagctgaacctgtacctgatcatcaactacttcaagggcggcaagctgcggttcaagaagatcaaacctgaagccttcgaagccaacagattctacaccgtgatcaacaaaaagagcggcgagatcgtgcccatggaggtgaacttcaacttcgacgaccccaacctgatcatcctgcctctggcctttggcaagagacagggcagagaattcatctggaacgacctgctgtccctggaaaccggcagcctgaagctggccaacggaagagtgatcgagaagacactgtacaacagaagaacccggcaggatgagcctgccctgttcgtggccctgaccttcgagcggcgggaggtcctggactcctccaatatcaaaccaatgaacctgatcggcgtggcaagaggcgaaaacatccccgccgtgatcgccctgaccgaccccgagggctgcccactgagccggtttaaggatagcctgggaaacccaacccacatcctgagaatcggcgagagctataaggagaagcagcggaccatccaggccaagaaggaggtggagcagcggagagccggcggctacagccggaagtacgccagcaaagccaagaatctggcagacgatatggtgagaaacaccgctagagatctgctgtactacgccgtgacccaggatgccatgctgatcttcgccaacctgagccggggcttcggccggcagggcaagcggaccttcatggccgagagacagtacacacggatggaggactggctgaccgccaagctggcctacgagggcctgagcaagacctacctgtccaagacactggcccagtacacctccaagacatgcagcaactgtgggtttaccatcaccagcgccgactacgacagggtgctggagaagctgaagaagacagcaacaggctggatgaccacaattaacggcaaggagctgaaggtggagggccagattacctactacaacagatacaagagacagaacgtagtcaaggacctgtccgtcgagctggatagactgagcgaagaatctgtgaacaacgacatctcctcctggacaaagggcagaagcggagaagctctgagcctcctgaagaaaagattctcccatagacccgtgcaggagaagttcgtgtgcctgaactgcggcttcgagacacacgcagccgagcaagccgccctgaacatcgccagatcctggctgttcctgcggagccaggagtacaagaaataccagacaaacaagacaaccggcaacaccgataagagagccttcgtcgagacctggcagtccttttaccggaagaagcttaaggaggtgtggaaacctgccgtgcggtctggcggatctggcggaggctccacaagcagcacccccgtgaccttcgaggacgtggtggtgtacttcaccgccgccgagtgggtgcacctgaccaactggcagagggacttctaccaggccgtgatgatggagacctacgagctggtggccagcgtggccggcgacggcgtgcccatggccgaggacgaggagggcggcgtggagaggcccgtgtggcagtacatccccaggggcaagaggaggaggaagaccccccagcccagggccgacaccagccccaagaaaaagagaaaagtctaagctgccttctgcggggcttgccttctggccatgcccttcttctctcccttgcacctgtacctcttggtctttgaataaagcctgagtaggaaggctagcaaaaaaaaaaaaaaaaaaaaaaaaaaaaaaaaaaaaaaaaaaaaaaaaaaaaaaaaaaaaaaaaaaaaaaaaaaaaaaaa

SEQ ID NO: 5727 - RNA, 5797 nt, synthetic construct
  source 1..5797: mol_type = other RNA
aggaaataagagagaaaagaagagtaagaagaaatataagagccaccatggcccctaagaagaagcgtaaagtgagccggatggaacgcctcgtctacgaggtgcggcagaagtgcagaaacatcgaggacatctgcatctcctgcggatctctgaacgtgaccctggagcacccactgttcatcggcggcatgtgccagaactgtaaaaactgttttctggagtgtgcctatcaatacgacgatgacggctaccagagctactgcaccatctgttgcggcggaagagaggtgctgatgtgtggaaataacaactgctgccggtgcttctgcgtggaatgcgtggacctgctggtgggccccggcgccgcccaggccgctattaaggaagatccttggaactgctacatgtgcggccacaagggcacatacggcctgctgagacggagagaggactggcctagcagactgcagatgttcttcgccaataaccacgaccaggagttcgacccccctaaggtgtaccctcccgtccccgccgagaagagaaagcccatccgggtcctgagcctgttcgatggcatcgccaccggtctgctggtgctgaaggacctgggcatccaggtggataggtacattgcctccgaggtgtgcgaggactccatcaccgtgggaatggtgcgtcatcagggcaagatcatgtacgtgggcgacgtgcggagcgtgacacagaagcatatccaggagtggggccctttcgacctggtgatcggcggcagcccttgcaatgacctgagcatcgtgaacccagcccggaagggcctgtacgagggaaccggcagactgttcttcgagttttacagactgctgcacgacgcccggcctaaggaaggcgacgaccggcccttcttttggctgttcgagaatgtggtggccatgggagtcagcgacaagcgggatattagccggttcctggagagcaaccccgtgatgatcgatgccaaggaagtgagcgccgcccaccgggccagatacttctggggcaatctgcctggcatgaacagacccctggccagcaccgtgaacgacaagctggagctgcaggagtgcctggagcacggccggatcgccaagttcagcaaggtgagaaccatcaccacccgaagcaacagcatcaaacaaggcaaggaccagcactttcctgtgttcatgaacgagaaggaggacatcctgtggtgtaccgagatggagagagtgttcgggttcccagtccactacacagatgtcagcaacatgtctagactggccagacagagactgctgggaagaagctggtccgtccctgtgatcagacacctgttcgcccctctgaaggagtacttcgcctgcgtgagcagcggcaacagcaacgccaacagccggggccccagcttctctagcggcctggtgccactgtccctgagagggagccacatgggccccatggagatctacaaaaccgtgagcgcctggaagcggcagcctgtgcgcgtgctgagcctgtttcggaatatcgataaagtcctgaaaagcctgggattcctggagagcggctctggctccggcggtggcaccctgaagtacgtggaggatgtgacaaacgtggtcagacgggatgtggagaagtggggccccttcgatctggtgtacggcagcacccaacccctgggcagctcttgtgaccggtgccctggctggtacatgtttcagttccaccggatcctgcagtacgccctgccgagacaggagtcccagcggccattcttttggattttcatggacaacttgctgctgaccgaggatgaccaggaaactaccactcggttcctgcagaccgaagccgtgaccctgcaggacgtgagaggccgggactaccagaacgccatgcgggtgtggtccaacatccctggactgaaaagcaagcacgcacctctgacccctaaagaagaggagtacctgcaggcccaggtgcggagcagaagcaagctggacgcccctaaggtggatctgctggtgaagaattgcctcctgcccctgagagagtacttcaagtatttcagccagaatagtctgcccctgggcggcccaagcagcggcgcccctcctcccagcggcggcagcccagccggctccccaacctctaccgaggagggcacctctgagtccgccacccccgagagcggccctggcacctccaccgagcccagcgagggcagcgcacccggcagccctgccggcagccccacctccacagaggagggaaccagcaccgagcccagcgaaggcagcgccccaggcaccagcaccgagcctagtgagggcggctctggcggcggcagcgcccaggagattaaacggatcaacaagatcagaagaagacttgtgaaagacagcaacaccaagaaggccggcaagacaggccccatgaaaaccctgctggttagagtgatgacacccgatctgagagagcggctggaaaacctgagaaagaagcctgaaaatatcccccagcccatcagcaatacatctagagccaacctgaataagctgctgaccgattacaccgaaatgaagaaggcgatcctgcatgtgtactgggaagagttccagaaggaccctgtgggcctgatgagccgggtggcccagcctgccagcaagaagatcgatcagaacaagctgaaacctgagatggacgagaagggcaacctgaccaccgccggctttgcctgctctcagtgtggccagcccctgttcgtgtacaagctggagcaggtgtctgagaagggcaaggcttacaccaactacttcggacggtgcaatgtggccgagcacgaaaagctgatcctgctggcccagctgaagcccgagaaggatagcgacgaagccgtgacatatagcctgggaaagtttgggcagagggccctggatttctacagcattcatgtgaccaaggagtccacccaccccgtgaagcccctggcccagatcgccggaaacagatacgcctccggacctgtgggaaaggccctgagcgacgcatgtatgggcacaatcgcctccttcctgtctaagtaccaggacatcatcatcgaacaccagaaggtggtgaagggcaaccagaagagactggagagcctgcgggagctggccggcaaggaaaacctggaataccctagcgtgaccctgccacctcagcctcacaccaaggagggcgttgatgcctacaacgaagtgatcgcccgggtgcgaatgtgggtgaacctgaacctgtggcagaagctgaagctaagcagagatgatgccaagcctctgctgagactgaagggattcccttcctttcctctggtcgagagacaggccaacgaagtggactggtgggacatggtgtgtaacgtgaagaagctgatcaacgagaaaaaggaggatggcaaggtgttttggcagaatctggctggctacaagagacaggaagccctgagaccatacctgagcagcgaggaagatcggaagaagggaaagaaattcgctcggtaccagctgggcgacctgctgctgcacctggaaaagaagcacggcgaggactggggaaaggtgtacgacgaggcctgggagcggattgacaagaaagtggaaggcctgagcaagcacatcaagctggaagaggaacggagaagcgaggacgcccagagcaaggccgccctgaccgactggctgcgggctaaggccagcttcgtgatcgagggcctgaaggaggccgacaaggacgagttctgcagatgcgagctgaagctgcagaagtggtacggggacctgcggggaaagcccttcgccatcgaagccgagaacagcatcctggacatcagcggcttcagcaagcagtacaactgtgccttcatctggcagaaggacggcgtgaagaagctgaacctgtacctgatcatcaactacttcaagggcggcaagctgcggttcaagaagatcaaacctgaagccttcgaagccaacagattctacaccgtgatcaacaaaaagagcggcgagatcgtgcccatggaggtgaacttcaacttcgacgaccccaacctgatcatcctgcctctggcctttggcaagagacagggcagagaattcatctggaacgacctgctgtccctggaaaccggcagcctgaagctggccaacggaagagtgatcgagaagacactgtacaacagaagaacccggcaggatgagcctgccctgttcgtggccctgaccttcgagcggcgggaggtcctggactcctccaatatcaaaccaatgaacctgatcggcgtggcaagaggcgaaaacatccccgccgtgatcgccctgaccgaccccgagggctgcccactgagccggtttaaggatagcctgggaaacccaacccacatcctgagaatcggcgagagctataaggagaagcagcggaccatccaggccaagaaggaggtggagcagcggagagccggcggctacagccggaagtacgccagcaaagccaagaatctggcagacgatatggtgagaaacaccgctagagatctgctgtactacgccgtgacccaggatgccatgctgatcttcgccaacctgagccggggcttcggccggcagggcaagcggaccttcatggccgagagacagtacacacggatggaggactggctgaccgccaagctggcctacgagggcctgagcaagacctacctgtccaagacactggcccagtacacctccaagacatgcagcaactgtgggtttaccatcaccagcgccgactacgacagggtgctggagaagctgaagaagacagcaacaggctggatgaccacaattaacggcaaggagctgaaggtggagggccagattacctactacaacagatacaagagacagaacgtagtcaaggacctgtccgtcgagctggatagactgagcgaagaatctgtgaacaacgacatctcctcctggacaaagggcagaagcggagaagctctgagcctcctgaagaaaagattctcccatagacccgtgcaggagaagttcgtgtgcctgaactgcggcttcgagacacacgcagccgagcaagccgccctgaacatcgccagatcctggctgttcctgcggagccaggagtacaagaaataccagacaaacaagacaaccggcaacaccgataagagagccttcgtcgagacctggcagtccttttaccggaagaagcttaaggaggtgtggaaacctgccgtgcggtctggcggatctggcggaggctccacaagcaagcccggcgccgtgagcttcgccgacgtggccgtgtacttcagccccgaggagtggggctgcctgaggcccgcccagagggccctgtacagggacgtgatgagggagacctacggccacctgggcgccctgggcttccccggccccaagcccgccctgatcagctggatggagcaggagagcgaggcctggagccccgccgcccaggaccccgaggagggcgagagcctgggcggcgccctgaccagccccaagaaaaagagaaaagtctaagctgccttctgcggggcttgccttctggccatgcccttcttctctcccttgcacctgtacctcttggtctttgaataaagcctgagtaggaaggctagcaaaaaaaaaaaaaaaaaaaaaaaaaaaaaaaaaaaaaaaaaaaaaaaaaaaaaaaaaaaaaaaaaaaaaaaaaaaaaaaa

SEQ ID NO: 5728 - RNA, 5797 nt, synthetic construct
  source 1..5797: mol_type = other RNA
aggaaataagagagaaaagaagagtaagaagaaatataagagccaccatggcccctaagaagaagcgtaaagtgagccggatggaacgcctcgtctacgaggtgcggcagaagtgcagaaacatcgaggacatctgcatctcctgcggatctctgaacgtgaccctggagcacccactgttcatcggcggcatgtgccagaactgtaaaaactgttttctggagtgtgcctatcaatacgacgatgacggctaccagagctactgcaccatctgttgcggcggaagagaggtgctgatgtgtggaaataacaactgctgccggtgcttctgcgtggaatgcgtggacctgctggtgggccccggcgccgcccaggccgctattaaggaagatccttggaactgctacatgtgcggccacaagggcacatacggcctgctgagacggagagaggactggcctagcagactgcagatgttcttcgccaataaccacgaccaggagttcgacccccctaaggtgtaccctcccgtccccgccgagaagagaaagcccatccgggtcctgagcctgttcgatggcatcgccaccggtctgctggtgctgaaggacctgggcatccaggtggataggtacattgcctccgaggtgtgcgaggactccatcaccgtgggaatggtgcgtcatcagggcaagatcatgtacgtgggcgacgtgcggagcgtgacacagaagcatatccaggagtggggccctttcgacctggtgatcggcggcagcccttgcaatgacctgagcatcgtgaacccagcccggaagggcctgtacgagggaaccggcagactgttcttcgagttttacagactgctgcacgacgcccggcctaaggaaggcgacgaccggcccttcttttggctgttcgagaatgtggtggccatgggagtcagcgacaagcgggatattagccggttcctggagagcaaccccgtgatgatcgatgccaaggaagtgagcgccgcccaccgggccagatacttctggggcaatctgcctggcatgaacagacccctggccagcaccgtgaacgacaagctggagctgcaggagtgcctggagcacggccggatcgccaagttcagcaaggtgagaaccatcaccacccgaagcaacagcatcaaacaaggcaaggaccagcactttcctgtgttcatgaacgagaaggaggacatcctgtggtgtaccgagatggagagagtgttcgggttcccagtccactacacagatgtcagcaacatgtctagactggccagacagagactgctgggaagaagctggtccgtccctgtgatcagacacctgttcgcccctctgaaggagtacttcgcctgcgtgagcagcggcaacagcaacgccaacagccggggccccagcttctctagcggcctggtgccactgtccctgagagggagccacatgggccccatggagatctacaaaaccgtgagcgcctggaagcggcagcctgtgcgcgtgctgagcctgtttcggaatatcgataaagtcctgaaaagcctgggattcctggagagcggctctggctccggcggtggcaccctgaagtacgtggaggatgtgacaaacgtggtcagacgggatgtggagaagtggggccccttcgatctggtgtacggcagcacccaacccctgggcagctcttgtgaccggtgccctggctggtacatgtttcagttccaccggatcctgcagtacgccctgccgagacaggagtcccagcggccattcttttggattttcatggacaacttgctgctgaccgaggatgaccaggaaactaccactcggttcctgcagaccgaagccgtgaccctgcaggacgtgagaggccgggactaccagaacgccatgcgggtgtggtccaacatccctggactgaaaagcaagcacgcacctctgacccctaaagaagaggagtacctgcaggcccaggtgcggagcagaagcaagctggacgcccctaaggtggatctgctggtgaagaattgcctcctgcccctgagagagtacttcaagtatttcagccagaatagtctgcccctgggcggcccaagcagcggcgcccctcctcccagcggcggcagcccagccggctccccaacctctaccgaggagggcacctctgagtccgccacccccgagagcggccctggcacctccaccgagcccagcgagggcagcgcacccggcagccctgccggcagccccacctccacagaggagggaaccagcaccgagcccagcgaaggcagcgccccaggcaccagcaccgagcctagtgagggcggctctggcggcggcagcgcccaggagattaaacggatcaacaagatcagaagaagacttgtgaaagacagcaacaccaagaaggccggcaagacaggccccatgaaaaccctgctggttagagtgatgacacccgatctgagagagcggctggaaaacctgagaaagaagcctgaaaatatcccccagcccatcagcaatacatctagagccaacctgaataagctgctgaccgattacaccgaaatgaagaaggcgatcctgcatgtgtactgggaagagttccagaaggaccctgtgggcctgatgagccgggtggcccagcctgccagcaagaagatcgatcagaacaagctgaaacctgagatggacgagaagggcaacctgaccaccgccggctttgcctgctctcagtgtggccagcccctgttcgtgtacaagctggagcaggtgtctgagaagggcaaggcttacaccaactacttcggacggtgcaatgtggccgagcacgaaaagctgatcctgctggcccagctgaagcccgagaaggatagcgacgaagccgtgacatatagcctgggaaagtttgggcagagggccctggatttctacagcattcatgtgaccaaggagtccacccaccccgtgaagcccctggcccagatcgccggaaacagatacgcctccggacctgtgggaaaggccctgagcgacgcatgtatgggcacaatcgcctccttcctgtctaagtaccaggacatcatcatcgaacaccagaaggtggtgaagggcaaccagaagagactggagagcctgcgggagctggccggcaaggaaaacctggaataccctagcgtgaccctgccacctcagcctcacaccaaggagggcgttgatgcctacaacgaagtgatcgcccgggtgcgaatgtgggtgaacctgaacctgtggcagaagctgaagctaagcagagatgatgccaagcctctgctgagactgaagggattcccttcctttcctctggtcgagagacaggccaacgaagtggactggtgggacatggtgtgtaacgtgaagaagctgatcaacgagaaaaaggaggatggcaaggtgttttggcagaatctggctggctacaagagacaggaagccctgagaccatacctgagcagcgaggaagatcggaagaagggaaagaaattcgctcggtaccagctgggcgacctgctgctgcacctggaaaagaagcacggcgaggactggggaaaggtgtacgacgaggcctgggagcggattgacaagaaagtggaaggcctgagcaagcacatcaagctggaagaggaacggagaagcgaggacgcccagagcaaggccgccctgaccgactggctgcgggctaaggccagcttcgtgatcgagggcctgaaggaggccgacaaggacgagttctgcagatgcgagctgaagctgcagaagtggtacggggacctgcggggaaagcccttcgccatcgaagccgagaacagcatcctggacatcagcggcttcagcaagcagtacaactgtgccttcatctggcagaaggacggcgtgaagaagctgaacctgtacctgatcatcaactacttcaagggcggcaagctgcggttcaagaagatcaaacctgaagccttcgaagccaacagattctacaccgtgatcaacaaaaagagcggcgagatcgtgcccatggaggtgaacttcaacttcgacgaccccaacctgatcatcctgcctctggcctttggcaagagacagggcagagaattcatctggaacgacctgctgtccctggaaaccggcagcctgaagctggccaacggaagagtgatcgagaagacactgtacaacagaagaacccggcaggatgagcctgccctgttcgtggccctgaccttcgagcggcgggaggtcctggactcctccaatatcaaaccaatgaacctgatcggcgtggcaagaggcgaaaacatccccgccgtgatcgccctgaccgaccccgagggctgcccactgagccggtttaaggatagcctgggaaacccaacccacatcctgagaatcggcgagagctataaggagaagcagcggaccatccaggccaagaaggaggtggagcagcggagagccggcggctacagccggaagtacgccagcaaagccaagaatctggcagacgatatggtgagaaacaccgctagagatctgctgtactacgccgtgacccaggatgccatgctgatcttcgccaacctgagccggggcttcggccggcagggcaagcggaccttcatggccgagagacagtacacacggatggaggactggctgaccgccaagctggcctacgagggcctgagcaagacctacctgtccaagacactggcccagtacacctccaagacatgcagcaactgtgggtttaccatcaccagcgccgactacgacagggtgctggagaagctgaagaagacagcaacaggctggatgaccacaattaacggcaaggagctgaaggtggagggccagattacctactacaacagatacaagagacagaacgtagtcaaggacctgtccgtcgagctggatagactgagcgaagaatctgtgaacaacgacatctcctcctggacaaagggcagaagcggagaagctctgagcctcctgaagaaaagattctcccatagacccgtgcaggagaagttcgtgtgcctgaactgcggcttcgagacacacgcagccgagcaagccgccctgaacatcgccagatcctggctgttcctgcggagccaggagtacaagaaataccagacaaacaagacaaccggcaacaccgataagagagccttcgtcgagacctggcagtccttttaccggaagaagcttaaggaggtgtggaaacctgccgtgcggtctggcggatctggcggaggctccacaagcaagcccggcgccgtgagcttcgccgacgtggccgtgtacttcagccccgaggagtggggctgcctgaggcccgcccagagggccctgtacagggacgtgatgagggagacctacggccacctgggcgccctgggcttccccggccccaagcccgccctgatcagctggatggagcaggagagcgaggcctggagccccgacgcccaggaccccgaggagggcgagagcctgggcggcgccctgaccagccccaagaaaaagagaaaagtctaagctgccttctgcggggcttgccttctggccatgcccttcttctctcccttgcacctgtacctcttggtctttgaataaagcctgagtaggaaggctagcaaaaaaaaaaaaaaaaaaaaaaaaaaaaaaaaaaaaaaaaaaaaaaaaaaaaaaaaaaaaaaaaaaaaaaaaaaaaaaaa

SEQ ID NO: 5729 - RNA, 5797 nt, synthetic construct
  source 1..5797: mol_type = other RNA
aggaaataagagagaaaagaagagtaagaagaaatataagagccaccatggcccctaagaagaagcgtaaagtgagccggatggaacgcctcgtctacgaggtgcggcagaagtgcagaaacatcgaggacatctgcatctcctgcggatctctgaacgtgaccctggagcacccactgttcatcggcggcatgtgccagaactgtaaaaactgttttctggagtgtgcctatcaatacgacgatgacggctaccagagctactgcaccatctgttgcggcggaagagaggtgctgatgtgtggaaataacaactgctgccggtgcttctgcgtggaatgcgtggacctgctggtgggccccggcgccgcccaggccgctattaaggaagatccttggaactgctacatgtgcggccacaagggcacatacggcctgctgagacggagagaggactggcctagcagactgcagatgttcttcgccaataaccacgaccaggagttcgacccccctaaggtgtaccctcccgtccccgccgagaagagaaagcccatccgggtcctgagcctgttcgatggcatcgccaccggtctgctggtgctgaaggacctgggcatccaggtggataggtacattgcctccgaggtgtgcgaggactccatcaccgtgggaatggtgcgtcatcagggcaagatcatgtacgtgggcgacgtgcggagcgtgacacagaagcatatccaggagtggggccctttcgacctggtgatcggcggcagcccttgcaatgacctgagcatcgtgaacccagcccggaagggcctgtacgagggaaccggcagactgttcttcgagttttacagactgctgcacgacgcccggcctaaggaaggcgacgaccggcccttcttttggctgttcgagaatgtggtggccatgggagtcagcgacaagcgggatattagccggttcctggagagcaaccccgtgatgatcgatgccaaggaagtgagcgccgcccaccgggccagatacttctggggcaatctgcctggcatgaacagacccctggccagcaccgtgaacgacaagctggagctgcaggagtgcctggagcacggccggatcgccaagttcagcaaggtgagaaccatcaccacccgaagcaacagcatcaaacaaggcaaggaccagcactttcctgtgttcatgaacgagaaggaggacatcctgtggtgtaccgagatggagagagtgttcgggttcccagtccactacacagatgtcagcaacatgtctagactggccagacagagactgctgggaagaagctggtccgtccctgtgatcagacacctgttcgcccctctgaaggagtacttcgcctgcgtgagcagcggcaacagcaacgccaacagccggggccccagcttctctagcggcctggtgccactgtccctgagagggagccacatgggccccatggagatctacaaaaccgtgagcgcctggaagcggcagcctgtgcgcgtgctgagcctgtttcggaatatcgataaagtcctgaaaagcctgggattcctggagagcggctctggctccggcggtggcaccctgaagtacgtggaggatgtgacaaacgtggtcagacgggatgtggagaagtggggccccttcgatctggtgtacggcagcacccaacccctgggcagctcttgtgaccggtgccctggctggtacatgtttcagttccaccggatcctgcagtacgccctgccgagacaggagtcccagcggccattcttttggattttcatggacaacttgctgctgaccgaggatgaccaggaaactaccactcggttcctgcagaccgaagccgtgaccctgcaggacgtgagaggccgggactaccagaacgccatgcgggtgtggtccaacatccctggactgaaaagcaagcacgcacctctgacccctaaagaagaggagtacctgcaggcccaggtgcggagcagaagcaagctggacgcccctaaggtggatctgctggtgaagaattgcctcctgcccctgagagagtacttcaagtatttcagccagaatagtctgcccctgggcggcccaagcagcggcgcccctcctcccagcggcggcagcccagccggctccccaacctctaccgaggagggcacctctgagtccgccacccccgagagcggccctggcacctccaccgagcccagcgagggcagcgcacccggcagccctgccggcagccccacctccacagaggagggaaccagcaccgagcccagcgaaggcagcgccccaggcaccagcaccgagcctagtgagggcggctctggcggcggcagcgcccaggagattaaacggatcaacaagatcagaagaagacttgtgaaagacagcaacaccaagaaggccggcaagacaggccccatgaaaaccctgctggttagagtgatgacacccgatctgagagagcggctggaaaacctgagaaagaagcctgaaaatatcccccagcccatcagcaatacatctagagccaacctgaataagctgctgaccgattacaccgaaatgaagaaggcgatcctgcatgtgtactgggaagagttccagaaggaccctgtgggcctgatgagccgggtggcccagcctgccagcaagaagatcgatcagaacaagctgaaacctgagatggacgagaagggcaacctgaccaccgccggctttgcctgctctcagtgtggccagcccctgttcgtgtacaagctggagcaggtgtctgagaagggcaaggcttacaccaactacttcggacggtgcaatgtggccgagcacgaaaagctgatcctgctggcccagctgaagcccgagaaggatagcgacgaagccgtgacatatagcctgggaaagtttgggcagagggccctggatttctacagcattcatgtgaccaaggagtccacccaccccgtgaagcccctggcccagatcgccggaaacagatacgcctccggacctgtgggaaaggccctgagcgacgcatgtatgggcacaatcgcctccttcctgtctaagtaccaggacatcatcatcgaacaccagaaggtggtgaagggcaaccagaagagactggagagcctgcgggagctggccggcaaggaaaacctggaataccctagcgtgaccctgccacctcagcctcacaccaaggagggcgttgatgcctacaacgaagtgatcgcccgggtgcgaatgtgggtgaacctgaacctgtggcagaagctgaagctaagcagagatgatgccaagcctctgctgagactgaagggattcccttcctttcctctggtcgagagacaggccaacgaagtggactggtgggacatggtgtgtaacgtgaagaagctgatcaacgagaaaaaggaggatggcaaggtgttttggcagaatctggctggctacaagagacaggaagccctgagaccatacctgagcagcgaggaagatcggaagaagggaaagaaattcgctcggtaccagctgggcgacctgctgctgcacctggaaaagaagcacggcgaggactggggaaaggtgtacgacgaggcctgggagcggattgacaagaaagtggaaggcctgagcaagcacatcaagctggaagaggaacggagaagcgaggacgcccagagcaaggccgccctgaccgactggctgcgggctaaggccagcttcgtgatcgagggcctgaaggaggccgacaaggacgagttctgcagatgcgagctgaagctgcagaagtggtacggggacctgcggggaaagcccttcgccatcgaagccgagaacagcatcctggacatcagcggcttcagcaagcagtacaactgtgccttcatctggcagaaggacggcgtgaagaagctgaacctgtacctgatcatcaactacttcaagggcggcaagctgcggttcaagaagatcaaacctgaagccttcgaagccaacagattctacaccgtgatcaacaaaaagagcggcgagatcgtgcccatggaggtgaacttcaacttcgacgaccccaacctgatcatcctgcctctggcctttggcaagagacagggcagagaattcatctggaacgacctgctgtccctggaaaccggcagcctgaagctggccaacggaagagtgatcgagaagacactgtacaacagaagaacccggcaggatgagcctgccctgttcgtggccctgaccttcgagcggcgggaggtcctggactcctccaatatcaaaccaatgaacctgatcggcgtggcaagaggcgaaaacatccccgccgtgatcgccctgaccgaccccgagggctgcccactgagccggtttaaggatagcctgggaaacccaacccacatcctgagaatcggcgagagctataaggagaagcagcggaccatccaggccaagaaggaggtggagcagcggagagccggcggctacagccggaagtacgccagcaaagccaagaatctggcagacgatatggtgagaaacaccgctagagatctgctgtactacgccgtgacccaggatgccatgctgatcttcgccaacctgagccggggcttcggccggcagggcaagcggaccttcatggccgagagacagtacacacggatggaggactggctgaccgccaagctggcctacgagggcctgagcaagacctacctgtccaagacactggcccagtacacctccaagacatgcagcaactgtgggtttaccatcaccagcgccgactacgacagggtgctggagaagctgaagaagacagcaacaggctggatgaccacaattaacggcaaggagctgaaggtggagggccagattacctactacaacagatacaagagacagaacgtagtcaaggacctgtccgtcgagctggatagactgagcgaagaatctgtgaacaacgacatctcctcctggacaaagggcagaagcggagaagctctgagcctcctgaagaaaagattctcccatagacccgtgcaggagaagttcgtgtgcctgaactgcggcttcgagacacacgcagccgagcaagccgccctgaacatcgccagatcctggctgttcctgcggagccaggagtacaagaaataccagacaaacaagacaaccggcaacaccgataagagagccttcgtcgagacctggcagtccttttaccggaagaagcttaaggaggtgtggaaacctgccgtgcggtctggcggatctggcggaggctccacaagcatggccttcgaggacgtggccgtgtacttcagccaggaggagtggggcctgctggacaccgcccagagggccctgtacaggagggtgatgctggagaacttcaccctggtgaccagcctgggcctgagcaccagcaggccccacgtggtgatccagctggagaggggcgaggagccctgggtgcccagcggcaaggacatgaccctggccaggaacacctacaggaggctgaacgccggcgagaccagccccaagaaaaagagaaaagtctaagctgccttctgcggggcttgccttctggccatgcccttcttctctcccttgcacctgtacctcttggtctttgaataaagcctgagtaggaaggctagcaaaaaaaaaaaaaaaaaaaaaaaaaaaaaaaaaaaaaaaaaaaaaaaaaaaaaaaaaaaaaaaaaaaaaaaaaaaaaaaa

SEQ ID NO: 5730 - RNA, 5797 nt, synthetic construct
  source 1..5797: mol_type = other RNA
aggaaataagagagaaaagaagagtaagaagaaatataagagccaccatggcccctaagaagaagcgtaaagtgagccggatggaacgcctcgtctacgaggtgcggcagaagtgcagaaacatcgaggacatctgcatctcctgcggatctctgaacgtgaccctggagcacccactgttcatcggcggcatgtgccagaactgtaaaaactgttttctggagtgtgcctatcaatacgacgatgacggctaccagagctactgcaccatctgttgcggcggaagagaggtgctgatgtgtggaaataacaactgctgccggtgcttctgcgtggaatgcgtggacctgctggtgggccccggcgccgcccaggccgctattaaggaagatccttggaactgctacatgtgcggccacaagggcacatacggcctgctgagacggagagaggactggcctagcagactgcagatgttcttcgccaataaccacgaccaggagttcgacccccctaaggtgtaccctcccgtccccgccgagaagagaaagcccatccgggtcctgagcctgttcgatggcatcgccaccggtctgctggtgctgaaggacctgggcatccaggtggataggtacattgcctccgaggtgtgcgaggactccatcaccgtgggaatggtgcgtcatcagggcaagatcatgtacgtgggcgacgtgcggagcgtgacacagaagcatatccaggagtggggccctttcgacctggtgatcggcggcagcccttgcaatgacctgagcatcgtgaacccagcccggaagggcctgtacgagggaaccggcagactgttcttcgagttttacagactgctgcacgacgcccggcctaaggaaggcgacgaccggcccttcttttggctgttcgagaatgtggtggccatgggagtcagcgacaagcgggatattagccggttcctggagagcaaccccgtgatgatcgatgccaaggaagtgagcgccgcccaccgggccagatacttctggggcaatctgcctggcatgaacagacccctggccagcaccgtgaacgacaagctggagctgcaggagtgcctggagcacggccggatcgccaagttcagcaaggtgagaaccatcaccacccgaagcaacagcatcaaacaaggcaaggaccagcactttcctgtgttcatgaacgagaaggaggacatcctgtggtgtaccgagatggagagagtgttcgggttcccagtccactacacagatgtcagcaacatgtctagactggccagacagagactgctgggaagaagctggtccgtccctgtgatcagacacctgttcgcccctctgaaggagtacttcgcctgcgtgagcagcggcaacagcaacgccaacagccggggccccagcttctctagcggcctggtgccactgtccctgagagggagccacatgggccccatggagatctacaaaaccgtgagcgcctggaagcggcagcctgtgcgcgtgctgagcctgtttcggaatatcgataaagtcctgaaaagcctgggattcctggagagcggctctggctccggcggtggcaccctgaagtacgtggaggatgtgacaaacgtggtcagacgggatgtggagaagtggggccccttcgatctggtgtacggcagcacccaacccctgggcagctcttgtgaccggtgccctggctggtacatgtttcagttccaccggatcctgcagtacgccctgccgagacaggagtcccagcggccattcttttggattttcatggacaacttgctgctgaccgaggatgaccaggaaactaccactcggttcctgcagaccgaagccgtgaccctgcaggacgtgagaggccgggactaccagaacgccatgcgggtgtggtccaacatccctggactgaaaagcaagcacgcacctctgacccctaaagaagaggagtacctgcaggcccaggtgcggagcagaagcaagctggacgcccctaaggtggatctgctggtgaagaattgcctcctgcccctgagagagtacttcaagtatttcagccagaatagtctgcccctgggcggcccaagcagcggcgcccctcctcccagcggcggcagcccagccggctccccaacctctaccgaggagggcacctctgagtccgccacccccgagagcggccctggcacctccaccgagcccagcgagggcagcgcacccggcagccctgccggcagccccacctccacagaggagggaaccagcaccgagcccagcgaaggcagcgccccaggcaccagcaccgagcctagtgagggcggctctggcggcggcagcgcccaggagattaaacggatcaacaagatcagaagaagacttgtgaaagacagcaacaccaagaaggccggcaagacaggccccatgaaaaccctgctggttagagtgatgacacccgatctgagagagcggctggaaaacctgagaaagaagcctgaaaatatcccccagcccatcagcaatacatctagagccaacctgaataagctgctgaccgattacaccgaaatgaagaaggcgatcctgcatgtgtactgggaagagttccagaaggaccctgtgggcctgatgagccgggtggcccagcctgccagcaagaagatcgatcagaacaagctgaaacctgagatggacgagaagggcaacctgaccaccgccggctttgcctgctctcagtgtggccagcccctgttcgtgtacaagctggagcaggtgtctgagaagggcaaggcttacaccaactacttcggacggtgcaatgtggccgagcacgaaaagctgatcctgctggcccagctgaagcccgagaaggatagcgacgaagccgtgacatatagcctgggaaagtttgggcagagggccctggatttctacagcattcatgtgaccaaggagtccacccaccccgtgaagcccctggcccagatcgccggaaacagatacgcctccggacctgtgggaaaggccctgagcgacgcatgtatgggcacaatcgcctccttcctgtctaagtaccaggacatcatcatcgaacaccagaaggtggtgaagggcaaccagaagagactggagagcctgcgggagctggccggcaaggaaaacctggaataccctagcgtgaccctgccacctcagcctcacaccaaggagggcgttgatgcctacaacgaagtgatcgcccgggtgcgaatgtgggtgaacctgaacctgtggcagaagctgaagctaagcagagatgatgccaagcctctgctgagactgaagggattcccttcctttcctctggtcgagagacaggccaacgaagtggactggtgggacatggtgtgtaacgtgaagaagctgatcaacgagaaaaaggaggatggcaaggtgttttggcagaatctggctggctacaagagacaggaagccctgagaccatacctgagcagcgaggaagatcggaagaagggaaagaaattcgctcggtaccagctgggcgacctgctgctgcacctggaaaagaagcacggcgaggactggggaaaggtgtacgacgaggcctgggagcggattgacaagaaagtggaaggcctgagcaagcacatcaagctggaagaggaacggagaagcgaggacgcccagagcaaggccgccctgaccgactggctgcgggctaaggccagcttcgtgatcgagggcctgaaggaggccgacaaggacgagttctgcagatgcgagctgaagctgcagaagtggtacggggacctgcggggaaagcccttcgccatcgaagccgagaacagcatcctggacatcagcggcttcagcaagcagtacaactgtgccttcatctggcagaaggacggcgtgaagaagctgaacctgtacctgatcatcaactacttcaagggcggcaagctgcggttcaagaagatcaaacctgaagccttcgaagccaacagattctacaccgtgatcaacaaaaagagcggcgagatcgtgcccatggaggtgaacttcaacttcgacgaccccaacctgatcatcctgcctctggcctttggcaagagacagggcagagaattcatctggaacgacctgctgtccctggaaaccggcagcctgaagctggccaacggaagagtgatcgagaagacactgtacaacagaagaacccggcaggatgagcctgccctgttcgtggccctgaccttcgagcggcgggaggtcctggactcctccaatatcaaaccaatgaacctgatcggcgtggcaagaggcgaaaacatccccgccgtgatcgccctgaccgaccccgagggctgcccactgagccggtttaaggatagcctgggaaacccaacccacatcctgagaatcggcgagagctataaggagaagcagcggaccatccaggccaagaaggaggtggagcagcggagagccggcggctacagccggaagtacgccagcaaagccaagaatctggcagacgatatggtgagaaacaccgctagagatctgctgtactacgccgtgacccaggatgccatgctgatcttcgccaacctgagccggggcttcggccggcagggcaagcggaccttcatggccgagagacagtacacacggatggaggactggctgaccgccaagctggcctacgagggcctgagcaagacctacctgtccaagacactggcccagtacacctccaagacatgcagcaactgtgggtttaccatcaccagcgccgactacgacagggtgctggagaagctgaagaagacagcaacaggctggatgaccacaattaacggcaaggagctgaaggtggagggccagattacctactacaacagatacaagagacagaacgtagtcaaggacctgtccgtcgagctggatagactgagcgaagaatctgtgaacaacgacatctcctcctggacaaagggcagaagcggagaagctctgagcctcctgaagaaaagattctcccatagacccgtgcaggagaagttcgtgtgcctgaactgcggcttcgagacacacgcagccgagcaagccgccctgaacatcgccagatcctggctgttcctgcggagccaggagtacaagaaataccagacaaacaagacaaccggcaacaccgataagagagccttcgtcgagacctggcagtccttttaccggaagaagcttaaggaggtgtggaaacctgccgtgcggtctggcggatctggcggaggctccacaagcatggccttcgaggacgtggccgtgtacttcagccaggaggagtggggcctgctggacaccgcccagagggccctgtacaggagggtgatgctggacaacttcgccctggtggccagcctgggcctgagcaccagcaggcccagggtggtgatccagctggagaggggcgaggagccctgggtgcccagcggcaccgacaccgtgctgagcaggaacacctacaggaggaggaaccccggcagcaccagccccaagaaaaagagaaaagtctaagctgccttctgcggggcttgccttctggccatgcccttcttctctcccttgcacctgtacctcttggtctttgaataaagcctgagtaggaaggctagcaaaaaaaaaaaaaaaaaaaaaaaaaaaaaaaaaaaaaaaaaaaaaaaaaaaaaaaaaaaaaaaaaaaaaaaaaaaaaaaa

SEQ ID NO: 5731 - RNA, 5797 nt, synthetic construct
  source 1..5797: mol_type = other RNA
aggaaataagagagaaaagaagagtaagaagaaatataagagccaccatggcccctaagaagaagcgtaaagtgagccggatggaacgcctcgtctacgaggtgcggcagaagtgcagaaacatcgaggacatctgcatctcctgcggatctctgaacgtgaccctggagcacccactgttcatcggcggcatgtgccagaactgtaaaaactgttttctggagtgtgcctatcaatacgacgatgacggctaccagagctactgcaccatctgttgcggcggaagagaggtgctgatgtgtggaaataacaactgctgccggtgcttctgcgtggaatgcgtggacctgctggtgggccccggcgccgcccaggccgctattaaggaagatccttggaactgctacatgtgcggccacaagggcacatacggcctgctgagacggagagaggactggcctagcagactgcagatgttcttcgccaataaccacgaccaggagttcgacccccctaaggtgtaccctcccgtccccgccgagaagagaaagcccatccgggtcctgagcctgttcgatggcatcgccaccggtctgctggtgctgaaggacctgggcatccaggtggataggtacattgcctccgaggtgtgcgaggactccatcaccgtgggaatggtgcgtcatcagggcaagatcatgtacgtgggcgacgtgcggagcgtgacacagaagcatatccaggagtggggccctttcgacctggtgatcggcggcagcccttgcaatgacctgagcatcgtgaacccagcccggaagggcctgtacgagggaaccggcagactgttcttcgagttttacagactgctgcacgacgcccggcctaaggaaggcgacgaccggcccttcttttggctgttcgagaatgtggtggccatgggagtcagcgacaagcgggatattagccggttcctggagagcaaccccgtgatgatcgatgccaaggaagtgagcgccgcccaccgggccagatacttctggggcaatctgcctggcatgaacagacccctggccagcaccgtgaacgacaagctggagctgcaggagtgcctggagcacggccggatcgccaagttcagcaaggtgagaaccatcaccacccgaagcaacagcatcaaacaaggcaaggaccagcactttcctgtgttcatgaacgagaaggaggacatcctgtggtgtaccgagatggagagagtgttcgggttcccagtccactacacagatgtcagcaacatgtctagactggccagacagagactgctgggaagaagctggtccgtccctgtgatcagacacctgttcgcccctctgaaggagtacttcgcctgcgtgagcagcggcaacagcaacgccaacagccggggccccagcttctctagcggcctggtgccactgtccctgagagggagccacatgggccccatggagatctacaaaaccgtgagcgcctggaagcggcagcctgtgcgcgtgctgagcctgtttcggaatatcgataaagtcctgaaaagcctgggattcctggagagcggctctggctccggcggtggcaccctgaagtacgtggaggatgtgacaaacgtggtcagacgggatgtggagaagtggggccccttcgatctggtgtacggcagcacccaacccctgggcagctcttgtgaccggtgccctggctggtacatgtttcagttccaccggatcctgcagtacgccctgccgagacaggagtcccagcggccattcttttggattttcatggacaacttgctgctgaccgaggatgaccaggaaactaccactcggttcctgcagaccgaagccgtgaccctgcaggacgtgagaggccgggactaccagaacgccatgcgggtgtggtccaacatccctggactgaaaagcaagcacgcacctctgacccctaaagaagaggagtacctgcaggcccaggtgcggagcagaagcaagctggacgcccctaaggtggatctgctggtgaagaattgcctcctgcccctgagagagtacttcaagtatttcagccagaatagtctgcccctgggcggcccaagcagcggcgcccctcctcccagcggcggcagcccagccggctccccaacctctaccgaggagggcacctctgagtccgccacccccgagagcggccctggcacctccaccgagcccagcgagggcagcgcacccggcagccctgccggcagccccacctccacagaggagggaaccagcaccgagcccagcgaaggcagcgccccaggcaccagcaccgagcctagtgagggcggctctggcggcggcagcgcccaggagattaaacggatcaacaagatcagaagaagacttgtgaaagacagcaacaccaagaaggccggcaagacaggccccatgaaaaccctgctggttagagtgatgacacccgatctgagagagcggctggaaaacctgagaaagaagcctgaaaatatcccccagcccatcagcaatacatctagagccaacctgaataagctgctgaccgattacaccgaaatgaagaaggcgatcctgcatgtgtactgggaagagttccagaaggaccctgtgggcctgatgagccgggtggcccagcctgccagcaagaagatcgatcagaacaagctgaaacctgagatggacgagaagggcaacctgaccaccgccggctttgcctgctctcagtgtggccagcccctgttcgtgtacaagctggagcaggtgtctgagaagggcaaggcttacaccaactacttcggacggtgcaatgtggccgagcacgaaaagctgatcctgctggcccagctgaagcccgagaaggatagcgacgaagccgtgacatatagcctgggaaagtttgggcagagggccctggatttctacagcattcatgtgaccaaggagtccacccaccccgtgaagcccctggcccagatcgccggaaacagatacgcctccggacctgtgggaaaggccctgagcgacgcatgtatgggcacaatcgcctccttcctgtctaagtaccaggacatcatcatcgaacaccagaaggtggtgaagggcaaccagaagagactggagagcctgcgggagctggccggcaaggaaaacctggaataccctagcgtgaccctgccacctcagcctcacaccaaggagggcgttgatgcctacaacgaagtgatcgcccgggtgcgaatgtgggtgaacctgaacctgtggcagaagctgaagctaagcagagatgatgccaagcctctgctgagactgaagggattcccttcctttcctctggtcgagagacaggccaacgaagtggactggtgggacatggtgtgtaacgtgaagaagctgatcaacgagaaaaaggaggatggcaaggtgttttggcagaatctggctggctacaagagacaggaagccctgagaccatacctgagcagcgaggaagatcggaagaagggaaagaaattcgctcggtaccagctgggcgacctgctgctgcacctggaaaagaagcacggcgaggactggggaaaggtgtacgacgaggcctgggagcggattgacaagaaagtggaaggcctgagcaagcacatcaagctggaagaggaacggagaagcgaggacgcccagagcaaggccgccctgaccgactggctgcgggctaaggccagcttcgtgatcgagggcctgaaggaggccgacaaggacgagttctgcagatgcgagctgaagctgcagaagtggtacggggacctgcggggaaagcccttcgccatcgaagccgagaacagcatcctggacatcagcggcttcagcaagcagtacaactgtgccttcatctggcagaaggacggcgtgaagaagctgaacctgtacctgatcatcaactacttcaagggcggcaagctgcggttcaagaagatcaaacctgaagccttcgaagccaacagattctacaccgtgatcaacaaaaagagcggcgagatcgtgcccatggaggtgaacttcaacttcgacgaccccaacctgatcatcctgcctctggcctttggcaagagacagggcagagaattcatctggaacgacctgctgtccctggaaaccggcagcctgaagctggccaacggaagagtgatcgagaagacactgtacaacagaagaacccggcaggatgagcctgccctgttcgtggccctgaccttcgagcggcgggaggtcctggactcctccaatatcaaaccaatgaacctgatcggcgtggcaagaggcgaaaacatccccgccgtgatcgccctgaccgaccccgagggctgcccactgagccggtttaaggatagcctgggaaacccaacccacatcctgagaatcggcgagagctataaggagaagcagcggaccatccaggccaagaaggaggtggagcagcggagagccggcggctacagccggaagtacgccagcaaagccaagaatctggcagacgatatggtgagaaacaccgctagagatctgctgtactacgccgtgacccaggatgccatgctgatcttcgccaacctgagccggggcttcggccggcagggcaagcggaccttcatggccgagagacagtacacacggatggaggactggctgaccgccaagctggcctacgagggcctgagcaagacctacctgtccaagacactggcccagtacacctccaagacatgcagcaactgtgggtttaccatcaccagcgccgactacgacagggtgctggagaagctgaagaagacagcaacaggctggatgaccacaattaacggcaaggagctgaaggtggagggccagattacctactacaacagatacaagagacagaacgtagtcaaggacctgtccgtcgagctggatagactgagcgaagaatctgtgaacaacgacatctcctcctggacaaagggcagaagcggagaagctctgagcctcctgaagaaaagattctcccatagacccgtgcaggagaagttcgtgtgcctgaactgcggcttcgagacacacgcagccgagcaagccgccctgaacatcgccagatcctggctgttcctgcggagccaggagtacaagaaataccagacaaacaagacaaccggcaacaccgataagagagccttcgtcgagacctggcagtccttttaccggaagaagcttaaggaggtgtggaaacctgccgtgcggtctggcggatctggcggaggctccacaagcaagcccggcgccgtgagcttcgccgacgtggccgtgtacttcagccccgaggagtggggctgcctgaggcccgcccagagggccctgtacagggacgtgatgagggagacctacggccacctgggcgccctgggcttccccggccccaagcccgccctgatcagctggatggagcaggagaccgaggcctggagccccgccgcccaggaccccgagaagggcgagaggctgggcggcgccaggaccagccccaagaaaaagagaaaagtctaagctgccttctgcggggcttgccttctggccatgcccttcttctctcccttgcacctgtacctcttggtctttgaataaagcctgagtaggaaggctagcaaaaaaaaaaaaaaaaaaaaaaaaaaaaaaaaaaaaaaaaaaaaaaaaaaaaaaaaaaaaaaaaaaaaaaaaaaaaaaaa

SEQ ID NO: 5732 - RNA, 5797 nt, synthetic construct
  source 1..5797: mol_type = other RNA
aggaaataagagagaaaagaagagtaagaagaaatataagagccaccatggcccctaagaagaagcgtaaagtgagccggatggaacgcctcgtctacgaggtgcggcagaagtgcagaaacatcgaggacatctgcatctcctgcggatctctgaacgtgaccctggagcacccactgttcatcggcggcatgtgccagaactgtaaaaactgttttctggagtgtgcctatcaatacgacgatgacggctaccagagctactgcaccatctgttgcggcggaagagaggtgctgatgtgtggaaataacaactgctgccggtgcttctgcgtggaatgcgtggacctgctggtgggccccggcgccgcccaggccgctattaaggaagatccttggaactgctacatgtgcggccacaagggcacatacggcctgctgagacggagagaggactggcctagcagactgcagatgttcttcgccaataaccacgaccaggagttcgacccccctaaggtgtaccctcccgtccccgccgagaagagaaagcccatccgggtcctgagcctgttcgatggcatcgccaccggtctgctggtgctgaaggacctgggcatccaggtggataggtacattgcctccgaggtgtgcgaggactccatcaccgtgggaatggtgcgtcatcagggcaagatcatgtacgtgggcgacgtgcggagcgtgacacagaagcatatccaggagtggggccctttcgacctggtgatcggcggcagcccttgcaatgacctgagcatcgtgaacccagcccggaagggcctgtacgagggaaccggcagactgttcttcgagttttacagactgctgcacgacgcccggcctaaggaaggcgacgaccggcccttcttttggctgttcgagaatgtggtggccatgggagtcagcgacaagcgggatattagccggttcctggagagcaaccccgtgatgatcgatgccaaggaagtgagcgccgcccaccgggccagatacttctggggcaatctgcctggcatgaacagacccctggccagcaccgtgaacgacaagctggagctgcaggagtgcctggagcacggccggatcgccaagttcagcaaggtgagaaccatcaccacccgaagcaacagcatcaaacaaggcaaggaccagcactttcctgtgttcatgaacgagaaggaggacatcctgtggtgtaccgagatggagagagtgttcgggttcccagtccactacacagatgtcagcaacatgtctagactggccagacagagactgctgggaagaagctggtccgtccctgtgatcagacacctgttcgcccctctgaaggagtacttcgcctgcgtgagcagcggcaacagcaacgccaacagccggggccccagcttctctagcggcctggtgccactgtccctgagagggagccacatgggccccatggagatctacaaaaccgtgagcgcctggaagcggcagcctgtgcgcgtgctgagcctgtttcggaatatcgataaagtcctgaaaagcctgggattcctggagagcggctctggctccggcggtggcaccctgaagtacgtggaggatgtgacaaacgtggtcagacgggatgtggagaagtggggccccttcgatctggtgtacggcagcacccaacccctgggcagctcttgtgaccggtgccctggctggtacatgtttcagttccaccggatcctgcagtacgccctgccgagacaggagtcccagcggccattcttttggattttcatggacaacttgctgctgaccgaggatgaccaggaaactaccactcggttcctgcagaccgaagccgtgaccctgcaggacgtgagaggccgggactaccagaacgccatgcgggtgtggtccaacatccctggactgaaaagcaagcacgcacctctgacccctaaagaagaggagtacctgcaggcccaggtgcggagcagaagcaagctggacgcccctaaggtggatctgctggtgaagaattgcctcctgcccctgagagagtacttcaagtatttcagccagaatagtctgcccctgggcggcccaagcagcggcgcccctcctcccagcggcggcagcccagccggctccccaacctctaccgaggagggcacctctgagtccgccacccccgagagcggccctggcacctccaccgagcccagcgagggcagcgcacccggcagccctgccggcagccccacctccacagaggagggaaccagcaccgagcccagcgaaggcagcgccccaggcaccagcaccgagcctagtgagggcggctctggcggcggcagcgcccaggagattaaacggatcaacaagatcagaagaagacttgtgaaagacagcaacaccaagaaggccggcaagacaggccccatgaaaaccctgctggttagagtgatgacacccgatctgagagagcggctggaaaacctgagaaagaagcctgaaaatatcccccagcccatcagcaatacatctagagccaacctgaataagctgctgaccgattacaccgaaatgaagaaggcgatcctgcatgtgtactgggaagagttccagaaggaccctgtgggcctgatgagccgggtggcccagcctgccagcaagaagatcgatcagaacaagctgaaacctgagatggacgagaagggcaacctgaccaccgccggctttgcctgctctcagtgtggccagcccctgttcgtgtacaagctggagcaggtgtctgagaagggcaaggcttacaccaactacttcggacggtgcaatgtggccgagcacgaaaagctgatcctgctggcccagctgaagcccgagaaggatagcgacgaagccgtgacatatagcctgggaaagtttgggcagagggccctggatttctacagcattcatgtgaccaaggagtccacccaccccgtgaagcccctggcccagatcgccggaaacagatacgcctccggacctgtgggaaaggccctgagcgacgcatgtatgggcacaatcgcctccttcctgtctaagtaccaggacatcatcatcgaacaccagaaggtggtgaagggcaaccagaagagactggagagcctgcgggagctggccggcaaggaaaacctggaataccctagcgtgaccctgccacctcagcctcacaccaaggagggcgttgatgcctacaacgaagtgatcgcccgggtgcgaatgtgggtgaacctgaacctgtggcagaagctgaagctaagcagagatgatgccaagcctctgctgagactgaagggattcccttcctttcctctggtcgagagacaggccaacgaagtggactggtgggacatggtgtgtaacgtgaagaagctgatcaacgagaaaaaggaggatggcaaggtgttttggcagaatctggctggctacaagagacaggaagccctgagaccatacctgagcagcgaggaagatcggaagaagggaaagaaattcgctcggtaccagctgggcgacctgctgctgcacctggaaaagaagcacggcgaggactggggaaaggtgtacgacgaggcctgggagcggattgacaagaaagtggaaggcctgagcaagcacatcaagctggaagaggaacggagaagcgaggacgcccagagcaaggccgccctgaccgactggctgcgggctaaggccagcttcgtgatcgagggcctgaaggaggccgacaaggacgagttctgcagatgcgagctgaagctgcagaagtggtacggggacctgcggggaaagcccttcgccatcgaagccgagaacagcatcctggacatcagcggcttcagcaagcagtacaactgtgccttcatctggcagaaggacggcgtgaagaagctgaacctgtacctgatcatcaactacttcaagggcggcaagctgcggttcaagaagatcaaacctgaagccttcgaagccaacagattctacaccgtgatcaacaaaaagagcggcgagatcgtgcccatggaggtgaacttcaacttcgacgaccccaacctgatcatcctgcctctggcctttggcaagagacagggcagagaattcatctggaacgacctgctgtccctggaaaccggcagcctgaagctggccaacggaagagtgatcgagaagacactgtacaacagaagaacccggcaggatgagcctgccctgttcgtggccctgaccttcgagcggcgggaggtcctggactcctccaatatcaaaccaatgaacctgatcggcgtggcaagaggcgaaaacatccccgccgtgatcgccctgaccgaccccgagggctgcccactgagccggtttaaggatagcctgggaaacccaacccacatcctgagaatcggcgagagctataaggagaagcagcggaccatccaggccaagaaggaggtggagcagcggagagccggcggctacagccggaagtacgccagcaaagccaagaatctggcagacgatatggtgagaaacaccgctagagatctgctgtactacgccgtgacccaggatgccatgctgatcttcgccaacctgagccggggcttcggccggcagggcaagcggaccttcatggccgagagacagtacacacggatggaggactggctgaccgccaagctggcctacgagggcctgagcaagacctacctgtccaagacactggcccagtacacctccaagacatgcagcaactgtgggtttaccatcaccagcgccgactacgacagggtgctggagaagctgaagaagacagcaacaggctggatgaccacaattaacggcaaggagctgaaggtggagggccagattacctactacaacagatacaagagacagaacgtagtcaaggacctgtccgtcgagctggatagactgagcgaagaatctgtgaacaacgacatctcctcctggacaaagggcagaagcggagaagctctgagcctcctgaagaaaagattctcccatagacccgtgcaggagaagttcgtgtgcctgaactgcggcttcgagacacacgcagccgagcaagccgccctgaacatcgccagatcctggctgttcctgcggagccaggagtacaagaaataccagacaaacaagacaaccggcaacaccgataagagagccttcgtcgagacctggcagtccttttaccggaagaagcttaaggaggtgtggaaacctgccgtgcggtctggcggatctggcggaggctccacaagcatggccttcgaggacgtggccgtgtacttcagccaggaggagtggggcctgctggacaccgcccagagggccctgtacaggagggtgatgctggacaacttcgccctggtggccagcctgggcctgagcaccagcaggcccagggtggtgatccagctggagaggggcgaggagccctgggtgcccagcggcaaggacatgaccctggccaggaacacctacggcaggctgaacagcggcagcaccagccccaagaaaaagagaaaagtctaagctgccttctgcggggcttgccttctggccatgcccttcttctctcccttgcacctgtacctcttggtctttgaataaagcctgagtaggaaggctagcaaaaaaaaaaaaaaaaaaaaaaaaaaaaaaaaaaaaaaaaaaaaaaaaaaaaaaaaaaaaaaaaaaaaaaaaaaaaaaaa

SEQ ID NO: 5733 - RNA, 5797 nt, synthetic construct
  source 1..5797: mol_type = other RNA
aggaaataagagagaaaagaagagtaagaagaaatataagagccaccatggcccctaagaagaagcgtaaagtgagccggatggaacgcctcgtctacgaggtgcggcagaagtgcagaaacatcgaggacatctgcatctcctgcggatctctgaacgtgaccctggagcacccactgttcatcggcggcatgtgccagaactgtaaaaactgttttctggagtgtgcctatcaatacgacgatgacggctaccagagctactgcaccatctgttgcggcggaagagaggtgctgatgtgtggaaataacaactgctgccggtgcttctgcgtggaatgcgtggacctgctggtgggccccggcgccgcccaggccgctattaaggaagatccttggaactgctacatgtgcggccacaagggcacatacggcctgctgagacggagagaggactggcctagcagactgcagatgttcttcgccaataaccacgaccaggagttcgacccccctaaggtgtaccctcccgtccccgccgagaagagaaagcccatccgggtcctgagcctgttcgatggcatcgccaccggtctgctggtgctgaaggacctgggcatccaggtggataggtacattgcctccgaggtgtgcgaggactccatcaccgtgggaatggtgcgtcatcagggcaagatcatgtacgtgggcgacgtgcggagcgtgacacagaagcatatccaggagtggggccctttcgacctggtgatcggcggcagcccttgcaatgacctgagcatcgtgaacccagcccggaagggcctgtacgagggaaccggcagactgttcttcgagttttacagactgctgcacgacgcccggcctaaggaaggcgacgaccggcccttcttttggctgttcgagaatgtggtggccatgggagtcagcgacaagcgggatattagccggttcctggagagcaaccccgtgatgatcgatgccaaggaagtgagcgccgcccaccgggccagatacttctggggcaatctgcctggcatgaacagacccctggccagcaccgtgaacgacaagctggagctgcaggagtgcctggagcacggccggatcgccaagttcagcaaggtgagaaccatcaccacccgaagcaacagcatcaaacaaggcaaggaccagcactttcctgtgttcatgaacgagaaggaggacatcctgtggtgtaccgagatggagagagtgttcgggttcccagtccactacacagatgtcagcaacatgtctagactggccagacagagactgctgggaagaagctggtccgtccctgtgatcagacacctgttcgcccctctgaaggagtacttcgcctgcgtgagcagcggcaacagcaacgccaacagccggggccccagcttctctagcggcctggtgccactgtccctgagagggagccacatgggccccatggagatctacaaaaccgtgagcgcctggaagcggcagcctgtgcgcgtgctgagcctgtttcggaatatcgataaagtcctgaaaagcctgggattcctggagagcggctctggctccggcggtggcaccctgaagtacgtggaggatgtgacaaacgtggtcagacgggatgtggagaagtggggccccttcgatctggtgtacggcagcacccaacccctgggcagctcttgtgaccggtgccctggctggtacatgtttcagttccaccggatcctgcagtacgccctgccgagacaggagtcccagcggccattcttttggattttcatggacaacttgctgctgaccgaggatgaccaggaaactaccactcggttcctgcagaccgaagccgtgaccctgcaggacgtgagaggccgggactaccagaacgccatgcgggtgtggtccaacatccctggactgaaaagcaagcacgcacctctgacccctaaagaagaggagtacctgcaggcccaggtgcggagcagaagcaagctggacgcccctaaggtggatctgctggtgaagaattgcctcctgcccctgagagagtacttcaagtatttcagccagaatagtctgcccctgggcggcccaagcagcggcgcccctcctcccagcggcggcagcccagccggctccccaacctctaccgaggagggcacctctgagtccgccacccccgagagcggccctggcacctccaccgagcccagcgagggcagcgcacccggcagccctgccggcagccccacctccacagaggagggaaccagcaccgagcccagcgaaggcagcgccccaggcaccagcaccgagcctagtgagggcggctctggcggcggcagcgcccaggagattaaacggatcaacaagatcagaagaagacttgtgaaagacagcaacaccaagaaggccggcaagacaggccccatgaaaaccctgctggttagagtgatgacacccgatctgagagagcggctggaaaacctgagaaagaagcctgaaaatatcccccagcccatcagcaatacatctagagccaacctgaataagctgctgaccgattacaccgaaatgaagaaggcgatcctgcatgtgtactgggaagagttccagaaggaccctgtgggcctgatgagccgggtggcccagcctgccagcaagaagatcgatcagaacaagctgaaacctgagatggacgagaagggcaacctgaccaccgccggctttgcctgctctcagtgtggccagcccctgttcgtgtacaagctggagcaggtgtctgagaagggcaaggcttacaccaactacttcggacggtgcaatgtggccgagcacgaaaagctgatcctgctggcccagctgaagcccgagaaggatagcgacgaagccgtgacatatagcctgggaaagtttgggcagagggccctggatttctacagcattcatgtgaccaaggagtccacccaccccgtgaagcccctggcccagatcgccggaaacagatacgcctccggacctgtgggaaaggccctgagcgacgcatgtatgggcacaatcgcctccttcctgtctaagtaccaggacatcatcatcgaacaccagaaggtggtgaagggcaaccagaagagactggagagcctgcgggagctggccggcaaggaaaacctggaataccctagcgtgaccctgccacctcagcctcacaccaaggagggcgttgatgcctacaacgaagtgatcgcccgggtgcgaatgtgggtgaacctgaacctgtggcagaagctgaagctaagcagagatgatgccaagcctctgctgagactgaagggattcccttcctttcctctggtcgagagacaggccaacgaagtggactggtgggacatggtgtgtaacgtgaagaagctgatcaacgagaaaaaggaggatggcaaggtgttttggcagaatctggctggctacaagagacaggaagccctgagaccatacctgagcagcgaggaagatcggaagaagggaaagaaattcgctcggtaccagctgggcgacctgctgctgcacctggaaaagaagcacggcgaggactggggaaaggtgtacgacgaggcctgggagcggattgacaagaaagtggaaggcctgagcaagcacatcaagctggaagaggaacggagaagcgaggacgcccagagcaaggccgccctgaccgactggctgcgggctaaggccagcttcgtgatcgagggcctgaaggaggccgacaaggacgagttctgcagatgcgagctgaagctgcagaagtggtacggggacctgcggggaaagcccttcgccatcgaagccgagaacagcatcctggacatcagcggcttcagcaagcagtacaactgtgccttcatctggcagaaggacggcgtgaagaagctgaacctgtacctgatcatcaactacttcaagggcggcaagctgcggttcaagaagatcaaacctgaagccttcgaagccaacagattctacaccgtgatcaacaaaaagagcggcgagatcgtgcccatggaggtgaacttcaacttcgacgaccccaacctgatcatcctgcctctggcctttggcaagagacagggcagagaattcatctggaacgacctgctgtccctggaaaccggcagcctgaagctggccaacggaagagtgatcgagaagacactgtacaacagaagaacccggcaggatgagcctgccctgttcgtggccctgaccttcgagcggcgggaggtcctggactcctccaatatcaaaccaatgaacctgatcggcgtggcaagaggcgaaaacatccccgccgtgatcgccctgaccgaccccgagggctgcccactgagccggtttaaggatagcctgggaaacccaacccacatcctgagaatcggcgagagctataaggagaagcagcggaccatccaggccaagaaggaggtggagcagcggagagccggcggctacagccggaagtacgccagcaaagccaagaatctggcagacgatatggtgagaaacaccgctagagatctgctgtactacgccgtgacccaggatgccatgctgatcttcgccaacctgagccggggcttcggccggcagggcaagcggaccttcatggccgagagacagtacacacggatggaggactggctgaccgccaagctggcctacgagggcctgagcaagacctacctgtccaagacactggcccagtacacctccaagacatgcagcaactgtgggtttaccatcaccagcgccgactacgacagggtgctggagaagctgaagaagacagcaacaggctggatgaccacaattaacggcaaggagctgaaggtggagggccagattacctactacaacagatacaagagacagaacgtagtcaaggacctgtccgtcgagctggatagactgagcgaagaatctgtgaacaacgacatctcctcctggacaaagggcagaagcggagaagctctgagcctcctgaagaaaagattctcccatagacccgtgcaggagaagttcgtgtgcctgaactgcggcttcgagacacacgcagccgagcaagccgccctgaacatcgccagatcctggctgttcctgcggagccaggagtacaagaaataccagacaaacaagacaaccggcaacaccgataagagagccttcgtcgagacctggcagtccttttaccggaagaagcttaaggaggtgtggaaacctgccgtgcggtctggcggatctggcggaggctccacaagcagccagagccccctgaccttcggcgacgtggccgtggagttcagcggcgaggagtgggcctggctggacagcgcccagaggagcctgcacaggagcgtgatgctggagaactacaggaacctggccagcctgggcctgtgcctgagcaagcccgagatgatcagcagcctggagcagaggaaggagccctgggccgtgaagaggaagctgaccggcggcgagtgccccgacagccagaccctgaccagccccaagaaaaagagaaaagtctaagctgccttctgcggggcttgccttctggccatgcccttcttctctcccttgcacctgtacctcttggtctttgaataaagcctgagtaggaaggctagcaaaaaaaaaaaaaaaaaaaaaaaaaaaaaaaaaaaaaaaaaaaaaaaaaaaaaaaaaaaaaaaaaaaaaaaaaaaaaaaa

SEQ ID NO: 5734 - RNA, 5797 nt, synthetic construct
  source 1..5797: mol_type = other RNA
aggaaataagagagaaaagaagagtaagaagaaatataagagccaccatggcccctaagaagaagcgtaaagtgagccggatggaacgcctcgtctacgaggtgcggcagaagtgcagaaacatcgaggacatctgcatctcctgcggatctctgaacgtgaccctggagcacccactgttcatcggcggcatgtgccagaactgtaaaaactgttttctggagtgtgcctatcaatacgacgatgacggctaccagagctactgcaccatctgttgcggcggaagagaggtgctgatgtgtggaaataacaactgctgccggtgcttctgcgtggaatgcgtggacctgctggtgggccccggcgccgcccaggccgctattaaggaagatccttggaactgctacatgtgcggccacaagggcacatacggcctgctgagacggagagaggactggcctagcagactgcagatgttcttcgccaataaccacgaccaggagttcgacccccctaaggtgtaccctcccgtccccgccgagaagagaaagcccatccgggtcctgagcctgttcgatggcatcgccaccggtctgctggtgctgaaggacctgggcatccaggtggataggtacattgcctccgaggtgtgcgaggactccatcaccgtgggaatggtgcgtcatcagggcaagatcatgtacgtgggcgacgtgcggagcgtgacacagaagcatatccaggagtggggccctttcgacctggtgatcggcggcagcccttgcaatgacctgagcatcgtgaacccagcccggaagggcctgtacgagggaaccggcagactgttcttcgagttttacagactgctgcacgacgcccggcctaaggaaggcgacgaccggcccttcttttggctgttcgagaatgtggtggccatgggagtcagcgacaagcgggatattagccggttcctggagagcaaccccgtgatgatcgatgccaaggaagtgagcgccgcccaccgggccagatacttctggggcaatctgcctggcatgaacagacccctggccagcaccgtgaacgacaagctggagctgcaggagtgcctggagcacggccggatcgccaagttcagcaaggtgagaaccatcaccacccgaagcaacagcatcaaacaaggcaaggaccagcactttcctgtgttcatgaacgagaaggaggacatcctgtggtgtaccgagatggagagagtgttcgggttcccagtccactacacagatgtcagcaacatgtctagactggccagacagagactgctgggaagaagctggtccgtccctgtgatcagacacctgttcgcccctctgaaggagtacttcgcctgcgtgagcagcggcaacagcaacgccaacagccggggccccagcttctctagcggcctggtgccactgtccctgagagggagccacatgggccccatggagatctacaaaaccgtgagcgcctggaagcggcagcctgtgcgcgtgctgagcctgtttcggaatatcgataaagtcctgaaaagcctgggattcctggagagcggctctggctccggcggtggcaccctgaagtacgtggaggatgtgacaaacgtggtcagacgggatgtggagaagtggggccccttcgatctggtgtacggcagcacccaacccctgggcagctcttgtgaccggtgccctggctggtacatgtttcagttccaccggatcctgcagtacgccctgccgagacaggagtcccagcggccattcttttggattttcatggacaacttgctgctgaccgaggatgaccaggaaactaccactcggttcctgcagaccgaagccgtgaccctgcaggacgtgagaggccgggactaccagaacgccatgcgggtgtggtccaacatccctggactgaaaagcaagcacgcacctctgacccctaaagaagaggagtacctgcaggcccaggtgcggagcagaagcaagctggacgcccctaaggtggatctgctggtgaagaattgcctcctgcccctgagagagtacttcaagtatttcagccagaatagtctgcccctgggcggcccaagcagcggcgcccctcctcccagcggcggcagcccagccggctccccaacctctaccgaggagggcacctctgagtccgccacccccgagagcggccctggcacctccaccgagcccagcgagggcagcgcacccggcagccctgccggcagccccacctccacagaggagggaaccagcaccgagcccagcgaaggcagcgccccaggcaccagcaccgagcctagtgagggcggctctggcggcggcagcgcccaggagattaaacggatcaacaagatcagaagaagacttgtgaaagacagcaacaccaagaaggccggcaagacaggccccatgaaaaccctgctggttagagtgatgacacccgatctgagagagcggctggaaaacctgagaaagaagcctgaaaatatcccccagcccatcagcaatacatctagagccaacctgaataagctgctgaccgattacaccgaaatgaagaaggcgatcctgcatgtgtactgggaagagttccagaaggaccctgtgggcctgatgagccgggtggcccagcctgccagcaagaagatcgatcagaacaagctgaaacctgagatggacgagaagggcaacctgaccaccgccggctttgcctgctctcagtgtggccagcccctgttcgtgtacaagctggagcaggtgtctgagaagggcaaggcttacaccaactacttcggacggtgcaatgtggccgagcacgaaaagctgatcctgctggcccagctgaagcccgagaaggatagcgacgaagccgtgacatatagcctgggaaagtttgggcagagggccctggatttctacagcattcatgtgaccaaggagtccacccaccccgtgaagcccctggcccagatcgccggaaacagatacgcctccggacctgtgggaaaggccctgagcgacgcatgtatgggcacaatcgcctccttcctgtctaagtaccaggacatcatcatcgaacaccagaaggtggtgaagggcaaccagaagagactggagagcctgcgggagctggccggcaaggaaaacctggaataccctagcgtgaccctgccacctcagcctcacaccaaggagggcgttgatgcctacaacgaagtgatcgcccgggtgcgaatgtgggtgaacctgaacctgtggcagaagctgaagctaagcagagatgatgccaagcctctgctgagactgaagggattcccttcctttcctctggtcgagagacaggccaacgaagtggactggtgggacatggtgtgtaacgtgaagaagctgatcaacgagaaaaaggaggatggcaaggtgttttggcagaatctggctggctacaagagacaggaagccctgagaccatacctgagcagcgaggaagatcggaagaagggaaagaaattcgctcggtaccagctgggcgacctgctgctgcacctggaaaagaagcacggcgaggactggggaaaggtgtacgacgaggcctgggagcggattgacaagaaagtggaaggcctgagcaagcacatcaagctggaagaggaacggagaagcgaggacgcccagagcaaggccgccctgaccgactggctgcgggctaaggccagcttcgtgatcgagggcctgaaggaggccgacaaggacgagttctgcagatgcgagctgaagctgcagaagtggtacggggacctgcggggaaagcccttcgccatcgaagccgagaacagcatcctggacatcagcggcttcagcaagcagtacaactgtgccttcatctggcagaaggacggcgtgaagaagctgaacctgtacctgatcatcaactacttcaagggcggcaagctgcggttcaagaagatcaaacctgaagccttcgaagccaacagattctacaccgtgatcaacaaaaagagcggcgagatcgtgcccatggaggtgaacttcaacttcgacgaccccaacctgatcatcctgcctctggcctttggcaagagacagggcagagaattcatctggaacgacctgctgtccctggaaaccggcagcctgaagctggccaacggaagagtgatcgagaagacactgtacaacagaagaacccggcaggatgagcctgccctgttcgtggccctgaccttcgagcggcgggaggtcctggactcctccaatatcaaaccaatgaacctgatcggcgtggcaagaggcgaaaacatccccgccgtgatcgccctgaccgaccccgagggctgcccactgagccggtttaaggatagcctgggaaacccaacccacatcctgagaatcggcgagagctataaggagaagcagcggaccatccaggccaagaaggaggtggagcagcggagagccggcggctacagccggaagtacgccagcaaagccaagaatctggcagacgatatggtgagaaacaccgctagagatctgctgtactacgccgtgacccaggatgccatgctgatcttcgccaacctgagccggggcttcggccggcagggcaagcggaccttcatggccgagagacagtacacacggatggaggactggctgaccgccaagctggcctacgagggcctgagcaagacctacctgtccaagacactggcccagtacacctccaagacatgcagcaactgtgggtttaccatcaccagcgccgactacgacagggtgctggagaagctgaagaagacagcaacaggctggatgaccacaattaacggcaaggagctgaaggtggagggccagattacctactacaacagatacaagagacagaacgtagtcaaggacctgtccgtcgagctggatagactgagcgaagaatctgtgaacaacgacatctcctcctggacaaagggcagaagcggagaagctctgagcctcctgaagaaaagattctcccatagacccgtgcaggagaagttcgtgtgcctgaactgcggcttcgagacacacgcagccgagcaagccgccctgaacatcgccagatcctggctgttcctgcggagccaggagtacaagaaataccagacaaacaagacaaccggcaacaccgataagagagccttcgtcgagacctggcagtccttttaccggaagaagcttaaggaggtgtggaaacctgccgtgcggtctggcggatctggcggaggctccacaagcagccagagccccctgaccttcggcgacgtggccgtggagttcagcggcgaggagtgggcctggctggacagcgcccagaggagcctgcacaggagcgtgatgctggagaactacaggaacctggccagcctgggcctgtgcctgagcaagcccgagatgatcagcagcctggagcagaggaaggagccctgggccgtgaagaggaagagcaccggcggcgagtgcgccgacagccagaccctgaccagccccaagaaaaagagaaaagtctaagctgccttctgcggggcttgccttctggccatgcccttcttctctcccttgcacctgtacctcttggtctttgaataaagcctgagtaggaaggctagcaaaaaaaaaaaaaaaaaaaaaaaaaaaaaaaaaaaaaaaaaaaaaaaaaaaaaaaaaaaaaaaaaaaaaaaaaaaaaaaa

SEQ ID NO: 5735 - RNA, 5797 nt, synthetic construct
  source 1..5797: mol_type = other RNA
aggaaataagagagaaaagaagagtaagaagaaatataagagccaccatggcccctaagaagaagcgtaaagtgagccggatggaacgcctcgtctacgaggtgcggcagaagtgcagaaacatcgaggacatctgcatctcctgcggatctctgaacgtgaccctggagcacccactgttcatcggcggcatgtgccagaactgtaaaaactgttttctggagtgtgcctatcaatacgacgatgacggctaccagagctactgcaccatctgttgcggcggaagagaggtgctgatgtgtggaaataacaactgctgccggtgcttctgcgtggaatgcgtggacctgctggtgggccccggcgccgcccaggccgctattaaggaagatccttggaactgctacatgtgcggccacaagggcacatacggcctgctgagacggagagaggactggcctagcagactgcagatgttcttcgccaataaccacgaccaggagttcgacccccctaaggtgtaccctcccgtccccgccgagaagagaaagcccatccgggtcctgagcctgttcgatggcatcgccaccggtctgctggtgctgaaggacctgggcatccaggtggataggtacattgcctccgaggtgtgcgaggactccatcaccgtgggaatggtgcgtcatcagggcaagatcatgtacgtgggcgacgtgcggagcgtgacacagaagcatatccaggagtggggccctttcgacctggtgatcggcggcagcccttgcaatgacctgagcatcgtgaacccagcccggaagggcctgtacgagggaaccggcagactgttcttcgagttttacagactgctgcacgacgcccggcctaaggaaggcgacgaccggcccttcttttggctgttcgagaatgtggtggccatgggagtcagcgacaagcgggatattagccggttcctggagagcaaccccgtgatgatcgatgccaaggaagtgagcgccgcccaccgggccagatacttctggggcaatctgcctggcatgaacagacccctggccagcaccgtgaacgacaagctggagctgcaggagtgcctggagcacggccggatcgccaagttcagcaaggtgagaaccatcaccacccgaagcaacagcatcaaacaaggcaaggaccagcactttcctgtgttcatgaacgagaaggaggacatcctgtggtgtaccgagatggagagagtgttcgggttcccagtccactacacagatgtcagcaacatgtctagactggccagacagagactgctgggaagaagctggtccgtccctgtgatcagacacctgttcgcccctctgaaggagtacttcgcctgcgtgagcagcggcaacagcaacgccaacagccggggccccagcttctctagcggcctggtgccactgtccctgagagggagccacatgggccccatggagatctacaaaaccgtgagcgcctggaagcggcagcctgtgcgcgtgctgagcctgtttcggaatatcgataaagtcctgaaaagcctgggattcctggagagcggctctggctccggcggtggcaccctgaagtacgtggaggatgtgacaaacgtggtcagacgggatgtggagaagtggggccccttcgatctggtgtacggcagcacccaacccctgggcagctcttgtgaccggtgccctggctggtacatgtttcagttccaccggatcctgcagtacgccctgccgagacaggagtcccagcggccattcttttggattttcatggacaacttgctgctgaccgaggatgaccaggaaactaccactcggttcctgcagaccgaagccgtgaccctgcaggacgtgagaggccgggactaccagaacgccatgcgggtgtggtccaacatccctggactgaaaagcaagcacgcacctctgacccctaaagaagaggagtacctgcaggcccaggtgcggagcagaagcaagctggacgcccctaaggtggatctgctggtgaagaattgcctcctgcccctgagagagtacttcaagtatttcagccagaatagtctgcccctgggcggcccaagcagcggcgcccctcctcccagcggcggcagcccagccggctccccaacctctaccgaggagggcacctctgagtccgccacccccgagagcggccctggcacctccaccgagcccagcgagggcagcgcacccggcagccctgccggcagccccacctccacagaggagggaaccagcaccgagcccagcgaaggcagcgccccaggcaccagcaccgagcctagtgagggcggctctggcggcggcagcgcccaggagattaaacggatcaacaagatcagaagaagacttgtgaaagacagcaacaccaagaaggccggcaagacaggccccatgaaaaccctgctggttagagtgatgacacccgatctgagagagcggctggaaaacctgagaaagaagcctgaaaatatcccccagcccatcagcaatacatctagagccaacctgaataagctgctgaccgattacaccgaaatgaagaaggcgatcctgcatgtgtactgggaagagttccagaaggaccctgtgggcctgatgagccgggtggcccagcctgccagcaagaagatcgatcagaacaagctgaaacctgagatggacgagaagggcaacctgaccaccgccggctttgcctgctctcagtgtggccagcccctgttcgtgtacaagctggagcaggtgtctgagaagggcaaggcttacaccaactacttcggacggtgcaatgtggccgagcacgaaaagctgatcctgctggcccagctgaagcccgagaaggatagcgacgaagccgtgacatatagcctgggaaagtttgggcagagggccctggatttctacagcattcatgtgaccaaggagtccacccaccccgtgaagcccctggcccagatcgccggaaacagatacgcctccggacctgtgggaaaggccctgagcgacgcatgtatgggcacaatcgcctccttcctgtctaagtaccaggacatcatcatcgaacaccagaaggtggtgaagggcaaccagaagagactggagagcctgcgggagctggccggcaaggaaaacctggaataccctagcgtgaccctgccacctcagcctcacaccaaggagggcgttgatgcctacaacgaagtgatcgcccgggtgcgaatgtgggtgaacctgaacctgtggcagaagctgaagctaagcagagatgatgccaagcctctgctgagactgaagggattcccttcctttcctctggtcgagagacaggccaacgaagtggactggtgggacatggtgtgtaacgtgaagaagctgatcaacgagaaaaaggaggatggcaaggtgttttggcagaatctggctggctacaagagacaggaagccctgagaccatacctgagcagcgaggaagatcggaagaagggaaagaaattcgctcggtaccagctgggcgacctgctgctgcacctggaaaagaagcacggcgaggactggggaaaggtgtacgacgaggcctgggagcggattgacaagaaagtggaaggcctgagcaagcacatcaagctggaagaggaacggagaagcgaggacgcccagagcaaggccgccctgaccgactggctgcgggctaaggccagcttcgtgatcgagggcctgaaggaggccgacaaggacgagttctgcagatgcgagctgaagctgcagaagtggtacggggacctgcggggaaagcccttcgccatcgaagccgagaacagcatcctggacatcagcggcttcagcaagcagtacaactgtgccttcatctggcagaaggacggcgtgaagaagctgaacctgtacctgatcatcaactacttcaagggcggcaagctgcggttcaagaagatcaaacctgaagccttcgaagccaacagattctacaccgtgatcaacaaaaagagcggcgagatcgtgcccatggaggtgaacttcaacttcgacgaccccaacctgatcatcctgcctctggcctttggcaagagacagggcagagaattcatctggaacgacctgctgtccctggaaaccggcagcctgaagctggccaacggaagagtgatcgagaagacactgtacaacagaagaacccggcaggatgagcctgccctgttcgtggccctgaccttcgagcggcgggaggtcctggactcctccaatatcaaaccaatgaacctgatcggcgtggcaagaggcgaaaacatccccgccgtgatcgccctgaccgaccccgagggctgcccactgagccggtttaaggatagcctgggaaacccaacccacatcctgagaatcggcgagagctataaggagaagcagcggaccatccaggccaagaaggaggtggagcagcggagagccggcggctacagccggaagtacgccagcaaagccaagaatctggcagacgatatggtgagaaacaccgctagagatctgctgtactacgccgtgacccaggatgccatgctgatcttcgccaacctgagccggggcttcggccggcagggcaagcggaccttcatggccgagagacagtacacacggatggaggactggctgaccgccaagctggcctacgagggcctgagcaagacctacctgtccaagacactggcccagtacacctccaagacatgcagcaactgtgggtttaccatcaccagcgccgactacgacagggtgctggagaagctgaagaagacagcaacaggctggatgaccacaattaacggcaaggagctgaaggtggagggccagattacctactacaacagatacaagagacagaacgtagtcaaggacctgtccgtcgagctggatagactgagcgaagaatctgtgaacaacgacatctcctcctggacaaagggcagaagcggagaagctctgagcctcctgaagaaaagattctcccatagacccgtgcaggagaagttcgtgtgcctgaactgcggcttcgagacacacgcagccgagcaagccgccctgaacatcgccagatcctggctgttcctgcggagccaggagtacaagaaataccagacaaacaagacaaccggcaacaccgataagagagccttcgtcgagacctggcagtccttttaccggaagaagcttaaggaggtgtggaaacctgccgtgcggtctggcggatctggcggaggctccacaagcgacagggtgaagttcaccttcagcgacgtggccgtgtacttcagcgaggaggagtggcagctgctggaggagcagcagaaggagctgtaccagaacgtgatgaaggagaactacaccaccctgatgagcctgggctacaccaccgtgaagcccgacgtgatcagcaagatcgagcagggcaagcagcccctggtgagcagccccagcggcagcaagggcaggagggccatcggcaggcccagcaccagccccaagaaaaagagaaaagtctaagctgccttctgcggggcttgccttctggccatgcccttcttctctcccttgcacctgtacctcttggtctttgaataaagcctgagtaggaaggctagcaaaaaaaaaaaaaaaaaaaaaaaaaaaaaaaaaaaaaaaaaaaaaaaaaaaaaaaaaaaaaaaaaaaaaaaaaaaaaaaa

SEQ ID NO: 5736 - RNA, 5797 nt, synthetic construct
  source 1..5797: mol_type = other RNA
aggaaataagagagaaaagaagagtaagaagaaatataagagccaccatggcccctaagaagaagcgtaaagtgagccggatggaacgcctcgtctacgaggtgcggcagaagtgcagaaacatcgaggacatctgcatctcctgcggatctctgaacgtgaccctggagcacccactgttcatcggcggcatgtgccagaactgtaaaaactgttttctggagtgtgcctatcaatacgacgatgacggctaccagagctactgcaccatctgttgcggcggaagagaggtgctgatgtgtggaaataacaactgctgccggtgcttctgcgtggaatgcgtggacctgctggtgggccccggcgccgcccaggccgctattaaggaagatccttggaactgctacatgtgcggccacaagggcacatacggcctgctgagacggagagaggactggcctagcagactgcagatgttcttcgccaataaccacgaccaggagttcgacccccctaaggtgtaccctcccgtccccgccgagaagagaaagcccatccgggtcctgagcctgttcgatggcatcgccaccggtctgctggtgctgaaggacctgggcatccaggtggataggtacattgcctccgaggtgtgcgaggactccatcaccgtgggaatggtgcgtcatcagggcaagatcatgtacgtgggcgacgtgcggagcgtgacacagaagcatatccaggagtggggccctttcgacctggtgatcggcggcagcccttgcaatgacctgagcatcgtgaacccagcccggaagggcctgtacgagggaaccggcagactgttcttcgagttttacagactgctgcacgacgcccggcctaaggaaggcgacgaccggcccttcttttggctgttcgagaatgtggtggccatgggagtcagcgacaagcgggatattagccggttcctggagagcaaccccgtgatgatcgatgccaaggaagtgagcgccgcccaccgggccagatacttctggggcaatctgcctggcatgaacagacccctggccagcaccgtgaacgacaagctggagctgcaggagtgcctggagcacggccggatcgccaagttcagcaaggtgagaaccatcaccacccgaagcaacagcatcaaacaaggcaaggaccagcactttcctgtgttcatgaacgagaaggaggacatcctgtggtgtaccgagatggagagagtgttcgggttcccagtccactacacagatgtcagcaacatgtctagactggccagacagagactgctgggaagaagctggtccgtccctgtgatcagacacctgttcgcccctctgaaggagtacttcgcctgcgtgagcagcggcaacagcaacgccaacagccggggccccagcttctctagcggcctggtgccactgtccctgagagggagccacatgggccccatggagatctacaaaaccgtgagcgcctggaagcggcagcctgtgcgcgtgctgagcctgtttcggaatatcgataaagtcctgaaaagcctgggattcctggagagcggctctggctccggcggtggcaccctgaagtacgtggaggatgtgacaaacgtggtcagacgggatgtggagaagtggggccccttcgatctggtgtacggcagcacccaacccctgggcagctcttgtgaccggtgccctggctggtacatgtttcagttccaccggatcctgcagtacgccctgccgagacaggagtcccagcggccattcttttggattttcatggacaacttgctgctgaccgaggatgaccaggaaactaccactcggttcctgcagaccgaagccgtgaccctgcaggacgtgagaggccgggactaccagaacgccatgcgggtgtggtccaacatccctggactgaaaagcaagcacgcacctctgacccctaaagaagaggagtacctgcaggcccaggtgcggagcagaagcaagctggacgcccctaaggtggatctgctggtgaagaattgcctcctgcccctgagagagtacttcaagtatttcagccagaatagtctgcccctgggcggcccaagcagcggcgcccctcctcccagcggcggcagcccagccggctccccaacctctaccgaggagggcacctctgagtccgccacccccgagagcggccctggcacctccaccgagcccagcgagggcagcgcacccggcagccctgccggcagccccacctccacagaggagggaaccagcaccgagcccagcgaaggcagcgccccaggcaccagcaccgagcctagtgagggcggctctggcggcggcagcgcccaggagattaaacggatcaacaagatcagaagaagacttgtgaaagacagcaacaccaagaaggccggcaagacaggccccatgaaaaccctgctggttagagtgatgacacccgatctgagagagcggctggaaaacctgagaaagaagcctgaaaatatcccccagcccatcagcaatacatctagagccaacctgaataagctgctgaccgattacaccgaaatgaagaaggcgatcctgcatgtgtactgggaagagttccagaaggaccctgtgggcctgatgagccgggtggcccagcctgccagcaagaagatcgatcagaacaagctgaaacctgagatggacgagaagggcaacctgaccaccgccggctttgcctgctctcagtgtggccagcccctgttcgtgtacaagctggagcaggtgtctgagaagggcaaggcttacaccaactacttcggacggtgcaatgtggccgagcacgaaaagctgatcctgctggcccagctgaagcccgagaaggatagcgacgaagccgtgacatatagcctgggaaagtttgggcagagggccctggatttctacagcattcatgtgaccaaggagtccacccaccccgtgaagcccctggcccagatcgccggaaacagatacgcctccggacctgtgggaaaggccctgagcgacgcatgtatgggcacaatcgcctccttcctgtctaagtaccaggacatcatcatcgaacaccagaaggtggtgaagggcaaccagaagagactggagagcctgcgggagctggccggcaaggaaaacctggaataccctagcgtgaccctgccacctcagcctcacaccaaggagggcgttgatgcctacaacgaagtgatcgcccgggtgcgaatgtgggtgaacctgaacctgtggcagaagctgaagctaagcagagatgatgccaagcctctgctgagactgaagggattcccttcctttcctctggtcgagagacaggccaacgaagtggactggtgggacatggtgtgtaacgtgaagaagctgatcaacgagaaaaaggaggatggcaaggtgttttggcagaatctggctggctacaagagacaggaagccctgagaccatacctgagcagcgaggaagatcggaagaagggaaagaaattcgctcggtaccagctgggcgacctgctgctgcacctggaaaagaagcacggcgaggactggggaaaggtgtacgacgaggcctgggagcggattgacaagaaagtggaaggcctgagcaagcacatcaagctggaagaggaacggagaagcgaggacgcccagagcaaggccgccctgaccgactggctgcgggctaaggccagcttcgtgatcgagggcctgaaggaggccgacaaggacgagttctgcagatgcgagctgaagctgcagaagtggtacggggacctgcggggaaagcccttcgccatcgaagccgagaacagcatcctggacatcagcggcttcagcaagcagtacaactgtgccttcatctggcagaaggacggcgtgaagaagctgaacctgtacctgatcatcaactacttcaagggcggcaagctgcggttcaagaagatcaaacctgaagccttcgaagccaacagattctacaccgtgatcaacaaaaagagcggcgagatcgtgcccatggaggtgaacttcaacttcgacgaccccaacctgatcatcctgcctctggcctttggcaagagacagggcagagaattcatctggaacgacctgctgtccctggaaaccggcagcctgaagctggccaacggaagagtgatcgagaagacactgtacaacagaagaacccggcaggatgagcctgccctgttcgtggccctgaccttcgagcggcgggaggtcctggactcctccaatatcaaaccaatgaacctgatcggcgtggcaagaggcgaaaacatccccgccgtgatcgccctgaccgaccccgagggctgcccactgagccggtttaaggatagcctgggaaacccaacccacatcctgagaatcggcgagagctataaggagaagcagcggaccatccaggccaagaaggaggtggagcagcggagagccggcggctacagccggaagtacgccagcaaagccaagaatctggcagacgatatggtgagaaacaccgctagagatctgctgtactacgccgtgacccaggatgccatgctgatcttcgccaacctgagccggggcttcggccggcagggcaagcggaccttcatggccgagagacagtacacacggatggaggactggctgaccgccaagctggcctacgagggcctgagcaagacctacctgtccaagacactggcccagtacacctccaagacatgcagcaactgtgggtttaccatcaccagcgccgactacgacagggtgctggagaagctgaagaagacagcaacaggctggatgaccacaattaacggcaaggagctgaaggtggagggccagattacctactacaacagatacaagagacagaacgtagtcaaggacctgtccgtcgagctggatagactgagcgaagaatctgtgaacaacgacatctcctcctggacaaagggcagaagcggagaagctctgagcctcctgaagaaaagattctcccatagacccgtgcaggagaagttcgtgtgcctgaactgcggcttcgagacacacgcagccgagcaagccgccctgaacatcgccagatcctggctgttcctgcggagccaggagtacaagaaataccagacaaacaagacaaccggcaacaccgataagagagccttcgtcgagacctggcagtccttttaccggaagaagcttaaggaggtgtggaaacctgccgtgcggtctggcggatctggcggaggctccacaagcgccctgaggagcgtgatgttcagcgacatcagcatcgacttcagccccgaggagtgggactgcctggacctggagcagaaggacctgtacagggacgtgatgctggagaactacagcaacctggtgagcctgggctgcttcatcagcaagcccgacgtgatcagcctgctggagcagggcaaggagccctggaaggtggtgaggaagaggaggggccagtgccccgacctgcagaccaagtacaccagccccaagaaaaagagaaaagtctaagctgccttctgcggggcttgccttctggccatgcccttcttctctcccttgcacctgtacctcttggtctttgaataaagcctgagtaggaaggctagcaaaaaaaaaaaaaaaaaaaaaaaaaaaaaaaaaaaaaaaaaaaaaaaaaaaaaaaaaaaaaaaaaaaaaaaaaaaaaaaa

SEQ ID NO: 5737 - RNA, 5797 nt, synthetic construct
  source 1..5797: mol_type = other RNA
aggaaataagagagaaaagaagagtaagaagaaatataagagccaccatggcccctaagaagaagcgtaaagtgagccggatggaacgcctcgtctacgaggtgcggcagaagtgcagaaacatcgaggacatctgcatctcctgcggatctctgaacgtgaccctggagcacccactgttcatcggcggcatgtgccagaactgtaaaaactgttttctggagtgtgcctatcaatacgacgatgacggctaccagagctactgcaccatctgttgcggcggaagagaggtgctgatgtgtggaaataacaactgctgccggtgcttctgcgtggaatgcgtggacctgctggtgggccccggcgccgcccaggccgctattaaggaagatccttggaactgctacatgtgcggccacaagggcacatacggcctgctgagacggagagaggactggcctagcagactgcagatgttcttcgccaataaccacgaccaggagttcgacccccctaaggtgtaccctcccgtccccgccgagaagagaaagcccatccgggtcctgagcctgttcgatggcatcgccaccggtctgctggtgctgaaggacctgggcatccaggtggataggtacattgcctccgaggtgtgcgaggactccatcaccgtgggaatggtgcgtcatcagggcaagatcatgtacgtgggcgacgtgcggagcgtgacacagaagcatatccaggagtggggccctttcgacctggtgatcggcggcagcccttgcaatgacctgagcatcgtgaacccagcccggaagggcctgtacgagggaaccggcagactgttcttcgagttttacagactgctgcacgacgcccggcctaaggaaggcgacgaccggcccttcttttggctgttcgagaatgtggtggccatgggagtcagcgacaagcgggatattagccggttcctggagagcaaccccgtgatgatcgatgccaaggaagtgagcgccgcccaccgggccagatacttctggggcaatctgcctggcatgaacagacccctggccagcaccgtgaacgacaagctggagctgcaggagtgcctggagcacggccggatcgccaagttcagcaaggtgagaaccatcaccacccgaagcaacagcatcaaacaaggcaaggaccagcactttcctgtgttcatgaacgagaaggaggacatcctgtggtgtaccgagatggagagagtgttcgggttcccagtccactacacagatgtcagcaacatgtctagactggccagacagagactgctgggaagaagctggtccgtccctgtgatcagacacctgttcgcccctctgaaggagtacttcgcctgcgtgagcagcggcaacagcaacgccaacagccggggccccagcttctctagcggcctggtgccactgtccctgagagggagccacatgggccccatggagatctacaaaaccgtgagcgcctggaagcggcagcctgtgcgcgtgctgagcctgtttcggaatatcgataaagtcctgaaaagcctgggattcctggagagcggctctggctccggcggtggcaccctgaagtacgtggaggatgtgacaaacgtggtcagacgggatgtggagaagtggggccccttcgatctggtgtacggcagcacccaacccctgggcagctcttgtgaccggtgccctggctggtacatgtttcagttccaccggatcctgcagtacgccctgccgagacaggagtcccagcggccattcttttggattttcatggacaacttgctgctgaccgaggatgaccaggaaactaccactcggttcctgcagaccgaagccgtgaccctgcaggacgtgagaggccgggactaccagaacgccatgcgggtgtggtccaacatccctggactgaaaagcaagcacgcacctctgacccctaaagaagaggagtacctgcaggcccaggtgcggagcagaagcaagctggacgcccctaaggtggatctgctggtgaagaattgcctcctgcccctgagagagtacttcaagtatttcagccagaatagtctgcccctgggcggcccaagcagcggcgcccctcctcccagcggcggcagcccagccggctccccaacctctaccgaggagggcacctctgagtccgccacccccgagagcggccctggcacctccaccgagcccagcgagggcagcgcacccggcagccctgccggcagccccacctccacagaggagggaaccagcaccgagcccagcgaaggcagcgccccaggcaccagcaccgagcctagtgagggcggctctggcggcggcagcgcccaggagattaaacggatcaacaagatcagaagaagacttgtgaaagacagcaacaccaagaaggccggcaagacaggccccatgaaaaccctgctggttagagtgatgacacccgatctgagagagcggctggaaaacctgagaaagaagcctgaaaatatcccccagcccatcagcaatacatctagagccaacctgaataagctgctgaccgattacaccgaaatgaagaaggcgatcctgcatgtgtactgggaagagttccagaaggaccctgtgggcctgatgagccgggtggcccagcctgccagcaagaagatcgatcagaacaagctgaaacctgagatggacgagaagggcaacctgaccaccgccggctttgcctgctctcagtgtggccagcccctgttcgtgtacaagctggagcaggtgtctgagaagggcaaggcttacaccaactacttcggacggtgcaatgtggccgagcacgaaaagctgatcctgctggcccagctgaagcccgagaaggatagcgacgaagccgtgacatatagcctgggaaagtttgggcagagggccctggatttctacagcattcatgtgaccaaggagtccacccaccccgtgaagcccctggcccagatcgccggaaacagatacgcctccggacctgtgggaaaggccctgagcgacgcatgtatgggcacaatcgcctccttcctgtctaagtaccaggacatcatcatcgaacaccagaaggtggtgaagggcaaccagaagagactggagagcctgcgggagctggccggcaaggaaaacctggaataccctagcgtgaccctgccacctcagcctcacaccaaggagggcgttgatgcctacaacgaagtgatcgcccgggtgcgaatgtgggtgaacctgaacctgtggcagaagctgaagctaagcagagatgatgccaagcctctgctgagactgaagggattcccttcctttcctctggtcgagagacaggccaacgaagtggactggtgggacatggtgtgtaacgtgaagaagctgatcaacgagaaaaaggaggatggcaaggtgttttggcagaatctggctggctacaagagacaggaagccctgagaccatacctgagcagcgaggaagatcggaagaagggaaagaaattcgctcggtaccagctgggcgacctgctgctgcacctggaaaagaagcacggcgaggactggggaaaggtgtacgacgaggcctgggagcggattgacaagaaagtggaaggcctgagcaagcacatcaagctggaagaggaacggagaagcgaggacgcccagagcaaggccgccctgaccgactggctgcgggctaaggccagcttcgtgatcgagggcctgaaggaggccgacaaggacgagttctgcagatgcgagctgaagctgcagaagtggtacggggacctgcggggaaagcccttcgccatcgaagccgagaacagcatcctggacatcagcggcttcagcaagcagtacaactgtgccttcatctggcagaaggacggcgtgaagaagctgaacctgtacctgatcatcaactacttcaagggcggcaagctgcggttcaagaagatcaaacctgaagccttcgaagccaacagattctacaccgtgatcaacaaaaagagcggcgagatcgtgcccatggaggtgaacttcaacttcgacgaccccaacctgatcatcctgcctctggcctttggcaagagacagggcagagaattcatctggaacgacctgctgtccctggaaaccggcagcctgaagctggccaacggaagagtgatcgagaagacactgtacaacagaagaacccggcaggatgagcctgccctgttcgtggccctgaccttcgagcggcgggaggtcctggactcctccaatatcaaaccaatgaacctgatcggcgtggcaagaggcgaaaacatccccgccgtgatcgccctgaccgaccccgagggctgcccactgagccggtttaaggatagcctgggaaacccaacccacatcctgagaatcggcgagagctataaggagaagcagcggaccatccaggccaagaaggaggtggagcagcggagagccggcggctacagccggaagtacgccagcaaagccaagaatctggcagacgatatggtgagaaacaccgctagagatctgctgtactacgccgtgacccaggatgccatgctgatcttcgccaacctgagccggggcttcggccggcagggcaagcggaccttcatggccgagagacagtacacacggatggaggactggctgaccgccaagctggcctacgagggcctgagcaagacctacctgtccaagacactggcccagtacacctccaagacatgcagcaactgtgggtttaccatcaccagcgccgactacgacagggtgctggagaagctgaagaagacagcaacaggctggatgaccacaattaacggcaaggagctgaaggtggagggccagattacctactacaacagatacaagagacagaacgtagtcaaggacctgtccgtcgagctggatagactgagcgaagaatctgtgaacaacgacatctcctcctggacaaagggcagaagcggagaagctctgagcctcctgaagaaaagattctcccatagacccgtgcaggagaagttcgtgtgcctgaactgcggcttcgagacacacgcagccgagcaagccgccctgaacatcgccagatcctggctgttcctgcggagccaggagtacaagaaataccagacaaacaagacaaccggcaacaccgataagagagccttcgtcgagacctggcagtccttttaccggaagaagcttaaggaggtgtggaaacctgccgtgcggtctggcggatctggcggaggctccacaagcgccagggtggccgtgatgttcagcgacgtgagcatcgccttcagccaggaggagtgggagtacctggacctggcccagagggacctgtacaaggacgtgatgatggagaactacaggaacgtggccagcctggccggctgcttcatcagcaagcccgacgtgatcagcctgctggagcagggcaaggagccctggaaggtggtgaggaagaggaggaggaaccccgacctggagaccaaggacaccagccccaagaaaaagagaaaagtctaagctgccttctgcggggcttgccttctggccatgcccttcttctctcccttgcacctgtacctcttggtctttgaataaagcctgagtaggaaggctagcaaaaaaaaaaaaaaaaaaaaaaaaaaaaaaaaaaaaaaaaaaaaaaaaaaaaaaaaaaaaaaaaaaaaaaaaaaaaaaaa

SEQ ID NO: 5738 - RNA, 5797 nt, synthetic construct
  source 1..5797: mol_type = other RNA
aggaaataagagagaaaagaagagtaagaagaaatataagagccaccatggcccctaagaagaagcgtaaagtgagccggatggaacgcctcgtctacgaggtgcggcagaagtgcagaaacatcgaggacatctgcatctcctgcggatctctgaacgtgaccctggagcacccactgttcatcggcggcatgtgccagaactgtaaaaactgttttctggagtgtgcctatcaatacgacgatgacggctaccagagctactgcaccatctgttgcggcggaagagaggtgctgatgtgtggaaataacaactgctgccggtgcttctgcgtggaatgcgtggacctgctggtgggccccggcgccgcccaggccgctattaaggaagatccttggaactgctacatgtgcggccacaagggcacatacggcctgctgagacggagagaggactggcctagcagactgcagatgttcttcgccaataaccacgaccaggagttcgacccccctaaggtgtaccctcccgtccccgccgagaagagaaagcccatccgggtcctgagcctgttcgatggcatcgccaccggtctgctggtgctgaaggacctgggcatccaggtggataggtacattgcctccgaggtgtgcgaggactccatcaccgtgggaatggtgcgtcatcagggcaagatcatgtacgtgggcgacgtgcggagcgtgacacagaagcatatccaggagtggggccctttcgacctggtgatcggcggcagcccttgcaatgacctgagcatcgtgaacccagcccggaagggcctgtacgagggaaccggcagactgttcttcgagttttacagactgctgcacgacgcccggcctaaggaaggcgacgaccggcccttcttttggctgttcgagaatgtggtggccatgggagtcagcgacaagcgggatattagccggttcctggagagcaaccccgtgatgatcgatgccaaggaagtgagcgccgcccaccgggccagatacttctggggcaatctgcctggcatgaacagacccctggccagcaccgtgaacgacaagctggagctgcaggagtgcctggagcacggccggatcgccaagttcagcaaggtgagaaccatcaccacccgaagcaacagcatcaaacaaggcaaggaccagcactttcctgtgttcatgaacgagaaggaggacatcctgtggtgtaccgagatggagagagtgttcgggttcccagtccactacacagatgtcagcaacatgtctagactggccagacagagactgctgggaagaagctggtccgtccctgtgatcagacacctgttcgcccctctgaaggagtacttcgcctgcgtgagcagcggcaacagcaacgccaacagccggggccccagcttctctagcggcctggtgccactgtccctgagagggagccacatgggccccatggagatctacaaaaccgtgagcgcctggaagcggcagcctgtgcgcgtgctgagcctgtttcggaatatcgataaagtcctgaaaagcctgggattcctggagagcggctctggctccggcggtggcaccctgaagtacgtggaggatgtgacaaacgtggtcagacgggatgtggagaagtggggccccttcgatctggtgtacggcagcacccaacccctgggcagctcttgtgaccggtgccctggctggtacatgtttcagttccaccggatcctgcagtacgccctgccgagacaggagtcccagcggccattcttttggattttcatggacaacttgctgctgaccgaggatgaccaggaaactaccactcggttcctgcagaccgaagccgtgaccctgcaggacgtgagaggccgggactaccagaacgccatgcgggtgtggtccaacatccctggactgaaaagcaagcacgcacctctgacccctaaagaagaggagtacctgcaggcccaggtgcggagcagaagcaagctggacgcccctaaggtggatctgctggtgaagaattgcctcctgcccctgagagagtacttcaagtatttcagccagaatagtctgcccctgggcggcccaagcagcggcgcccctcctcccagcggcggcagcccagccggctccccaacctctaccgaggagggcacctctgagtccgccacccccgagagcggccctggcacctccaccgagcccagcgagggcagcgcacccggcagccctgccggcagccccacctccacagaggagggaaccagcaccgagcccagcgaaggcagcgccccaggcaccagcaccgagcctagtgagggcggctctggcggcggcagcgcccaggagattaaacggatcaacaagatcagaagaagacttgtgaaagacagcaacaccaagaaggccggcaagacaggccccatgaaaaccctgctggttagagtgatgacacccgatctgagagagcggctggaaaacctgagaaagaagcctgaaaatatcccccagcccatcagcaatacatctagagccaacctgaataagctgctgaccgattacaccgaaatgaagaaggcgatcctgcatgtgtactgggaagagttccagaaggaccctgtgggcctgatgagccgggtggcccagcctgccagcaagaagatcgatcagaacaagctgaaacctgagatggacgagaagggcaacctgaccaccgccggctttgcctgctctcagtgtggccagcccctgttcgtgtacaagctggagcaggtgtctgagaagggcaaggcttacaccaactacttcggacggtgcaatgtggccgagcacgaaaagctgatcctgctggcccagctgaagcccgagaaggatagcgacgaagccgtgacatatagcctgggaaagtttgggcagagggccctggatttctacagcattcatgtgaccaaggagtccacccaccccgtgaagcccctggcccagatcgccggaaacagatacgcctccggacctgtgggaaaggccctgagcgacgcatgtatgggcacaatcgcctccttcctgtctaagtaccaggacatcatcatcgaacaccagaaggtggtgaagggcaaccagaagagactggagagcctgcgggagctggccggcaaggaaaacctggaataccctagcgtgaccctgccacctcagcctcacaccaaggagggcgttgatgcctacaacgaagtgatcgcccgggtgcgaatgtgggtgaacctgaacctgtggcagaagctgaagctaagcagagatgatgccaagcctctgctgagactgaagggattcccttcctttcctctggtcgagagacaggccaacgaagtggactggtgggacatggtgtgtaacgtgaagaagctgatcaacgagaaaaaggaggatggcaaggtgttttggcagaatctggctggctacaagagacaggaagccctgagaccatacctgagcagcgaggaagatcggaagaagggaaagaaattcgctcggtaccagctgggcgacctgctgctgcacctggaaaagaagcacggcgaggactggggaaaggtgtacgacgaggcctgggagcggattgacaagaaagtggaaggcctgagcaagcacatcaagctggaagaggaacggagaagcgaggacgcccagagcaaggccgccctgaccgactggctgcgggctaaggccagcttcgtgatcgagggcctgaaggaggccgacaaggacgagttctgcagatgcgagctgaagctgcagaagtggtacggggacctgcggggaaagcccttcgccatcgaagccgagaacagcatcctggacatcagcggcttcagcaagcagtacaactgtgccttcatctggcagaaggacggcgtgaagaagctgaacctgtacctgatcatcaactacttcaagggcggcaagctgcggttcaagaagatcaaacctgaagccttcgaagccaacagattctacaccgtgatcaacaaaaagagcggcgagatcgtgcccatggaggtgaacttcaacttcgacgaccccaacctgatcatcctgcctctggcctttggcaagagacagggcagagaattcatctggaacgacctgctgtccctggaaaccggcagcctgaagctggccaacggaagagtgatcgagaagacactgtacaacagaagaacccggcaggatgagcctgccctgttcgtggccctgaccttcgagcggcgggaggtcctggactcctccaatatcaaaccaatgaacctgatcggcgtggcaagaggcgaaaacatccccgccgtgatcgccctgaccgaccccgagggctgcccactgagccggtttaaggatagcctgggaaacccaacccacatcctgagaatcggcgagagctataaggagaagcagcggaccatccaggccaagaaggaggtggagcagcggagagccggcggctacagccggaagtacgccagcaaagccaagaatctggcagacgatatggtgagaaacaccgctagagatctgctgtactacgccgtgacccaggatgccatgctgatcttcgccaacctgagccggggcttcggccggcagggcaagcggaccttcatggccgagagacagtacacacggatggaggactggctgaccgccaagctggcctacgagggcctgagcaagacctacctgtccaagacactggcccagtacacctccaagacatgcagcaactgtgggtttaccatcaccagcgccgactacgacagggtgctggagaagctgaagaagacagcaacaggctggatgaccacaattaacggcaaggagctgaaggtggagggccagattacctactacaacagatacaagagacagaacgtagtcaaggacctgtccgtcgagctggatagactgagcgaagaatctgtgaacaacgacatctcctcctggacaaagggcagaagcggagaagctctgagcctcctgaagaaaagattctcccatagacccgtgcaggagaagttcgtgtgcctgaactgcggcttcgagacacacgcagccgagcaagccgccctgaacatcgccagatcctggctgttcctgcggagccaggagtacaagaaataccagacaaacaagacaaccggcaacaccgataagagagccttcgtcgagacctggcagtccttttaccggaagaagcttaaggaggtgtggaaacctgccgtgcggtctggcggatctggcggaggctccacaagcccccagaagagcgtgaccttcgaggacgtggccgtgtacttcacccagaccgagtgggacggcctgagccccgcccagagggccctgtacagggacgtgatgctggagaactacggcaacgtggccagcctgggcttcagcctgctgaagcccgccgtgatcagccagctggagggcgccggcgagctgggcggccccagccccctggtggacggcaccgagaccggcccccagggcctgtggaccagccccaagaaaaagagaaaagtctaagctgccttctgcggggcttgccttctggccatgcccttcttctctcccttgcacctgtacctcttggtctttgaataaagcctgagtaggaaggctagcaaaaaaaaaaaaaaaaaaaaaaaaaaaaaaaaaaaaaaaaaaaaaaaaaaaaaaaaaaaaaaaaaaaaaaaaaaaaaaaa

SEQ ID NO: 5739 - RNA, 5797 nt, synthetic construct
  source 1..5797: mol_type = other RNA
aggaaataagagagaaaagaagagtaagaagaaatataagagccaccatggcccctaagaagaagcgtaaagtgagccggatggaacgcctcgtctacgaggtgcggcagaagtgcagaaacatcgaggacatctgcatctcctgcggatctctgaacgtgaccctggagcacccactgttcatcggcggcatgtgccagaactgtaaaaactgttttctggagtgtgcctatcaatacgacgatgacggctaccagagctactgcaccatctgttgcggcggaagagaggtgctgatgtgtggaaataacaactgctgccggtgcttctgcgtggaatgcgtggacctgctggtgggccccggcgccgcccaggccgctattaaggaagatccttggaactgctacatgtgcggccacaagggcacatacggcctgctgagacggagagaggactggcctagcagactgcagatgttcttcgccaataaccacgaccaggagttcgacccccctaaggtgtaccctcccgtccccgccgagaagagaaagcccatccgggtcctgagcctgttcgatggcatcgccaccggtctgctggtgctgaaggacctgggcatccaggtggataggtacattgcctccgaggtgtgcgaggactccatcaccgtgggaatggtgcgtcatcagggcaagatcatgtacgtgggcgacgtgcggagcgtgacacagaagcatatccaggagtggggccctttcgacctggtgatcggcggcagcccttgcaatgacctgagcatcgtgaacccagcccggaagggcctgtacgagggaaccggcagactgttcttcgagttttacagactgctgcacgacgcccggcctaaggaaggcgacgaccggcccttcttttggctgttcgagaatgtggtggccatgggagtcagcgacaagcgggatattagccggttcctggagagcaaccccgtgatgatcgatgccaaggaagtgagcgccgcccaccgggccagatacttctggggcaatctgcctggcatgaacagacccctggccagcaccgtgaacgacaagctggagctgcaggagtgcctggagcacggccggatcgccaagttcagcaaggtgagaaccatcaccacccgaagcaacagcatcaaacaaggcaaggaccagcactttcctgtgttcatgaacgagaaggaggacatcctgtggtgtaccgagatggagagagtgttcgggttcccagtccactacacagatgtcagcaacatgtctagactggccagacagagactgctgggaagaagctggtccgtccctgtgatcagacacctgttcgcccctctgaaggagtacttcgcctgcgtgagcagcggcaacagcaacgccaacagccggggccccagcttctctagcggcctggtgccactgtccctgagagggagccacatgggccccatggagatctacaaaaccgtgagcgcctggaagcggcagcctgtgcgcgtgctgagcctgtttcggaatatcgataaagtcctgaaaagcctgggattcctggagagcggctctggctccggcggtggcaccctgaagtacgtggaggatgtgacaaacgtggtcagacgggatgtggagaagtggggccccttcgatctggtgtacggcagcacccaacccctgggcagctcttgtgaccggtgccctggctggtacatgtttcagttccaccggatcctgcagtacgccctgccgagacaggagtcccagcggccattcttttggattttcatggacaacttgctgctgaccgaggatgaccaggaaactaccactcggttcctgcagaccgaagccgtgaccctgcaggacgtgagaggccgggactaccagaacgccatgcgggtgtggtccaacatccctggactgaaaagcaagcacgcacctctgacccctaaagaagaggagtacctgcaggcccaggtgcggagcagaagcaagctggacgcccctaaggtggatctgctggtgaagaattgcctcctgcccctgagagagtacttcaagtatttcagccagaatagtctgcccctgggcggcccaagcagcggcgcccctcctcccagcggcggcagcccagccggctccccaacctctaccgaggagggcacctctgagtccgccacccccgagagcggccctggcacctccaccgagcccagcgagggcagcgcacccggcagccctgccggcagccccacctccacagaggagggaaccagcaccgagcccagcgaaggcagcgccccaggcaccagcaccgagcctagtgagggcggctctggcggcggcagcgcccaggagattaaacggatcaacaagatcagaagaagacttgtgaaagacagcaacaccaagaaggccggcaagacaggccccatgaaaaccctgctggttagagtgatgacacccgatctgagagagcggctggaaaacctgagaaagaagcctgaaaatatcccccagcccatcagcaatacatctagagccaacctgaataagctgctgaccgattacaccgaaatgaagaaggcgatcctgcatgtgtactgggaagagttccagaaggaccctgtgggcctgatgagccgggtggcccagcctgccagcaagaagatcgatcagaacaagctgaaacctgagatggacgagaagggcaacctgaccaccgccggctttgcctgctctcagtgtggccagcccctgttcgtgtacaagctggagcaggtgtctgagaagggcaaggcttacaccaactacttcggacggtgcaatgtggccgagcacgaaaagctgatcctgctggcccagctgaagcccgagaaggatagcgacgaagccgtgacatatagcctgggaaagtttgggcagagggccctggatttctacagcattcatgtgaccaaggagtccacccaccccgtgaagcccctggcccagatcgccggaaacagatacgcctccggacctgtgggaaaggccctgagcgacgcatgtatgggcacaatcgcctccttcctgtctaagtaccaggacatcatcatcgaacaccagaaggtggtgaagggcaaccagaagagactggagagcctgcgggagctggccggcaaggaaaacctggaataccctagcgtgaccctgccacctcagcctcacaccaaggagggcgttgatgcctacaacgaagtgatcgcccgggtgcgaatgtgggtgaacctgaacctgtggcagaagctgaagctaagcagagatgatgccaagcctctgctgagactgaagggattcccttcctttcctctggtcgagagacaggccaacgaagtggactggtgggacatggtgtgtaacgtgaagaagctgatcaacgagaaaaaggaggatggcaaggtgttttggcagaatctggctggctacaagagacaggaagccctgagaccatacctgagcagcgaggaagatcggaagaagggaaagaaattcgctcggtaccagctgggcgacctgctgctgcacctggaaaagaagcacggcgaggactggggaaaggtgtacgacgaggcctgggagcggattgacaagaaagtggaaggcctgagcaagcacatcaagctggaagaggaacggagaagcgaggacgcccagagcaaggccgccctgaccgactggctgcgggctaaggccagcttcgtgatcgagggcctgaaggaggccgacaaggacgagttctgcagatgcgagctgaagctgcagaagtggtacggggacctgcggggaaagcccttcgccatcgaagccgagaacagcatcctggacatcagcggcttcagcaagcagtacaactgtgccttcatctggcagaaggacggcgtgaagaagctgaacctgtacctgatcatcaactacttcaagggcggcaagctgcggttcaagaagatcaaacctgaagccttcgaagccaacagattctacaccgtgatcaacaaaaagagcggcgagatcgtgcccatggaggtgaacttcaacttcgacgaccccaacctgatcatcctgcctctggcctttggcaagagacagggcagagaattcatctggaacgacctgctgtccctggaaaccggcagcctgaagctggccaacggaagagtgatcgagaagacactgtacaacagaagaacccggcaggatgagcctgccctgttcgtggccctgaccttcgagcggcgggaggtcctggactcctccaatatcaaaccaatgaacctgatcggcgtggcaagaggcgaaaacatccccgccgtgatcgccctgaccgaccccgagggctgcccactgagccggtttaaggatagcctgggaaacccaacccacatcctgagaatcggcgagagctataaggagaagcagcggaccatccaggccaagaaggaggtggagcagcggagagccggcggctacagccggaagtacgccagcaaagccaagaatctggcagacgatatggtgagaaacaccgctagagatctgctgtactacgccgtgacccaggatgccatgctgatcttcgccaacctgagccggggcttcggccggcagggcaagcggaccttcatggccgagagacagtacacacggatggaggactggctgaccgccaagctggcctacgagggcctgagcaagacctacctgtccaagacactggcccagtacacctccaagacatgcagcaactgtgggtttaccatcaccagcgccgactacgacagggtgctggagaagctgaagaagacagcaacaggctggatgaccacaattaacggcaaggagctgaaggtggagggccagattacctactacaacagatacaagagacagaacgtagtcaaggacctgtccgtcgagctggatagactgagcgaagaatctgtgaacaacgacatctcctcctggacaaagggcagaagcggagaagctctgagcctcctgaagaaaagattctcccatagacccgtgcaggagaagttcgtgtgcctgaactgcggcttcgagacacacgcagccgagcaagccgccctgaacatcgccagatcctggctgttcctgcggagccaggagtacaagaaataccagacaaacaagacaaccggcaacaccgataagagagccttcgtcgagacctggcagtccttttaccggaagaagcttaaggaggtgtggaaacctgccgtgcggtctggcggatctggcggaggctccacaagcttccaggcccccgtgaccttcggcgacctggccatctacttcagccaggaggagtgggagtgcctgagccccatccagaaggacctgtacgaggacgtgatgctggagaactaccagaacctggtgagcctgggcctgagcttcaggaggcccaacgtgatcaccctgctggagaagggcaaggccccctggatggtggagcccgtgaagaggaggaggggcctggacctgggcagcaagtgcaccagccccaagaaaaagagaaaagtctaagctgccttctgcggggcttgccttctggccatgcccttcttctctcccttgcacctgtacctcttggtctttgaataaagcctgagtaggaaggctagcaaaaaaaaaaaaaaaaaaaaaaaaaaaaaaaaaaaaaaaaaaaaaaaaaaaaaaaaaaaaaaaaaaaaaaaaaaaaaaaa

SEQ ID NO: 5740 - RNA, 5797 nt, synthetic construct
  source 1..5797: mol_type = other RNA
aggaaataagagagaaaagaagagtaagaagaaatataagagccaccatggcccctaagaagaagcgtaaagtgagccggatggaacgcctcgtctacgaggtgcggcagaagtgcagaaacatcgaggacatctgcatctcctgcggatctctgaacgtgaccctggagcacccactgttcatcggcggcatgtgccagaactgtaaaaactgttttctggagtgtgcctatcaatacgacgatgacggctaccagagctactgcaccatctgttgcggcggaagagaggtgctgatgtgtggaaataacaactgctgccggtgcttctgcgtggaatgcgtggacctgctggtgggccccggcgccgcccaggccgctattaaggaagatccttggaactgctacatgtgcggccacaagggcacatacggcctgctgagacggagagaggactggcctagcagactgcagatgttcttcgccaataaccacgaccaggagttcgacccccctaaggtgtaccctcccgtccccgccgagaagagaaagcccatccgggtcctgagcctgttcgatggcatcgccaccggtctgctggtgctgaaggacctgggcatccaggtggataggtacattgcctccgaggtgtgcgaggactccatcaccgtgggaatggtgcgtcatcagggcaagatcatgtacgtgggcgacgtgcggagcgtgacacagaagcatatccaggagtggggccctttcgacctggtgatcggcggcagcccttgcaatgacctgagcatcgtgaacccagcccggaagggcctgtacgagggaaccggcagactgttcttcgagttttacagactgctgcacgacgcccggcctaaggaaggcgacgaccggcccttcttttggctgttcgagaatgtggtggccatgggagtcagcgacaagcgggatattagccggttcctggagagcaaccccgtgatgatcgatgccaaggaagtgagcgccgcccaccgggccagatacttctggggcaatctgcctggcatgaacagacccctggccagcaccgtgaacgacaagctggagctgcaggagtgcctggagcacggccggatcgccaagttcagcaaggtgagaaccatcaccacccgaagcaacagcatcaaacaaggcaaggaccagcactttcctgtgttcatgaacgagaaggaggacatcctgtggtgtaccgagatggagagagtgttcgggttcccagtccactacacagatgtcagcaacatgtctagactggccagacagagactgctgggaagaagctggtccgtccctgtgatcagacacctgttcgcccctctgaaggagtacttcgcctgcgtgagcagcggcaacagcaacgccaacagccggggccccagcttctctagcggcctggtgccactgtccctgagagggagccacatgggccccatggagatctacaaaaccgtgagcgcctggaagcggcagcctgtgcgcgtgctgagcctgtttcggaatatcgataaagtcctgaaaagcctgggattcctggagagcggctctggctccggcggtggcaccctgaagtacgtggaggatgtgacaaacgtggtcagacgggatgtggagaagtggggccccttcgatctggtgtacggcagcacccaacccctgggcagctcttgtgaccggtgccctggctggtacatgtttcagttccaccggatcctgcagtacgccctgccgagacaggagtcccagcggccattcttttggattttcatggacaacttgctgctgaccgaggatgaccaggaaactaccactcggttcctgcagaccgaagccgtgaccctgcaggacgtgagaggccgggactaccagaacgccatgcgggtgtggtccaacatccctggactgaaaagcaagcacgcacctctgacccctaaagaagaggagtacctgcaggcccaggtgcggagcagaagcaagctggacgcccctaaggtggatctgctggtgaagaattgcctcctgcccctgagagagtacttcaagtatttcagccagaatagtctgcccctgggcggcccaagcagcggcgcccctcctcccagcggcggcagcccagccggctccccaacctctaccgaggagggcacctctgagtccgccacccccgagagcggccctggcacctccaccgagcccagcgagggcagcgcacccggcagccctgccggcagccccacctccacagaggagggaaccagcaccgagcccagcgaaggcagcgccccaggcaccagcaccgagcctagtgagggcggctctggcggcggcagcgcccaggagattaaacggatcaacaagatcagaagaagacttgtgaaagacagcaacaccaagaaggccggcaagacaggccccatgaaaaccctgctggttagagtgatgacacccgatctgagagagcggctggaaaacctgagaaagaagcctgaaaatatcccccagcccatcagcaatacatctagagccaacctgaataagctgctgaccgattacaccgaaatgaagaaggcgatcctgcatgtgtactgggaagagttccagaaggaccctgtgggcctgatgagccgggtggcccagcctgccagcaagaagatcgatcagaacaagctgaaacctgagatggacgagaagggcaacctgaccaccgccggctttgcctgctctcagtgtggccagcccctgttcgtgtacaagctggagcaggtgtctgagaagggcaaggcttacaccaactacttcggacggtgcaatgtggccgagcacgaaaagctgatcctgctggcccagctgaagcccgagaaggatagcgacgaagccgtgacatatagcctgggaaagtttgggcagagggccctggatttctacagcattcatgtgaccaaggagtccacccaccccgtgaagcccctggcccagatcgccggaaacagatacgcctccggacctgtgggaaaggccctgagcgacgcatgtatgggcacaatcgcctccttcctgtctaagtaccaggacatcatcatcgaacaccagaaggtggtgaagggcaaccagaagagactggagagcctgcgggagctggccggcaaggaaaacctggaataccctagcgtgaccctgccacctcagcctcacaccaaggagggcgttgatgcctacaacgaagtgatcgcccgggtgcgaatgtgggtgaacctgaacctgtggcagaagctgaagctaagcagagatgatgccaagcctctgctgagactgaagggattcccttcctttcctctggtcgagagacaggccaacgaagtggactggtgggacatggtgtgtaacgtgaagaagctgatcaacgagaaaaaggaggatggcaaggtgttttggcagaatctggctggctacaagagacaggaagccctgagaccatacctgagcagcgaggaagatcggaagaagggaaagaaattcgctcggtaccagctgggcgacctgctgctgcacctggaaaagaagcacggcgaggactggggaaaggtgtacgacgaggcctgggagcggattgacaagaaagtggaaggcctgagcaagcacatcaagctggaagaggaacggagaagcgaggacgcccagagcaaggccgccctgaccgactggctgcgggctaaggccagcttcgtgatcgagggcctgaaggaggccgacaaggacgagttctgcagatgcgagctgaagctgcagaagtggtacggggacctgcggggaaagcccttcgccatcgaagccgagaacagcatcctggacatcagcggcttcagcaagcagtacaactgtgccttcatctggcagaaggacggcgtgaagaagctgaacctgtacctgatcatcaactacttcaagggcggcaagctgcggttcaagaagatcaaacctgaagccttcgaagccaacagattctacaccgtgatcaacaaaaagagcggcgagatcgtgcccatggaggtgaacttcaacttcgacgaccccaacctgatcatcctgcctctggcctttggcaagagacagggcagagaattcatctggaacgacctgctgtccctggaaaccggcagcctgaagctggccaacggaagagtgatcgagaagacactgtacaacagaagaacccggcaggatgagcctgccctgttcgtggccctgaccttcgagcggcgggaggtcctggactcctccaatatcaaaccaatgaacctgatcggcgtggcaagaggcgaaaacatccccgccgtgatcgccctgaccgaccccgagggctgcccactgagccggtttaaggatagcctgggaaacccaacccacatcctgagaatcggcgagagctataaggagaagcagcggaccatccaggccaagaaggaggtggagcagcggagagccggcggctacagccggaagtacgccagcaaagccaagaatctggcagacgatatggtgagaaacaccgctagagatctgctgtactacgccgtgacccaggatgccatgctgatcttcgccaacctgagccggggcttcggccggcagggcaagcggaccttcatggccgagagacagtacacacggatggaggactggctgaccgccaagctggcctacgagggcctgagcaagacctacctgtccaagacactggcccagtacacctccaagacatgcagcaactgtgggtttaccatcaccagcgccgactacgacagggtgctggagaagctgaagaagacagcaacaggctggatgaccacaattaacggcaaggagctgaaggtggagggccagattacctactacaacagatacaagagacagaacgtagtcaaggacctgtccgtcgagctggatagactgagcgaagaatctgtgaacaacgacatctcctcctggacaaagggcagaagcggagaagctctgagcctcctgaagaaaagattctcccatagacccgtgcaggagaagttcgtgtgcctgaactgcggcttcgagacacacgcagccgagcaagccgccctgaacatcgccagatcctggctgttcctgcggagccaggagtacaagaaataccagacaaacaagacaaccggcaacaccgataagagagccttcgtcgagacctggcagtccttttaccggaagaagcttaaggaggtgtggaaacctgccgtgcggtctggcggatctggcggaggctccacaagcatggccctgaggagcgtgatcttcagcgacatcagcatcgacttcagccccgaggagtgggagtacctggacctggagcagaaggacctgtacagggacgtgatgctggagaactacagcaacctggtgagcctgggctgcttcatcagcaagcccgacgtgatcagcctgctggagcagggcaaggagccctggaaggtggtgaggaagaggaggaggcagtaccccgacctggagaccaagaccagccccaagaaaaagagaaaagtctaagctgccttctgcggggcttgccttctggccatgcccttcttctctcccttgcacctgtacctcttggtctttgaataaagcctgagtaggaaggctagcaaaaaaaaaaaaaaaaaaaaaaaaaaaaaaaaaaaaaaaaaaaaaaaaaaaaaaaaaaaaaaaaaaaaaaaaaaaaaaaa

SEQ ID NO: 5741 - RNA, 5797 nt, synthetic construct
  source 1..5797: mol_type = other RNA
aggaaataagagagaaaagaagagtaagaagaaatataagagccaccatggcccctaagaagaagcgtaaagtgagccggatggaacgcctcgtctacgaggtgcggcagaagtgcagaaacatcgaggacatctgcatctcctgcggatctctgaacgtgaccctggagcacccactgttcatcggcggcatgtgccagaactgtaaaaactgttttctggagtgtgcctatcaatacgacgatgacggctaccagagctactgcaccatctgttgcggcggaagagaggtgctgatgtgtggaaataacaactgctgccggtgcttctgcgtggaatgcgtggacctgctggtgggccccggcgccgcccaggccgctattaaggaagatccttggaactgctacatgtgcggccacaagggcacatacggcctgctgagacggagagaggactggcctagcagactgcagatgttcttcgccaataaccacgaccaggagttcgacccccctaaggtgtaccctcccgtccccgccgagaagagaaagcccatccgggtcctgagcctgttcgatggcatcgccaccggtctgctggtgctgaaggacctgggcatccaggtggataggtacattgcctccgaggtgtgcgaggactccatcaccgtgggaatggtgcgtcatcagggcaagatcatgtacgtgggcgacgtgcggagcgtgacacagaagcatatccaggagtggggccctttcgacctggtgatcggcggcagcccttgcaatgacctgagcatcgtgaacccagcccggaagggcctgtacgagggaaccggcagactgttcttcgagttttacagactgctgcacgacgcccggcctaaggaaggcgacgaccggcccttcttttggctgttcgagaatgtggtggccatgggagtcagcgacaagcgggatattagccggttcctggagagcaaccccgtgatgatcgatgccaaggaagtgagcgccgcccaccgggccagatacttctggggcaatctgcctggcatgaacagacccctggccagcaccgtgaacgacaagctggagctgcaggagtgcctggagcacggccggatcgccaagttcagcaaggtgagaaccatcaccacccgaagcaacagcatcaaacaaggcaaggaccagcactttcctgtgttcatgaacgagaaggaggacatcctgtggtgtaccgagatggagagagtgttcgggttcccagtccactacacagatgtcagcaacatgtctagactggccagacagagactgctgggaagaagctggtccgtccctgtgatcagacacctgttcgcccctctgaaggagtacttcgcctgcgtgagcagcggcaacagcaacgccaacagccggggccccagcttctctagcggcctggtgccactgtccctgagagggagccacatgggccccatggagatctacaaaaccgtgagcgcctggaagcggcagcctgtgcgcgtgctgagcctgtttcggaatatcgataaagtcctgaaaagcctgggattcctggagagcggctctggctccggcggtggcaccctgaagtacgtggaggatgtgacaaacgtggtcagacgggatgtggagaagtggggccccttcgatctggtgtacggcagcacccaacccctgggcagctcttgtgaccggtgccctggctggtacatgtttcagttccaccggatcctgcagtacgccctgccgagacaggagtcccagcggccattcttttggattttcatggacaacttgctgctgaccgaggatgaccaggaaactaccactcggttcctgcagaccgaagccgtgaccctgcaggacgtgagaggccgggactaccagaacgccatgcgggtgtggtccaacatccctggactgaaaagcaagcacgcacctctgacccctaaagaagaggagtacctgcaggcccaggtgcggagcagaagcaagctggacgcccctaaggtggatctgctggtgaagaattgcctcctgcccctgagagagtacttcaagtatttcagccagaatagtctgcccctgggcggcccaagcagcggcgcccctcctcccagcggcggcagcccagccggctccccaacctctaccgaggagggcacctctgagtccgccacccccgagagcggccctggcacctccaccgagcccagcgagggcagcgcacccggcagccctgccggcagccccacctccacagaggagggaaccagcaccgagcccagcgaaggcagcgccccaggcaccagcaccgagcctagtgagggcggctctggcggcggcagcgcccaggagattaaacggatcaacaagatcagaagaagacttgtgaaagacagcaacaccaagaaggccggcaagacaggccccatgaaaaccctgctggttagagtgatgacacccgatctgagagagcggctggaaaacctgagaaagaagcctgaaaatatcccccagcccatcagcaatacatctagagccaacctgaataagctgctgaccgattacaccgaaatgaagaaggcgatcctgcatgtgtactgggaagagttccagaaggaccctgtgggcctgatgagccgggtggcccagcctgccagcaagaagatcgatcagaacaagctgaaacctgagatggacgagaagggcaacctgaccaccgccggctttgcctgctctcagtgtggccagcccctgttcgtgtacaagctggagcaggtgtctgagaagggcaaggcttacaccaactacttcggacggtgcaatgtggccgagcacgaaaagctgatcctgctggcccagctgaagcccgagaaggatagcgacgaagccgtgacatatagcctgggaaagtttgggcagagggccctggatttctacagcattcatgtgaccaaggagtccacccaccccgtgaagcccctggcccagatcgccggaaacagatacgcctccggacctgtgggaaaggccctgagcgacgcatgtatgggcacaatcgcctccttcctgtctaagtaccaggacatcatcatcgaacaccagaaggtggtgaagggcaaccagaagagactggagagcctgcgggagctggccggcaaggaaaacctggaataccctagcgtgaccctgccacctcagcctcacaccaaggagggcgttgatgcctacaacgaagtgatcgcccgggtgcgaatgtgggtgaacctgaacctgtggcagaagctgaagctaagcagagatgatgccaagcctctgctgagactgaagggattcccttcctttcctctggtcgagagacaggccaacgaagtggactggtgggacatggtgtgtaacgtgaagaagctgatcaacgagaaaaaggaggatggcaaggtgttttggcagaatctggctggctacaagagacaggaagccctgagaccatacctgagcagcgaggaagatcggaagaagggaaagaaattcgctcggtaccagctgggcgacctgctgctgcacctggaaaagaagcacggcgaggactggggaaaggtgtacgacgaggcctgggagcggattgacaagaaagtggaaggcctgagcaagcacatcaagctggaagaggaacggagaagcgaggacgcccagagcaaggccgccctgaccgactggctgcgggctaaggccagcttcgtgatcgagggcctgaaggaggccgacaaggacgagttctgcagatgcgagctgaagctgcagaagtggtacggggacctgcggggaaagcccttcgccatcgaagccgagaacagcatcctggacatcagcggcttcagcaagcagtacaactgtgccttcatctggcagaaggacggcgtgaagaagctgaacctgtacctgatcatcaactacttcaagggcggcaagctgcggttcaagaagatcaaacctgaagccttcgaagccaacagattctacaccgtgatcaacaaaaagagcggcgagatcgtgcccatggaggtgaacttcaacttcgacgaccccaacctgatcatcctgcctctggcctttggcaagagacagggcagagaattcatctggaacgacctgctgtccctggaaaccggcagcctgaagctggccaacggaagagtgatcgagaagacactgtacaacagaagaacccggcaggatgagcctgccctgttcgtggccctgaccttcgagcggcgggaggtcctggactcctccaatatcaaaccaatgaacctgatcggcgtggcaagaggcgaaaacatccccgccgtgatcgccctgaccgaccccgagggctgcccactgagccggtttaaggatagcctgggaaacccaacccacatcctgagaatcggcgagagctataaggagaagcagcggaccatccaggccaagaaggaggtggagcagcggagagccggcggctacagccggaagtacgccagcaaagccaagaatctggcagacgatatggtgagaaacaccgctagagatctgctgtactacgccgtgacccaggatgccatgctgatcttcgccaacctgagccggggcttcggccggcagggcaagcggaccttcatggccgagagacagtacacacggatggaggactggctgaccgccaagctggcctacgagggcctgagcaagacctacctgtccaagacactggcccagtacacctccaagacatgcagcaactgtgggtttaccatcaccagcgccgactacgacagggtgctggagaagctgaagaagacagcaacaggctggatgaccacaattaacggcaaggagctgaaggtggagggccagattacctactacaacagatacaagagacagaacgtagtcaaggacctgtccgtcgagctggatagactgagcgaagaatctgtgaacaacgacatctcctcctggacaaagggcagaagcggagaagctctgagcctcctgaagaaaagattctcccatagacccgtgcaggagaagttcgtgtgcctgaactgcggcttcgagacacacgcagccgagcaagccgccctgaacatcgccagatcctggctgttcctgcggagccaggagtacaagaaataccagacaaacaagacaaccggcaacaccgataagagagccttcgtcgagacctggcagtccttttaccggaagaagcttaaggaggtgtggaaacctgccgtgcggtctggcggatctggcggaggctccacaagcgcccacaggagcgtgatgttcaacgacgtgagcatcgacttcagcagggaggagtgggagtacctgaacctggagcagagggacctgtacagggacgtgatgctggagaactacagcaacctggtgagcctgggctacttcatcagcaagcccgacgtgatcagcctgctggagcagggcgaggagccctggaaggtggtgaggaagggcaggaggaggtaccccgacctgaagaccaactacaccagccccaagaaaaagagaaaagtctaagctgccttctgcggggcttgccttctggccatgcccttcttctctcccttgcacctgtacctcttggtctttgaataaagcctgagtaggaaggctagcaaaaaaaaaaaaaaaaaaaaaaaaaaaaaaaaaaaaaaaaaaaaaaaaaaaaaaaaaaaaaaaaaaaaaaaaaaaaaaaa

SEQ ID NO: 5742 - RNA, 5797 nt, synthetic construct
  source 1..5797: mol_type = other RNA
aggaaataagagagaaaagaagagtaagaagaaatataagagccaccatggcccctaagaagaagcgtaaagtgagccggatggaacgcctcgtctacgaggtgcggcagaagtgcagaaacatcgaggacatctgcatctcctgcggatctctgaacgtgaccctggagcacccactgttcatcggcggcatgtgccagaactgtaaaaactgttttctggagtgtgcctatcaatacgacgatgacggctaccagagctactgcaccatctgttgcggcggaagagaggtgctgatgtgtggaaataacaactgctgccggtgcttctgcgtggaatgcgtggacctgctggtgggccccggcgccgcccaggccgctattaaggaagatccttggaactgctacatgtgcggccacaagggcacatacggcctgctgagacggagagaggactggcctagcagactgcagatgttcttcgccaataaccacgaccaggagttcgacccccctaaggtgtaccctcccgtccccgccgagaagagaaagcccatccgggtcctgagcctgttcgatggcatcgccaccggtctgctggtgctgaaggacctgggcatccaggtggataggtacattgcctccgaggtgtgcgaggactccatcaccgtgggaatggtgcgtcatcagggcaagatcatgtacgtgggcgacgtgcggagcgtgacacagaagcatatccaggagtggggccctttcgacctggtgatcggcggcagcccttgcaatgacctgagcatcgtgaacccagcccggaagggcctgtacgagggaaccggcagactgttcttcgagttttacagactgctgcacgacgcccggcctaaggaaggcgacgaccggcccttcttttggctgttcgagaatgtggtggccatgggagtcagcgacaagcgggatattagccggttcctggagagcaaccccgtgatgatcgatgccaaggaagtgagcgccgcccaccgggccagatacttctggggcaatctgcctggcatgaacagacccctggccagcaccgtgaacgacaagctggagctgcaggagtgcctggagcacggccggatcgccaagttcagcaaggtgagaaccatcaccacccgaagcaacagcatcaaacaaggcaaggaccagcactttcctgtgttcatgaacgagaaggaggacatcctgtggtgtaccgagatggagagagtgttcgggttcccagtccactacacagatgtcagcaacatgtctagactggccagacagagactgctgggaagaagctggtccgtccctgtgatcagacacctgttcgcccctctgaaggagtacttcgcctgcgtgagcagcggcaacagcaacgccaacagccggggccccagcttctctagcggcctggtgccactgtccctgagagggagccacatgggccccatggagatctacaaaaccgtgagcgcctggaagcggcagcctgtgcgcgtgctgagcctgtttcggaatatcgataaagtcctgaaaagcctgggattcctggagagcggctctggctccggcggtggcaccctgaagtacgtggaggatgtgacaaacgtggtcagacgggatgtggagaagtggggccccttcgatctggtgtacggcagcacccaacccctgggcagctcttgtgaccggtgccctggctggtacatgtttcagttccaccggatcctgcagtacgccctgccgagacaggagtcccagcggccattcttttggattttcatggacaacttgctgctgaccgaggatgaccaggaaactaccactcggttcctgcagaccgaagccgtgaccctgcaggacgtgagaggccgggactaccagaacgccatgcgggtgtggtccaacatccctggactgaaaagcaagcacgcacctctgacccctaaagaagaggagtacctgcaggcccaggtgcggagcagaagcaagctggacgcccctaaggtggatctgctggtgaagaattgcctcctgcccctgagagagtacttcaagtatttcagccagaatagtctgcccctgggcggcccaagcagcggcgcccctcctcccagcggcggcagcccagccggctccccaacctctaccgaggagggcacctctgagtccgccacccccgagagcggccctggcacctccaccgagcccagcgagggcagcgcacccggcagccctgccggcagccccacctccacagaggagggaaccagcaccgagcccagcgaaggcagcgccccaggcaccagcaccgagcctagtgagggcggctctggcggcggcagcgcccaggagattaaacggatcaacaagatcagaagaagacttgtgaaagacagcaacaccaagaaggccggcaagacaggccccatgaaaaccctgctggttagagtgatgacacccgatctgagagagcggctggaaaacctgagaaagaagcctgaaaatatcccccagcccatcagcaatacatctagagccaacctgaataagctgctgaccgattacaccgaaatgaagaaggcgatcctgcatgtgtactgggaagagttccagaaggaccctgtgggcctgatgagccgggtggcccagcctgccagcaagaagatcgatcagaacaagctgaaacctgagatggacgagaagggcaacctgaccaccgccggctttgcctgctctcagtgtggccagcccctgttcgtgtacaagctggagcaggtgtctgagaagggcaaggcttacaccaactacttcggacggtgcaatgtggccgagcacgaaaagctgatcctgctggcccagctgaagcccgagaaggatagcgacgaagccgtgacatatagcctgggaaagtttgggcagagggccctggatttctacagcattcatgtgaccaaggagtccacccaccccgtgaagcccctggcccagatcgccggaaacagatacgcctccggacctgtgggaaaggccctgagcgacgcatgtatgggcacaatcgcctccttcctgtctaagtaccaggacatcatcatcgaacaccagaaggtggtgaagggcaaccagaagagactggagagcctgcgggagctggccggcaaggaaaacctggaataccctagcgtgaccctgccacctcagcctcacaccaaggagggcgttgatgcctacaacgaagtgatcgcccgggtgcgaatgtgggtgaacctgaacctgtggcagaagctgaagctaagcagagatgatgccaagcctctgctgagactgaagggattcccttcctttcctctggtcgagagacaggccaacgaagtggactggtgggacatggtgtgtaacgtgaagaagctgatcaacgagaaaaaggaggatggcaaggtgttttggcagaatctggctggctacaagagacaggaagccctgagaccatacctgagcagcgaggaagatcggaagaagggaaagaaattcgctcggtaccagctgggcgacctgctgctgcacctggaaaagaagcacggcgaggactggggaaaggtgtacgacgaggcctgggagcggattgacaagaaagtggaaggcctgagcaagcacatcaagctggaagaggaacggagaagcgaggacgcccagagcaaggccgccctgaccgactggctgcgggctaaggccagcttcgtgatcgagggcctgaaggaggccgacaaggacgagttctgcagatgcgagctgaagctgcagaagtggtacggggacctgcggggaaagcccttcgccatcgaagccgagaacagcatcctggacatcagcggcttcagcaagcagtacaactgtgccttcatctggcagaaggacggcgtgaagaagctgaacctgtacctgatcatcaactacttcaagggcggcaagctgcggttcaagaagatcaaacctgaagccttcgaagccaacagattctacaccgtgatcaacaaaaagagcggcgagatcgtgcccatggaggtgaacttcaacttcgacgaccccaacctgatcatcctgcctctggcctttggcaagagacagggcagagaattcatctggaacgacctgctgtccctggaaaccggcagcctgaagctggccaacggaagagtgatcgagaagacactgtacaacagaagaacccggcaggatgagcctgccctgttcgtggccctgaccttcgagcggcgggaggtcctggactcctccaatatcaaaccaatgaacctgatcggcgtggcaagaggcgaaaacatccccgccgtgatcgccctgaccgaccccgagggctgcccactgagccggtttaaggatagcctgggaaacccaacccacatcctgagaatcggcgagagctataaggagaagcagcggaccatccaggccaagaaggaggtggagcagcggagagccggcggctacagccggaagtacgccagcaaagccaagaatctggcagacgatatggtgagaaacaccgctagagatctgctgtactacgccgtgacccaggatgccatgctgatcttcgccaacctgagccggggcttcggccggcagggcaagcggaccttcatggccgagagacagtacacacggatggaggactggctgaccgccaagctggcctacgagggcctgagcaagacctacctgtccaagacactggcccagtacacctccaagacatgcagcaactgtgggtttaccatcaccagcgccgactacgacagggtgctggagaagctgaagaagacagcaacaggctggatgaccacaattaacggcaaggagctgaaggtggagggccagattacctactacaacagatacaagagacagaacgtagtcaaggacctgtccgtcgagctggatagactgagcgaagaatctgtgaacaacgacatctcctcctggacaaagggcagaagcggagaagctctgagcctcctgaagaaaagattctcccatagacccgtgcaggagaagttcgtgtgcctgaactgcggcttcgagacacacgcagccgagcaagccgccctgaacatcgccagatcctggctgttcctgcggagccaggagtacaagaaataccagacaaacaagacaaccggcaacaccgataagagagccttcgtcgagacctggcagtccttttaccggaagaagcttaaggaggtgtggaaacctgccgtgcggtctggcggatctggcggaggctccacaagcccccaggtgctggtgagcttcgaggaggtggccgtgctgctgagccaggaggagtggggccacctgggccccgcccagaagaggctgtacagggacgtgatgctggagacctacggcaacctggtgagcctgggcctgcagggcagcaagcccgacgtgatcagcaagctggagcagggcgaggagccctgggccccccacagccccaggatcgagggcagctggatctggaggaggaggaggaccagccccaagaaaaagagaaaagtctaagctgccttctgcggggcttgccttctggccatgcccttcttctctcccttgcacctgtacctcttggtctttgaataaagcctgagtaggaaggctagcaaaaaaaaaaaaaaaaaaaaaaaaaaaaaaaaaaaaaaaaaaaaaaaaaaaaaaaaaaaaaaaaaaaaaaaaaaaaaaaa

SEQ ID NO: 5743 - RNA, 5797 nt, synthetic construct
  source 1..5797: mol_type = other RNA
aggaaataagagagaaaagaagagtaagaagaaatataagagccaccatggcccctaagaagaagcgtaaagtgagccggatggaacgcctcgtctacgaggtgcggcagaagtgcagaaacatcgaggacatctgcatctcctgcggatctctgaacgtgaccctggagcacccactgttcatcggcggcatgtgccagaactgtaaaaactgttttctggagtgtgcctatcaatacgacgatgacggctaccagagctactgcaccatctgttgcggcggaagagaggtgctgatgtgtggaaataacaactgctgccggtgcttctgcgtggaatgcgtggacctgctggtgggccccggcgccgcccaggccgctattaaggaagatccttggaactgctacatgtgcggccacaagggcacatacggcctgctgagacggagagaggactggcctagcagactgcagatgttcttcgccaataaccacgaccaggagttcgacccccctaaggtgtaccctcccgtccccgccgagaagagaaagcccatccgggtcctgagcctgttcgatggcatcgccaccggtctgctggtgctgaaggacctgggcatccaggtggataggtacattgcctccgaggtgtgcgaggactccatcaccgtgggaatggtgcgtcatcagggcaagatcatgtacgtgggcgacgtgcggagcgtgacacagaagcatatccaggagtggggccctttcgacctggtgatcggcggcagcccttgcaatgacctgagcatcgtgaacccagcccggaagggcctgtacgagggaaccggcagactgttcttcgagttttacagactgctgcacgacgcccggcctaaggaaggcgacgaccggcccttcttttggctgttcgagaatgtggtggccatgggagtcagcgacaagcgggatattagccggttcctggagagcaaccccgtgatgatcgatgccaaggaagtgagcgccgcccaccgggccagatacttctggggcaatctgcctggcatgaacagacccctggccagcaccgtgaacgacaagctggagctgcaggagtgcctggagcacggccggatcgccaagttcagcaaggtgagaaccatcaccacccgaagcaacagcatcaaacaaggcaaggaccagcactttcctgtgttcatgaacgagaaggaggacatcctgtggtgtaccgagatggagagagtgttcgggttcccagtccactacacagatgtcagcaacatgtctagactggccagacagagactgctgggaagaagctggtccgtccctgtgatcagacacctgttcgcccctctgaaggagtacttcgcctgcgtgagcagcggcaacagcaacgccaacagccggggccccagcttctctagcggcctggtgccactgtccctgagagggagccacatgggccccatggagatctacaaaaccgtgagcgcctggaagcggcagcctgtgcgcgtgctgagcctgtttcggaatatcgataaagtcctgaaaagcctgggattcctggagagcggctctggctccggcggtggcaccctgaagtacgtggaggatgtgacaaacgtggtcagacgggatgtggagaagtggggccccttcgatctggtgtacggcagcacccaacccctgggcagctcttgtgaccggtgccctggctggtacatgtttcagttccaccggatcctgcagtacgccctgccgagacaggagtcccagcggccattcttttggattttcatggacaacttgctgctgaccgaggatgaccaggaaactaccactcggttcctgcagaccgaagccgtgaccctgcaggacgtgagaggccgggactaccagaacgccatgcgggtgtggtccaacatccctggactgaaaagcaagcacgcacctctgacccctaaagaagaggagtacctgcaggcccaggtgcggagcagaagcaagctggacgcccctaaggtggatctgctggtgaagaattgcctcctgcccctgagagagtacttcaagtatttcagccagaatagtctgcccctgggcggcccaagcagcggcgcccctcctcccagcggcggcagcccagccggctccccaacctctaccgaggagggcacctctgagtccgccacccccgagagcggccctggcacctccaccgagcccagcgagggcagcgcacccggcagccctgccggcagccccacctccacagaggagggaaccagcaccgagcccagcgaaggcagcgccccaggcaccagcaccgagcctagtgagggcggctctggcggcggcagcgcccaggagattaaacggatcaacaagatcagaagaagacttgtgaaagacagcaacaccaagaaggccggcaagacaggccccatgaaaaccctgctggttagagtgatgacacccgatctgagagagcggctggaaaacctgagaaagaagcctgaaaatatcccccagcccatcagcaatacatctagagccaacctgaataagctgctgaccgattacaccgaaatgaagaaggcgatcctgcatgtgtactgggaagagttccagaaggaccctgtgggcctgatgagccgggtggcccagcctgccagcaagaagatcgatcagaacaagctgaaacctgagatggacgagaagggcaacctgaccaccgccggctttgcctgctctcagtgtggccagcccctgttcgtgtacaagctggagcaggtgtctgagaagggcaaggcttacaccaactacttcggacggtgcaatgtggccgagcacgaaaagctgatcctgctggcccagctgaagcccgagaaggatagcgacgaagccgtgacatatagcctgggaaagtttgggcagagggccctggatttctacagcattcatgtgaccaaggagtccacccaccccgtgaagcccctggcccagatcgccggaaacagatacgcctccggacctgtgggaaaggccctgagcgacgcatgtatgggcacaatcgcctccttcctgtctaagtaccaggacatcatcatcgaacaccagaaggtggtgaagggcaaccagaagagactggagagcctgcgggagctggccggcaaggaaaacctggaataccctagcgtgaccctgccacctcagcctcacaccaaggagggcgttgatgcctacaacgaagtgatcgcccgggtgcgaatgtgggtgaacctgaacctgtggcagaagctgaagctaagcagagatgatgccaagcctctgctgagactgaagggattcccttcctttcctctggtcgagagacaggccaacgaagtggactggtgggacatggtgtgtaacgtgaagaagctgatcaacgagaaaaaggaggatggcaaggtgttttggcagaatctggctggctacaagagacaggaagccctgagaccatacctgagcagcgaggaagatcggaagaagggaaagaaattcgctcggtaccagctgggcgacctgctgctgcacctggaaaagaagcacggcgaggactggggaaaggtgtacgacgaggcctgggagcggattgacaagaaagtggaaggcctgagcaagcacatcaagctggaagaggaacggagaagcgaggacgcccagagcaaggccgccctgaccgactggctgcgggctaaggccagcttcgtgatcgagggcctgaaggaggccgacaaggacgagttctgcagatgcgagctgaagctgcagaagtggtacggggacctgcggggaaagcccttcgccatcgaagccgagaacagcatcctggacatcagcggcttcagcaagcagtacaactgtgccttcatctggcagaaggacggcgtgaagaagctgaacctgtacctgatcatcaactacttcaagggcggcaagctgcggttcaagaagatcaaacctgaagccttcgaagccaacagattctacaccgtgatcaacaaaaagagcggcgagatcgtgcccatggaggtgaacttcaacttcgacgaccccaacctgatcatcctgcctctggcctttggcaagagacagggcagagaattcatctggaacgacctgctgtccctggaaaccggcagcctgaagctggccaacggaagagtgatcgagaagacactgtacaacagaagaacccggcaggatgagcctgccctgttcgtggccctgaccttcgagcggcgggaggtcctggactcctccaatatcaaaccaatgaacctgatcggcgtggcaagaggcgaaaacatccccgccgtgatcgccctgaccgaccccgagggctgcccactgagccggtttaaggatagcctgggaaacccaacccacatcctgagaatcggcgagagctataaggagaagcagcggaccatccaggccaagaaggaggtggagcagcggagagccggcggctacagccggaagtacgccagcaaagccaagaatctggcagacgatatggtgagaaacaccgctagagatctgctgtactacgccgtgacccaggatgccatgctgatcttcgccaacctgagccggggcttcggccggcagggcaagcggaccttcatggccgagagacagtacacacggatggaggactggctgaccgccaagctggcctacgagggcctgagcaagacctacctgtccaagacactggcccagtacacctccaagacatgcagcaactgtgggtttaccatcaccagcgccgactacgacagggtgctggagaagctgaagaagacagcaacaggctggatgaccacaattaacggcaaggagctgaaggtggagggccagattacctactacaacagatacaagagacagaacgtagtcaaggacctgtccgtcgagctggatagactgagcgaagaatctgtgaacaacgacatctcctcctggacaaagggcagaagcggagaagctctgagcctcctgaagaaaagattctcccatagacccgtgcaggagaagttcgtgtgcctgaactgcggcttcgagacacacgcagccgagcaagccgccctgaacatcgccagatcctggctgttcctgcggagccaggagtacaagaaataccagacaaacaagacaaccggcaacaccgataagagagccttcgtcgagacctggcagtccttttaccggaagaagcttaaggaggtgtggaaacctgccgtgcggtctggcggatctggcggaggctccacaagcagcaaggcccccatcaccttcggcgacctggccatctacttcagccaggaggagtgggagtggctgagccccatccagaaggacctgtacgaggacgtgatgctggagaactacaggaacctggtgagcctgggcctgagcttcaggaggcccaacgtgatcaccctgctggagaagggcaaggccccctggatggtggagcccgccaggaggaggaggggccccgacagcggcagcaaggtgaccagccccaagaaaaagagaaaagtctaagctgccttctgcggggcttgccttctggccatgcccttcttctctcccttgcacctgtacctcttggtctttgaataaagcctgagtaggaaggctagcaaaaaaaaaaaaaaaaaaaaaaaaaaaaaaaaaaaaaaaaaaaaaaaaaaaaaaaaaaaaaaaaaaaaaaaaaaaaaaaa

SEQ ID NO: 5744 - RNA, 5797 nt, synthetic construct
  source 1..5797: mol_type = other RNA
aggaaataagagagaaaagaagagtaagaagaaatataagagccaccatggcccctaagaagaagcgtaaagtgagccggatggaacgcctcgtctacgaggtgcggcagaagtgcagaaacatcgaggacatctgcatctcctgcggatctctgaacgtgaccctggagcacccactgttcatcggcggcatgtgccagaactgtaaaaactgttttctggagtgtgcctatcaatacgacgatgacggctaccagagctactgcaccatctgttgcggcggaagagaggtgctgatgtgtggaaataacaactgctgccggtgcttctgcgtggaatgcgtggacctgctggtgggccccggcgccgcccaggccgctattaaggaagatccttggaactgctacatgtgcggccacaagggcacatacggcctgctgagacggagagaggactggcctagcagactgcagatgttcttcgccaataaccacgaccaggagttcgacccccctaaggtgtaccctcccgtccccgccgagaagagaaagcccatccgggtcctgagcctgttcgatggcatcgccaccggtctgctggtgctgaaggacctgggcatccaggtggataggtacattgcctccgaggtgtgcgaggactccatcaccgtgggaatggtgcgtcatcagggcaagatcatgtacgtgggcgacgtgcggagcgtgacacagaagcatatccaggagtggggccctttcgacctggtgatcggcggcagcccttgcaatgacctgagcatcgtgaacccagcccggaagggcctgtacgagggaaccggcagactgttcttcgagttttacagactgctgcacgacgcccggcctaaggaaggcgacgaccggcccttcttttggctgttcgagaatgtggtggccatgggagtcagcgacaagcgggatattagccggttcctggagagcaaccccgtgatgatcgatgccaaggaagtgagcgccgcccaccgggccagatacttctggggcaatctgcctggcatgaacagacccctggccagcaccgtgaacgacaagctggagctgcaggagtgcctggagcacggccggatcgccaagttcagcaaggtgagaaccatcaccacccgaagcaacagcatcaaacaaggcaaggaccagcactttcctgtgttcatgaacgagaaggaggacatcctgtggtgtaccgagatggagagagtgttcgggttcccagtccactacacagatgtcagcaacatgtctagactggccagacagagactgctgggaagaagctggtccgtccctgtgatcagacacctgttcgcccctctgaaggagtacttcgcctgcgtgagcagcggcaacagcaacgccaacagccggggccccagcttctctagcggcctggtgccactgtccctgagagggagccacatgggccccatggagatctacaaaaccgtgagcgcctggaagcggcagcctgtgcgcgtgctgagcctgtttcggaatatcgataaagtcctgaaaagcctgggattcctggagagcggctctggctccggcggtggcaccctgaagtacgtggaggatgtgacaaacgtggtcagacgggatgtggagaagtggggccccttcgatctggtgtacggcagcacccaacccctgggcagctcttgtgaccggtgccctggctggtacatgtttcagttccaccggatcctgcagtacgccctgccgagacaggagtcccagcggccattcttttggattttcatggacaacttgctgctgaccgaggatgaccaggaaactaccactcggttcctgcagaccgaagccgtgaccctgcaggacgtgagaggccgggactaccagaacgccatgcgggtgtggtccaacatccctggactgaaaagcaagcacgcacctctgacccctaaagaagaggagtacctgcaggcccaggtgcggagcagaagcaagctggacgcccctaaggtggatctgctggtgaagaattgcctcctgcccctgagagagtacttcaagtatttcagccagaatagtctgcccctgggcggcccaagcagcggcgcccctcctcccagcggcggcagcccagccggctccccaacctctaccgaggagggcacctctgagtccgccacccccgagagcggccctggcacctccaccgagcccagcgagggcagcgcacccggcagccctgccggcagccccacctccacagaggagggaaccagcaccgagcccagcgaaggcagcgccccaggcaccagcaccgagcctagtgagggcggctctggcggcggcagcgcccaggagattaaacggatcaacaagatcagaagaagacttgtgaaagacagcaacaccaagaaggccggcaagacaggccccatgaaaaccctgctggttagagtgatgacacccgatctgagagagcggctggaaaacctgagaaagaagcctgaaaatatcccccagcccatcagcaatacatctagagccaacctgaataagctgctgaccgattacaccgaaatgaagaaggcgatcctgcatgtgtactgggaagagttccagaaggaccctgtgggcctgatgagccgggtggcccagcctgccagcaagaagatcgatcagaacaagctgaaacctgagatggacgagaagggcaacctgaccaccgccggctttgcctgctctcagtgtggccagcccctgttcgtgtacaagctggagcaggtgtctgagaagggcaaggcttacaccaactacttcggacggtgcaatgtggccgagcacgaaaagctgatcctgctggcccagctgaagcccgagaaggatagcgacgaagccgtgacatatagcctgggaaagtttgggcagagggccctggatttctacagcattcatgtgaccaaggagtccacccaccccgtgaagcccctggcccagatcgccggaaacagatacgcctccggacctgtgggaaaggccctgagcgacgcatgtatgggcacaatcgcctccttcctgtctaagtaccaggacatcatcatcgaacaccagaaggtggtgaagggcaaccagaagagactggagagcctgcgggagctggccggcaaggaaaacctggaataccctagcgtgaccctgccacctcagcctcacaccaaggagggcgttgatgcctacaacgaagtgatcgcccgggtgcgaatgtgggtgaacctgaacctgtggcagaagctgaagctaagcagagatgatgccaagcctctgctgagactgaagggattcccttcctttcctctggtcgagagacaggccaacgaagtggactggtgggacatggtgtgtaacgtgaagaagctgatcaacgagaaaaaggaggatggcaaggtgttttggcagaatctggctggctacaagagacaggaagccctgagaccatacctgagcagcgaggaagatcggaagaagggaaagaaattcgctcggtaccagctgggcgacctgctgctgcacctggaaaagaagcacggcgaggactggggaaaggtgtacgacgaggcctgggagcggattgacaagaaagtggaaggcctgagcaagcacatcaagctggaagaggaacggagaagcgaggacgcccagagcaaggccgccctgaccgactggctgcgggctaaggccagcttcgtgatcgagggcctgaaggaggccgacaaggacgagttctgcagatgcgagctgaagctgcagaagtggtacggggacctgcggggaaagcccttcgccatcgaagccgagaacagcatcctggacatcagcggcttcagcaagcagtacaactgtgccttcatctggcagaaggacggcgtgaagaagctgaacctgtacctgatcatcaactacttcaagggcggcaagctgcggttcaagaagatcaaacctgaagccttcgaagccaacagattctacaccgtgatcaacaaaaagagcggcgagatcgtgcccatggaggtgaacttcaacttcgacgaccccaacctgatcatcctgcctctggcctttggcaagagacagggcagagaattcatctggaacgacctgctgtccctggaaaccggcagcctgaagctggccaacggaagagtgatcgagaagacactgtacaacagaagaacccggcaggatgagcctgccctgttcgtggccctgaccttcgagcggcgggaggtcctggactcctccaatatcaaaccaatgaacctgatcggcgtggcaagaggcgaaaacatccccgccgtgatcgccctgaccgaccccgagggctgcccactgagccggtttaaggatagcctgggaaacccaacccacatcctgagaatcggcgagagctataaggagaagcagcggaccatccaggccaagaaggaggtggagcagcggagagccggcggctacagccggaagtacgccagcaaagccaagaatctggcagacgatatggtgagaaacaccgctagagatctgctgtactacgccgtgacccaggatgccatgctgatcttcgccaacctgagccggggcttcggccggcagggcaagcggaccttcatggccgagagacagtacacacggatggaggactggctgaccgccaagctggcctacgagggcctgagcaagacctacctgtccaagacactggcccagtacacctccaagacatgcagcaactgtgggtttaccatcaccagcgccgactacgacagggtgctggagaagctgaagaagacagcaacaggctggatgaccacaattaacggcaaggagctgaaggtggagggccagattacctactacaacagatacaagagacagaacgtagtcaaggacctgtccgtcgagctggatagactgagcgaagaatctgtgaacaacgacatctcctcctggacaaagggcagaagcggagaagctctgagcctcctgaagaaaagattctcccatagacccgtgcaggagaagttcgtgtgcctgaactgcggcttcgagacacacgcagccgagcaagccgccctgaacatcgccagatcctggctgttcctgcggagccaggagtacaagaaataccagacaaacaagacaaccggcaacaccgataagagagccttcgtcgagacctggcagtccttttaccggaagaagcttaaggaggtgtggaaacctgccgtgcggtctggcggatctggcggaggctccacaagcttccaggagagcgtggtgttcagcgacgtgagcatcgccttcagccaggaggagtgggcccacctggacctggagcagaaggacctgtacagggacgtgatgctggagaactacagcaacctggtgagcctgggctgcttcgtgagcaagcccgacgtgatcagcctgctggagcagggcaaggagccctggaagatcgtgaggaagggcaggaggaggtaccccgacctggagaccaggtacaccagccccaagaaaaagagaaaagtctaagctgccttctgcggggcttgccttctggccatgcccttcttctctcccttgcacctgtacctcttggtctttgaataaagcctgagtaggaaggctagcaaaaaaaaaaaaaaaaaaaaaaaaaaaaaaaaaaaaaaaaaaaaaaaaaaaaaaaaaaaaaaaaaaaaaaaaaaaaaaaa

SEQ ID NO: 5745 - RNA, 5797 nt, synthetic construct
  source 1..5797: mol_type = other RNA
aggaaataagagagaaaagaagagtaagaagaaatataagagccaccatggcccctaagaagaagcgtaaagtgagccggatggaacgcctcgtctacgaggtgcggcagaagtgcagaaacatcgaggacatctgcatctcctgcggatctctgaacgtgaccctggagcacccactgttcatcggcggcatgtgccagaactgtaaaaactgttttctggagtgtgcctatcaatacgacgatgacggctaccagagctactgcaccatctgttgcggcggaagagaggtgctgatgtgtggaaataacaactgctgccggtgcttctgcgtggaatgcgtggacctgctggtgggccccggcgccgcccaggccgctattaaggaagatccttggaactgctacatgtgcggccacaagggcacatacggcctgctgagacggagagaggactggcctagcagactgcagatgttcttcgccaataaccacgaccaggagttcgacccccctaaggtgtaccctcccgtccccgccgagaagagaaagcccatccgggtcctgagcctgttcgatggcatcgccaccggtctgctggtgctgaaggacctgggcatccaggtggataggtacattgcctccgaggtgtgcgaggactccatcaccgtgggaatggtgcgtcatcagggcaagatcatgtacgtgggcgacgtgcggagcgtgacacagaagcatatccaggagtggggccctttcgacctggtgatcggcggcagcccttgcaatgacctgagcatcgtgaacccagcccggaagggcctgtacgagggaaccggcagactgttcttcgagttttacagactgctgcacgacgcccggcctaaggaaggcgacgaccggcccttcttttggctgttcgagaatgtggtggccatgggagtcagcgacaagcgggatattagccggttcctggagagcaaccccgtgatgatcgatgccaaggaagtgagcgccgcccaccgggccagatacttctggggcaatctgcctggcatgaacagacccctggccagcaccgtgaacgacaagctggagctgcaggagtgcctggagcacggccggatcgccaagttcagcaaggtgagaaccatcaccacccgaagcaacagcatcaaacaaggcaaggaccagcactttcctgtgttcatgaacgagaaggaggacatcctgtggtgtaccgagatggagagagtgttcgggttcccagtccactacacagatgtcagcaacatgtctagactggccagacagagactgctgggaagaagctggtccgtccctgtgatcagacacctgttcgcccctctgaaggagtacttcgcctgcgtgagcagcggcaacagcaacgccaacagccggggccccagcttctctagcggcctggtgccactgtccctgagagggagccacatgggccccatggagatctacaaaaccgtgagcgcctggaagcggcagcctgtgcgcgtgctgagcctgtttcggaatatcgataaagtcctgaaaagcctgggattcctggagagcggctctggctccggcggtggcaccctgaagtacgtggaggatgtgacaaacgtggtcagacgggatgtggagaagtggggccccttcgatctggtgtacggcagcacccaacccctgggcagctcttgtgaccggtgccctggctggtacatgtttcagttccaccggatcctgcagtacgccctgccgagacaggagtcccagcggccattcttttggattttcatggacaacttgctgctgaccgaggatgaccaggaaactaccactcggttcctgcagaccgaagccgtgaccctgcaggacgtgagaggccgggactaccagaacgccatgcgggtgtggtccaacatccctggactgaaaagcaagcacgcacctctgacccctaaagaagaggagtacctgcaggcccaggtgcggagcagaagcaagctggacgcccctaaggtggatctgctggtgaagaattgcctcctgcccctgagagagtacttcaagtatttcagccagaatagtctgcccctgggcggcccaagcagcggcgcccctcctcccagcggcggcagcccagccggctccccaacctctaccgaggagggcacctctgagtccgccacccccgagagcggccctggcacctccaccgagcccagcgagggcagcgcacccggcagccctgccggcagccccacctccacagaggagggaaccagcaccgagcccagcgaaggcagcgccccaggcaccagcaccgagcctagtgagggcggctctggcggcggcagcgcccaggagattaaacggatcaacaagatcagaagaagacttgtgaaagacagcaacaccaagaaggccggcaagacaggccccatgaaaaccctgctggttagagtgatgacacccgatctgagagagcggctggaaaacctgagaaagaagcctgaaaatatcccccagcccatcagcaatacatctagagccaacctgaataagctgctgaccgattacaccgaaatgaagaaggcgatcctgcatgtgtactgggaagagttccagaaggaccctgtgggcctgatgagccgggtggcccagcctgccagcaagaagatcgatcagaacaagctgaaacctgagatggacgagaagggcaacctgaccaccgccggctttgcctgctctcagtgtggccagcccctgttcgtgtacaagctggagcaggtgtctgagaagggcaaggcttacaccaactacttcggacggtgcaatgtggccgagcacgaaaagctgatcctgctggcccagctgaagcccgagaaggatagcgacgaagccgtgacatatagcctgggaaagtttgggcagagggccctggatttctacagcattcatgtgaccaaggagtccacccaccccgtgaagcccctggcccagatcgccggaaacagatacgcctccggacctgtgggaaaggccctgagcgacgcatgtatgggcacaatcgcctccttcctgtctaagtaccaggacatcatcatcgaacaccagaaggtggtgaagggcaaccagaagagactggagagcctgcgggagctggccggcaaggaaaacctggaataccctagcgtgaccctgccacctcagcctcacaccaaggagggcgttgatgcctacaacgaagtgatcgcccgggtgcgaatgtgggtgaacctgaacctgtggcagaagctgaagctaagcagagatgatgccaagcctctgctgagactgaagggattcccttcctttcctctggtcgagagacaggccaacgaagtggactggtgggacatggtgtgtaacgtgaagaagctgatcaacgagaaaaaggaggatggcaaggtgttttggcagaatctggctggctacaagagacaggaagccctgagaccatacctgagcagcgaggaagatcggaagaagggaaagaaattcgctcggtaccagctgggcgacctgctgctgcacctggaaaagaagcacggcgaggactggggaaaggtgtacgacgaggcctgggagcggattgacaagaaagtggaaggcctgagcaagcacatcaagctggaagaggaacggagaagcgaggacgcccagagcaaggccgccctgaccgactggctgcgggctaaggccagcttcgtgatcgagggcctgaaggaggccgacaaggacgagttctgcagatgcgagctgaagctgcagaagtggtacggggacctgcggggaaagcccttcgccatcgaagccgagaacagcatcctggacatcagcggcttcagcaagcagtacaactgtgccttcatctggcagaaggacggcgtgaagaagctgaacctgtacctgatcatcaactacttcaagggcggcaagctgcggttcaagaagatcaaacctgaagccttcgaagccaacagattctacaccgtgatcaacaaaaagagcggcgagatcgtgcccatggaggtgaacttcaacttcgacgaccccaacctgatcatcctgcctctggcctttggcaagagacagggcagagaattcatctggaacgacctgctgtccctggaaaccggcagcctgaagctggccaacggaagagtgatcgagaagacactgtacaacagaagaacccggcaggatgagcctgccctgttcgtggccctgaccttcgagcggcgggaggtcctggactcctccaatatcaaaccaatgaacctgatcggcgtggcaagaggcgaaaacatccccgccgtgatcgccctgaccgaccccgagggctgcccactgagccggtttaaggatagcctgggaaacccaacccacatcctgagaatcggcgagagctataaggagaagcagcggaccatccaggccaagaaggaggtggagcagcggagagccggcggctacagccggaagtacgccagcaaagccaagaatctggcagacgatatggtgagaaacaccgctagagatctgctgtactacgccgtgacccaggatgccatgctgatcttcgccaacctgagccggggcttcggccggcagggcaagcggaccttcatggccgagagacagtacacacggatggaggactggctgaccgccaagctggcctacgagggcctgagcaagacctacctgtccaagacactggcccagtacacctccaagacatgcagcaactgtgggtttaccatcaccagcgccgactacgacagggtgctggagaagctgaagaagacagcaacaggctggatgaccacaattaacggcaaggagctgaaggtggagggccagattacctactacaacagatacaagagacagaacgtagtcaaggacctgtccgtcgagctggatagactgagcgaagaatctgtgaacaacgacatctcctcctggacaaagggcagaagcggagaagctctgagcctcctgaagaaaagattctcccatagacccgtgcaggagaagttcgtgtgcctgaactgcggcttcgagacacacgcagccgagcaagccgccctgaacatcgccagatcctggctgttcctgcggagccaggagtacaagaaataccagacaaacaagacaaccggcaacaccgataagagagccttcgtcgagacctggcagtccttttaccggaagaagcttaaggaggtgtggaaacctgccgtgcggtctggcggatctggcggaggctccacaagcagcaaggcccccatcaccttcggcgacctggccatctacttcagccaggaggagtgggagtggctgagccccatccagaaggacctgtacgaggacgtgatgctggagaactacaggaacctggtgagcctgggcctgagcttcaggaggcccaacgtgatcaccctgctggagaagggcaaggccccctggatgatcgagcccgtgaggaggaggagggcccccgagctgaccgaggccagcaccagccccaagaaaaagagaaaagtctaagctgccttctgcggggcttgccttctggccatgcccttcttctctcccttgcacctgtacctcttggtctttgaataaagcctgagtaggaaggctagcaaaaaaaaaaaaaaaaaaaaaaaaaaaaaaaaaaaaaaaaaaaaaaaaaaaaaaaaaaaaaaaaaaaaaaaaaaaaaaaa

SEQ ID NO: 5746 - RNA, 5797 nt, synthetic construct
  source 1..5797: mol_type = other RNA
aggaaataagagagaaaagaagagtaagaagaaatataagagccaccatggcccctaagaagaagcgtaaagtgagccggatggaacgcctcgtctacgaggtgcggcagaagtgcagaaacatcgaggacatctgcatctcctgcggatctctgaacgtgaccctggagcacccactgttcatcggcggcatgtgccagaactgtaaaaactgttttctggagtgtgcctatcaatacgacgatgacggctaccagagctactgcaccatctgttgcggcggaagagaggtgctgatgtgtggaaataacaactgctgccggtgcttctgcgtggaatgcgtggacctgctggtgggccccggcgccgcccaggccgctattaaggaagatccttggaactgctacatgtgcggccacaagggcacatacggcctgctgagacggagagaggactggcctagcagactgcagatgttcttcgccaataaccacgaccaggagttcgacccccctaaggtgtaccctcccgtccccgccgagaagagaaagcccatccgggtcctgagcctgttcgatggcatcgccaccggtctgctggtgctgaaggacctgggcatccaggtggataggtacattgcctccgaggtgtgcgaggactccatcaccgtgggaatggtgcgtcatcagggcaagatcatgtacgtgggcgacgtgcggagcgtgacacagaagcatatccaggagtggggccctttcgacctggtgatcggcggcagcccttgcaatgacctgagcatcgtgaacccagcccggaagggcctgtacgagggaaccggcagactgttcttcgagttttacagactgctgcacgacgcccggcctaaggaaggcgacgaccggcccttcttttggctgttcgagaatgtggtggccatgggagtcagcgacaagcgggatattagccggttcctggagagcaaccccgtgatgatcgatgccaaggaagtgagcgccgcccaccgggccagatacttctggggcaatctgcctggcatgaacagacccctggccagcaccgtgaacgacaagctggagctgcaggagtgcctggagcacggccggatcgccaagttcagcaaggtgagaaccatcaccacccgaagcaacagcatcaaacaaggcaaggaccagcactttcctgtgttcatgaacgagaaggaggacatcctgtggtgtaccgagatggagagagtgttcgggttcccagtccactacacagatgtcagcaacatgtctagactggccagacagagactgctgggaagaagctggtccgtccctgtgatcagacacctgttcgcccctctgaaggagtacttcgcctgcgtgagcagcggcaacagcaacgccaacagccggggccccagcttctctagcggcctggtgccactgtccctgagagggagccacatgggccccatggagatctacaaaaccgtgagcgcctggaagcggcagcctgtgcgcgtgctgagcctgtttcggaatatcgataaagtcctgaaaagcctgggattcctggagagcggctctggctccggcggtggcaccctgaagtacgtggaggatgtgacaaacgtggtcagacgggatgtggagaagtggggccccttcgatctggtgtacggcagcacccaacccctgggcagctcttgtgaccggtgccctggctggtacatgtttcagttccaccggatcctgcagtacgccctgccgagacaggagtcccagcggccattcttttggattttcatggacaacttgctgctgaccgaggatgaccaggaaactaccactcggttcctgcagaccgaagccgtgaccctgcaggacgtgagaggccgggactaccagaacgccatgcgggtgtggtccaacatccctggactgaaaagcaagcacgcacctctgacccctaaagaagaggagtacctgcaggcccaggtgcggagcagaagcaagctggacgcccctaaggtggatctgctggtgaagaattgcctcctgcccctgagagagtacttcaagtatttcagccagaatagtctgcccctgggcggcccaagcagcggcgcccctcctcccagcggcggcagcccagccggctccccaacctctaccgaggagggcacctctgagtccgccacccccgagagcggccctggcacctccaccgagcccagcgagggcagcgcacccggcagccctgccggcagccccacctccacagaggagggaaccagcaccgagcccagcgaaggcagcgccccaggcaccagcaccgagcctagtgagggcggctctggcggcggcagcgcccaggagattaaacggatcaacaagatcagaagaagacttgtgaaagacagcaacaccaagaaggccggcaagacaggccccatgaaaaccctgctggttagagtgatgacacccgatctgagagagcggctggaaaacctgagaaagaagcctgaaaatatcccccagcccatcagcaatacatctagagccaacctgaataagctgctgaccgattacaccgaaatgaagaaggcgatcctgcatgtgtactgggaagagttccagaaggaccctgtgggcctgatgagccgggtggcccagcctgccagcaagaagatcgatcagaacaagctgaaacctgagatggacgagaagggcaacctgaccaccgccggctttgcctgctctcagtgtggccagcccctgttcgtgtacaagctggagcaggtgtctgagaagggcaaggcttacaccaactacttcggacggtgcaatgtggccgagcacgaaaagctgatcctgctggcccagctgaagcccgagaaggatagcgacgaagccgtgacatatagcctgggaaagtttgggcagagggccctggatttctacagcattcatgtgaccaaggagtccacccaccccgtgaagcccctggcccagatcgccggaaacagatacgcctccggacctgtgggaaaggccctgagcgacgcatgtatgggcacaatcgcctccttcctgtctaagtaccaggacatcatcatcgaacaccagaaggtggtgaagggcaaccagaagagactggagagcctgcgggagctggccggcaaggaaaacctggaataccctagcgtgaccctgccacctcagcctcacaccaaggagggcgttgatgcctacaacgaagtgatcgcccgggtgcgaatgtgggtgaacctgaacctgtggcagaagctgaagctaagcagagatgatgccaagcctctgctgagactgaagggattcccttcctttcctctggtcgagagacaggccaacgaagtggactggtgggacatggtgtgtaacgtgaagaagctgatcaacgagaaaaaggaggatggcaaggtgttttggcagaatctggctggctacaagagacaggaagccctgagaccatacctgagcagcgaggaagatcggaagaagggaaagaaattcgctcggtaccagctgggcgacctgctgctgcacctggaaaagaagcacggcgaggactggggaaaggtgtacgacgaggcctgggagcggattgacaagaaagtggaaggcctgagcaagcacatcaagctggaagaggaacggagaagcgaggacgcccagagcaaggccgccctgaccgactggctgcgggctaaggccagcttcgtgatcgagggcctgaaggaggccgacaaggacgagttctgcagatgcgagctgaagctgcagaagtggtacggggacctgcggggaaagcccttcgccatcgaagccgagaacagcatcctggacatcagcggcttcagcaagcagtacaactgtgccttcatctggcagaaggacggcgtgaagaagctgaacctgtacctgatcatcaactacttcaagggcggcaagctgcggttcaagaagatcaaacctgaagccttcgaagccaacagattctacaccgtgatcaacaaaaagagcggcgagatcgtgcccatggaggtgaacttcaacttcgacgaccccaacctgatcatcctgcctctggcctttggcaagagacagggcagagaattcatctggaacgacctgctgtccctggaaaccggcagcctgaagctggccaacggaagagtgatcgagaagacactgtacaacagaagaacccggcaggatgagcctgccctgttcgtggccctgaccttcgagcggcgggaggtcctggactcctccaatatcaaaccaatgaacctgatcggcgtggcaagaggcgaaaacatccccgccgtgatcgccctgaccgaccccgagggctgcccactgagccggtttaaggatagcctgggaaacccaacccacatcctgagaatcggcgagagctataaggagaagcagcggaccatccaggccaagaaggaggtggagcagcggagagccggcggctacagccggaagtacgccagcaaagccaagaatctggcagacgatatggtgagaaacaccgctagagatctgctgtactacgccgtgacccaggatgccatgctgatcttcgccaacctgagccggggcttcggccggcagggcaagcggaccttcatggccgagagacagtacacacggatggaggactggctgaccgccaagctggcctacgagggcctgagcaagacctacctgtccaagacactggcccagtacacctccaagacatgcagcaactgtgggtttaccatcaccagcgccgactacgacagggtgctggagaagctgaagaagacagcaacaggctggatgaccacaattaacggcaaggagctgaaggtggagggccagattacctactacaacagatacaagagacagaacgtagtcaaggacctgtccgtcgagctggatagactgagcgaagaatctgtgaacaacgacatctcctcctggacaaagggcagaagcggagaagctctgagcctcctgaagaaaagattctcccatagacccgtgcaggagaagttcgtgtgcctgaactgcggcttcgagacacacgcagccgagcaagccgccctgaacatcgccagatcctggctgttcctgcggagccaggagtacaagaaataccagacaaacaagacaaccggcaacaccgataagagagccttcgtcgagacctggcagtccttttaccggaagaagcttaaggaggtgtggaaacctgccgtgcggtctggcggatctggcggaggctccacaagcagcaaggcccccgtgaccttcggcgacctggccatctacttcagccaggaggagtgggagtggctgagccccatccagaaggacctgtacgaggacgtgatgctggagaactacaggaacctggtgagcctgggcctgagcttcaggaggcccaacgtgatcaccctgctggagaagggcaaggccccctggatggtggagcccgtgaggaggaggagggcccccgacagcggcagcaagtgcaccagccccaagaaaaagagaaaagtctaagctgccttctgcggggcttgccttctggccatgcccttcttctctcccttgcacctgtacctcttggtctttgaataaagcctgagtaggaaggctagcaaaaaaaaaaaaaaaaaaaaaaaaaaaaaaaaaaaaaaaaaaaaaaaaaaaaaaaaaaaaaaaaaaaaaaaaaaaaaaaa

SEQ ID NO: 5747 - RNA, 5797 nt, synthetic construct
  source 1..5797: mol_type = other RNA
aggaaataagagagaaaagaagagtaagaagaaatataagagccaccatggcccctaagaagaagcgtaaagtgagccggatggaacgcctcgtctacgaggtgcggcagaagtgcagaaacatcgaggacatctgcatctcctgcggatctctgaacgtgaccctggagcacccactgttcatcggcggcatgtgccagaactgtaaaaactgttttctggagtgtgcctatcaatacgacgatgacggctaccagagctactgcaccatctgttgcggcggaagagaggtgctgatgtgtggaaataacaactgctgccggtgcttctgcgtggaatgcgtggacctgctggtgggccccggcgccgcccaggccgctattaaggaagatccttggaactgctacatgtgcggccacaagggcacatacggcctgctgagacggagagaggactggcctagcagactgcagatgttcttcgccaataaccacgaccaggagttcgacccccctaaggtgtaccctcccgtccccgccgagaagagaaagcccatccgggtcctgagcctgttcgatggcatcgccaccggtctgctggtgctgaaggacctgggcatccaggtggataggtacattgcctccgaggtgtgcgaggactccatcaccgtgggaatggtgcgtcatcagggcaagatcatgtacgtgggcgacgtgcggagcgtgacacagaagcatatccaggagtggggccctttcgacctggtgatcggcggcagcccttgcaatgacctgagcatcgtgaacccagcccggaagggcctgtacgagggaaccggcagactgttcttcgagttttacagactgctgcacgacgcccggcctaaggaaggcgacgaccggcccttcttttggctgttcgagaatgtggtggccatgggagtcagcgacaagcgggatattagccggttcctggagagcaaccccgtgatgatcgatgccaaggaagtgagcgccgcccaccgggccagatacttctggggcaatctgcctggcatgaacagacccctggccagcaccgtgaacgacaagctggagctgcaggagtgcctggagcacggccggatcgccaagttcagcaaggtgagaaccatcaccacccgaagcaacagcatcaaacaaggcaaggaccagcactttcctgtgttcatgaacgagaaggaggacatcctgtggtgtaccgagatggagagagtgttcgggttcccagtccactacacagatgtcagcaacatgtctagactggccagacagagactgctgggaagaagctggtccgtccctgtgatcagacacctgttcgcccctctgaaggagtacttcgcctgcgtgagcagcggcaacagcaacgccaacagccggggccccagcttctctagcggcctggtgccactgtccctgagagggagccacatgggccccatggagatctacaaaaccgtgagcgcctggaagcggcagcctgtgcgcgtgctgagcctgtttcggaatatcgataaagtcctgaaaagcctgggattcctggagagcggctctggctccggcggtggcaccctgaagtacgtggaggatgtgacaaacgtggtcagacgggatgtggagaagtggggccccttcgatctggtgtacggcagcacccaacccctgggcagctcttgtgaccggtgccctggctggtacatgtttcagttccaccggatcctgcagtacgccctgccgagacaggagtcccagcggccattcttttggattttcatggacaacttgctgctgaccgaggatgaccaggaaactaccactcggttcctgcagaccgaagccgtgaccctgcaggacgtgagaggccgggactaccagaacgccatgcgggtgtggtccaacatccctggactgaaaagcaagcacgcacctctgacccctaaagaagaggagtacctgcaggcccaggtgcggagcagaagcaagctggacgcccctaaggtggatctgctggtgaagaattgcctcctgcccctgagagagtacttcaagtatttcagccagaatagtctgcccctgggcggcccaagcagcggcgcccctcctcccagcggcggcagcccagccggctccccaacctctaccgaggagggcacctctgagtccgccacccccgagagcggccctggcacctccaccgagcccagcgagggcagcgcacccggcagccctgccggcagccccacctccacagaggagggaaccagcaccgagcccagcgaaggcagcgccccaggcaccagcaccgagcctagtgagggcggctctggcggcggcagcgcccaggagattaaacggatcaacaagatcagaagaagacttgtgaaagacagcaacaccaagaaggccggcaagacaggccccatgaaaaccctgctggttagagtgatgacacccgatctgagagagcggctggaaaacctgagaaagaagcctgaaaatatcccccagcccatcagcaatacatctagagccaacctgaataagctgctgaccgattacaccgaaatgaagaaggcgatcctgcatgtgtactgggaagagttccagaaggaccctgtgggcctgatgagccgggtggcccagcctgccagcaagaagatcgatcagaacaagctgaaacctgagatggacgagaagggcaacctgaccaccgccggctttgcctgctctcagtgtggccagcccctgttcgtgtacaagctggagcaggtgtctgagaagggcaaggcttacaccaactacttcggacggtgcaatgtggccgagcacgaaaagctgatcctgctggcccagctgaagcccgagaaggatagcgacgaagccgtgacatatagcctgggaaagtttgggcagagggccctggatttctacagcattcatgtgaccaaggagtccacccaccccgtgaagcccctggcccagatcgccggaaacagatacgcctccggacctgtgggaaaggccctgagcgacgcatgtatgggcacaatcgcctccttcctgtctaagtaccaggacatcatcatcgaacaccagaaggtggtgaagggcaaccagaagagactggagagcctgcgggagctggccggcaaggaaaacctggaataccctagcgtgaccctgccacctcagcctcacaccaaggagggcgttgatgcctacaacgaagtgatcgcccgggtgcgaatgtgggtgaacctgaacctgtggcagaagctgaagctaagcagagatgatgccaagcctctgctgagactgaagggattcccttcctttcctctggtcgagagacaggccaacgaagtggactggtgggacatggtgtgtaacgtgaagaagctgatcaacgagaaaaaggaggatggcaaggtgttttggcagaatctggctggctacaagagacaggaagccctgagaccatacctgagcagcgaggaagatcggaagaagggaaagaaattcgctcggtaccagctgggcgacctgctgctgcacctggaaaagaagcacggcgaggactggggaaaggtgtacgacgaggcctgggagcggattgacaagaaagtggaaggcctgagcaagcacatcaagctggaagaggaacggagaagcgaggacgcccagagcaaggccgccctgaccgactggctgcgggctaaggccagcttcgtgatcgagggcctgaaggaggccgacaaggacgagttctgcagatgcgagctgaagctgcagaagtggtacggggacctgcggggaaagcccttcgccatcgaagccgagaacagcatcctggacatcagcggcttcagcaagcagtacaactgtgccttcatctggcagaaggacggcgtgaagaagctgaacctgtacctgatcatcaactacttcaagggcggcaagctgcggttcaagaagatcaaacctgaagccttcgaagccaacagattctacaccgtgatcaacaaaaagagcggcgagatcgtgcccatggaggtgaacttcaacttcgacgaccccaacctgatcatcctgcctctggcctttggcaagagacagggcagagaattcatctggaacgacctgctgtccctggaaaccggcagcctgaagctggccaacggaagagtgatcgagaagacactgtacaacagaagaacccggcaggatgagcctgccctgttcgtggccctgaccttcgagcggcgggaggtcctggactcctccaatatcaaaccaatgaacctgatcggcgtggcaagaggcgaaaacatccccgccgtgatcgccctgaccgaccccgagggctgcccactgagccggtttaaggatagcctgggaaacccaacccacatcctgagaatcggcgagagctataaggagaagcagcggaccatccaggccaagaaggaggtggagcagcggagagccggcggctacagccggaagtacgccagcaaagccaagaatctggcagacgatatggtgagaaacaccgctagagatctgctgtactacgccgtgacccaggatgccatgctgatcttcgccaacctgagccggggcttcggccggcagggcaagcggaccttcatggccgagagacagtacacacggatggaggactggctgaccgccaagctggcctacgagggcctgagcaagacctacctgtccaagacactggcccagtacacctccaagacatgcagcaactgtgggtttaccatcaccagcgccgactacgacagggtgctggagaagctgaagaagacagcaacaggctggatgaccacaattaacggcaaggagctgaaggtggagggccagattacctactacaacagatacaagagacagaacgtagtcaaggacctgtccgtcgagctggatagactgagcgaagaatctgtgaacaacgacatctcctcctggacaaagggcagaagcggagaagctctgagcctcctgaagaaaagattctcccatagacccgtgcaggagaagttcgtgtgcctgaactgcggcttcgagacacacgcagccgagcaagccgccctgaacatcgccagatcctggctgttcctgcggagccaggagtacaagaaataccagacaaacaagacaaccggcaacaccgataagagagccttcgtcgagacctggcagtccttttaccggaagaagcttaaggaggtgtggaaacctgccgtgcggtctggcggatctggcggaggctccacaagcatggtgagcttcgaggacgtggccgtgctgctgagccaggaggagtgggactgcctgatccccgcccagaggggcctgtacagggacgtgatgctggagacctacggcaacctggtgagcctgggcctgcaggccagcaagcccgacgtgatcagcaggctggagcagggcgacgagccctggaccacccacaccctgaggacccagggcagctggagctggaggcacaagagggagggctacaccagccccaagaaaaagagaaaagtctaagctgccttctgcggggcttgccttctggccatgcccttcttctctcccttgcacctgtacctcttggtctttgaataaagcctgagtaggaaggctagcaaaaaaaaaaaaaaaaaaaaaaaaaaaaaaaaaaaaaaaaaaaaaaaaaaaaaaaaaaaaaaaaaaaaaaaaaaaaaaaa

SEQ ID NO: 5748 - RNA, 5797 nt, synthetic construct
  source 1..5797: mol_type = other RNA
aggaaataagagagaaaagaagagtaagaagaaatataagagccaccatggcccctaagaagaagcgtaaagtgagccggatggaacgcctcgtctacgaggtgcggcagaagtgcagaaacatcgaggacatctgcatctcctgcggatctctgaacgtgaccctggagcacccactgttcatcggcggcatgtgccagaactgtaaaaactgttttctggagtgtgcctatcaatacgacgatgacggctaccagagctactgcaccatctgttgcggcggaagagaggtgctgatgtgtggaaataacaactgctgccggtgcttctgcgtggaatgcgtggacctgctggtgggccccggcgccgcccaggccgctattaaggaagatccttggaactgctacatgtgcggccacaagggcacatacggcctgctgagacggagagaggactggcctagcagactgcagatgttcttcgccaataaccacgaccaggagttcgacccccctaaggtgtaccctcccgtccccgccgagaagagaaagcccatccgggtcctgagcctgttcgatggcatcgccaccggtctgctggtgctgaaggacctgggcatccaggtggataggtacattgcctccgaggtgtgcgaggactccatcaccgtgggaatggtgcgtcatcagggcaagatcatgtacgtgggcgacgtgcggagcgtgacacagaagcatatccaggagtggggccctttcgacctggtgatcggcggcagcccttgcaatgacctgagcatcgtgaacccagcccggaagggcctgtacgagggaaccggcagactgttcttcgagttttacagactgctgcacgacgcccggcctaaggaaggcgacgaccggcccttcttttggctgttcgagaatgtggtggccatgggagtcagcgacaagcgggatattagccggttcctggagagcaaccccgtgatgatcgatgccaaggaagtgagcgccgcccaccgggccagatacttctggggcaatctgcctggcatgaacagacccctggccagcaccgtgaacgacaagctggagctgcaggagtgcctggagcacggccggatcgccaagttcagcaaggtgagaaccatcaccacccgaagcaacagcatcaaacaaggcaaggaccagcactttcctgtgttcatgaacgagaaggaggacatcctgtggtgtaccgagatggagagagtgttcgggttcccagtccactacacagatgtcagcaacatgtctagactggccagacagagactgctgggaagaagctggtccgtccctgtgatcagacacctgttcgcccctctgaaggagtacttcgcctgcgtgagcagcggcaacagcaacgccaacagccggggccccagcttctctagcggcctggtgccactgtccctgagagggagccacatgggccccatggagatctacaaaaccgtgagcgcctggaagcggcagcctgtgcgcgtgctgagcctgtttcggaatatcgataaagtcctgaaaagcctgggattcctggagagcggctctggctccggcggtggcaccctgaagtacgtggaggatgtgacaaacgtggtcagacgggatgtggagaagtggggccccttcgatctggtgtacggcagcacccaacccctgggcagctcttgtgaccggtgccctggctggtacatgtttcagttccaccggatcctgcagtacgccctgccgagacaggagtcccagcggccattcttttggattttcatggacaacttgctgctgaccgaggatgaccaggaaactaccactcggttcctgcagaccgaagccgtgaccctgcaggacgtgagaggccgggactaccagaacgccatgcgggtgtggtccaacatccctggactgaaaagcaagcacgcacctctgacccctaaagaagaggagtacctgcaggcccaggtgcggagcagaagcaagctggacgcccctaaggtggatctgctggtgaagaattgcctcctgcccctgagagagtacttcaagtatttcagccagaatagtctgcccctgggcggcccaagcagcggcgcccctcctcccagcggcggcagcccagccggctccccaacctctaccgaggagggcacctctgagtccgccacccccgagagcggccctggcacctccaccgagcccagcgagggcagcgcacccggcagccctgccggcagccccacctccacagaggagggaaccagcaccgagcccagcgaaggcagcgccccaggcaccagcaccgagcctagtgagggcggctctggcggcggcagcgcccaggagattaaacggatcaacaagatcagaagaagacttgtgaaagacagcaacaccaagaaggccggcaagacaggccccatgaaaaccctgctggttagagtgatgacacccgatctgagagagcggctggaaaacctgagaaagaagcctgaaaatatcccccagcccatcagcaatacatctagagccaacctgaataagctgctgaccgattacaccgaaatgaagaaggcgatcctgcatgtgtactgggaagagttccagaaggaccctgtgggcctgatgagccgggtggcccagcctgccagcaagaagatcgatcagaacaagctgaaacctgagatggacgagaagggcaacctgaccaccgccggctttgcctgctctcagtgtggccagcccctgttcgtgtacaagctggagcaggtgtctgagaagggcaaggcttacaccaactacttcggacggtgcaatgtggccgagcacgaaaagctgatcctgctggcccagctgaagcccgagaaggatagcgacgaagccgtgacatatagcctgggaaagtttgggcagagggccctggatttctacagcattcatgtgaccaaggagtccacccaccccgtgaagcccctggcccagatcgccggaaacagatacgcctccggacctgtgggaaaggccctgagcgacgcatgtatgggcacaatcgcctccttcctgtctaagtaccaggacatcatcatcgaacaccagaaggtggtgaagggcaaccagaagagactggagagcctgcgggagctggccggcaaggaaaacctggaataccctagcgtgaccctgccacctcagcctcacaccaaggagggcgttgatgcctacaacgaagtgatcgcccgggtgcgaatgtgggtgaacctgaacctgtggcagaagctgaagctaagcagagatgatgccaagcctctgctgagactgaagggattcccttcctttcctctggtcgagagacaggccaacgaagtggactggtgggacatggtgtgtaacgtgaagaagctgatcaacgagaaaaaggaggatggcaaggtgttttggcagaatctggctggctacaagagacaggaagccctgagaccatacctgagcagcgaggaagatcggaagaagggaaagaaattcgctcggtaccagctgggcgacctgctgctgcacctggaaaagaagcacggcgaggactggggaaaggtgtacgacgaggcctgggagcggattgacaagaaagtggaaggcctgagcaagcacatcaagctggaagaggaacggagaagcgaggacgcccagagcaaggccgccctgaccgactggctgcgggctaaggccagcttcgtgatcgagggcctgaaggaggccgacaaggacgagttctgcagatgcgagctgaagctgcagaagtggtacggggacctgcggggaaagcccttcgccatcgaagccgagaacagcatcctggacatcagcggcttcagcaagcagtacaactgtgccttcatctggcagaaggacggcgtgaagaagctgaacctgtacctgatcatcaactacttcaagggcggcaagctgcggttcaagaagatcaaacctgaagccttcgaagccaacagattctacaccgtgatcaacaaaaagagcggcgagatcgtgcccatggaggtgaacttcaacttcgacgaccccaacctgatcatcctgcctctggcctttggcaagagacagggcagagaattcatctggaacgacctgctgtccctggaaaccggcagcctgaagctggccaacggaagagtgatcgagaagacactgtacaacagaagaacccggcaggatgagcctgccctgttcgtggccctgaccttcgagcggcgggaggtcctggactcctccaatatcaaaccaatgaacctgatcggcgtggcaagaggcgaaaacatccccgccgtgatcgccctgaccgaccccgagggctgcccactgagccggtttaaggatagcctgggaaacccaacccacatcctgagaatcggcgagagctataaggagaagcagcggaccatccaggccaagaaggaggtggagcagcggagagccggcggctacagccggaagtacgccagcaaagccaagaatctggcagacgatatggtgagaaacaccgctagagatctgctgtactacgccgtgacccaggatgccatgctgatcttcgccaacctgagccggggcttcggccggcagggcaagcggaccttcatggccgagagacagtacacacggatggaggactggctgaccgccaagctggcctacgagggcctgagcaagacctacctgtccaagacactggcccagtacacctccaagacatgcagcaactgtgggtttaccatcaccagcgccgactacgacagggtgctggagaagctgaagaagacagcaacaggctggatgaccacaattaacggcaaggagctgaaggtggagggccagattacctactacaacagatacaagagacagaacgtagtcaaggacctgtccgtcgagctggatagactgagcgaagaatctgtgaacaacgacatctcctcctggacaaagggcagaagcggagaagctctgagcctcctgaagaaaagattctcccatagacccgtgcaggagaagttcgtgtgcctgaactgcggcttcgagacacacgcagccgagcaagccgccctgaacatcgccagatcctggctgttcctgcggagccaggagtacaagaaataccagacaaacaagacaaccggcaacaccgataagagagccttcgtcgagacctggcagtccttttaccggaagaagcttaaggaggtgtggaaacctgccgtgcggtctggcggatctggcggaggctccacaagcaagcccggcgccgtgagcttcgccgacgtggccgtgtacttcagccccgaggagtggggctgcctgaggcccgcccagagggccctgtacagggacgtgatgagggagacctacggccacctgggcgccctgggcctgcccggccccaagcccgccctgatcagctggatggagggcgagagcgaggcctggaaccccgccgcccaggaccccgaggagggcgagaacctgggcggcgccctgaccagccccaagaaaaagagaaaagtctaagctgccttctgcggggcttgccttctggccatgcccttcttctctcccttgcacctgtacctcttggtctttgaataaagcctgagtaggaaggctagcaaaaaaaaaaaaaaaaaaaaaaaaaaaaaaaaaaaaaaaaaaaaaaaaaaaaaaaaaaaaaaaaaaaaaaaaaaaaaaaa

SEQ ID NO: 5749 - RNA, 5797 nt, synthetic construct
  source 1..5797: mol_type = other RNA
aggaaataagagagaaaagaagagtaagaagaaatataagagccaccatggcccctaagaagaagcgtaaagtgagccggatggaacgcctcgtctacgaggtgcggcagaagtgcagaaacatcgaggacatctgcatctcctgcggatctctgaacgtgaccctggagcacccactgttcatcggcggcatgtgccagaactgtaaaaactgttttctggagtgtgcctatcaatacgacgatgacggctaccagagctactgcaccatctgttgcggcggaagagaggtgctgatgtgtggaaataacaactgctgccggtgcttctgcgtggaatgcgtggacctgctggtgggccccggcgccgcccaggccgctattaaggaagatccttggaactgctacatgtgcggccacaagggcacatacggcctgctgagacggagagaggactggcctagcagactgcagatgttcttcgccaataaccacgaccaggagttcgacccccctaaggtgtaccctcccgtccccgccgagaagagaaagcccatccgggtcctgagcctgttcgatggcatcgccaccggtctgctggtgctgaaggacctgggcatccaggtggataggtacattgcctccgaggtgtgcgaggactccatcaccgtgggaatggtgcgtcatcagggcaagatcatgtacgtgggcgacgtgcggagcgtgacacagaagcatatccaggagtggggccctttcgacctggtgatcggcggcagcccttgcaatgacctgagcatcgtgaacccagcccggaagggcctgtacgagggaaccggcagactgttcttcgagttttacagactgctgcacgacgcccggcctaaggaaggcgacgaccggcccttcttttggctgttcgagaatgtggtggccatgggagtcagcgacaagcgggatattagccggttcctggagagcaaccccgtgatgatcgatgccaaggaagtgagcgccgcccaccgggccagatacttctggggcaatctgcctggcatgaacagacccctggccagcaccgtgaacgacaagctggagctgcaggagtgcctggagcacggccggatcgccaagttcagcaaggtgagaaccatcaccacccgaagcaacagcatcaaacaaggcaaggaccagcactttcctgtgttcatgaacgagaaggaggacatcctgtggtgtaccgagatggagagagtgttcgggttcccagtccactacacagatgtcagcaacatgtctagactggccagacagagactgctgggaagaagctggtccgtccctgtgatcagacacctgttcgcccctctgaaggagtacttcgcctgcgtgagcagcggcaacagcaacgccaacagccggggccccagcttctctagcggcctggtgccactgtccctgagagggagccacatgggccccatggagatctacaaaaccgtgagcgcctggaagcggcagcctgtgcgcgtgctgagcctgtttcggaatatcgataaagtcctgaaaagcctgggattcctggagagcggctctggctccggcggtggcaccctgaagtacgtggaggatgtgacaaacgtggtcagacgggatgtggagaagtggggccccttcgatctggtgtacggcagcacccaacccctgggcagctcttgtgaccggtgccctggctggtacatgtttcagttccaccggatcctgcagtacgccctgccgagacaggagtcccagcggccattcttttggattttcatggacaacttgctgctgaccgaggatgaccaggaaactaccactcggttcctgcagaccgaagccgtgaccctgcaggacgtgagaggccgggactaccagaacgccatgcgggtgtggtccaacatccctggactgaaaagcaagcacgcacctctgacccctaaagaagaggagtacctgcaggcccaggtgcggagcagaagcaagctggacgcccctaaggtggatctgctggtgaagaattgcctcctgcccctgagagagtacttcaagtatttcagccagaatagtctgcccctgggcggcccaagcagcggcgcccctcctcccagcggcggcagcccagccggctccccaacctctaccgaggagggcacctctgagtccgccacccccgagagcggccctggcacctccaccgagcccagcgagggcagcgcacccggcagccctgccggcagccccacctccacagaggagggaaccagcaccgagcccagcgaaggcagcgccccaggcaccagcaccgagcctagtgagggcggctctggcggcggcagcgcccaggagattaaacggatcaacaagatcagaagaagacttgtgaaagacagcaacaccaagaaggccggcaagacaggccccatgaaaaccctgctggttagagtgatgacacccgatctgagagagcggctggaaaacctgagaaagaagcctgaaaatatcccccagcccatcagcaatacatctagagccaacctgaataagctgctgaccgattacaccgaaatgaagaaggcgatcctgcatgtgtactgggaagagttccagaaggaccctgtgggcctgatgagccgggtggcccagcctgccagcaagaagatcgatcagaacaagctgaaacctgagatggacgagaagggcaacctgaccaccgccggctttgcctgctctcagtgtggccagcccctgttcgtgtacaagctggagcaggtgtctgagaagggcaaggcttacaccaactacttcggacggtgcaatgtggccgagcacgaaaagctgatcctgctggcccagctgaagcccgagaaggatagcgacgaagccgtgacatatagcctgggaaagtttgggcagagggccctggatttctacagcattcatgtgaccaaggagtccacccaccccgtgaagcccctggcccagatcgccggaaacagatacgcctccggacctgtgggaaaggccctgagcgacgcatgtatgggcacaatcgcctccttcctgtctaagtaccaggacatcatcatcgaacaccagaaggtggtgaagggcaaccagaagagactggagagcctgcgggagctggccggcaaggaaaacctggaataccctagcgtgaccctgccacctcagcctcacaccaaggagggcgttgatgcctacaacgaagtgatcgcccgggtgcgaatgtgggtgaacctgaacctgtggcagaagctgaagctaagcagagatgatgccaagcctctgctgagactgaagggattcccttcctttcctctggtcgagagacaggccaacgaagtggactggtgggacatggtgtgtaacgtgaagaagctgatcaacgagaaaaaggaggatggcaaggtgttttggcagaatctggctggctacaagagacaggaagccctgagaccatacctgagcagcgaggaagatcggaagaagggaaagaaattcgctcggtaccagctgggcgacctgctgctgcacctggaaaagaagcacggcgaggactggggaaaggtgtacgacgaggcctgggagcggattgacaagaaagtggaaggcctgagcaagcacatcaagctggaagaggaacggagaagcgaggacgcccagagcaaggccgccctgaccgactggctgcgggctaaggccagcttcgtgatcgagggcctgaaggaggccgacaaggacgagttctgcagatgcgagctgaagctgcagaagtggtacggggacctgcggggaaagcccttcgccatcgaagccgagaacagcatcctggacatcagcggcttcagcaagcagtacaactgtgccttcatctggcagaaggacggcgtgaagaagctgaacctgtacctgatcatcaactacttcaagggcggcaagctgcggttcaagaagatcaaacctgaagccttcgaagccaacagattctacaccgtgatcaacaaaaagagcggcgagatcgtgcccatggaggtgaacttcaacttcgacgaccccaacctgatcatcctgcctctggcctttggcaagagacagggcagagaattcatctggaacgacctgctgtccctggaaaccggcagcctgaagctggccaacggaagagtgatcgagaagacactgtacaacagaagaacccggcaggatgagcctgccctgttcgtggccctgaccttcgagcggcgggaggtcctggactcctccaatatcaaaccaatgaacctgatcggcgtggcaagaggcgaaaacatccccgccgtgatcgccctgaccgaccccgagggctgcccactgagccggtttaaggatagcctgggaaacccaacccacatcctgagaatcggcgagagctataaggagaagcagcggaccatccaggccaagaaggaggtggagcagcggagagccggcggctacagccggaagtacgccagcaaagccaagaatctggcagacgatatggtgagaaacaccgctagagatctgctgtactacgccgtgacccaggatgccatgctgatcttcgccaacctgagccggggcttcggccggcagggcaagcggaccttcatggccgagagacagtacacacggatggaggactggctgaccgccaagctggcctacgagggcctgagcaagacctacctgtccaagacactggcccagtacacctccaagacatgcagcaactgtgggtttaccatcaccagcgccgactacgacagggtgctggagaagctgaagaagacagcaacaggctggatgaccacaattaacggcaaggagctgaaggtggagggccagattacctactacaacagatacaagagacagaacgtagtcaaggacctgtccgtcgagctggatagactgagcgaagaatctgtgaacaacgacatctcctcctggacaaagggcagaagcggagaagctctgagcctcctgaagaaaagattctcccatagacccgtgcaggagaagttcgtgtgcctgaactgcggcttcgagacacacgcagccgagcaagccgccctgaacatcgccagatcctggctgttcctgcggagccaggagtacaagaaataccagacaaacaagacaaccggcaacaccgataagagagccttcgtcgagacctggcagtccttttaccggaagaagcttaaggaggtgtggaaacctgccgtgcggtctggcggatctggcggaggctccacaagcttccagaggagcgtgctgttcagcgacgtgagcatcgacttcagccccgaggagtgggagtacctggacctggagcagaaggacctgtacagggacgtgatgctggagaactacagcaacctggtgagcctgggctgcttcatcagcaagcccgacgtgatcagcctgctggagcagggcaaggagccctggaaggtggtgaggaagggcaggaggcagtaccccgacctggagaccaagtacaccagccccaagaaaaagagaaaagtctaagctgccttctgcggggcttgccttctggccatgcccttcttctctcccttgcacctgtacctcttggtctttgaataaagcctgagtaggaaggctagcaaaaaaaaaaaaaaaaaaaaaaaaaaaaaaaaaaaaaaaaaaaaaaaaaaaaaaaaaaaaaaaaaaaaaaaaaaaaaaaa

SEQ ID NO: 5750 - RNA, 5797 nt, synthetic construct
  source 1..5797: mol_type = other RNA
aggaaataagagagaaaagaagagtaagaagaaatataagagccaccatggcccctaagaagaagcgtaaagtgagccggatggaacgcctcgtctacgaggtgcggcagaagtgcagaaacatcgaggacatctgcatctcctgcggatctctgaacgtgaccctggagcacccactgttcatcggcggcatgtgccagaactgtaaaaactgttttctggagtgtgcctatcaatacgacgatgacggctaccagagctactgcaccatctgttgcggcggaagagaggtgctgatgtgtggaaataacaactgctgccggtgcttctgcgtggaatgcgtggacctgctggtgggccccggcgccgcccaggccgctattaaggaagatccttggaactgctacatgtgcggccacaagggcacatacggcctgctgagacggagagaggactggcctagcagactgcagatgttcttcgccaataaccacgaccaggagttcgacccccctaaggtgtaccctcccgtccccgccgagaagagaaagcccatccgggtcctgagcctgttcgatggcatcgccaccggtctgctggtgctgaaggacctgggcatccaggtggataggtacattgcctccgaggtgtgcgaggactccatcaccgtgggaatggtgcgtcatcagggcaagatcatgtacgtgggcgacgtgcggagcgtgacacagaagcatatccaggagtggggccctttcgacctggtgatcggcggcagcccttgcaatgacctgagcatcgtgaacccagcccggaagggcctgtacgagggaaccggcagactgttcttcgagttttacagactgctgcacgacgcccggcctaaggaaggcgacgaccggcccttcttttggctgttcgagaatgtggtggccatgggagtcagcgacaagcgggatattagccggttcctggagagcaaccccgtgatgatcgatgccaaggaagtgagcgccgcccaccgggccagatacttctggggcaatctgcctggcatgaacagacccctggccagcaccgtgaacgacaagctggagctgcaggagtgcctggagcacggccggatcgccaagttcagcaaggtgagaaccatcaccacccgaagcaacagcatcaaacaaggcaaggaccagcactttcctgtgttcatgaacgagaaggaggacatcctgtggtgtaccgagatggagagagtgttcgggttcccagtccactacacagatgtcagcaacatgtctagactggccagacagagactgctgggaagaagctggtccgtccctgtgatcagacacctgttcgcccctctgaaggagtacttcgcctgcgtgagcagcggcaacagcaacgccaacagccggggccccagcttctctagcggcctggtgccactgtccctgagagggagccacatgggccccatggagatctacaaaaccgtgagcgcctggaagcggcagcctgtgcgcgtgctgagcctgtttcggaatatcgataaagtcctgaaaagcctgggattcctggagagcggctctggctccggcggtggcaccctgaagtacgtggaggatgtgacaaacgtggtcagacgggatgtggagaagtggggccccttcgatctggtgtacggcagcacccaacccctgggcagctcttgtgaccggtgccctggctggtacatgtttcagttccaccggatcctgcagtacgccctgccgagacaggagtcccagcggccattcttttggattttcatggacaacttgctgctgaccgaggatgaccaggaaactaccactcggttcctgcagaccgaagccgtgaccctgcaggacgtgagaggccgggactaccagaacgccatgcgggtgtggtccaacatccctggactgaaaagcaagcacgcacctctgacccctaaagaagaggagtacctgcaggcccaggtgcggagcagaagcaagctggacgcccctaaggtggatctgctggtgaagaattgcctcctgcccctgagagagtacttcaagtatttcagccagaatagtctgcccctgggcggcccaagcagcggcgcccctcctcccagcggcggcagcccagccggctccccaacctctaccgaggagggcacctctgagtccgccacccccgagagcggccctggcacctccaccgagcccagcgagggcagcgcacccggcagccctgccggcagccccacctccacagaggagggaaccagcaccgagcccagcgaaggcagcgccccaggcaccagcaccgagcctagtgagggcggctctggcggcggcagcgcccaggagattaaacggatcaacaagatcagaagaagacttgtgaaagacagcaacaccaagaaggccggcaagacaggccccatgaaaaccctgctggttagagtgatgacacccgatctgagagagcggctggaaaacctgagaaagaagcctgaaaatatcccccagcccatcagcaatacatctagagccaacctgaataagctgctgaccgattacaccgaaatgaagaaggcgatcctgcatgtgtactgggaagagttccagaaggaccctgtgggcctgatgagccgggtggcccagcctgccagcaagaagatcgatcagaacaagctgaaacctgagatggacgagaagggcaacctgaccaccgccggctttgcctgctctcagtgtggccagcccctgttcgtgtacaagctggagcaggtgtctgagaagggcaaggcttacaccaactacttcggacggtgcaatgtggccgagcacgaaaagctgatcctgctggcccagctgaagcccgagaaggatagcgacgaagccgtgacatatagcctgggaaagtttgggcagagggccctggatttctacagcattcatgtgaccaaggagtccacccaccccgtgaagcccctggcccagatcgccggaaacagatacgcctccggacctgtgggaaaggccctgagcgacgcatgtatgggcacaatcgcctccttcctgtctaagtaccaggacatcatcatcgaacaccagaaggtggtgaagggcaaccagaagagactggagagcctgcgggagctggccggcaaggaaaacctggaataccctagcgtgaccctgccacctcagcctcacaccaaggagggcgttgatgcctacaacgaagtgatcgcccgggtgcgaatgtgggtgaacctgaacctgtggcagaagctgaagctaagcagagatgatgccaagcctctgctgagactgaagggattcccttcctttcctctggtcgagagacaggccaacgaagtggactggtgggacatggtgtgtaacgtgaagaagctgatcaacgagaaaaaggaggatggcaaggtgttttggcagaatctggctggctacaagagacaggaagccctgagaccatacctgagcagcgaggaagatcggaagaagggaaagaaattcgctcggtaccagctgggcgacctgctgctgcacctggaaaagaagcacggcgaggactggggaaaggtgtacgacgaggcctgggagcggattgacaagaaagtggaaggcctgagcaagcacatcaagctggaagaggaacggagaagcgaggacgcccagagcaaggccgccctgaccgactggctgcgggctaaggccagcttcgtgatcgagggcctgaaggaggccgacaaggacgagttctgcagatgcgagctgaagctgcagaagtggtacggggacctgcggggaaagcccttcgccatcgaagccgagaacagcatcctggacatcagcggcttcagcaagcagtacaactgtgccttcatctggcagaaggacggcgtgaagaagctgaacctgtacctgatcatcaactacttcaagggcggcaagctgcggttcaagaagatcaaacctgaagccttcgaagccaacagattctacaccgtgatcaacaaaaagagcggcgagatcgtgcccatggaggtgaacttcaacttcgacgaccccaacctgatcatcctgcctctggcctttggcaagagacagggcagagaattcatctggaacgacctgctgtccctggaaaccggcagcctgaagctggccaacggaagagtgatcgagaagacactgtacaacagaagaacccggcaggatgagcctgccctgttcgtggccctgaccttcgagcggcgggaggtcctggactcctccaatatcaaaccaatgaacctgatcggcgtggcaagaggcgaaaacatccccgccgtgatcgccctgaccgaccccgagggctgcccactgagccggtttaaggatagcctgggaaacccaacccacatcctgagaatcggcgagagctataaggagaagcagcggaccatccaggccaagaaggaggtggagcagcggagagccggcggctacagccggaagtacgccagcaaagccaagaatctggcagacgatatggtgagaaacaccgctagagatctgctgtactacgccgtgacccaggatgccatgctgatcttcgccaacctgagccggggcttcggccggcagggcaagcggaccttcatggccgagagacagtacacacggatggaggactggctgaccgccaagctggcctacgagggcctgagcaagacctacctgtccaagacactggcccagtacacctccaagacatgcagcaactgtgggtttaccatcaccagcgccgactacgacagggtgctggagaagctgaagaagacagcaacaggctggatgaccacaattaacggcaaggagctgaaggtggagggccagattacctactacaacagatacaagagacagaacgtagtcaaggacctgtccgtcgagctggatagactgagcgaagaatctgtgaacaacgacatctcctcctggacaaagggcagaagcggagaagctctgagcctcctgaagaaaagattctcccatagacccgtgcaggagaagttcgtgtgcctgaactgcggcttcgagacacacgcagccgagcaagccgccctgaacatcgccagatcctggctgttcctgcggagccaggagtacaagaaataccagacaaacaagacaaccggcaacaccgataagagagccttcgtcgagacctggcagtccttttaccggaagaagcttaaggaggtgtggaaacctgccgtgcggtctggcggatctggcggaggctccacaagcatggccttcgaggacgtggccgtgtacttcagccaggaggagtggggcctgctggacaccgcccagagggccctgtacaggagggtgatgctggacaacttcgccctggtggccagcctgggcctgagcaccagcaggcccagggtggtgatccagctggagaggggcgaggagccctgggtgcccagcggcaccgacaccatcctgagcaggaacacctacaggaggaggaaccccggcagcaccagccccaagaaaaagagaaaagtctaagctgccttctgcggggcttgccttctggccatgcccttcttctctcccttgcacctgtacctcttggtctttgaataaagcctgagtaggaaggctagcaaaaaaaaaaaaaaaaaaaaaaaaaaaaaaaaaaaaaaaaaaaaaaaaaaaaaaaaaaaaaaaaaaaaaaaaaaaaaaaa

SEQ ID NO: 5751 - RNA, 5797 nt, synthetic construct
  source 1..5797: mol_type = other RNA
aggaaataagagagaaaagaagagtaagaagaaatataagagccaccatggcccctaagaagaagcgtaaagtgagccggatggaacgcctcgtctacgaggtgcggcagaagtgcagaaacatcgaggacatctgcatctcctgcggatctctgaacgtgaccctggagcacccactgttcatcggcggcatgtgccagaactgtaaaaactgttttctggagtgtgcctatcaatacgacgatgacggctaccagagctactgcaccatctgttgcggcggaagagaggtgctgatgtgtggaaataacaactgctgccggtgcttctgcgtggaatgcgtggacctgctggtgggccccggcgccgcccaggccgctattaaggaagatccttggaactgctacatgtgcggccacaagggcacatacggcctgctgagacggagagaggactggcctagcagactgcagatgttcttcgccaataaccacgaccaggagttcgacccccctaaggtgtaccctcccgtccccgccgagaagagaaagcccatccgggtcctgagcctgttcgatggcatcgccaccggtctgctggtgctgaaggacctgggcatccaggtggataggtacattgcctccgaggtgtgcgaggactccatcaccgtgggaatggtgcgtcatcagggcaagatcatgtacgtgggcgacgtgcggagcgtgacacagaagcatatccaggagtggggccctttcgacctggtgatcggcggcagcccttgcaatgacctgagcatcgtgaacccagcccggaagggcctgtacgagggaaccggcagactgttcttcgagttttacagactgctgcacgacgcccggcctaaggaaggcgacgaccggcccttcttttggctgttcgagaatgtggtggccatgggagtcagcgacaagcgggatattagccggttcctggagagcaaccccgtgatgatcgatgccaaggaagtgagcgccgcccaccgggccagatacttctggggcaatctgcctggcatgaacagacccctggccagcaccgtgaacgacaagctggagctgcaggagtgcctggagcacggccggatcgccaagttcagcaaggtgagaaccatcaccacccgaagcaacagcatcaaacaaggcaaggaccagcactttcctgtgttcatgaacgagaaggaggacatcctgtggtgtaccgagatggagagagtgttcgggttcccagtccactacacagatgtcagcaacatgtctagactggccagacagagactgctgggaagaagctggtccgtccctgtgatcagacacctgttcgcccctctgaaggagtacttcgcctgcgtgagcagcggcaacagcaacgccaacagccggggccccagcttctctagcggcctggtgccactgtccctgagagggagccacatgggccccatggagatctacaaaaccgtgagcgcctggaagcggcagcctgtgcgcgtgctgagcctgtttcggaatatcgataaagtcctgaaaagcctgggattcctggagagcggctctggctccggcggtggcaccctgaagtacgtggaggatgtgacaaacgtggtcagacgggatgtggagaagtggggccccttcgatctggtgtacggcagcacccaacccctgggcagctcttgtgaccggtgccctggctggtacatgtttcagttccaccggatcctgcagtacgccctgccgagacaggagtcccagcggccattcttttggattttcatggacaacttgctgctgaccgaggatgaccaggaaactaccactcggttcctgcagaccgaagccgtgaccctgcaggacgtgagaggccgggactaccagaacgccatgcgggtgtggtccaacatccctggactgaaaagcaagcacgcacctctgacccctaaagaagaggagtacctgcaggcccaggtgcggagcagaagcaagctggacgcccctaaggtggatctgctggtgaagaattgcctcctgcccctgagagagtacttcaagtatttcagccagaatagtctgcccctgggcggcccaagcagcggcgcccctcctcccagcggcggcagcccagccggctccccaacctctaccgaggagggcacctctgagtccgccacccccgagagcggccctggcacctccaccgagcccagcgagggcagcgcacccggcagccctgccggcagccccacctccacagaggagggaaccagcaccgagcccagcgaaggcagcgccccaggcaccagcaccgagcctagtgagggcggctctggcggcggcagcgcccaggagattaaacggatcaacaagatcagaagaagacttgtgaaagacagcaacaccaagaaggccggcaagacaggccccatgaaaaccctgctggttagagtgatgacacccgatctgagagagcggctggaaaacctgagaaagaagcctgaaaatatcccccagcccatcagcaatacatctagagccaacctgaataagctgctgaccgattacaccgaaatgaagaaggcgatcctgcatgtgtactgggaagagttccagaaggaccctgtgggcctgatgagccgggtggcccagcctgccagcaagaagatcgatcagaacaagctgaaacctgagatggacgagaagggcaacctgaccaccgccggctttgcctgctctcagtgtggccagcccctgttcgtgtacaagctggagcaggtgtctgagaagggcaaggcttacaccaactacttcggacggtgcaatgtggccgagcacgaaaagctgatcctgctggcccagctgaagcccgagaaggatagcgacgaagccgtgacatatagcctgggaaagtttgggcagagggccctggatttctacagcattcatgtgaccaaggagtccacccaccccgtgaagcccctggcccagatcgccggaaacagatacgcctccggacctgtgggaaaggccctgagcgacgcatgtatgggcacaatcgcctccttcctgtctaagtaccaggacatcatcatcgaacaccagaaggtggtgaagggcaaccagaagagactggagagcctgcgggagctggccggcaaggaaaacctggaataccctagcgtgaccctgccacctcagcctcacaccaaggagggcgttgatgcctacaacgaagtgatcgcccgggtgcgaatgtgggtgaacctgaacctgtggcagaagctgaagctaagcagagatgatgccaagcctctgctgagactgaagggattcccttcctttcctctggtcgagagacaggccaacgaagtggactggtgggacatggtgtgtaacgtgaagaagctgatcaacgagaaaaaggaggatggcaaggtgttttggcagaatctggctggctacaagagacaggaagccctgagaccatacctgagcagcgaggaagatcggaagaagggaaagaaattcgctcggtaccagctgggcgacctgctgctgcacctggaaaagaagcacggcgaggactggggaaaggtgtacgacgaggcctgggagcggattgacaagaaagtggaaggcctgagcaagcacatcaagctggaagaggaacggagaagcgaggacgcccagagcaaggccgccctgaccgactggctgcgggctaaggccagcttcgtgatcgagggcctgaaggaggccgacaaggacgagttctgcagatgcgagctgaagctgcagaagtggtacggggacctgcggggaaagcccttcgccatcgaagccgagaacagcatcctggacatcagcggcttcagcaagcagtacaactgtgccttcatctggcagaaggacggcgtgaagaagctgaacctgtacctgatcatcaactacttcaagggcggcaagctgcggttcaagaagatcaaacctgaagccttcgaagccaacagattctacaccgtgatcaacaaaaagagcggcgagatcgtgcccatggaggtgaacttcaacttcgacgaccccaacctgatcatcctgcctctggcctttggcaagagacagggcagagaattcatctggaacgacctgctgtccctggaaaccggcagcctgaagctggccaacggaagagtgatcgagaagacactgtacaacagaagaacccggcaggatgagcctgccctgttcgtggccctgaccttcgagcggcgggaggtcctggactcctccaatatcaaaccaatgaacctgatcggcgtggcaagaggcgaaaacatccccgccgtgatcgccctgaccgaccccgagggctgcccactgagccggtttaaggatagcctgggaaacccaacccacatcctgagaatcggcgagagctataaggagaagcagcggaccatccaggccaagaaggaggtggagcagcggagagccggcggctacagccggaagtacgccagcaaagccaagaatctggcagacgatatggtgagaaacaccgctagagatctgctgtactacgccgtgacccaggatgccatgctgatcttcgccaacctgagccggggcttcggccggcagggcaagcggaccttcatggccgagagacagtacacacggatggaggactggctgaccgccaagctggcctacgagggcctgagcaagacctacctgtccaagacactggcccagtacacctccaagacatgcagcaactgtgggtttaccatcaccagcgccgactacgacagggtgctggagaagctgaagaagacagcaacaggctggatgaccacaattaacggcaaggagctgaaggtggagggccagattacctactacaacagatacaagagacagaacgtagtcaaggacctgtccgtcgagctggatagactgagcgaagaatctgtgaacaacgacatctcctcctggacaaagggcagaagcggagaagctctgagcctcctgaagaaaagattctcccatagacccgtgcaggagaagttcgtgtgcctgaactgcggcttcgagacacacgcagccgagcaagccgccctgaacatcgccagatcctggctgttcctgcggagccaggagtacaagaaataccagacaaacaagacaaccggcaacaccgataagagagccttcgtcgagacctggcagtccttttaccggaagaagcttaaggaggtgtggaaacctgccgtgcggtctggcggatctggcggaggctccacaagcgtgcaggagcccgtgaccttcaaggacgtggccgtggacttcacccaggaggagtggggccagctggacctggtgcagaggaccctgtacagggacgtgatgctggagacctacggccacctgctgagcgtgggcaaccagatcgccaagcccgaggtgatcagcctgctggagcagggcgaggagccctggagcatggagcaggcctgcccccagaggacctgccccgagtggatgaggaacaccagccccaagaaaaagagaaaagtctaagctgccttctgcggggcttgccttctggccatgcccttcttctctcccttgcacctgtacctcttggtctttgaataaagcctgagtaggaaggctagcaaaaaaaaaaaaaaaaaaaaaaaaaaaaaaaaaaaaaaaaaaaaaaaaaaaaaaaaaaaaaaaaaaaaaaaaaaaaaaaa

SEQ ID NO: 5752 - RNA, 5797 nt, synthetic construct
  source 1..5797: mol_type = other RNA
aggaaataagagagaaaagaagagtaagaagaaatataagagccaccatggcccctaagaagaagcgtaaagtgagccggatggaacgcctcgtctacgaggtgcggcagaagtgcagaaacatcgaggacatctgcatctcctgcggatctctgaacgtgaccctggagcacccactgttcatcggcggcatgtgccagaactgtaaaaactgttttctggagtgtgcctatcaatacgacgatgacggctaccagagctactgcaccatctgttgcggcggaagagaggtgctgatgtgtggaaataacaactgctgccggtgcttctgcgtggaatgcgtggacctgctggtgggccccggcgccgcccaggccgctattaaggaagatccttggaactgctacatgtgcggccacaagggcacatacggcctgctgagacggagagaggactggcctagcagactgcagatgttcttcgccaataaccacgaccaggagttcgacccccctaaggtgtaccctcccgtccccgccgagaagagaaagcccatccgggtcctgagcctgttcgatggcatcgccaccggtctgctggtgctgaaggacctgggcatccaggtggataggtacattgcctccgaggtgtgcgaggactccatcaccgtgggaatggtgcgtcatcagggcaagatcatgtacgtgggcgacgtgcggagcgtgacacagaagcatatccaggagtggggccctttcgacctggtgatcggcggcagcccttgcaatgacctgagcatcgtgaacccagcccggaagggcctgtacgagggaaccggcagactgttcttcgagttttacagactgctgcacgacgcccggcctaaggaaggcgacgaccggcccttcttttggctgttcgagaatgtggtggccatgggagtcagcgacaagcgggatattagccggttcctggagagcaaccccgtgatgatcgatgccaaggaagtgagcgccgcccaccgggccagatacttctggggcaatctgcctggcatgaacagacccctggccagcaccgtgaacgacaagctggagctgcaggagtgcctggagcacggccggatcgccaagttcagcaaggtgagaaccatcaccacccgaagcaacagcatcaaacaaggcaaggaccagcactttcctgtgttcatgaacgagaaggaggacatcctgtggtgtaccgagatggagagagtgttcgggttcccagtccactacacagatgtcagcaacatgtctagactggccagacagagactgctgggaagaagctggtccgtccctgtgatcagacacctgttcgcccctctgaaggagtacttcgcctgcgtgagcagcggcaacagcaacgccaacagccggggccccagcttctctagcggcctggtgccactgtccctgagagggagccacatgggccccatggagatctacaaaaccgtgagcgcctggaagcggcagcctgtgcgcgtgctgagcctgtttcggaatatcgataaagtcctgaaaagcctgggattcctggagagcggctctggctccggcggtggcaccctgaagtacgtggaggatgtgacaaacgtggtcagacgggatgtggagaagtggggccccttcgatctggtgtacggcagcacccaacccctgggcagctcttgtgaccggtgccctggctggtacatgtttcagttccaccggatcctgcagtacgccctgccgagacaggagtcccagcggccattcttttggattttcatggacaacttgctgctgaccgaggatgaccaggaaactaccactcggttcctgcagaccgaagccgtgaccctgcaggacgtgagaggccgggactaccagaacgccatgcgggtgtggtccaacatccctggactgaaaagcaagcacgcacctctgacccctaaagaagaggagtacctgcaggcccaggtgcggagcagaagcaagctggacgcccctaaggtggatctgctggtgaagaattgcctcctgcccctgagagagtacttcaagtatttcagccagaatagtctgcccctgggcggcccaagcagcggcgcccctcctcccagcggcggcagcccagccggctccccaacctctaccgaggagggcacctctgagtccgccacccccgagagcggccctggcacctccaccgagcccagcgagggcagcgcacccggcagccctgccggcagccccacctccacagaggagggaaccagcaccgagcccagcgaaggcagcgccccaggcaccagcaccgagcctagtgagggcggctctggcggcggcagcgcccaggagattaaacggatcaacaagatcagaagaagacttgtgaaagacagcaacaccaagaaggccggcaagacaggccccatgaaaaccctgctggttagagtgatgacacccgatctgagagagcggctggaaaacctgagaaagaagcctgaaaatatcccccagcccatcagcaatacatctagagccaacctgaataagctgctgaccgattacaccgaaatgaagaaggcgatcctgcatgtgtactgggaagagttccagaaggaccctgtgggcctgatgagccgggtggcccagcctgccagcaagaagatcgatcagaacaagctgaaacctgagatggacgagaagggcaacctgaccaccgccggctttgcctgctctcagtgtggccagcccctgttcgtgtacaagctggagcaggtgtctgagaagggcaaggcttacaccaactacttcggacggtgcaatgtggccgagcacgaaaagctgatcctgctggcccagctgaagcccgagaaggatagcgacgaagccgtgacatatagcctgggaaagtttgggcagagggccctggatttctacagcattcatgtgaccaaggagtccacccaccccgtgaagcccctggcccagatcgccggaaacagatacgcctccggacctgtgggaaaggccctgagcgacgcatgtatgggcacaatcgcctccttcctgtctaagtaccaggacatcatcatcgaacaccagaaggtggtgaagggcaaccagaagagactggagagcctgcgggagctggccggcaaggaaaacctggaataccctagcgtgaccctgccacctcagcctcacaccaaggagggcgttgatgcctacaacgaagtgatcgcccgggtgcgaatgtgggtgaacctgaacctgtggcagaagctgaagctaagcagagatgatgccaagcctctgctgagactgaagggattcccttcctttcctctggtcgagagacaggccaacgaagtggactggtgggacatggtgtgtaacgtgaagaagctgatcaacgagaaaaaggaggatggcaaggtgttttggcagaatctggctggctacaagagacaggaagccctgagaccatacctgagcagcgaggaagatcggaagaagggaaagaaattcgctcggtaccagctgggcgacctgctgctgcacctggaaaagaagcacggcgaggactggggaaaggtgtacgacgaggcctgggagcggattgacaagaaagtggaaggcctgagcaagcacatcaagctggaagaggaacggagaagcgaggacgcccagagcaaggccgccctgaccgactggctgcgggctaaggccagcttcgtgatcgagggcctgaaggaggccgacaaggacgagttctgcagatgcgagctgaagctgcagaagtggtacggggacctgcggggaaagcccttcgccatcgaagccgagaacagcatcctggacatcagcggcttcagcaagcagtacaactgtgccttcatctggcagaaggacggcgtgaagaagctgaacctgtacctgatcatcaactacttcaagggcggcaagctgcggttcaagaagatcaaacctgaagccttcgaagccaacagattctacaccgtgatcaacaaaaagagcggcgagatcgtgcccatggaggtgaacttcaacttcgacgaccccaacctgatcatcctgcctctggcctttggcaagagacagggcagagaattcatctggaacgacctgctgtccctggaaaccggcagcctgaagctggccaacggaagagtgatcgagaagacactgtacaacagaagaacccggcaggatgagcctgccctgttcgtggccctgaccttcgagcggcgggaggtcctggactcctccaatatcaaaccaatgaacctgatcggcgtggcaagaggcgaaaacatccccgccgtgatcgccctgaccgaccccgagggctgcccactgagccggtttaaggatagcctgggaaacccaacccacatcctgagaatcggcgagagctataaggagaagcagcggaccatccaggccaagaaggaggtggagcagcggagagccggcggctacagccggaagtacgccagcaaagccaagaatctggcagacgatatggtgagaaacaccgctagagatctgctgtactacgccgtgacccaggatgccatgctgatcttcgccaacctgagccggggcttcggccggcagggcaagcggaccttcatggccgagagacagtacacacggatggaggactggctgaccgccaagctggcctacgagggcctgagcaagacctacctgtccaagacactggcccagtacacctccaagacatgcagcaactgtgggtttaccatcaccagcgccgactacgacagggtgctggagaagctgaagaagacagcaacaggctggatgaccacaattaacggcaaggagctgaaggtggagggccagattacctactacaacagatacaagagacagaacgtagtcaaggacctgtccgtcgagctggatagactgagcgaagaatctgtgaacaacgacatctcctcctggacaaagggcagaagcggagaagctctgagcctcctgaagaaaagattctcccatagacccgtgcaggagaagttcgtgtgcctgaactgcggcttcgagacacacgcagccgagcaagccgccctgaacatcgccagatcctggctgttcctgcggagccaggagtacaagaaataccagacaaacaagacaaccggcaacaccgataagagagccttcgtcgagacctggcagtccttttaccggaagaagcttaaggaggtgtggaaacctgccgtgcggtctggcggatctggcggaggctccacaagcatgagccagggcagcgtgaccttcagggacgtggccatcgacttcagccaggaggagtggaagtggctgcagcccgcccagagggacctgtacaggtgcgtgatgctggagaactacggccacctggtgagcctgggcctgagcatcagcaagcccgacgtggtgagcctgctggagcagggcaaggagccctggctgggcaagaggaacgtgaacagggacctgttcagcgtgagcgagagcaccagccccaagaaaaagagaaaagtctaagctgccttctgcggggcttgccttctggccatgcccttcttctctcccttgcacctgtacctcttggtctttgaataaagcctgagtaggaaggctagcaaaaaaaaaaaaaaaaaaaaaaaaaaaaaaaaaaaaaaaaaaaaaaaaaaaaaaaaaaaaaaaaaaaaaaaaaaaaaaaa

SEQ ID NO: 5753 - RNA, 5797 nt, synthetic construct
  source 1..5797: mol_type = other RNA
aggaaataagagagaaaagaagagtaagaagaaatataagagccaccatggcccctaagaagaagcgtaaagtgagccggatggaacgcctcgtctacgaggtgcggcagaagtgcagaaacatcgaggacatctgcatctcctgcggatctctgaacgtgaccctggagcacccactgttcatcggcggcatgtgccagaactgtaaaaactgttttctggagtgtgcctatcaatacgacgatgacggctaccagagctactgcaccatctgttgcggcggaagagaggtgctgatgtgtggaaataacaactgctgccggtgcttctgcgtggaatgcgtggacctgctggtgggccccggcgccgcccaggccgctattaaggaagatccttggaactgctacatgtgcggccacaagggcacatacggcctgctgagacggagagaggactggcctagcagactgcagatgttcttcgccaataaccacgaccaggagttcgacccccctaaggtgtaccctcccgtccccgccgagaagagaaagcccatccgggtcctgagcctgttcgatggcatcgccaccggtctgctggtgctgaaggacctgggcatccaggtggataggtacattgcctccgaggtgtgcgaggactccatcaccgtgggaatggtgcgtcatcagggcaagatcatgtacgtgggcgacgtgcggagcgtgacacagaagcatatccaggagtggggccctttcgacctggtgatcggcggcagcccttgcaatgacctgagcatcgtgaacccagcccggaagggcctgtacgagggaaccggcagactgttcttcgagttttacagactgctgcacgacgcccggcctaaggaaggcgacgaccggcccttcttttggctgttcgagaatgtggtggccatgggagtcagcgacaagcgggatattagccggttcctggagagcaaccccgtgatgatcgatgccaaggaagtgagcgccgcccaccgggccagatacttctggggcaatctgcctggcatgaacagacccctggccagcaccgtgaacgacaagctggagctgcaggagtgcctggagcacggccggatcgccaagttcagcaaggtgagaaccatcaccacccgaagcaacagcatcaaacaaggcaaggaccagcactttcctgtgttcatgaacgagaaggaggacatcctgtggtgtaccgagatggagagagtgttcgggttcccagtccactacacagatgtcagcaacatgtctagactggccagacagagactgctgggaagaagctggtccgtccctgtgatcagacacctgttcgcccctctgaaggagtacttcgcctgcgtgagcagcggcaacagcaacgccaacagccggggccccagcttctctagcggcctggtgccactgtccctgagagggagccacatgggccccatggagatctacaaaaccgtgagcgcctggaagcggcagcctgtgcgcgtgctgagcctgtttcggaatatcgataaagtcctgaaaagcctgggattcctggagagcggctctggctccggcggtggcaccctgaagtacgtggaggatgtgacaaacgtggtcagacgggatgtggagaagtggggccccttcgatctggtgtacggcagcacccaacccctgggcagctcttgtgaccggtgccctggctggtacatgtttcagttccaccggatcctgcagtacgccctgccgagacaggagtcccagcggccattcttttggattttcatggacaacttgctgctgaccgaggatgaccaggaaactaccactcggttcctgcagaccgaagccgtgaccctgcaggacgtgagaggccgggactaccagaacgccatgcgggtgtggtccaacatccctggactgaaaagcaagcacgcacctctgacccctaaagaagaggagtacctgcaggcccaggtgcggagcagaagcaagctggacgcccctaaggtggatctgctggtgaagaattgcctcctgcccctgagagagtacttcaagtatttcagccagaatagtctgcccctgggcggcccaagcagcggcgcccctcctcccagcggcggcagcccagccggctccccaacctctaccgaggagggcacctctgagtccgccacccccgagagcggccctggcacctccaccgagcccagcgagggcagcgcacccggcagccctgccggcagccccacctccacagaggagggaaccagcaccgagcccagcgaaggcagcgccccaggcaccagcaccgagcctagtgagggcggctctggcggcggcagcgcccaggagattaaacggatcaacaagatcagaagaagacttgtgaaagacagcaacaccaagaaggccggcaagacaggccccatgaaaaccctgctggttagagtgatgacacccgatctgagagagcggctggaaaacctgagaaagaagcctgaaaatatcccccagcccatcagcaatacatctagagccaacctgaataagctgctgaccgattacaccgaaatgaagaaggcgatcctgcatgtgtactgggaagagttccagaaggaccctgtgggcctgatgagccgggtggcccagcctgccagcaagaagatcgatcagaacaagctgaaacctgagatggacgagaagggcaacctgaccaccgccggctttgcctgctctcagtgtggccagcccctgttcgtgtacaagctggagcaggtgtctgagaagggcaaggcttacaccaactacttcggacggtgcaatgtggccgagcacgaaaagctgatcctgctggcccagctgaagcccgagaaggatagcgacgaagccgtgacatatagcctgggaaagtttgggcagagggccctggatttctacagcattcatgtgaccaaggagtccacccaccccgtgaagcccctggcccagatcgccggaaacagatacgcctccggacctgtgggaaaggccctgagcgacgcatgtatgggcacaatcgcctccttcctgtctaagtaccaggacatcatcatcgaacaccagaaggtggtgaagggcaaccagaagagactggagagcctgcgggagctggccggcaaggaaaacctggaataccctagcgtgaccctgccacctcagcctcacaccaaggagggcgttgatgcctacaacgaagtgatcgcccgggtgcgaatgtgggtgaacctgaacctgtggcagaagctgaagctaagcagagatgatgccaagcctctgctgagactgaagggattcccttcctttcctctggtcgagagacaggccaacgaagtggactggtgggacatggtgtgtaacgtgaagaagctgatcaacgagaaaaaggaggatggcaaggtgttttggcagaatctggctggctacaagagacaggaagccctgagaccatacctgagcagcgaggaagatcggaagaagggaaagaaattcgctcggtaccagctgggcgacctgctgctgcacctggaaaagaagcacggcgaggactggggaaaggtgtacgacgaggcctgggagcggattgacaagaaagtggaaggcctgagcaagcacatcaagctggaagaggaacggagaagcgaggacgcccagagcaaggccgccctgaccgactggctgcgggctaaggccagcttcgtgatcgagggcctgaaggaggccgacaaggacgagttctgcagatgcgagctgaagctgcagaagtggtacggggacctgcggggaaagcccttcgccatcgaagccgagaacagcatcctggacatcagcggcttcagcaagcagtacaactgtgccttcatctggcagaaggacggcgtgaagaagctgaacctgtacctgatcatcaactacttcaagggcggcaagctgcggttcaagaagatcaaacctgaagccttcgaagccaacagattctacaccgtgatcaacaaaaagagcggcgagatcgtgcccatggaggtgaacttcaacttcgacgaccccaacctgatcatcctgcctctggcctttggcaagagacagggcagagaattcatctggaacgacctgctgtccctggaaaccggcagcctgaagctggccaacggaagagtgatcgagaagacactgtacaacagaagaacccggcaggatgagcctgccctgttcgtggccctgaccttcgagcggcgggaggtcctggactcctccaatatcaaaccaatgaacctgatcggcgtggcaagaggcgaaaacatccccgccgtgatcgccctgaccgaccccgagggctgcccactgagccggtttaaggatagcctgggaaacccaacccacatcctgagaatcggcgagagctataaggagaagcagcggaccatccaggccaagaaggaggtggagcagcggagagccggcggctacagccggaagtacgccagcaaagccaagaatctggcagacgatatggtgagaaacaccgctagagatctgctgtactacgccgtgacccaggatgccatgctgatcttcgccaacctgagccggggcttcggccggcagggcaagcggaccttcatggccgagagacagtacacacggatggaggactggctgaccgccaagctggcctacgagggcctgagcaagacctacctgtccaagacactggcccagtacacctccaagacatgcagcaactgtgggtttaccatcaccagcgccgactacgacagggtgctggagaagctgaagaagacagcaacaggctggatgaccacaattaacggcaaggagctgaaggtggagggccagattacctactacaacagatacaagagacagaacgtagtcaaggacctgtccgtcgagctggatagactgagcgaagaatctgtgaacaacgacatctcctcctggacaaagggcagaagcggagaagctctgagcctcctgaagaaaagattctcccatagacccgtgcaggagaagttcgtgtgcctgaactgcggcttcgagacacacgcagccgagcaagccgccctgaacatcgccagatcctggctgttcctgcggagccaggagtacaagaaataccagacaaacaagacaaccggcaacaccgataagagagccttcgtcgagacctggcagtccttttaccggaagaagcttaaggaggtgtggaaacctgccgtgcggtctggcggatctggcggaggctccacaagctggcccgagagcgtgaccttcgaggacgtggccgtgtacttcacccagaaccagtgggccagcctggaccccgcccagagggccctgtacggcgaggtgatgctggagaactacgccaacgtggccagcctggtggccttccccttccccaagcccgccctgatcagccacctggagaggggcgaggccccctggggccccgacccctgggacaccgagatccccaggggcatcagccagggcaccagccccaagaaaaagagaaaagtctaagctgccttctgcggggcttgccttctggccatgcccttcttctctcccttgcacctgtacctcttggtctttgaataaagcctgagtaggaaggctagcaaaaaaaaaaaaaaaaaaaaaaaaaaaaaaaaaaaaaaaaaaaaaaaaaaaaaaaaaaaaaaaaaaaaaaaaaaaaaaaa

SEQ ID NO: 5754 - RNA, 5797 nt, synthetic construct
  source 1..5797: mol_type = other RNA
aggaaataagagagaaaagaagagtaagaagaaatataagagccaccatggcccctaagaagaagcgtaaagtgagccggatggaacgcctcgtctacgaggtgcggcagaagtgcagaaacatcgaggacatctgcatctcctgcggatctctgaacgtgaccctggagcacccactgttcatcggcggcatgtgccagaactgtaaaaactgttttctggagtgtgcctatcaatacgacgatgacggctaccagagctactgcaccatctgttgcggcggaagagaggtgctgatgtgtggaaataacaactgctgccggtgcttctgcgtggaatgcgtggacctgctggtgggccccggcgccgcccaggccgctattaaggaagatccttggaactgctacatgtgcggccacaagggcacatacggcctgctgagacggagagaggactggcctagcagactgcagatgttcttcgccaataaccacgaccaggagttcgacccccctaaggtgtaccctcccgtccccgccgagaagagaaagcccatccgggtcctgagcctgttcgatggcatcgccaccggtctgctggtgctgaaggacctgggcatccaggtggataggtacattgcctccgaggtgtgcgaggactccatcaccgtgggaatggtgcgtcatcagggcaagatcatgtacgtgggcgacgtgcggagcgtgacacagaagcatatccaggagtggggccctttcgacctggtgatcggcggcagcccttgcaatgacctgagcatcgtgaacccagcccggaagggcctgtacgagggaaccggcagactgttcttcgagttttacagactgctgcacgacgcccggcctaaggaaggcgacgaccggcccttcttttggctgttcgagaatgtggtggccatgggagtcagcgacaagcgggatattagccggttcctggagagcaaccccgtgatgatcgatgccaaggaagtgagcgccgcccaccgggccagatacttctggggcaatctgcctggcatgaacagacccctggccagcaccgtgaacgacaagctggagctgcaggagtgcctggagcacggccggatcgccaagttcagcaaggtgagaaccatcaccacccgaagcaacagcatcaaacaaggcaaggaccagcactttcctgtgttcatgaacgagaaggaggacatcctgtggtgtaccgagatggagagagtgttcgggttcccagtccactacacagatgtcagcaacatgtctagactggccagacagagactgctgggaagaagctggtccgtccctgtgatcagacacctgttcgcccctctgaaggagtacttcgcctgcgtgagcagcggcaacagcaacgccaacagccggggccccagcttctctagcggcctggtgccactgtccctgagagggagccacatgggccccatggagatctacaaaaccgtgagcgcctggaagcggcagcctgtgcgcgtgctgagcctgtttcggaatatcgataaagtcctgaaaagcctgggattcctggagagcggctctggctccggcggtggcaccctgaagtacgtggaggatgtgacaaacgtggtcagacgggatgtggagaagtggggccccttcgatctggtgtacggcagcacccaacccctgggcagctcttgtgaccggtgccctggctggtacatgtttcagttccaccggatcctgcagtacgccctgccgagacaggagtcccagcggccattcttttggattttcatggacaacttgctgctgaccgaggatgaccaggaaactaccactcggttcctgcagaccgaagccgtgaccctgcaggacgtgagaggccgggactaccagaacgccatgcgggtgtggtccaacatccctggactgaaaagcaagcacgcacctctgacccctaaagaagaggagtacctgcaggcccaggtgcggagcagaagcaagctggacgcccctaaggtggatctgctggtgaagaattgcctcctgcccctgagagagtacttcaagtatttcagccagaatagtctgcccctgggcggcccaagcagcggcgcccctcctcccagcggcggcagcccagccggctccccaacctctaccgaggagggcacctctgagtccgccacccccgagagcggccctggcacctccaccgagcccagcgagggcagcgcacccggcagccctgccggcagccccacctccacagaggagggaaccagcaccgagcccagcgaaggcagcgccccaggcaccagcaccgagcctagtgagggcggctctggcggcggcagcgcccaggagattaaacggatcaacaagatcagaagaagacttgtgaaagacagcaacaccaagaaggccggcaagacaggccccatgaaaaccctgctggttagagtgatgacacccgatctgagagagcggctggaaaacctgagaaagaagcctgaaaatatcccccagcccatcagcaatacatctagagccaacctgaataagctgctgaccgattacaccgaaatgaagaaggcgatcctgcatgtgtactgggaagagttccagaaggaccctgtgggcctgatgagccgggtggcccagcctgccagcaagaagatcgatcagaacaagctgaaacctgagatggacgagaagggcaacctgaccaccgccggctttgcctgctctcagtgtggccagcccctgttcgtgtacaagctggagcaggtgtctgagaagggcaaggcttacaccaactacttcggacggtgcaatgtggccgagcacgaaaagctgatcctgctggcccagctgaagcccgagaaggatagcgacgaagccgtgacatatagcctgggaaagtttgggcagagggccctggatttctacagcattcatgtgaccaaggagtccacccaccccgtgaagcccctggcccagatcgccggaaacagatacgcctccggacctgtgggaaaggccctgagcgacgcatgtatgggcacaatcgcctccttcctgtctaagtaccaggacatcatcatcgaacaccagaaggtggtgaagggcaaccagaagagactggagagcctgcgggagctggccggcaaggaaaacctggaataccctagcgtgaccctgccacctcagcctcacaccaaggagggcgttgatgcctacaacgaagtgatcgcccgggtgcgaatgtgggtgaacctgaacctgtggcagaagctgaagctaagcagagatgatgccaagcctctgctgagactgaagggattcccttcctttcctctggtcgagagacaggccaacgaagtggactggtgggacatggtgtgtaacgtgaagaagctgatcaacgagaaaaaggaggatggcaaggtgttttggcagaatctggctggctacaagagacaggaagccctgagaccatacctgagcagcgaggaagatcggaagaagggaaagaaattcgctcggtaccagctgggcgacctgctgctgcacctggaaaagaagcacggcgaggactggggaaaggtgtacgacgaggcctgggagcggattgacaagaaagtggaaggcctgagcaagcacatcaagctggaagaggaacggagaagcgaggacgcccagagcaaggccgccctgaccgactggctgcgggctaaggccagcttcgtgatcgagggcctgaaggaggccgacaaggacgagttctgcagatgcgagctgaagctgcagaagtggtacggggacctgcggggaaagcccttcgccatcgaagccgagaacagcatcctggacatcagcggcttcagcaagcagtacaactgtgccttcatctggcagaaggacggcgtgaagaagctgaacctgtacctgatcatcaactacttcaagggcggcaagctgcggttcaagaagatcaaacctgaagccttcgaagccaacagattctacaccgtgatcaacaaaaagagcggcgagatcgtgcccatggaggtgaacttcaacttcgacgaccccaacctgatcatcctgcctctggcctttggcaagagacagggcagagaattcatctggaacgacctgctgtccctggaaaccggcagcctgaagctggccaacggaagagtgatcgagaagacactgtacaacagaagaacccggcaggatgagcctgccctgttcgtggccctgaccttcgagcggcgggaggtcctggactcctccaatatcaaaccaatgaacctgatcggcgtggcaagaggcgaaaacatccccgccgtgatcgccctgaccgaccccgagggctgcccactgagccggtttaaggatagcctgggaaacccaacccacatcctgagaatcggcgagagctataaggagaagcagcggaccatccaggccaagaaggaggtggagcagcggagagccggcggctacagccggaagtacgccagcaaagccaagaatctggcagacgatatggtgagaaacaccgctagagatctgctgtactacgccgtgacccaggatgccatgctgatcttcgccaacctgagccggggcttcggccggcagggcaagcggaccttcatggccgagagacagtacacacggatggaggactggctgaccgccaagctggcctacgagggcctgagcaagacctacctgtccaagacactggcccagtacacctccaagacatgcagcaactgtgggtttaccatcaccagcgccgactacgacagggtgctggagaagctgaagaagacagcaacaggctggatgaccacaattaacggcaaggagctgaaggtggagggccagattacctactacaacagatacaagagacagaacgtagtcaaggacctgtccgtcgagctggatagactgagcgaagaatctgtgaacaacgacatctcctcctggacaaagggcagaagcggagaagctctgagcctcctgaagaaaagattctcccatagacccgtgcaggagaagttcgtgtgcctgaactgcggcttcgagacacacgcagccgagcaagccgccctgaacatcgccagatcctggctgttcctgcggagccaggagtacaagaaataccagacaaacaagacaaccggcaacaccgataagagagccttcgtcgagacctggcagtccttttaccggaagaagcttaaggaggtgtggaaacctgccgtgcggtctggcggatctggcggaggctccacaagcgcccacagcatggtgatgttcagggacgtgaccgtggacttcagccaggaggagtgggagtgcctgagcagctacgagagggacctgtacagggacgtgatgctggagaactacagccacctggtgagcctgggctgcagcatcagcaagcccgacgtgatcaccctgctggagcagggcaaggagccctggatgatcgtgagggccgagaagaggaggtggagcagggacctggagagcaggaccagccccaagaaaaagagaaaagtctaagctgccttctgcggggcttgccttctggccatgcccttcttctctcccttgcacctgtacctcttggtctttgaataaagcctgagtaggaaggctagcaaaaaaaaaaaaaaaaaaaaaaaaaaaaaaaaaaaaaaaaaaaaaaaaaaaaaaaaaaaaaaaaaaaaaaaaaaaaaaaa

SEQ ID NO: 5755 - RNA, 5797 nt, synthetic construct
  source 1..5797: mol_type = other RNA
aggaaataagagagaaaagaagagtaagaagaaatataagagccaccatggcccctaagaagaagcgtaaagtgagccggatggaacgcctcgtctacgaggtgcggcagaagtgcagaaacatcgaggacatctgcatctcctgcggatctctgaacgtgaccctggagcacccactgttcatcggcggcatgtgccagaactgtaaaaactgttttctggagtgtgcctatcaatacgacgatgacggctaccagagctactgcaccatctgttgcggcggaagagaggtgctgatgtgtggaaataacaactgctgccggtgcttctgcgtggaatgcgtggacctgctggtgggccccggcgccgcccaggccgctattaaggaagatccttggaactgctacatgtgcggccacaagggcacatacggcctgctgagacggagagaggactggcctagcagactgcagatgttcttcgccaataaccacgaccaggagttcgacccccctaaggtgtaccctcccgtccccgccgagaagagaaagcccatccgggtcctgagcctgttcgatggcatcgccaccggtctgctggtgctgaaggacctgggcatccaggtggataggtacattgcctccgaggtgtgcgaggactccatcaccgtgggaatggtgcgtcatcagggcaagatcatgtacgtgggcgacgtgcggagcgtgacacagaagcatatccaggagtggggccctttcgacctggtgatcggcggcagcccttgcaatgacctgagcatcgtgaacccagcccggaagggcctgtacgagggaaccggcagactgttcttcgagttttacagactgctgcacgacgcccggcctaaggaaggcgacgaccggcccttcttttggctgttcgagaatgtggtggccatgggagtcagcgacaagcgggatattagccggttcctggagagcaaccccgtgatgatcgatgccaaggaagtgagcgccgcccaccgggccagatacttctggggcaatctgcctggcatgaacagacccctggccagcaccgtgaacgacaagctggagctgcaggagtgcctggagcacggccggatcgccaagttcagcaaggtgagaaccatcaccacccgaagcaacagcatcaaacaaggcaaggaccagcactttcctgtgttcatgaacgagaaggaggacatcctgtggtgtaccgagatggagagagtgttcgggttcccagtccactacacagatgtcagcaacatgtctagactggccagacagagactgctgggaagaagctggtccgtccctgtgatcagacacctgttcgcccctctgaaggagtacttcgcctgcgtgagcagcggcaacagcaacgccaacagccggggccccagcttctctagcggcctggtgccactgtccctgagagggagccacatgggccccatggagatctacaaaaccgtgagcgcctggaagcggcagcctgtgcgcgtgctgagcctgtttcggaatatcgataaagtcctgaaaagcctgggattcctggagagcggctctggctccggcggtggcaccctgaagtacgtggaggatgtgacaaacgtggtcagacgggatgtggagaagtggggccccttcgatctggtgtacggcagcacccaacccctgggcagctcttgtgaccggtgccctggctggtacatgtttcagttccaccggatcctgcagtacgccctgccgagacaggagtcccagcggccattcttttggattttcatggacaacttgctgctgaccgaggatgaccaggaaactaccactcggttcctgcagaccgaagccgtgaccctgcaggacgtgagaggccgggactaccagaacgccatgcgggtgtggtccaacatccctggactgaaaagcaagcacgcacctctgacccctaaagaagaggagtacctgcaggcccaggtgcggagcagaagcaagctggacgcccctaaggtggatctgctggtgaagaattgcctcctgcccctgagagagtacttcaagtatttcagccagaatagtctgcccctgggcggcccaagcagcggcgcccctcctcccagcggcggcagcccagccggctccccaacctctaccgaggagggcacctctgagtccgccacccccgagagcggccctggcacctccaccgagcccagcgagggcagcgcacccggcagccctgccggcagccccacctccacagaggagggaaccagcaccgagcccagcgaaggcagcgccccaggcaccagcaccgagcctagtgagggcggctctggcggcggcagcgcccaggagattaaacggatcaacaagatcagaagaagacttgtgaaagacagcaacaccaagaaggccggcaagacaggccccatgaaaaccctgctggttagagtgatgacacccgatctgagagagcggctggaaaacctgagaaagaagcctgaaaatatcccccagcccatcagcaatacatctagagccaacctgaataagctgctgaccgattacaccgaaatgaagaaggcgatcctgcatgtgtactgggaagagttccagaaggaccctgtgggcctgatgagccgggtggcccagcctgccagcaagaagatcgatcagaacaagctgaaacctgagatggacgagaagggcaacctgaccaccgccggctttgcctgctctcagtgtggccagcccctgttcgtgtacaagctggagcaggtgtctgagaagggcaaggcttacaccaactacttcggacggtgcaatgtggccgagcacgaaaagctgatcctgctggcccagctgaagcccgagaaggatagcgacgaagccgtgacatatagcctgggaaagtttgggcagagggccctggatttctacagcattcatgtgaccaaggagtccacccaccccgtgaagcccctggcccagatcgccggaaacagatacgcctccggacctgtgggaaaggccctgagcgacgcatgtatgggcacaatcgcctccttcctgtctaagtaccaggacatcatcatcgaacaccagaaggtggtgaagggcaaccagaagagactggagagcctgcgggagctggccggcaaggaaaacctggaataccctagcgtgaccctgccacctcagcctcacaccaaggagggcgttgatgcctacaacgaagtgatcgcccgggtgcgaatgtgggtgaacctgaacctgtggcagaagctgaagctaagcagagatgatgccaagcctctgctgagactgaagggattcccttcctttcctctggtcgagagacaggccaacgaagtggactggtgggacatggtgtgtaacgtgaagaagctgatcaacgagaaaaaggaggatggcaaggtgttttggcagaatctggctggctacaagagacaggaagccctgagaccatacctgagcagcgaggaagatcggaagaagggaaagaaattcgctcggtaccagctgggcgacctgctgctgcacctggaaaagaagcacggcgaggactggggaaaggtgtacgacgaggcctgggagcggattgacaagaaagtggaaggcctgagcaagcacatcaagctggaagaggaacggagaagcgaggacgcccagagcaaggccgccctgaccgactggctgcgggctaaggccagcttcgtgatcgagggcctgaaggaggccgacaaggacgagttctgcagatgcgagctgaagctgcagaagtggtacggggacctgcggggaaagcccttcgccatcgaagccgagaacagcatcctggacatcagcggcttcagcaagcagtacaactgtgccttcatctggcagaaggacggcgtgaagaagctgaacctgtacctgatcatcaactacttcaagggcggcaagctgcggttcaagaagatcaaacctgaagccttcgaagccaacagattctacaccgtgatcaacaaaaagagcggcgagatcgtgcccatggaggtgaacttcaacttcgacgaccccaacctgatcatcctgcctctggcctttggcaagagacagggcagagaattcatctggaacgacctgctgtccctggaaaccggcagcctgaagctggccaacggaagagtgatcgagaagacactgtacaacagaagaacccggcaggatgagcctgccctgttcgtggccctgaccttcgagcggcgggaggtcctggactcctccaatatcaaaccaatgaacctgatcggcgtggcaagaggcgaaaacatccccgccgtgatcgccctgaccgaccccgagggctgcccactgagccggtttaaggatagcctgggaaacccaacccacatcctgagaatcggcgagagctataaggagaagcagcggaccatccaggccaagaaggaggtggagcagcggagagccggcggctacagccggaagtacgccagcaaagccaagaatctggcagacgatatggtgagaaacaccgctagagatctgctgtactacgccgtgacccaggatgccatgctgatcttcgccaacctgagccggggcttcggccggcagggcaagcggaccttcatggccgagagacagtacacacggatggaggactggctgaccgccaagctggcctacgagggcctgagcaagacctacctgtccaagacactggcccagtacacctccaagacatgcagcaactgtgggtttaccatcaccagcgccgactacgacagggtgctggagaagctgaagaagacagcaacaggctggatgaccacaattaacggcaaggagctgaaggtggagggccagattacctactacaacagatacaagagacagaacgtagtcaaggacctgtccgtcgagctggatagactgagcgaagaatctgtgaacaacgacatctcctcctggacaaagggcagaagcggagaagctctgagcctcctgaagaaaagattctcccatagacccgtgcaggagaagttcgtgtgcctgaactgcggcttcgagacacacgcagccgagcaagccgccctgaacatcgccagatcctggctgttcctgcggagccaggagtacaagaaataccagacaaacaagacaaccggcaacaccgataagagagccttcgtcgagacctggcagtccttttaccggaagaagcttaaggaggtgtggaaacctgccgtgcggtctggcggatctggcggaggctccacaagcagcaaggcccccgtgaccttcggcgacctggccatctacttcagccaggaggagtgggagtggctgagccccaaccagaaggacctgtacgaggacgtgatgctggagaactaccacaacctggtgagcgtgggcctggcctgcaggaggcccaacatcatcgccctgctggagaagggcaaggccccctggatggtggagcccagcaggaagaggaggggccccgagctgggcagcaaggacaccagccccaagaaaaagagaaaagtctaagctgccttctgcggggcttgccttctggccatgcccttcttctctcccttgcacctgtacctcttggtctttgaataaagcctgagtaggaaggctagcaaaaaaaaaaaaaaaaaaaaaaaaaaaaaaaaaaaaaaaaaaaaaaaaaaaaaaaaaaaaaaaaaaaaaaaaaaaaaaaa

SEQ ID NO: 5756 - RNA, 5797 nt, synthetic construct
  source 1..5797: mol_type = other RNA
aggaaataagagagaaaagaagagtaagaagaaatataagagccaccatggcccctaagaagaagcgtaaagtgagccggatggaacgcctcgtctacgaggtgcggcagaagtgcagaaacatcgaggacatctgcatctcctgcggatctctgaacgtgaccctggagcacccactgttcatcggcggcatgtgccagaactgtaaaaactgttttctggagtgtgcctatcaatacgacgatgacggctaccagagctactgcaccatctgttgcggcggaagagaggtgctgatgtgtggaaataacaactgctgccggtgcttctgcgtggaatgcgtggacctgctggtgggccccggcgccgcccaggccgctattaaggaagatccttggaactgctacatgtgcggccacaagggcacatacggcctgctgagacggagagaggactggcctagcagactgcagatgttcttcgccaataaccacgaccaggagttcgacccccctaaggtgtaccctcccgtccccgccgagaagagaaagcccatccgggtcctgagcctgttcgatggcatcgccaccggtctgctggtgctgaaggacctgggcatccaggtggataggtacattgcctccgaggtgtgcgaggactccatcaccgtgggaatggtgcgtcatcagggcaagatcatgtacgtgggcgacgtgcggagcgtgacacagaagcatatccaggagtggggccctttcgacctggtgatcggcggcagcccttgcaatgacctgagcatcgtgaacccagcccggaagggcctgtacgagggaaccggcagactgttcttcgagttttacagactgctgcacgacgcccggcctaaggaaggcgacgaccggcccttcttttggctgttcgagaatgtggtggccatgggagtcagcgacaagcgggatattagccggttcctggagagcaaccccgtgatgatcgatgccaaggaagtgagcgccgcccaccgggccagatacttctggggcaatctgcctggcatgaacagacccctggccagcaccgtgaacgacaagctggagctgcaggagtgcctggagcacggccggatcgccaagttcagcaaggtgagaaccatcaccacccgaagcaacagcatcaaacaaggcaaggaccagcactttcctgtgttcatgaacgagaaggaggacatcctgtggtgtaccgagatggagagagtgttcgggttcccagtccactacacagatgtcagcaacatgtctagactggccagacagagactgctgggaagaagctggtccgtccctgtgatcagacacctgttcgcccctctgaaggagtacttcgcctgcgtgagcagcggcaacagcaacgccaacagccggggccccagcttctctagcggcctggtgccactgtccctgagagggagccacatgggccccatggagatctacaaaaccgtgagcgcctggaagcggcagcctgtgcgcgtgctgagcctgtttcggaatatcgataaagtcctgaaaagcctgggattcctggagagcggctctggctccggcggtggcaccctgaagtacgtggaggatgtgacaaacgtggtcagacgggatgtggagaagtggggccccttcgatctggtgtacggcagcacccaacccctgggcagctcttgtgaccggtgccctggctggtacatgtttcagttccaccggatcctgcagtacgccctgccgagacaggagtcccagcggccattcttttggattttcatggacaacttgctgctgaccgaggatgaccaggaaactaccactcggttcctgcagaccgaagccgtgaccctgcaggacgtgagaggccgggactaccagaacgccatgcgggtgtggtccaacatccctggactgaaaagcaagcacgcacctctgacccctaaagaagaggagtacctgcaggcccaggtgcggagcagaagcaagctggacgcccctaaggtggatctgctggtgaagaattgcctcctgcccctgagagagtacttcaagtatttcagccagaatagtctgcccctgggcggcccaagcagcggcgcccctcctcccagcggcggcagcccagccggctccccaacctctaccgaggagggcacctctgagtccgccacccccgagagcggccctggcacctccaccgagcccagcgagggcagcgcacccggcagccctgccggcagccccacctccacagaggagggaaccagcaccgagcccagcgaaggcagcgccccaggcaccagcaccgagcctagtgagggcggctctggcggcggcagcgcccaggagattaaacggatcaacaagatcagaagaagacttgtgaaagacagcaacaccaagaaggccggcaagacaggccccatgaaaaccctgctggttagagtgatgacacccgatctgagagagcggctggaaaacctgagaaagaagcctgaaaatatcccccagcccatcagcaatacatctagagccaacctgaataagctgctgaccgattacaccgaaatgaagaaggcgatcctgcatgtgtactgggaagagttccagaaggaccctgtgggcctgatgagccgggtggcccagcctgccagcaagaagatcgatcagaacaagctgaaacctgagatggacgagaagggcaacctgaccaccgccggctttgcctgctctcagtgtggccagcccctgttcgtgtacaagctggagcaggtgtctgagaagggcaaggcttacaccaactacttcggacggtgcaatgtggccgagcacgaaaagctgatcctgctggcccagctgaagcccgagaaggatagcgacgaagccgtgacatatagcctgggaaagtttgggcagagggccctggatttctacagcattcatgtgaccaaggagtccacccaccccgtgaagcccctggcccagatcgccggaaacagatacgcctccggacctgtgggaaaggccctgagcgacgcatgtatgggcacaatcgcctccttcctgtctaagtaccaggacatcatcatcgaacaccagaaggtggtgaagggcaaccagaagagactggagagcctgcgggagctggccggcaaggaaaacctggaataccctagcgtgaccctgccacctcagcctcacaccaaggagggcgttgatgcctacaacgaagtgatcgcccgggtgcgaatgtgggtgaacctgaacctgtggcagaagctgaagctaagcagagatgatgccaagcctctgctgagactgaagggattcccttcctttcctctggtcgagagacaggccaacgaagtggactggtgggacatggtgtgtaacgtgaagaagctgatcaacgagaaaaaggaggatggcaaggtgttttggcagaatctggctggctacaagagacaggaagccctgagaccatacctgagcagcgaggaagatcggaagaagggaaagaaattcgctcggtaccagctgggcgacctgctgctgcacctggaaaagaagcacggcgaggactggggaaaggtgtacgacgaggcctgggagcggattgacaagaaagtggaaggcctgagcaagcacatcaagctggaagaggaacggagaagcgaggacgcccagagcaaggccgccctgaccgactggctgcgggctaaggccagcttcgtgatcgagggcctgaaggaggccgacaaggacgagttctgcagatgcgagctgaagctgcagaagtggtacggggacctgcggggaaagcccttcgccatcgaagccgagaacagcatcctggacatcagcggcttcagcaagcagtacaactgtgccttcatctggcagaaggacggcgtgaagaagctgaacctgtacctgatcatcaactacttcaagggcggcaagctgcggttcaagaagatcaaacctgaagccttcgaagccaacagattctacaccgtgatcaacaaaaagagcggcgagatcgtgcccatggaggtgaacttcaacttcgacgaccccaacctgatcatcctgcctctggcctttggcaagagacagggcagagaattcatctggaacgacctgctgtccctggaaaccggcagcctgaagctggccaacggaagagtgatcgagaagacactgtacaacagaagaacccggcaggatgagcctgccctgttcgtggccctgaccttcgagcggcgggaggtcctggactcctccaatatcaaaccaatgaacctgatcggcgtggcaagaggcgaaaacatccccgccgtgatcgccctgaccgaccccgagggctgcccactgagccggtttaaggatagcctgggaaacccaacccacatcctgagaatcggcgagagctataaggagaagcagcggaccatccaggccaagaaggaggtggagcagcggagagccggcggctacagccggaagtacgccagcaaagccaagaatctggcagacgatatggtgagaaacaccgctagagatctgctgtactacgccgtgacccaggatgccatgctgatcttcgccaacctgagccggggcttcggccggcagggcaagcggaccttcatggccgagagacagtacacacggatggaggactggctgaccgccaagctggcctacgagggcctgagcaagacctacctgtccaagacactggcccagtacacctccaagacatgcagcaactgtgggtttaccatcaccagcgccgactacgacagggtgctggagaagctgaagaagacagcaacaggctggatgaccacaattaacggcaaggagctgaaggtggagggccagattacctactacaacagatacaagagacagaacgtagtcaaggacctgtccgtcgagctggatagactgagcgaagaatctgtgaacaacgacatctcctcctggacaaagggcagaagcggagaagctctgagcctcctgaagaaaagattctcccatagacccgtgcaggagaagttcgtgtgcctgaactgcggcttcgagacacacgcagccgagcaagccgccctgaacatcgccagatcctggctgttcctgcggagccaggagtacaagaaataccagacaaacaagacaaccggcaacaccgataagagagccttcgtcgagacctggcagtccttttaccggaagaagcttaaggaggtgtggaaacctgccgtgcggtctggcggatctggcggaggctccacaagcatggtgagcttcgaggacgtggccgtgctgctgagccaggaggagtgggactgcctgatccccgcccagaggggcctgtacagggacgtgatgctggagacctacggcaacctggtgagcctgggcctgcaggccagcaagcccgacgtgatcagcaggctggagcagggcgacgagccctggaccccccacatcctgaggacccagaggagctggagctggaggcacaagagggagtgctacaccagccccaagaaaaagagaaaagtctaagctgccttctgcggggcttgccttctggccatgcccttcttctctcccttgcacctgtacctcttggtctttgaataaagcctgagtaggaaggctagcaaaaaaaaaaaaaaaaaaaaaaaaaaaaaaaaaaaaaaaaaaaaaaaaaaaaaaaaaaaaaaaaaaaaaaaaaaaaaaaa

SEQ ID NO: 5757 - RNA, 5797 nt, synthetic construct
  source 1..5797: mol_type = other RNA
aggaaataagagagaaaagaagagtaagaagaaatataagagccaccatggcccctaagaagaagcgtaaagtgagccggatggaacgcctcgtctacgaggtgcggcagaagtgcagaaacatcgaggacatctgcatctcctgcggatctctgaacgtgaccctggagcacccactgttcatcggcggcatgtgccagaactgtaaaaactgttttctggagtgtgcctatcaatacgacgatgacggctaccagagctactgcaccatctgttgcggcggaagagaggtgctgatgtgtggaaataacaactgctgccggtgcttctgcgtggaatgcgtggacctgctggtgggccccggcgccgcccaggccgctattaaggaagatccttggaactgctacatgtgcggccacaagggcacatacggcctgctgagacggagagaggactggcctagcagactgcagatgttcttcgccaataaccacgaccaggagttcgacccccctaaggtgtaccctcccgtccccgccgagaagagaaagcccatccgggtcctgagcctgttcgatggcatcgccaccggtctgctggtgctgaaggacctgggcatccaggtggataggtacattgcctccgaggtgtgcgaggactccatcaccgtgggaatggtgcgtcatcagggcaagatcatgtacgtgggcgacgtgcggagcgtgacacagaagcatatccaggagtggggccctttcgacctggtgatcggcggcagcccttgcaatgacctgagcatcgtgaacccagcccggaagggcctgtacgagggaaccggcagactgttcttcgagttttacagactgctgcacgacgcccggcctaaggaaggcgacgaccggcccttcttttggctgttcgagaatgtggtggccatgggagtcagcgacaagcgggatattagccggttcctggagagcaaccccgtgatgatcgatgccaaggaagtgagcgccgcccaccgggccagatacttctggggcaatctgcctggcatgaacagacccctggccagcaccgtgaacgacaagctggagctgcaggagtgcctggagcacggccggatcgccaagttcagcaaggtgagaaccatcaccacccgaagcaacagcatcaaacaaggcaaggaccagcactttcctgtgttcatgaacgagaaggaggacatcctgtggtgtaccgagatggagagagtgttcgggttcccagtccactacacagatgtcagcaacatgtctagactggccagacagagactgctgggaagaagctggtccgtccctgtgatcagacacctgttcgcccctctgaaggagtacttcgcctgcgtgagcagcggcaacagcaacgccaacagccggggccccagcttctctagcggcctggtgccactgtccctgagagggagccacatgggccccatggagatctacaaaaccgtgagcgcctggaagcggcagcctgtgcgcgtgctgagcctgtttcggaatatcgataaagtcctgaaaagcctgggattcctggagagcggctctggctccggcggtggcaccctgaagtacgtggaggatgtgacaaacgtggtcagacgggatgtggagaagtggggccccttcgatctggtgtacggcagcacccaacccctgggcagctcttgtgaccggtgccctggctggtacatgtttcagttccaccggatcctgcagtacgccctgccgagacaggagtcccagcggccattcttttggattttcatggacaacttgctgctgaccgaggatgaccaggaaactaccactcggttcctgcagaccgaagccgtgaccctgcaggacgtgagaggccgggactaccagaacgccatgcgggtgtggtccaacatccctggactgaaaagcaagcacgcacctctgacccctaaagaagaggagtacctgcaggcccaggtgcggagcagaagcaagctggacgcccctaaggtggatctgctggtgaagaattgcctcctgcccctgagagagtacttcaagtatttcagccagaatagtctgcccctgggcggcccaagcagcggcgcccctcctcccagcggcggcagcccagccggctccccaacctctaccgaggagggcacctctgagtccgccacccccgagagcggccctggcacctccaccgagcccagcgagggcagcgcacccggcagccctgccggcagccccacctccacagaggagggaaccagcaccgagcccagcgaaggcagcgccccaggcaccagcaccgagcctagtgagggcggctctggcggcggcagcgcccaggagattaaacggatcaacaagatcagaagaagacttgtgaaagacagcaacaccaagaaggccggcaagacaggccccatgaaaaccctgctggttagagtgatgacacccgatctgagagagcggctggaaaacctgagaaagaagcctgaaaatatcccccagcccatcagcaatacatctagagccaacctgaataagctgctgaccgattacaccgaaatgaagaaggcgatcctgcatgtgtactgggaagagttccagaaggaccctgtgggcctgatgagccgggtggcccagcctgccagcaagaagatcgatcagaacaagctgaaacctgagatggacgagaagggcaacctgaccaccgccggctttgcctgctctcagtgtggccagcccctgttcgtgtacaagctggagcaggtgtctgagaagggcaaggcttacaccaactacttcggacggtgcaatgtggccgagcacgaaaagctgatcctgctggcccagctgaagcccgagaaggatagcgacgaagccgtgacatatagcctgggaaagtttgggcagagggccctggatttctacagcattcatgtgaccaaggagtccacccaccccgtgaagcccctggcccagatcgccggaaacagatacgcctccggacctgtgggaaaggccctgagcgacgcatgtatgggcacaatcgcctccttcctgtctaagtaccaggacatcatcatcgaacaccagaaggtggtgaagggcaaccagaagagactggagagcctgcgggagctggccggcaaggaaaacctggaataccctagcgtgaccctgccacctcagcctcacaccaaggagggcgttgatgcctacaacgaagtgatcgcccgggtgcgaatgtgggtgaacctgaacctgtggcagaagctgaagctaagcagagatgatgccaagcctctgctgagactgaagggattcccttcctttcctctggtcgagagacaggccaacgaagtggactggtgggacatggtgtgtaacgtgaagaagctgatcaacgagaaaaaggaggatggcaaggtgttttggcagaatctggctggctacaagagacaggaagccctgagaccatacctgagcagcgaggaagatcggaagaagggaaagaaattcgctcggtaccagctgggcgacctgctgctgcacctggaaaagaagcacggcgaggactggggaaaggtgtacgacgaggcctgggagcggattgacaagaaagtggaaggcctgagcaagcacatcaagctggaagaggaacggagaagcgaggacgcccagagcaaggccgccctgaccgactggctgcgggctaaggccagcttcgtgatcgagggcctgaaggaggccgacaaggacgagttctgcagatgcgagctgaagctgcagaagtggtacggggacctgcggggaaagcccttcgccatcgaagccgagaacagcatcctggacatcagcggcttcagcaagcagtacaactgtgccttcatctggcagaaggacggcgtgaagaagctgaacctgtacctgatcatcaactacttcaagggcggcaagctgcggttcaagaagatcaaacctgaagccttcgaagccaacagattctacaccgtgatcaacaaaaagagcggcgagatcgtgcccatggaggtgaacttcaacttcgacgaccccaacctgatcatcctgcctctggcctttggcaagagacagggcagagaattcatctggaacgacctgctgtccctggaaaccggcagcctgaagctggccaacggaagagtgatcgagaagacactgtacaacagaagaacccggcaggatgagcctgccctgttcgtggccctgaccttcgagcggcgggaggtcctggactcctccaatatcaaaccaatgaacctgatcggcgtggcaagaggcgaaaacatccccgccgtgatcgccctgaccgaccccgagggctgcccactgagccggtttaaggatagcctgggaaacccaacccacatcctgagaatcggcgagagctataaggagaagcagcggaccatccaggccaagaaggaggtggagcagcggagagccggcggctacagccggaagtacgccagcaaagccaagaatctggcagacgatatggtgagaaacaccgctagagatctgctgtactacgccgtgacccaggatgccatgctgatcttcgccaacctgagccggggcttcggccggcagggcaagcggaccttcatggccgagagacagtacacacggatggaggactggctgaccgccaagctggcctacgagggcctgagcaagacctacctgtccaagacactggcccagtacacctccaagacatgcagcaactgtgggtttaccatcaccagcgccgactacgacagggtgctggagaagctgaagaagacagcaacaggctggatgaccacaattaacggcaaggagctgaaggtggagggccagattacctactacaacagatacaagagacagaacgtagtcaaggacctgtccgtcgagctggatagactgagcgaagaatctgtgaacaacgacatctcctcctggacaaagggcagaagcggagaagctctgagcctcctgaagaaaagattctcccatagacccgtgcaggagaagttcgtgtgcctgaactgcggcttcgagacacacgcagccgagcaagccgccctgaacatcgccagatcctggctgttcctgcggagccaggagtacaagaaataccagacaaacaagacaaccggcaacaccgataagagagccttcgtcgagacctggcagtccttttaccggaagaagcttaaggaggtgtggaaacctgccgtgcggtctggcggatctggcggaggctccacaagcccccagaagagcgtgaccttcgaggacgtggccgtgtacttcacccagaccgagtgggacggcctgagccccgcccagagggccctgtacagggacgtgatgctggagaactacggcaacgtggccagcctgggcttcagcctgctgaagcccgccgtgatcagccagctggagggcgccggcgagctggagggccccagccccctggccgccggcaccgagatcggcccccagggcctgtggaccagccccaagaaaaagagaaaagtctaagctgccttctgcggggcttgccttctggccatgcccttcttctctcccttgcacctgtacctcttggtctttgaataaagcctgagtaggaaggctagcaaaaaaaaaaaaaaaaaaaaaaaaaaaaaaaaaaaaaaaaaaaaaaaaaaaaaaaaaaaaaaaaaaaaaaaaaaaaaaaa

SEQ ID NO: 5758 - RNA, 5797 nt, synthetic construct
  source 1..5797: mol_type = other RNA
aggaaataagagagaaaagaagagtaagaagaaatataagagccaccatggcccctaagaagaagcgtaaagtgagccggatggaacgcctcgtctacgaggtgcggcagaagtgcagaaacatcgaggacatctgcatctcctgcggatctctgaacgtgaccctggagcacccactgttcatcggcggcatgtgccagaactgtaaaaactgttttctggagtgtgcctatcaatacgacgatgacggctaccagagctactgcaccatctgttgcggcggaagagaggtgctgatgtgtggaaataacaactgctgccggtgcttctgcgtggaatgcgtggacctgctggtgggccccggcgccgcccaggccgctattaaggaagatccttggaactgctacatgtgcggccacaagggcacatacggcctgctgagacggagagaggactggcctagcagactgcagatgttcttcgccaataaccacgaccaggagttcgacccccctaaggtgtaccctcccgtccccgccgagaagagaaagcccatccgggtcctgagcctgttcgatggcatcgccaccggtctgctggtgctgaaggacctgggcatccaggtggataggtacattgcctccgaggtgtgcgaggactccatcaccgtgggaatggtgcgtcatcagggcaagatcatgtacgtgggcgacgtgcggagcgtgacacagaagcatatccaggagtggggccctttcgacctggtgatcggcggcagcccttgcaatgacctgagcatcgtgaacccagcccggaagggcctgtacgagggaaccggcagactgttcttcgagttttacagactgctgcacgacgcccggcctaaggaaggcgacgaccggcccttcttttggctgttcgagaatgtggtggccatgggagtcagcgacaagcgggatattagccggttcctggagagcaaccccgtgatgatcgatgccaaggaagtgagcgccgcccaccgggccagatacttctggggcaatctgcctggcatgaacagacccctggccagcaccgtgaacgacaagctggagctgcaggagtgcctggagcacggccggatcgccaagttcagcaaggtgagaaccatcaccacccgaagcaacagcatcaaacaaggcaaggaccagcactttcctgtgttcatgaacgagaaggaggacatcctgtggtgtaccgagatggagagagtgttcgggttcccagtccactacacagatgtcagcaacatgtctagactggccagacagagactgctgggaagaagctggtccgtccctgtgatcagacacctgttcgcccctctgaaggagtacttcgcctgcgtgagcagcggcaacagcaacgccaacagccggggccccagcttctctagcggcctggtgccactgtccctgagagggagccacatgggccccatggagatctacaaaaccgtgagcgcctggaagcggcagcctgtgcgcgtgctgagcctgtttcggaatatcgataaagtcctgaaaagcctgggattcctggagagcggctctggctccggcggtggcaccctgaagtacgtggaggatgtgacaaacgtggtcagacgggatgtggagaagtggggccccttcgatctggtgtacggcagcacccaacccctgggcagctcttgtgaccggtgccctggctggtacatgtttcagttccaccggatcctgcagtacgccctgccgagacaggagtcccagcggccattcttttggattttcatggacaacttgctgctgaccgaggatgaccaggaaactaccactcggttcctgcagaccgaagccgtgaccctgcaggacgtgagaggccgggactaccagaacgccatgcgggtgtggtccaacatccctggactgaaaagcaagcacgcacctctgacccctaaagaagaggagtacctgcaggcccaggtgcggagcagaagcaagctggacgcccctaaggtggatctgctggtgaagaattgcctcctgcccctgagagagtacttcaagtatttcagccagaatagtctgcccctgggcggcccaagcagcggcgcccctcctcccagcggcggcagcccagccggctccccaacctctaccgaggagggcacctctgagtccgccacccccgagagcggccctggcacctccaccgagcccagcgagggcagcgcacccggcagccctgccggcagccccacctccacagaggagggaaccagcaccgagcccagcgaaggcagcgccccaggcaccagcaccgagcctagtgagggcggctctggcggcggcagcgcccaggagattaaacggatcaacaagatcagaagaagacttgtgaaagacagcaacaccaagaaggccggcaagacaggccccatgaaaaccctgctggttagagtgatgacacccgatctgagagagcggctggaaaacctgagaaagaagcctgaaaatatcccccagcccatcagcaatacatctagagccaacctgaataagctgctgaccgattacaccgaaatgaagaaggcgatcctgcatgtgtactgggaagagttccagaaggaccctgtgggcctgatgagccgggtggcccagcctgccagcaagaagatcgatcagaacaagctgaaacctgagatggacgagaagggcaacctgaccaccgccggctttgcctgctctcagtgtggccagcccctgttcgtgtacaagctggagcaggtgtctgagaagggcaaggcttacaccaactacttcggacggtgcaatgtggccgagcacgaaaagctgatcctgctggcccagctgaagcccgagaaggatagcgacgaagccgtgacatatagcctgggaaagtttgggcagagggccctggatttctacagcattcatgtgaccaaggagtccacccaccccgtgaagcccctggcccagatcgccggaaacagatacgcctccggacctgtgggaaaggccctgagcgacgcatgtatgggcacaatcgcctccttcctgtctaagtaccaggacatcatcatcgaacaccagaaggtggtgaagggcaaccagaagagactggagagcctgcgggagctggccggcaaggaaaacctggaataccctagcgtgaccctgccacctcagcctcacaccaaggagggcgttgatgcctacaacgaagtgatcgcccgggtgcgaatgtgggtgaacctgaacctgtggcagaagctgaagctaagcagagatgatgccaagcctctgctgagactgaagggattcccttcctttcctctggtcgagagacaggccaacgaagtggactggtgggacatggtgtgtaacgtgaagaagctgatcaacgagaaaaaggaggatggcaaggtgttttggcagaatctggctggctacaagagacaggaagccctgagaccatacctgagcagcgaggaagatcggaagaagggaaagaaattcgctcggtaccagctgggcgacctgctgctgcacctggaaaagaagcacggcgaggactggggaaaggtgtacgacgaggcctgggagcggattgacaagaaagtggaaggcctgagcaagcacatcaagctggaagaggaacggagaagcgaggacgcccagagcaaggccgccctgaccgactggctgcgggctaaggccagcttcgtgatcgagggcctgaaggaggccgacaaggacgagttctgcagatgcgagctgaagctgcagaagtggtacggggacctgcggggaaagcccttcgccatcgaagccgagaacagcatcctggacatcagcggcttcagcaagcagtacaactgtgccttcatctggcagaaggacggcgtgaagaagctgaacctgtacctgatcatcaactacttcaagggcggcaagctgcggttcaagaagatcaaacctgaagccttcgaagccaacagattctacaccgtgatcaacaaaaagagcggcgagatcgtgcccatggaggtgaacttcaacttcgacgaccccaacctgatcatcctgcctctggcctttggcaagagacagggcagagaattcatctggaacgacctgctgtccctggaaaccggcagcctgaagctggccaacggaagagtgatcgagaagacactgtacaacagaagaacccggcaggatgagcctgccctgttcgtggccctgaccttcgagcggcgggaggtcctggactcctccaatatcaaaccaatgaacctgatcggcgtggcaagaggcgaaaacatccccgccgtgatcgccctgaccgaccccgagggctgcccactgagccggtttaaggatagcctgggaaacccaacccacatcctgagaatcggcgagagctataaggagaagcagcggaccatccaggccaagaaggaggtggagcagcggagagccggcggctacagccggaagtacgccagcaaagccaagaatctggcagacgatatggtgagaaacaccgctagagatctgctgtactacgccgtgacccaggatgccatgctgatcttcgccaacctgagccggggcttcggccggcagggcaagcggaccttcatggccgagagacagtacacacggatggaggactggctgaccgccaagctggcctacgagggcctgagcaagacctacctgtccaagacactggcccagtacacctccaagacatgcagcaactgtgggtttaccatcaccagcgccgactacgacagggtgctggagaagctgaagaagacagcaacaggctggatgaccacaattaacggcaaggagctgaaggtggagggccagattacctactacaacagatacaagagacagaacgtagtcaaggacctgtccgtcgagctggatagactgagcgaagaatctgtgaacaacgacatctcctcctggacaaagggcagaagcggagaagctctgagcctcctgaagaaaagattctcccatagacccgtgcaggagaagttcgtgtgcctgaactgcggcttcgagacacacgcagccgagcaagccgccctgaacatcgccagatcctggctgttcctgcggagccaggagtacaagaaataccagacaaacaagacaaccggcaacaccgataagagagccttcgtcgagacctggcagtccttttaccggaagaagcttaaggaggtgtggaaacctgccgtgcggtctggcggatctggcggaggctccacaagcggcctgctgagcttcgaggacgtggccctgtacttcaccagggaggagtgggacaccctggactgggcccagaaggccctgtacagggacgtgatgctggacaactacaggcacatcgtgagcctgggcttccccttccccaagcccgaggtgatctgccagctggagcagtgggaggagccctggaccctggacctgcccagggccggcaccaggaaggccagcggcagcgcctgccccgacaccagccccaagaaaaagagaaaagtctaagctgccttctgcggggcttgccttctggccatgcccttcttctctcccttgcacctgtacctcttggtctttgaataaagcctgagtaggaaggctagcaaaaaaaaaaaaaaaaaaaaaaaaaaaaaaaaaaaaaaaaaaaaaaaaaaaaaaaaaaaaaaaaaaaaaaaaaaaaaaaa

SEQ ID NO: 5759 - RNA, 5797 nt, synthetic construct
  source 1..5797: mol_type = other RNA
aggaaataagagagaaaagaagagtaagaagaaatataagagccaccatggcccctaagaagaagcgtaaagtgagccggatggaacgcctcgtctacgaggtgcggcagaagtgcagaaacatcgaggacatctgcatctcctgcggatctctgaacgtgaccctggagcacccactgttcatcggcggcatgtgccagaactgtaaaaactgttttctggagtgtgcctatcaatacgacgatgacggctaccagagctactgcaccatctgttgcggcggaagagaggtgctgatgtgtggaaataacaactgctgccggtgcttctgcgtggaatgcgtggacctgctggtgggccccggcgccgcccaggccgctattaaggaagatccttggaactgctacatgtgcggccacaagggcacatacggcctgctgagacggagagaggactggcctagcagactgcagatgttcttcgccaataaccacgaccaggagttcgacccccctaaggtgtaccctcccgtccccgccgagaagagaaagcccatccgggtcctgagcctgttcgatggcatcgccaccggtctgctggtgctgaaggacctgggcatccaggtggataggtacattgcctccgaggtgtgcgaggactccatcaccgtgggaatggtgcgtcatcagggcaagatcatgtacgtgggcgacgtgcggagcgtgacacagaagcatatccaggagtggggccctttcgacctggtgatcggcggcagcccttgcaatgacctgagcatcgtgaacccagcccggaagggcctgtacgagggaaccggcagactgttcttcgagttttacagactgctgcacgacgcccggcctaaggaaggcgacgaccggcccttcttttggctgttcgagaatgtggtggccatgggagtcagcgacaagcgggatattagccggttcctggagagcaaccccgtgatgatcgatgccaaggaagtgagcgccgcccaccgggccagatacttctggggcaatctgcctggcatgaacagacccctggccagcaccgtgaacgacaagctggagctgcaggagtgcctggagcacggccggatcgccaagttcagcaaggtgagaaccatcaccacccgaagcaacagcatcaaacaaggcaaggaccagcactttcctgtgttcatgaacgagaaggaggacatcctgtggtgtaccgagatggagagagtgttcgggttcccagtccactacacagatgtcagcaacatgtctagactggccagacagagactgctgggaagaagctggtccgtccctgtgatcagacacctgttcgcccctctgaaggagtacttcgcctgcgtgagcagcggcaacagcaacgccaacagccggggccccagcttctctagcggcctggtgccactgtccctgagagggagccacatgggccccatggagatctacaaaaccgtgagcgcctggaagcggcagcctgtgcgcgtgctgagcctgtttcggaatatcgataaagtcctgaaaagcctgggattcctggagagcggctctggctccggcggtggcaccctgaagtacgtggaggatgtgacaaacgtggtcagacgggatgtggagaagtggggccccttcgatctggtgtacggcagcacccaacccctgggcagctcttgtgaccggtgccctggctggtacatgtttcagttccaccggatcctgcagtacgccctgccgagacaggagtcccagcggccattcttttggattttcatggacaacttgctgctgaccgaggatgaccaggaaactaccactcggttcctgcagaccgaagccgtgaccctgcaggacgtgagaggccgggactaccagaacgccatgcgggtgtggtccaacatccctggactgaaaagcaagcacgcacctctgacccctaaagaagaggagtacctgcaggcccaggtgcggagcagaagcaagctggacgcccctaaggtggatctgctggtgaagaattgcctcctgcccctgagagagtacttcaagtatttcagccagaatagtctgcccctgggcggcccaagcagcggcgcccctcctcccagcggcggcagcccagccggctccccaacctctaccgaggagggcacctctgagtccgccacccccgagagcggccctggcacctccaccgagcccagcgagggcagcgcacccggcagccctgccggcagccccacctccacagaggagggaaccagcaccgagcccagcgaaggcagcgccccaggcaccagcaccgagcctagtgagggcggctctggcggcggcagcgcccaggagattaaacggatcaacaagatcagaagaagacttgtgaaagacagcaacaccaagaaggccggcaagacaggccccatgaaaaccctgctggttagagtgatgacacccgatctgagagagcggctggaaaacctgagaaagaagcctgaaaatatcccccagcccatcagcaatacatctagagccaacctgaataagctgctgaccgattacaccgaaatgaagaaggcgatcctgcatgtgtactgggaagagttccagaaggaccctgtgggcctgatgagccgggtggcccagcctgccagcaagaagatcgatcagaacaagctgaaacctgagatggacgagaagggcaacctgaccaccgccggctttgcctgctctcagtgtggccagcccctgttcgtgtacaagctggagcaggtgtctgagaagggcaaggcttacaccaactacttcggacggtgcaatgtggccgagcacgaaaagctgatcctgctggcccagctgaagcccgagaaggatagcgacgaagccgtgacatatagcctgggaaagtttgggcagagggccctggatttctacagcattcatgtgaccaaggagtccacccaccccgtgaagcccctggcccagatcgccggaaacagatacgcctccggacctgtgggaaaggccctgagcgacgcatgtatgggcacaatcgcctccttcctgtctaagtaccaggacatcatcatcgaacaccagaaggtggtgaagggcaaccagaagagactggagagcctgcgggagctggccggcaaggaaaacctggaataccctagcgtgaccctgccacctcagcctcacaccaaggagggcgttgatgcctacaacgaagtgatcgcccgggtgcgaatgtgggtgaacctgaacctgtggcagaagctgaagctaagcagagatgatgccaagcctctgctgagactgaagggattcccttcctttcctctggtcgagagacaggccaacgaagtggactggtgggacatggtgtgtaacgtgaagaagctgatcaacgagaaaaaggaggatggcaaggtgttttggcagaatctggctggctacaagagacaggaagccctgagaccatacctgagcagcgaggaagatcggaagaagggaaagaaattcgctcggtaccagctgggcgacctgctgctgcacctggaaaagaagcacggcgaggactggggaaaggtgtacgacgaggcctgggagcggattgacaagaaagtggaaggcctgagcaagcacatcaagctggaagaggaacggagaagcgaggacgcccagagcaaggccgccctgaccgactggctgcgggctaaggccagcttcgtgatcgagggcctgaaggaggccgacaaggacgagttctgcagatgcgagctgaagctgcagaagtggtacggggacctgcggggaaagcccttcgccatcgaagccgagaacagcatcctggacatcagcggcttcagcaagcagtacaactgtgccttcatctggcagaaggacggcgtgaagaagctgaacctgtacctgatcatcaactacttcaagggcggcaagctgcggttcaagaagatcaaacctgaagccttcgaagccaacagattctacaccgtgatcaacaaaaagagcggcgagatcgtgcccatggaggtgaacttcaacttcgacgaccccaacctgatcatcctgcctctggcctttggcaagagacagggcagagaattcatctggaacgacctgctgtccctggaaaccggcagcctgaagctggccaacggaagagtgatcgagaagacactgtacaacagaagaacccggcaggatgagcctgccctgttcgtggccctgaccttcgagcggcgggaggtcctggactcctccaatatcaaaccaatgaacctgatcggcgtggcaagaggcgaaaacatccccgccgtgatcgccctgaccgaccccgagggctgcccactgagccggtttaaggatagcctgggaaacccaacccacatcctgagaatcggcgagagctataaggagaagcagcggaccatccaggccaagaaggaggtggagcagcggagagccggcggctacagccggaagtacgccagcaaagccaagaatctggcagacgatatggtgagaaacaccgctagagatctgctgtactacgccgtgacccaggatgccatgctgatcttcgccaacctgagccggggcttcggccggcagggcaagcggaccttcatggccgagagacagtacacacggatggaggactggctgaccgccaagctggcctacgagggcctgagcaagacctacctgtccaagacactggcccagtacacctccaagacatgcagcaactgtgggtttaccatcaccagcgccgactacgacagggtgctggagaagctgaagaagacagcaacaggctggatgaccacaattaacggcaaggagctgaaggtggagggccagattacctactacaacagatacaagagacagaacgtagtcaaggacctgtccgtcgagctggatagactgagcgaagaatctgtgaacaacgacatctcctcctggacaaagggcagaagcggagaagctctgagcctcctgaagaaaagattctcccatagacccgtgcaggagaagttcgtgtgcctgaactgcggcttcgagacacacgcagccgagcaagccgccctgaacatcgccagatcctggctgttcctgcggagccaggagtacaagaaataccagacaaacaagacaaccggcaacaccgataagagagccttcgtcgagacctggcagtccttttaccggaagaagcttaaggaggtgtggaaacctgccgtgcggtctggcggatctggcggaggctccacaagcaagcccggcgccgtgagcttcgccgacgtggccgtgtacttcagccccgaggagtggggctgcctgaggcccgcccagagggccctgtacagggacgtgatgagggagacctacggccacctgggcgccctgggcttccccggccccaagcccgccctgatcagctggatggagcaggagagcgaggcctggagcagcgccgcccaggaccccgagaagggcgagagcctgggcggcgccaggaccagccccaagaaaaagagaaaagtctaagctgccttctgcggggcttgccttctggccatgcccttcttctctcccttgcacctgtacctcttggtctttgaataaagcctgagtaggaaggctagcaaaaaaaaaaaaaaaaaaaaaaaaaaaaaaaaaaaaaaaaaaaaaaaaaaaaaaaaaaaaaaaaaaaaaaaaaaaaaaaa

SEQ ID NO: 5760 - RNA, 5797 nt, synthetic construct
  source 1..5797: mol_type = other RNA
aggaaataagagagaaaagaagagtaagaagaaatataagagccaccatggcccctaagaagaagcgtaaagtgagccggatggaacgcctcgtctacgaggtgcggcagaagtgcagaaacatcgaggacatctgcatctcctgcggatctctgaacgtgaccctggagcacccactgttcatcggcggcatgtgccagaactgtaaaaactgttttctggagtgtgcctatcaatacgacgatgacggctaccagagctactgcaccatctgttgcggcggaagagaggtgctgatgtgtggaaataacaactgctgccggtgcttctgcgtggaatgcgtggacctgctggtgggccccggcgccgcccaggccgctattaaggaagatccttggaactgctacatgtgcggccacaagggcacatacggcctgctgagacggagagaggactggcctagcagactgcagatgttcttcgccaataaccacgaccaggagttcgacccccctaaggtgtaccctcccgtccccgccgagaagagaaagcccatccgggtcctgagcctgttcgatggcatcgccaccggtctgctggtgctgaaggacctgggcatccaggtggataggtacattgcctccgaggtgtgcgaggactccatcaccgtgggaatggtgcgtcatcagggcaagatcatgtacgtgggcgacgtgcggagcgtgacacagaagcatatccaggagtggggccctttcgacctggtgatcggcggcagcccttgcaatgacctgagcatcgtgaacccagcccggaagggcctgtacgagggaaccggcagactgttcttcgagttttacagactgctgcacgacgcccggcctaaggaaggcgacgaccggcccttcttttggctgttcgagaatgtggtggccatgggagtcagcgacaagcgggatattagccggttcctggagagcaaccccgtgatgatcgatgccaaggaagtgagcgccgcccaccgggccagatacttctggggcaatctgcctggcatgaacagacccctggccagcaccgtgaacgacaagctggagctgcaggagtgcctggagcacggccggatcgccaagttcagcaaggtgagaaccatcaccacccgaagcaacagcatcaaacaaggcaaggaccagcactttcctgtgttcatgaacgagaaggaggacatcctgtggtgtaccgagatggagagagtgttcgggttcccagtccactacacagatgtcagcaacatgtctagactggccagacagagactgctgggaagaagctggtccgtccctgtgatcagacacctgttcgcccctctgaaggagtacttcgcctgcgtgagcagcggcaacagcaacgccaacagccggggccccagcttctctagcggcctggtgccactgtccctgagagggagccacatgggccccatggagatctacaaaaccgtgagcgcctggaagcggcagcctgtgcgcgtgctgagcctgtttcggaatatcgataaagtcctgaaaagcctgggattcctggagagcggctctggctccggcggtggcaccctgaagtacgtggaggatgtgacaaacgtggtcagacgggatgtggagaagtggggccccttcgatctggtgtacggcagcacccaacccctgggcagctcttgtgaccggtgccctggctggtacatgtttcagttccaccggatcctgcagtacgccctgccgagacaggagtcccagcggccattcttttggattttcatggacaacttgctgctgaccgaggatgaccaggaaactaccactcggttcctgcagaccgaagccgtgaccctgcaggacgtgagaggccgggactaccagaacgccatgcgggtgtggtccaacatccctggactgaaaagcaagcacgcacctctgacccctaaagaagaggagtacctgcaggcccaggtgcggagcagaagcaagctggacgcccctaaggtggatctgctggtgaagaattgcctcctgcccctgagagagtacttcaagtatttcagccagaatagtctgcccctgggcggcccaagcagcggcgcccctcctcccagcggcggcagcccagccggctccccaacctctaccgaggagggcacctctgagtccgccacccccgagagcggccctggcacctccaccgagcccagcgagggcagcgcacccggcagccctgccggcagccccacctccacagaggagggaaccagcaccgagcccagcgaaggcagcgccccaggcaccagcaccgagcctagtgagggcggctctggcggcggcagcgcccaggagattaaacggatcaacaagatcagaagaagacttgtgaaagacagcaacaccaagaaggccggcaagacaggccccatgaaaaccctgctggttagagtgatgacacccgatctgagagagcggctggaaaacctgagaaagaagcctgaaaatatcccccagcccatcagcaatacatctagagccaacctgaataagctgctgaccgattacaccgaaatgaagaaggcgatcctgcatgtgtactgggaagagttccagaaggaccctgtgggcctgatgagccgggtggcccagcctgccagcaagaagatcgatcagaacaagctgaaacctgagatggacgagaagggcaacctgaccaccgccggctttgcctgctctcagtgtggccagcccctgttcgtgtacaagctggagcaggtgtctgagaagggcaaggcttacaccaactacttcggacggtgcaatgtggccgagcacgaaaagctgatcctgctggcccagctgaagcccgagaaggatagcgacgaagccgtgacatatagcctgggaaagtttgggcagagggccctggatttctacagcattcatgtgaccaaggagtccacccaccccgtgaagcccctggcccagatcgccggaaacagatacgcctccggacctgtgggaaaggccctgagcgacgcatgtatgggcacaatcgcctccttcctgtctaagtaccaggacatcatcatcgaacaccagaaggtggtgaagggcaaccagaagagactggagagcctgcgggagctggccggcaaggaaaacctggaataccctagcgtgaccctgccacctcagcctcacaccaaggagggcgttgatgcctacaacgaagtgatcgcccgggtgcgaatgtgggtgaacctgaacctgtggcagaagctgaagctaagcagagatgatgccaagcctctgctgagactgaagggattcccttcctttcctctggtcgagagacaggccaacgaagtggactggtgggacatggtgtgtaacgtgaagaagctgatcaacgagaaaaaggaggatggcaaggtgttttggcagaatctggctggctacaagagacaggaagccctgagaccatacctgagcagcgaggaagatcggaagaagggaaagaaattcgctcggtaccagctgggcgacctgctgctgcacctggaaaagaagcacggcgaggactggggaaaggtgtacgacgaggcctgggagcggattgacaagaaagtggaaggcctgagcaagcacatcaagctggaagaggaacggagaagcgaggacgcccagagcaaggccgccctgaccgactggctgcgggctaaggccagcttcgtgatcgagggcctgaaggaggccgacaaggacgagttctgcagatgcgagctgaagctgcagaagtggtacggggacctgcggggaaagcccttcgccatcgaagccgagaacagcatcctggacatcagcggcttcagcaagcagtacaactgtgccttcatctggcagaaggacggcgtgaagaagctgaacctgtacctgatcatcaactacttcaagggcggcaagctgcggttcaagaagatcaaacctgaagccttcgaagccaacagattctacaccgtgatcaacaaaaagagcggcgagatcgtgcccatggaggtgaacttcaacttcgacgaccccaacctgatcatcctgcctctggcctttggcaagagacagggcagagaattcatctggaacgacctgctgtccctggaaaccggcagcctgaagctggccaacggaagagtgatcgagaagacactgtacaacagaagaacccggcaggatgagcctgccctgttcgtggccctgaccttcgagcggcgggaggtcctggactcctccaatatcaaaccaatgaacctgatcggcgtggcaagaggcgaaaacatccccgccgtgatcgccctgaccgaccccgagggctgcccactgagccggtttaaggatagcctgggaaacccaacccacatcctgagaatcggcgagagctataaggagaagcagcggaccatccaggccaagaaggaggtggagcagcggagagccggcggctacagccggaagtacgccagcaaagccaagaatctggcagacgatatggtgagaaacaccgctagagatctgctgtactacgccgtgacccaggatgccatgctgatcttcgccaacctgagccggggcttcggccggcagggcaagcggaccttcatggccgagagacagtacacacggatggaggactggctgaccgccaagctggcctacgagggcctgagcaagacctacctgtccaagacactggcccagtacacctccaagacatgcagcaactgtgggtttaccatcaccagcgccgactacgacagggtgctggagaagctgaagaagacagcaacaggctggatgaccacaattaacggcaaggagctgaaggtggagggccagattacctactacaacagatacaagagacagaacgtagtcaaggacctgtccgtcgagctggatagactgagcgaagaatctgtgaacaacgacatctcctcctggacaaagggcagaagcggagaagctctgagcctcctgaagaaaagattctcccatagacccgtgcaggagaagttcgtgtgcctgaactgcggcttcgagacacacgcagccgagcaagccgccctgaacatcgccagatcctggctgttcctgcggagccaggagtacaagaaataccagacaaacaagacaaccggcaacaccgataagagagccttcgtcgagacctggcagtccttttaccggaagaagcttaaggaggtgtggaaacctgccgtgcggtctggcggatctggcggaggctccacaagcaagcccggcgccgtgagcttcgccgacgtggccgtgtacttcagccccgaggagtggggctgcctgaggcccgcccagagggccctgtacagggacgtgatgagggagacctacggccacctgggcgccctgggcttccccggccccaagcccgccctgatcagctggatggagcaggagagcgaggagagcgaggcctggagccccgccgccaaggaccccgaggagggcgagagcctgggcaccagccccaagaaaaagagaaaagtctaagctgccttctgcggggcttgccttctggccatgcccttcttctctcccttgcacctgtacctcttggtctttgaataaagcctgagtaggaaggctagcaaaaaaaaaaaaaaaaaaaaaaaaaaaaaaaaaaaaaaaaaaaaaaaaaaaaaaaaaaaaaaaaaaaaaaaaaaaaaaaa

SEQ ID NO: 5761 - RNA, 5797 nt, synthetic construct
  source 1..5797: mol_type = other RNA
aggaaataagagagaaaagaagagtaagaagaaatataagagccaccatggcccctaagaagaagcgtaaagtgagccggatggaacgcctcgtctacgaggtgcggcagaagtgcagaaacatcgaggacatctgcatctcctgcggatctctgaacgtgaccctggagcacccactgttcatcggcggcatgtgccagaactgtaaaaactgttttctggagtgtgcctatcaatacgacgatgacggctaccagagctactgcaccatctgttgcggcggaagagaggtgctgatgtgtggaaataacaactgctgccggtgcttctgcgtggaatgcgtggacctgctggtgggccccggcgccgcccaggccgctattaaggaagatccttggaactgctacatgtgcggccacaagggcacatacggcctgctgagacggagagaggactggcctagcagactgcagatgttcttcgccaataaccacgaccaggagttcgacccccctaaggtgtaccctcccgtccccgccgagaagagaaagcccatccgggtcctgagcctgttcgatggcatcgccaccggtctgctggtgctgaaggacctgggcatccaggtggataggtacattgcctccgaggtgtgcgaggactccatcaccgtgggaatggtgcgtcatcagggcaagatcatgtacgtgggcgacgtgcggagcgtgacacagaagcatatccaggagtggggccctttcgacctggtgatcggcggcagcccttgcaatgacctgagcatcgtgaacccagcccggaagggcctgtacgagggaaccggcagactgttcttcgagttttacagactgctgcacgacgcccggcctaaggaaggcgacgaccggcccttcttttggctgttcgagaatgtggtggccatgggagtcagcgacaagcgggatattagccggttcctggagagcaaccccgtgatgatcgatgccaaggaagtgagcgccgcccaccgggccagatacttctggggcaatctgcctggcatgaacagacccctggccagcaccgtgaacgacaagctggagctgcaggagtgcctggagcacggccggatcgccaagttcagcaaggtgagaaccatcaccacccgaagcaacagcatcaaacaaggcaaggaccagcactttcctgtgttcatgaacgagaaggaggacatcctgtggtgtaccgagatggagagagtgttcgggttcccagtccactacacagatgtcagcaacatgtctagactggccagacagagactgctgggaagaagctggtccgtccctgtgatcagacacctgttcgcccctctgaaggagtacttcgcctgcgtgagcagcggcaacagcaacgccaacagccggggccccagcttctctagcggcctggtgccactgtccctgagagggagccacatgggccccatggagatctacaaaaccgtgagcgcctggaagcggcagcctgtgcgcgtgctgagcctgtttcggaatatcgataaagtcctgaaaagcctgggattcctggagagcggctctggctccggcggtggcaccctgaagtacgtggaggatgtgacaaacgtggtcagacgggatgtggagaagtggggccccttcgatctggtgtacggcagcacccaacccctgggcagctcttgtgaccggtgccctggctggtacatgtttcagttccaccggatcctgcagtacgccctgccgagacaggagtcccagcggccattcttttggattttcatggacaacttgctgctgaccgaggatgaccaggaaactaccactcggttcctgcagaccgaagccgtgaccctgcaggacgtgagaggccgggactaccagaacgccatgcgggtgtggtccaacatccctggactgaaaagcaagcacgcacctctgacccctaaagaagaggagtacctgcaggcccaggtgcggagcagaagcaagctggacgcccctaaggtggatctgctggtgaagaattgcctcctgcccctgagagagtacttcaagtatttcagccagaatagtctgcccctgggcggcccaagcagcggcgcccctcctcccagcggcggcagcccagccggctccccaacctctaccgaggagggcacctctgagtccgccacccccgagagcggccctggcacctccaccgagcccagcgagggcagcgcacccggcagccctgccggcagccccacctccacagaggagggaaccagcaccgagcccagcgaaggcagcgccccaggcaccagcaccgagcctagtgagggcggctctggcggcggcagcgcccaggagattaaacggatcaacaagatcagaagaagacttgtgaaagacagcaacaccaagaaggccggcaagacaggccccatgaaaaccctgctggttagagtgatgacacccgatctgagagagcggctggaaaacctgagaaagaagcctgaaaatatcccccagcccatcagcaatacatctagagccaacctgaataagctgctgaccgattacaccgaaatgaagaaggcgatcctgcatgtgtactgggaagagttccagaaggaccctgtgggcctgatgagccgggtggcccagcctgccagcaagaagatcgatcagaacaagctgaaacctgagatggacgagaagggcaacctgaccaccgccggctttgcctgctctcagtgtggccagcccctgttcgtgtacaagctggagcaggtgtctgagaagggcaaggcttacaccaactacttcggacggtgcaatgtggccgagcacgaaaagctgatcctgctggcccagctgaagcccgagaaggatagcgacgaagccgtgacatatagcctgggaaagtttgggcagagggccctggatttctacagcattcatgtgaccaaggagtccacccaccccgtgaagcccctggcccagatcgccggaaacagatacgcctccggacctgtgggaaaggccctgagcgacgcatgtatgggcacaatcgcctccttcctgtctaagtaccaggacatcatcatcgaacaccagaaggtggtgaagggcaaccagaagagactggagagcctgcgggagctggccggcaaggaaaacctggaataccctagcgtgaccctgccacctcagcctcacaccaaggagggcgttgatgcctacaacgaagtgatcgcccgggtgcgaatgtgggtgaacctgaacctgtggcagaagctgaagctaagcagagatgatgccaagcctctgctgagactgaagggattcccttcctttcctctggtcgagagacaggccaacgaagtggactggtgggacatggtgtgtaacgtgaagaagctgatcaacgagaaaaaggaggatggcaaggtgttttggcagaatctggctggctacaagagacaggaagccctgagaccatacctgagcagcgaggaagatcggaagaagggaaagaaattcgctcggtaccagctgggcgacctgctgctgcacctggaaaagaagcacggcgaggactggggaaaggtgtacgacgaggcctgggagcggattgacaagaaagtggaaggcctgagcaagcacatcaagctggaagaggaacggagaagcgaggacgcccagagcaaggccgccctgaccgactggctgcgggctaaggccagcttcgtgatcgagggcctgaaggaggccgacaaggacgagttctgcagatgcgagctgaagctgcagaagtggtacggggacctgcggggaaagcccttcgccatcgaagccgagaacagcatcctggacatcagcggcttcagcaagcagtacaactgtgccttcatctggcagaaggacggcgtgaagaagctgaacctgtacctgatcatcaactacttcaagggcggcaagctgcggttcaagaagatcaaacctgaagccttcgaagccaacagattctacaccgtgatcaacaaaaagagcggcgagatcgtgcccatggaggtgaacttcaacttcgacgaccccaacctgatcatcctgcctctggcctttggcaagagacagggcagagaattcatctggaacgacctgctgtccctggaaaccggcagcctgaagctggccaacggaagagtgatcgagaagacactgtacaacagaagaacccggcaggatgagcctgccctgttcgtggccctgaccttcgagcggcgggaggtcctggactcctccaatatcaaaccaatgaacctgatcggcgtggcaagaggcgaaaacatccccgccgtgatcgccctgaccgaccccgagggctgcccactgagccggtttaaggatagcctgggaaacccaacccacatcctgagaatcggcgagagctataaggagaagcagcggaccatccaggccaagaaggaggtggagcagcggagagccggcggctacagccggaagtacgccagcaaagccaagaatctggcagacgatatggtgagaaacaccgctagagatctgctgtactacgccgtgacccaggatgccatgctgatcttcgccaacctgagccggggcttcggccggcagggcaagcggaccttcatggccgagagacagtacacacggatggaggactggctgaccgccaagctggcctacgagggcctgagcaagacctacctgtccaagacactggcccagtacacctccaagacatgcagcaactgtgggtttaccatcaccagcgccgactacgacagggtgctggagaagctgaagaagacagcaacaggctggatgaccacaattaacggcaaggagctgaaggtggagggccagattacctactacaacagatacaagagacagaacgtagtcaaggacctgtccgtcgagctggatagactgagcgaagaatctgtgaacaacgacatctcctcctggacaaagggcagaagcggagaagctctgagcctcctgaagaaaagattctcccatagacccgtgcaggagaagttcgtgtgcctgaactgcggcttcgagacacacgcagccgagcaagccgccctgaacatcgccagatcctggctgttcctgcggagccaggagtacaagaaataccagacaaacaagacaaccggcaacaccgataagagagccttcgtcgagacctggcagtccttttaccggaagaagcttaaggaggtgtggaaacctgccgtgcggtctggcggatctggcggaggctccacaagcagccagagccccctgaccttcggcgacgtggccgtggagttcagcggcgacgagtgggcctggctggacagcgcccagaggagcctgcacaggagcgtgatgctggagaactacaggaacctggccagcctgggcctgtgcatgagcaagcccgagatgatcagcagcctggagcagagcaaggagccctgggccgtgaaggccaagagcaccaggggcaggtgccccggcctggaggccatcaccagccccaagaaaaagagaaaagtctaagctgccttctgcggggcttgccttctggccatgcccttcttctctcccttgcacctgtacctcttggtctttgaataaagcctgagtaggaaggctagcaaaaaaaaaaaaaaaaaaaaaaaaaaaaaaaaaaaaaaaaaaaaaaaaaaaaaaaaaaaaaaaaaaaaaaaaaaaaaaaa

SEQ ID NO: 5762 - RNA, 5797 nt, synthetic construct
  source 1..5797: mol_type = other RNA
aggaaataagagagaaaagaagagtaagaagaaatataagagccaccatggcccctaagaagaagcgtaaagtgagccggatggaacgcctcgtctacgaggtgcggcagaagtgcagaaacatcgaggacatctgcatctcctgcggatctctgaacgtgaccctggagcacccactgttcatcggcggcatgtgccagaactgtaaaaactgttttctggagtgtgcctatcaatacgacgatgacggctaccagagctactgcaccatctgttgcggcggaagagaggtgctgatgtgtggaaataacaactgctgccggtgcttctgcgtggaatgcgtggacctgctggtgggccccggcgccgcccaggccgctattaaggaagatccttggaactgctacatgtgcggccacaagggcacatacggcctgctgagacggagagaggactggcctagcagactgcagatgttcttcgccaataaccacgaccaggagttcgacccccctaaggtgtaccctcccgtccccgccgagaagagaaagcccatccgggtcctgagcctgttcgatggcatcgccaccggtctgctggtgctgaaggacctgggcatccaggtggataggtacattgcctccgaggtgtgcgaggactccatcaccgtgggaatggtgcgtcatcagggcaagatcatgtacgtgggcgacgtgcggagcgtgacacagaagcatatccaggagtggggccctttcgacctggtgatcggcggcagcccttgcaatgacctgagcatcgtgaacccagcccggaagggcctgtacgagggaaccggcagactgttcttcgagttttacagactgctgcacgacgcccggcctaaggaaggcgacgaccggcccttcttttggctgttcgagaatgtggtggccatgggagtcagcgacaagcgggatattagccggttcctggagagcaaccccgtgatgatcgatgccaaggaagtgagcgccgcccaccgggccagatacttctggggcaatctgcctggcatgaacagacccctggccagcaccgtgaacgacaagctggagctgcaggagtgcctggagcacggccggatcgccaagttcagcaaggtgagaaccatcaccacccgaagcaacagcatcaaacaaggcaaggaccagcactttcctgtgttcatgaacgagaaggaggacatcctgtggtgtaccgagatggagagagtgttcgggttcccagtccactacacagatgtcagcaacatgtctagactggccagacagagactgctgggaagaagctggtccgtccctgtgatcagacacctgttcgcccctctgaaggagtacttcgcctgcgtgagcagcggcaacagcaacgccaacagccggggccccagcttctctagcggcctggtgccactgtccctgagagggagccacatgggccccatggagatctacaaaaccgtgagcgcctggaagcggcagcctgtgcgcgtgctgagcctgtttcggaatatcgataaagtcctgaaaagcctgggattcctggagagcggctctggctccggcggtggcaccctgaagtacgtggaggatgtgacaaacgtggtcagacgggatgtggagaagtggggccccttcgatctggtgtacggcagcacccaacccctgggcagctcttgtgaccggtgccctggctggtacatgtttcagttccaccggatcctgcagtacgccctgccgagacaggagtcccagcggccattcttttggattttcatggacaacttgctgctgaccgaggatgaccaggaaactaccactcggttcctgcagaccgaagccgtgaccctgcaggacgtgagaggccgggactaccagaacgccatgcgggtgtggtccaacatccctggactgaaaagcaagcacgcacctctgacccctaaagaagaggagtacctgcaggcccaggtgcggagcagaagcaagctggacgcccctaaggtggatctgctggtgaagaattgcctcctgcccctgagagagtacttcaagtatttcagccagaatagtctgcccctgggcggcccaagcagcggcgcccctcctcccagcggcggcagcccagccggctccccaacctctaccgaggagggcacctctgagtccgccacccccgagagcggccctggcacctccaccgagcccagcgagggcagcgcacccggcagccctgccggcagccccacctccacagaggagggaaccagcaccgagcccagcgaaggcagcgccccaggcaccagcaccgagcctagtgagggcggctctggcggcggcagcgcccaggagattaaacggatcaacaagatcagaagaagacttgtgaaagacagcaacaccaagaaggccggcaagacaggccccatgaaaaccctgctggttagagtgatgacacccgatctgagagagcggctggaaaacctgagaaagaagcctgaaaatatcccccagcccatcagcaatacatctagagccaacctgaataagctgctgaccgattacaccgaaatgaagaaggcgatcctgcatgtgtactgggaagagttccagaaggaccctgtgggcctgatgagccgggtggcccagcctgccagcaagaagatcgatcagaacaagctgaaacctgagatggacgagaagggcaacctgaccaccgccggctttgcctgctctcagtgtggccagcccctgttcgtgtacaagctggagcaggtgtctgagaagggcaaggcttacaccaactacttcggacggtgcaatgtggccgagcacgaaaagctgatcctgctggcccagctgaagcccgagaaggatagcgacgaagccgtgacatatagcctgggaaagtttgggcagagggccctggatttctacagcattcatgtgaccaaggagtccacccaccccgtgaagcccctggcccagatcgccggaaacagatacgcctccggacctgtgggaaaggccctgagcgacgcatgtatgggcacaatcgcctccttcctgtctaagtaccaggacatcatcatcgaacaccagaaggtggtgaagggcaaccagaagagactggagagcctgcgggagctggccggcaaggaaaacctggaataccctagcgtgaccctgccacctcagcctcacaccaaggagggcgttgatgcctacaacgaagtgatcgcccgggtgcgaatgtgggtgaacctgaacctgtggcagaagctgaagctaagcagagatgatgccaagcctctgctgagactgaagggattcccttcctttcctctggtcgagagacaggccaacgaagtggactggtgggacatggtgtgtaacgtgaagaagctgatcaacgagaaaaaggaggatggcaaggtgttttggcagaatctggctggctacaagagacaggaagccctgagaccatacctgagcagcgaggaagatcggaagaagggaaagaaattcgctcggtaccagctgggcgacctgctgctgcacctggaaaagaagcacggcgaggactggggaaaggtgtacgacgaggcctgggagcggattgacaagaaagtggaaggcctgagcaagcacatcaagctggaagaggaacggagaagcgaggacgcccagagcaaggccgccctgaccgactggctgcgggctaaggccagcttcgtgatcgagggcctgaaggaggccgacaaggacgagttctgcagatgcgagctgaagctgcagaagtggtacggggacctgcggggaaagcccttcgccatcgaagccgagaacagcatcctggacatcagcggcttcagcaagcagtacaactgtgccttcatctggcagaaggacggcgtgaagaagctgaacctgtacctgatcatcaactacttcaagggcggcaagctgcggttcaagaagatcaaacctgaagccttcgaagccaacagattctacaccgtgatcaacaaaaagagcggcgagatcgtgcccatggaggtgaacttcaacttcgacgaccccaacctgatcatcctgcctctggcctttggcaagagacagggcagagaattcatctggaacgacctgctgtccctggaaaccggcagcctgaagctggccaacggaagagtgatcgagaagacactgtacaacagaagaacccggcaggatgagcctgccctgttcgtggccctgaccttcgagcggcgggaggtcctggactcctccaatatcaaaccaatgaacctgatcggcgtggcaagaggcgaaaacatccccgccgtgatcgccctgaccgaccccgagggctgcccactgagccggtttaaggatagcctgggaaacccaacccacatcctgagaatcggcgagagctataaggagaagcagcggaccatccaggccaagaaggaggtggagcagcggagagccggcggctacagccggaagtacgccagcaaagccaagaatctggcagacgatatggtgagaaacaccgctagagatctgctgtactacgccgtgacccaggatgccatgctgatcttcgccaacctgagccggggcttcggccggcagggcaagcggaccttcatggccgagagacagtacacacggatggaggactggctgaccgccaagctggcctacgagggcctgagcaagacctacctgtccaagacactggcccagtacacctccaagacatgcagcaactgtgggtttaccatcaccagcgccgactacgacagggtgctggagaagctgaagaagacagcaacaggctggatgaccacaattaacggcaaggagctgaaggtggagggccagattacctactacaacagatacaagagacagaacgtagtcaaggacctgtccgtcgagctggatagactgagcgaagaatctgtgaacaacgacatctcctcctggacaaagggcagaagcggagaagctctgagcctcctgaagaaaagattctcccatagacccgtgcaggagaagttcgtgtgcctgaactgcggcttcgagacacacgcagccgagcaagccgccctgaacatcgccagatcctggctgttcctgcggagccaggagtacaagaaataccagacaaacaagacaaccggcaacaccgataagagagccttcgtcgagacctggcagtccttttaccggaagaagcttaaggaggtgtggaaacctgccgtgcggtctggcggatctggcggaggctccacaagcatggccttcgaggacgtggccgtgtacttcagccaggaggagtggggcctgctggacaccgcccagagggccctgtacaggcacgtgatgctggagaacttcaccctggtgaccagcctgggcctgagcaccagcaggccctacgtggtgatccagctggagaggggcgaggagccctgggtgcccagcggcaaggacatgaccctggccaggaacacctacaggaggctgaacgccggcagcaccagccccaagaaaaagagaaaagtctaagctgccttctgcggggcttgccttctggccatgcccttcttctctcccttgcacctgtacctcttggtctttgaataaagcctgagtaggaaggctagcaaaaaaaaaaaaaaaaaaaaaaaaaaaaaaaaaaaaaaaaaaaaaaaaaaaaaaaaaaaaaaaaaaaaaaaaaaaaaaaa

SEQ ID NO: 5763 - RNA, 5797 nt, synthetic construct
  source 1..5797: mol_type = other RNA
aggaaataagagagaaaagaagagtaagaagaaatataagagccaccatggcccctaagaagaagcgtaaagtgagccggatggaacgcctcgtctacgaggtgcggcagaagtgcagaaacatcgaggacatctgcatctcctgcggatctctgaacgtgaccctggagcacccactgttcatcggcggcatgtgccagaactgtaaaaactgttttctggagtgtgcctatcaatacgacgatgacggctaccagagctactgcaccatctgttgcggcggaagagaggtgctgatgtgtggaaataacaactgctgccggtgcttctgcgtggaatgcgtggacctgctggtgggccccggcgccgcccaggccgctattaaggaagatccttggaactgctacatgtgcggccacaagggcacatacggcctgctgagacggagagaggactggcctagcagactgcagatgttcttcgccaataaccacgaccaggagttcgacccccctaaggtgtaccctcccgtccccgccgagaagagaaagcccatccgggtcctgagcctgttcgatggcatcgccaccggtctgctggtgctgaaggacctgggcatccaggtggataggtacattgcctccgaggtgtgcgaggactccatcaccgtgggaatggtgcgtcatcagggcaagatcatgtacgtgggcgacgtgcggagcgtgacacagaagcatatccaggagtggggccctttcgacctggtgatcggcggcagcccttgcaatgacctgagcatcgtgaacccagcccggaagggcctgtacgagggaaccggcagactgttcttcgagttttacagactgctgcacgacgcccggcctaaggaaggcgacgaccggcccttcttttggctgttcgagaatgtggtggccatgggagtcagcgacaagcgggatattagccggttcctggagagcaaccccgtgatgatcgatgccaaggaagtgagcgccgcccaccgggccagatacttctggggcaatctgcctggcatgaacagacccctggccagcaccgtgaacgacaagctggagctgcaggagtgcctggagcacggccggatcgccaagttcagcaaggtgagaaccatcaccacccgaagcaacagcatcaaacaaggcaaggaccagcactttcctgtgttcatgaacgagaaggaggacatcctgtggtgtaccgagatggagagagtgttcgggttcccagtccactacacagatgtcagcaacatgtctagactggccagacagagactgctgggaagaagctggtccgtccctgtgatcagacacctgttcgcccctctgaaggagtacttcgcctgcgtgagcagcggcaacagcaacgccaacagccggggccccagcttctctagcggcctggtgccactgtccctgagagggagccacatgggccccatggagatctacaaaaccgtgagcgcctggaagcggcagcctgtgcgcgtgctgagcctgtttcggaatatcgataaagtcctgaaaagcctgggattcctggagagcggctctggctccggcggtggcaccctgaagtacgtggaggatgtgacaaacgtggtcagacgggatgtggagaagtggggccccttcgatctggtgtacggcagcacccaacccctgggcagctcttgtgaccggtgccctggctggtacatgtttcagttccaccggatcctgcagtacgccctgccgagacaggagtcccagcggccattcttttggattttcatggacaacttgctgctgaccgaggatgaccaggaaactaccactcggttcctgcagaccgaagccgtgaccctgcaggacgtgagaggccgggactaccagaacgccatgcgggtgtggtccaacatccctggactgaaaagcaagcacgcacctctgacccctaaagaagaggagtacctgcaggcccaggtgcggagcagaagcaagctggacgcccctaaggtggatctgctggtgaagaattgcctcctgcccctgagagagtacttcaagtatttcagccagaatagtctgcccctgggcggcccaagcagcggcgcccctcctcccagcggcggcagcccagccggctccccaacctctaccgaggagggcacctctgagtccgccacccccgagagcggccctggcacctccaccgagcccagcgagggcagcgcacccggcagccctgccggcagccccacctccacagaggagggaaccagcaccgagcccagcgaaggcagcgccccaggcaccagcaccgagcctagtgagggcggctctggcggcggcagcgcccaggagattaaacggatcaacaagatcagaagaagacttgtgaaagacagcaacaccaagaaggccggcaagacaggccccatgaaaaccctgctggttagagtgatgacacccgatctgagagagcggctggaaaacctgagaaagaagcctgaaaatatcccccagcccatcagcaatacatctagagccaacctgaataagctgctgaccgattacaccgaaatgaagaaggcgatcctgcatgtgtactgggaagagttccagaaggaccctgtgggcctgatgagccgggtggcccagcctgccagcaagaagatcgatcagaacaagctgaaacctgagatggacgagaagggcaacctgaccaccgccggctttgcctgctctcagtgtggccagcccctgttcgtgtacaagctggagcaggtgtctgagaagggcaaggcttacaccaactacttcggacggtgcaatgtggccgagcacgaaaagctgatcctgctggcccagctgaagcccgagaaggatagcgacgaagccgtgacatatagcctgggaaagtttgggcagagggccctggatttctacagcattcatgtgaccaaggagtccacccaccccgtgaagcccctggcccagatcgccggaaacagatacgcctccggacctgtgggaaaggccctgagcgacgcatgtatgggcacaatcgcctccttcctgtctaagtaccaggacatcatcatcgaacaccagaaggtggtgaagggcaaccagaagagactggagagcctgcgggagctggccggcaaggaaaacctggaataccctagcgtgaccctgccacctcagcctcacaccaaggagggcgttgatgcctacaacgaagtgatcgcccgggtgcgaatgtgggtgaacctgaacctgtggcagaagctgaagctaagcagagatgatgccaagcctctgctgagactgaagggattcccttcctttcctctggtcgagagacaggccaacgaagtggactggtgggacatggtgtgtaacgtgaagaagctgatcaacgagaaaaaggaggatggcaaggtgttttggcagaatctggctggctacaagagacaggaagccctgagaccatacctgagcagcgaggaagatcggaagaagggaaagaaattcgctcggtaccagctgggcgacctgctgctgcacctggaaaagaagcacggcgaggactggggaaaggtgtacgacgaggcctgggagcggattgacaagaaagtggaaggcctgagcaagcacatcaagctggaagaggaacggagaagcgaggacgcccagagcaaggccgccctgaccgactggctgcgggctaaggccagcttcgtgatcgagggcctgaaggaggccgacaaggacgagttctgcagatgcgagctgaagctgcagaagtggtacggggacctgcggggaaagcccttcgccatcgaagccgagaacagcatcctggacatcagcggcttcagcaagcagtacaactgtgccttcatctggcagaaggacggcgtgaagaagctgaacctgtacctgatcatcaactacttcaagggcggcaagctgcggttcaagaagatcaaacctgaagccttcgaagccaacagattctacaccgtgatcaacaaaaagagcggcgagatcgtgcccatggaggtgaacttcaacttcgacgaccccaacctgatcatcctgcctctggcctttggcaagagacagggcagagaattcatctggaacgacctgctgtccctggaaaccggcagcctgaagctggccaacggaagagtgatcgagaagacactgtacaacagaagaacccggcaggatgagcctgccctgttcgtggccctgaccttcgagcggcgggaggtcctggactcctccaatatcaaaccaatgaacctgatcggcgtggcaagaggcgaaaacatccccgccgtgatcgccctgaccgaccccgagggctgcccactgagccggtttaaggatagcctgggaaacccaacccacatcctgagaatcggcgagagctataaggagaagcagcggaccatccaggccaagaaggaggtggagcagcggagagccggcggctacagccggaagtacgccagcaaagccaagaatctggcagacgatatggtgagaaacaccgctagagatctgctgtactacgccgtgacccaggatgccatgctgatcttcgccaacctgagccggggcttcggccggcagggcaagcggaccttcatggccgagagacagtacacacggatggaggactggctgaccgccaagctggcctacgagggcctgagcaagacctacctgtccaagacactggcccagtacacctccaagacatgcagcaactgtgggtttaccatcaccagcgccgactacgacagggtgctggagaagctgaagaagacagcaacaggctggatgaccacaattaacggcaaggagctgaaggtggagggccagattacctactacaacagatacaagagacagaacgtagtcaaggacctgtccgtcgagctggatagactgagcgaagaatctgtgaacaacgacatctcctcctggacaaagggcagaagcggagaagctctgagcctcctgaagaaaagattctcccatagacccgtgcaggagaagttcgtgtgcctgaactgcggcttcgagacacacgcagccgagcaagccgccctgaacatcgccagatcctggctgttcctgcggagccaggagtacaagaaataccagacaaacaagacaaccggcaacaccgataagagagccttcgtcgagacctggcagtccttttaccggaagaagcttaaggaggtgtggaaacctgccgtgcggtctggcggatctggcggaggctccacaagcatggccttcgaggacgtggccgtgtacttcagccaggaggagtggggcctgctggacaccgcccagagggccctgtacaggagggtgatgctggacaacttcgccctggtggccagcctgggcctgagcaccagcaggcccagggtggtgatccagctggagaggggcgaggagccctgggtgcccagcggcaccgacatgaccatgagcaggaacacccacaggaggaggaacagcggcttcaccagccccaagaaaaagagaaaagtctaagctgccttctgcggggcttgccttctggccatgcccttcttctctcccttgcacctgtacctcttggtctttgaataaagcctgagtaggaaggctagcaaaaaaaaaaaaaaaaaaaaaaaaaaaaaaaaaaaaaaaaaaaaaaaaaaaaaaaaaaaaaaaaaaaaaaaaaaaaaaaa

SEQ ID NO: 5764 - RNA, 5797 nt, synthetic construct
  source 1..5797: mol_type = other RNA
aggaaataagagagaaaagaagagtaagaagaaatataagagccaccatggcccctaagaagaagcgtaaagtgagccggatggaacgcctcgtctacgaggtgcggcagaagtgcagaaacatcgaggacatctgcatctcctgcggatctctgaacgtgaccctggagcacccactgttcatcggcggcatgtgccagaactgtaaaaactgttttctggagtgtgcctatcaatacgacgatgacggctaccagagctactgcaccatctgttgcggcggaagagaggtgctgatgtgtggaaataacaactgctgccggtgcttctgcgtggaatgcgtggacctgctggtgggccccggcgccgcccaggccgctattaaggaagatccttggaactgctacatgtgcggccacaagggcacatacggcctgctgagacggagagaggactggcctagcagactgcagatgttcttcgccaataaccacgaccaggagttcgacccccctaaggtgtaccctcccgtccccgccgagaagagaaagcccatccgggtcctgagcctgttcgatggcatcgccaccggtctgctggtgctgaaggacctgggcatccaggtggataggtacattgcctccgaggtgtgcgaggactccatcaccgtgggaatggtgcgtcatcagggcaagatcatgtacgtgggcgacgtgcggagcgtgacacagaagcatatccaggagtggggccctttcgacctggtgatcggcggcagcccttgcaatgacctgagcatcgtgaacccagcccggaagggcctgtacgagggaaccggcagactgttcttcgagttttacagactgctgcacgacgcccggcctaaggaaggcgacgaccggcccttcttttggctgttcgagaatgtggtggccatgggagtcagcgacaagcgggatattagccggttcctggagagcaaccccgtgatgatcgatgccaaggaagtgagcgccgcccaccgggccagatacttctggggcaatctgcctggcatgaacagacccctggccagcaccgtgaacgacaagctggagctgcaggagtgcctggagcacggccggatcgccaagttcagcaaggtgagaaccatcaccacccgaagcaacagcatcaaacaaggcaaggaccagcactttcctgtgttcatgaacgagaaggaggacatcctgtggtgtaccgagatggagagagtgttcgggttcccagtccactacacagatgtcagcaacatgtctagactggccagacagagactgctgggaagaagctggtccgtccctgtgatcagacacctgttcgcccctctgaaggagtacttcgcctgcgtgagcagcggcaacagcaacgccaacagccggggccccagcttctctagcggcctggtgccactgtccctgagagggagccacatgggccccatggagatctacaaaaccgtgagcgcctggaagcggcagcctgtgcgcgtgctgagcctgtttcggaatatcgataaagtcctgaaaagcctgggattcctggagagcggctctggctccggcggtggcaccctgaagtacgtggaggatgtgacaaacgtggtcagacgggatgtggagaagtggggccccttcgatctggtgtacggcagcacccaacccctgggcagctcttgtgaccggtgccctggctggtacatgtttcagttccaccggatcctgcagtacgccctgccgagacaggagtcccagcggccattcttttggattttcatggacaacttgctgctgaccgaggatgaccaggaaactaccactcggttcctgcagaccgaagccgtgaccctgcaggacgtgagaggccgggactaccagaacgccatgcgggtgtggtccaacatccctggactgaaaagcaagcacgcacctctgacccctaaagaagaggagtacctgcaggcccaggtgcggagcagaagcaagctggacgcccctaaggtggatctgctggtgaagaattgcctcctgcccctgagagagtacttcaagtatttcagccagaatagtctgcccctgggcggcccaagcagcggcgcccctcctcccagcggcggcagcccagccggctccccaacctctaccgaggagggcacctctgagtccgccacccccgagagcggccctggcacctccaccgagcccagcgagggcagcgcacccggcagccctgccggcagccccacctccacagaggagggaaccagcaccgagcccagcgaaggcagcgccccaggcaccagcaccgagcctagtgagggcggctctggcggcggcagcgcccaggagattaaacggatcaacaagatcagaagaagacttgtgaaagacagcaacaccaagaaggccggcaagacaggccccatgaaaaccctgctggttagagtgatgacacccgatctgagagagcggctggaaaacctgagaaagaagcctgaaaatatcccccagcccatcagcaatacatctagagccaacctgaataagctgctgaccgattacaccgaaatgaagaaggcgatcctgcatgtgtactgggaagagttccagaaggaccctgtgggcctgatgagccgggtggcccagcctgccagcaagaagatcgatcagaacaagctgaaacctgagatggacgagaagggcaacctgaccaccgccggctttgcctgctctcagtgtggccagcccctgttcgtgtacaagctggagcaggtgtctgagaagggcaaggcttacaccaactacttcggacggtgcaatgtggccgagcacgaaaagctgatcctgctggcccagctgaagcccgagaaggatagcgacgaagccgtgacatatagcctgggaaagtttgggcagagggccctggatttctacagcattcatgtgaccaaggagtccacccaccccgtgaagcccctggcccagatcgccggaaacagatacgcctccggacctgtgggaaaggccctgagcgacgcatgtatgggcacaatcgcctccttcctgtctaagtaccaggacatcatcatcgaacaccagaaggtggtgaagggcaaccagaagagactggagagcctgcgggagctggccggcaaggaaaacctggaataccctagcgtgaccctgccacctcagcctcacaccaaggagggcgttgatgcctacaacgaagtgatcgcccgggtgcgaatgtgggtgaacctgaacctgtggcagaagctgaagctaagcagagatgatgccaagcctctgctgagactgaagggattcccttcctttcctctggtcgagagacaggccaacgaagtggactggtgggacatggtgtgtaacgtgaagaagctgatcaacgagaaaaaggaggatggcaaggtgttttggcagaatctggctggctacaagagacaggaagccctgagaccatacctgagcagcgaggaagatcggaagaagggaaagaaattcgctcggtaccagctgggcgacctgctgctgcacctggaaaagaagcacggcgaggactggggaaaggtgtacgacgaggcctgggagcggattgacaagaaagtggaaggcctgagcaagcacatcaagctggaagaggaacggagaagcgaggacgcccagagcaaggccgccctgaccgactggctgcgggctaaggccagcttcgtgatcgagggcctgaaggaggccgacaaggacgagttctgcagatgcgagctgaagctgcagaagtggtacggggacctgcggggaaagcccttcgccatcgaagccgagaacagcatcctggacatcagcggcttcagcaagcagtacaactgtgccttcatctggcagaaggacggcgtgaagaagctgaacctgtacctgatcatcaactacttcaagggcggcaagctgcggttcaagaagatcaaacctgaagccttcgaagccaacagattctacaccgtgatcaacaaaaagagcggcgagatcgtgcccatggaggtgaacttcaacttcgacgaccccaacctgatcatcctgcctctggcctttggcaagagacagggcagagaattcatctggaacgacctgctgtccctggaaaccggcagcctgaagctggccaacggaagagtgatcgagaagacactgtacaacagaagaacccggcaggatgagcctgccctgttcgtggccctgaccttcgagcggcgggaggtcctggactcctccaatatcaaaccaatgaacctgatcggcgtggcaagaggcgaaaacatccccgccgtgatcgccctgaccgaccccgagggctgcccactgagccggtttaaggatagcctgggaaacccaacccacatcctgagaatcggcgagagctataaggagaagcagcggaccatccaggccaagaaggaggtggagcagcggagagccggcggctacagccggaagtacgccagcaaagccaagaatctggcagacgatatggtgagaaacaccgctagagatctgctgtactacgccgtgacccaggatgccatgctgatcttcgccaacctgagccggggcttcggccggcagggcaagcggaccttcatggccgagagacagtacacacggatggaggactggctgaccgccaagctggcctacgagggcctgagcaagacctacctgtccaagacactggcccagtacacctccaagacatgcagcaactgtgggtttaccatcaccagcgccgactacgacagggtgctggagaagctgaagaagacagcaacaggctggatgaccacaattaacggcaaggagctgaaggtggagggccagattacctactacaacagatacaagagacagaacgtagtcaaggacctgtccgtcgagctggatagactgagcgaagaatctgtgaacaacgacatctcctcctggacaaagggcagaagcggagaagctctgagcctcctgaagaaaagattctcccatagacccgtgcaggagaagttcgtgtgcctgaactgcggcttcgagacacacgcagccgagcaagccgccctgaacatcgccagatcctggctgttcctgcggagccaggagtacaagaaataccagacaaacaagacaaccggcaacaccgataagagagccttcgtcgagacctggcagtccttttaccggaagaagcttaaggaggtgtggaaacctgccgtgcggtctggcggatctggcggaggctccacaagcagccagagcctggtgaccttcggcgacgtggccgtggacttcagccaggaggagtgggagcagctgacctgcgcccagagggccctgtacagggacgtgatgctggagaactacaggaacctggtgagcctgggcctgtgcttcagcaagcccgacatgatcagcagcctggagcagagggaggagccctggatggccaagaggaagctgaccaggggcccctgccccgactggagggccgtgaccagccccaagaaaaagagaaaagtctaagctgccttctgcggggcttgccttctggccatgcccttcttctctcccttgcacctgtacctcttggtctttgaataaagcctgagtaggaaggctagcaaaaaaaaaaaaaaaaaaaaaaaaaaaaaaaaaaaaaaaaaaaaaaaaaaaaaaaaaaaaaaaaaaaaaaaaaaaaaaaa

SEQ ID NO: 5765 - RNA, 5797 nt, synthetic construct
  source 1..5797: mol_type = other RNA
aggaaataagagagaaaagaagagtaagaagaaatataagagccaccatggcccctaagaagaagcgtaaagtgagccggatggaacgcctcgtctacgaggtgcggcagaagtgcagaaacatcgaggacatctgcatctcctgcggatctctgaacgtgaccctggagcacccactgttcatcggcggcatgtgccagaactgtaaaaactgttttctggagtgtgcctatcaatacgacgatgacggctaccagagctactgcaccatctgttgcggcggaagagaggtgctgatgtgtggaaataacaactgctgccggtgcttctgcgtggaatgcgtggacctgctggtgggccccggcgccgcccaggccgctattaaggaagatccttggaactgctacatgtgcggccacaagggcacatacggcctgctgagacggagagaggactggcctagcagactgcagatgttcttcgccaataaccacgaccaggagttcgacccccctaaggtgtaccctcccgtccccgccgagaagagaaagcccatccgggtcctgagcctgttcgatggcatcgccaccggtctgctggtgctgaaggacctgggcatccaggtggataggtacattgcctccgaggtgtgcgaggactccatcaccgtgggaatggtgcgtcatcagggcaagatcatgtacgtgggcgacgtgcggagcgtgacacagaagcatatccaggagtggggccctttcgacctggtgatcggcggcagcccttgcaatgacctgagcatcgtgaacccagcccggaagggcctgtacgagggaaccggcagactgttcttcgagttttacagactgctgcacgacgcccggcctaaggaaggcgacgaccggcccttcttttggctgttcgagaatgtggtggccatgggagtcagcgacaagcgggatattagccggttcctggagagcaaccccgtgatgatcgatgccaaggaagtgagcgccgcccaccgggccagatacttctggggcaatctgcctggcatgaacagacccctggccagcaccgtgaacgacaagctggagctgcaggagtgcctggagcacggccggatcgccaagttcagcaaggtgagaaccatcaccacccgaagcaacagcatcaaacaaggcaaggaccagcactttcctgtgttcatgaacgagaaggaggacatcctgtggtgtaccgagatggagagagtgttcgggttcccagtccactacacagatgtcagcaacatgtctagactggccagacagagactgctgggaagaagctggtccgtccctgtgatcagacacctgttcgcccctctgaaggagtacttcgcctgcgtgagcagcggcaacagcaacgccaacagccggggccccagcttctctagcggcctggtgccactgtccctgagagggagccacatgggccccatggagatctacaaaaccgtgagcgcctggaagcggcagcctgtgcgcgtgctgagcctgtttcggaatatcgataaagtcctgaaaagcctgggattcctggagagcggctctggctccggcggtggcaccctgaagtacgtggaggatgtgacaaacgtggtcagacgggatgtggagaagtggggccccttcgatctggtgtacggcagcacccaacccctgggcagctcttgtgaccggtgccctggctggtacatgtttcagttccaccggatcctgcagtacgccctgccgagacaggagtcccagcggccattcttttggattttcatggacaacttgctgctgaccgaggatgaccaggaaactaccactcggttcctgcagaccgaagccgtgaccctgcaggacgtgagaggccgggactaccagaacgccatgcgggtgtggtccaacatccctggactgaaaagcaagcacgcacctctgacccctaaagaagaggagtacctgcaggcccaggtgcggagcagaagcaagctggacgcccctaaggtggatctgctggtgaagaattgcctcctgcccctgagagagtacttcaagtatttcagccagaatagtctgcccctgggcggcccaagcagcggcgcccctcctcccagcggcggcagcccagccggctccccaacctctaccgaggagggcacctctgagtccgccacccccgagagcggccctggcacctccaccgagcccagcgagggcagcgcacccggcagccctgccggcagccccacctccacagaggagggaaccagcaccgagcccagcgaaggcagcgccccaggcaccagcaccgagcctagtgagggcggctctggcggcggcagcgcccaggagattaaacggatcaacaagatcagaagaagacttgtgaaagacagcaacaccaagaaggccggcaagacaggccccatgaaaaccctgctggttagagtgatgacacccgatctgagagagcggctggaaaacctgagaaagaagcctgaaaatatcccccagcccatcagcaatacatctagagccaacctgaataagctgctgaccgattacaccgaaatgaagaaggcgatcctgcatgtgtactgggaagagttccagaaggaccctgtgggcctgatgagccgggtggcccagcctgccagcaagaagatcgatcagaacaagctgaaacctgagatggacgagaagggcaacctgaccaccgccggctttgcctgctctcagtgtggccagcccctgttcgtgtacaagctggagcaggtgtctgagaagggcaaggcttacaccaactacttcggacggtgcaatgtggccgagcacgaaaagctgatcctgctggcccagctgaagcccgagaaggatagcgacgaagccgtgacatatagcctgggaaagtttgggcagagggccctggatttctacagcattcatgtgaccaaggagtccacccaccccgtgaagcccctggcccagatcgccggaaacagatacgcctccggacctgtgggaaaggccctgagcgacgcatgtatgggcacaatcgcctccttcctgtctaagtaccaggacatcatcatcgaacaccagaaggtggtgaagggcaaccagaagagactggagagcctgcgggagctggccggcaaggaaaacctggaataccctagcgtgaccctgccacctcagcctcacaccaaggagggcgttgatgcctacaacgaagtgatcgcccgggtgcgaatgtgggtgaacctgaacctgtggcagaagctgaagctaagcagagatgatgccaagcctctgctgagactgaagggattcccttcctttcctctggtcgagagacaggccaacgaagtggactggtgggacatggtgtgtaacgtgaagaagctgatcaacgagaaaaaggaggatggcaaggtgttttggcagaatctggctggctacaagagacaggaagccctgagaccatacctgagcagcgaggaagatcggaagaagggaaagaaattcgctcggtaccagctgggcgacctgctgctgcacctggaaaagaagcacggcgaggactggggaaaggtgtacgacgaggcctgggagcggattgacaagaaagtggaaggcctgagcaagcacatcaagctggaagaggaacggagaagcgaggacgcccagagcaaggccgccctgaccgactggctgcgggctaaggccagcttcgtgatcgagggcctgaaggaggccgacaaggacgagttctgcagatgcgagctgaagctgcagaagtggtacggggacctgcggggaaagcccttcgccatcgaagccgagaacagcatcctggacatcagcggcttcagcaagcagtacaactgtgccttcatctggcagaaggacggcgtgaagaagctgaacctgtacctgatcatcaactacttcaagggcggcaagctgcggttcaagaagatcaaacctgaagccttcgaagccaacagattctacaccgtgatcaacaaaaagagcggcgagatcgtgcccatggaggtgaacttcaacttcgacgaccccaacctgatcatcctgcctctggcctttggcaagagacagggcagagaattcatctggaacgacctgctgtccctggaaaccggcagcctgaagctggccaacggaagagtgatcgagaagacactgtacaacagaagaacccggcaggatgagcctgccctgttcgtggccctgaccttcgagcggcgggaggtcctggactcctccaatatcaaaccaatgaacctgatcggcgtggcaagaggcgaaaacatccccgccgtgatcgccctgaccgaccccgagggctgcccactgagccggtttaaggatagcctgggaaacccaacccacatcctgagaatcggcgagagctataaggagaagcagcggaccatccaggccaagaaggaggtggagcagcggagagccggcggctacagccggaagtacgccagcaaagccaagaatctggcagacgatatggtgagaaacaccgctagagatctgctgtactacgccgtgacccaggatgccatgctgatcttcgccaacctgagccggggcttcggccggcagggcaagcggaccttcatggccgagagacagtacacacggatggaggactggctgaccgccaagctggcctacgagggcctgagcaagacctacctgtccaagacactggcccagtacacctccaagacatgcagcaactgtgggtttaccatcaccagcgccgactacgacagggtgctggagaagctgaagaagacagcaacaggctggatgaccacaattaacggcaaggagctgaaggtggagggccagattacctactacaacagatacaagagacagaacgtagtcaaggacctgtccgtcgagctggatagactgagcgaagaatctgtgaacaacgacatctcctcctggacaaagggcagaagcggagaagctctgagcctcctgaagaaaagattctcccatagacccgtgcaggagaagttcgtgtgcctgaactgcggcttcgagacacacgcagccgagcaagccgccctgaacatcgccagatcctggctgttcctgcggagccaggagtacaagaaataccagacaaacaagacaaccggcaacaccgataagagagccttcgtcgagacctggcagtccttttaccggaagaagcttaaggaggtgtggaaacctgccgtgcggtctggcggatctggcggaggctccacaagcatgcacctgaccgcctggccccagaagagcgtgaccttcgaggacgtggccgtgtacttcacccaggccgagtgggacggcctgagccccgcccagaggaccctgtacagggacgtgatgctggagaactacggcaacgtggccagcctgggcttccccctgctgaagcccgccgtgatcagccagctggagggcggcggcgagctgggcggccccagccccctggccgccggcaccggcctgaccagccccaagaaaaagagaaaagtctaagctgccttctgcggggcttgccttctggccatgcccttcttctctcccttgcacctgtacctcttggtctttgaataaagcctgagtaggaaggctagcaaaaaaaaaaaaaaaaaaaaaaaaaaaaaaaaaaaaaaaaaaaaaaaaaaaaaaaaaaaaaaaaaaaaaaaaaaaaaaaa

SEQ ID NO: 5766 - RNA, 5797 nt, synthetic construct
  source 1..5797: mol_type = other RNA
aggaaataagagagaaaagaagagtaagaagaaatataagagccaccatggcccctaagaagaagcgtaaagtgagccggatggaacgcctcgtctacgaggtgcggcagaagtgcagaaacatcgaggacatctgcatctcctgcggatctctgaacgtgaccctggagcacccactgttcatcggcggcatgtgccagaactgtaaaaactgttttctggagtgtgcctatcaatacgacgatgacggctaccagagctactgcaccatctgttgcggcggaagagaggtgctgatgtgtggaaataacaactgctgccggtgcttctgcgtggaatgcgtggacctgctggtgggccccggcgccgcccaggccgctattaaggaagatccttggaactgctacatgtgcggccacaagggcacatacggcctgctgagacggagagaggactggcctagcagactgcagatgttcttcgccaataaccacgaccaggagttcgacccccctaaggtgtaccctcccgtccccgccgagaagagaaagcccatccgggtcctgagcctgttcgatggcatcgccaccggtctgctggtgctgaaggacctgggcatccaggtggataggtacattgcctccgaggtgtgcgaggactccatcaccgtgggaatggtgcgtcatcagggcaagatcatgtacgtgggcgacgtgcggagcgtgacacagaagcatatccaggagtggggccctttcgacctggtgatcggcggcagcccttgcaatgacctgagcatcgtgaacccagcccggaagggcctgtacgagggaaccggcagactgttcttcgagttttacagactgctgcacgacgcccggcctaaggaaggcgacgaccggcccttcttttggctgttcgagaatgtggtggccatgggagtcagcgacaagcgggatattagccggttcctggagagcaaccccgtgatgatcgatgccaaggaagtgagcgccgcccaccgggccagatacttctggggcaatctgcctggcatgaacagacccctggccagcaccgtgaacgacaagctggagctgcaggagtgcctggagcacggccggatcgccaagttcagcaaggtgagaaccatcaccacccgaagcaacagcatcaaacaaggcaaggaccagcactttcctgtgttcatgaacgagaaggaggacatcctgtggtgtaccgagatggagagagtgttcgggttcccagtccactacacagatgtcagcaacatgtctagactggccagacagagactgctgggaagaagctggtccgtccctgtgatcagacacctgttcgcccctctgaaggagtacttcgcctgcgtgagcagcggcaacagcaacgccaacagccggggccccagcttctctagcggcctggtgccactgtccctgagagggagccacatgggccccatggagatctacaaaaccgtgagcgcctggaagcggcagcctgtgcgcgtgctgagcctgtttcggaatatcgataaagtcctgaaaagcctgggattcctggagagcggctctggctccggcggtggcaccctgaagtacgtggaggatgtgacaaacgtggtcagacgggatgtggagaagtggggccccttcgatctggtgtacggcagcacccaacccctgggcagctcttgtgaccggtgccctggctggtacatgtttcagttccaccggatcctgcagtacgccctgccgagacaggagtcccagcggccattcttttggattttcatggacaacttgctgctgaccgaggatgaccaggaaactaccactcggttcctgcagaccgaagccgtgaccctgcaggacgtgagaggccgggactaccagaacgccatgcgggtgtggtccaacatccctggactgaaaagcaagcacgcacctctgacccctaaagaagaggagtacctgcaggcccaggtgcggagcagaagcaagctggacgcccctaaggtggatctgctggtgaagaattgcctcctgcccctgagagagtacttcaagtatttcagccagaatagtctgcccctgggcggcccaagcagcggcgcccctcctcccagcggcggcagcccagccggctccccaacctctaccgaggagggcacctctgagtccgccacccccgagagcggccctggcacctccaccgagcccagcgagggcagcgcacccggcagccctgccggcagccccacctccacagaggagggaaccagcaccgagcccagcgaaggcagcgccccaggcaccagcaccgagcctagtgagggcggctctggcggcggcagcgcccaggagattaaacggatcaacaagatcagaagaagacttgtgaaagacagcaacaccaagaaggccggcaagacaggccccatgaaaaccctgctggttagagtgatgacacccgatctgagagagcggctggaaaacctgagaaagaagcctgaaaatatcccccagcccatcagcaatacatctagagccaacctgaataagctgctgaccgattacaccgaaatgaagaaggcgatcctgcatgtgtactgggaagagttccagaaggaccctgtgggcctgatgagccgggtggcccagcctgccagcaagaagatcgatcagaacaagctgaaacctgagatggacgagaagggcaacctgaccaccgccggctttgcctgctctcagtgtggccagcccctgttcgtgtacaagctggagcaggtgtctgagaagggcaaggcttacaccaactacttcggacggtgcaatgtggccgagcacgaaaagctgatcctgctggcccagctgaagcccgagaaggatagcgacgaagccgtgacatatagcctgggaaagtttgggcagagggccctggatttctacagcattcatgtgaccaaggagtccacccaccccgtgaagcccctggcccagatcgccggaaacagatacgcctccggacctgtgggaaaggccctgagcgacgcatgtatgggcacaatcgcctccttcctgtctaagtaccaggacatcatcatcgaacaccagaaggtggtgaagggcaaccagaagagactggagagcctgcgggagctggccggcaaggaaaacctggaataccctagcgtgaccctgccacctcagcctcacaccaaggagggcgttgatgcctacaacgaagtgatcgcccgggtgcgaatgtgggtgaacctgaacctgtggcagaagctgaagctaagcagagatgatgccaagcctctgctgagactgaagggattcccttcctttcctctggtcgagagacaggccaacgaagtggactggtgggacatggtgtgtaacgtgaagaagctgatcaacgagaaaaaggaggatggcaaggtgttttggcagaatctggctggctacaagagacaggaagccctgagaccatacctgagcagcgaggaagatcggaagaagggaaagaaattcgctcggtaccagctgggcgacctgctgctgcacctggaaaagaagcacggcgaggactggggaaaggtgtacgacgaggcctgggagcggattgacaagaaagtggaaggcctgagcaagcacatcaagctggaagaggaacggagaagcgaggacgcccagagcaaggccgccctgaccgactggctgcgggctaaggccagcttcgtgatcgagggcctgaaggaggccgacaaggacgagttctgcagatgcgagctgaagctgcagaagtggtacggggacctgcggggaaagcccttcgccatcgaagccgagaacagcatcctggacatcagcggcttcagcaagcagtacaactgtgccttcatctggcagaaggacggcgtgaagaagctgaacctgtacctgatcatcaactacttcaagggcggcaagctgcggttcaagaagatcaaacctgaagccttcgaagccaacagattctacaccgtgatcaacaaaaagagcggcgagatcgtgcccatggaggtgaacttcaacttcgacgaccccaacctgatcatcctgcctctggcctttggcaagagacagggcagagaattcatctggaacgacctgctgtccctggaaaccggcagcctgaagctggccaacggaagagtgatcgagaagacactgtacaacagaagaacccggcaggatgagcctgccctgttcgtggccctgaccttcgagcggcgggaggtcctggactcctccaatatcaaaccaatgaacctgatcggcgtggcaagaggcgaaaacatccccgccgtgatcgccctgaccgaccccgagggctgcccactgagccggtttaaggatagcctgggaaacccaacccacatcctgagaatcggcgagagctataaggagaagcagcggaccatccaggccaagaaggaggtggagcagcggagagccggcggctacagccggaagtacgccagcaaagccaagaatctggcagacgatatggtgagaaacaccgctagagatctgctgtactacgccgtgacccaggatgccatgctgatcttcgccaacctgagccggggcttcggccggcagggcaagcggaccttcatggccgagagacagtacacacggatggaggactggctgaccgccaagctggcctacgagggcctgagcaagacctacctgtccaagacactggcccagtacacctccaagacatgcagcaactgtgggtttaccatcaccagcgccgactacgacagggtgctggagaagctgaagaagacagcaacaggctggatgaccacaattaacggcaaggagctgaaggtggagggccagattacctactacaacagatacaagagacagaacgtagtcaaggacctgtccgtcgagctggatagactgagcgaagaatctgtgaacaacgacatctcctcctggacaaagggcagaagcggagaagctctgagcctcctgaagaaaagattctcccatagacccgtgcaggagaagttcgtgtgcctgaactgcggcttcgagacacacgcagccgagcaagccgccctgaacatcgccagatcctggctgttcctgcggagccaggagtacaagaaataccagacaaacaagacaaccggcaacaccgataagagagccttcgtcgagacctggcagtccttttaccggaagaagcttaaggaggtgtggaaacctgccgtgcggtctggcggatctggcggaggctccacaagcgcccccgtgaccttcggcgacctggccatctacttcagccaggaggagtgggagtggctgagccccatccagaaggacctgtacgaggacgtgatgctggagaactaccagaacctggtgagcctgggcctgtgcttcaggaggcccaacgtgatcaccctgctggagaggggcaaggccccctggatggtggaccccgtgaagaggaggaggggcctggacctgggcagcaagggcgagaccaccagccccaagaaaaagagaaaagtctaagctgccttctgcggggcttgccttctggccatgcccttcttctctcccttgcacctgtacctcttggtctttgaataaagcctgagtaggaaggctagcaaaaaaaaaaaaaaaaaaaaaaaaaaaaaaaaaaaaaaaaaaaaaaaaaaaaaaaaaaaaaaaaaaaaaaaaaaaaaaaa

SEQ ID NO: 5767 - RNA, 5797 nt, synthetic construct
  source 1..5797: mol_type = other RNA
aggaaataagagagaaaagaagagtaagaagaaatataagagccaccatggcccctaagaagaagcgtaaagtgagccggatggaacgcctcgtctacgaggtgcggcagaagtgcagaaacatcgaggacatctgcatctcctgcggatctctgaacgtgaccctggagcacccactgttcatcggcggcatgtgccagaactgtaaaaactgttttctggagtgtgcctatcaatacgacgatgacggctaccagagctactgcaccatctgttgcggcggaagagaggtgctgatgtgtggaaataacaactgctgccggtgcttctgcgtggaatgcgtggacctgctggtgggccccggcgccgcccaggccgctattaaggaagatccttggaactgctacatgtgcggccacaagggcacatacggcctgctgagacggagagaggactggcctagcagactgcagatgttcttcgccaataaccacgaccaggagttcgacccccctaaggtgtaccctcccgtccccgccgagaagagaaagcccatccgggtcctgagcctgttcgatggcatcgccaccggtctgctggtgctgaaggacctgggcatccaggtggataggtacattgcctccgaggtgtgcgaggactccatcaccgtgggaatggtgcgtcatcagggcaagatcatgtacgtgggcgacgtgcggagcgtgacacagaagcatatccaggagtggggccctttcgacctggtgatcggcggcagcccttgcaatgacctgagcatcgtgaacccagcccggaagggcctgtacgagggaaccggcagactgttcttcgagttttacagactgctgcacgacgcccggcctaaggaaggcgacgaccggcccttcttttggctgttcgagaatgtggtggccatgggagtcagcgacaagcgggatattagccggttcctggagagcaaccccgtgatgatcgatgccaaggaagtgagcgccgcccaccgggccagatacttctggggcaatctgcctggcatgaacagacccctggccagcaccgtgaacgacaagctggagctgcaggagtgcctggagcacggccggatcgccaagttcagcaaggtgagaaccatcaccacccgaagcaacagcatcaaacaaggcaaggaccagcactttcctgtgttcatgaacgagaaggaggacatcctgtggtgtaccgagatggagagagtgttcgggttcccagtccactacacagatgtcagcaacatgtctagactggccagacagagactgctgggaagaagctggtccgtccctgtgatcagacacctgttcgcccctctgaaggagtacttcgcctgcgtgagcagcggcaacagcaacgccaacagccggggccccagcttctctagcggcctggtgccactgtccctgagagggagccacatgggccccatggagatctacaaaaccgtgagcgcctggaagcggcagcctgtgcgcgtgctgagcctgtttcggaatatcgataaagtcctgaaaagcctgggattcctggagagcggctctggctccggcggtggcaccctgaagtacgtggaggatgtgacaaacgtggtcagacgggatgtggagaagtggggccccttcgatctggtgtacggcagcacccaacccctgggcagctcttgtgaccggtgccctggctggtacatgtttcagttccaccggatcctgcagtacgccctgccgagacaggagtcccagcggccattcttttggattttcatggacaacttgctgctgaccgaggatgaccaggaaactaccactcggttcctgcagaccgaagccgtgaccctgcaggacgtgagaggccgggactaccagaacgccatgcgggtgtggtccaacatccctggactgaaaagcaagcacgcacctctgacccctaaagaagaggagtacctgcaggcccaggtgcggagcagaagcaagctggacgcccctaaggtggatctgctggtgaagaattgcctcctgcccctgagagagtacttcaagtatttcagccagaatagtctgcccctgggcggcccaagcagcggcgcccctcctcccagcggcggcagcccagccggctccccaacctctaccgaggagggcacctctgagtccgccacccccgagagcggccctggcacctccaccgagcccagcgagggcagcgcacccggcagccctgccggcagccccacctccacagaggagggaaccagcaccgagcccagcgaaggcagcgccccaggcaccagcaccgagcctagtgagggcggctctggcggcggcagcgcccaggagattaaacggatcaacaagatcagaagaagacttgtgaaagacagcaacaccaagaaggccggcaagacaggccccatgaaaaccctgctggttagagtgatgacacccgatctgagagagcggctggaaaacctgagaaagaagcctgaaaatatcccccagcccatcagcaatacatctagagccaacctgaataagctgctgaccgattacaccgaaatgaagaaggcgatcctgcatgtgtactgggaagagttccagaaggaccctgtgggcctgatgagccgggtggcccagcctgccagcaagaagatcgatcagaacaagctgaaacctgagatggacgagaagggcaacctgaccaccgccggctttgcctgctctcagtgtggccagcccctgttcgtgtacaagctggagcaggtgtctgagaagggcaaggcttacaccaactacttcggacggtgcaatgtggccgagcacgaaaagctgatcctgctggcccagctgaagcccgagaaggatagcgacgaagccgtgacatatagcctgggaaagtttgggcagagggccctggatttctacagcattcatgtgaccaaggagtccacccaccccgtgaagcccctggcccagatcgccggaaacagatacgcctccggacctgtgggaaaggccctgagcgacgcatgtatgggcacaatcgcctccttcctgtctaagtaccaggacatcatcatcgaacaccagaaggtggtgaagggcaaccagaagagactggagagcctgcgggagctggccggcaaggaaaacctggaataccctagcgtgaccctgccacctcagcctcacaccaaggagggcgttgatgcctacaacgaagtgatcgcccgggtgcgaatgtgggtgaacctgaacctgtggcagaagctgaagctaagcagagatgatgccaagcctctgctgagactgaagggattcccttcctttcctctggtcgagagacaggccaacgaagtggactggtgggacatggtgtgtaacgtgaagaagctgatcaacgagaaaaaggaggatggcaaggtgttttggcagaatctggctggctacaagagacaggaagccctgagaccatacctgagcagcgaggaagatcggaagaagggaaagaaattcgctcggtaccagctgggcgacctgctgctgcacctggaaaagaagcacggcgaggactggggaaaggtgtacgacgaggcctgggagcggattgacaagaaagtggaaggcctgagcaagcacatcaagctggaagaggaacggagaagcgaggacgcccagagcaaggccgccctgaccgactggctgcgggctaaggccagcttcgtgatcgagggcctgaaggaggccgacaaggacgagttctgcagatgcgagctgaagctgcagaagtggtacggggacctgcggggaaagcccttcgccatcgaagccgagaacagcatcctggacatcagcggcttcagcaagcagtacaactgtgccttcatctggcagaaggacggcgtgaagaagctgaacctgtacctgatcatcaactacttcaagggcggcaagctgcggttcaagaagatcaaacctgaagccttcgaagccaacagattctacaccgtgatcaacaaaaagagcggcgagatcgtgcccatggaggtgaacttcaacttcgacgaccccaacctgatcatcctgcctctggcctttggcaagagacagggcagagaattcatctggaacgacctgctgtccctggaaaccggcagcctgaagctggccaacggaagagtgatcgagaagacactgtacaacagaagaacccggcaggatgagcctgccctgttcgtggccctgaccttcgagcggcgggaggtcctggactcctccaatatcaaaccaatgaacctgatcggcgtggcaagaggcgaaaacatccccgccgtgatcgccctgaccgaccccgagggctgcccactgagccggtttaaggatagcctgggaaacccaacccacatcctgagaatcggcgagagctataaggagaagcagcggaccatccaggccaagaaggaggtggagcagcggagagccggcggctacagccggaagtacgccagcaaagccaagaatctggcagacgatatggtgagaaacaccgctagagatctgctgtactacgccgtgacccaggatgccatgctgatcttcgccaacctgagccggggcttcggccggcagggcaagcggaccttcatggccgagagacagtacacacggatggaggactggctgaccgccaagctggcctacgagggcctgagcaagacctacctgtccaagacactggcccagtacacctccaagacatgcagcaactgtgggtttaccatcaccagcgccgactacgacagggtgctggagaagctgaagaagacagcaacaggctggatgaccacaattaacggcaaggagctgaaggtggagggccagattacctactacaacagatacaagagacagaacgtagtcaaggacctgtccgtcgagctggatagactgagcgaagaatctgtgaacaacgacatctcctcctggacaaagggcagaagcggagaagctctgagcctcctgaagaaaagattctcccatagacccgtgcaggagaagttcgtgtgcctgaactgcggcttcgagacacacgcagccgagcaagccgccctgaacatcgccagatcctggctgttcctgcggagccaggagtacaagaaataccagacaaacaagacaaccggcaacaccgataagagagccttcgtcgagacctggcagtccttttaccggaagaagcttaaggaggtgtggaaacctgccgtgcggtctggcggatctggcggaggctccacaagcagcaaggcccccatcaccttcggcgacctggccatctacttcagccaggaggagtgggagtggctgagccccatccagaaggacctgtacgaggacgtgatgctggagaactacaggaacctggtgagcctgggcctgagcttcaggaggcccaacgtgatcaccctgctggagaagggcaaggccccctggatgatcgagcccgtgaggaggaggagggcccccgacagcggcagcaagtgcaccagccccaagaaaaagagaaaagtctaagctgccttctgcggggcttgccttctggccatgcccttcttctctcccttgcacctgtacctcttggtctttgaataaagcctgagtaggaaggctagcaaaaaaaaaaaaaaaaaaaaaaaaaaaaaaaaaaaaaaaaaaaaaaaaaaaaaaaaaaaaaaaaaaaaaaaaaaaaaaaa

SEQ ID NO: 5768 - RNA, 5797 nt, synthetic construct
  source 1..5797: mol_type = other RNA
aggaaataagagagaaaagaagagtaagaagaaatataagagccaccatggcccctaagaagaagcgtaaagtgagccggatggaacgcctcgtctacgaggtgcggcagaagtgcagaaacatcgaggacatctgcatctcctgcggatctctgaacgtgaccctggagcacccactgttcatcggcggcatgtgccagaactgtaaaaactgttttctggagtgtgcctatcaatacgacgatgacggctaccagagctactgcaccatctgttgcggcggaagagaggtgctgatgtgtggaaataacaactgctgccggtgcttctgcgtggaatgcgtggacctgctggtgggccccggcgccgcccaggccgctattaaggaagatccttggaactgctacatgtgcggccacaagggcacatacggcctgctgagacggagagaggactggcctagcagactgcagatgttcttcgccaataaccacgaccaggagttcgacccccctaaggtgtaccctcccgtccccgccgagaagagaaagcccatccgggtcctgagcctgttcgatggcatcgccaccggtctgctggtgctgaaggacctgggcatccaggtggataggtacattgcctccgaggtgtgcgaggactccatcaccgtgggaatggtgcgtcatcagggcaagatcatgtacgtgggcgacgtgcggagcgtgacacagaagcatatccaggagtggggccctttcgacctggtgatcggcggcagcccttgcaatgacctgagcatcgtgaacccagcccggaagggcctgtacgagggaaccggcagactgttcttcgagttttacagactgctgcacgacgcccggcctaaggaaggcgacgaccggcccttcttttggctgttcgagaatgtggtggccatgggagtcagcgacaagcgggatattagccggttcctggagagcaaccccgtgatgatcgatgccaaggaagtgagcgccgcccaccgggccagatacttctggggcaatctgcctggcatgaacagacccctggccagcaccgtgaacgacaagctggagctgcaggagtgcctggagcacggccggatcgccaagttcagcaaggtgagaaccatcaccacccgaagcaacagcatcaaacaaggcaaggaccagcactttcctgtgttcatgaacgagaaggaggacatcctgtggtgtaccgagatggagagagtgttcgggttcccagtccactacacagatgtcagcaacatgtctagactggccagacagagactgctgggaagaagctggtccgtccctgtgatcagacacctgttcgcccctctgaaggagtacttcgcctgcgtgagcagcggcaacagcaacgccaacagccggggccccagcttctctagcggcctggtgccactgtccctgagagggagccacatgggccccatggagatctacaaaaccgtgagcgcctggaagcggcagcctgtgcgcgtgctgagcctgtttcggaatatcgataaagtcctgaaaagcctgggattcctggagagcggctctggctccggcggtggcaccctgaagtacgtggaggatgtgacaaacgtggtcagacgggatgtggagaagtggggccccttcgatctggtgtacggcagcacccaacccctgggcagctcttgtgaccggtgccctggctggtacatgtttcagttccaccggatcctgcagtacgccctgccgagacaggagtcccagcggccattcttttggattttcatggacaacttgctgctgaccgaggatgaccaggaaactaccactcggttcctgcagaccgaagccgtgaccctgcaggacgtgagaggccgggactaccagaacgccatgcgggtgtggtccaacatccctggactgaaaagcaagcacgcacctctgacccctaaagaagaggagtacctgcaggcccaggtgcggagcagaagcaagctggacgcccctaaggtggatctgctggtgaagaattgcctcctgcccctgagagagtacttcaagtatttcagccagaatagtctgcccctgggcggcccaagcagcggcgcccctcctcccagcggcggcagcccagccggctccccaacctctaccgaggagggcacctctgagtccgccacccccgagagcggccctggcacctccaccgagcccagcgagggcagcgcacccggcagccctgccggcagccccacctccacagaggagggaaccagcaccgagcccagcgaaggcagcgccccaggcaccagcaccgagcctagtgagggcggctctggcggcggcagcgcccaggagattaaacggatcaacaagatcagaagaagacttgtgaaagacagcaacaccaagaaggccggcaagacaggccccatgaaaaccctgctggttagagtgatgacacccgatctgagagagcggctggaaaacctgagaaagaagcctgaaaatatcccccagcccatcagcaatacatctagagccaacctgaataagctgctgaccgattacaccgaaatgaagaaggcgatcctgcatgtgtactgggaagagttccagaaggaccctgtgggcctgatgagccgggtggcccagcctgccagcaagaagatcgatcagaacaagctgaaacctgagatggacgagaagggcaacctgaccaccgccggctttgcctgctctcagtgtggccagcccctgttcgtgtacaagctggagcaggtgtctgagaagggcaaggcttacaccaactacttcggacggtgcaatgtggccgagcacgaaaagctgatcctgctggcccagctgaagcccgagaaggatagcgacgaagccgtgacatatagcctgggaaagtttgggcagagggccctggatttctacagcattcatgtgaccaaggagtccacccaccccgtgaagcccctggcccagatcgccggaaacagatacgcctccggacctgtgggaaaggccctgagcgacgcatgtatgggcacaatcgcctccttcctgtctaagtaccaggacatcatcatcgaacaccagaaggtggtgaagggcaaccagaagagactggagagcctgcgggagctggccggcaaggaaaacctggaataccctagcgtgaccctgccacctcagcctcacaccaaggagggcgttgatgcctacaacgaagtgatcgcccgggtgcgaatgtgggtgaacctgaacctgtggcagaagctgaagctaagcagagatgatgccaagcctctgctgagactgaagggattcccttcctttcctctggtcgagagacaggccaacgaagtggactggtgggacatggtgtgtaacgtgaagaagctgatcaacgagaaaaaggaggatggcaaggtgttttggcagaatctggctggctacaagagacaggaagccctgagaccatacctgagcagcgaggaagatcggaagaagggaaagaaattcgctcggtaccagctgggcgacctgctgctgcacctggaaaagaagcacggcgaggactggggaaaggtgtacgacgaggcctgggagcggattgacaagaaagtggaaggcctgagcaagcacatcaagctggaagaggaacggagaagcgaggacgcccagagcaaggccgccctgaccgactggctgcgggctaaggccagcttcgtgatcgagggcctgaaggaggccgacaaggacgagttctgcagatgcgagctgaagctgcagaagtggtacggggacctgcggggaaagcccttcgccatcgaagccgagaacagcatcctggacatcagcggcttcagcaagcagtacaactgtgccttcatctggcagaaggacggcgtgaagaagctgaacctgtacctgatcatcaactacttcaagggcggcaagctgcggttcaagaagatcaaacctgaagccttcgaagccaacagattctacaccgtgatcaacaaaaagagcggcgagatcgtgcccatggaggtgaacttcaacttcgacgaccccaacctgatcatcctgcctctggcctttggcaagagacagggcagagaattcatctggaacgacctgctgtccctggaaaccggcagcctgaagctggccaacggaagagtgatcgagaagacactgtacaacagaagaacccggcaggatgagcctgccctgttcgtggccctgaccttcgagcggcgggaggtcctggactcctccaatatcaaaccaatgaacctgatcggcgtggcaagaggcgaaaacatccccgccgtgatcgccctgaccgaccccgagggctgcccactgagccggtttaaggatagcctgggaaacccaacccacatcctgagaatcggcgagagctataaggagaagcagcggaccatccaggccaagaaggaggtggagcagcggagagccggcggctacagccggaagtacgccagcaaagccaagaatctggcagacgatatggtgagaaacaccgctagagatctgctgtactacgccgtgacccaggatgccatgctgatcttcgccaacctgagccggggcttcggccggcagggcaagcggaccttcatggccgagagacagtacacacggatggaggactggctgaccgccaagctggcctacgagggcctgagcaagacctacctgtccaagacactggcccagtacacctccaagacatgcagcaactgtgggtttaccatcaccagcgccgactacgacagggtgctggagaagctgaagaagacagcaacaggctggatgaccacaattaacggcaaggagctgaaggtggagggccagattacctactacaacagatacaagagacagaacgtagtcaaggacctgtccgtcgagctggatagactgagcgaagaatctgtgaacaacgacatctcctcctggacaaagggcagaagcggagaagctctgagcctcctgaagaaaagattctcccatagacccgtgcaggagaagttcgtgtgcctgaactgcggcttcgagacacacgcagccgagcaagccgccctgaacatcgccagatcctggctgttcctgcggagccaggagtacaagaaataccagacaaacaagacaaccggcaacaccgataagagagccttcgtcgagacctggcagtccttttaccggaagaagcttaaggaggtgtggaaacctgccgtgcggtctggcggatctggcggaggctccacaagcatggcccacaggagcgtgatgttcagcgacatcagcatcgacttcagccccgaggagtgggagtacctggacctggagcagaaggacctgtacagggacgtgatgctggagaactacagcaacctggtgagcctgggctgcttcatcagcaagcccgacgtgatcagcctgctggagcagggcaaggagccctggaaggtggtgaggaagaggaggaggcagtaccccgacctggagaccaagaccagccccaagaaaaagagaaaagtctaagctgccttctgcggggcttgccttctggccatgcccttcttctctcccttgcacctgtacctcttggtctttgaataaagcctgagtaggaaggctagcaaaaaaaaaaaaaaaaaaaaaaaaaaaaaaaaaaaaaaaaaaaaaaaaaaaaaaaaaaaaaaaaaaaaaaaaaaaaaaaa

SEQ ID NO: 5769 - RNA, 5797 nt, synthetic construct
  source 1..5797: mol_type = other RNA
aggaaataagagagaaaagaagagtaagaagaaatataagagccaccatggcccctaagaagaagcgtaaagtgagccggatggaacgcctcgtctacgaggtgcggcagaagtgcagaaacatcgaggacatctgcatctcctgcggatctctgaacgtgaccctggagcacccactgttcatcggcggcatgtgccagaactgtaaaaactgttttctggagtgtgcctatcaatacgacgatgacggctaccagagctactgcaccatctgttgcggcggaagagaggtgctgatgtgtggaaataacaactgctgccggtgcttctgcgtggaatgcgtggacctgctggtgggccccggcgccgcccaggccgctattaaggaagatccttggaactgctacatgtgcggccacaagggcacatacggcctgctgagacggagagaggactggcctagcagactgcagatgttcttcgccaataaccacgaccaggagttcgacccccctaaggtgtaccctcccgtccccgccgagaagagaaagcccatccgggtcctgagcctgttcgatggcatcgccaccggtctgctggtgctgaaggacctgggcatccaggtggataggtacattgcctccgaggtgtgcgaggactccatcaccgtgggaatggtgcgtcatcagggcaagatcatgtacgtgggcgacgtgcggagcgtgacacagaagcatatccaggagtggggccctttcgacctggtgatcggcggcagcccttgcaatgacctgagcatcgtgaacccagcccggaagggcctgtacgagggaaccggcagactgttcttcgagttttacagactgctgcacgacgcccggcctaaggaaggcgacgaccggcccttcttttggctgttcgagaatgtggtggccatgggagtcagcgacaagcgggatattagccggttcctggagagcaaccccgtgatgatcgatgccaaggaagtgagcgccgcccaccgggccagatacttctggggcaatctgcctggcatgaacagacccctggccagcaccgtgaacgacaagctggagctgcaggagtgcctggagcacggccggatcgccaagttcagcaaggtgagaaccatcaccacccgaagcaacagcatcaaacaaggcaaggaccagcactttcctgtgttcatgaacgagaaggaggacatcctgtggtgtaccgagatggagagagtgttcgggttcccagtccactacacagatgtcagcaacatgtctagactggccagacagagactgctgggaagaagctggtccgtccctgtgatcagacacctgttcgcccctctgaaggagtacttcgcctgcgtgagcagcggcaacagcaacgccaacagccggggccccagcttctctagcggcctggtgccactgtccctgagagggagccacatgggccccatggagatctacaaaaccgtgagcgcctggaagcggcagcctgtgcgcgtgctgagcctgtttcggaatatcgataaagtcctgaaaagcctgggattcctggagagcggctctggctccggcggtggcaccctgaagtacgtggaggatgtgacaaacgtggtcagacgggatgtggagaagtggggccccttcgatctggtgtacggcagcacccaacccctgggcagctcttgtgaccggtgccctggctggtacatgtttcagttccaccggatcctgcagtacgccctgccgagacaggagtcccagcggccattcttttggattttcatggacaacttgctgctgaccgaggatgaccaggaaactaccactcggttcctgcagaccgaagccgtgaccctgcaggacgtgagaggccgggactaccagaacgccatgcgggtgtggtccaacatccctggactgaaaagcaagcacgcacctctgacccctaaagaagaggagtacctgcaggcccaggtgcggagcagaagcaagctggacgcccctaaggtggatctgctggtgaagaattgcctcctgcccctgagagagtacttcaagtatttcagccagaatagtctgcccctgggcggcccaagcagcggcgcccctcctcccagcggcggcagcccagccggctccccaacctctaccgaggagggcacctctgagtccgccacccccgagagcggccctggcacctccaccgagcccagcgagggcagcgcacccggcagccctgccggcagccccacctccacagaggagggaaccagcaccgagcccagcgaaggcagcgccccaggcaccagcaccgagcctagtgagggcggctctggcggcggcagcgcccaggagattaaacggatcaacaagatcagaagaagacttgtgaaagacagcaacaccaagaaggccggcaagacaggccccatgaaaaccctgctggttagagtgatgacacccgatctgagagagcggctggaaaacctgagaaagaagcctgaaaatatcccccagcccatcagcaatacatctagagccaacctgaataagctgctgaccgattacaccgaaatgaagaaggcgatcctgcatgtgtactgggaagagttccagaaggaccctgtgggcctgatgagccgggtggcccagcctgccagcaagaagatcgatcagaacaagctgaaacctgagatggacgagaagggcaacctgaccaccgccggctttgcctgctctcagtgtggccagcccctgttcgtgtacaagctggagcaggtgtctgagaagggcaaggcttacaccaactacttcggacggtgcaatgtggccgagcacgaaaagctgatcctgctggcccagctgaagcccgagaaggatagcgacgaagccgtgacatatagcctgggaaagtttgggcagagggccctggatttctacagcattcatgtgaccaaggagtccacccaccccgtgaagcccctggcccagatcgccggaaacagatacgcctccggacctgtgggaaaggccctgagcgacgcatgtatgggcacaatcgcctccttcctgtctaagtaccaggacatcatcatcgaacaccagaaggtggtgaagggcaaccagaagagactggagagcctgcgggagctggccggcaaggaaaacctggaataccctagcgtgaccctgccacctcagcctcacaccaaggagggcgttgatgcctacaacgaagtgatcgcccgggtgcgaatgtgggtgaacctgaacctgtggcagaagctgaagctaagcagagatgatgccaagcctctgctgagactgaagggattcccttcctttcctctggtcgagagacaggccaacgaagtggactggtgggacatggtgtgtaacgtgaagaagctgatcaacgagaaaaaggaggatggcaaggtgttttggcagaatctggctggctacaagagacaggaagccctgagaccatacctgagcagcgaggaagatcggaagaagggaaagaaattcgctcggtaccagctgggcgacctgctgctgcacctggaaaagaagcacggcgaggactggggaaaggtgtacgacgaggcctgggagcggattgacaagaaagtggaaggcctgagcaagcacatcaagctggaagaggaacggagaagcgaggacgcccagagcaaggccgccctgaccgactggctgcgggctaaggccagcttcgtgatcgagggcctgaaggaggccgacaaggacgagttctgcagatgcgagctgaagctgcagaagtggtacggggacctgcggggaaagcccttcgccatcgaagccgagaacagcatcctggacatcagcggcttcagcaagcagtacaactgtgccttcatctggcagaaggacggcgtgaagaagctgaacctgtacctgatcatcaactacttcaagggcggcaagctgcggttcaagaagatcaaacctgaagccttcgaagccaacagattctacaccgtgatcaacaaaaagagcggcgagatcgtgcccatggaggtgaacttcaacttcgacgaccccaacctgatcatcctgcctctggcctttggcaagagacagggcagagaattcatctggaacgacctgctgtccctggaaaccggcagcctgaagctggccaacggaagagtgatcgagaagacactgtacaacagaagaacccggcaggatgagcctgccctgttcgtggccctgaccttcgagcggcgggaggtcctggactcctccaatatcaaaccaatgaacctgatcggcgtggcaagaggcgaaaacatccccgccgtgatcgccctgaccgaccccgagggctgcccactgagccggtttaaggatagcctgggaaacccaacccacatcctgagaatcggcgagagctataaggagaagcagcggaccatccaggccaagaaggaggtggagcagcggagagccggcggctacagccggaagtacgccagcaaagccaagaatctggcagacgatatggtgagaaacaccgctagagatctgctgtactacgccgtgacccaggatgccatgctgatcttcgccaacctgagccggggcttcggccggcagggcaagcggaccttcatggccgagagacagtacacacggatggaggactggctgaccgccaagctggcctacgagggcctgagcaagacctacctgtccaagacactggcccagtacacctccaagacatgcagcaactgtgggtttaccatcaccagcgccgactacgacagggtgctggagaagctgaagaagacagcaacaggctggatgaccacaattaacggcaaggagctgaaggtggagggccagattacctactacaacagatacaagagacagaacgtagtcaaggacctgtccgtcgagctggatagactgagcgaagaatctgtgaacaacgacatctcctcctggacaaagggcagaagcggagaagctctgagcctcctgaagaaaagattctcccatagacccgtgcaggagaagttcgtgtgcctgaactgcggcttcgagacacacgcagccgagcaagccgccctgaacatcgccagatcctggctgttcctgcggagccaggagtacaagaaataccagacaaacaagacaaccggcaacaccgataagagagccttcgtcgagacctggcagtccttttaccggaagaagcttaaggaggtgtggaaacctgccgtgcggtctggcggatctggcggaggctccacaagcagcaggagccccctgaccttcggcgacgtggccgtggagttcagcggcgaggagtgggccaggctggacagcgcccagaggagcctgcacaggagcgtgatgctggagaactacaggaacctggccagcctgggcctgtgcatgagcaagcccgagatgatcagcagcctggagcagaggaaggagccctgggccgtgaagaggaagagcaccaggggcaggtgccccgacagccagaccgccaccagccccaagaaaaagagaaaagtctaagctgccttctgcggggcttgccttctggccatgcccttcttctctcccttgcacctgtacctcttggtctttgaataaagcctgagtaggaaggctagcaaaaaaaaaaaaaaaaaaaaaaaaaaaaaaaaaaaaaaaaaaaaaaaaaaaaaaaaaaaaaaaaaaaaaaaaaaaaaaaa

SEQ ID NO: 5770 - RNA, 5806 nt, synthetic construct
  source 1..5806: mol_type = other RNA
aggaaataagagagaaaagaagagtaagaagaaatataagagccaccatggcccctaagaagaagcgtaaagtgagccggatggaacgcctcgtctacgaggtgcggcagaagtgcagaaacatcgaggacatctgcatctcctgcggatctctgaacgtgaccctggagcacccactgttcatcggcggcatgtgccagaactgtaaaaactgttttctggagtgtgcctatcaatacgacgatgacggctaccagagctactgcaccatctgttgcggcggaagagaggtgctgatgtgtggaaataacaactgctgccggtgcttctgcgtggaatgcgtggacctgctggtgggccccggcgccgcccaggccgctattaaggaagatccttggaactgctacatgtgcggccacaagggcacatacggcctgctgagacggagagaggactggcctagcagactgcagatgttcttcgccaataaccacgaccaggagttcgacccccctaaggtgtaccctcccgtccccgccgagaagagaaagcccatccgggtcctgagcctgttcgatggcatcgccaccggtctgctggtgctgaaggacctgggcatccaggtggataggtacattgcctccgaggtgtgcgaggactccatcaccgtgggaatggtgcgtcatcagggcaagatcatgtacgtgggcgacgtgcggagcgtgacacagaagcatatccaggagtggggccctttcgacctggtgatcggcggcagcccttgcaatgacctgagcatcgtgaacccagcccggaagggcctgtacgagggaaccggcagactgttcttcgagttttacagactgctgcacgacgcccggcctaaggaaggcgacgaccggcccttcttttggctgttcgagaatgtggtggccatgggagtcagcgacaagcgggatattagccggttcctggagagcaaccccgtgatgatcgatgccaaggaagtgagcgccgcccaccgggccagatacttctggggcaatctgcctggcatgaacagacccctggccagcaccgtgaacgacaagctggagctgcaggagtgcctggagcacggccggatcgccaagttcagcaaggtgagaaccatcaccacccgaagcaacagcatcaaacaaggcaaggaccagcactttcctgtgttcatgaacgagaaggaggacatcctgtggtgtaccgagatggagagagtgttcgggttcccagtccactacacagatgtcagcaacatgtctagactggccagacagagactgctgggaagaagctggtccgtccctgtgatcagacacctgttcgcccctctgaaggagtacttcgcctgcgtgagcagcggcaacagcaacgccaacagccggggccccagcttctctagcggcctggtgccactgtccctgagagggagccacatgggccccatggagatctacaaaaccgtgagcgcctggaagcggcagcctgtgcgcgtgctgagcctgtttcggaatatcgataaagtcctgaaaagcctgggattcctggagagcggctctggctccggcggtggcaccctgaagtacgtggaggatgtgacaaacgtggtcagacgggatgtggagaagtggggccccttcgatctggtgtacggcagcacccaacccctgggcagctcttgtgaccggtgccctggctggtacatgtttcagttccaccggatcctgcagtacgccctgccgagacaggagtcccagcggccattcttttggattttcatggacaacttgctgctgaccgaggatgaccaggaaactaccactcggttcctgcagaccgaagccgtgaccctgcaggacgtgagaggccgggactaccagaacgccatgcgggtgtggtccaacatccctggactgaaaagcaagcacgcacctctgacccctaaagaagaggagtacctgcaggcccaggtgcggagcagaagcaagctggacgcccctaaggtggatctgctggtgaagaattgcctcctgcccctgagagagtacttcaagtatttcagccagaatagtctgcccctgggcggcccaagcagcggcgcccctcctcccagcggcggcagcccagccggctccccaacctctaccgaggagggcacctctgagtccgccacccccgagagcggccctggcacctccaccgagcccagcgagggcagcgcacccggcagccctgccggcagccccacctccacagaggagggaaccagcaccgagcccagcgaaggcagcgccccaggcaccagcaccgagcctagtgagggcggctctggcggcggcagcgcccaggagattaaacggatcaacaagatcagaagaagacttgtgaaagacagcaacaccaagaaggccggcaagacaggccccatgaaaaccctgctggttagagtgatgacacccgatctgagagagcggctggaaaacctgagaaagaagcctgaaaatatcccccagcccatcagcaatacatctagagccaacctgaataagctgctgaccgattacaccgaaatgaagaaggcgatcctgcatgtgtactgggaagagttccagaaggaccctgtgggcctgatgagccgggtggcccagcctgccagcaagaagatcgatcagaacaagctgaaacctgagatggacgagaagggcaacctgaccaccgccggctttgcctgctctcagtgtggccagcccctgttcgtgtacaagctggagcaggtgtctgagaagggcaaggcttacaccaactacttcggacggtgcaatgtggccgagcacgaaaagctgatcctgctggcccagctgaagcccgagaaggatagcgacgaagccgtgacatatagcctgggaaagtttgggcagagggccctggatttctacagcattcatgtgaccaaggagtccacccaccccgtgaagcccctggcccagatcgccggaaacagatacgcctccggacctgtgggaaaggccctgagcgacgcatgtatgggcacaatcgcctccttcctgtctaagtaccaggacatcatcatcgaacaccagaaggtggtgaagggcaaccagaagagactggagagcctgcgggagctggccggcaaggaaaacctggaataccctagcgtgaccctgccacctcagcctcacaccaaggagggcgttgatgcctacaacgaagtgatcgcccgggtgcgaatgtgggtgaacctgaacctgtggcagaagctgaagctaagcagagatgatgccaagcctctgctgagactgaagggattcccttcctttcctctggtcgagagacaggccaacgaagtggactggtgggacatggtgtgtaacgtgaagaagctgatcaacgagaaaaaggaggatggcaaggtgttttggcagaatctggctggctacaagagacaggaagccctgagaccatacctgagcagcgaggaagatcggaagaagggaaagaaattcgctcggtaccagctgggcgacctgctgctgcacctggaaaagaagcacggcgaggactggggaaaggtgtacgacgaggcctgggagcggattgacaagaaagtggaaggcctgagcaagcacatcaagctggaagaggaacggagaagcgaggacgcccagagcaaggccgccctgaccgactggctgcgggctaaggccagcttcgtgatcgagggcctgaaggaggccgacaaggacgagttctgcagatgcgagctgaagctgcagaagtggtacggggacctgcggggaaagcccttcgccatcgaagccgagaacagcatcctggacatcagcggcttcagcaagcagtacaactgtgccttcatctggcagaaggacggcgtgaagaagctgaacctgtacctgatcatcaactacttcaagggcggcaagctgcggttcaagaagatcaaacctgaagccttcgaagccaacagattctacaccgtgatcaacaaaaagagcggcgagatcgtgcccatggaggtgaacttcaacttcgacgaccccaacctgatcatcctgcctctggcctttggcaagagacagggcagagaattcatctggaacgacctgctgtccctggaaaccggcagcctgaagctggccaacggaagagtgatcgagaagacactgtacaacagaagaacccggcaggatgagcctgccctgttcgtggccctgaccttcgagcggcgggaggtcctggactcctccaatatcaaaccaatgaacctgatcggcgtggcaagaggcgaaaacatccccgccgtgatcgccctgaccgaccccgagggctgcccactgagccggtttaaggatagcctgggaaacccaacccacatcctgagaatcggcgagagctataaggagaagcagcggaccatccaggccaagaaggaggtggagcagcggagagccggcggctacagccggaagtacgccagcaaagccaagaatctggcagacgatatggtgagaaacaccgctagagatctgctgtactacgccgtgacccaggatgccatgctgatcttcgccaacctgagccggggcttcggccggcagggcaagcggaccttcatggccgagagacagtacacacggatggaggactggctgaccgccaagctggcctacgagggcctgagcaagacctacctgtccaagacactggcccagtacacctccaagacatgcagcaactgtgggtttaccatcaccagcgccgactacgacagggtgctggagaagctgaagaagacagcaacaggctggatgaccacaattaacggcaaggagctgaaggtggagggccagattacctactacaacagatacaagagacagaacgtagtcaaggacctgtccgtcgagctggatagactgagcgaagaatctgtgaacaacgacatctcctcctggacaaagggcagaagcggagaagctctgagcctcctgaagaaaagattctcccatagacccgtgcaggagaagttcgtgtgcctgaactgcggcttcgagacacacgcagccgagcaagccgccctgaacatcgccagatcctggctgttcctgcggagccaggagtacaagaaataccagacaaacaagacaaccggcaacaccgataagagagccttcgtcgagacctggcagtccttttaccggaagaagcttaaggaggtgtggaaacctgccgtgcggtctggcggatctggcggaggctccacaagcgtgacctacaacgacgtgcacgtggacatcacccaggaggagtgggccctgatggaccccagccagaggaacctgtacaaggacgtgatggtggagacctacatgaacctgaccgccatcggctacaactgggagaacctggaggtggaggagccctgccagaaccccctgaagcacggcaggcacgagaggccccacaccggcgagaagccctacgagtacaaccagtgcggcaaggccttcgcccagcccaccagccccaagaaaaagagaaaagtctaagctgccttctgcggggcttgccttctggccatgcccttcttctctcccttgcacctgtacctcttggtctttgaataaagcctgagtaggaaggctagcaaaaaaaaaaaaaaaaaaaaaaaaaaaaaaaaaaaaaaaaaaaaaaaaaaaaaaaaaaaaaaaaaaaaaaaaaaaaaaaa

SEQ ID NO: 5771 - RNA, 5797 nt, synthetic construct
  source 1..5797: mol_type = other RNA
aggaaataagagagaaaagaagagtaagaagaaatataagagccaccatggcccctaagaagaagcgtaaagtgagccggatggaacgcctcgtctacgaggtgcggcagaagtgcagaaacatcgaggacatctgcatctcctgcggatctctgaacgtgaccctggagcacccactgttcatcggcggcatgtgccagaactgtaaaaactgttttctggagtgtgcctatcaatacgacgatgacggctaccagagctactgcaccatctgttgcggcggaagagaggtgctgatgtgtggaaataacaactgctgccggtgcttctgcgtggaatgcgtggacctgctggtgggccccggcgccgcccaggccgctattaaggaagatccttggaactgctacatgtgcggccacaagggcacatacggcctgctgagacggagagaggactggcctagcagactgcagatgttcttcgccaataaccacgaccaggagttcgacccccctaaggtgtaccctcccgtccccgccgagaagagaaagcccatccgggtcctgagcctgttcgatggcatcgccaccggtctgctggtgctgaaggacctgggcatccaggtggataggtacattgcctccgaggtgtgcgaggactccatcaccgtgggaatggtgcgtcatcagggcaagatcatgtacgtgggcgacgtgcggagcgtgacacagaagcatatccaggagtggggccctttcgacctggtgatcggcggcagcccttgcaatgacctgagcatcgtgaacccagcccggaagggcctgtacgagggaaccggcagactgttcttcgagttttacagactgctgcacgacgcccggcctaaggaaggcgacgaccggcccttcttttggctgttcgagaatgtggtggccatgggagtcagcgacaagcgggatattagccggttcctggagagcaaccccgtgatgatcgatgccaaggaagtgagcgccgcccaccgggccagatacttctggggcaatctgcctggcatgaacagacccctggccagcaccgtgaacgacaagctggagctgcaggagtgcctggagcacggccggatcgccaagttcagcaaggtgagaaccatcaccacccgaagcaacagcatcaaacaaggcaaggaccagcactttcctgtgttcatgaacgagaaggaggacatcctgtggtgtaccgagatggagagagtgttcgggttcccagtccactacacagatgtcagcaacatgtctagactggccagacagagactgctgggaagaagctggtccgtccctgtgatcagacacctgttcgcccctctgaaggagtacttcgcctgcgtgagcagcggcaacagcaacgccaacagccggggccccagcttctctagcggcctggtgccactgtccctgagagggagccacatgggccccatggagatctacaaaaccgtgagcgcctggaagcggcagcctgtgcgcgtgctgagcctgtttcggaatatcgataaagtcctgaaaagcctgggattcctggagagcggctctggctccggcggtggcaccctgaagtacgtggaggatgtgacaaacgtggtcagacgggatgtggagaagtggggccccttcgatctggtgtacggcagcacccaacccctgggcagctcttgtgaccggtgccctggctggtacatgtttcagttccaccggatcctgcagtacgccctgccgagacaggagtcccagcggccattcttttggattttcatggacaacttgctgctgaccgaggatgaccaggaaactaccactcggttcctgcagaccgaagccgtgaccctgcaggacgtgagaggccgggactaccagaacgccatgcgggtgtggtccaacatccctggactgaaaagcaagcacgcacctctgacccctaaagaagaggagtacctgcaggcccaggtgcggagcagaagcaagctggacgcccctaaggtggatctgctggtgaagaattgcctcctgcccctgagagagtacttcaagtatttcagccagaatagtctgcccctgggcggcccaagcagcggcgcccctcctcccagcggcggcagcccagccggctccccaacctctaccgaggagggcacctctgagtccgccacccccgagagcggccctggcacctccaccgagcccagcgagggcagcgcacccggcagccctgccggcagccccacctccacagaggagggaaccagcaccgagcccagcgaaggcagcgccccaggcaccagcaccgagcctagtgagggcggctctggcggcggcagcgcccaggagattaaacggatcaacaagatcagaagaagacttgtgaaagacagcaacaccaagaaggccggcaagacaggccccatgaaaaccctgctggttagagtgatgacacccgatctgagagagcggctggaaaacctgagaaagaagcctgaaaatatcccccagcccatcagcaatacatctagagccaacctgaataagctgctgaccgattacaccgaaatgaagaaggcgatcctgcatgtgtactgggaagagttccagaaggaccctgtgggcctgatgagccgggtggcccagcctgccagcaagaagatcgatcagaacaagctgaaacctgagatggacgagaagggcaacctgaccaccgccggctttgcctgctctcagtgtggccagcccctgttcgtgtacaagctggagcaggtgtctgagaagggcaaggcttacaccaactacttcggacggtgcaatgtggccgagcacgaaaagctgatcctgctggcccagctgaagcccgagaaggatagcgacgaagccgtgacatatagcctgggaaagtttgggcagagggccctggatttctacagcattcatgtgaccaaggagtccacccaccccgtgaagcccctggcccagatcgccggaaacagatacgcctccggacctgtgggaaaggccctgagcgacgcatgtatgggcacaatcgcctccttcctgtctaagtaccaggacatcatcatcgaacaccagaaggtggtgaagggcaaccagaagagactggagagcctgcgggagctggccggcaaggaaaacctggaataccctagcgtgaccctgccacctcagcctcacaccaaggagggcgttgatgcctacaacgaagtgatcgcccgggtgcgaatgtgggtgaacctgaacctgtggcagaagctgaagctaagcagagatgatgccaagcctctgctgagactgaagggattcccttcctttcctctggtcgagagacaggccaacgaagtggactggtgggacatggtgtgtaacgtgaagaagctgatcaacgagaaaaaggaggatggcaaggtgttttggcagaatctggctggctacaagagacaggaagccctgagaccatacctgagcagcgaggaagatcggaagaagggaaagaaattcgctcggtaccagctgggcgacctgctgctgcacctggaaaagaagcacggcgaggactggggaaaggtgtacgacgaggcctgggagcggattgacaagaaagtggaaggcctgagcaagcacatcaagctggaagaggaacggagaagcgaggacgcccagagcaaggccgccctgaccgactggctgcgggctaaggccagcttcgtgatcgagggcctgaaggaggccgacaaggacgagttctgcagatgcgagctgaagctgcagaagtggtacggggacctgcggggaaagcccttcgccatcgaagccgagaacagcatcctggacatcagcggcttcagcaagcagtacaactgtgccttcatctggcagaaggacggcgtgaagaagctgaacctgtacctgatcatcaactacttcaagggcggcaagctgcggttcaagaagatcaaacctgaagccttcgaagccaacagattctacaccgtgatcaacaaaaagagcggcgagatcgtgcccatggaggtgaacttcaacttcgacgaccccaacctgatcatcctgcctctggcctttggcaagagacagggcagagaattcatctggaacgacctgctgtccctggaaaccggcagcctgaagctggccaacggaagagtgatcgagaagacactgtacaacagaagaacccggcaggatgagcctgccctgttcgtggccctgaccttcgagcggcgggaggtcctggactcctccaatatcaaaccaatgaacctgatcggcgtggcaagaggcgaaaacatccccgccgtgatcgccctgaccgaccccgagggctgcccactgagccggtttaaggatagcctgggaaacccaacccacatcctgagaatcggcgagagctataaggagaagcagcggaccatccaggccaagaaggaggtggagcagcggagagccggcggctacagccggaagtacgccagcaaagccaagaatctggcagacgatatggtgagaaacaccgctagagatctgctgtactacgccgtgacccaggatgccatgctgatcttcgccaacctgagccggggcttcggccggcagggcaagcggaccttcatggccgagagacagtacacacggatggaggactggctgaccgccaagctggcctacgagggcctgagcaagacctacctgtccaagacactggcccagtacacctccaagacatgcagcaactgtgggtttaccatcaccagcgccgactacgacagggtgctggagaagctgaagaagacagcaacaggctggatgaccacaattaacggcaaggagctgaaggtggagggccagattacctactacaacagatacaagagacagaacgtagtcaaggacctgtccgtcgagctggatagactgagcgaagaatctgtgaacaacgacatctcctcctggacaaagggcagaagcggagaagctctgagcctcctgaagaaaagattctcccatagacccgtgcaggagaagttcgtgtgcctgaactgcggcttcgagacacacgcagccgagcaagccgccctgaacatcgccagatcctggctgttcctgcggagccaggagtacaagaaataccagacaaacaagacaaccggcaacaccgataagagagccttcgtcgagacctggcagtccttttaccggaagaagcttaaggaggtgtggaaacctgccgtgcggtctggcggatctggcggaggctccacaagcagcaaggcccccgtgaccttcggcgacctggccatctacttcagccaggaggagtgggagtggctgagccccatccagaaggacctgtacgaggacgtgatgctggagaactaccagaacctggtgagcctgggcctgtgcttcaggaggcccaacgtgatcaccctgctggagaagggcaaggccccctggatggtggaccccgtgaagaggaggaggggcctggacctgggcagcaagggcaccagccccaagaaaaagagaaaagtctaagctgccttctgcggggcttgccttctggccatgcccttcttctctcccttgcacctgtacctcttggtctttgaataaagcctgagtaggaaggctagcaaaaaaaaaaaaaaaaaaaaaaaaaaaaaaaaaaaaaaaaaaaaaaaaaaaaaaaaaaaaaaaaaaaaaaaaaaaaaaaa

SEQ ID NO: 5772 - RNA, 5797 nt, synthetic construct
  source 1..5797: mol_type = other RNA
aggaaataagagagaaaagaagagtaagaagaaatataagagccaccatggcccctaagaagaagcgtaaagtgagccggatggaacgcctcgtctacgaggtgcggcagaagtgcagaaacatcgaggacatctgcatctcctgcggatctctgaacgtgaccctggagcacccactgttcatcggcggcatgtgccagaactgtaaaaactgttttctggagtgtgcctatcaatacgacgatgacggctaccagagctactgcaccatctgttgcggcggaagagaggtgctgatgtgtggaaataacaactgctgccggtgcttctgcgtggaatgcgtggacctgctggtgggccccggcgccgcccaggccgctattaaggaagatccttggaactgctacatgtgcggccacaagggcacatacggcctgctgagacggagagaggactggcctagcagactgcagatgttcttcgccaataaccacgaccaggagttcgacccccctaaggtgtaccctcccgtccccgccgagaagagaaagcccatccgggtcctgagcctgttcgatggcatcgccaccggtctgctggtgctgaaggacctgggcatccaggtggataggtacattgcctccgaggtgtgcgaggactccatcaccgtgggaatggtgcgtcatcagggcaagatcatgtacgtgggcgacgtgcggagcgtgacacagaagcatatccaggagtggggccctttcgacctggtgatcggcggcagcccttgcaatgacctgagcatcgtgaacccagcccggaagggcctgtacgagggaaccggcagactgttcttcgagttttacagactgctgcacgacgcccggcctaaggaaggcgacgaccggcccttcttttggctgttcgagaatgtggtggccatgggagtcagcgacaagcgggatattagccggttcctggagagcaaccccgtgatgatcgatgccaaggaagtgagcgccgcccaccgggccagatacttctggggcaatctgcctggcatgaacagacccctggccagcaccgtgaacgacaagctggagctgcaggagtgcctggagcacggccggatcgccaagttcagcaaggtgagaaccatcaccacccgaagcaacagcatcaaacaaggcaaggaccagcactttcctgtgttcatgaacgagaaggaggacatcctgtggtgtaccgagatggagagagtgttcgggttcccagtccactacacagatgtcagcaacatgtctagactggccagacagagactgctgggaagaagctggtccgtccctgtgatcagacacctgttcgcccctctgaaggagtacttcgcctgcgtgagcagcggcaacagcaacgccaacagccggggccccagcttctctagcggcctggtgccactgtccctgagagggagccacatgggccccatggagatctacaaaaccgtgagcgcctggaagcggcagcctgtgcgcgtgctgagcctgtttcggaatatcgataaagtcctgaaaagcctgggattcctggagagcggctctggctccggcggtggcaccctgaagtacgtggaggatgtgacaaacgtggtcagacgggatgtggagaagtggggccccttcgatctggtgtacggcagcacccaacccctgggcagctcttgtgaccggtgccctggctggtacatgtttcagttccaccggatcctgcagtacgccctgccgagacaggagtcccagcggccattcttttggattttcatggacaacttgctgctgaccgaggatgaccaggaaactaccactcggttcctgcagaccgaagccgtgaccctgcaggacgtgagaggccgggactaccagaacgccatgcgggtgtggtccaacatccctggactgaaaagcaagcacgcacctctgacccctaaagaagaggagtacctgcaggcccaggtgcggagcagaagcaagctggacgcccctaaggtggatctgctggtgaagaattgcctcctgcccctgagagagtacttcaagtatttcagccagaatagtctgcccctgggcggcccaagcagcggcgcccctcctcccagcggcggcagcccagccggctccccaacctctaccgaggagggcacctctgagtccgccacccccgagagcggccctggcacctccaccgagcccagcgagggcagcgcacccggcagccctgccggcagccccacctccacagaggagggaaccagcaccgagcccagcgaaggcagcgccccaggcaccagcaccgagcctagtgagggcggctctggcggcggcagcgcccaggagattaaacggatcaacaagatcagaagaagacttgtgaaagacagcaacaccaagaaggccggcaagacaggccccatgaaaaccctgctggttagagtgatgacacccgatctgagagagcggctggaaaacctgagaaagaagcctgaaaatatcccccagcccatcagcaatacatctagagccaacctgaataagctgctgaccgattacaccgaaatgaagaaggcgatcctgcatgtgtactgggaagagttccagaaggaccctgtgggcctgatgagccgggtggcccagcctgccagcaagaagatcgatcagaacaagctgaaacctgagatggacgagaagggcaacctgaccaccgccggctttgcctgctctcagtgtggccagcccctgttcgtgtacaagctggagcaggtgtctgagaagggcaaggcttacaccaactacttcggacggtgcaatgtggccgagcacgaaaagctgatcctgctggcccagctgaagcccgagaaggatagcgacgaagccgtgacatatagcctgggaaagtttgggcagagggccctggatttctacagcattcatgtgaccaaggagtccacccaccccgtgaagcccctggcccagatcgccggaaacagatacgcctccggacctgtgggaaaggccctgagcgacgcatgtatgggcacaatcgcctccttcctgtctaagtaccaggacatcatcatcgaacaccagaaggtggtgaagggcaaccagaagagactggagagcctgcgggagctggccggcaaggaaaacctggaataccctagcgtgaccctgccacctcagcctcacaccaaggagggcgttgatgcctacaacgaagtgatcgcccgggtgcgaatgtgggtgaacctgaacctgtggcagaagctgaagctaagcagagatgatgccaagcctctgctgagactgaagggattcccttcctttcctctggtcgagagacaggccaacgaagtggactggtgggacatggtgtgtaacgtgaagaagctgatcaacgagaaaaaggaggatggcaaggtgttttggcagaatctggctggctacaagagacaggaagccctgagaccatacctgagcagcgaggaagatcggaagaagggaaagaaattcgctcggtaccagctgggcgacctgctgctgcacctggaaaagaagcacggcgaggactggggaaaggtgtacgacgaggcctgggagcggattgacaagaaagtggaaggcctgagcaagcacatcaagctggaagaggaacggagaagcgaggacgcccagagcaaggccgccctgaccgactggctgcgggctaaggccagcttcgtgatcgagggcctgaaggaggccgacaaggacgagttctgcagatgcgagctgaagctgcagaagtggtacggggacctgcggggaaagcccttcgccatcgaagccgagaacagcatcctggacatcagcggcttcagcaagcagtacaactgtgccttcatctggcagaaggacggcgtgaagaagctgaacctgtacctgatcatcaactacttcaagggcggcaagctgcggttcaagaagatcaaacctgaagccttcgaagccaacagattctacaccgtgatcaacaaaaagagcggcgagatcgtgcccatggaggtgaacttcaacttcgacgaccccaacctgatcatcctgcctctggcctttggcaagagacagggcagagaattcatctggaacgacctgctgtccctggaaaccggcagcctgaagctggccaacggaagagtgatcgagaagacactgtacaacagaagaacccggcaggatgagcctgccctgttcgtggccctgaccttcgagcggcgggaggtcctggactcctccaatatcaaaccaatgaacctgatcggcgtggcaagaggcgaaaacatccccgccgtgatcgccctgaccgaccccgagggctgcccactgagccggtttaaggatagcctgggaaacccaacccacatcctgagaatcggcgagagctataaggagaagcagcggaccatccaggccaagaaggaggtggagcagcggagagccggcggctacagccggaagtacgccagcaaagccaagaatctggcagacgatatggtgagaaacaccgctagagatctgctgtactacgccgtgacccaggatgccatgctgatcttcgccaacctgagccggggcttcggccggcagggcaagcggaccttcatggccgagagacagtacacacggatggaggactggctgaccgccaagctggcctacgagggcctgagcaagacctacctgtccaagacactggcccagtacacctccaagacatgcagcaactgtgggtttaccatcaccagcgccgactacgacagggtgctggagaagctgaagaagacagcaacaggctggatgaccacaattaacggcaaggagctgaaggtggagggccagattacctactacaacagatacaagagacagaacgtagtcaaggacctgtccgtcgagctggatagactgagcgaagaatctgtgaacaacgacatctcctcctggacaaagggcagaagcggagaagctctgagcctcctgaagaaaagattctcccatagacccgtgcaggagaagttcgtgtgcctgaactgcggcttcgagacacacgcagccgagcaagccgccctgaacatcgccagatcctggctgttcctgcggagccaggagtacaagaaataccagacaaacaagacaaccggcaacaccgataagagagccttcgtcgagacctggcagtccttttaccggaagaagcttaaggaggtgtggaaacctgccgtgcggtctggcggatctggcggaggctccacaagcgcccaccacctggtgatgttcagggacgtggccgtggacttcagcaaggaggagtgggagtgcctgaacagctaccagaggaacctgtacagggacgtgatcctggagaactacagcaacctggtgagcgtggccggctgcagcatcagcaagcccgacgtgatcaccctgctggagcagggcaaggagccctggatggtggtgagggacgagaggaggaggaggagcctggacctggagagcaccagccccaagaaaaagagaaaagtctaagctgccttctgcggggcttgccttctggccatgcccttcttctctcccttgcacctgtacctcttggtctttgaataaagcctgagtaggaaggctagcaaaaaaaaaaaaaaaaaaaaaaaaaaaaaaaaaaaaaaaaaaaaaaaaaaaaaaaaaaaaaaaaaaaaaaaaaaaaaaaa

SEQ ID NO: 5773 - RNA, 5797 nt, synthetic construct
  source 1..5797: mol_type = other RNA
aggaaataagagagaaaagaagagtaagaagaaatataagagccaccatggcccctaagaagaagcgtaaagtgagccggatggaacgcctcgtctacgaggtgcggcagaagtgcagaaacatcgaggacatctgcatctcctgcggatctctgaacgtgaccctggagcacccactgttcatcggcggcatgtgccagaactgtaaaaactgttttctggagtgtgcctatcaatacgacgatgacggctaccagagctactgcaccatctgttgcggcggaagagaggtgctgatgtgtggaaataacaactgctgccggtgcttctgcgtggaatgcgtggacctgctggtgggccccggcgccgcccaggccgctattaaggaagatccttggaactgctacatgtgcggccacaagggcacatacggcctgctgagacggagagaggactggcctagcagactgcagatgttcttcgccaataaccacgaccaggagttcgacccccctaaggtgtaccctcccgtccccgccgagaagagaaagcccatccgggtcctgagcctgttcgatggcatcgccaccggtctgctggtgctgaaggacctgggcatccaggtggataggtacattgcctccgaggtgtgcgaggactccatcaccgtgggaatggtgcgtcatcagggcaagatcatgtacgtgggcgacgtgcggagcgtgacacagaagcatatccaggagtggggccctttcgacctggtgatcggcggcagcccttgcaatgacctgagcatcgtgaacccagcccggaagggcctgtacgagggaaccggcagactgttcttcgagttttacagactgctgcacgacgcccggcctaaggaaggcgacgaccggcccttcttttggctgttcgagaatgtggtggccatgggagtcagcgacaagcgggatattagccggttcctggagagcaaccccgtgatgatcgatgccaaggaagtgagcgccgcccaccgggccagatacttctggggcaatctgcctggcatgaacagacccctggccagcaccgtgaacgacaagctggagctgcaggagtgcctggagcacggccggatcgccaagttcagcaaggtgagaaccatcaccacccgaagcaacagcatcaaacaaggcaaggaccagcactttcctgtgttcatgaacgagaaggaggacatcctgtggtgtaccgagatggagagagtgttcgggttcccagtccactacacagatgtcagcaacatgtctagactggccagacagagactgctgggaagaagctggtccgtccctgtgatcagacacctgttcgcccctctgaaggagtacttcgcctgcgtgagcagcggcaacagcaacgccaacagccggggccccagcttctctagcggcctggtgccactgtccctgagagggagccacatgggccccatggagatctacaaaaccgtgagcgcctggaagcggcagcctgtgcgcgtgctgagcctgtttcggaatatcgataaagtcctgaaaagcctgggattcctggagagcggctctggctccggcggtggcaccctgaagtacgtggaggatgtgacaaacgtggtcagacgggatgtggagaagtggggccccttcgatctggtgtacggcagcacccaacccctgggcagctcttgtgaccggtgccctggctggtacatgtttcagttccaccggatcctgcagtacgccctgccgagacaggagtcccagcggccattcttttggattttcatggacaacttgctgctgaccgaggatgaccaggaaactaccactcggttcctgcagaccgaagccgtgaccctgcaggacgtgagaggccgggactaccagaacgccatgcgggtgtggtccaacatccctggactgaaaagcaagcacgcacctctgacccctaaagaagaggagtacctgcaggcccaggtgcggagcagaagcaagctggacgcccctaaggtggatctgctggtgaagaattgcctcctgcccctgagagagtacttcaagtatttcagccagaatagtctgcccctgggcggcccaagcagcggcgcccctcctcccagcggcggcagcccagccggctccccaacctctaccgaggagggcacctctgagtccgccacccccgagagcggccctggcacctccaccgagcccagcgagggcagcgcacccggcagccctgccggcagccccacctccacagaggagggaaccagcaccgagcccagcgaaggcagcgccccaggcaccagcaccgagcctagtgagggcggctctggcggcggcagcgcccaggagattaaacggatcaacaagatcagaagaagacttgtgaaagacagcaacaccaagaaggccggcaagacaggccccatgaaaaccctgctggttagagtgatgacacccgatctgagagagcggctggaaaacctgagaaagaagcctgaaaatatcccccagcccatcagcaatacatctagagccaacctgaataagctgctgaccgattacaccgaaatgaagaaggcgatcctgcatgtgtactgggaagagttccagaaggaccctgtgggcctgatgagccgggtggcccagcctgccagcaagaagatcgatcagaacaagctgaaacctgagatggacgagaagggcaacctgaccaccgccggctttgcctgctctcagtgtggccagcccctgttcgtgtacaagctggagcaggtgtctgagaagggcaaggcttacaccaactacttcggacggtgcaatgtggccgagcacgaaaagctgatcctgctggcccagctgaagcccgagaaggatagcgacgaagccgtgacatatagcctgggaaagtttgggcagagggccctggatttctacagcattcatgtgaccaaggagtccacccaccccgtgaagcccctggcccagatcgccggaaacagatacgcctccggacctgtgggaaaggccctgagcgacgcatgtatgggcacaatcgcctccttcctgtctaagtaccaggacatcatcatcgaacaccagaaggtggtgaagggcaaccagaagagactggagagcctgcgggagctggccggcaaggaaaacctggaataccctagcgtgaccctgccacctcagcctcacaccaaggagggcgttgatgcctacaacgaagtgatcgcccgggtgcgaatgtgggtgaacctgaacctgtggcagaagctgaagctaagcagagatgatgccaagcctctgctgagactgaagggattcccttcctttcctctggtcgagagacaggccaacgaagtggactggtgggacatggtgtgtaacgtgaagaagctgatcaacgagaaaaaggaggatggcaaggtgttttggcagaatctggctggctacaagagacaggaagccctgagaccatacctgagcagcgaggaagatcggaagaagggaaagaaattcgctcggtaccagctgggcgacctgctgctgcacctggaaaagaagcacggcgaggactggggaaaggtgtacgacgaggcctgggagcggattgacaagaaagtggaaggcctgagcaagcacatcaagctggaagaggaacggagaagcgaggacgcccagagcaaggccgccctgaccgactggctgcgggctaaggccagcttcgtgatcgagggcctgaaggaggccgacaaggacgagttctgcagatgcgagctgaagctgcagaagtggtacggggacctgcggggaaagcccttcgccatcgaagccgagaacagcatcctggacatcagcggcttcagcaagcagtacaactgtgccttcatctggcagaaggacggcgtgaagaagctgaacctgtacctgatcatcaactacttcaagggcggcaagctgcggttcaagaagatcaaacctgaagccttcgaagccaacagattctacaccgtgatcaacaaaaagagcggcgagatcgtgcccatggaggtgaacttcaacttcgacgaccccaacctgatcatcctgcctctggcctttggcaagagacagggcagagaattcatctggaacgacctgctgtccctggaaaccggcagcctgaagctggccaacggaagagtgatcgagaagacactgtacaacagaagaacccggcaggatgagcctgccctgttcgtggccctgaccttcgagcggcgggaggtcctggactcctccaatatcaaaccaatgaacctgatcggcgtggcaagaggcgaaaacatccccgccgtgatcgccctgaccgaccccgagggctgcccactgagccggtttaaggatagcctgggaaacccaacccacatcctgagaatcggcgagagctataaggagaagcagcggaccatccaggccaagaaggaggtggagcagcggagagccggcggctacagccggaagtacgccagcaaagccaagaatctggcagacgatatggtgagaaacaccgctagagatctgctgtactacgccgtgacccaggatgccatgctgatcttcgccaacctgagccggggcttcggccggcagggcaagcggaccttcatggccgagagacagtacacacggatggaggactggctgaccgccaagctggcctacgagggcctgagcaagacctacctgtccaagacactggcccagtacacctccaagacatgcagcaactgtgggtttaccatcaccagcgccgactacgacagggtgctggagaagctgaagaagacagcaacaggctggatgaccacaattaacggcaaggagctgaaggtggagggccagattacctactacaacagatacaagagacagaacgtagtcaaggacctgtccgtcgagctggatagactgagcgaagaatctgtgaacaacgacatctcctcctggacaaagggcagaagcggagaagctctgagcctcctgaagaaaagattctcccatagacccgtgcaggagaagttcgtgtgcctgaactgcggcttcgagacacacgcagccgagcaagccgccctgaacatcgccagatcctggctgttcctgcggagccaggagtacaagaaataccagacaaacaagacaaccggcaacaccgataagagagccttcgtcgagacctggcagtccttttaccggaagaagcttaaggaggtgtggaaacctgccgtgcggtctggcggatctggcggaggctccacaagcgccatcaggagcgtgatgttcagcgacatcagcatcgacttcagccccgaggagtgggagtacctggacctggagcagaaggacctgtacagggacgtgatgctggagaactacagcaacctggtgagcctgggctgcttcatcagcaagcccgacgtgatcagcctgctggagcagggcaaggagccctggaaggtggtgaggaagaggaggaggcagtaccccgagatgctgctgctgctgaccagccccaagaaaaagagaaaagtctaagctgccttctgcggggcttgccttctggccatgcccttcttctctcccttgcacctgtacctcttggtctttgaataaagcctgagtaggaaggctagcaaaaaaaaaaaaaaaaaaaaaaaaaaaaaaaaaaaaaaaaaaaaaaaaaaaaaaaaaaaaaaaaaaaaaaaaaaaaaaaa

SEQ ID NO: 5774 - RNA, 5794 nt, synthetic construct
  source 1..5794: mol_type = other RNA
aggaaataagagagaaaagaagagtaagaagaaatataagagccaccatggcccctaagaagaagcgtaaagtgagccggatggaacgcctcgtctacgaggtgcggcagaagtgcagaaacatcgaggacatctgcatctcctgcggatctctgaacgtgaccctggagcacccactgttcatcggcggcatgtgccagaactgtaaaaactgttttctggagtgtgcctatcaatacgacgatgacggctaccagagctactgcaccatctgttgcggcggaagagaggtgctgatgtgtggaaataacaactgctgccggtgcttctgcgtggaatgcgtggacctgctggtgggccccggcgccgcccaggccgctattaaggaagatccttggaactgctacatgtgcggccacaagggcacatacggcctgctgagacggagagaggactggcctagcagactgcagatgttcttcgccaataaccacgaccaggagttcgacccccctaaggtgtaccctcccgtccccgccgagaagagaaagcccatccgggtcctgagcctgttcgatggcatcgccaccggtctgctggtgctgaaggacctgggcatccaggtggataggtacattgcctccgaggtgtgcgaggactccatcaccgtgggaatggtgcgtcatcagggcaagatcatgtacgtgggcgacgtgcggagcgtgacacagaagcatatccaggagtggggccctttcgacctggtgatcggcggcagcccttgcaatgacctgagcatcgtgaacccagcccggaagggcctgtacgagggaaccggcagactgttcttcgagttttacagactgctgcacgacgcccggcctaaggaaggcgacgaccggcccttcttttggctgttcgagaatgtggtggccatgggagtcagcgacaagcgggatattagccggttcctggagagcaaccccgtgatgatcgatgccaaggaagtgagcgccgcccaccgggccagatacttctggggcaatctgcctggcatgaacagacccctggccagcaccgtgaacgacaagctggagctgcaggagtgcctggagcacggccggatcgccaagttcagcaaggtgagaaccatcaccacccgaagcaacagcatcaaacaaggcaaggaccagcactttcctgtgttcatgaacgagaaggaggacatcctgtggtgtaccgagatggagagagtgttcgggttcccagtccactacacagatgtcagcaacatgtctagactggccagacagagactgctgggaagaagctggtccgtccctgtgatcagacacctgttcgcccctctgaaggagtacttcgcctgcgtgagcagcggcaacagcaacgccaacagccggggccccagcttctctagcggcctggtgccactgtccctgagagggagccacatgggccccatggagatctacaaaaccgtgagcgcctggaagcggcagcctgtgcgcgtgctgagcctgtttcggaatatcgataaagtcctgaaaagcctgggattcctggagagcggctctggctccggcggtggcaccctgaagtacgtggaggatgtgacaaacgtggtcagacgggatgtggagaagtggggccccttcgatctggtgtacggcagcacccaacccctgggcagctcttgtgaccggtgccctggctggtacatgtttcagttccaccggatcctgcagtacgccctgccgagacaggagtcccagcggccattcttttggattttcatggacaacttgctgctgaccgaggatgaccaggaaactaccactcggttcctgcagaccgaagccgtgaccctgcaggacgtgagaggccgggactaccagaacgccatgcgggtgtggtccaacatccctggactgaaaagcaagcacgcacctctgacccctaaagaagaggagtacctgcaggcccaggtgcggagcagaagcaagctggacgcccctaaggtggatctgctggtgaagaattgcctcctgcccctgagagagtacttcaagtatttcagccagaatagtctgcccctgggcggcccaagcagcggcgcccctcctcccagcggcggcagcccagccggctccccaacctctaccgaggagggcacctctgagtccgccacccccgagagcggccctggcacctccaccgagcccagcgagggcagcgcacccggcagccctgccggcagccccacctccacagaggagggaaccagcaccgagcccagcgaaggcagcgccccaggcaccagcaccgagcctagtgagggcggctctggcggcggcagcgcccaggagattaaacggatcaacaagatcagaagaagacttgtgaaagacagcaacaccaagaaggccggcaagacaggccccatgaaaaccctgctggttagagtgatgacacccgatctgagagagcggctggaaaacctgagaaagaagcctgaaaatatcccccagcccatcagcaatacatctagagccaacctgaataagctgctgaccgattacaccgaaatgaagaaggcgatcctgcatgtgtactgggaagagttccagaaggaccctgtgggcctgatgagccgggtggcccagcctgccagcaagaagatcgatcagaacaagctgaaacctgagatggacgagaagggcaacctgaccaccgccggctttgcctgctctcagtgtggccagcccctgttcgtgtacaagctggagcaggtgtctgagaagggcaaggcttacaccaactacttcggacggtgcaatgtggccgagcacgaaaagctgatcctgctggcccagctgaagcccgagaaggatagcgacgaagccgtgacatatagcctgggaaagtttgggcagagggccctggatttctacagcattcatgtgaccaaggagtccacccaccccgtgaagcccctggcccagatcgccggaaacagatacgcctccggacctgtgggaaaggccctgagcgacgcatgtatgggcacaatcgcctccttcctgtctaagtaccaggacatcatcatcgaacaccagaaggtggtgaagggcaaccagaagagactggagagcctgcgggagctggccggcaaggaaaacctggaataccctagcgtgaccctgccacctcagcctcacaccaaggagggcgttgatgcctacaacgaagtgatcgcccgggtgcgaatgtgggtgaacctgaacctgtggcagaagctgaagctaagcagagatgatgccaagcctctgctgagactgaagggattcccttcctttcctctggtcgagagacaggccaacgaagtggactggtgggacatggtgtgtaacgtgaagaagctgatcaacgagaaaaaggaggatggcaaggtgttttggcagaatctggctggctacaagagacaggaagccctgagaccatacctgagcagcgaggaagatcggaagaagggaaagaaattcgctcggtaccagctgggcgacctgctgctgcacctggaaaagaagcacggcgaggactggggaaaggtgtacgacgaggcctgggagcggattgacaagaaagtggaaggcctgagcaagcacatcaagctggaagaggaacggagaagcgaggacgcccagagcaaggccgccctgaccgactggctgcgggctaaggccagcttcgtgatcgagggcctgaaggaggccgacaaggacgagttctgcagatgcgagctgaagctgcagaagtggtacggggacctgcggggaaagcccttcgccatcgaagccgagaacagcatcctggacatcagcggcttcagcaagcagtacaactgtgccttcatctggcagaaggacggcgtgaagaagctgaacctgtacctgatcatcaactacttcaagggcggcaagctgcggttcaagaagatcaaacctgaagccttcgaagccaacagattctacaccgtgatcaacaaaaagagcggcgagatcgtgcccatggaggtgaacttcaacttcgacgaccccaacctgatcatcctgcctctggcctttggcaagagacagggcagagaattcatctggaacgacctgctgtccctggaaaccggcagcctgaagctggccaacggaagagtgatcgagaagacactgtacaacagaagaacccggcaggatgagcctgccctgttcgtggccctgaccttcgagcggcgggaggtcctggactcctccaatatcaaaccaatgaacctgatcggcgtggcaagaggcgaaaacatccccgccgtgatcgccctgaccgaccccgagggctgcccactgagccggtttaaggatagcctgggaaacccaacccacatcctgagaatcggcgagagctataaggagaagcagcggaccatccaggccaagaaggaggtggagcagcggagagccggcggctacagccggaagtacgccagcaaagccaagaatctggcagacgatatggtgagaaacaccgctagagatctgctgtactacgccgtgacccaggatgccatgctgatcttcgccaacctgagccggggcttcggccggcagggcaagcggaccttcatggccgagagacagtacacacggatggaggactggctgaccgccaagctggcctacgagggcctgagcaagacctacctgtccaagacactggcccagtacacctccaagacatgcagcaactgtgggtttaccatcaccagcgccgactacgacagggtgctggagaagctgaagaagacagcaacaggctggatgaccacaattaacggcaaggagctgaaggtggagggccagattacctactacaacagatacaagagacagaacgtagtcaaggacctgtccgtcgagctggatagactgagcgaagaatctgtgaacaacgacatctcctcctggacaaagggcagaagcggagaagctctgagcctcctgaagaaaagattctcccatagacccgtgcaggagaagttcgtgtgcctgaactgcggcttcgagacacacgcagccgagcaagccgccctgaacatcgccagatcctggctgttcctgcggagccaggagtacaagaaataccagacaaacaagacaaccggcaacaccgataagagagccttcgtcgagacctggcagtccttttaccggaagaagcttaaggaggtgtggaaacctgccgtgcggtctggcggatctggcggaggctccacaagcatggcccccagccagggcaggctgaccttcgaggacgtggccatcgagttcagccaggaggagtgggagtgcctggaccccgcccagagggccctgtacggcgaggtgatgctggagacctacaggaacctggtgagcctgggcctgaccagcaaggacagctgcagcctgaggaagaagcccaggaggaggaggaggggccagaagaggaccagggagtggcccctgctgaggtaccacaccagccccaagaaaaagagaaaagtctaagctgccttctgcggggcttgccttctggccatgcccttcttctctcccttgcacctgtacctcttggtctttgaataaagcctgagtaggaaggctagcaaaaaaaaaaaaaaaaaaaaaaaaaaaaaaaaaaaaaaaaaaaaaaaaaaaaaaaaaaaaaaaaaaaaaaaaaaaaaaaa

SEQ ID NO: 5775 - RNA, 5797 nt, synthetic construct
  source 1..5797: mol_type = other RNA
aggaaataagagagaaaagaagagtaagaagaaatataagagccaccatggcccctaagaagaagcgtaaagtgagccggatggaacgcctcgtctacgaggtgcggcagaagtgcagaaacatcgaggacatctgcatctcctgcggatctctgaacgtgaccctggagcacccactgttcatcggcggcatgtgccagaactgtaaaaactgttttctggagtgtgcctatcaatacgacgatgacggctaccagagctactgcaccatctgttgcggcggaagagaggtgctgatgtgtggaaataacaactgctgccggtgcttctgcgtggaatgcgtggacctgctggtgggccccggcgccgcccaggccgctattaaggaagatccttggaactgctacatgtgcggccacaagggcacatacggcctgctgagacggagagaggactggcctagcagactgcagatgttcttcgccaataaccacgaccaggagttcgacccccctaaggtgtaccctcccgtccccgccgagaagagaaagcccatccgggtcctgagcctgttcgatggcatcgccaccggtctgctggtgctgaaggacctgggcatccaggtggataggtacattgcctccgaggtgtgcgaggactccatcaccgtgggaatggtgcgtcatcagggcaagatcatgtacgtgggcgacgtgcggagcgtgacacagaagcatatccaggagtggggccctttcgacctggtgatcggcggcagcccttgcaatgacctgagcatcgtgaacccagcccggaagggcctgtacgagggaaccggcagactgttcttcgagttttacagactgctgcacgacgcccggcctaaggaaggcgacgaccggcccttcttttggctgttcgagaatgtggtggccatgggagtcagcgacaagcgggatattagccggttcctggagagcaaccccgtgatgatcgatgccaaggaagtgagcgccgcccaccgggccagatacttctggggcaatctgcctggcatgaacagacccctggccagcaccgtgaacgacaagctggagctgcaggagtgcctggagcacggccggatcgccaagttcagcaaggtgagaaccatcaccacccgaagcaacagcatcaaacaaggcaaggaccagcactttcctgtgttcatgaacgagaaggaggacatcctgtggtgtaccgagatggagagagtgttcgggttcccagtccactacacagatgtcagcaacatgtctagactggccagacagagactgctgggaagaagctggtccgtccctgtgatcagacacctgttcgcccctctgaaggagtacttcgcctgcgtgagcagcggcaacagcaacgccaacagccggggccccagcttctctagcggcctggtgccactgtccctgagagggagccacatgggccccatggagatctacaaaaccgtgagcgcctggaagcggcagcctgtgcgcgtgctgagcctgtttcggaatatcgataaagtcctgaaaagcctgggattcctggagagcggctctggctccggcggtggcaccctgaagtacgtggaggatgtgacaaacgtggtcagacgggatgtggagaagtggggccccttcgatctggtgtacggcagcacccaacccctgggcagctcttgtgaccggtgccctggctggtacatgtttcagttccaccggatcctgcagtacgccctgccgagacaggagtcccagcggccattcttttggattttcatggacaacttgctgctgaccgaggatgaccaggaaactaccactcggttcctgcagaccgaagccgtgaccctgcaggacgtgagaggccgggactaccagaacgccatgcgggtgtggtccaacatccctggactgaaaagcaagcacgcacctctgacccctaaagaagaggagtacctgcaggcccaggtgcggagcagaagcaagctggacgcccctaaggtggatctgctggtgaagaattgcctcctgcccctgagagagtacttcaagtatttcagccagaatagtctgcccctgggcggcccaagcagcggcgcccctcctcccagcggcggcagcccagccggctccccaacctctaccgaggagggcacctctgagtccgccacccccgagagcggccctggcacctccaccgagcccagcgagggcagcgcacccggcagccctgccggcagccccacctccacagaggagggaaccagcaccgagcccagcgaaggcagcgccccaggcaccagcaccgagcctagtgagggcggctctggcggcggcagcgcccaggagattaaacggatcaacaagatcagaagaagacttgtgaaagacagcaacaccaagaaggccggcaagacaggccccatgaaaaccctgctggttagagtgatgacacccgatctgagagagcggctggaaaacctgagaaagaagcctgaaaatatcccccagcccatcagcaatacatctagagccaacctgaataagctgctgaccgattacaccgaaatgaagaaggcgatcctgcatgtgtactgggaagagttccagaaggaccctgtgggcctgatgagccgggtggcccagcctgccagcaagaagatcgatcagaacaagctgaaacctgagatggacgagaagggcaacctgaccaccgccggctttgcctgctctcagtgtggccagcccctgttcgtgtacaagctggagcaggtgtctgagaagggcaaggcttacaccaactacttcggacggtgcaatgtggccgagcacgaaaagctgatcctgctggcccagctgaagcccgagaaggatagcgacgaagccgtgacatatagcctgggaaagtttgggcagagggccctggatttctacagcattcatgtgaccaaggagtccacccaccccgtgaagcccctggcccagatcgccggaaacagatacgcctccggacctgtgggaaaggccctgagcgacgcatgtatgggcacaatcgcctccttcctgtctaagtaccaggacatcatcatcgaacaccagaaggtggtgaagggcaaccagaagagactggagagcctgcgggagctggccggcaaggaaaacctggaataccctagcgtgaccctgccacctcagcctcacaccaaggagggcgttgatgcctacaacgaagtgatcgcccgggtgcgaatgtgggtgaacctgaacctgtggcagaagctgaagctaagcagagatgatgccaagcctctgctgagactgaagggattcccttcctttcctctggtcgagagacaggccaacgaagtggactggtgggacatggtgtgtaacgtgaagaagctgatcaacgagaaaaaggaggatggcaaggtgttttggcagaatctggctggctacaagagacaggaagccctgagaccatacctgagcagcgaggaagatcggaagaagggaaagaaattcgctcggtaccagctgggcgacctgctgctgcacctggaaaagaagcacggcgaggactggggaaaggtgtacgacgaggcctgggagcggattgacaagaaagtggaaggcctgagcaagcacatcaagctggaagaggaacggagaagcgaggacgcccagagcaaggccgccctgaccgactggctgcgggctaaggccagcttcgtgatcgagggcctgaaggaggccgacaaggacgagttctgcagatgcgagctgaagctgcagaagtggtacggggacctgcggggaaagcccttcgccatcgaagccgagaacagcatcctggacatcagcggcttcagcaagcagtacaactgtgccttcatctggcagaaggacggcgtgaagaagctgaacctgtacctgatcatcaactacttcaagggcggcaagctgcggttcaagaagatcaaacctgaagccttcgaagccaacagattctacaccgtgatcaacaaaaagagcggcgagatcgtgcccatggaggtgaacttcaacttcgacgaccccaacctgatcatcctgcctctggcctttggcaagagacagggcagagaattcatctggaacgacctgctgtccctggaaaccggcagcctgaagctggccaacggaagagtgatcgagaagacactgtacaacagaagaacccggcaggatgagcctgccctgttcgtggccctgaccttcgagcggcgggaggtcctggactcctccaatatcaaaccaatgaacctgatcggcgtggcaagaggcgaaaacatccccgccgtgatcgccctgaccgaccccgagggctgcccactgagccggtttaaggatagcctgggaaacccaacccacatcctgagaatcggcgagagctataaggagaagcagcggaccatccaggccaagaaggaggtggagcagcggagagccggcggctacagccggaagtacgccagcaaagccaagaatctggcagacgatatggtgagaaacaccgctagagatctgctgtactacgccgtgacccaggatgccatgctgatcttcgccaacctgagccggggcttcggccggcagggcaagcggaccttcatggccgagagacagtacacacggatggaggactggctgaccgccaagctggcctacgagggcctgagcaagacctacctgtccaagacactggcccagtacacctccaagacatgcagcaactgtgggtttaccatcaccagcgccgactacgacagggtgctggagaagctgaagaagacagcaacaggctggatgaccacaattaacggcaaggagctgaaggtggagggccagattacctactacaacagatacaagagacagaacgtagtcaaggacctgtccgtcgagctggatagactgagcgaagaatctgtgaacaacgacatctcctcctggacaaagggcagaagcggagaagctctgagcctcctgaagaaaagattctcccatagacccgtgcaggagaagttcgtgtgcctgaactgcggcttcgagacacacgcagccgagcaagccgccctgaacatcgccagatcctggctgttcctgcggagccaggagtacaagaaataccagacaaacaagacaaccggcaacaccgataagagagccttcgtcgagacctggcagtccttttaccggaagaagcttaaggaggtgtggaaacctgccgtgcggtctggcggatctggcggaggctccacaagcagccagagcctggtgaccttcggcgacgtggccgtggagttcagccccgaggagtgggagtggctggacagcgcccagaggagcctgtacaggagcgtgatgctggagaactacaggagcctggtgagcctgggcctgtgcgtgagcaagcccaagatgatcagcagcctggagcagaggaaggagccctgggccgccaagaggaccctgaccaggggcggctgcagcgacagcagggccctgaccagccccaagaaaaagagaaaagtctaagctgccttctgcggggcttgccttctggccatgcccttcttctctcccttgcacctgtacctcttggtctttgaataaagcctgagtaggaaggctagcaaaaaaaaaaaaaaaaaaaaaaaaaaaaaaaaaaaaaaaaaaaaaaaaaaaaaaaaaaaaaaaaaaaaaaaaaaaaaaaa

SEQ ID NO: 5776 - RNA, 5797 nt, synthetic construct
  source 1..5797: mol_type = other RNA
aggaaataagagagaaaagaagagtaagaagaaatataagagccaccatggcccctaagaagaagcgtaaagtgagccggatggaacgcctcgtctacgaggtgcggcagaagtgcagaaacatcgaggacatctgcatctcctgcggatctctgaacgtgaccctggagcacccactgttcatcggcggcatgtgccagaactgtaaaaactgttttctggagtgtgcctatcaatacgacgatgacggctaccagagctactgcaccatctgttgcggcggaagagaggtgctgatgtgtggaaataacaactgctgccggtgcttctgcgtggaatgcgtggacctgctggtgggccccggcgccgcccaggccgctattaaggaagatccttggaactgctacatgtgcggccacaagggcacatacggcctgctgagacggagagaggactggcctagcagactgcagatgttcttcgccaataaccacgaccaggagttcgacccccctaaggtgtaccctcccgtccccgccgagaagagaaagcccatccgggtcctgagcctgttcgatggcatcgccaccggtctgctggtgctgaaggacctgggcatccaggtggataggtacattgcctccgaggtgtgcgaggactccatcaccgtgggaatggtgcgtcatcagggcaagatcatgtacgtgggcgacgtgcggagcgtgacacagaagcatatccaggagtggggccctttcgacctggtgatcggcggcagcccttgcaatgacctgagcatcgtgaacccagcccggaagggcctgtacgagggaaccggcagactgttcttcgagttttacagactgctgcacgacgcccggcctaaggaaggcgacgaccggcccttcttttggctgttcgagaatgtggtggccatgggagtcagcgacaagcgggatattagccggttcctggagagcaaccccgtgatgatcgatgccaaggaagtgagcgccgcccaccgggccagatacttctggggcaatctgcctggcatgaacagacccctggccagcaccgtgaacgacaagctggagctgcaggagtgcctggagcacggccggatcgccaagttcagcaaggtgagaaccatcaccacccgaagcaacagcatcaaacaaggcaaggaccagcactttcctgtgttcatgaacgagaaggaggacatcctgtggtgtaccgagatggagagagtgttcgggttcccagtccactacacagatgtcagcaacatgtctagactggccagacagagactgctgggaagaagctggtccgtccctgtgatcagacacctgttcgcccctctgaaggagtacttcgcctgcgtgagcagcggcaacagcaacgccaacagccggggccccagcttctctagcggcctggtgccactgtccctgagagggagccacatgggccccatggagatctacaaaaccgtgagcgcctggaagcggcagcctgtgcgcgtgctgagcctgtttcggaatatcgataaagtcctgaaaagcctgggattcctggagagcggctctggctccggcggtggcaccctgaagtacgtggaggatgtgacaaacgtggtcagacgggatgtggagaagtggggccccttcgatctggtgtacggcagcacccaacccctgggcagctcttgtgaccggtgccctggctggtacatgtttcagttccaccggatcctgcagtacgccctgccgagacaggagtcccagcggccattcttttggattttcatggacaacttgctgctgaccgaggatgaccaggaaactaccactcggttcctgcagaccgaagccgtgaccctgcaggacgtgagaggccgggactaccagaacgccatgcgggtgtggtccaacatccctggactgaaaagcaagcacgcacctctgacccctaaagaagaggagtacctgcaggcccaggtgcggagcagaagcaagctggacgcccctaaggtggatctgctggtgaagaattgcctcctgcccctgagagagtacttcaagtatttcagccagaatagtctgcccctgggcggcccaagcagcggcgcccctcctcccagcggcggcagcccagccggctccccaacctctaccgaggagggcacctctgagtccgccacccccgagagcggccctggcacctccaccgagcccagcgagggcagcgcacccggcagccctgccggcagccccacctccacagaggagggaaccagcaccgagcccagcgaaggcagcgccccaggcaccagcaccgagcctagtgagggcggctctggcggcggcagcgcccaggagattaaacggatcaacaagatcagaagaagacttgtgaaagacagcaacaccaagaaggccggcaagacaggccccatgaaaaccctgctggttagagtgatgacacccgatctgagagagcggctggaaaacctgagaaagaagcctgaaaatatcccccagcccatcagcaatacatctagagccaacctgaataagctgctgaccgattacaccgaaatgaagaaggcgatcctgcatgtgtactgggaagagttccagaaggaccctgtgggcctgatgagccgggtggcccagcctgccagcaagaagatcgatcagaacaagctgaaacctgagatggacgagaagggcaacctgaccaccgccggctttgcctgctctcagtgtggccagcccctgttcgtgtacaagctggagcaggtgtctgagaagggcaaggcttacaccaactacttcggacggtgcaatgtggccgagcacgaaaagctgatcctgctggcccagctgaagcccgagaaggatagcgacgaagccgtgacatatagcctgggaaagtttgggcagagggccctggatttctacagcattcatgtgaccaaggagtccacccaccccgtgaagcccctggcccagatcgccggaaacagatacgcctccggacctgtgggaaaggccctgagcgacgcatgtatgggcacaatcgcctccttcctgtctaagtaccaggacatcatcatcgaacaccagaaggtggtgaagggcaaccagaagagactggagagcctgcgggagctggccggcaaggaaaacctggaataccctagcgtgaccctgccacctcagcctcacaccaaggagggcgttgatgcctacaacgaagtgatcgcccgggtgcgaatgtgggtgaacctgaacctgtggcagaagctgaagctaagcagagatgatgccaagcctctgctgagactgaagggattcccttcctttcctctggtcgagagacaggccaacgaagtggactggtgggacatggtgtgtaacgtgaagaagctgatcaacgagaaaaaggaggatggcaaggtgttttggcagaatctggctggctacaagagacaggaagccctgagaccatacctgagcagcgaggaagatcggaagaagggaaagaaattcgctcggtaccagctgggcgacctgctgctgcacctggaaaagaagcacggcgaggactggggaaaggtgtacgacgaggcctgggagcggattgacaagaaagtggaaggcctgagcaagcacatcaagctggaagaggaacggagaagcgaggacgcccagagcaaggccgccctgaccgactggctgcgggctaaggccagcttcgtgatcgagggcctgaaggaggccgacaaggacgagttctgcagatgcgagctgaagctgcagaagtggtacggggacctgcggggaaagcccttcgccatcgaagccgagaacagcatcctggacatcagcggcttcagcaagcagtacaactgtgccttcatctggcagaaggacggcgtgaagaagctgaacctgtacctgatcatcaactacttcaagggcggcaagctgcggttcaagaagatcaaacctgaagccttcgaagccaacagattctacaccgtgatcaacaaaaagagcggcgagatcgtgcccatggaggtgaacttcaacttcgacgaccccaacctgatcatcctgcctctggcctttggcaagagacagggcagagaattcatctggaacgacctgctgtccctggaaaccggcagcctgaagctggccaacggaagagtgatcgagaagacactgtacaacagaagaacccggcaggatgagcctgccctgttcgtggccctgaccttcgagcggcgggaggtcctggactcctccaatatcaaaccaatgaacctgatcggcgtggcaagaggcgaaaacatccccgccgtgatcgccctgaccgaccccgagggctgcccactgagccggtttaaggatagcctgggaaacccaacccacatcctgagaatcggcgagagctataaggagaagcagcggaccatccaggccaagaaggaggtggagcagcggagagccggcggctacagccggaagtacgccagcaaagccaagaatctggcagacgatatggtgagaaacaccgctagagatctgctgtactacgccgtgacccaggatgccatgctgatcttcgccaacctgagccggggcttcggccggcagggcaagcggaccttcatggccgagagacagtacacacggatggaggactggctgaccgccaagctggcctacgagggcctgagcaagacctacctgtccaagacactggcccagtacacctccaagacatgcagcaactgtgggtttaccatcaccagcgccgactacgacagggtgctggagaagctgaagaagacagcaacaggctggatgaccacaattaacggcaaggagctgaaggtggagggccagattacctactacaacagatacaagagacagaacgtagtcaaggacctgtccgtcgagctggatagactgagcgaagaatctgtgaacaacgacatctcctcctggacaaagggcagaagcggagaagctctgagcctcctgaagaaaagattctcccatagacccgtgcaggagaagttcgtgtgcctgaactgcggcttcgagacacacgcagccgagcaagccgccctgaacatcgccagatcctggctgttcctgcggagccaggagtacaagaaataccagacaaacaagacaaccggcaacaccgataagagagccttcgtcgagacctggcagtccttttaccggaagaagcttaaggaggtgtggaaacctgccgtgcggtctggcggatctggcggaggctccacaagcagcaagctgcccgtgaccttcggcgacctggccatctacttcagccaggaggagtgggagtggctgagccccatccagaaggacctgtacgaggacgtgatgctggagaactaccagaacctggtgagcctgggcctgagcttcaggaggcccaacgtgatcaccctgctggagaagggcaaggccccctggatggtggagcccgtgaggaagaggaggggcctggacagcaagagcaagtgcaccagccccaagaaaaagagaaaagtctaagctgccttctgcggggcttgccttctggccatgcccttcttctctcccttgcacctgtacctcttggtctttgaataaagcctgagtaggaaggctagcaaaaaaaaaaaaaaaaaaaaaaaaaaaaaaaaaaaaaaaaaaaaaaaaaaaaaaaaaaaaaaaaaaaaaaaaaaaaaaaa

SEQ ID NO: 5777 - RNA, 5797 nt, synthetic construct
  source 1..5797: mol_type = other RNA
aggaaataagagagaaaagaagagtaagaagaaatataagagccaccatggcccctaagaagaagcgtaaagtgagccggatggaacgcctcgtctacgaggtgcggcagaagtgcagaaacatcgaggacatctgcatctcctgcggatctctgaacgtgaccctggagcacccactgttcatcggcggcatgtgccagaactgtaaaaactgttttctggagtgtgcctatcaatacgacgatgacggctaccagagctactgcaccatctgttgcggcggaagagaggtgctgatgtgtggaaataacaactgctgccggtgcttctgcgtggaatgcgtggacctgctggtgggccccggcgccgcccaggccgctattaaggaagatccttggaactgctacatgtgcggccacaagggcacatacggcctgctgagacggagagaggactggcctagcagactgcagatgttcttcgccaataaccacgaccaggagttcgacccccctaaggtgtaccctcccgtccccgccgagaagagaaagcccatccgggtcctgagcctgttcgatggcatcgccaccggtctgctggtgctgaaggacctgggcatccaggtggataggtacattgcctccgaggtgtgcgaggactccatcaccgtgggaatggtgcgtcatcagggcaagatcatgtacgtgggcgacgtgcggagcgtgacacagaagcatatccaggagtggggccctttcgacctggtgatcggcggcagcccttgcaatgacctgagcatcgtgaacccagcccggaagggcctgtacgagggaaccggcagactgttcttcgagttttacagactgctgcacgacgcccggcctaaggaaggcgacgaccggcccttcttttggctgttcgagaatgtggtggccatgggagtcagcgacaagcgggatattagccggttcctggagagcaaccccgtgatgatcgatgccaaggaagtgagcgccgcccaccgggccagatacttctggggcaatctgcctggcatgaacagacccctggccagcaccgtgaacgacaagctggagctgcaggagtgcctggagcacggccggatcgccaagttcagcaaggtgagaaccatcaccacccgaagcaacagcatcaaacaaggcaaggaccagcactttcctgtgttcatgaacgagaaggaggacatcctgtggtgtaccgagatggagagagtgttcgggttcccagtccactacacagatgtcagcaacatgtctagactggccagacagagactgctgggaagaagctggtccgtccctgtgatcagacacctgttcgcccctctgaaggagtacttcgcctgcgtgagcagcggcaacagcaacgccaacagccggggccccagcttctctagcggcctggtgccactgtccctgagagggagccacatgggccccatggagatctacaaaaccgtgagcgcctggaagcggcagcctgtgcgcgtgctgagcctgtttcggaatatcgataaagtcctgaaaagcctgggattcctggagagcggctctggctccggcggtggcaccctgaagtacgtggaggatgtgacaaacgtggtcagacgggatgtggagaagtggggccccttcgatctggtgtacggcagcacccaacccctgggcagctcttgtgaccggtgccctggctggtacatgtttcagttccaccggatcctgcagtacgccctgccgagacaggagtcccagcggccattcttttggattttcatggacaacttgctgctgaccgaggatgaccaggaaactaccactcggttcctgcagaccgaagccgtgaccctgcaggacgtgagaggccgggactaccagaacgccatgcgggtgtggtccaacatccctggactgaaaagcaagcacgcacctctgacccctaaagaagaggagtacctgcaggcccaggtgcggagcagaagcaagctggacgcccctaaggtggatctgctggtgaagaattgcctcctgcccctgagagagtacttcaagtatttcagccagaatagtctgcccctgggcggcccaagcagcggcgcccctcctcccagcggcggcagcccagccggctccccaacctctaccgaggagggcacctctgagtccgccacccccgagagcggccctggcacctccaccgagcccagcgagggcagcgcacccggcagccctgccggcagccccacctccacagaggagggaaccagcaccgagcccagcgaaggcagcgccccaggcaccagcaccgagcctagtgagggcggctctggcggcggcagcgcccaggagattaaacggatcaacaagatcagaagaagacttgtgaaagacagcaacaccaagaaggccggcaagacaggccccatgaaaaccctgctggttagagtgatgacacccgatctgagagagcggctggaaaacctgagaaagaagcctgaaaatatcccccagcccatcagcaatacatctagagccaacctgaataagctgctgaccgattacaccgaaatgaagaaggcgatcctgcatgtgtactgggaagagttccagaaggaccctgtgggcctgatgagccgggtggcccagcctgccagcaagaagatcgatcagaacaagctgaaacctgagatggacgagaagggcaacctgaccaccgccggctttgcctgctctcagtgtggccagcccctgttcgtgtacaagctggagcaggtgtctgagaagggcaaggcttacaccaactacttcggacggtgcaatgtggccgagcacgaaaagctgatcctgctggcccagctgaagcccgagaaggatagcgacgaagccgtgacatatagcctgggaaagtttgggcagagggccctggatttctacagcattcatgtgaccaaggagtccacccaccccgtgaagcccctggcccagatcgccggaaacagatacgcctccggacctgtgggaaaggccctgagcgacgcatgtatgggcacaatcgcctccttcctgtctaagtaccaggacatcatcatcgaacaccagaaggtggtgaagggcaaccagaagagactggagagcctgcgggagctggccggcaaggaaaacctggaataccctagcgtgaccctgccacctcagcctcacaccaaggagggcgttgatgcctacaacgaagtgatcgcccgggtgcgaatgtgggtgaacctgaacctgtggcagaagctgaagctaagcagagatgatgccaagcctctgctgagactgaagggattcccttcctttcctctggtcgagagacaggccaacgaagtggactggtgggacatggtgtgtaacgtgaagaagctgatcaacgagaaaaaggaggatggcaaggtgttttggcagaatctggctggctacaagagacaggaagccctgagaccatacctgagcagcgaggaagatcggaagaagggaaagaaattcgctcggtaccagctgggcgacctgctgctgcacctggaaaagaagcacggcgaggactggggaaaggtgtacgacgaggcctgggagcggattgacaagaaagtggaaggcctgagcaagcacatcaagctggaagaggaacggagaagcgaggacgcccagagcaaggccgccctgaccgactggctgcgggctaaggccagcttcgtgatcgagggcctgaaggaggccgacaaggacgagttctgcagatgcgagctgaagctgcagaagtggtacggggacctgcggggaaagcccttcgccatcgaagccgagaacagcatcctggacatcagcggcttcagcaagcagtacaactgtgccttcatctggcagaaggacggcgtgaagaagctgaacctgtacctgatcatcaactacttcaagggcggcaagctgcggttcaagaagatcaaacctgaagccttcgaagccaacagattctacaccgtgatcaacaaaaagagcggcgagatcgtgcccatggaggtgaacttcaacttcgacgaccccaacctgatcatcctgcctctggcctttggcaagagacagggcagagaattcatctggaacgacctgctgtccctggaaaccggcagcctgaagctggccaacggaagagtgatcgagaagacactgtacaacagaagaacccggcaggatgagcctgccctgttcgtggccctgaccttcgagcggcgggaggtcctggactcctccaatatcaaaccaatgaacctgatcggcgtggcaagaggcgaaaacatccccgccgtgatcgccctgaccgaccccgagggctgcccactgagccggtttaaggatagcctgggaaacccaacccacatcctgagaatcggcgagagctataaggagaagcagcggaccatccaggccaagaaggaggtggagcagcggagagccggcggctacagccggaagtacgccagcaaagccaagaatctggcagacgatatggtgagaaacaccgctagagatctgctgtactacgccgtgacccaggatgccatgctgatcttcgccaacctgagccggggcttcggccggcagggcaagcggaccttcatggccgagagacagtacacacggatggaggactggctgaccgccaagctggcctacgagggcctgagcaagacctacctgtccaagacactggcccagtacacctccaagacatgcagcaactgtgggtttaccatcaccagcgccgactacgacagggtgctggagaagctgaagaagacagcaacaggctggatgaccacaattaacggcaaggagctgaaggtggagggccagattacctactacaacagatacaagagacagaacgtagtcaaggacctgtccgtcgagctggatagactgagcgaagaatctgtgaacaacgacatctcctcctggacaaagggcagaagcggagaagctctgagcctcctgaagaaaagattctcccatagacccgtgcaggagaagttcgtgtgcctgaactgcggcttcgagacacacgcagccgagcaagccgccctgaacatcgccagatcctggctgttcctgcggagccaggagtacaagaaataccagacaaacaagacaaccggcaacaccgataagagagccttcgtcgagacctggcagtccttttaccggaagaagcttaaggaggtgtggaaacctgccgtgcggtctggcggatctggcggaggctccacaagccaggaccccagcgccgagggcctgagcgaggaggtgcccgtggtgttcgaggagctgcccgtggtgttcgaggacgtggccgtgtacttcaccagggaggagtggggcatgctggacaagaggcagaaggagctgtacagggacgtgatgaggatgaactacgagctgctggccagcctgggccccgccgccgccaagcccgacctgatcagcaagctggagaggagggccgccccctggatcaccagccccaagaaaaagagaaaagtctaagctgccttctgcggggcttgccttctggccatgcccttcttctctcccttgcacctgtacctcttggtctttgaataaagcctgagtaggaaggctagcaaaaaaaaaaaaaaaaaaaaaaaaaaaaaaaaaaaaaaaaaaaaaaaaaaaaaaaaaaaaaaaaaaaaaaaaaaaaaaaa

SEQ ID NO: 5778 - RNA, 5797 nt, synthetic construct
  source 1..5797: mol_type = other RNA
aggaaataagagagaaaagaagagtaagaagaaatataagagccaccatggcccctaagaagaagcgtaaagtgagccggatggaacgcctcgtctacgaggtgcggcagaagtgcagaaacatcgaggacatctgcatctcctgcggatctctgaacgtgaccctggagcacccactgttcatcggcggcatgtgccagaactgtaaaaactgttttctggagtgtgcctatcaatacgacgatgacggctaccagagctactgcaccatctgttgcggcggaagagaggtgctgatgtgtggaaataacaactgctgccggtgcttctgcgtggaatgcgtggacctgctggtgggccccggcgccgcccaggccgctattaaggaagatccttggaactgctacatgtgcggccacaagggcacatacggcctgctgagacggagagaggactggcctagcagactgcagatgttcttcgccaataaccacgaccaggagttcgacccccctaaggtgtaccctcccgtccccgccgagaagagaaagcccatccgggtcctgagcctgttcgatggcatcgccaccggtctgctggtgctgaaggacctgggcatccaggtggataggtacattgcctccgaggtgtgcgaggactccatcaccgtgggaatggtgcgtcatcagggcaagatcatgtacgtgggcgacgtgcggagcgtgacacagaagcatatccaggagtggggccctttcgacctggtgatcggcggcagcccttgcaatgacctgagcatcgtgaacccagcccggaagggcctgtacgagggaaccggcagactgttcttcgagttttacagactgctgcacgacgcccggcctaaggaaggcgacgaccggcccttcttttggctgttcgagaatgtggtggccatgggagtcagcgacaagcgggatattagccggttcctggagagcaaccccgtgatgatcgatgccaaggaagtgagcgccgcccaccgggccagatacttctggggcaatctgcctggcatgaacagacccctggccagcaccgtgaacgacaagctggagctgcaggagtgcctggagcacggccggatcgccaagttcagcaaggtgagaaccatcaccacccgaagcaacagcatcaaacaaggcaaggaccagcactttcctgtgttcatgaacgagaaggaggacatcctgtggtgtaccgagatggagagagtgttcgggttcccagtccactacacagatgtcagcaacatgtctagactggccagacagagactgctgggaagaagctggtccgtccctgtgatcagacacctgttcgcccctctgaaggagtacttcgcctgcgtgagcagcggcaacagcaacgccaacagccggggccccagcttctctagcggcctggtgccactgtccctgagagggagccacatgggccccatggagatctacaaaaccgtgagcgcctggaagcggcagcctgtgcgcgtgctgagcctgtttcggaatatcgataaagtcctgaaaagcctgggattcctggagagcggctctggctccggcggtggcaccctgaagtacgtggaggatgtgacaaacgtggtcagacgggatgtggagaagtggggccccttcgatctggtgtacggcagcacccaacccctgggcagctcttgtgaccggtgccctggctggtacatgtttcagttccaccggatcctgcagtacgccctgccgagacaggagtcccagcggccattcttttggattttcatggacaacttgctgctgaccgaggatgaccaggaaactaccactcggttcctgcagaccgaagccgtgaccctgcaggacgtgagaggccgggactaccagaacgccatgcgggtgtggtccaacatccctggactgaaaagcaagcacgcacctctgacccctaaagaagaggagtacctgcaggcccaggtgcggagcagaagcaagctggacgcccctaaggtggatctgctggtgaagaattgcctcctgcccctgagagagtacttcaagtatttcagccagaatagtctgcccctgggcggcccaagcagcggcgcccctcctcccagcggcggcagcccagccggctccccaacctctaccgaggagggcacctctgagtccgccacccccgagagcggccctggcacctccaccgagcccagcgagggcagcgcacccggcagccctgccggcagccccacctccacagaggagggaaccagcaccgagcccagcgaaggcagcgccccaggcaccagcaccgagcctagtgagggcggctctggcggcggcagcgcccaggagattaaacggatcaacaagatcagaagaagacttgtgaaagacagcaacaccaagaaggccggcaagacaggccccatgaaaaccctgctggttagagtgatgacacccgatctgagagagcggctggaaaacctgagaaagaagcctgaaaatatcccccagcccatcagcaatacatctagagccaacctgaataagctgctgaccgattacaccgaaatgaagaaggcgatcctgcatgtgtactgggaagagttccagaaggaccctgtgggcctgatgagccgggtggcccagcctgccagcaagaagatcgatcagaacaagctgaaacctgagatggacgagaagggcaacctgaccaccgccggctttgcctgctctcagtgtggccagcccctgttcgtgtacaagctggagcaggtgtctgagaagggcaaggcttacaccaactacttcggacggtgcaatgtggccgagcacgaaaagctgatcctgctggcccagctgaagcccgagaaggatagcgacgaagccgtgacatatagcctgggaaagtttgggcagagggccctggatttctacagcattcatgtgaccaaggagtccacccaccccgtgaagcccctggcccagatcgccggaaacagatacgcctccggacctgtgggaaaggccctgagcgacgcatgtatgggcacaatcgcctccttcctgtctaagtaccaggacatcatcatcgaacaccagaaggtggtgaagggcaaccagaagagactggagagcctgcgggagctggccggcaaggaaaacctggaataccctagcgtgaccctgccacctcagcctcacaccaaggagggcgttgatgcctacaacgaagtgatcgcccgggtgcgaatgtgggtgaacctgaacctgtggcagaagctgaagctaagcagagatgatgccaagcctctgctgagactgaagggattcccttcctttcctctggtcgagagacaggccaacgaagtggactggtgggacatggtgtgtaacgtgaagaagctgatcaacgagaaaaaggaggatggcaaggtgttttggcagaatctggctggctacaagagacaggaagccctgagaccatacctgagcagcgaggaagatcggaagaagggaaagaaattcgctcggtaccagctgggcgacctgctgctgcacctggaaaagaagcacggcgaggactggggaaaggtgtacgacgaggcctgggagcggattgacaagaaagtggaaggcctgagcaagcacatcaagctggaagaggaacggagaagcgaggacgcccagagcaaggccgccctgaccgactggctgcgggctaaggccagcttcgtgatcgagggcctgaaggaggccgacaaggacgagttctgcagatgcgagctgaagctgcagaagtggtacggggacctgcggggaaagcccttcgccatcgaagccgagaacagcatcctggacatcagcggcttcagcaagcagtacaactgtgccttcatctggcagaaggacggcgtgaagaagctgaacctgtacctgatcatcaactacttcaagggcggcaagctgcggttcaagaagatcaaacctgaagccttcgaagccaacagattctacaccgtgatcaacaaaaagagcggcgagatcgtgcccatggaggtgaacttcaacttcgacgaccccaacctgatcatcctgcctctggcctttggcaagagacagggcagagaattcatctggaacgacctgctgtccctggaaaccggcagcctgaagctggccaacggaagagtgatcgagaagacactgtacaacagaagaacccggcaggatgagcctgccctgttcgtggccctgaccttcgagcggcgggaggtcctggactcctccaatatcaaaccaatgaacctgatcggcgtggcaagaggcgaaaacatccccgccgtgatcgccctgaccgaccccgagggctgcccactgagccggtttaaggatagcctgggaaacccaacccacatcctgagaatcggcgagagctataaggagaagcagcggaccatccaggccaagaaggaggtggagcagcggagagccggcggctacagccggaagtacgccagcaaagccaagaatctggcagacgatatggtgagaaacaccgctagagatctgctgtactacgccgtgacccaggatgccatgctgatcttcgccaacctgagccggggcttcggccggcagggcaagcggaccttcatggccgagagacagtacacacggatggaggactggctgaccgccaagctggcctacgagggcctgagcaagacctacctgtccaagacactggcccagtacacctccaagacatgcagcaactgtgggtttaccatcaccagcgccgactacgacagggtgctggagaagctgaagaagacagcaacaggctggatgaccacaattaacggcaaggagctgaaggtggagggccagattacctactacaacagatacaagagacagaacgtagtcaaggacctgtccgtcgagctggatagactgagcgaagaatctgtgaacaacgacatctcctcctggacaaagggcagaagcggagaagctctgagcctcctgaagaaaagattctcccatagacccgtgcaggagaagttcgtgtgcctgaactgcggcttcgagacacacgcagccgagcaagccgccctgaacatcgccagatcctggctgttcctgcggagccaggagtacaagaaataccagacaaacaagacaaccggcaacaccgataagagagccttcgtcgagacctggcagtccttttaccggaagaagcttaaggaggtgtggaaacctgccgtgcggtctggcggatctggcggaggctccacaagcatccagaacaccgtgacctacgacgacgtgcacatcgacttcacctgggaggagtggaccctgctggaccccagccagaggaacctgtacaaggacgtgatggtggagacctacaccaacctgaccgccgtgggctacagctgggaggaccacaacatggaggagcactgccagagcagccagaggcagaggaggtacaagaggagcaacaccggcgagaagccctgcgagtacacccagtgcaccagccccaagaaaaagagaaaagtctaagctgccttctgcggggcttgccttctggccatgcccttcttctctcccttgcacctgtacctcttggtctttgaataaagcctgagtaggaaggctagcaaaaaaaaaaaaaaaaaaaaaaaaaaaaaaaaaaaaaaaaaaaaaaaaaaaaaaaaaaaaaaaaaaaaaaaaaaaaaaaa

SEQ ID NO: 5779 - RNA, 5797 nt, synthetic construct
  source 1..5797: mol_type = other RNA
aggaaataagagagaaaagaagagtaagaagaaatataagagccaccatggcccctaagaagaagcgtaaagtgagccggatggaacgcctcgtctacgaggtgcggcagaagtgcagaaacatcgaggacatctgcatctcctgcggatctctgaacgtgaccctggagcacccactgttcatcggcggcatgtgccagaactgtaaaaactgttttctggagtgtgcctatcaatacgacgatgacggctaccagagctactgcaccatctgttgcggcggaagagaggtgctgatgtgtggaaataacaactgctgccggtgcttctgcgtggaatgcgtggacctgctggtgggccccggcgccgcccaggccgctattaaggaagatccttggaactgctacatgtgcggccacaagggcacatacggcctgctgagacggagagaggactggcctagcagactgcagatgttcttcgccaataaccacgaccaggagttcgacccccctaaggtgtaccctcccgtccccgccgagaagagaaagcccatccgggtcctgagcctgttcgatggcatcgccaccggtctgctggtgctgaaggacctgggcatccaggtggataggtacattgcctccgaggtgtgcgaggactccatcaccgtgggaatggtgcgtcatcagggcaagatcatgtacgtgggcgacgtgcggagcgtgacacagaagcatatccaggagtggggccctttcgacctggtgatcggcggcagcccttgcaatgacctgagcatcgtgaacccagcccggaagggcctgtacgagggaaccggcagactgttcttcgagttttacagactgctgcacgacgcccggcctaaggaaggcgacgaccggcccttcttttggctgttcgagaatgtggtggccatgggagtcagcgacaagcgggatattagccggttcctggagagcaaccccgtgatgatcgatgccaaggaagtgagcgccgcccaccgggccagatacttctggggcaatctgcctggcatgaacagacccctggccagcaccgtgaacgacaagctggagctgcaggagtgcctggagcacggccggatcgccaagttcagcaaggtgagaaccatcaccacccgaagcaacagcatcaaacaaggcaaggaccagcactttcctgtgttcatgaacgagaaggaggacatcctgtggtgtaccgagatggagagagtgttcgggttcccagtccactacacagatgtcagcaacatgtctagactggccagacagagactgctgggaagaagctggtccgtccctgtgatcagacacctgttcgcccctctgaaggagtacttcgcctgcgtgagcagcggcaacagcaacgccaacagccggggccccagcttctctagcggcctggtgccactgtccctgagagggagccacatgggccccatggagatctacaaaaccgtgagcgcctggaagcggcagcctgtgcgcgtgctgagcctgtttcggaatatcgataaagtcctgaaaagcctgggattcctggagagcggctctggctccggcggtggcaccctgaagtacgtggaggatgtgacaaacgtggtcagacgggatgtggagaagtggggccccttcgatctggtgtacggcagcacccaacccctgggcagctcttgtgaccggtgccctggctggtacatgtttcagttccaccggatcctgcagtacgccctgccgagacaggagtcccagcggccattcttttggattttcatggacaacttgctgctgaccgaggatgaccaggaaactaccactcggttcctgcagaccgaagccgtgaccctgcaggacgtgagaggccgggactaccagaacgccatgcgggtgtggtccaacatccctggactgaaaagcaagcacgcacctctgacccctaaagaagaggagtacctgcaggcccaggtgcggagcagaagcaagctggacgcccctaaggtggatctgctggtgaagaattgcctcctgcccctgagagagtacttcaagtatttcagccagaatagtctgcccctgggcggcccaagcagcggcgcccctcctcccagcggcggcagcccagccggctccccaacctctaccgaggagggcacctctgagtccgccacccccgagagcggccctggcacctccaccgagcccagcgagggcagcgcacccggcagccctgccggcagccccacctccacagaggagggaaccagcaccgagcccagcgaaggcagcgccccaggcaccagcaccgagcctagtgagggcggctctggcggcggcagcgcccaggagattaaacggatcaacaagatcagaagaagacttgtgaaagacagcaacaccaagaaggccggcaagacaggccccatgaaaaccctgctggttagagtgatgacacccgatctgagagagcggctggaaaacctgagaaagaagcctgaaaatatcccccagcccatcagcaatacatctagagccaacctgaataagctgctgaccgattacaccgaaatgaagaaggcgatcctgcatgtgtactgggaagagttccagaaggaccctgtgggcctgatgagccgggtggcccagcctgccagcaagaagatcgatcagaacaagctgaaacctgagatggacgagaagggcaacctgaccaccgccggctttgcctgctctcagtgtggccagcccctgttcgtgtacaagctggagcaggtgtctgagaagggcaaggcttacaccaactacttcggacggtgcaatgtggccgagcacgaaaagctgatcctgctggcccagctgaagcccgagaaggatagcgacgaagccgtgacatatagcctgggaaagtttgggcagagggccctggatttctacagcattcatgtgaccaaggagtccacccaccccgtgaagcccctggcccagatcgccggaaacagatacgcctccggacctgtgggaaaggccctgagcgacgcatgtatgggcacaatcgcctccttcctgtctaagtaccaggacatcatcatcgaacaccagaaggtggtgaagggcaaccagaagagactggagagcctgcgggagctggccggcaaggaaaacctggaataccctagcgtgaccctgccacctcagcctcacaccaaggagggcgttgatgcctacaacgaagtgatcgcccgggtgcgaatgtgggtgaacctgaacctgtggcagaagctgaagctaagcagagatgatgccaagcctctgctgagactgaagggattcccttcctttcctctggtcgagagacaggccaacgaagtggactggtgggacatggtgtgtaacgtgaagaagctgatcaacgagaaaaaggaggatggcaaggtgttttggcagaatctggctggctacaagagacaggaagccctgagaccatacctgagcagcgaggaagatcggaagaagggaaagaaattcgctcggtaccagctgggcgacctgctgctgcacctggaaaagaagcacggcgaggactggggaaaggtgtacgacgaggcctgggagcggattgacaagaaagtggaaggcctgagcaagcacatcaagctggaagaggaacggagaagcgaggacgcccagagcaaggccgccctgaccgactggctgcgggctaaggccagcttcgtgatcgagggcctgaaggaggccgacaaggacgagttctgcagatgcgagctgaagctgcagaagtggtacggggacctgcggggaaagcccttcgccatcgaagccgagaacagcatcctggacatcagcggcttcagcaagcagtacaactgtgccttcatctggcagaaggacggcgtgaagaagctgaacctgtacctgatcatcaactacttcaagggcggcaagctgcggttcaagaagatcaaacctgaagccttcgaagccaacagattctacaccgtgatcaacaaaaagagcggcgagatcgtgcccatggaggtgaacttcaacttcgacgaccccaacctgatcatcctgcctctggcctttggcaagagacagggcagagaattcatctggaacgacctgctgtccctggaaaccggcagcctgaagctggccaacggaagagtgatcgagaagacactgtacaacagaagaacccggcaggatgagcctgccctgttcgtggccctgaccttcgagcggcgggaggtcctggactcctccaatatcaaaccaatgaacctgatcggcgtggcaagaggcgaaaacatccccgccgtgatcgccctgaccgaccccgagggctgcccactgagccggtttaaggatagcctgggaaacccaacccacatcctgagaatcggcgagagctataaggagaagcagcggaccatccaggccaagaaggaggtggagcagcggagagccggcggctacagccggaagtacgccagcaaagccaagaatctggcagacgatatggtgagaaacaccgctagagatctgctgtactacgccgtgacccaggatgccatgctgatcttcgccaacctgagccggggcttcggccggcagggcaagcggaccttcatggccgagagacagtacacacggatggaggactggctgaccgccaagctggcctacgagggcctgagcaagacctacctgtccaagacactggcccagtacacctccaagacatgcagcaactgtgggtttaccatcaccagcgccgactacgacagggtgctggagaagctgaagaagacagcaacaggctggatgaccacaattaacggcaaggagctgaaggtggagggccagattacctactacaacagatacaagagacagaacgtagtcaaggacctgtccgtcgagctggatagactgagcgaagaatctgtgaacaacgacatctcctcctggacaaagggcagaagcggagaagctctgagcctcctgaagaaaagattctcccatagacccgtgcaggagaagttcgtgtgcctgaactgcggcttcgagacacacgcagccgagcaagccgccctgaacatcgccagatcctggctgttcctgcggagccaggagtacaagaaataccagacaaacaagacaaccggcaacaccgataagagagccttcgtcgagacctggcagtccttttaccggaagaagcttaaggaggtgtggaaacctgccgtgcggtctggcggatctggcggaggctccacaagccaggaccccagcgccgagggcctgagcgaggaggtgcccgtggtgttcgaggagctgcccgtggtgttcgaggacgtggccgtgtacttcaccagggaggagtggggcatgctggacaagtggcagaaggagctgtacagggacgtgatgaggatgaactacgagctgctggccagcctgggccccgccgccgccaagcccgacctgatcagcaagctggagaggagggccgccccctggatcaccagccccaagaaaaagagaaaagtctaagctgccttctgcggggcttgccttctggccatgcccttcttctctcccttgcacctgtacctcttggtctttgaataaagcctgagtaggaaggctagcaaaaaaaaaaaaaaaaaaaaaaaaaaaaaaaaaaaaaaaaaaaaaaaaaaaaaaaaaaaaaaaaaaaaaaaaaaaaaaaa

SEQ ID NO: 5780 - RNA, 5797 nt, synthetic construct
  source 1..5797: mol_type = other RNA
aggaaataagagagaaaagaagagtaagaagaaatataagagccaccatggcccctaagaagaagcgtaaagtgagccggatggaacgcctcgtctacgaggtgcggcagaagtgcagaaacatcgaggacatctgcatctcctgcggatctctgaacgtgaccctggagcacccactgttcatcggcggcatgtgccagaactgtaaaaactgttttctggagtgtgcctatcaatacgacgatgacggctaccagagctactgcaccatctgttgcggcggaagagaggtgctgatgtgtggaaataacaactgctgccggtgcttctgcgtggaatgcgtggacctgctggtgggccccggcgccgcccaggccgctattaaggaagatccttggaactgctacatgtgcggccacaagggcacatacggcctgctgagacggagagaggactggcctagcagactgcagatgttcttcgccaataaccacgaccaggagttcgacccccctaaggtgtaccctcccgtccccgccgagaagagaaagcccatccgggtcctgagcctgttcgatggcatcgccaccggtctgctggtgctgaaggacctgggcatccaggtggataggtacattgcctccgaggtgtgcgaggactccatcaccgtgggaatggtgcgtcatcagggcaagatcatgtacgtgggcgacgtgcggagcgtgacacagaagcatatccaggagtggggccctttcgacctggtgatcggcggcagcccttgcaatgacctgagcatcgtgaacccagcccggaagggcctgtacgagggaaccggcagactgttcttcgagttttacagactgctgcacgacgcccggcctaaggaaggcgacgaccggcccttcttttggctgttcgagaatgtggtggccatgggagtcagcgacaagcgggatattagccggttcctggagagcaaccccgtgatgatcgatgccaaggaagtgagcgccgcccaccgggccagatacttctggggcaatctgcctggcatgaacagacccctggccagcaccgtgaacgacaagctggagctgcaggagtgcctggagcacggccggatcgccaagttcagcaaggtgagaaccatcaccacccgaagcaacagcatcaaacaaggcaaggaccagcactttcctgtgttcatgaacgagaaggaggacatcctgtggtgtaccgagatggagagagtgttcgggttcccagtccactacacagatgtcagcaacatgtctagactggccagacagagactgctgggaagaagctggtccgtccctgtgatcagacacctgttcgcccctctgaaggagtacttcgcctgcgtgagcagcggcaacagcaacgccaacagccggggccccagcttctctagcggcctggtgccactgtccctgagagggagccacatgggccccatggagatctacaaaaccgtgagcgcctggaagcggcagcctgtgcgcgtgctgagcctgtttcggaatatcgataaagtcctgaaaagcctgggattcctggagagcggctctggctccggcggtggcaccctgaagtacgtggaggatgtgacaaacgtggtcagacgggatgtggagaagtggggccccttcgatctggtgtacggcagcacccaacccctgggcagctcttgtgaccggtgccctggctggtacatgtttcagttccaccggatcctgcagtacgccctgccgagacaggagtcccagcggccattcttttggattttcatggacaacttgctgctgaccgaggatgaccaggaaactaccactcggttcctgcagaccgaagccgtgaccctgcaggacgtgagaggccgggactaccagaacgccatgcgggtgtggtccaacatccctggactgaaaagcaagcacgcacctctgacccctaaagaagaggagtacctgcaggcccaggtgcggagcagaagcaagctggacgcccctaaggtggatctgctggtgaagaattgcctcctgcccctgagagagtacttcaagtatttcagccagaatagtctgcccctgggcggcccaagcagcggcgcccctcctcccagcggcggcagcccagccggctccccaacctctaccgaggagggcacctctgagtccgccacccccgagagcggccctggcacctccaccgagcccagcgagggcagcgcacccggcagccctgccggcagccccacctccacagaggagggaaccagcaccgagcccagcgaaggcagcgccccaggcaccagcaccgagcctagtgagggcggctctggcggcggcagcgcccaggagattaaacggatcaacaagatcagaagaagacttgtgaaagacagcaacaccaagaaggccggcaagacaggccccatgaaaaccctgctggttagagtgatgacacccgatctgagagagcggctggaaaacctgagaaagaagcctgaaaatatcccccagcccatcagcaatacatctagagccaacctgaataagctgctgaccgattacaccgaaatgaagaaggcgatcctgcatgtgtactgggaagagttccagaaggaccctgtgggcctgatgagccgggtggcccagcctgccagcaagaagatcgatcagaacaagctgaaacctgagatggacgagaagggcaacctgaccaccgccggctttgcctgctctcagtgtggccagcccctgttcgtgtacaagctggagcaggtgtctgagaagggcaaggcttacaccaactacttcggacggtgcaatgtggccgagcacgaaaagctgatcctgctggcccagctgaagcccgagaaggatagcgacgaagccgtgacatatagcctgggaaagtttgggcagagggccctggatttctacagcattcatgtgaccaaggagtccacccaccccgtgaagcccctggcccagatcgccggaaacagatacgcctccggacctgtgggaaaggccctgagcgacgcatgtatgggcacaatcgcctccttcctgtctaagtaccaggacatcatcatcgaacaccagaaggtggtgaagggcaaccagaagagactggagagcctgcgggagctggccggcaaggaaaacctggaataccctagcgtgaccctgccacctcagcctcacaccaaggagggcgttgatgcctacaacgaagtgatcgcccgggtgcgaatgtgggtgaacctgaacctgtggcagaagctgaagctaagcagagatgatgccaagcctctgctgagactgaagggattcccttcctttcctctggtcgagagacaggccaacgaagtggactggtgggacatggtgtgtaacgtgaagaagctgatcaacgagaaaaaggaggatggcaaggtgttttggcagaatctggctggctacaagagacaggaagccctgagaccatacctgagcagcgaggaagatcggaagaagggaaagaaattcgctcggtaccagctgggcgacctgctgctgcacctggaaaagaagcacggcgaggactggggaaaggtgtacgacgaggcctgggagcggattgacaagaaagtggaaggcctgagcaagcacatcaagctggaagaggaacggagaagcgaggacgcccagagcaaggccgccctgaccgactggctgcgggctaaggccagcttcgtgatcgagggcctgaaggaggccgacaaggacgagttctgcagatgcgagctgaagctgcagaagtggtacggggacctgcggggaaagcccttcgccatcgaagccgagaacagcatcctggacatcagcggcttcagcaagcagtacaactgtgccttcatctggcagaaggacggcgtgaagaagctgaacctgtacctgatcatcaactacttcaagggcggcaagctgcggttcaagaagatcaaacctgaagccttcgaagccaacagattctacaccgtgatcaacaaaaagagcggcgagatcgtgcccatggaggtgaacttcaacttcgacgaccccaacctgatcatcctgcctctggcctttggcaagagacagggcagagaattcatctggaacgacctgctgtccctggaaaccggcagcctgaagctggccaacggaagagtgatcgagaagacactgtacaacagaagaacccggcaggatgagcctgccctgttcgtggccctgaccttcgagcggcgggaggtcctggactcctccaatatcaaaccaatgaacctgatcggcgtggcaagaggcgaaaacatccccgccgtgatcgccctgaccgaccccgagggctgcccactgagccggtttaaggatagcctgggaaacccaacccacatcctgagaatcggcgagagctataaggagaagcagcggaccatccaggccaagaaggaggtggagcagcggagagccggcggctacagccggaagtacgccagcaaagccaagaatctggcagacgatatggtgagaaacaccgctagagatctgctgtactacgccgtgacccaggatgccatgctgatcttcgccaacctgagccggggcttcggccggcagggcaagcggaccttcatggccgagagacagtacacacggatggaggactggctgaccgccaagctggcctacgagggcctgagcaagacctacctgtccaagacactggcccagtacacctccaagacatgcagcaactgtgggtttaccatcaccagcgccgactacgacagggtgctggagaagctgaagaagacagcaacaggctggatgaccacaattaacggcaaggagctgaaggtggagggccagattacctactacaacagatacaagagacagaacgtagtcaaggacctgtccgtcgagctggatagactgagcgaagaatctgtgaacaacgacatctcctcctggacaaagggcagaagcggagaagctctgagcctcctgaagaaaagattctcccatagacccgtgcaggagaagttcgtgtgcctgaactgcggcttcgagacacacgcagccgagcaagccgccctgaacatcgccagatcctggctgttcctgcggagccaggagtacaagaaataccagacaaacaagacaaccggcaacaccgataagagagccttcgtcgagacctggcagtccttttaccggaagaagcttaaggaggtgtggaaacctgccgtgcggtctggcggatctggcggaggctccacaagcgcccacgagctggtgatgttcagggacgtggccatcgacttcagcaaggaggagtgggagtgcctggacctggagcagagggacctgtacagggacgtgatgctggagaactacagcaacatggtgctgctgggcctgtgcatccaccagcccgacatgttcagcctgctggagaagggcaaggagccctggaaggtgctgaggtaccagaccaggggcccctgccccgacatgcagagcaggaccagccccaagaaaaagagaaaagtctaagctgccttctgcggggcttgccttctggccatgcccttcttctctcccttgcacctgtacctcttggtctttgaataaagcctgagtaggaaggctagcaaaaaaaaaaaaaaaaaaaaaaaaaaaaaaaaaaaaaaaaaaaaaaaaaaaaaaaaaaaaaaaaaaaaaaaaaaaaaaaa

SEQ ID NO: 5781 - RNA, 5797 nt, synthetic construct
  source 1..5797: mol_type = other RNA
aggaaataagagagaaaagaagagtaagaagaaatataagagccaccatggcccctaagaagaagcgtaaagtgagccggatggaacgcctcgtctacgaggtgcggcagaagtgcagaaacatcgaggacatctgcatctcctgcggatctctgaacgtgaccctggagcacccactgttcatcggcggcatgtgccagaactgtaaaaactgttttctggagtgtgcctatcaatacgacgatgacggctaccagagctactgcaccatctgttgcggcggaagagaggtgctgatgtgtggaaataacaactgctgccggtgcttctgcgtggaatgcgtggacctgctggtgggccccggcgccgcccaggccgctattaaggaagatccttggaactgctacatgtgcggccacaagggcacatacggcctgctgagacggagagaggactggcctagcagactgcagatgttcttcgccaataaccacgaccaggagttcgacccccctaaggtgtaccctcccgtccccgccgagaagagaaagcccatccgggtcctgagcctgttcgatggcatcgccaccggtctgctggtgctgaaggacctgggcatccaggtggataggtacattgcctccgaggtgtgcgaggactccatcaccgtgggaatggtgcgtcatcagggcaagatcatgtacgtgggcgacgtgcggagcgtgacacagaagcatatccaggagtggggccctttcgacctggtgatcggcggcagcccttgcaatgacctgagcatcgtgaacccagcccggaagggcctgtacgagggaaccggcagactgttcttcgagttttacagactgctgcacgacgcccggcctaaggaaggcgacgaccggcccttcttttggctgttcgagaatgtggtggccatgggagtcagcgacaagcgggatattagccggttcctggagagcaaccccgtgatgatcgatgccaaggaagtgagcgccgcccaccgggccagatacttctggggcaatctgcctggcatgaacagacccctggccagcaccgtgaacgacaagctggagctgcaggagtgcctggagcacggccggatcgccaagttcagcaaggtgagaaccatcaccacccgaagcaacagcatcaaacaaggcaaggaccagcactttcctgtgttcatgaacgagaaggaggacatcctgtggtgtaccgagatggagagagtgttcgggttcccagtccactacacagatgtcagcaacatgtctagactggccagacagagactgctgggaagaagctggtccgtccctgtgatcagacacctgttcgcccctctgaaggagtacttcgcctgcgtgagcagcggcaacagcaacgccaacagccggggccccagcttctctagcggcctggtgccactgtccctgagagggagccacatgggccccatggagatctacaaaaccgtgagcgcctggaagcggcagcctgtgcgcgtgctgagcctgtttcggaatatcgataaagtcctgaaaagcctgggattcctggagagcggctctggctccggcggtggcaccctgaagtacgtggaggatgtgacaaacgtggtcagacgggatgtggagaagtggggccccttcgatctggtgtacggcagcacccaacccctgggcagctcttgtgaccggtgccctggctggtacatgtttcagttccaccggatcctgcagtacgccctgccgagacaggagtcccagcggccattcttttggattttcatggacaacttgctgctgaccgaggatgaccaggaaactaccactcggttcctgcagaccgaagccgtgaccctgcaggacgtgagaggccgggactaccagaacgccatgcgggtgtggtccaacatccctggactgaaaagcaagcacgcacctctgacccctaaagaagaggagtacctgcaggcccaggtgcggagcagaagcaagctggacgcccctaaggtggatctgctggtgaagaattgcctcctgcccctgagagagtacttcaagtatttcagccagaatagtctgcccctgggcggcccaagcagcggcgcccctcctcccagcggcggcagcccagccggctccccaacctctaccgaggagggcacctctgagtccgccacccccgagagcggccctggcacctccaccgagcccagcgagggcagcgcacccggcagccctgccggcagccccacctccacagaggagggaaccagcaccgagcccagcgaaggcagcgccccaggcaccagcaccgagcctagtgagggcggctctggcggcggcagcgcccaggagattaaacggatcaacaagatcagaagaagacttgtgaaagacagcaacaccaagaaggccggcaagacaggccccatgaaaaccctgctggttagagtgatgacacccgatctgagagagcggctggaaaacctgagaaagaagcctgaaaatatcccccagcccatcagcaatacatctagagccaacctgaataagctgctgaccgattacaccgaaatgaagaaggcgatcctgcatgtgtactgggaagagttccagaaggaccctgtgggcctgatgagccgggtggcccagcctgccagcaagaagatcgatcagaacaagctgaaacctgagatggacgagaagggcaacctgaccaccgccggctttgcctgctctcagtgtggccagcccctgttcgtgtacaagctggagcaggtgtctgagaagggcaaggcttacaccaactacttcggacggtgcaatgtggccgagcacgaaaagctgatcctgctggcccagctgaagcccgagaaggatagcgacgaagccgtgacatatagcctgggaaagtttgggcagagggccctggatttctacagcattcatgtgaccaaggagtccacccaccccgtgaagcccctggcccagatcgccggaaacagatacgcctccggacctgtgggaaaggccctgagcgacgcatgtatgggcacaatcgcctccttcctgtctaagtaccaggacatcatcatcgaacaccagaaggtggtgaagggcaaccagaagagactggagagcctgcgggagctggccggcaaggaaaacctggaataccctagcgtgaccctgccacctcagcctcacaccaaggagggcgttgatgcctacaacgaagtgatcgcccgggtgcgaatgtgggtgaacctgaacctgtggcagaagctgaagctaagcagagatgatgccaagcctctgctgagactgaagggattcccttcctttcctctggtcgagagacaggccaacgaagtggactggtgggacatggtgtgtaacgtgaagaagctgatcaacgagaaaaaggaggatggcaaggtgttttggcagaatctggctggctacaagagacaggaagccctgagaccatacctgagcagcgaggaagatcggaagaagggaaagaaattcgctcggtaccagctgggcgacctgctgctgcacctggaaaagaagcacggcgaggactggggaaaggtgtacgacgaggcctgggagcggattgacaagaaagtggaaggcctgagcaagcacatcaagctggaagaggaacggagaagcgaggacgcccagagcaaggccgccctgaccgactggctgcgggctaaggccagcttcgtgatcgagggcctgaaggaggccgacaaggacgagttctgcagatgcgagctgaagctgcagaagtggtacggggacctgcggggaaagcccttcgccatcgaagccgagaacagcatcctggacatcagcggcttcagcaagcagtacaactgtgccttcatctggcagaaggacggcgtgaagaagctgaacctgtacctgatcatcaactacttcaagggcggcaagctgcggttcaagaagatcaaacctgaagccttcgaagccaacagattctacaccgtgatcaacaaaaagagcggcgagatcgtgcccatggaggtgaacttcaacttcgacgaccccaacctgatcatcctgcctctggcctttggcaagagacagggcagagaattcatctggaacgacctgctgtccctggaaaccggcagcctgaagctggccaacggaagagtgatcgagaagacactgtacaacagaagaacccggcaggatgagcctgccctgttcgtggccctgaccttcgagcggcgggaggtcctggactcctccaatatcaaaccaatgaacctgatcggcgtggcaagaggcgaaaacatccccgccgtgatcgccctgaccgaccccgagggctgcccactgagccggtttaaggatagcctgggaaacccaacccacatcctgagaatcggcgagagctataaggagaagcagcggaccatccaggccaagaaggaggtggagcagcggagagccggcggctacagccggaagtacgccagcaaagccaagaatctggcagacgatatggtgagaaacaccgctagagatctgctgtactacgccgtgacccaggatgccatgctgatcttcgccaacctgagccggggcttcggccggcagggcaagcggaccttcatggccgagagacagtacacacggatggaggactggctgaccgccaagctggcctacgagggcctgagcaagacctacctgtccaagacactggcccagtacacctccaagacatgcagcaactgtgggtttaccatcaccagcgccgactacgacagggtgctggagaagctgaagaagacagcaacaggctggatgaccacaattaacggcaaggagctgaaggtggagggccagattacctactacaacagatacaagagacagaacgtagtcaaggacctgtccgtcgagctggatagactgagcgaagaatctgtgaacaacgacatctcctcctggacaaagggcagaagcggagaagctctgagcctcctgaagaaaagattctcccatagacccgtgcaggagaagttcgtgtgcctgaactgcggcttcgagacacacgcagccgagcaagccgccctgaacatcgccagatcctggctgttcctgcggagccaggagtacaagaaataccagacaaacaagacaaccggcaacaccgataagagagccttcgtcgagacctggcagtccttttaccggaagaagcttaaggaggtgtggaaacctgccgtgcggtctggcggatctggcggaggctccacaagccaggaccccagcgccgagggcctgagcgaggaggtgcccgtggtgttcgaggagctgcccgtggtgttcgaggacgtggccgtgtacttcaccaggaaggagtggggcatgctggacaagaggcagaaggagctgtacagggacgtgatgaggatgaactacgagctgctggccagcctgggccccgccgccgccaagcccgacctgatcagcaagctggagaggagggccgccccctggatcaccagccccaagaaaaagagaaaagtctaagctgccttctgcggggcttgccttctggccatgcccttcttctctcccttgcacctgtacctcttggtctttgaataaagcctgagtaggaaggctagcaaaaaaaaaaaaaaaaaaaaaaaaaaaaaaaaaaaaaaaaaaaaaaaaaaaaaaaaaaaaaaaaaaaaaaaaaaaaaaaa

SEQ ID NO: 5782 - RNA, 5797 nt, synthetic construct
  source 1..5797: mol_type = other RNA
aggaaataagagagaaaagaagagtaagaagaaatataagagccaccatggcccctaagaagaagcgtaaagtgagccggatggaacgcctcgtctacgaggtgcggcagaagtgcagaaacatcgaggacatctgcatctcctgcggatctctgaacgtgaccctggagcacccactgttcatcggcggcatgtgccagaactgtaaaaactgttttctggagtgtgcctatcaatacgacgatgacggctaccagagctactgcaccatctgttgcggcggaagagaggtgctgatgtgtggaaataacaactgctgccggtgcttctgcgtggaatgcgtggacctgctggtgggccccggcgccgcccaggccgctattaaggaagatccttggaactgctacatgtgcggccacaagggcacatacggcctgctgagacggagagaggactggcctagcagactgcagatgttcttcgccaataaccacgaccaggagttcgacccccctaaggtgtaccctcccgtccccgccgagaagagaaagcccatccgggtcctgagcctgttcgatggcatcgccaccggtctgctggtgctgaaggacctgggcatccaggtggataggtacattgcctccgaggtgtgcgaggactccatcaccgtgggaatggtgcgtcatcagggcaagatcatgtacgtgggcgacgtgcggagcgtgacacagaagcatatccaggagtggggccctttcgacctggtgatcggcggcagcccttgcaatgacctgagcatcgtgaacccagcccggaagggcctgtacgagggaaccggcagactgttcttcgagttttacagactgctgcacgacgcccggcctaaggaaggcgacgaccggcccttcttttggctgttcgagaatgtggtggccatgggagtcagcgacaagcgggatattagccggttcctggagagcaaccccgtgatgatcgatgccaaggaagtgagcgccgcccaccgggccagatacttctggggcaatctgcctggcatgaacagacccctggccagcaccgtgaacgacaagctggagctgcaggagtgcctggagcacggccggatcgccaagttcagcaaggtgagaaccatcaccacccgaagcaacagcatcaaacaaggcaaggaccagcactttcctgtgttcatgaacgagaaggaggacatcctgtggtgtaccgagatggagagagtgttcgggttcccagtccactacacagatgtcagcaacatgtctagactggccagacagagactgctgggaagaagctggtccgtccctgtgatcagacacctgttcgcccctctgaaggagtacttcgcctgcgtgagcagcggcaacagcaacgccaacagccggggccccagcttctctagcggcctggtgccactgtccctgagagggagccacatgggccccatggagatctacaaaaccgtgagcgcctggaagcggcagcctgtgcgcgtgctgagcctgtttcggaatatcgataaagtcctgaaaagcctgggattcctggagagcggctctggctccggcggtggcaccctgaagtacgtggaggatgtgacaaacgtggtcagacgggatgtggagaagtggggccccttcgatctggtgtacggcagcacccaacccctgggcagctcttgtgaccggtgccctggctggtacatgtttcagttccaccggatcctgcagtacgccctgccgagacaggagtcccagcggccattcttttggattttcatggacaacttgctgctgaccgaggatgaccaggaaactaccactcggttcctgcagaccgaagccgtgaccctgcaggacgtgagaggccgggactaccagaacgccatgcgggtgtggtccaacatccctggactgaaaagcaagcacgcacctctgacccctaaagaagaggagtacctgcaggcccaggtgcggagcagaagcaagctggacgcccctaaggtggatctgctggtgaagaattgcctcctgcccctgagagagtacttcaagtatttcagccagaatagtctgcccctgggcggcccaagcagcggcgcccctcctcccagcggcggcagcccagccggctccccaacctctaccgaggagggcacctctgagtccgccacccccgagagcggccctggcacctccaccgagcccagcgagggcagcgcacccggcagccctgccggcagccccacctccacagaggagggaaccagcaccgagcccagcgaaggcagcgccccaggcaccagcaccgagcctagtgagggcggctctggcggcggcagcgcccaggagattaaacggatcaacaagatcagaagaagacttgtgaaagacagcaacaccaagaaggccggcaagacaggccccatgaaaaccctgctggttagagtgatgacacccgatctgagagagcggctggaaaacctgagaaagaagcctgaaaatatcccccagcccatcagcaatacatctagagccaacctgaataagctgctgaccgattacaccgaaatgaagaaggcgatcctgcatgtgtactgggaagagttccagaaggaccctgtgggcctgatgagccgggtggcccagcctgccagcaagaagatcgatcagaacaagctgaaacctgagatggacgagaagggcaacctgaccaccgccggctttgcctgctctcagtgtggccagcccctgttcgtgtacaagctggagcaggtgtctgagaagggcaaggcttacaccaactacttcggacggtgcaatgtggccgagcacgaaaagctgatcctgctggcccagctgaagcccgagaaggatagcgacgaagccgtgacatatagcctgggaaagtttgggcagagggccctggatttctacagcattcatgtgaccaaggagtccacccaccccgtgaagcccctggcccagatcgccggaaacagatacgcctccggacctgtgggaaaggccctgagcgacgcatgtatgggcacaatcgcctccttcctgtctaagtaccaggacatcatcatcgaacaccagaaggtggtgaagggcaaccagaagagactggagagcctgcgggagctggccggcaaggaaaacctggaataccctagcgtgaccctgccacctcagcctcacaccaaggagggcgttgatgcctacaacgaagtgatcgcccgggtgcgaatgtgggtgaacctgaacctgtggcagaagctgaagctaagcagagatgatgccaagcctctgctgagactgaagggattcccttcctttcctctggtcgagagacaggccaacgaagtggactggtgggacatggtgtgtaacgtgaagaagctgatcaacgagaaaaaggaggatggcaaggtgttttggcagaatctggctggctacaagagacaggaagccctgagaccatacctgagcagcgaggaagatcggaagaagggaaagaaattcgctcggtaccagctgggcgacctgctgctgcacctggaaaagaagcacggcgaggactggggaaaggtgtacgacgaggcctgggagcggattgacaagaaagtggaaggcctgagcaagcacatcaagctggaagaggaacggagaagcgaggacgcccagagcaaggccgccctgaccgactggctgcgggctaaggccagcttcgtgatcgagggcctgaaggaggccgacaaggacgagttctgcagatgcgagctgaagctgcagaagtggtacggggacctgcggggaaagcccttcgccatcgaagccgagaacagcatcctggacatcagcggcttcagcaagcagtacaactgtgccttcatctggcagaaggacggcgtgaagaagctgaacctgtacctgatcatcaactacttcaagggcggcaagctgcggttcaagaagatcaaacctgaagccttcgaagccaacagattctacaccgtgatcaacaaaaagagcggcgagatcgtgcccatggaggtgaacttcaacttcgacgaccccaacctgatcatcctgcctctggcctttggcaagagacagggcagagaattcatctggaacgacctgctgtccctggaaaccggcagcctgaagctggccaacggaagagtgatcgagaagacactgtacaacagaagaacccggcaggatgagcctgccctgttcgtggccctgaccttcgagcggcgggaggtcctggactcctccaatatcaaaccaatgaacctgatcggcgtggcaagaggcgaaaacatccccgccgtgatcgccctgaccgaccccgagggctgcccactgagccggtttaaggatagcctgggaaacccaacccacatcctgagaatcggcgagagctataaggagaagcagcggaccatccaggccaagaaggaggtggagcagcggagagccggcggctacagccggaagtacgccagcaaagccaagaatctggcagacgatatggtgagaaacaccgctagagatctgctgtactacgccgtgacccaggatgccatgctgatcttcgccaacctgagccggggcttcggccggcagggcaagcggaccttcatggccgagagacagtacacacggatggaggactggctgaccgccaagctggcctacgagggcctgagcaagacctacctgtccaagacactggcccagtacacctccaagacatgcagcaactgtgggtttaccatcaccagcgccgactacgacagggtgctggagaagctgaagaagacagcaacaggctggatgaccacaattaacggcaaggagctgaaggtggagggccagattacctactacaacagatacaagagacagaacgtagtcaaggacctgtccgtcgagctggatagactgagcgaagaatctgtgaacaacgacatctcctcctggacaaagggcagaagcggagaagctctgagcctcctgaagaaaagattctcccatagacccgtgcaggagaagttcgtgtgcctgaactgcggcttcgagacacacgcagccgagcaagccgccctgaacatcgccagatcctggctgttcctgcggagccaggagtacaagaaataccagacaaacaagacaaccggcaacaccgataagagagccttcgtcgagacctggcagtccttttaccggaagaagcttaaggaggtgtggaaacctgccgtgcggtctggcggatctggcggaggctccacaagcgccgtgaccatggaggacgtgaccgtgaccttcaccaacgaggagtgggccctgctgaaccccgcccagaagaggctgtacggcgacgtgatgtgggagaccttcaggaccatcagcgccatcggcaggacctgggacagccagcagatggaggaggagtacaagaactacctgaggaacctgagcaacgaggaggtggccaagtgctgcaggtacaccaccttcaaccagcacgagaacatcaccagccccaagaaaaagagaaaagtctaagctgccttctgcggggcttgccttctggccatgcccttcttctctcccttgcacctgtacctcttggtctttgaataaagcctgagtaggaaggctagcaaaaaaaaaaaaaaaaaaaaaaaaaaaaaaaaaaaaaaaaaaaaaaaaaaaaaaaaaaaaaaaaaaaaaaaaaaaaaaaa

SEQ ID NO: 5783 - RNA, 5797 nt, synthetic construct
  source 1..5797: mol_type = other RNA
aggaaataagagagaaaagaagagtaagaagaaatataagagccaccatggcccctaagaagaagcgtaaagtgagccggatggaacgcctcgtctacgaggtgcggcagaagtgcagaaacatcgaggacatctgcatctcctgcggatctctgaacgtgaccctggagcacccactgttcatcggcggcatgtgccagaactgtaaaaactgttttctggagtgtgcctatcaatacgacgatgacggctaccagagctactgcaccatctgttgcggcggaagagaggtgctgatgtgtggaaataacaactgctgccggtgcttctgcgtggaatgcgtggacctgctggtgggccccggcgccgcccaggccgctattaaggaagatccttggaactgctacatgtgcggccacaagggcacatacggcctgctgagacggagagaggactggcctagcagactgcagatgttcttcgccaataaccacgaccaggagttcgacccccctaaggtgtaccctcccgtccccgccgagaagagaaagcccatccgggtcctgagcctgttcgatggcatcgccaccggtctgctggtgctgaaggacctgggcatccaggtggataggtacattgcctccgaggtgtgcgaggactccatcaccgtgggaatggtgcgtcatcagggcaagatcatgtacgtgggcgacgtgcggagcgtgacacagaagcatatccaggagtggggccctttcgacctggtgatcggcggcagcccttgcaatgacctgagcatcgtgaacccagcccggaagggcctgtacgagggaaccggcagactgttcttcgagttttacagactgctgcacgacgcccggcctaaggaaggcgacgaccggcccttcttttggctgttcgagaatgtggtggccatgggagtcagcgacaagcgggatattagccggttcctggagagcaaccccgtgatgatcgatgccaaggaagtgagcgccgcccaccgggccagatacttctggggcaatctgcctggcatgaacagacccctggccagcaccgtgaacgacaagctggagctgcaggagtgcctggagcacggccggatcgccaagttcagcaaggtgagaaccatcaccacccgaagcaacagcatcaaacaaggcaaggaccagcactttcctgtgttcatgaacgagaaggaggacatcctgtggtgtaccgagatggagagagtgttcgggttcccagtccactacacagatgtcagcaacatgtctagactggccagacagagactgctgggaagaagctggtccgtccctgtgatcagacacctgttcgcccctctgaaggagtacttcgcctgcgtgagcagcggcaacagcaacgccaacagccggggccccagcttctctagcggcctggtgccactgtccctgagagggagccacatgggccccatggagatctacaaaaccgtgagcgcctggaagcggcagcctgtgcgcgtgctgagcctgtttcggaatatcgataaagtcctgaaaagcctgggattcctggagagcggctctggctccggcggtggcaccctgaagtacgtggaggatgtgacaaacgtggtcagacgggatgtggagaagtggggccccttcgatctggtgtacggcagcacccaacccctgggcagctcttgtgaccggtgccctggctggtacatgtttcagttccaccggatcctgcagtacgccctgccgagacaggagtcccagcggccattcttttggattttcatggacaacttgctgctgaccgaggatgaccaggaaactaccactcggttcctgcagaccgaagccgtgaccctgcaggacgtgagaggccgggactaccagaacgccatgcgggtgtggtccaacatccctggactgaaaagcaagcacgcacctctgacccctaaagaagaggagtacctgcaggcccaggtgcggagcagaagcaagctggacgcccctaaggtggatctgctggtgaagaattgcctcctgcccctgagagagtacttcaagtatttcagccagaatagtctgcccctgggcggcccaagcagcggcgcccctcctcccagcggcggcagcccagccggctccccaacctctaccgaggagggcacctctgagtccgccacccccgagagcggccctggcacctccaccgagcccagcgagggcagcgcacccggcagccctgccggcagccccacctccacagaggagggaaccagcaccgagcccagcgaaggcagcgccccaggcaccagcaccgagcctagtgagggcggctctggcggcggcagcgcccaggagattaaacggatcaacaagatcagaagaagacttgtgaaagacagcaacaccaagaaggccggcaagacaggccccatgaaaaccctgctggttagagtgatgacacccgatctgagagagcggctggaaaacctgagaaagaagcctgaaaatatcccccagcccatcagcaatacatctagagccaacctgaataagctgctgaccgattacaccgaaatgaagaaggcgatcctgcatgtgtactgggaagagttccagaaggaccctgtgggcctgatgagccgggtggcccagcctgccagcaagaagatcgatcagaacaagctgaaacctgagatggacgagaagggcaacctgaccaccgccggctttgcctgctctcagtgtggccagcccctgttcgtgtacaagctggagcaggtgtctgagaagggcaaggcttacaccaactacttcggacggtgcaatgtggccgagcacgaaaagctgatcctgctggcccagctgaagcccgagaaggatagcgacgaagccgtgacatatagcctgggaaagtttgggcagagggccctggatttctacagcattcatgtgaccaaggagtccacccaccccgtgaagcccctggcccagatcgccggaaacagatacgcctccggacctgtgggaaaggccctgagcgacgcatgtatgggcacaatcgcctccttcctgtctaagtaccaggacatcatcatcgaacaccagaaggtggtgaagggcaaccagaagagactggagagcctgcgggagctggccggcaaggaaaacctggaataccctagcgtgaccctgccacctcagcctcacaccaaggagggcgttgatgcctacaacgaagtgatcgcccgggtgcgaatgtgggtgaacctgaacctgtggcagaagctgaagctaagcagagatgatgccaagcctctgctgagactgaagggattcccttcctttcctctggtcgagagacaggccaacgaagtggactggtgggacatggtgtgtaacgtgaagaagctgatcaacgagaaaaaggaggatggcaaggtgttttggcagaatctggctggctacaagagacaggaagccctgagaccatacctgagcagcgaggaagatcggaagaagggaaagaaattcgctcggtaccagctgggcgacctgctgctgcacctggaaaagaagcacggcgaggactggggaaaggtgtacgacgaggcctgggagcggattgacaagaaagtggaaggcctgagcaagcacatcaagctggaagaggaacggagaagcgaggacgcccagagcaaggccgccctgaccgactggctgcgggctaaggccagcttcgtgatcgagggcctgaaggaggccgacaaggacgagttctgcagatgcgagctgaagctgcagaagtggtacggggacctgcggggaaagcccttcgccatcgaagccgagaacagcatcctggacatcagcggcttcagcaagcagtacaactgtgccttcatctggcagaaggacggcgtgaagaagctgaacctgtacctgatcatcaactacttcaagggcggcaagctgcggttcaagaagatcaaacctgaagccttcgaagccaacagattctacaccgtgatcaacaaaaagagcggcgagatcgtgcccatggaggtgaacttcaacttcgacgaccccaacctgatcatcctgcctctggcctttggcaagagacagggcagagaattcatctggaacgacctgctgtccctggaaaccggcagcctgaagctggccaacggaagagtgatcgagaagacactgtacaacagaagaacccggcaggatgagcctgccctgttcgtggccctgaccttcgagcggcgggaggtcctggactcctccaatatcaaaccaatgaacctgatcggcgtggcaagaggcgaaaacatccccgccgtgatcgccctgaccgaccccgagggctgcccactgagccggtttaaggatagcctgggaaacccaacccacatcctgagaatcggcgagagctataaggagaagcagcggaccatccaggccaagaaggaggtggagcagcggagagccggcggctacagccggaagtacgccagcaaagccaagaatctggcagacgatatggtgagaaacaccgctagagatctgctgtactacgccgtgacccaggatgccatgctgatcttcgccaacctgagccggggcttcggccggcagggcaagcggaccttcatggccgagagacagtacacacggatggaggactggctgaccgccaagctggcctacgagggcctgagcaagacctacctgtccaagacactggcccagtacacctccaagacatgcagcaactgtgggtttaccatcaccagcgccgactacgacagggtgctggagaagctgaagaagacagcaacaggctggatgaccacaattaacggcaaggagctgaaggtggagggccagattacctactacaacagatacaagagacagaacgtagtcaaggacctgtccgtcgagctggatagactgagcgaagaatctgtgaacaacgacatctcctcctggacaaagggcagaagcggagaagctctgagcctcctgaagaaaagattctcccatagacccgtgcaggagaagttcgtgtgcctgaactgcggcttcgagacacacgcagccgagcaagccgccctgaacatcgccagatcctggctgttcctgcggagccaggagtacaagaaataccagacaaacaagacaaccggcaacaccgataagagagccttcgtcgagacctggcagtccttttaccggaagaagcttaaggaggtgtggaaacctgccgtgcggtctggcggatctggcggaggctccacaagcatgaacaccgtgacctacgacgacgtgcacatcggcttcacctgggaggagtggaccctgctggaccccagccagaagaacctgtacaaggacgtgatgctggagacctacaggaacctggccatcatcggctacagctgggaggaccacaacatcgaggagcactaccagaacagcaggaggcacgagaggcacgagaggagccagaccggcatgaagaccagcgtgcacacccagtgcagcaccagccccaagaaaaagagaaaagtctaagctgccttctgcggggcttgccttctggccatgcccttcttctctcccttgcacctgtacctcttggtctttgaataaagcctgagtaggaaggctagcaaaaaaaaaaaaaaaaaaaaaaaaaaaaaaaaaaaaaaaaaaaaaaaaaaaaaaaaaaaaaaaaaaaaaaaaaaaaaaaa

SEQ ID NO: 5784 - RNA, 5797 nt, synthetic construct
  source 1..5797: mol_type = other RNA
aggaaataagagagaaaagaagagtaagaagaaatataagagccaccatggcccctaagaagaagcgtaaagtgagccggatggaacgcctcgtctacgaggtgcggcagaagtgcagaaacatcgaggacatctgcatctcctgcggatctctgaacgtgaccctggagcacccactgttcatcggcggcatgtgccagaactgtaaaaactgttttctggagtgtgcctatcaatacgacgatgacggctaccagagctactgcaccatctgttgcggcggaagagaggtgctgatgtgtggaaataacaactgctgccggtgcttctgcgtggaatgcgtggacctgctggtgggccccggcgccgcccaggccgctattaaggaagatccttggaactgctacatgtgcggccacaagggcacatacggcctgctgagacggagagaggactggcctagcagactgcagatgttcttcgccaataaccacgaccaggagttcgacccccctaaggtgtaccctcccgtccccgccgagaagagaaagcccatccgggtcctgagcctgttcgatggcatcgccaccggtctgctggtgctgaaggacctgggcatccaggtggataggtacattgcctccgaggtgtgcgaggactccatcaccgtgggaatggtgcgtcatcagggcaagatcatgtacgtgggcgacgtgcggagcgtgacacagaagcatatccaggagtggggccctttcgacctggtgatcggcggcagcccttgcaatgacctgagcatcgtgaacccagcccggaagggcctgtacgagggaaccggcagactgttcttcgagttttacagactgctgcacgacgcccggcctaaggaaggcgacgaccggcccttcttttggctgttcgagaatgtggtggccatgggagtcagcgacaagcgggatattagccggttcctggagagcaaccccgtgatgatcgatgccaaggaagtgagcgccgcccaccgggccagatacttctggggcaatctgcctggcatgaacagacccctggccagcaccgtgaacgacaagctggagctgcaggagtgcctggagcacggccggatcgccaagttcagcaaggtgagaaccatcaccacccgaagcaacagcatcaaacaaggcaaggaccagcactttcctgtgttcatgaacgagaaggaggacatcctgtggtgtaccgagatggagagagtgttcgggttcccagtccactacacagatgtcagcaacatgtctagactggccagacagagactgctgggaagaagctggtccgtccctgtgatcagacacctgttcgcccctctgaaggagtacttcgcctgcgtgagcagcggcaacagcaacgccaacagccggggccccagcttctctagcggcctggtgccactgtccctgagagggagccacatgggccccatggagatctacaaaaccgtgagcgcctggaagcggcagcctgtgcgcgtgctgagcctgtttcggaatatcgataaagtcctgaaaagcctgggattcctggagagcggctctggctccggcggtggcaccctgaagtacgtggaggatgtgacaaacgtggtcagacgggatgtggagaagtggggccccttcgatctggtgtacggcagcacccaacccctgggcagctcttgtgaccggtgccctggctggtacatgtttcagttccaccggatcctgcagtacgccctgccgagacaggagtcccagcggccattcttttggattttcatggacaacttgctgctgaccgaggatgaccaggaaactaccactcggttcctgcagaccgaagccgtgaccctgcaggacgtgagaggccgggactaccagaacgccatgcgggtgtggtccaacatccctggactgaaaagcaagcacgcacctctgacccctaaagaagaggagtacctgcaggcccaggtgcggagcagaagcaagctggacgcccctaaggtggatctgctggtgaagaattgcctcctgcccctgagagagtacttcaagtatttcagccagaatagtctgcccctgggcggcccaagcagcggcgcccctcctcccagcggcggcagcccagccggctccccaacctctaccgaggagggcacctctgagtccgccacccccgagagcggccctggcacctccaccgagcccagcgagggcagcgcacccggcagccctgccggcagccccacctccacagaggagggaaccagcaccgagcccagcgaaggcagcgccccaggcaccagcaccgagcctagtgagggcggctctggcggcggcagcgcccaggagattaaacggatcaacaagatcagaagaagacttgtgaaagacagcaacaccaagaaggccggcaagacaggccccatgaaaaccctgctggttagagtgatgacacccgatctgagagagcggctggaaaacctgagaaagaagcctgaaaatatcccccagcccatcagcaatacatctagagccaacctgaataagctgctgaccgattacaccgaaatgaagaaggcgatcctgcatgtgtactgggaagagttccagaaggaccctgtgggcctgatgagccgggtggcccagcctgccagcaagaagatcgatcagaacaagctgaaacctgagatggacgagaagggcaacctgaccaccgccggctttgcctgctctcagtgtggccagcccctgttcgtgtacaagctggagcaggtgtctgagaagggcaaggcttacaccaactacttcggacggtgcaatgtggccgagcacgaaaagctgatcctgctggcccagctgaagcccgagaaggatagcgacgaagccgtgacatatagcctgggaaagtttgggcagagggccctggatttctacagcattcatgtgaccaaggagtccacccaccccgtgaagcccctggcccagatcgccggaaacagatacgcctccggacctgtgggaaaggccctgagcgacgcatgtatgggcacaatcgcctccttcctgtctaagtaccaggacatcatcatcgaacaccagaaggtggtgaagggcaaccagaagagactggagagcctgcgggagctggccggcaaggaaaacctggaataccctagcgtgaccctgccacctcagcctcacaccaaggagggcgttgatgcctacaacgaagtgatcgcccgggtgcgaatgtgggtgaacctgaacctgtggcagaagctgaagctaagcagagatgatgccaagcctctgctgagactgaagggattcccttcctttcctctggtcgagagacaggccaacgaagtggactggtgggacatggtgtgtaacgtgaagaagctgatcaacgagaaaaaggaggatggcaaggtgttttggcagaatctggctggctacaagagacaggaagccctgagaccatacctgagcagcgaggaagatcggaagaagggaaagaaattcgctcggtaccagctgggcgacctgctgctgcacctggaaaagaagcacggcgaggactggggaaaggtgtacgacgaggcctgggagcggattgacaagaaagtggaaggcctgagcaagcacatcaagctggaagaggaacggagaagcgaggacgcccagagcaaggccgccctgaccgactggctgcgggctaaggccagcttcgtgatcgagggcctgaaggaggccgacaaggacgagttctgcagatgcgagctgaagctgcagaagtggtacggggacctgcggggaaagcccttcgccatcgaagccgagaacagcatcctggacatcagcggcttcagcaagcagtacaactgtgccttcatctggcagaaggacggcgtgaagaagctgaacctgtacctgatcatcaactacttcaagggcggcaagctgcggttcaagaagatcaaacctgaagccttcgaagccaacagattctacaccgtgatcaacaaaaagagcggcgagatcgtgcccatggaggtgaacttcaacttcgacgaccccaacctgatcatcctgcctctggcctttggcaagagacagggcagagaattcatctggaacgacctgctgtccctggaaaccggcagcctgaagctggccaacggaagagtgatcgagaagacactgtacaacagaagaacccggcaggatgagcctgccctgttcgtggccctgaccttcgagcggcgggaggtcctggactcctccaatatcaaaccaatgaacctgatcggcgtggcaagaggcgaaaacatccccgccgtgatcgccctgaccgaccccgagggctgcccactgagccggtttaaggatagcctgggaaacccaacccacatcctgagaatcggcgagagctataaggagaagcagcggaccatccaggccaagaaggaggtggagcagcggagagccggcggctacagccggaagtacgccagcaaagccaagaatctggcagacgatatggtgagaaacaccgctagagatctgctgtactacgccgtgacccaggatgccatgctgatcttcgccaacctgagccggggcttcggccggcagggcaagcggaccttcatggccgagagacagtacacacggatggaggactggctgaccgccaagctggcctacgagggcctgagcaagacctacctgtccaagacactggcccagtacacctccaagacatgcagcaactgtgggtttaccatcaccagcgccgactacgacagggtgctggagaagctgaagaagacagcaacaggctggatgaccacaattaacggcaaggagctgaaggtggagggccagattacctactacaacagatacaagagacagaacgtagtcaaggacctgtccgtcgagctggatagactgagcgaagaatctgtgaacaacgacatctcctcctggacaaagggcagaagcggagaagctctgagcctcctgaagaaaagattctcccatagacccgtgcaggagaagttcgtgtgcctgaactgcggcttcgagacacacgcagccgagcaagccgccctgaacatcgccagatcctggctgttcctgcggagccaggagtacaagaaataccagacaaacaagacaaccggcaacaccgataagagagccttcgtcgagacctggcagtccttttaccggaagaagcttaaggaggtgtggaaacctgccgtgcggtctggcggatctggcggaggctccacaagcttccagaacagcctgacctacgacgacgtgcacatcaacttcacctgcgaggagtgggccctgctggacgccagccagaagaggctgtacaaggacgtgatgctggagacctacagcaacctgaccgccatcggctacaagtgggaggaccacaacatcgaggagcactgccagaggttcaggaggaggggcaggcacaagaggagcaggaccgaggagaggccctacgagtgcaagcagtgcaccagccccaagaaaaagagaaaagtctaagctgccttctgcggggcttgccttctggccatgcccttcttctctcccttgcacctgtacctcttggtctttgaataaagcctgagtaggaaggctagcaaaaaaaaaaaaaaaaaaaaaaaaaaaaaaaaaaaaaaaaaaaaaaaaaaaaaaaaaaaaaaaaaaaaaaaaaaaaaaaa

SEQ ID NO: 5785 - RNA, 5797 nt, synthetic construct
  source 1..5797: mol_type = other RNA
aggaaataagagagaaaagaagagtaagaagaaatataagagccaccatggcccctaagaagaagcgtaaagtgagccggatggaacgcctcgtctacgaggtgcggcagaagtgcagaaacatcgaggacatctgcatctcctgcggatctctgaacgtgaccctggagcacccactgttcatcggcggcatgtgccagaactgtaaaaactgttttctggagtgtgcctatcaatacgacgatgacggctaccagagctactgcaccatctgttgcggcggaagagaggtgctgatgtgtggaaataacaactgctgccggtgcttctgcgtggaatgcgtggacctgctggtgggccccggcgccgcccaggccgctattaaggaagatccttggaactgctacatgtgcggccacaagggcacatacggcctgctgagacggagagaggactggcctagcagactgcagatgttcttcgccaataaccacgaccaggagttcgacccccctaaggtgtaccctcccgtccccgccgagaagagaaagcccatccgggtcctgagcctgttcgatggcatcgccaccggtctgctggtgctgaaggacctgggcatccaggtggataggtacattgcctccgaggtgtgcgaggactccatcaccgtgggaatggtgcgtcatcagggcaagatcatgtacgtgggcgacgtgcggagcgtgacacagaagcatatccaggagtggggccctttcgacctggtgatcggcggcagcccttgcaatgacctgagcatcgtgaacccagcccggaagggcctgtacgagggaaccggcagactgttcttcgagttttacagactgctgcacgacgcccggcctaaggaaggcgacgaccggcccttcttttggctgttcgagaatgtggtggccatgggagtcagcgacaagcgggatattagccggttcctggagagcaaccccgtgatgatcgatgccaaggaagtgagcgccgcccaccgggccagatacttctggggcaatctgcctggcatgaacagacccctggccagcaccgtgaacgacaagctggagctgcaggagtgcctggagcacggccggatcgccaagttcagcaaggtgagaaccatcaccacccgaagcaacagcatcaaacaaggcaaggaccagcactttcctgtgttcatgaacgagaaggaggacatcctgtggtgtaccgagatggagagagtgttcgggttcccagtccactacacagatgtcagcaacatgtctagactggccagacagagactgctgggaagaagctggtccgtccctgtgatcagacacctgttcgcccctctgaaggagtacttcgcctgcgtgagcagcggcaacagcaacgccaacagccggggccccagcttctctagcggcctggtgccactgtccctgagagggagccacatgggccccatggagatctacaaaaccgtgagcgcctggaagcggcagcctgtgcgcgtgctgagcctgtttcggaatatcgataaagtcctgaaaagcctgggattcctggagagcggctctggctccggcggtggcaccctgaagtacgtggaggatgtgacaaacgtggtcagacgggatgtggagaagtggggccccttcgatctggtgtacggcagcacccaacccctgggcagctcttgtgaccggtgccctggctggtacatgtttcagttccaccggatcctgcagtacgccctgccgagacaggagtcccagcggccattcttttggattttcatggacaacttgctgctgaccgaggatgaccaggaaactaccactcggttcctgcagaccgaagccgtgaccctgcaggacgtgagaggccgggactaccagaacgccatgcgggtgtggtccaacatccctggactgaaaagcaagcacgcacctctgacccctaaagaagaggagtacctgcaggcccaggtgcggagcagaagcaagctggacgcccctaaggtggatctgctggtgaagaattgcctcctgcccctgagagagtacttcaagtatttcagccagaatagtctgcccctgggcggcccaagcagcggcgcccctcctcccagcggcggcagcccagccggctccccaacctctaccgaggagggcacctctgagtccgccacccccgagagcggccctggcacctccaccgagcccagcgagggcagcgcacccggcagccctgccggcagccccacctccacagaggagggaaccagcaccgagcccagcgaaggcagcgccccaggcaccagcaccgagcctagtgagggcggctctggcggcggcagcgcccaggagattaaacggatcaacaagatcagaagaagacttgtgaaagacagcaacaccaagaaggccggcaagacaggccccatgaaaaccctgctggttagagtgatgacacccgatctgagagagcggctggaaaacctgagaaagaagcctgaaaatatcccccagcccatcagcaatacatctagagccaacctgaataagctgctgaccgattacaccgaaatgaagaaggcgatcctgcatgtgtactgggaagagttccagaaggaccctgtgggcctgatgagccgggtggcccagcctgccagcaagaagatcgatcagaacaagctgaaacctgagatggacgagaagggcaacctgaccaccgccggctttgcctgctctcagtgtggccagcccctgttcgtgtacaagctggagcaggtgtctgagaagggcaaggcttacaccaactacttcggacggtgcaatgtggccgagcacgaaaagctgatcctgctggcccagctgaagcccgagaaggatagcgacgaagccgtgacatatagcctgggaaagtttgggcagagggccctggatttctacagcattcatgtgaccaaggagtccacccaccccgtgaagcccctggcccagatcgccggaaacagatacgcctccggacctgtgggaaaggccctgagcgacgcatgtatgggcacaatcgcctccttcctgtctaagtaccaggacatcatcatcgaacaccagaaggtggtgaagggcaaccagaagagactggagagcctgcgggagctggccggcaaggaaaacctggaataccctagcgtgaccctgccacctcagcctcacaccaaggagggcgttgatgcctacaacgaagtgatcgcccgggtgcgaatgtgggtgaacctgaacctgtggcagaagctgaagctaagcagagatgatgccaagcctctgctgagactgaagggattcccttcctttcctctggtcgagagacaggccaacgaagtggactggtgggacatggtgtgtaacgtgaagaagctgatcaacgagaaaaaggaggatggcaaggtgttttggcagaatctggctggctacaagagacaggaagccctgagaccatacctgagcagcgaggaagatcggaagaagggaaagaaattcgctcggtaccagctgggcgacctgctgctgcacctggaaaagaagcacggcgaggactggggaaaggtgtacgacgaggcctgggagcggattgacaagaaagtggaaggcctgagcaagcacatcaagctggaagaggaacggagaagcgaggacgcccagagcaaggccgccctgaccgactggctgcgggctaaggccagcttcgtgatcgagggcctgaaggaggccgacaaggacgagttctgcagatgcgagctgaagctgcagaagtggtacggggacctgcggggaaagcccttcgccatcgaagccgagaacagcatcctggacatcagcggcttcagcaagcagtacaactgtgccttcatctggcagaaggacggcgtgaagaagctgaacctgtacctgatcatcaactacttcaagggcggcaagctgcggttcaagaagatcaaacctgaagccttcgaagccaacagattctacaccgtgatcaacaaaaagagcggcgagatcgtgcccatggaggtgaacttcaacttcgacgaccccaacctgatcatcctgcctctggcctttggcaagagacagggcagagaattcatctggaacgacctgctgtccctggaaaccggcagcctgaagctggccaacggaagagtgatcgagaagacactgtacaacagaagaacccggcaggatgagcctgccctgttcgtggccctgaccttcgagcggcgggaggtcctggactcctccaatatcaaaccaatgaacctgatcggcgtggcaagaggcgaaaacatccccgccgtgatcgccctgaccgaccccgagggctgcccactgagccggtttaaggatagcctgggaaacccaacccacatcctgagaatcggcgagagctataaggagaagcagcggaccatccaggccaagaaggaggtggagcagcggagagccggcggctacagccggaagtacgccagcaaagccaagaatctggcagacgatatggtgagaaacaccgctagagatctgctgtactacgccgtgacccaggatgccatgctgatcttcgccaacctgagccggggcttcggccggcagggcaagcggaccttcatggccgagagacagtacacacggatggaggactggctgaccgccaagctggcctacgagggcctgagcaagacctacctgtccaagacactggcccagtacacctccaagacatgcagcaactgtgggtttaccatcaccagcgccgactacgacagggtgctggagaagctgaagaagacagcaacaggctggatgaccacaattaacggcaaggagctgaaggtggagggccagattacctactacaacagatacaagagacagaacgtagtcaaggacctgtccgtcgagctggatagactgagcgaagaatctgtgaacaacgacatctcctcctggacaaagggcagaagcggagaagctctgagcctcctgaagaaaagattctcccatagacccgtgcaggagaagttcgtgtgcctgaactgcggcttcgagacacacgcagccgagcaagccgccctgaacatcgccagatcctggctgttcctgcggagccaggagtacaagaaataccagacaaacaagacaaccggcaacaccgataagagagccttcgtcgagacctggcagtccttttaccggaagaagcttaaggaggtgtggaaacctgccgtgcggtctggcggatctggcggaggctccacaagcagcaaggcccccatcaccttcggcgacctggccatctacttcagccaggaggagtgggagtggctgagccccatccagaaggacctgtacgaggacgtgatgctggagaactacaggaacctggtgagcctgggcctgagcttcaggaggcccaacgtgatcaccctgctggagaagggcaaggccccctggatggtggagcccgtgaggaggaggagggcccccgagctggtgaccgtggccaccagccccaagaaaaagagaaaagtctaagctgccttctgcggggcttgccttctggccatgcccttcttctctcccttgcacctgtacctcttggtctttgaataaagcctgagtaggaaggctagcaaaaaaaaaaaaaaaaaaaaaaaaaaaaaaaaaaaaaaaaaaaaaaaaaaaaaaaaaaaaaaaaaaaaaaaaaaaaaaaa

SEQ ID NO: 5786 - RNA, 5797 nt, synthetic construct
  source 1..5797: mol_type = other RNA
aggaaataagagagaaaagaagagtaagaagaaatataagagccaccatggcccctaagaagaagcgtaaagtgagccggatggaacgcctcgtctacgaggtgcggcagaagtgcagaaacatcgaggacatctgcatctcctgcggatctctgaacgtgaccctggagcacccactgttcatcggcggcatgtgccagaactgtaaaaactgttttctggagtgtgcctatcaatacgacgatgacggctaccagagctactgcaccatctgttgcggcggaagagaggtgctgatgtgtggaaataacaactgctgccggtgcttctgcgtggaatgcgtggacctgctggtgggccccggcgccgcccaggccgctattaaggaagatccttggaactgctacatgtgcggccacaagggcacatacggcctgctgagacggagagaggactggcctagcagactgcagatgttcttcgccaataaccacgaccaggagttcgacccccctaaggtgtaccctcccgtccccgccgagaagagaaagcccatccgggtcctgagcctgttcgatggcatcgccaccggtctgctggtgctgaaggacctgggcatccaggtggataggtacattgcctccgaggtgtgcgaggactccatcaccgtgggaatggtgcgtcatcagggcaagatcatgtacgtgggcgacgtgcggagcgtgacacagaagcatatccaggagtggggccctttcgacctggtgatcggcggcagcccttgcaatgacctgagcatcgtgaacccagcccggaagggcctgtacgagggaaccggcagactgttcttcgagttttacagactgctgcacgacgcccggcctaaggaaggcgacgaccggcccttcttttggctgttcgagaatgtggtggccatgggagtcagcgacaagcgggatattagccggttcctggagagcaaccccgtgatgatcgatgccaaggaagtgagcgccgcccaccgggccagatacttctggggcaatctgcctggcatgaacagacccctggccagcaccgtgaacgacaagctggagctgcaggagtgcctggagcacggccggatcgccaagttcagcaaggtgagaaccatcaccacccgaagcaacagcatcaaacaaggcaaggaccagcactttcctgtgttcatgaacgagaaggaggacatcctgtggtgtaccgagatggagagagtgttcgggttcccagtccactacacagatgtcagcaacatgtctagactggccagacagagactgctgggaagaagctggtccgtccctgtgatcagacacctgttcgcccctctgaaggagtacttcgcctgcgtgagcagcggcaacagcaacgccaacagccggggccccagcttctctagcggcctggtgccactgtccctgagagggagccacatgggccccatggagatctacaaaaccgtgagcgcctggaagcggcagcctgtgcgcgtgctgagcctgtttcggaatatcgataaagtcctgaaaagcctgggattcctggagagcggctctggctccggcggtggcaccctgaagtacgtggaggatgtgacaaacgtggtcagacgggatgtggagaagtggggccccttcgatctggtgtacggcagcacccaacccctgggcagctcttgtgaccggtgccctggctggtacatgtttcagttccaccggatcctgcagtacgccctgccgagacaggagtcccagcggccattcttttggattttcatggacaacttgctgctgaccgaggatgaccaggaaactaccactcggttcctgcagaccgaagccgtgaccctgcaggacgtgagaggccgggactaccagaacgccatgcgggtgtggtccaacatccctggactgaaaagcaagcacgcacctctgacccctaaagaagaggagtacctgcaggcccaggtgcggagcagaagcaagctggacgcccctaaggtggatctgctggtgaagaattgcctcctgcccctgagagagtacttcaagtatttcagccagaatagtctgcccctgggcggcccaagcagcggcgcccctcctcccagcggcggcagcccagccggctccccaacctctaccgaggagggcacctctgagtccgccacccccgagagcggccctggcacctccaccgagcccagcgagggcagcgcacccggcagccctgccggcagccccacctccacagaggagggaaccagcaccgagcccagcgaaggcagcgccccaggcaccagcaccgagcctagtgagggcggctctggcggcggcagcgcccaggagattaaacggatcaacaagatcagaagaagacttgtgaaagacagcaacaccaagaaggccggcaagacaggccccatgaaaaccctgctggttagagtgatgacacccgatctgagagagcggctggaaaacctgagaaagaagcctgaaaatatcccccagcccatcagcaatacatctagagccaacctgaataagctgctgaccgattacaccgaaatgaagaaggcgatcctgcatgtgtactgggaagagttccagaaggaccctgtgggcctgatgagccgggtggcccagcctgccagcaagaagatcgatcagaacaagctgaaacctgagatggacgagaagggcaacctgaccaccgccggctttgcctgctctcagtgtggccagcccctgttcgtgtacaagctggagcaggtgtctgagaagggcaaggcttacaccaactacttcggacggtgcaatgtggccgagcacgaaaagctgatcctgctggcccagctgaagcccgagaaggatagcgacgaagccgtgacatatagcctgggaaagtttgggcagagggccctggatttctacagcattcatgtgaccaaggagtccacccaccccgtgaagcccctggcccagatcgccggaaacagatacgcctccggacctgtgggaaaggccctgagcgacgcatgtatgggcacaatcgcctccttcctgtctaagtaccaggacatcatcatcgaacaccagaaggtggtgaagggcaaccagaagagactggagagcctgcgggagctggccggcaaggaaaacctggaataccctagcgtgaccctgccacctcagcctcacaccaaggagggcgttgatgcctacaacgaagtgatcgcccgggtgcgaatgtgggtgaacctgaacctgtggcagaagctgaagctaagcagagatgatgccaagcctctgctgagactgaagggattcccttcctttcctctggtcgagagacaggccaacgaagtggactggtgggacatggtgtgtaacgtgaagaagctgatcaacgagaaaaaggaggatggcaaggtgttttggcagaatctggctggctacaagagacaggaagccctgagaccatacctgagcagcgaggaagatcggaagaagggaaagaaattcgctcggtaccagctgggcgacctgctgctgcacctggaaaagaagcacggcgaggactggggaaaggtgtacgacgaggcctgggagcggattgacaagaaagtggaaggcctgagcaagcacatcaagctggaagaggaacggagaagcgaggacgcccagagcaaggccgccctgaccgactggctgcgggctaaggccagcttcgtgatcgagggcctgaaggaggccgacaaggacgagttctgcagatgcgagctgaagctgcagaagtggtacggggacctgcggggaaagcccttcgccatcgaagccgagaacagcatcctggacatcagcggcttcagcaagcagtacaactgtgccttcatctggcagaaggacggcgtgaagaagctgaacctgtacctgatcatcaactacttcaagggcggcaagctgcggttcaagaagatcaaacctgaagccttcgaagccaacagattctacaccgtgatcaacaaaaagagcggcgagatcgtgcccatggaggtgaacttcaacttcgacgaccccaacctgatcatcctgcctctggcctttggcaagagacagggcagagaattcatctggaacgacctgctgtccctggaaaccggcagcctgaagctggccaacggaagagtgatcgagaagacactgtacaacagaagaacccggcaggatgagcctgccctgttcgtggccctgaccttcgagcggcgggaggtcctggactcctccaatatcaaaccaatgaacctgatcggcgtggcaagaggcgaaaacatccccgccgtgatcgccctgaccgaccccgagggctgcccactgagccggtttaaggatagcctgggaaacccaacccacatcctgagaatcggcgagagctataaggagaagcagcggaccatccaggccaagaaggaggtggagcagcggagagccggcggctacagccggaagtacgccagcaaagccaagaatctggcagacgatatggtgagaaacaccgctagagatctgctgtactacgccgtgacccaggatgccatgctgatcttcgccaacctgagccggggcttcggccggcagggcaagcggaccttcatggccgagagacagtacacacggatggaggactggctgaccgccaagctggcctacgagggcctgagcaagacctacctgtccaagacactggcccagtacacctccaagacatgcagcaactgtgggtttaccatcaccagcgccgactacgacagggtgctggagaagctgaagaagacagcaacaggctggatgaccacaattaacggcaaggagctgaaggtggagggccagattacctactacaacagatacaagagacagaacgtagtcaaggacctgtccgtcgagctggatagactgagcgaagaatctgtgaacaacgacatctcctcctggacaaagggcagaagcggagaagctctgagcctcctgaagaaaagattctcccatagacccgtgcaggagaagttcgtgtgcctgaactgcggcttcgagacacacgcagccgagcaagccgccctgaacatcgccagatcctggctgttcctgcggagccaggagtacaagaaataccagacaaacaagacaaccggcaacaccgataagagagccttcgtcgagacctggcagtccttttaccggaagaagcttaaggaggtgtggaaacctgccgtgcggtctggcggatctggcggaggctccacaagcggcaaccagttcagcttccagagcctgctgaccttcaaggacgtggccatcaacttcagcaaggaggagtgggagtgcctgcacaccagccagaggaacctgtacagggacgtgatgctggagaactacagcaacctggtgagcgtgggcctgagcgagagcaagcccgagctggtgacctgcctggagcagaacaaggagccctggatggtgaacatcgacgaggccgagggcctgggccagaccagccccaagaaaaagagaaaagtctaagctgccttctgcggggcttgccttctggccatgcccttcttctctcccttgcacctgtacctcttggtctttgaataaagcctgagtaggaaggctagcaaaaaaaaaaaaaaaaaaaaaaaaaaaaaaaaaaaaaaaaaaaaaaaaaaaaaaaaaaaaaaaaaaaaaaaaaaaaaaaa

SEQ ID NO: 5787 - RNA, 5797 nt, synthetic construct
  source 1..5797: mol_type = other RNA
aggaaataagagagaaaagaagagtaagaagaaatataagagccaccatggcccctaagaagaagcgtaaagtgagccggatggaacgcctcgtctacgaggtgcggcagaagtgcagaaacatcgaggacatctgcatctcctgcggatctctgaacgtgaccctggagcacccactgttcatcggcggcatgtgccagaactgtaaaaactgttttctggagtgtgcctatcaatacgacgatgacggctaccagagctactgcaccatctgttgcggcggaagagaggtgctgatgtgtggaaataacaactgctgccggtgcttctgcgtggaatgcgtggacctgctggtgggccccggcgccgcccaggccgctattaaggaagatccttggaactgctacatgtgcggccacaagggcacatacggcctgctgagacggagagaggactggcctagcagactgcagatgttcttcgccaataaccacgaccaggagttcgacccccctaaggtgtaccctcccgtccccgccgagaagagaaagcccatccgggtcctgagcctgttcgatggcatcgccaccggtctgctggtgctgaaggacctgggcatccaggtggataggtacattgcctccgaggtgtgcgaggactccatcaccgtgggaatggtgcgtcatcagggcaagatcatgtacgtgggcgacgtgcggagcgtgacacagaagcatatccaggagtggggccctttcgacctggtgatcggcggcagcccttgcaatgacctgagcatcgtgaacccagcccggaagggcctgtacgagggaaccggcagactgttcttcgagttttacagactgctgcacgacgcccggcctaaggaaggcgacgaccggcccttcttttggctgttcgagaatgtggtggccatgggagtcagcgacaagcgggatattagccggttcctggagagcaaccccgtgatgatcgatgccaaggaagtgagcgccgcccaccgggccagatacttctggggcaatctgcctggcatgaacagacccctggccagcaccgtgaacgacaagctggagctgcaggagtgcctggagcacggccggatcgccaagttcagcaaggtgagaaccatcaccacccgaagcaacagcatcaaacaaggcaaggaccagcactttcctgtgttcatgaacgagaaggaggacatcctgtggtgtaccgagatggagagagtgttcgggttcccagtccactacacagatgtcagcaacatgtctagactggccagacagagactgctgggaagaagctggtccgtccctgtgatcagacacctgttcgcccctctgaaggagtacttcgcctgcgtgagcagcggcaacagcaacgccaacagccggggccccagcttctctagcggcctggtgccactgtccctgagagggagccacatgggccccatggagatctacaaaaccgtgagcgcctggaagcggcagcctgtgcgcgtgctgagcctgtttcggaatatcgataaagtcctgaaaagcctgggattcctggagagcggctctggctccggcggtggcaccctgaagtacgtggaggatgtgacaaacgtggtcagacgggatgtggagaagtggggccccttcgatctggtgtacggcagcacccaacccctgggcagctcttgtgaccggtgccctggctggtacatgtttcagttccaccggatcctgcagtacgccctgccgagacaggagtcccagcggccattcttttggattttcatggacaacttgctgctgaccgaggatgaccaggaaactaccactcggttcctgcagaccgaagccgtgaccctgcaggacgtgagaggccgggactaccagaacgccatgcgggtgtggtccaacatccctggactgaaaagcaagcacgcacctctgacccctaaagaagaggagtacctgcaggcccaggtgcggagcagaagcaagctggacgcccctaaggtggatctgctggtgaagaattgcctcctgcccctgagagagtacttcaagtatttcagccagaatagtctgcccctgggcggcccaagcagcggcgcccctcctcccagcggcggcagcccagccggctccccaacctctaccgaggagggcacctctgagtccgccacccccgagagcggccctggcacctccaccgagcccagcgagggcagcgcacccggcagccctgccggcagccccacctccacagaggagggaaccagcaccgagcccagcgaaggcagcgccccaggcaccagcaccgagcctagtgagggcggctctggcggcggcagcgcccaggagattaaacggatcaacaagatcagaagaagacttgtgaaagacagcaacaccaagaaggccggcaagacaggccccatgaaaaccctgctggttagagtgatgacacccgatctgagagagcggctggaaaacctgagaaagaagcctgaaaatatcccccagcccatcagcaatacatctagagccaacctgaataagctgctgaccgattacaccgaaatgaagaaggcgatcctgcatgtgtactgggaagagttccagaaggaccctgtgggcctgatgagccgggtggcccagcctgccagcaagaagatcgatcagaacaagctgaaacctgagatggacgagaagggcaacctgaccaccgccggctttgcctgctctcagtgtggccagcccctgttcgtgtacaagctggagcaggtgtctgagaagggcaaggcttacaccaactacttcggacggtgcaatgtggccgagcacgaaaagctgatcctgctggcccagctgaagcccgagaaggatagcgacgaagccgtgacatatagcctgggaaagtttgggcagagggccctggatttctacagcattcatgtgaccaaggagtccacccaccccgtgaagcccctggcccagatcgccggaaacagatacgcctccggacctgtgggaaaggccctgagcgacgcatgtatgggcacaatcgcctccttcctgtctaagtaccaggacatcatcatcgaacaccagaaggtggtgaagggcaaccagaagagactggagagcctgcgggagctggccggcaaggaaaacctggaataccctagcgtgaccctgccacctcagcctcacaccaaggagggcgttgatgcctacaacgaagtgatcgcccgggtgcgaatgtgggtgaacctgaacctgtggcagaagctgaagctaagcagagatgatgccaagcctctgctgagactgaagggattcccttcctttcctctggtcgagagacaggccaacgaagtggactggtgggacatggtgtgtaacgtgaagaagctgatcaacgagaaaaaggaggatggcaaggtgttttggcagaatctggctggctacaagagacaggaagccctgagaccatacctgagcagcgaggaagatcggaagaagggaaagaaattcgctcggtaccagctgggcgacctgctgctgcacctggaaaagaagcacggcgaggactggggaaaggtgtacgacgaggcctgggagcggattgacaagaaagtggaaggcctgagcaagcacatcaagctggaagaggaacggagaagcgaggacgcccagagcaaggccgccctgaccgactggctgcgggctaaggccagcttcgtgatcgagggcctgaaggaggccgacaaggacgagttctgcagatgcgagctgaagctgcagaagtggtacggggacctgcggggaaagcccttcgccatcgaagccgagaacagcatcctggacatcagcggcttcagcaagcagtacaactgtgccttcatctggcagaaggacggcgtgaagaagctgaacctgtacctgatcatcaactacttcaagggcggcaagctgcggttcaagaagatcaaacctgaagccttcgaagccaacagattctacaccgtgatcaacaaaaagagcggcgagatcgtgcccatggaggtgaacttcaacttcgacgaccccaacctgatcatcctgcctctggcctttggcaagagacagggcagagaattcatctggaacgacctgctgtccctggaaaccggcagcctgaagctggccaacggaagagtgatcgagaagacactgtacaacagaagaacccggcaggatgagcctgccctgttcgtggccctgaccttcgagcggcgggaggtcctggactcctccaatatcaaaccaatgaacctgatcggcgtggcaagaggcgaaaacatccccgccgtgatcgccctgaccgaccccgagggctgcccactgagccggtttaaggatagcctgggaaacccaacccacatcctgagaatcggcgagagctataaggagaagcagcggaccatccaggccaagaaggaggtggagcagcggagagccggcggctacagccggaagtacgccagcaaagccaagaatctggcagacgatatggtgagaaacaccgctagagatctgctgtactacgccgtgacccaggatgccatgctgatcttcgccaacctgagccggggcttcggccggcagggcaagcggaccttcatggccgagagacagtacacacggatggaggactggctgaccgccaagctggcctacgagggcctgagcaagacctacctgtccaagacactggcccagtacacctccaagacatgcagcaactgtgggtttaccatcaccagcgccgactacgacagggtgctggagaagctgaagaagacagcaacaggctggatgaccacaattaacggcaaggagctgaaggtggagggccagattacctactacaacagatacaagagacagaacgtagtcaaggacctgtccgtcgagctggatagactgagcgaagaatctgtgaacaacgacatctcctcctggacaaagggcagaagcggagaagctctgagcctcctgaagaaaagattctcccatagacccgtgcaggagaagttcgtgtgcctgaactgcggcttcgagacacacgcagccgagcaagccgccctgaacatcgccagatcctggctgttcctgcggagccaggagtacaagaaataccagacaaacaagacaaccggcaacaccgataagagagccttcgtcgagacctggcagtccttttaccggaagaagcttaaggaggtgtggaaacctgccgtgcggtctggcggatctggcggaggctccacaagcatggccttcgaggacgtggccgtgtacttcagccaggaggagtggggcctgctggacaccgcccagagggccctgtacaggagggtgatgctggacaacttcgccctggtggccagcctgggcctgagcaccagcaggcccagggtggtgatccagctggagaggggcgaggagccctgggtgcccagcaggaccgacaccatcctgagcaggaacacctacaggaggaggaaccccggcagcaccagccccaagaaaaagagaaaagtctaagctgccttctgcggggcttgccttctggccatgcccttcttctctcccttgcacctgtacctcttggtctttgaataaagcctgagtaggaaggctagcaaaaaaaaaaaaaaaaaaaaaaaaaaaaaaaaaaaaaaaaaaaaaaaaaaaaaaaaaaaaaaaaaaaaaaaaaaaaaaaa

SEQ ID NO: 5788 - RNA, 5797 nt, synthetic construct
  source 1..5797: mol_type = other RNA
aggaaataagagagaaaagaagagtaagaagaaatataagagccaccatggcccctaagaagaagcgtaaagtgagccggatggaacgcctcgtctacgaggtgcggcagaagtgcagaaacatcgaggacatctgcatctcctgcggatctctgaacgtgaccctggagcacccactgttcatcggcggcatgtgccagaactgtaaaaactgttttctggagtgtgcctatcaatacgacgatgacggctaccagagctactgcaccatctgttgcggcggaagagaggtgctgatgtgtggaaataacaactgctgccggtgcttctgcgtggaatgcgtggacctgctggtgggccccggcgccgcccaggccgctattaaggaagatccttggaactgctacatgtgcggccacaagggcacatacggcctgctgagacggagagaggactggcctagcagactgcagatgttcttcgccaataaccacgaccaggagttcgacccccctaaggtgtaccctcccgtccccgccgagaagagaaagcccatccgggtcctgagcctgttcgatggcatcgccaccggtctgctggtgctgaaggacctgggcatccaggtggataggtacattgcctccgaggtgtgcgaggactccatcaccgtgggaatggtgcgtcatcagggcaagatcatgtacgtgggcgacgtgcggagcgtgacacagaagcatatccaggagtggggccctttcgacctggtgatcggcggcagcccttgcaatgacctgagcatcgtgaacccagcccggaagggcctgtacgagggaaccggcagactgttcttcgagttttacagactgctgcacgacgcccggcctaaggaaggcgacgaccggcccttcttttggctgttcgagaatgtggtggccatgggagtcagcgacaagcgggatattagccggttcctggagagcaaccccgtgatgatcgatgccaaggaagtgagcgccgcccaccgggccagatacttctggggcaatctgcctggcatgaacagacccctggccagcaccgtgaacgacaagctggagctgcaggagtgcctggagcacggccggatcgccaagttcagcaaggtgagaaccatcaccacccgaagcaacagcatcaaacaaggcaaggaccagcactttcctgtgttcatgaacgagaaggaggacatcctgtggtgtaccgagatggagagagtgttcgggttcccagtccactacacagatgtcagcaacatgtctagactggccagacagagactgctgggaagaagctggtccgtccctgtgatcagacacctgttcgcccctctgaaggagtacttcgcctgcgtgagcagcggcaacagcaacgccaacagccggggccccagcttctctagcggcctggtgccactgtccctgagagggagccacatgggccccatggagatctacaaaaccgtgagcgcctggaagcggcagcctgtgcgcgtgctgagcctgtttcggaatatcgataaagtcctgaaaagcctgggattcctggagagcggctctggctccggcggtggcaccctgaagtacgtggaggatgtgacaaacgtggtcagacgggatgtggagaagtggggccccttcgatctggtgtacggcagcacccaacccctgggcagctcttgtgaccggtgccctggctggtacatgtttcagttccaccggatcctgcagtacgccctgccgagacaggagtcccagcggccattcttttggattttcatggacaacttgctgctgaccgaggatgaccaggaaactaccactcggttcctgcagaccgaagccgtgaccctgcaggacgtgagaggccgggactaccagaacgccatgcgggtgtggtccaacatccctggactgaaaagcaagcacgcacctctgacccctaaagaagaggagtacctgcaggcccaggtgcggagcagaagcaagctggacgcccctaaggtggatctgctggtgaagaattgcctcctgcccctgagagagtacttcaagtatttcagccagaatagtctgcccctgggcggcccaagcagcggcgcccctcctcccagcggcggcagcccagccggctccccaacctctaccgaggagggcacctctgagtccgccacccccgagagcggccctggcacctccaccgagcccagcgagggcagcgcacccggcagccctgccggcagccccacctccacagaggagggaaccagcaccgagcccagcgaaggcagcgccccaggcaccagcaccgagcctagtgagggcggctctggcggcggcagcgcccaggagattaaacggatcaacaagatcagaagaagacttgtgaaagacagcaacaccaagaaggccggcaagacaggccccatgaaaaccctgctggttagagtgatgacacccgatctgagagagcggctggaaaacctgagaaagaagcctgaaaatatcccccagcccatcagcaatacatctagagccaacctgaataagctgctgaccgattacaccgaaatgaagaaggcgatcctgcatgtgtactgggaagagttccagaaggaccctgtgggcctgatgagccgggtggcccagcctgccagcaagaagatcgatcagaacaagctgaaacctgagatggacgagaagggcaacctgaccaccgccggctttgcctgctctcagtgtggccagcccctgttcgtgtacaagctggagcaggtgtctgagaagggcaaggcttacaccaactacttcggacggtgcaatgtggccgagcacgaaaagctgatcctgctggcccagctgaagcccgagaaggatagcgacgaagccgtgacatatagcctgggaaagtttgggcagagggccctggatttctacagcattcatgtgaccaaggagtccacccaccccgtgaagcccctggcccagatcgccggaaacagatacgcctccggacctgtgggaaaggccctgagcgacgcatgtatgggcacaatcgcctccttcctgtctaagtaccaggacatcatcatcgaacaccagaaggtggtgaagggcaaccagaagagactggagagcctgcgggagctggccggcaaggaaaacctggaataccctagcgtgaccctgccacctcagcctcacaccaaggagggcgttgatgcctacaacgaagtgatcgcccgggtgcgaatgtgggtgaacctgaacctgtggcagaagctgaagctaagcagagatgatgccaagcctctgctgagactgaagggattcccttcctttcctctggtcgagagacaggccaacgaagtggactggtgggacatggtgtgtaacgtgaagaagctgatcaacgagaaaaaggaggatggcaaggtgttttggcagaatctggctggctacaagagacaggaagccctgagaccatacctgagcagcgaggaagatcggaagaagggaaagaaattcgctcggtaccagctgggcgacctgctgctgcacctggaaaagaagcacggcgaggactggggaaaggtgtacgacgaggcctgggagcggattgacaagaaagtggaaggcctgagcaagcacatcaagctggaagaggaacggagaagcgaggacgcccagagcaaggccgccctgaccgactggctgcgggctaaggccagcttcgtgatcgagggcctgaaggaggccgacaaggacgagttctgcagatgcgagctgaagctgcagaagtggtacggggacctgcggggaaagcccttcgccatcgaagccgagaacagcatcctggacatcagcggcttcagcaagcagtacaactgtgccttcatctggcagaaggacggcgtgaagaagctgaacctgtacctgatcatcaactacttcaagggcggcaagctgcggttcaagaagatcaaacctgaagccttcgaagccaacagattctacaccgtgatcaacaaaaagagcggcgagatcgtgcccatggaggtgaacttcaacttcgacgaccccaacctgatcatcctgcctctggcctttggcaagagacagggcagagaattcatctggaacgacctgctgtccctggaaaccggcagcctgaagctggccaacggaagagtgatcgagaagacactgtacaacagaagaacccggcaggatgagcctgccctgttcgtggccctgaccttcgagcggcgggaggtcctggactcctccaatatcaaaccaatgaacctgatcggcgtggcaagaggcgaaaacatccccgccgtgatcgccctgaccgaccccgagggctgcccactgagccggtttaaggatagcctgggaaacccaacccacatcctgagaatcggcgagagctataaggagaagcagcggaccatccaggccaagaaggaggtggagcagcggagagccggcggctacagccggaagtacgccagcaaagccaagaatctggcagacgatatggtgagaaacaccgctagagatctgctgtactacgccgtgacccaggatgccatgctgatcttcgccaacctgagccggggcttcggccggcagggcaagcggaccttcatggccgagagacagtacacacggatggaggactggctgaccgccaagctggcctacgagggcctgagcaagacctacctgtccaagacactggcccagtacacctccaagacatgcagcaactgtgggtttaccatcaccagcgccgactacgacagggtgctggagaagctgaagaagacagcaacaggctggatgaccacaattaacggcaaggagctgaaggtggagggccagattacctactacaacagatacaagagacagaacgtagtcaaggacctgtccgtcgagctggatagactgagcgaagaatctgtgaacaacgacatctcctcctggacaaagggcagaagcggagaagctctgagcctcctgaagaaaagattctcccatagacccgtgcaggagaagttcgtgtgcctgaactgcggcttcgagacacacgcagccgagcaagccgccctgaacatcgccagatcctggctgttcctgcggagccaggagtacaagaaataccagacaaacaagacaaccggcaacaccgataagagagccttcgtcgagacctggcagtccttttaccggaagaagcttaaggaggtgtggaaacctgccgtgcggtctggcggatctggcggaggctccacaagcatggccttcgaggacgtggccgtgtacttcagccaggaggagtggggcctgctggacaccgcccagagggccctgtacaggagggtgatgctggacaacttcgccctggtggccagcctgggcctgagcaccagcaggcccagggtggtgatccagctggagaggggcgaggagccctgggtgcccagcgagaccgacatgaccatgagcaggaacacccacaggaggaggaaccccggcagcaccagccccaagaaaaagagaaaagtctaagctgccttctgcggggcttgccttctggccatgcccttcttctctcccttgcacctgtacctcttggtctttgaataaagcctgagtaggaaggctagcaaaaaaaaaaaaaaaaaaaaaaaaaaaaaaaaaaaaaaaaaaaaaaaaaaaaaaaaaaaaaaaaaaaaaaaaaaaaaaaa

SEQ ID NO: 5789 - RNA, 5797 nt, synthetic construct
  source 1..5797: mol_type = other RNA
aggaaataagagagaaaagaagagtaagaagaaatataagagccaccatggcccctaagaagaagcgtaaagtgagccggatggaacgcctcgtctacgaggtgcggcagaagtgcagaaacatcgaggacatctgcatctcctgcggatctctgaacgtgaccctggagcacccactgttcatcggcggcatgtgccagaactgtaaaaactgttttctggagtgtgcctatcaatacgacgatgacggctaccagagctactgcaccatctgttgcggcggaagagaggtgctgatgtgtggaaataacaactgctgccggtgcttctgcgtggaatgcgtggacctgctggtgggccccggcgccgcccaggccgctattaaggaagatccttggaactgctacatgtgcggccacaagggcacatacggcctgctgagacggagagaggactggcctagcagactgcagatgttcttcgccaataaccacgaccaggagttcgacccccctaaggtgtaccctcccgtccccgccgagaagagaaagcccatccgggtcctgagcctgttcgatggcatcgccaccggtctgctggtgctgaaggacctgggcatccaggtggataggtacattgcctccgaggtgtgcgaggactccatcaccgtgggaatggtgcgtcatcagggcaagatcatgtacgtgggcgacgtgcggagcgtgacacagaagcatatccaggagtggggccctttcgacctggtgatcggcggcagcccttgcaatgacctgagcatcgtgaacccagcccggaagggcctgtacgagggaaccggcagactgttcttcgagttttacagactgctgcacgacgcccggcctaaggaaggcgacgaccggcccttcttttggctgttcgagaatgtggtggccatgggagtcagcgacaagcgggatattagccggttcctggagagcaaccccgtgatgatcgatgccaaggaagtgagcgccgcccaccgggccagatacttctggggcaatctgcctggcatgaacagacccctggccagcaccgtgaacgacaagctggagctgcaggagtgcctggagcacggccggatcgccaagttcagcaaggtgagaaccatcaccacccgaagcaacagcatcaaacaaggcaaggaccagcactttcctgtgttcatgaacgagaaggaggacatcctgtggtgtaccgagatggagagagtgttcgggttcccagtccactacacagatgtcagcaacatgtctagactggccagacagagactgctgggaagaagctggtccgtccctgtgatcagacacctgttcgcccctctgaaggagtacttcgcctgcgtgagcagcggcaacagcaacgccaacagccggggccccagcttctctagcggcctggtgccactgtccctgagagggagccacatgggccccatggagatctacaaaaccgtgagcgcctggaagcggcagcctgtgcgcgtgctgagcctgtttcggaatatcgataaagtcctgaaaagcctgggattcctggagagcggctctggctccggcggtggcaccctgaagtacgtggaggatgtgacaaacgtggtcagacgggatgtggagaagtggggccccttcgatctggtgtacggcagcacccaacccctgggcagctcttgtgaccggtgccctggctggtacatgtttcagttccaccggatcctgcagtacgccctgccgagacaggagtcccagcggccattcttttggattttcatggacaacttgctgctgaccgaggatgaccaggaaactaccactcggttcctgcagaccgaagccgtgaccctgcaggacgtgagaggccgggactaccagaacgccatgcgggtgtggtccaacatccctggactgaaaagcaagcacgcacctctgacccctaaagaagaggagtacctgcaggcccaggtgcggagcagaagcaagctggacgcccctaaggtggatctgctggtgaagaattgcctcctgcccctgagagagtacttcaagtatttcagccagaatagtctgcccctgggcggcccaagcagcggcgcccctcctcccagcggcggcagcccagccggctccccaacctctaccgaggagggcacctctgagtccgccacccccgagagcggccctggcacctccaccgagcccagcgagggcagcgcacccggcagccctgccggcagccccacctccacagaggagggaaccagcaccgagcccagcgaaggcagcgccccaggcaccagcaccgagcctagtgagggcggctctggcggcggcagcgcccaggagattaaacggatcaacaagatcagaagaagacttgtgaaagacagcaacaccaagaaggccggcaagacaggccccatgaaaaccctgctggttagagtgatgacacccgatctgagagagcggctggaaaacctgagaaagaagcctgaaaatatcccccagcccatcagcaatacatctagagccaacctgaataagctgctgaccgattacaccgaaatgaagaaggcgatcctgcatgtgtactgggaagagttccagaaggaccctgtgggcctgatgagccgggtggcccagcctgccagcaagaagatcgatcagaacaagctgaaacctgagatggacgagaagggcaacctgaccaccgccggctttgcctgctctcagtgtggccagcccctgttcgtgtacaagctggagcaggtgtctgagaagggcaaggcttacaccaactacttcggacggtgcaatgtggccgagcacgaaaagctgatcctgctggcccagctgaagcccgagaaggatagcgacgaagccgtgacatatagcctgggaaagtttgggcagagggccctggatttctacagcattcatgtgaccaaggagtccacccaccccgtgaagcccctggcccagatcgccggaaacagatacgcctccggacctgtgggaaaggccctgagcgacgcatgtatgggcacaatcgcctccttcctgtctaagtaccaggacatcatcatcgaacaccagaaggtggtgaagggcaaccagaagagactggagagcctgcgggagctggccggcaaggaaaacctggaataccctagcgtgaccctgccacctcagcctcacaccaaggagggcgttgatgcctacaacgaagtgatcgcccgggtgcgaatgtgggtgaacctgaacctgtggcagaagctgaagctaagcagagatgatgccaagcctctgctgagactgaagggattcccttcctttcctctggtcgagagacaggccaacgaagtggactggtgggacatggtgtgtaacgtgaagaagctgatcaacgagaaaaaggaggatggcaaggtgttttggcagaatctggctggctacaagagacaggaagccctgagaccatacctgagcagcgaggaagatcggaagaagggaaagaaattcgctcggtaccagctgggcgacctgctgctgcacctggaaaagaagcacggcgaggactggggaaaggtgtacgacgaggcctgggagcggattgacaagaaagtggaaggcctgagcaagcacatcaagctggaagaggaacggagaagcgaggacgcccagagcaaggccgccctgaccgactggctgcgggctaaggccagcttcgtgatcgagggcctgaaggaggccgacaaggacgagttctgcagatgcgagctgaagctgcagaagtggtacggggacctgcggggaaagcccttcgccatcgaagccgagaacagcatcctggacatcagcggcttcagcaagcagtacaactgtgccttcatctggcagaaggacggcgtgaagaagctgaacctgtacctgatcatcaactacttcaagggcggcaagctgcggttcaagaagatcaaacctgaagccttcgaagccaacagattctacaccgtgatcaacaaaaagagcggcgagatcgtgcccatggaggtgaacttcaacttcgacgaccccaacctgatcatcctgcctctggcctttggcaagagacagggcagagaattcatctggaacgacctgctgtccctggaaaccggcagcctgaagctggccaacggaagagtgatcgagaagacactgtacaacagaagaacccggcaggatgagcctgccctgttcgtggccctgaccttcgagcggcgggaggtcctggactcctccaatatcaaaccaatgaacctgatcggcgtggcaagaggcgaaaacatccccgccgtgatcgccctgaccgaccccgagggctgcccactgagccggtttaaggatagcctgggaaacccaacccacatcctgagaatcggcgagagctataaggagaagcagcggaccatccaggccaagaaggaggtggagcagcggagagccggcggctacagccggaagtacgccagcaaagccaagaatctggcagacgatatggtgagaaacaccgctagagatctgctgtactacgccgtgacccaggatgccatgctgatcttcgccaacctgagccggggcttcggccggcagggcaagcggaccttcatggccgagagacagtacacacggatggaggactggctgaccgccaagctggcctacgagggcctgagcaagacctacctgtccaagacactggcccagtacacctccaagacatgcagcaactgtgggtttaccatcaccagcgccgactacgacagggtgctggagaagctgaagaagacagcaacaggctggatgaccacaattaacggcaaggagctgaaggtggagggccagattacctactacaacagatacaagagacagaacgtagtcaaggacctgtccgtcgagctggatagactgagcgaagaatctgtgaacaacgacatctcctcctggacaaagggcagaagcggagaagctctgagcctcctgaagaaaagattctcccatagacccgtgcaggagaagttcgtgtgcctgaactgcggcttcgagacacacgcagccgagcaagccgccctgaacatcgccagatcctggctgttcctgcggagccaggagtacaagaaataccagacaaacaagacaaccggcaacaccgataagagagccttcgtcgagacctggcagtccttttaccggaagaagcttaaggaggtgtggaaacctgccgtgcggtctggcggatctggcggaggctccacaagccaccaggaggtggtgaccttcgaggacgtggccgtgtacttcacccagaccgagtgggccggcctgagccccgcccagagggccctgtacaggagcgtgatgctggagatctacggcaacctgaccagcctgggctaccccgtgcccaagcccgccctggtgagcctgctggagaggggcgacctgccctggggcctggagaccagggacgacaggcccgcccagggcaccaaggacatctgcaccagccccaagaaaaagagaaaagtctaagctgccttctgcggggcttgccttctggccatgcccttcttctctcccttgcacctgtacctcttggtctttgaataaagcctgagtaggaaggctagcaaaaaaaaaaaaaaaaaaaaaaaaaaaaaaaaaaaaaaaaaaaaaaaaaaaaaaaaaaaaaaaaaaaaaaaaaaaaaaaa

SEQ ID NO: 5790 - RNA, 5797 nt, synthetic construct
  source 1..5797: mol_type = other RNA
aggaaataagagagaaaagaagagtaagaagaaatataagagccaccatggcccctaagaagaagcgtaaagtgagccggatggaacgcctcgtctacgaggtgcggcagaagtgcagaaacatcgaggacatctgcatctcctgcggatctctgaacgtgaccctggagcacccactgttcatcggcggcatgtgccagaactgtaaaaactgttttctggagtgtgcctatcaatacgacgatgacggctaccagagctactgcaccatctgttgcggcggaagagaggtgctgatgtgtggaaataacaactgctgccggtgcttctgcgtggaatgcgtggacctgctggtgggccccggcgccgcccaggccgctattaaggaagatccttggaactgctacatgtgcggccacaagggcacatacggcctgctgagacggagagaggactggcctagcagactgcagatgttcttcgccaataaccacgaccaggagttcgacccccctaaggtgtaccctcccgtccccgccgagaagagaaagcccatccgggtcctgagcctgttcgatggcatcgccaccggtctgctggtgctgaaggacctgggcatccaggtggataggtacattgcctccgaggtgtgcgaggactccatcaccgtgggaatggtgcgtcatcagggcaagatcatgtacgtgggcgacgtgcggagcgtgacacagaagcatatccaggagtggggccctttcgacctggtgatcggcggcagcccttgcaatgacctgagcatcgtgaacccagcccggaagggcctgtacgagggaaccggcagactgttcttcgagttttacagactgctgcacgacgcccggcctaaggaaggcgacgaccggcccttcttttggctgttcgagaatgtggtggccatgggagtcagcgacaagcgggatattagccggttcctggagagcaaccccgtgatgatcgatgccaaggaagtgagcgccgcccaccgggccagatacttctggggcaatctgcctggcatgaacagacccctggccagcaccgtgaacgacaagctggagctgcaggagtgcctggagcacggccggatcgccaagttcagcaaggtgagaaccatcaccacccgaagcaacagcatcaaacaaggcaaggaccagcactttcctgtgttcatgaacgagaaggaggacatcctgtggtgtaccgagatggagagagtgttcgggttcccagtccactacacagatgtcagcaacatgtctagactggccagacagagactgctgggaagaagctggtccgtccctgtgatcagacacctgttcgcccctctgaaggagtacttcgcctgcgtgagcagcggcaacagcaacgccaacagccggggccccagcttctctagcggcctggtgccactgtccctgagagggagccacatgggccccatggagatctacaaaaccgtgagcgcctggaagcggcagcctgtgcgcgtgctgagcctgtttcggaatatcgataaagtcctgaaaagcctgggattcctggagagcggctctggctccggcggtggcaccctgaagtacgtggaggatgtgacaaacgtggtcagacgggatgtggagaagtggggccccttcgatctggtgtacggcagcacccaacccctgggcagctcttgtgaccggtgccctggctggtacatgtttcagttccaccggatcctgcagtacgccctgccgagacaggagtcccagcggccattcttttggattttcatggacaacttgctgctgaccgaggatgaccaggaaactaccactcggttcctgcagaccgaagccgtgaccctgcaggacgtgagaggccgggactaccagaacgccatgcgggtgtggtccaacatccctggactgaaaagcaagcacgcacctctgacccctaaagaagaggagtacctgcaggcccaggtgcggagcagaagcaagctggacgcccctaaggtggatctgctggtgaagaattgcctcctgcccctgagagagtacttcaagtatttcagccagaatagtctgcccctgggcggcccaagcagcggcgcccctcctcccagcggcggcagcccagccggctccccaacctctaccgaggagggcacctctgagtccgccacccccgagagcggccctggcacctccaccgagcccagcgagggcagcgcacccggcagccctgccggcagccccacctccacagaggagggaaccagcaccgagcccagcgaaggcagcgccccaggcaccagcaccgagcctagtgagggcggctctggcggcggcagcgcccaggagattaaacggatcaacaagatcagaagaagacttgtgaaagacagcaacaccaagaaggccggcaagacaggccccatgaaaaccctgctggttagagtgatgacacccgatctgagagagcggctggaaaacctgagaaagaagcctgaaaatatcccccagcccatcagcaatacatctagagccaacctgaataagctgctgaccgattacaccgaaatgaagaaggcgatcctgcatgtgtactgggaagagttccagaaggaccctgtgggcctgatgagccgggtggcccagcctgccagcaagaagatcgatcagaacaagctgaaacctgagatggacgagaagggcaacctgaccaccgccggctttgcctgctctcagtgtggccagcccctgttcgtgtacaagctggagcaggtgtctgagaagggcaaggcttacaccaactacttcggacggtgcaatgtggccgagcacgaaaagctgatcctgctggcccagctgaagcccgagaaggatagcgacgaagccgtgacatatagcctgggaaagtttgggcagagggccctggatttctacagcattcatgtgaccaaggagtccacccaccccgtgaagcccctggcccagatcgccggaaacagatacgcctccggacctgtgggaaaggccctgagcgacgcatgtatgggcacaatcgcctccttcctgtctaagtaccaggacatcatcatcgaacaccagaaggtggtgaagggcaaccagaagagactggagagcctgcgggagctggccggcaaggaaaacctggaataccctagcgtgaccctgccacctcagcctcacaccaaggagggcgttgatgcctacaacgaagtgatcgcccgggtgcgaatgtgggtgaacctgaacctgtggcagaagctgaagctaagcagagatgatgccaagcctctgctgagactgaagggattcccttcctttcctctggtcgagagacaggccaacgaagtggactggtgggacatggtgtgtaacgtgaagaagctgatcaacgagaaaaaggaggatggcaaggtgttttggcagaatctggctggctacaagagacaggaagccctgagaccatacctgagcagcgaggaagatcggaagaagggaaagaaattcgctcggtaccagctgggcgacctgctgctgcacctggaaaagaagcacggcgaggactggggaaaggtgtacgacgaggcctgggagcggattgacaagaaagtggaaggcctgagcaagcacatcaagctggaagaggaacggagaagcgaggacgcccagagcaaggccgccctgaccgactggctgcgggctaaggccagcttcgtgatcgagggcctgaaggaggccgacaaggacgagttctgcagatgcgagctgaagctgcagaagtggtacggggacctgcggggaaagcccttcgccatcgaagccgagaacagcatcctggacatcagcggcttcagcaagcagtacaactgtgccttcatctggcagaaggacggcgtgaagaagctgaacctgtacctgatcatcaactacttcaagggcggcaagctgcggttcaagaagatcaaacctgaagccttcgaagccaacagattctacaccgtgatcaacaaaaagagcggcgagatcgtgcccatggaggtgaacttcaacttcgacgaccccaacctgatcatcctgcctctggcctttggcaagagacagggcagagaattcatctggaacgacctgctgtccctggaaaccggcagcctgaagctggccaacggaagagtgatcgagaagacactgtacaacagaagaacccggcaggatgagcctgccctgttcgtggccctgaccttcgagcggcgggaggtcctggactcctccaatatcaaaccaatgaacctgatcggcgtggcaagaggcgaaaacatccccgccgtgatcgccctgaccgaccccgagggctgcccactgagccggtttaaggatagcctgggaaacccaacccacatcctgagaatcggcgagagctataaggagaagcagcggaccatccaggccaagaaggaggtggagcagcggagagccggcggctacagccggaagtacgccagcaaagccaagaatctggcagacgatatggtgagaaacaccgctagagatctgctgtactacgccgtgacccaggatgccatgctgatcttcgccaacctgagccggggcttcggccggcagggcaagcggaccttcatggccgagagacagtacacacggatggaggactggctgaccgccaagctggcctacgagggcctgagcaagacctacctgtccaagacactggcccagtacacctccaagacatgcagcaactgtgggtttaccatcaccagcgccgactacgacagggtgctggagaagctgaagaagacagcaacaggctggatgaccacaattaacggcaaggagctgaaggtggagggccagattacctactacaacagatacaagagacagaacgtagtcaaggacctgtccgtcgagctggatagactgagcgaagaatctgtgaacaacgacatctcctcctggacaaagggcagaagcggagaagctctgagcctcctgaagaaaagattctcccatagacccgtgcaggagaagttcgtgtgcctgaactgcggcttcgagacacacgcagccgagcaagccgccctgaacatcgccagatcctggctgttcctgcggagccaggagtacaagaaataccagacaaacaagacaaccggcaacaccgataagagagccttcgtcgagacctggcagtccttttaccggaagaagcttaaggaggtgtggaaacctgccgtgcggtctggcggatctggcggaggctccacaagcacccaggtgcccgtgaccttcgaggacgtggccgtgtacttctgcgagggcgagtgggagaccctggccgagtggcagaaggagctgtacagggagaccatgaaggagaactacgagaccctgaccagcctgggcttcagcagcaagaagcccagcctgatcagcaagatcgagagggaggaggacccctgcgtgagggacaagcaggacagcagggacaggaggaggctgaggagctgctggaccagccccaagaaaaagagaaaagtctaagctgccttctgcggggcttgccttctggccatgcccttcttctctcccttgcacctgtacctcttggtctttgaataaagcctgagtaggaaggctagcaaaaaaaaaaaaaaaaaaaaaaaaaaaaaaaaaaaaaaaaaaaaaaaaaaaaaaaaaaaaaaaaaaaaaaaaaaaaaaaa

SEQ ID NO: 5791 - RNA, 5797 nt, synthetic construct
  source 1..5797: mol_type = other RNA
aggaaataagagagaaaagaagagtaagaagaaatataagagccaccatggcccctaagaagaagcgtaaagtgagccggatggaacgcctcgtctacgaggtgcggcagaagtgcagaaacatcgaggacatctgcatctcctgcggatctctgaacgtgaccctggagcacccactgttcatcggcggcatgtgccagaactgtaaaaactgttttctggagtgtgcctatcaatacgacgatgacggctaccagagctactgcaccatctgttgcggcggaagagaggtgctgatgtgtggaaataacaactgctgccggtgcttctgcgtggaatgcgtggacctgctggtgggccccggcgccgcccaggccgctattaaggaagatccttggaactgctacatgtgcggccacaagggcacatacggcctgctgagacggagagaggactggcctagcagactgcagatgttcttcgccaataaccacgaccaggagttcgacccccctaaggtgtaccctcccgtccccgccgagaagagaaagcccatccgggtcctgagcctgttcgatggcatcgccaccggtctgctggtgctgaaggacctgggcatccaggtggataggtacattgcctccgaggtgtgcgaggactccatcaccgtgggaatggtgcgtcatcagggcaagatcatgtacgtgggcgacgtgcggagcgtgacacagaagcatatccaggagtggggccctttcgacctggtgatcggcggcagcccttgcaatgacctgagcatcgtgaacccagcccggaagggcctgtacgagggaaccggcagactgttcttcgagttttacagactgctgcacgacgcccggcctaaggaaggcgacgaccggcccttcttttggctgttcgagaatgtggtggccatgggagtcagcgacaagcgggatattagccggttcctggagagcaaccccgtgatgatcgatgccaaggaagtgagcgccgcccaccgggccagatacttctggggcaatctgcctggcatgaacagacccctggccagcaccgtgaacgacaagctggagctgcaggagtgcctggagcacggccggatcgccaagttcagcaaggtgagaaccatcaccacccgaagcaacagcatcaaacaaggcaaggaccagcactttcctgtgttcatgaacgagaaggaggacatcctgtggtgtaccgagatggagagagtgttcgggttcccagtccactacacagatgtcagcaacatgtctagactggccagacagagactgctgggaagaagctggtccgtccctgtgatcagacacctgttcgcccctctgaaggagtacttcgcctgcgtgagcagcggcaacagcaacgccaacagccggggccccagcttctctagcggcctggtgccactgtccctgagagggagccacatgggccccatggagatctacaaaaccgtgagcgcctggaagcggcagcctgtgcgcgtgctgagcctgtttcggaatatcgataaagtcctgaaaagcctgggattcctggagagcggctctggctccggcggtggcaccctgaagtacgtggaggatgtgacaaacgtggtcagacgggatgtggagaagtggggccccttcgatctggtgtacggcagcacccaacccctgggcagctcttgtgaccggtgccctggctggtacatgtttcagttccaccggatcctgcagtacgccctgccgagacaggagtcccagcggccattcttttggattttcatggacaacttgctgctgaccgaggatgaccaggaaactaccactcggttcctgcagaccgaagccgtgaccctgcaggacgtgagaggccgggactaccagaacgccatgcgggtgtggtccaacatccctggactgaaaagcaagcacgcacctctgacccctaaagaagaggagtacctgcaggcccaggtgcggagcagaagcaagctggacgcccctaaggtggatctgctggtgaagaattgcctcctgcccctgagagagtacttcaagtatttcagccagaatagtctgcccctgggcggcccaagcagcggcgcccctcctcccagcggcggcagcccagccggctccccaacctctaccgaggagggcacctctgagtccgccacccccgagagcggccctggcacctccaccgagcccagcgagggcagcgcacccggcagccctgccggcagccccacctccacagaggagggaaccagcaccgagcccagcgaaggcagcgccccaggcaccagcaccgagcctagtgagggcggctctggcggcggcagcgcccaggagattaaacggatcaacaagatcagaagaagacttgtgaaagacagcaacaccaagaaggccggcaagacaggccccatgaaaaccctgctggttagagtgatgacacccgatctgagagagcggctggaaaacctgagaaagaagcctgaaaatatcccccagcccatcagcaatacatctagagccaacctgaataagctgctgaccgattacaccgaaatgaagaaggcgatcctgcatgtgtactgggaagagttccagaaggaccctgtgggcctgatgagccgggtggcccagcctgccagcaagaagatcgatcagaacaagctgaaacctgagatggacgagaagggcaacctgaccaccgccggctttgcctgctctcagtgtggccagcccctgttcgtgtacaagctggagcaggtgtctgagaagggcaaggcttacaccaactacttcggacggtgcaatgtggccgagcacgaaaagctgatcctgctggcccagctgaagcccgagaaggatagcgacgaagccgtgacatatagcctgggaaagtttgggcagagggccctggatttctacagcattcatgtgaccaaggagtccacccaccccgtgaagcccctggcccagatcgccggaaacagatacgcctccggacctgtgggaaaggccctgagcgacgcatgtatgggcacaatcgcctccttcctgtctaagtaccaggacatcatcatcgaacaccagaaggtggtgaagggcaaccagaagagactggagagcctgcgggagctggccggcaaggaaaacctggaataccctagcgtgaccctgccacctcagcctcacaccaaggagggcgttgatgcctacaacgaagtgatcgcccgggtgcgaatgtgggtgaacctgaacctgtggcagaagctgaagctaagcagagatgatgccaagcctctgctgagactgaagggattcccttcctttcctctggtcgagagacaggccaacgaagtggactggtgggacatggtgtgtaacgtgaagaagctgatcaacgagaaaaaggaggatggcaaggtgttttggcagaatctggctggctacaagagacaggaagccctgagaccatacctgagcagcgaggaagatcggaagaagggaaagaaattcgctcggtaccagctgggcgacctgctgctgcacctggaaaagaagcacggcgaggactggggaaaggtgtacgacgaggcctgggagcggattgacaagaaagtggaaggcctgagcaagcacatcaagctggaagaggaacggagaagcgaggacgcccagagcaaggccgccctgaccgactggctgcgggctaaggccagcttcgtgatcgagggcctgaaggaggccgacaaggacgagttctgcagatgcgagctgaagctgcagaagtggtacggggacctgcggggaaagcccttcgccatcgaagccgagaacagcatcctggacatcagcggcttcagcaagcagtacaactgtgccttcatctggcagaaggacggcgtgaagaagctgaacctgtacctgatcatcaactacttcaagggcggcaagctgcggttcaagaagatcaaacctgaagccttcgaagccaacagattctacaccgtgatcaacaaaaagagcggcgagatcgtgcccatggaggtgaacttcaacttcgacgaccccaacctgatcatcctgcctctggcctttggcaagagacagggcagagaattcatctggaacgacctgctgtccctggaaaccggcagcctgaagctggccaacggaagagtgatcgagaagacactgtacaacagaagaacccggcaggatgagcctgccctgttcgtggccctgaccttcgagcggcgggaggtcctggactcctccaatatcaaaccaatgaacctgatcggcgtggcaagaggcgaaaacatccccgccgtgatcgccctgaccgaccccgagggctgcccactgagccggtttaaggatagcctgggaaacccaacccacatcctgagaatcggcgagagctataaggagaagcagcggaccatccaggccaagaaggaggtggagcagcggagagccggcggctacagccggaagtacgccagcaaagccaagaatctggcagacgatatggtgagaaacaccgctagagatctgctgtactacgccgtgacccaggatgccatgctgatcttcgccaacctgagccggggcttcggccggcagggcaagcggaccttcatggccgagagacagtacacacggatggaggactggctgaccgccaagctggcctacgagggcctgagcaagacctacctgtccaagacactggcccagtacacctccaagacatgcagcaactgtgggtttaccatcaccagcgccgactacgacagggtgctggagaagctgaagaagacagcaacaggctggatgaccacaattaacggcaaggagctgaaggtggagggccagattacctactacaacagatacaagagacagaacgtagtcaaggacctgtccgtcgagctggatagactgagcgaagaatctgtgaacaacgacatctcctcctggacaaagggcagaagcggagaagctctgagcctcctgaagaaaagattctcccatagacccgtgcaggagaagttcgtgtgcctgaactgcggcttcgagacacacgcagccgagcaagccgccctgaacatcgccagatcctggctgttcctgcggagccaggagtacaagaaataccagacaaacaagacaaccggcaacaccgataagagagccttcgtcgagacctggcagtccttttaccggaagaagcttaaggaggtgtggaaacctgccgtgcggtctggcggatctggcggaggctccacaagcgcccacggcagcctgatgttcagcgacgtgagcatcgtgttcagccaggaggagtgggagtgcctggacctggagcagagggacctgtacagggacgtgatgctggagaactacaccaacctggtgagcctgggctgcttcatcagcaagcccgacgtgatcagcctgctggagcagggcaaggagccctggaaggtggtgaggaagaggaggggccagtacgccgacctggagaccaggtacaccagccccaagaaaaagagaaaagtctaagctgccttctgcggggcttgccttctggccatgcccttcttctctcccttgcacctgtacctcttggtctttgaataaagcctgagtaggaaggctagcaaaaaaaaaaaaaaaaaaaaaaaaaaaaaaaaaaaaaaaaaaaaaaaaaaaaaaaaaaaaaaaaaaaaaaaaaaaaaaaa

SEQ ID NO: 5792 - RNA, 5797 nt, synthetic construct
  source 1..5797: mol_type = other RNA
aggaaataagagagaaaagaagagtaagaagaaatataagagccaccatggcccctaagaagaagcgtaaagtgagccggatggaacgcctcgtctacgaggtgcggcagaagtgcagaaacatcgaggacatctgcatctcctgcggatctctgaacgtgaccctggagcacccactgttcatcggcggcatgtgccagaactgtaaaaactgttttctggagtgtgcctatcaatacgacgatgacggctaccagagctactgcaccatctgttgcggcggaagagaggtgctgatgtgtggaaataacaactgctgccggtgcttctgcgtggaatgcgtggacctgctggtgggccccggcgccgcccaggccgctattaaggaagatccttggaactgctacatgtgcggccacaagggcacatacggcctgctgagacggagagaggactggcctagcagactgcagatgttcttcgccaataaccacgaccaggagttcgacccccctaaggtgtaccctcccgtccccgccgagaagagaaagcccatccgggtcctgagcctgttcgatggcatcgccaccggtctgctggtgctgaaggacctgggcatccaggtggataggtacattgcctccgaggtgtgcgaggactccatcaccgtgggaatggtgcgtcatcagggcaagatcatgtacgtgggcgacgtgcggagcgtgacacagaagcatatccaggagtggggccctttcgacctggtgatcggcggcagcccttgcaatgacctgagcatcgtgaacccagcccggaagggcctgtacgagggaaccggcagactgttcttcgagttttacagactgctgcacgacgcccggcctaaggaaggcgacgaccggcccttcttttggctgttcgagaatgtggtggccatgggagtcagcgacaagcgggatattagccggttcctggagagcaaccccgtgatgatcgatgccaaggaagtgagcgccgcccaccgggccagatacttctggggcaatctgcctggcatgaacagacccctggccagcaccgtgaacgacaagctggagctgcaggagtgcctggagcacggccggatcgccaagttcagcaaggtgagaaccatcaccacccgaagcaacagcatcaaacaaggcaaggaccagcactttcctgtgttcatgaacgagaaggaggacatcctgtggtgtaccgagatggagagagtgttcgggttcccagtccactacacagatgtcagcaacatgtctagactggccagacagagactgctgggaagaagctggtccgtccctgtgatcagacacctgttcgcccctctgaaggagtacttcgcctgcgtgagcagcggcaacagcaacgccaacagccggggccccagcttctctagcggcctggtgccactgtccctgagagggagccacatgggccccatggagatctacaaaaccgtgagcgcctggaagcggcagcctgtgcgcgtgctgagcctgtttcggaatatcgataaagtcctgaaaagcctgggattcctggagagcggctctggctccggcggtggcaccctgaagtacgtggaggatgtgacaaacgtggtcagacgggatgtggagaagtggggccccttcgatctggtgtacggcagcacccaacccctgggcagctcttgtgaccggtgccctggctggtacatgtttcagttccaccggatcctgcagtacgccctgccgagacaggagtcccagcggccattcttttggattttcatggacaacttgctgctgaccgaggatgaccaggaaactaccactcggttcctgcagaccgaagccgtgaccctgcaggacgtgagaggccgggactaccagaacgccatgcgggtgtggtccaacatccctggactgaaaagcaagcacgcacctctgacccctaaagaagaggagtacctgcaggcccaggtgcggagcagaagcaagctggacgcccctaaggtggatctgctggtgaagaattgcctcctgcccctgagagagtacttcaagtatttcagccagaatagtctgcccctgggcggcccaagcagcggcgcccctcctcccagcggcggcagcccagccggctccccaacctctaccgaggagggcacctctgagtccgccacccccgagagcggccctggcacctccaccgagcccagcgagggcagcgcacccggcagccctgccggcagccccacctccacagaggagggaaccagcaccgagcccagcgaaggcagcgccccaggcaccagcaccgagcctagtgagggcggctctggcggcggcagcgcccaggagattaaacggatcaacaagatcagaagaagacttgtgaaagacagcaacaccaagaaggccggcaagacaggccccatgaaaaccctgctggttagagtgatgacacccgatctgagagagcggctggaaaacctgagaaagaagcctgaaaatatcccccagcccatcagcaatacatctagagccaacctgaataagctgctgaccgattacaccgaaatgaagaaggcgatcctgcatgtgtactgggaagagttccagaaggaccctgtgggcctgatgagccgggtggcccagcctgccagcaagaagatcgatcagaacaagctgaaacctgagatggacgagaagggcaacctgaccaccgccggctttgcctgctctcagtgtggccagcccctgttcgtgtacaagctggagcaggtgtctgagaagggcaaggcttacaccaactacttcggacggtgcaatgtggccgagcacgaaaagctgatcctgctggcccagctgaagcccgagaaggatagcgacgaagccgtgacatatagcctgggaaagtttgggcagagggccctggatttctacagcattcatgtgaccaaggagtccacccaccccgtgaagcccctggcccagatcgccggaaacagatacgcctccggacctgtgggaaaggccctgagcgacgcatgtatgggcacaatcgcctccttcctgtctaagtaccaggacatcatcatcgaacaccagaaggtggtgaagggcaaccagaagagactggagagcctgcgggagctggccggcaaggaaaacctggaataccctagcgtgaccctgccacctcagcctcacaccaaggagggcgttgatgcctacaacgaagtgatcgcccgggtgcgaatgtgggtgaacctgaacctgtggcagaagctgaagctaagcagagatgatgccaagcctctgctgagactgaagggattcccttcctttcctctggtcgagagacaggccaacgaagtggactggtgggacatggtgtgtaacgtgaagaagctgatcaacgagaaaaaggaggatggcaaggtgttttggcagaatctggctggctacaagagacaggaagccctgagaccatacctgagcagcgaggaagatcggaagaagggaaagaaattcgctcggtaccagctgggcgacctgctgctgcacctggaaaagaagcacggcgaggactggggaaaggtgtacgacgaggcctgggagcggattgacaagaaagtggaaggcctgagcaagcacatcaagctggaagaggaacggagaagcgaggacgcccagagcaaggccgccctgaccgactggctgcgggctaaggccagcttcgtgatcgagggcctgaaggaggccgacaaggacgagttctgcagatgcgagctgaagctgcagaagtggtacggggacctgcggggaaagcccttcgccatcgaagccgagaacagcatcctggacatcagcggcttcagcaagcagtacaactgtgccttcatctggcagaaggacggcgtgaagaagctgaacctgtacctgatcatcaactacttcaagggcggcaagctgcggttcaagaagatcaaacctgaagccttcgaagccaacagattctacaccgtgatcaacaaaaagagcggcgagatcgtgcccatggaggtgaacttcaacttcgacgaccccaacctgatcatcctgcctctggcctttggcaagagacagggcagagaattcatctggaacgacctgctgtccctggaaaccggcagcctgaagctggccaacggaagagtgatcgagaagacactgtacaacagaagaacccggcaggatgagcctgccctgttcgtggccctgaccttcgagcggcgggaggtcctggactcctccaatatcaaaccaatgaacctgatcggcgtggcaagaggcgaaaacatccccgccgtgatcgccctgaccgaccccgagggctgcccactgagccggtttaaggatagcctgggaaacccaacccacatcctgagaatcggcgagagctataaggagaagcagcggaccatccaggccaagaaggaggtggagcagcggagagccggcggctacagccggaagtacgccagcaaagccaagaatctggcagacgatatggtgagaaacaccgctagagatctgctgtactacgccgtgacccaggatgccatgctgatcttcgccaacctgagccggggcttcggccggcagggcaagcggaccttcatggccgagagacagtacacacggatggaggactggctgaccgccaagctggcctacgagggcctgagcaagacctacctgtccaagacactggcccagtacacctccaagacatgcagcaactgtgggtttaccatcaccagcgccgactacgacagggtgctggagaagctgaagaagacagcaacaggctggatgaccacaattaacggcaaggagctgaaggtggagggccagattacctactacaacagatacaagagacagaacgtagtcaaggacctgtccgtcgagctggatagactgagcgaagaatctgtgaacaacgacatctcctcctggacaaagggcagaagcggagaagctctgagcctcctgaagaaaagattctcccatagacccgtgcaggagaagttcgtgtgcctgaactgcggcttcgagacacacgcagccgagcaagccgccctgaacatcgccagatcctggctgttcctgcggagccaggagtacaagaaataccagacaaacaagacaaccggcaacaccgataagagagccttcgtcgagacctggcagtccttttaccggaagaagcttaaggaggtgtggaaacctgccgtgcggtctggcggatctggcggaggctccacaagcagcaaggcccccgtgaccttcggcgacctggccatctacttcagccaggaggagtgggagtggctgagccccatccagaaggacctgtacgaggacgtgatgctggagaactacaggaacctggtgagcctgggcctgagcttcaggaggcccaacgtgatcaccctgctggagaagggcaaggccccctggatggtggagcccgtgaggaggaggagggcccccggctggaccaccatgatgaccagccccaagaaaaagagaaaagtctaagctgccttctgcggggcttgccttctggccatgcccttcttctctcccttgcacctgtacctcttggtctttgaataaagcctgagtaggaaggctagcaaaaaaaaaaaaaaaaaaaaaaaaaaaaaaaaaaaaaaaaaaaaaaaaaaaaaaaaaaaaaaaaaaaaaaaaaaaaaaaa

SEQ ID NO: 5793 - RNA, 5797 nt, synthetic construct
  source 1..5797: mol_type = other RNA
aggaaataagagagaaaagaagagtaagaagaaatataagagccaccatggcccctaagaagaagcgtaaagtgagccggatggaacgcctcgtctacgaggtgcggcagaagtgcagaaacatcgaggacatctgcatctcctgcggatctctgaacgtgaccctggagcacccactgttcatcggcggcatgtgccagaactgtaaaaactgttttctggagtgtgcctatcaatacgacgatgacggctaccagagctactgcaccatctgttgcggcggaagagaggtgctgatgtgtggaaataacaactgctgccggtgcttctgcgtggaatgcgtggacctgctggtgggccccggcgccgcccaggccgctattaaggaagatccttggaactgctacatgtgcggccacaagggcacatacggcctgctgagacggagagaggactggcctagcagactgcagatgttcttcgccaataaccacgaccaggagttcgacccccctaaggtgtaccctcccgtccccgccgagaagagaaagcccatccgggtcctgagcctgttcgatggcatcgccaccggtctgctggtgctgaaggacctgggcatccaggtggataggtacattgcctccgaggtgtgcgaggactccatcaccgtgggaatggtgcgtcatcagggcaagatcatgtacgtgggcgacgtgcggagcgtgacacagaagcatatccaggagtggggccctttcgacctggtgatcggcggcagcccttgcaatgacctgagcatcgtgaacccagcccggaagggcctgtacgagggaaccggcagactgttcttcgagttttacagactgctgcacgacgcccggcctaaggaaggcgacgaccggcccttcttttggctgttcgagaatgtggtggccatgggagtcagcgacaagcgggatattagccggttcctggagagcaaccccgtgatgatcgatgccaaggaagtgagcgccgcccaccgggccagatacttctggggcaatctgcctggcatgaacagacccctggccagcaccgtgaacgacaagctggagctgcaggagtgcctggagcacggccggatcgccaagttcagcaaggtgagaaccatcaccacccgaagcaacagcatcaaacaaggcaaggaccagcactttcctgtgttcatgaacgagaaggaggacatcctgtggtgtaccgagatggagagagtgttcgggttcccagtccactacacagatgtcagcaacatgtctagactggccagacagagactgctgggaagaagctggtccgtccctgtgatcagacacctgttcgcccctctgaaggagtacttcgcctgcgtgagcagcggcaacagcaacgccaacagccggggccccagcttctctagcggcctggtgccactgtccctgagagggagccacatgggccccatggagatctacaaaaccgtgagcgcctggaagcggcagcctgtgcgcgtgctgagcctgtttcggaatatcgataaagtcctgaaaagcctgggattcctggagagcggctctggctccggcggtggcaccctgaagtacgtggaggatgtgacaaacgtggtcagacgggatgtggagaagtggggccccttcgatctggtgtacggcagcacccaacccctgggcagctcttgtgaccggtgccctggctggtacatgtttcagttccaccggatcctgcagtacgccctgccgagacaggagtcccagcggccattcttttggattttcatggacaacttgctgctgaccgaggatgaccaggaaactaccactcggttcctgcagaccgaagccgtgaccctgcaggacgtgagaggccgggactaccagaacgccatgcgggtgtggtccaacatccctggactgaaaagcaagcacgcacctctgacccctaaagaagaggagtacctgcaggcccaggtgcggagcagaagcaagctggacgcccctaaggtggatctgctggtgaagaattgcctcctgcccctgagagagtacttcaagtatttcagccagaatagtctgcccctgggcggcccaagcagcggcgcccctcctcccagcggcggcagcccagccggctccccaacctctaccgaggagggcacctctgagtccgccacccccgagagcggccctggcacctccaccgagcccagcgagggcagcgcacccggcagccctgccggcagccccacctccacagaggagggaaccagcaccgagcccagcgaaggcagcgccccaggcaccagcaccgagcctagtgagggcggctctggcggcggcagcgcccaggagattaaacggatcaacaagatcagaagaagacttgtgaaagacagcaacaccaagaaggccggcaagacaggccccatgaaaaccctgctggttagagtgatgacacccgatctgagagagcggctggaaaacctgagaaagaagcctgaaaatatcccccagcccatcagcaatacatctagagccaacctgaataagctgctgaccgattacaccgaaatgaagaaggcgatcctgcatgtgtactgggaagagttccagaaggaccctgtgggcctgatgagccgggtggcccagcctgccagcaagaagatcgatcagaacaagctgaaacctgagatggacgagaagggcaacctgaccaccgccggctttgcctgctctcagtgtggccagcccctgttcgtgtacaagctggagcaggtgtctgagaagggcaaggcttacaccaactacttcggacggtgcaatgtggccgagcacgaaaagctgatcctgctggcccagctgaagcccgagaaggatagcgacgaagccgtgacatatagcctgggaaagtttgggcagagggccctggatttctacagcattcatgtgaccaaggagtccacccaccccgtgaagcccctggcccagatcgccggaaacagatacgcctccggacctgtgggaaaggccctgagcgacgcatgtatgggcacaatcgcctccttcctgtctaagtaccaggacatcatcatcgaacaccagaaggtggtgaagggcaaccagaagagactggagagcctgcgggagctggccggcaaggaaaacctggaataccctagcgtgaccctgccacctcagcctcacaccaaggagggcgttgatgcctacaacgaagtgatcgcccgggtgcgaatgtgggtgaacctgaacctgtggcagaagctgaagctaagcagagatgatgccaagcctctgctgagactgaagggattcccttcctttcctctggtcgagagacaggccaacgaagtggactggtgggacatggtgtgtaacgtgaagaagctgatcaacgagaaaaaggaggatggcaaggtgttttggcagaatctggctggctacaagagacaggaagccctgagaccatacctgagcagcgaggaagatcggaagaagggaaagaaattcgctcggtaccagctgggcgacctgctgctgcacctggaaaagaagcacggcgaggactggggaaaggtgtacgacgaggcctgggagcggattgacaagaaagtggaaggcctgagcaagcacatcaagctggaagaggaacggagaagcgaggacgcccagagcaaggccgccctgaccgactggctgcgggctaaggccagcttcgtgatcgagggcctgaaggaggccgacaaggacgagttctgcagatgcgagctgaagctgcagaagtggtacggggacctgcggggaaagcccttcgccatcgaagccgagaacagcatcctggacatcagcggcttcagcaagcagtacaactgtgccttcatctggcagaaggacggcgtgaagaagctgaacctgtacctgatcatcaactacttcaagggcggcaagctgcggttcaagaagatcaaacctgaagccttcgaagccaacagattctacaccgtgatcaacaaaaagagcggcgagatcgtgcccatggaggtgaacttcaacttcgacgaccccaacctgatcatcctgcctctggcctttggcaagagacagggcagagaattcatctggaacgacctgctgtccctggaaaccggcagcctgaagctggccaacggaagagtgatcgagaagacactgtacaacagaagaacccggcaggatgagcctgccctgttcgtggccctgaccttcgagcggcgggaggtcctggactcctccaatatcaaaccaatgaacctgatcggcgtggcaagaggcgaaaacatccccgccgtgatcgccctgaccgaccccgagggctgcccactgagccggtttaaggatagcctgggaaacccaacccacatcctgagaatcggcgagagctataaggagaagcagcggaccatccaggccaagaaggaggtggagcagcggagagccggcggctacagccggaagtacgccagcaaagccaagaatctggcagacgatatggtgagaaacaccgctagagatctgctgtactacgccgtgacccaggatgccatgctgatcttcgccaacctgagccggggcttcggccggcagggcaagcggaccttcatggccgagagacagtacacacggatggaggactggctgaccgccaagctggcctacgagggcctgagcaagacctacctgtccaagacactggcccagtacacctccaagacatgcagcaactgtgggtttaccatcaccagcgccgactacgacagggtgctggagaagctgaagaagacagcaacaggctggatgaccacaattaacggcaaggagctgaaggtggagggccagattacctactacaacagatacaagagacagaacgtagtcaaggacctgtccgtcgagctggatagactgagcgaagaatctgtgaacaacgacatctcctcctggacaaagggcagaagcggagaagctctgagcctcctgaagaaaagattctcccatagacccgtgcaggagaagttcgtgtgcctgaactgcggcttcgagacacacgcagccgagcaagccgccctgaacatcgccagatcctggctgttcctgcggagccaggagtacaagaaataccagacaaacaagacaaccggcaacaccgataagagagccttcgtcgagacctggcagtccttttaccggaagaagcttaaggaggtgtggaaacctgccgtgcggtctggcggatctggcggaggctccacaagcttccaggaggccgtgaccttcaaggacgtggccgtggtgttcaccgaggaggagctgggcctgctggaccccccccagaggaagctgtacagggaggtgatgctggagaacttcaggaacctggtgagcgtgggccacagcagcagcaagcccgacgtgatcagccagctggagagggaggagaagctgtgcgtgaaggagatccacacccagaggggcaggcacagcggcggcaggaaccagaccagccccaagaaaaagagaaaagtctaagctgccttctgcggggcttgccttctggccatgcccttcttctctcccttgcacctgtacctcttggtctttgaataaagcctgagtaggaaggctagcaaaaaaaaaaaaaaaaaaaaaaaaaaaaaaaaaaaaaaaaaaaaaaaaaaaaaaaaaaaaaaaaaaaaaaaaaaaaaaaa

SEQ ID NO: 5794 - RNA, 5797 nt, synthetic construct
  source 1..5797: mol_type = other RNA
aggaaataagagagaaaagaagagtaagaagaaatataagagccaccatggcccctaagaagaagcgtaaagtgagccggatggaacgcctcgtctacgaggtgcggcagaagtgcagaaacatcgaggacatctgcatctcctgcggatctctgaacgtgaccctggagcacccactgttcatcggcggcatgtgccagaactgtaaaaactgttttctggagtgtgcctatcaatacgacgatgacggctaccagagctactgcaccatctgttgcggcggaagagaggtgctgatgtgtggaaataacaactgctgccggtgcttctgcgtggaatgcgtggacctgctggtgggccccggcgccgcccaggccgctattaaggaagatccttggaactgctacatgtgcggccacaagggcacatacggcctgctgagacggagagaggactggcctagcagactgcagatgttcttcgccaataaccacgaccaggagttcgacccccctaaggtgtaccctcccgtccccgccgagaagagaaagcccatccgggtcctgagcctgttcgatggcatcgccaccggtctgctggtgctgaaggacctgggcatccaggtggataggtacattgcctccgaggtgtgcgaggactccatcaccgtgggaatggtgcgtcatcagggcaagatcatgtacgtgggcgacgtgcggagcgtgacacagaagcatatccaggagtggggccctttcgacctggtgatcggcggcagcccttgcaatgacctgagcatcgtgaacccagcccggaagggcctgtacgagggaaccggcagactgttcttcgagttttacagactgctgcacgacgcccggcctaaggaaggcgacgaccggcccttcttttggctgttcgagaatgtggtggccatgggagtcagcgacaagcgggatattagccggttcctggagagcaaccccgtgatgatcgatgccaaggaagtgagcgccgcccaccgggccagatacttctggggcaatctgcctggcatgaacagacccctggccagcaccgtgaacgacaagctggagctgcaggagtgcctggagcacggccggatcgccaagttcagcaaggtgagaaccatcaccacccgaagcaacagcatcaaacaaggcaaggaccagcactttcctgtgttcatgaacgagaaggaggacatcctgtggtgtaccgagatggagagagtgttcgggttcccagtccactacacagatgtcagcaacatgtctagactggccagacagagactgctgggaagaagctggtccgtccctgtgatcagacacctgttcgcccctctgaaggagtacttcgcctgcgtgagcagcggcaacagcaacgccaacagccggggccccagcttctctagcggcctggtgccactgtccctgagagggagccacatgggccccatggagatctacaaaaccgtgagcgcctggaagcggcagcctgtgcgcgtgctgagcctgtttcggaatatcgataaagtcctgaaaagcctgggattcctggagagcggctctggctccggcggtggcaccctgaagtacgtggaggatgtgacaaacgtggtcagacgggatgtggagaagtggggccccttcgatctggtgtacggcagcacccaacccctgggcagctcttgtgaccggtgccctggctggtacatgtttcagttccaccggatcctgcagtacgccctgccgagacaggagtcccagcggccattcttttggattttcatggacaacttgctgctgaccgaggatgaccaggaaactaccactcggttcctgcagaccgaagccgtgaccctgcaggacgtgagaggccgggactaccagaacgccatgcgggtgtggtccaacatccctggactgaaaagcaagcacgcacctctgacccctaaagaagaggagtacctgcaggcccaggtgcggagcagaagcaagctggacgcccctaaggtggatctgctggtgaagaattgcctcctgcccctgagagagtacttcaagtatttcagccagaatagtctgcccctgggcggcccaagcagcggcgcccctcctcccagcggcggcagcccagccggctccccaacctctaccgaggagggcacctctgagtccgccacccccgagagcggccctggcacctccaccgagcccagcgagggcagcgcacccggcagccctgccggcagccccacctccacagaggagggaaccagcaccgagcccagcgaaggcagcgccccaggcaccagcaccgagcctagtgagggcggctctggcggcggcagcgcccaggagattaaacggatcaacaagatcagaagaagacttgtgaaagacagcaacaccaagaaggccggcaagacaggccccatgaaaaccctgctggttagagtgatgacacccgatctgagagagcggctggaaaacctgagaaagaagcctgaaaatatcccccagcccatcagcaatacatctagagccaacctgaataagctgctgaccgattacaccgaaatgaagaaggcgatcctgcatgtgtactgggaagagttccagaaggaccctgtgggcctgatgagccgggtggcccagcctgccagcaagaagatcgatcagaacaagctgaaacctgagatggacgagaagggcaacctgaccaccgccggctttgcctgctctcagtgtggccagcccctgttcgtgtacaagctggagcaggtgtctgagaagggcaaggcttacaccaactacttcggacggtgcaatgtggccgagcacgaaaagctgatcctgctggcccagctgaagcccgagaaggatagcgacgaagccgtgacatatagcctgggaaagtttgggcagagggccctggatttctacagcattcatgtgaccaaggagtccacccaccccgtgaagcccctggcccagatcgccggaaacagatacgcctccggacctgtgggaaaggccctgagcgacgcatgtatgggcacaatcgcctccttcctgtctaagtaccaggacatcatcatcgaacaccagaaggtggtgaagggcaaccagaagagactggagagcctgcgggagctggccggcaaggaaaacctggaataccctagcgtgaccctgccacctcagcctcacaccaaggagggcgttgatgcctacaacgaagtgatcgcccgggtgcgaatgtgggtgaacctgaacctgtggcagaagctgaagctaagcagagatgatgccaagcctctgctgagactgaagggattcccttcctttcctctggtcgagagacaggccaacgaagtggactggtgggacatggtgtgtaacgtgaagaagctgatcaacgagaaaaaggaggatggcaaggtgttttggcagaatctggctggctacaagagacaggaagccctgagaccatacctgagcagcgaggaagatcggaagaagggaaagaaattcgctcggtaccagctgggcgacctgctgctgcacctggaaaagaagcacggcgaggactggggaaaggtgtacgacgaggcctgggagcggattgacaagaaagtggaaggcctgagcaagcacatcaagctggaagaggaacggagaagcgaggacgcccagagcaaggccgccctgaccgactggctgcgggctaaggccagcttcgtgatcgagggcctgaaggaggccgacaaggacgagttctgcagatgcgagctgaagctgcagaagtggtacggggacctgcggggaaagcccttcgccatcgaagccgagaacagcatcctggacatcagcggcttcagcaagcagtacaactgtgccttcatctggcagaaggacggcgtgaagaagctgaacctgtacctgatcatcaactacttcaagggcggcaagctgcggttcaagaagatcaaacctgaagccttcgaagccaacagattctacaccgtgatcaacaaaaagagcggcgagatcgtgcccatggaggtgaacttcaacttcgacgaccccaacctgatcatcctgcctctggcctttggcaagagacagggcagagaattcatctggaacgacctgctgtccctggaaaccggcagcctgaagctggccaacggaagagtgatcgagaagacactgtacaacagaagaacccggcaggatgagcctgccctgttcgtggccctgaccttcgagcggcgggaggtcctggactcctccaatatcaaaccaatgaacctgatcggcgtggcaagaggcgaaaacatccccgccgtgatcgccctgaccgaccccgagggctgcccactgagccggtttaaggatagcctgggaaacccaacccacatcctgagaatcggcgagagctataaggagaagcagcggaccatccaggccaagaaggaggtggagcagcggagagccggcggctacagccggaagtacgccagcaaagccaagaatctggcagacgatatggtgagaaacaccgctagagatctgctgtactacgccgtgacccaggatgccatgctgatcttcgccaacctgagccggggcttcggccggcagggcaagcggaccttcatggccgagagacagtacacacggatggaggactggctgaccgccaagctggcctacgagggcctgagcaagacctacctgtccaagacactggcccagtacacctccaagacatgcagcaactgtgggtttaccatcaccagcgccgactacgacagggtgctggagaagctgaagaagacagcaacaggctggatgaccacaattaacggcaaggagctgaaggtggagggccagattacctactacaacagatacaagagacagaacgtagtcaaggacctgtccgtcgagctggatagactgagcgaagaatctgtgaacaacgacatctcctcctggacaaagggcagaagcggagaagctctgagcctcctgaagaaaagattctcccatagacccgtgcaggagaagttcgtgtgcctgaactgcggcttcgagacacacgcagccgagcaagccgccctgaacatcgccagatcctggctgttcctgcggagccaggagtacaagaaataccagacaaacaagacaaccggcaacaccgataagagagccttcgtcgagacctggcagtccttttaccggaagaagcttaaggaggtgtggaaacctgccgtgcggtctggcggatctggcggaggctccacaagcaggcaggccttcctggccttcggcgacgtgaccgtggacttcacccagaaggagtggaggctgctgagccccgcccagagggccctgtacagggaggtgaccctggagaactacagccacctggtgagcctgggcatcctgcacagcaagcccgagctgatcaggaggctggagcagggcgaggtgccctggggcgaggagaggaggaggaggcccggcccctgcgccggcatctacgccgagaccagccccaagaaaaagagaaaagtctaagctgccttctgcggggcttgccttctggccatgcccttcttctctcccttgcacctgtacctcttggtctttgaataaagcctgagtaggaaggctagcaaaaaaaaaaaaaaaaaaaaaaaaaaaaaaaaaaaaaaaaaaaaaaaaaaaaaaaaaaaaaaaaaaaaaaaaaaaaaaaa

SEQ ID NO: 5795 - RNA, 5797 nt, synthetic construct
  source 1..5797: mol_type = other RNA
aggaaataagagagaaaagaagagtaagaagaaatataagagccaccatggcccctaagaagaagcgtaaagtgagccggatggaacgcctcgtctacgaggtgcggcagaagtgcagaaacatcgaggacatctgcatctcctgcggatctctgaacgtgaccctggagcacccactgttcatcggcggcatgtgccagaactgtaaaaactgttttctggagtgtgcctatcaatacgacgatgacggctaccagagctactgcaccatctgttgcggcggaagagaggtgctgatgtgtggaaataacaactgctgccggtgcttctgcgtggaatgcgtggacctgctggtgggccccggcgccgcccaggccgctattaaggaagatccttggaactgctacatgtgcggccacaagggcacatacggcctgctgagacggagagaggactggcctagcagactgcagatgttcttcgccaataaccacgaccaggagttcgacccccctaaggtgtaccctcccgtccccgccgagaagagaaagcccatccgggtcctgagcctgttcgatggcatcgccaccggtctgctggtgctgaaggacctgggcatccaggtggataggtacattgcctccgaggtgtgcgaggactccatcaccgtgggaatggtgcgtcatcagggcaagatcatgtacgtgggcgacgtgcggagcgtgacacagaagcatatccaggagtggggccctttcgacctggtgatcggcggcagcccttgcaatgacctgagcatcgtgaacccagcccggaagggcctgtacgagggaaccggcagactgttcttcgagttttacagactgctgcacgacgcccggcctaaggaaggcgacgaccggcccttcttttggctgttcgagaatgtggtggccatgggagtcagcgacaagcgggatattagccggttcctggagagcaaccccgtgatgatcgatgccaaggaagtgagcgccgcccaccgggccagatacttctggggcaatctgcctggcatgaacagacccctggccagcaccgtgaacgacaagctggagctgcaggagtgcctggagcacggccggatcgccaagttcagcaaggtgagaaccatcaccacccgaagcaacagcatcaaacaaggcaaggaccagcactttcctgtgttcatgaacgagaaggaggacatcctgtggtgtaccgagatggagagagtgttcgggttcccagtccactacacagatgtcagcaacatgtctagactggccagacagagactgctgggaagaagctggtccgtccctgtgatcagacacctgttcgcccctctgaaggagtacttcgcctgcgtgagcagcggcaacagcaacgccaacagccggggccccagcttctctagcggcctggtgccactgtccctgagagggagccacatgggccccatggagatctacaaaaccgtgagcgcctggaagcggcagcctgtgcgcgtgctgagcctgtttcggaatatcgataaagtcctgaaaagcctgggattcctggagagcggctctggctccggcggtggcaccctgaagtacgtggaggatgtgacaaacgtggtcagacgggatgtggagaagtggggccccttcgatctggtgtacggcagcacccaacccctgggcagctcttgtgaccggtgccctggctggtacatgtttcagttccaccggatcctgcagtacgccctgccgagacaggagtcccagcggccattcttttggattttcatggacaacttgctgctgaccgaggatgaccaggaaactaccactcggttcctgcagaccgaagccgtgaccctgcaggacgtgagaggccgggactaccagaacgccatgcgggtgtggtccaacatccctggactgaaaagcaagcacgcacctctgacccctaaagaagaggagtacctgcaggcccaggtgcggagcagaagcaagctggacgcccctaaggtggatctgctggtgaagaattgcctcctgcccctgagagagtacttcaagtatttcagccagaatagtctgcccctgggcggcccaagcagcggcgcccctcctcccagcggcggcagcccagccggctccccaacctctaccgaggagggcacctctgagtccgccacccccgagagcggccctggcacctccaccgagcccagcgagggcagcgcacccggcagccctgccggcagccccacctccacagaggagggaaccagcaccgagcccagcgaaggcagcgccccaggcaccagcaccgagcctagtgagggcggctctggcggcggcagcgcccaggagattaaacggatcaacaagatcagaagaagacttgtgaaagacagcaacaccaagaaggccggcaagacaggccccatgaaaaccctgctggttagagtgatgacacccgatctgagagagcggctggaaaacctgagaaagaagcctgaaaatatcccccagcccatcagcaatacatctagagccaacctgaataagctgctgaccgattacaccgaaatgaagaaggcgatcctgcatgtgtactgggaagagttccagaaggaccctgtgggcctgatgagccgggtggcccagcctgccagcaagaagatcgatcagaacaagctgaaacctgagatggacgagaagggcaacctgaccaccgccggctttgcctgctctcagtgtggccagcccctgttcgtgtacaagctggagcaggtgtctgagaagggcaaggcttacaccaactacttcggacggtgcaatgtggccgagcacgaaaagctgatcctgctggcccagctgaagcccgagaaggatagcgacgaagccgtgacatatagcctgggaaagtttgggcagagggccctggatttctacagcattcatgtgaccaaggagtccacccaccccgtgaagcccctggcccagatcgccggaaacagatacgcctccggacctgtgggaaaggccctgagcgacgcatgtatgggcacaatcgcctccttcctgtctaagtaccaggacatcatcatcgaacaccagaaggtggtgaagggcaaccagaagagactggagagcctgcgggagctggccggcaaggaaaacctggaataccctagcgtgaccctgccacctcagcctcacaccaaggagggcgttgatgcctacaacgaagtgatcgcccgggtgcgaatgtgggtgaacctgaacctgtggcagaagctgaagctaagcagagatgatgccaagcctctgctgagactgaagggattcccttcctttcctctggtcgagagacaggccaacgaagtggactggtgggacatggtgtgtaacgtgaagaagctgatcaacgagaaaaaggaggatggcaaggtgttttggcagaatctggctggctacaagagacaggaagccctgagaccatacctgagcagcgaggaagatcggaagaagggaaagaaattcgctcggtaccagctgggcgacctgctgctgcacctggaaaagaagcacggcgaggactggggaaaggtgtacgacgaggcctgggagcggattgacaagaaagtggaaggcctgagcaagcacatcaagctggaagaggaacggagaagcgaggacgcccagagcaaggccgccctgaccgactggctgcgggctaaggccagcttcgtgatcgagggcctgaaggaggccgacaaggacgagttctgcagatgcgagctgaagctgcagaagtggtacggggacctgcggggaaagcccttcgccatcgaagccgagaacagcatcctggacatcagcggcttcagcaagcagtacaactgtgccttcatctggcagaaggacggcgtgaagaagctgaacctgtacctgatcatcaactacttcaagggcggcaagctgcggttcaagaagatcaaacctgaagccttcgaagccaacagattctacaccgtgatcaacaaaaagagcggcgagatcgtgcccatggaggtgaacttcaacttcgacgaccccaacctgatcatcctgcctctggcctttggcaagagacagggcagagaattcatctggaacgacctgctgtccctggaaaccggcagcctgaagctggccaacggaagagtgatcgagaagacactgtacaacagaagaacccggcaggatgagcctgccctgttcgtggccctgaccttcgagcggcgggaggtcctggactcctccaatatcaaaccaatgaacctgatcggcgtggcaagaggcgaaaacatccccgccgtgatcgccctgaccgaccccgagggctgcccactgagccggtttaaggatagcctgggaaacccaacccacatcctgagaatcggcgagagctataaggagaagcagcggaccatccaggccaagaaggaggtggagcagcggagagccggcggctacagccggaagtacgccagcaaagccaagaatctggcagacgatatggtgagaaacaccgctagagatctgctgtactacgccgtgacccaggatgccatgctgatcttcgccaacctgagccggggcttcggccggcagggcaagcggaccttcatggccgagagacagtacacacggatggaggactggctgaccgccaagctggcctacgagggcctgagcaagacctacctgtccaagacactggcccagtacacctccaagacatgcagcaactgtgggtttaccatcaccagcgccgactacgacagggtgctggagaagctgaagaagacagcaacaggctggatgaccacaattaacggcaaggagctgaaggtggagggccagattacctactacaacagatacaagagacagaacgtagtcaaggacctgtccgtcgagctggatagactgagcgaagaatctgtgaacaacgacatctcctcctggacaaagggcagaagcggagaagctctgagcctcctgaagaaaagattctcccatagacccgtgcaggagaagttcgtgtgcctgaactgcggcttcgagacacacgcagccgagcaagccgccctgaacatcgccagatcctggctgttcctgcggagccaggagtacaagaaataccagacaaacaagacaaccggcaacaccgataagagagccttcgtcgagacctggcagtccttttaccggaagaagcttaaggaggtgtggaaacctgccgtgcggtctggcggatctggcggaggctccacaagcccccaggagagcgtgaccttcaaggacgtggccgtggacttcacctgggaggagtggggctacctggacaccagccagaaggagctgtaccaggaggtgatgctggagaactacaggaacctggtgagcctgggcttcgtggtggccaagcccgacgtgatcagccagctggagcagggcgaggccccctggaggcccgagggcaggttccccaggagcaggcaccccgacagcgacaccaggaccagccccaagaaaaagagaaaagtctaagctgccttctgcggggcttgccttctggccatgcccttcttctctcccttgcacctgtacctcttggtctttgaataaagcctgagtaggaaggctagcaaaaaaaaaaaaaaaaaaaaaaaaaaaaaaaaaaaaaaaaaaaaaaaaaaaaaaaaaaaaaaaaaaaaaaaaaaaaaaaa

SEQ ID NO: 5796 - RNA, 5797 nt, synthetic construct
  source 1..5797: mol_type = other RNA
aggaaataagagagaaaagaagagtaagaagaaatataagagccaccatggcccctaagaagaagcgtaaagtgagccggatggaacgcctcgtctacgaggtgcggcagaagtgcagaaacatcgaggacatctgcatctcctgcggatctctgaacgtgaccctggagcacccactgttcatcggcggcatgtgccagaactgtaaaaactgttttctggagtgtgcctatcaatacgacgatgacggctaccagagctactgcaccatctgttgcggcggaagagaggtgctgatgtgtggaaataacaactgctgccggtgcttctgcgtggaatgcgtggacctgctggtgggccccggcgccgcccaggccgctattaaggaagatccttggaactgctacatgtgcggccacaagggcacatacggcctgctgagacggagagaggactggcctagcagactgcagatgttcttcgccaataaccacgaccaggagttcgacccccctaaggtgtaccctcccgtccccgccgagaagagaaagcccatccgggtcctgagcctgttcgatggcatcgccaccggtctgctggtgctgaaggacctgggcatccaggtggataggtacattgcctccgaggtgtgcgaggactccatcaccgtgggaatggtgcgtcatcagggcaagatcatgtacgtgggcgacgtgcggagcgtgacacagaagcatatccaggagtggggccctttcgacctggtgatcggcggcagcccttgcaatgacctgagcatcgtgaacccagcccggaagggcctgtacgagggaaccggcagactgttcttcgagttttacagactgctgcacgacgcccggcctaaggaaggcgacgaccggcccttcttttggctgttcgagaatgtggtggccatgggagtcagcgacaagcgggatattagccggttcctggagagcaaccccgtgatgatcgatgccaaggaagtgagcgccgcccaccgggccagatacttctggggcaatctgcctggcatgaacagacccctggccagcaccgtgaacgacaagctggagctgcaggagtgcctggagcacggccggatcgccaagttcagcaaggtgagaaccatcaccacccgaagcaacagcatcaaacaaggcaaggaccagcactttcctgtgttcatgaacgagaaggaggacatcctgtggtgtaccgagatggagagagtgttcgggttcccagtccactacacagatgtcagcaacatgtctagactggccagacagagactgctgggaagaagctggtccgtccctgtgatcagacacctgttcgcccctctgaaggagtacttcgcctgcgtgagcagcggcaacagcaacgccaacagccggggccccagcttctctagcggcctggtgccactgtccctgagagggagccacatgggccccatggagatctacaaaaccgtgagcgcctggaagcggcagcctgtgcgcgtgctgagcctgtttcggaatatcgataaagtcctgaaaagcctgggattcctggagagcggctctggctccggcggtggcaccctgaagtacgtggaggatgtgacaaacgtggtcagacgggatgtggagaagtggggccccttcgatctggtgtacggcagcacccaacccctgggcagctcttgtgaccggtgccctggctggtacatgtttcagttccaccggatcctgcagtacgccctgccgagacaggagtcccagcggccattcttttggattttcatggacaacttgctgctgaccgaggatgaccaggaaactaccactcggttcctgcagaccgaagccgtgaccctgcaggacgtgagaggccgggactaccagaacgccatgcgggtgtggtccaacatccctggactgaaaagcaagcacgcacctctgacccctaaagaagaggagtacctgcaggcccaggtgcggagcagaagcaagctggacgcccctaaggtggatctgctggtgaagaattgcctcctgcccctgagagagtacttcaagtatttcagccagaatagtctgcccctgggcggcccaagcagcggcgcccctcctcccagcggcggcagcccagccggctccccaacctctaccgaggagggcacctctgagtccgccacccccgagagcggccctggcacctccaccgagcccagcgagggcagcgcacccggcagccctgccggcagccccacctccacagaggagggaaccagcaccgagcccagcgaaggcagcgccccaggcaccagcaccgagcctagtgagggcggctctggcggcggcagcgcccaggagattaaacggatcaacaagatcagaagaagacttgtgaaagacagcaacaccaagaaggccggcaagacaggccccatgaaaaccctgctggttagagtgatgacacccgatctgagagagcggctggaaaacctgagaaagaagcctgaaaatatcccccagcccatcagcaatacatctagagccaacctgaataagctgctgaccgattacaccgaaatgaagaaggcgatcctgcatgtgtactgggaagagttccagaaggaccctgtgggcctgatgagccgggtggcccagcctgccagcaagaagatcgatcagaacaagctgaaacctgagatggacgagaagggcaacctgaccaccgccggctttgcctgctctcagtgtggccagcccctgttcgtgtacaagctggagcaggtgtctgagaagggcaaggcttacaccaactacttcggacggtgcaatgtggccgagcacgaaaagctgatcctgctggcccagctgaagcccgagaaggatagcgacgaagccgtgacatatagcctgggaaagtttgggcagagggccctggatttctacagcattcatgtgaccaaggagtccacccaccccgtgaagcccctggcccagatcgccggaaacagatacgcctccggacctgtgggaaaggccctgagcgacgcatgtatgggcacaatcgcctccttcctgtctaagtaccaggacatcatcatcgaacaccagaaggtggtgaagggcaaccagaagagactggagagcctgcgggagctggccggcaaggaaaacctggaataccctagcgtgaccctgccacctcagcctcacaccaaggagggcgttgatgcctacaacgaagtgatcgcccgggtgcgaatgtgggtgaacctgaacctgtggcagaagctgaagctaagcagagatgatgccaagcctctgctgagactgaagggattcccttcctttcctctggtcgagagacaggccaacgaagtggactggtgggacatggtgtgtaacgtgaagaagctgatcaacgagaaaaaggaggatggcaaggtgttttggcagaatctggctggctacaagagacaggaagccctgagaccatacctgagcagcgaggaagatcggaagaagggaaagaaattcgctcggtaccagctgggcgacctgctgctgcacctggaaaagaagcacggcgaggactggggaaaggtgtacgacgaggcctgggagcggattgacaagaaagtggaaggcctgagcaagcacatcaagctggaagaggaacggagaagcgaggacgcccagagcaaggccgccctgaccgactggctgcgggctaaggccagcttcgtgatcgagggcctgaaggaggccgacaaggacgagttctgcagatgcgagctgaagctgcagaagtggtacggggacctgcggggaaagcccttcgccatcgaagccgagaacagcatcctggacatcagcggcttcagcaagcagtacaactgtgccttcatctggcagaaggacggcgtgaagaagctgaacctgtacctgatcatcaactacttcaagggcggcaagctgcggttcaagaagatcaaacctgaagccttcgaagccaacagattctacaccgtgatcaacaaaaagagcggcgagatcgtgcccatggaggtgaacttcaacttcgacgaccccaacctgatcatcctgcctctggcctttggcaagagacagggcagagaattcatctggaacgacctgctgtccctggaaaccggcagcctgaagctggccaacggaagagtgatcgagaagacactgtacaacagaagaacccggcaggatgagcctgccctgttcgtggccctgaccttcgagcggcgggaggtcctggactcctccaatatcaaaccaatgaacctgatcggcgtggcaagaggcgaaaacatccccgccgtgatcgccctgaccgaccccgagggctgcccactgagccggtttaaggatagcctgggaaacccaacccacatcctgagaatcggcgagagctataaggagaagcagcggaccatccaggccaagaaggaggtggagcagcggagagccggcggctacagccggaagtacgccagcaaagccaagaatctggcagacgatatggtgagaaacaccgctagagatctgctgtactacgccgtgacccaggatgccatgctgatcttcgccaacctgagccggggcttcggccggcagggcaagcggaccttcatggccgagagacagtacacacggatggaggactggctgaccgccaagctggcctacgagggcctgagcaagacctacctgtccaagacactggcccagtacacctccaagacatgcagcaactgtgggtttaccatcaccagcgccgactacgacagggtgctggagaagctgaagaagacagcaacaggctggatgaccacaattaacggcaaggagctgaaggtggagggccagattacctactacaacagatacaagagacagaacgtagtcaaggacctgtccgtcgagctggatagactgagcgaagaatctgtgaacaacgacatctcctcctggacaaagggcagaagcggagaagctctgagcctcctgaagaaaagattctcccatagacccgtgcaggagaagttcgtgtgcctgaactgcggcttcgagacacacgcagccgagcaagccgccctgaacatcgccagatcctggctgttcctgcggagccaggagtacaagaaataccagacaaacaagacaaccggcaacaccgataagagagccttcgtcgagacctggcagtccttttaccggaagaagcttaaggaggtgtggaaacctgccgtgcggtctggcggatctggcggaggctccacaagcccccagaagctggtgaccttcgaggacgtggccgtgtacttcacccccaccgagtgggacggcctgagccccgcccagagggccctgtacagggacgtgatgctggagaactacggcaacgtggccagcctgggcttccccatcctgaagcccgccgtgatcagccagctggagggcggcggcgagctgggcatccccagcctgctggccgccggcgtgggcagcgacccccccggcctgtggaccagccccaagaaaaagagaaaagtctaagctgccttctgcggggcttgccttctggccatgcccttcttctctcccttgcacctgtacctcttggtctttgaataaagcctgagtaggaaggctagcaaaaaaaaaaaaaaaaaaaaaaaaaaaaaaaaaaaaaaaaaaaaaaaaaaaaaaaaaaaaaaaaaaaaaaaaaaaaaaaa

SEQ ID NO: 5797 - RNA, 5797 nt, synthetic construct
  source 1..5797: mol_type = other RNA
aggaaataagagagaaaagaagagtaagaagaaatataagagccaccatggcccctaagaagaagcgtaaagtgagccggatggaacgcctcgtctacgaggtgcggcagaagtgcagaaacatcgaggacatctgcatctcctgcggatctctgaacgtgaccctggagcacccactgttcatcggcggcatgtgccagaactgtaaaaactgttttctggagtgtgcctatcaatacgacgatgacggctaccagagctactgcaccatctgttgcggcggaagagaggtgctgatgtgtggaaataacaactgctgccggtgcttctgcgtggaatgcgtggacctgctggtgggccccggcgccgcccaggccgctattaaggaagatccttggaactgctacatgtgcggccacaagggcacatacggcctgctgagacggagagaggactggcctagcagactgcagatgttcttcgccaataaccacgaccaggagttcgacccccctaaggtgtaccctcccgtccccgccgagaagagaaagcccatccgggtcctgagcctgttcgatggcatcgccaccggtctgctggtgctgaaggacctgggcatccaggtggataggtacattgcctccgaggtgtgcgaggactccatcaccgtgggaatggtgcgtcatcagggcaagatcatgtacgtgggcgacgtgcggagcgtgacacagaagcatatccaggagtggggccctttcgacctggtgatcggcggcagcccttgcaatgacctgagcatcgtgaacccagcccggaagggcctgtacgagggaaccggcagactgttcttcgagttttacagactgctgcacgacgcccggcctaaggaaggcgacgaccggcccttcttttggctgttcgagaatgtggtggccatgggagtcagcgacaagcgggatattagccggttcctggagagcaaccccgtgatgatcgatgccaaggaagtgagcgccgcccaccgggccagatacttctggggcaatctgcctggcatgaacagacccctggccagcaccgtgaacgacaagctggagctgcaggagtgcctggagcacggccggatcgccaagttcagcaaggtgagaaccatcaccacccgaagcaacagcatcaaacaaggcaaggaccagcactttcctgtgttcatgaacgagaaggaggacatcctgtggtgtaccgagatggagagagtgttcgggttcccagtccactacacagatgtcagcaacatgtctagactggccagacagagactgctgggaagaagctggtccgtccctgtgatcagacacctgttcgcccctctgaaggagtacttcgcctgcgtgagcagcggcaacagcaacgccaacagccggggccccagcttctctagcggcctggtgccactgtccctgagagggagccacatgggccccatggagatctacaaaaccgtgagcgcctggaagcggcagcctgtgcgcgtgctgagcctgtttcggaatatcgataaagtcctgaaaagcctgggattcctggagagcggctctggctccggcggtggcaccctgaagtacgtggaggatgtgacaaacgtggtcagacgggatgtggagaagtggggccccttcgatctggtgtacggcagcacccaacccctgggcagctcttgtgaccggtgccctggctggtacatgtttcagttccaccggatcctgcagtacgccctgccgagacaggagtcccagcggccattcttttggattttcatggacaacttgctgctgaccgaggatgaccaggaaactaccactcggttcctgcagaccgaagccgtgaccctgcaggacgtgagaggccgggactaccagaacgccatgcgggtgtggtccaacatccctggactgaaaagcaagcacgcacctctgacccctaaagaagaggagtacctgcaggcccaggtgcggagcagaagcaagctggacgcccctaaggtggatctgctggtgaagaattgcctcctgcccctgagagagtacttcaagtatttcagccagaatagtctgcccctgggcggcccaagcagcggcgcccctcctcccagcggcggcagcccagccggctccccaacctctaccgaggagggcacctctgagtccgccacccccgagagcggccctggcacctccaccgagcccagcgagggcagcgcacccggcagccctgccggcagccccacctccacagaggagggaaccagcaccgagcccagcgaaggcagcgccccaggcaccagcaccgagcctagtgagggcggctctggcggcggcagcgcccaggagattaaacggatcaacaagatcagaagaagacttgtgaaagacagcaacaccaagaaggccggcaagacaggccccatgaaaaccctgctggttagagtgatgacacccgatctgagagagcggctggaaaacctgagaaagaagcctgaaaatatcccccagcccatcagcaatacatctagagccaacctgaataagctgctgaccgattacaccgaaatgaagaaggcgatcctgcatgtgtactgggaagagttccagaaggaccctgtgggcctgatgagccgggtggcccagcctgccagcaagaagatcgatcagaacaagctgaaacctgagatggacgagaagggcaacctgaccaccgccggctttgcctgctctcagtgtggccagcccctgttcgtgtacaagctggagcaggtgtctgagaagggcaaggcttacaccaactacttcggacggtgcaatgtggccgagcacgaaaagctgatcctgctggcccagctgaagcccgagaaggatagcgacgaagccgtgacatatagcctgggaaagtttgggcagagggccctggatttctacagcattcatgtgaccaaggagtccacccaccccgtgaagcccctggcccagatcgccggaaacagatacgcctccggacctgtgggaaaggccctgagcgacgcatgtatgggcacaatcgcctccttcctgtctaagtaccaggacatcatcatcgaacaccagaaggtggtgaagggcaaccagaagagactggagagcctgcgggagctggccggcaaggaaaacctggaataccctagcgtgaccctgccacctcagcctcacaccaaggagggcgttgatgcctacaacgaagtgatcgcccgggtgcgaatgtgggtgaacctgaacctgtggcagaagctgaagctaagcagagatgatgccaagcctctgctgagactgaagggattcccttcctttcctctggtcgagagacaggccaacgaagtggactggtgggacatggtgtgtaacgtgaagaagctgatcaacgagaaaaaggaggatggcaaggtgttttggcagaatctggctggctacaagagacaggaagccctgagaccatacctgagcagcgaggaagatcggaagaagggaaagaaattcgctcggtaccagctgggcgacctgctgctgcacctggaaaagaagcacggcgaggactggggaaaggtgtacgacgaggcctgggagcggattgacaagaaagtggaaggcctgagcaagcacatcaagctggaagaggaacggagaagcgaggacgcccagagcaaggccgccctgaccgactggctgcgggctaaggccagcttcgtgatcgagggcctgaaggaggccgacaaggacgagttctgcagatgcgagctgaagctgcagaagtggtacggggacctgcggggaaagcccttcgccatcgaagccgagaacagcatcctggacatcagcggcttcagcaagcagtacaactgtgccttcatctggcagaaggacggcgtgaagaagctgaacctgtacctgatcatcaactacttcaagggcggcaagctgcggttcaagaagatcaaacctgaagccttcgaagccaacagattctacaccgtgatcaacaaaaagagcggcgagatcgtgcccatggaggtgaacttcaacttcgacgaccccaacctgatcatcctgcctctggcctttggcaagagacagggcagagaattcatctggaacgacctgctgtccctggaaaccggcagcctgaagctggccaacggaagagtgatcgagaagacactgtacaacagaagaacccggcaggatgagcctgccctgttcgtggccctgaccttcgagcggcgggaggtcctggactcctccaatatcaaaccaatgaacctgatcggcgtggcaagaggcgaaaacatccccgccgtgatcgccctgaccgaccccgagggctgcccactgagccggtttaaggatagcctgggaaacccaacccacatcctgagaatcggcgagagctataaggagaagcagcggaccatccaggccaagaaggaggtggagcagcggagagccggcggctacagccggaagtacgccagcaaagccaagaatctggcagacgatatggtgagaaacaccgctagagatctgctgtactacgccgtgacccaggatgccatgctgatcttcgccaacctgagccggggcttcggccggcagggcaagcggaccttcatggccgagagacagtacacacggatggaggactggctgaccgccaagctggcctacgagggcctgagcaagacctacctgtccaagacactggcccagtacacctccaagacatgcagcaactgtgggtttaccatcaccagcgccgactacgacagggtgctggagaagctgaagaagacagcaacaggctggatgaccacaattaacggcaaggagctgaaggtggagggccagattacctactacaacagatacaagagacagaacgtagtcaaggacctgtccgtcgagctggatagactgagcgaagaatctgtgaacaacgacatctcctcctggacaaagggcagaagcggagaagctctgagcctcctgaagaaaagattctcccatagacccgtgcaggagaagttcgtgtgcctgaactgcggcttcgagacacacgcagccgagcaagccgccctgaacatcgccagatcctggctgttcctgcggagccaggagtacaagaaataccagacaaacaagacaaccggcaacaccgataagagagccttcgtcgagacctggcagtccttttaccggaagaagcttaaggaggtgtggaaacctgccgtgcggtctggcggatctggcggaggctccacaagcatggacagcgtggccttcgaggacgtggccgtgaacttcacccaggaggagtgggccctgctggaccccagccagaagaacctgtacagggaggtgatgcaggagaccgtgaggaacctggccagcatcggcaagaagtggaacaaccagtacatcgaggacgagcaccagaaccccaggaagaacctgaggaggctgatcggcgagaggctgagcgagagcaaggagagccaccagcacggcaccagccccaagaaaaagagaaaagtctaagctgccttctgcggggcttgccttctggccatgcccttcttctctcccttgcacctgtacctcttggtctttgaataaagcctgagtaggaaggctagcaaaaaaaaaaaaaaaaaaaaaaaaaaaaaaaaaaaaaaaaaaaaaaaaaaaaaaaaaaaaaaaaaaaaaaaaaaaaaaaa

SEQ ID NO: 5798 - RNA, 5797 nt, synthetic construct
  source 1..5797: mol_type = other RNA
aggaaataagagagaaaagaagagtaagaagaaatataagagccaccatggcccctaagaagaagcgtaaagtgagccggatggaacgcctcgtctacgaggtgcggcagaagtgcagaaacatcgaggacatctgcatctcctgcggatctctgaacgtgaccctggagcacccactgttcatcggcggcatgtgccagaactgtaaaaactgttttctggagtgtgcctatcaatacgacgatgacggctaccagagctactgcaccatctgttgcggcggaagagaggtgctgatgtgtggaaataacaactgctgccggtgcttctgcgtggaatgcgtggacctgctggtgggccccggcgccgcccaggccgctattaaggaagatccttggaactgctacatgtgcggccacaagggcacatacggcctgctgagacggagagaggactggcctagcagactgcagatgttcttcgccaataaccacgaccaggagttcgacccccctaaggtgtaccctcccgtccccgccgagaagagaaagcccatccgggtcctgagcctgttcgatggcatcgccaccggtctgctggtgctgaaggacctgggcatccaggtggataggtacattgcctccgaggtgtgcgaggactccatcaccgtgggaatggtgcgtcatcagggcaagatcatgtacgtgggcgacgtgcggagcgtgacacagaagcatatccaggagtggggccctttcgacctggtgatcggcggcagcccttgcaatgacctgagcatcgtgaacccagcccggaagggcctgtacgagggaaccggcagactgttcttcgagttttacagactgctgcacgacgcccggcctaaggaaggcgacgaccggcccttcttttggctgttcgagaatgtggtggccatgggagtcagcgacaagcgggatattagccggttcctggagagcaaccccgtgatgatcgatgccaaggaagtgagcgccgcccaccgggccagatacttctggggcaatctgcctggcatgaacagacccctggccagcaccgtgaacgacaagctggagctgcaggagtgcctggagcacggccggatcgccaagttcagcaaggtgagaaccatcaccacccgaagcaacagcatcaaacaaggcaaggaccagcactttcctgtgttcatgaacgagaaggaggacatcctgtggtgtaccgagatggagagagtgttcgggttcccagtccactacacagatgtcagcaacatgtctagactggccagacagagactgctgggaagaagctggtccgtccctgtgatcagacacctgttcgcccctctgaaggagtacttcgcctgcgtgagcagcggcaacagcaacgccaacagccggggccccagcttctctagcggcctggtgccactgtccctgagagggagccacatgggccccatggagatctacaaaaccgtgagcgcctggaagcggcagcctgtgcgcgtgctgagcctgtttcggaatatcgataaagtcctgaaaagcctgggattcctggagagcggctctggctccggcggtggcaccctgaagtacgtggaggatgtgacaaacgtggtcagacgggatgtggagaagtggggccccttcgatctggtgtacggcagcacccaacccctgggcagctcttgtgaccggtgccctggctggtacatgtttcagttccaccggatcctgcagtacgccctgccgagacaggagtcccagcggccattcttttggattttcatggacaacttgctgctgaccgaggatgaccaggaaactaccactcggttcctgcagaccgaagccgtgaccctgcaggacgtgagaggccgggactaccagaacgccatgcgggtgtggtccaacatccctggactgaaaagcaagcacgcacctctgacccctaaagaagaggagtacctgcaggcccaggtgcggagcagaagcaagctggacgcccctaaggtggatctgctggtgaagaattgcctcctgcccctgagagagtacttcaagtatttcagccagaatagtctgcccctgggcggcccaagcagcggcgcccctcctcccagcggcggcagcccagccggctccccaacctctaccgaggagggcacctctgagtccgccacccccgagagcggccctggcacctccaccgagcccagcgagggcagcgcacccggcagccctgccggcagccccacctccacagaggagggaaccagcaccgagcccagcgaaggcagcgccccaggcaccagcaccgagcctagtgagggcggctctggcggcggcagcgcccaggagattaaacggatcaacaagatcagaagaagacttgtgaaagacagcaacaccaagaaggccggcaagacaggccccatgaaaaccctgctggttagagtgatgacacccgatctgagagagcggctggaaaacctgagaaagaagcctgaaaatatcccccagcccatcagcaatacatctagagccaacctgaataagctgctgaccgattacaccgaaatgaagaaggcgatcctgcatgtgtactgggaagagttccagaaggaccctgtgggcctgatgagccgggtggcccagcctgccagcaagaagatcgatcagaacaagctgaaacctgagatggacgagaagggcaacctgaccaccgccggctttgcctgctctcagtgtggccagcccctgttcgtgtacaagctggagcaggtgtctgagaagggcaaggcttacaccaactacttcggacggtgcaatgtggccgagcacgaaaagctgatcctgctggcccagctgaagcccgagaaggatagcgacgaagccgtgacatatagcctgggaaagtttgggcagagggccctggatttctacagcattcatgtgaccaaggagtccacccaccccgtgaagcccctggcccagatcgccggaaacagatacgcctccggacctgtgggaaaggccctgagcgacgcatgtatgggcacaatcgcctccttcctgtctaagtaccaggacatcatcatcgaacaccagaaggtggtgaagggcaaccagaagagactggagagcctgcgggagctggccggcaaggaaaacctggaataccctagcgtgaccctgccacctcagcctcacaccaaggagggcgttgatgcctacaacgaagtgatcgcccgggtgcgaatgtgggtgaacctgaacctgtggcagaagctgaagctaagcagagatgatgccaagcctctgctgagactgaagggattcccttcctttcctctggtcgagagacaggccaacgaagtggactggtgggacatggtgtgtaacgtgaagaagctgatcaacgagaaaaaggaggatggcaaggtgttttggcagaatctggctggctacaagagacaggaagccctgagaccatacctgagcagcgaggaagatcggaagaagggaaagaaattcgctcggtaccagctgggcgacctgctgctgcacctggaaaagaagcacggcgaggactggggaaaggtgtacgacgaggcctgggagcggattgacaagaaagtggaaggcctgagcaagcacatcaagctggaagaggaacggagaagcgaggacgcccagagcaaggccgccctgaccgactggctgcgggctaaggccagcttcgtgatcgagggcctgaaggaggccgacaaggacgagttctgcagatgcgagctgaagctgcagaagtggtacggggacctgcggggaaagcccttcgccatcgaagccgagaacagcatcctggacatcagcggcttcagcaagcagtacaactgtgccttcatctggcagaaggacggcgtgaagaagctgaacctgtacctgatcatcaactacttcaagggcggcaagctgcggttcaagaagatcaaacctgaagccttcgaagccaacagattctacaccgtgatcaacaaaaagagcggcgagatcgtgcccatggaggtgaacttcaacttcgacgaccccaacctgatcatcctgcctctggcctttggcaagagacagggcagagaattcatctggaacgacctgctgtccctggaaaccggcagcctgaagctggccaacggaagagtgatcgagaagacactgtacaacagaagaacccggcaggatgagcctgccctgttcgtggccctgaccttcgagcggcgggaggtcctggactcctccaatatcaaaccaatgaacctgatcggcgtggcaagaggcgaaaacatccccgccgtgatcgccctgaccgaccccgagggctgcccactgagccggtttaaggatagcctgggaaacccaacccacatcctgagaatcggcgagagctataaggagaagcagcggaccatccaggccaagaaggaggtggagcagcggagagccggcggctacagccggaagtacgccagcaaagccaagaatctggcagacgatatggtgagaaacaccgctagagatctgctgtactacgccgtgacccaggatgccatgctgatcttcgccaacctgagccggggcttcggccggcagggcaagcggaccttcatggccgagagacagtacacacggatggaggactggctgaccgccaagctggcctacgagggcctgagcaagacctacctgtccaagacactggcccagtacacctccaagacatgcagcaactgtgggtttaccatcaccagcgccgactacgacagggtgctggagaagctgaagaagacagcaacaggctggatgaccacaattaacggcaaggagctgaaggtggagggccagattacctactacaacagatacaagagacagaacgtagtcaaggacctgtccgtcgagctggatagactgagcgaagaatctgtgaacaacgacatctcctcctggacaaagggcagaagcggagaagctctgagcctcctgaagaaaagattctcccatagacccgtgcaggagaagttcgtgtgcctgaactgcggcttcgagacacacgcagccgagcaagccgccctgaacatcgccagatcctggctgttcctgcggagccaggagtacaagaaataccagacaaacaagacaaccggcaacaccgataagagagccttcgtcgagacctggcagtccttttaccggaagaagcttaaggaggtgtggaaacctgccgtgcggtctggcggatctggcggaggctccacaagcatgcacctgaccgcctggccccagaagagcgtgaccttcgaggacgtggccgtgtacttcacccaggccgagtgggacggcctgagccccgcccagaggaccctgtacagggacgtgatgctggagaactacggcaacgtggccagcctgggcttccccctgctgaagcccgccgtgatcagccagctggagggcggcggcgagctgggcggccccagccccctggccgccggcaggggcctgaccagccccaagaaaaagagaaaagtctaagctgccttctgcggggcttgccttctggccatgcccttcttctctcccttgcacctgtacctcttggtctttgaataaagcctgagtaggaaggctagcaaaaaaaaaaaaaaaaaaaaaaaaaaaaaaaaaaaaaaaaaaaaaaaaaaaaaaaaaaaaaaaaaaaaaaaaaaaaaaaa

SEQ ID NO: 5799 - RNA, 5797 nt, synthetic construct
  source 1..5797: mol_type = other RNA
aggaaataagagagaaaagaagagtaagaagaaatataagagccaccatggcccctaagaagaagcgtaaagtgagccggatggaacgcctcgtctacgaggtgcggcagaagtgcagaaacatcgaggacatctgcatctcctgcggatctctgaacgtgaccctggagcacccactgttcatcggcggcatgtgccagaactgtaaaaactgttttctggagtgtgcctatcaatacgacgatgacggctaccagagctactgcaccatctgttgcggcggaagagaggtgctgatgtgtggaaataacaactgctgccggtgcttctgcgtggaatgcgtggacctgctggtgggccccggcgccgcccaggccgctattaaggaagatccttggaactgctacatgtgcggccacaagggcacatacggcctgctgagacggagagaggactggcctagcagactgcagatgttcttcgccaataaccacgaccaggagttcgacccccctaaggtgtaccctcccgtccccgccgagaagagaaagcccatccgggtcctgagcctgttcgatggcatcgccaccggtctgctggtgctgaaggacctgggcatccaggtggataggtacattgcctccgaggtgtgcgaggactccatcaccgtgggaatggtgcgtcatcagggcaagatcatgtacgtgggcgacgtgcggagcgtgacacagaagcatatccaggagtggggccctttcgacctggtgatcggcggcagcccttgcaatgacctgagcatcgtgaacccagcccggaagggcctgtacgagggaaccggcagactgttcttcgagttttacagactgctgcacgacgcccggcctaaggaaggcgacgaccggcccttcttttggctgttcgagaatgtggtggccatgggagtcagcgacaagcgggatattagccggttcctggagagcaaccccgtgatgatcgatgccaaggaagtgagcgccgcccaccgggccagatacttctggggcaatctgcctggcatgaacagacccctggccagcaccgtgaacgacaagctggagctgcaggagtgcctggagcacggccggatcgccaagttcagcaaggtgagaaccatcaccacccgaagcaacagcatcaaacaaggcaaggaccagcactttcctgtgttcatgaacgagaaggaggacatcctgtggtgtaccgagatggagagagtgttcgggttcccagtccactacacagatgtcagcaacatgtctagactggccagacagagactgctgggaagaagctggtccgtccctgtgatcagacacctgttcgcccctctgaaggagtacttcgcctgcgtgagcagcggcaacagcaacgccaacagccggggccccagcttctctagcggcctggtgccactgtccctgagagggagccacatgggccccatggagatctacaaaaccgtgagcgcctggaagcggcagcctgtgcgcgtgctgagcctgtttcggaatatcgataaagtcctgaaaagcctgggattcctggagagcggctctggctccggcggtggcaccctgaagtacgtggaggatgtgacaaacgtggtcagacgggatgtggagaagtggggccccttcgatctggtgtacggcagcacccaacccctgggcagctcttgtgaccggtgccctggctggtacatgtttcagttccaccggatcctgcagtacgccctgccgagacaggagtcccagcggccattcttttggattttcatggacaacttgctgctgaccgaggatgaccaggaaactaccactcggttcctgcagaccgaagccgtgaccctgcaggacgtgagaggccgggactaccagaacgccatgcgggtgtggtccaacatccctggactgaaaagcaagcacgcacctctgacccctaaagaagaggagtacctgcaggcccaggtgcggagcagaagcaagctggacgcccctaaggtggatctgctggtgaagaattgcctcctgcccctgagagagtacttcaagtatttcagccagaatagtctgcccctgggcggcccaagcagcggcgcccctcctcccagcggcggcagcccagccggctccccaacctctaccgaggagggcacctctgagtccgccacccccgagagcggccctggcacctccaccgagcccagcgagggcagcgcacccggcagccctgccggcagccccacctccacagaggagggaaccagcaccgagcccagcgaaggcagcgccccaggcaccagcaccgagcctagtgagggcggctctggcggcggcagcgcccaggagattaaacggatcaacaagatcagaagaagacttgtgaaagacagcaacaccaagaaggccggcaagacaggccccatgaaaaccctgctggttagagtgatgacacccgatctgagagagcggctggaaaacctgagaaagaagcctgaaaatatcccccagcccatcagcaatacatctagagccaacctgaataagctgctgaccgattacaccgaaatgaagaaggcgatcctgcatgtgtactgggaagagttccagaaggaccctgtgggcctgatgagccgggtggcccagcctgccagcaagaagatcgatcagaacaagctgaaacctgagatggacgagaagggcaacctgaccaccgccggctttgcctgctctcagtgtggccagcccctgttcgtgtacaagctggagcaggtgtctgagaagggcaaggcttacaccaactacttcggacggtgcaatgtggccgagcacgaaaagctgatcctgctggcccagctgaagcccgagaaggatagcgacgaagccgtgacatatagcctgggaaagtttgggcagagggccctggatttctacagcattcatgtgaccaaggagtccacccaccccgtgaagcccctggcccagatcgccggaaacagatacgcctccggacctgtgggaaaggccctgagcgacgcatgtatgggcacaatcgcctccttcctgtctaagtaccaggacatcatcatcgaacaccagaaggtggtgaagggcaaccagaagagactggagagcctgcgggagctggccggcaaggaaaacctggaataccctagcgtgaccctgccacctcagcctcacaccaaggagggcgttgatgcctacaacgaagtgatcgcccgggtgcgaatgtgggtgaacctgaacctgtggcagaagctgaagctaagcagagatgatgccaagcctctgctgagactgaagggattcccttcctttcctctggtcgagagacaggccaacgaagtggactggtgggacatggtgtgtaacgtgaagaagctgatcaacgagaaaaaggaggatggcaaggtgttttggcagaatctggctggctacaagagacaggaagccctgagaccatacctgagcagcgaggaagatcggaagaagggaaagaaattcgctcggtaccagctgggcgacctgctgctgcacctggaaaagaagcacggcgaggactggggaaaggtgtacgacgaggcctgggagcggattgacaagaaagtggaaggcctgagcaagcacatcaagctggaagaggaacggagaagcgaggacgcccagagcaaggccgccctgaccgactggctgcgggctaaggccagcttcgtgatcgagggcctgaaggaggccgacaaggacgagttctgcagatgcgagctgaagctgcagaagtggtacggggacctgcggggaaagcccttcgccatcgaagccgagaacagcatcctggacatcagcggcttcagcaagcagtacaactgtgccttcatctggcagaaggacggcgtgaagaagctgaacctgtacctgatcatcaactacttcaagggcggcaagctgcggttcaagaagatcaaacctgaagccttcgaagccaacagattctacaccgtgatcaacaaaaagagcggcgagatcgtgcccatggaggtgaacttcaacttcgacgaccccaacctgatcatcctgcctctggcctttggcaagagacagggcagagaattcatctggaacgacctgctgtccctggaaaccggcagcctgaagctggccaacggaagagtgatcgagaagacactgtacaacagaagaacccggcaggatgagcctgccctgttcgtggccctgaccttcgagcggcgggaggtcctggactcctccaatatcaaaccaatgaacctgatcggcgtggcaagaggcgaaaacatccccgccgtgatcgccctgaccgaccccgagggctgcccactgagccggtttaaggatagcctgggaaacccaacccacatcctgagaatcggcgagagctataaggagaagcagcggaccatccaggccaagaaggaggtggagcagcggagagccggcggctacagccggaagtacgccagcaaagccaagaatctggcagacgatatggtgagaaacaccgctagagatctgctgtactacgccgtgacccaggatgccatgctgatcttcgccaacctgagccggggcttcggccggcagggcaagcggaccttcatggccgagagacagtacacacggatggaggactggctgaccgccaagctggcctacgagggcctgagcaagacctacctgtccaagacactggcccagtacacctccaagacatgcagcaactgtgggtttaccatcaccagcgccgactacgacagggtgctggagaagctgaagaagacagcaacaggctggatgaccacaattaacggcaaggagctgaaggtggagggccagattacctactacaacagatacaagagacagaacgtagtcaaggacctgtccgtcgagctggatagactgagcgaagaatctgtgaacaacgacatctcctcctggacaaagggcagaagcggagaagctctgagcctcctgaagaaaagattctcccatagacccgtgcaggagaagttcgtgtgcctgaactgcggcttcgagacacacgcagccgagcaagccgccctgaacatcgccagatcctggctgttcctgcggagccaggagtacaagaaataccagacaaacaagacaaccggcaacaccgataagagagccttcgtcgagacctggcagtccttttaccggaagaagcttaaggaggtgtggaaacctgccgtgcggtctggcggatctggcggaggctccacaagcaccgagaacgccgtgacctacgacgacgtgcacgtgggcttcacctgggaggagtgggccctgctggaccccagccagaagaacctgtacaaggacgtgatgctggacacctacaggaacctgaccaccatcggctacagctgggagggccacaacatcgaggagcacttccagagcagcaggaggcacgagaggcacaagaggagcgacaccggcgagaacagcagcgtgtacacccagtgcaccagccccaagaaaaagagaaaagtctaagctgccttctgcggggcttgccttctggccatgcccttcttctctcccttgcacctgtacctcttggtctttgaataaagcctgagtaggaaggctagcaaaaaaaaaaaaaaaaaaaaaaaaaaaaaaaaaaaaaaaaaaaaaaaaaaaaaaaaaaaaaaaaaaaaaaaaaaaaaaaa

SEQ ID NO: 5800 - RNA, 5797 nt, synthetic construct
  source 1..5797: mol_type = other RNA
aggaaataagagagaaaagaagagtaagaagaaatataagagccaccatggcccctaagaagaagcgtaaagtgagccggatggaacgcctcgtctacgaggtgcggcagaagtgcagaaacatcgaggacatctgcatctcctgcggatctctgaacgtgaccctggagcacccactgttcatcggcggcatgtgccagaactgtaaaaactgttttctggagtgtgcctatcaatacgacgatgacggctaccagagctactgcaccatctgttgcggcggaagagaggtgctgatgtgtggaaataacaactgctgccggtgcttctgcgtggaatgcgtggacctgctggtgggccccggcgccgcccaggccgctattaaggaagatccttggaactgctacatgtgcggccacaagggcacatacggcctgctgagacggagagaggactggcctagcagactgcagatgttcttcgccaataaccacgaccaggagttcgacccccctaaggtgtaccctcccgtccccgccgagaagagaaagcccatccgggtcctgagcctgttcgatggcatcgccaccggtctgctggtgctgaaggacctgggcatccaggtggataggtacattgcctccgaggtgtgcgaggactccatcaccgtgggaatggtgcgtcatcagggcaagatcatgtacgtgggcgacgtgcggagcgtgacacagaagcatatccaggagtggggccctttcgacctggtgatcggcggcagcccttgcaatgacctgagcatcgtgaacccagcccggaagggcctgtacgagggaaccggcagactgttcttcgagttttacagactgctgcacgacgcccggcctaaggaaggcgacgaccggcccttcttttggctgttcgagaatgtggtggccatgggagtcagcgacaagcgggatattagccggttcctggagagcaaccccgtgatgatcgatgccaaggaagtgagcgccgcccaccgggccagatacttctggggcaatctgcctggcatgaacagacccctggccagcaccgtgaacgacaagctggagctgcaggagtgcctggagcacggccggatcgccaagttcagcaaggtgagaaccatcaccacccgaagcaacagcatcaaacaaggcaaggaccagcactttcctgtgttcatgaacgagaaggaggacatcctgtggtgtaccgagatggagagagtgttcgggttcccagtccactacacagatgtcagcaacatgtctagactggccagacagagactgctgggaagaagctggtccgtccctgtgatcagacacctgttcgcccctctgaaggagtacttcgcctgcgtgagcagcggcaacagcaacgccaacagccggggccccagcttctctagcggcctggtgccactgtccctgagagggagccacatgggccccatggagatctacaaaaccgtgagcgcctggaagcggcagcctgtgcgcgtgctgagcctgtttcggaatatcgataaagtcctgaaaagcctgggattcctggagagcggctctggctccggcggtggcaccctgaagtacgtggaggatgtgacaaacgtggtcagacgggatgtggagaagtggggccccttcgatctggtgtacggcagcacccaacccctgggcagctcttgtgaccggtgccctggctggtacatgtttcagttccaccggatcctgcagtacgccctgccgagacaggagtcccagcggccattcttttggattttcatggacaacttgctgctgaccgaggatgaccaggaaactaccactcggttcctgcagaccgaagccgtgaccctgcaggacgtgagaggccgggactaccagaacgccatgcgggtgtggtccaacatccctggactgaaaagcaagcacgcacctctgacccctaaagaagaggagtacctgcaggcccaggtgcggagcagaagcaagctggacgcccctaaggtggatctgctggtgaagaattgcctcctgcccctgagagagtacttcaagtatttcagccagaatagtctgcccctgggcggcccaagcagcggcgcccctcctcccagcggcggcagcccagccggctccccaacctctaccgaggagggcacctctgagtccgccacccccgagagcggccctggcacctccaccgagcccagcgagggcagcgcacccggcagccctgccggcagccccacctccacagaggagggaaccagcaccgagcccagcgaaggcagcgccccaggcaccagcaccgagcctagtgagggcggctctggcggcggcagcgcccaggagattaaacggatcaacaagatcagaagaagacttgtgaaagacagcaacaccaagaaggccggcaagacaggccccatgaaaaccctgctggttagagtgatgacacccgatctgagagagcggctggaaaacctgagaaagaagcctgaaaatatcccccagcccatcagcaatacatctagagccaacctgaataagctgctgaccgattacaccgaaatgaagaaggcgatcctgcatgtgtactgggaagagttccagaaggaccctgtgggcctgatgagccgggtggcccagcctgccagcaagaagatcgatcagaacaagctgaaacctgagatggacgagaagggcaacctgaccaccgccggctttgcctgctctcagtgtggccagcccctgttcgtgtacaagctggagcaggtgtctgagaagggcaaggcttacaccaactacttcggacggtgcaatgtggccgagcacgaaaagctgatcctgctggcccagctgaagcccgagaaggatagcgacgaagccgtgacatatagcctgggaaagtttgggcagagggccctggatttctacagcattcatgtgaccaaggagtccacccaccccgtgaagcccctggcccagatcgccggaaacagatacgcctccggacctgtgggaaaggccctgagcgacgcatgtatgggcacaatcgcctccttcctgtctaagtaccaggacatcatcatcgaacaccagaaggtggtgaagggcaaccagaagagactggagagcctgcgggagctggccggcaaggaaaacctggaataccctagcgtgaccctgccacctcagcctcacaccaaggagggcgttgatgcctacaacgaagtgatcgcccgggtgcgaatgtgggtgaacctgaacctgtggcagaagctgaagctaagcagagatgatgccaagcctctgctgagactgaagggattcccttcctttcctctggtcgagagacaggccaacgaagtggactggtgggacatggtgtgtaacgtgaagaagctgatcaacgagaaaaaggaggatggcaaggtgttttggcagaatctggctggctacaagagacaggaagccctgagaccatacctgagcagcgaggaagatcggaagaagggaaagaaattcgctcggtaccagctgggcgacctgctgctgcacctggaaaagaagcacggcgaggactggggaaaggtgtacgacgaggcctgggagcggattgacaagaaagtggaaggcctgagcaagcacatcaagctggaagaggaacggagaagcgaggacgcccagagcaaggccgccctgaccgactggctgcgggctaaggccagcttcgtgatcgagggcctgaaggaggccgacaaggacgagttctgcagatgcgagctgaagctgcagaagtggtacggggacctgcggggaaagcccttcgccatcgaagccgagaacagcatcctggacatcagcggcttcagcaagcagtacaactgtgccttcatctggcagaaggacggcgtgaagaagctgaacctgtacctgatcatcaactacttcaagggcggcaagctgcggttcaagaagatcaaacctgaagccttcgaagccaacagattctacaccgtgatcaacaaaaagagcggcgagatcgtgcccatggaggtgaacttcaacttcgacgaccccaacctgatcatcctgcctctggcctttggcaagagacagggcagagaattcatctggaacgacctgctgtccctggaaaccggcagcctgaagctggccaacggaagagtgatcgagaagacactgtacaacagaagaacccggcaggatgagcctgccctgttcgtggccctgaccttcgagcggcgggaggtcctggactcctccaatatcaaaccaatgaacctgatcggcgtggcaagaggcgaaaacatccccgccgtgatcgccctgaccgaccccgagggctgcccactgagccggtttaaggatagcctgggaaacccaacccacatcctgagaatcggcgagagctataaggagaagcagcggaccatccaggccaagaaggaggtggagcagcggagagccggcggctacagccggaagtacgccagcaaagccaagaatctggcagacgatatggtgagaaacaccgctagagatctgctgtactacgccgtgacccaggatgccatgctgatcttcgccaacctgagccggggcttcggccggcagggcaagcggaccttcatggccgagagacagtacacacggatggaggactggctgaccgccaagctggcctacgagggcctgagcaagacctacctgtccaagacactggcccagtacacctccaagacatgcagcaactgtgggtttaccatcaccagcgccgactacgacagggtgctggagaagctgaagaagacagcaacaggctggatgaccacaattaacggcaaggagctgaaggtggagggccagattacctactacaacagatacaagagacagaacgtagtcaaggacctgtccgtcgagctggatagactgagcgaagaatctgtgaacaacgacatctcctcctggacaaagggcagaagcggagaagctctgagcctcctgaagaaaagattctcccatagacccgtgcaggagaagttcgtgtgcctgaactgcggcttcgagacacacgcagccgagcaagccgccctgaacatcgccagatcctggctgttcctgcggagccaggagtacaagaaataccagacaaacaagacaaccggcaacaccgataagagagccttcgtcgagacctggcagtccttttaccggaagaagcttaaggaggtgtggaaacctgccgtgcggtctggcggatctggcggaggctccacaagcagccagggcctggtgaccttcggcgacgtggccgtggacttcagccaggaggagtgggagtggctgaaccccatccagaggaacctgtacaggaaggtgatgctggagaactacaggaacctggcctggctgggcctgtgcgtgagcaagcccgacgtgatcagcagcctggagcagggcaaggagccctggaccgtgaagaggaagatgaccagggcctggtgccccgacctgaaggccgtgaccagccccaagaaaaagagaaaagtctaagctgccttctgcggggcttgccttctggccatgcccttcttctctcccttgcacctgtacctcttggtctttgaataaagcctgagtaggaaggctagcaaaaaaaaaaaaaaaaaaaaaaaaaaaaaaaaaaaaaaaaaaaaaaaaaaaaaaaaaaaaaaaaaaaaaaaaaaaaaaaa

SEQ ID NO: 5801 - RNA, 5797 nt, synthetic construct
  source 1..5797: mol_type = other RNA
aggaaataagagagaaaagaagagtaagaagaaatataagagccaccatggcccctaagaagaagcgtaaagtgagccggatggaacgcctcgtctacgaggtgcggcagaagtgcagaaacatcgaggacatctgcatctcctgcggatctctgaacgtgaccctggagcacccactgttcatcggcggcatgtgccagaactgtaaaaactgttttctggagtgtgcctatcaatacgacgatgacggctaccagagctactgcaccatctgttgcggcggaagagaggtgctgatgtgtggaaataacaactgctgccggtgcttctgcgtggaatgcgtggacctgctggtgggccccggcgccgcccaggccgctattaaggaagatccttggaactgctacatgtgcggccacaagggcacatacggcctgctgagacggagagaggactggcctagcagactgcagatgttcttcgccaataaccacgaccaggagttcgacccccctaaggtgtaccctcccgtccccgccgagaagagaaagcccatccgggtcctgagcctgttcgatggcatcgccaccggtctgctggtgctgaaggacctgggcatccaggtggataggtacattgcctccgaggtgtgcgaggactccatcaccgtgggaatggtgcgtcatcagggcaagatcatgtacgtgggcgacgtgcggagcgtgacacagaagcatatccaggagtggggccctttcgacctggtgatcggcggcagcccttgcaatgacctgagcatcgtgaacccagcccggaagggcctgtacgagggaaccggcagactgttcttcgagttttacagactgctgcacgacgcccggcctaaggaaggcgacgaccggcccttcttttggctgttcgagaatgtggtggccatgggagtcagcgacaagcgggatattagccggttcctggagagcaaccccgtgatgatcgatgccaaggaagtgagcgccgcccaccgggccagatacttctggggcaatctgcctggcatgaacagacccctggccagcaccgtgaacgacaagctggagctgcaggagtgcctggagcacggccggatcgccaagttcagcaaggtgagaaccatcaccacccgaagcaacagcatcaaacaaggcaaggaccagcactttcctgtgttcatgaacgagaaggaggacatcctgtggtgtaccgagatggagagagtgttcgggttcccagtccactacacagatgtcagcaacatgtctagactggccagacagagactgctgggaagaagctggtccgtccctgtgatcagacacctgttcgcccctctgaaggagtacttcgcctgcgtgagcagcggcaacagcaacgccaacagccggggccccagcttctctagcggcctggtgccactgtccctgagagggagccacatgggccccatggagatctacaaaaccgtgagcgcctggaagcggcagcctgtgcgcgtgctgagcctgtttcggaatatcgataaagtcctgaaaagcctgggattcctggagagcggctctggctccggcggtggcaccctgaagtacgtggaggatgtgacaaacgtggtcagacgggatgtggagaagtggggccccttcgatctggtgtacggcagcacccaacccctgggcagctcttgtgaccggtgccctggctggtacatgtttcagttccaccggatcctgcagtacgccctgccgagacaggagtcccagcggccattcttttggattttcatggacaacttgctgctgaccgaggatgaccaggaaactaccactcggttcctgcagaccgaagccgtgaccctgcaggacgtgagaggccgggactaccagaacgccatgcgggtgtggtccaacatccctggactgaaaagcaagcacgcacctctgacccctaaagaagaggagtacctgcaggcccaggtgcggagcagaagcaagctggacgcccctaaggtggatctgctggtgaagaattgcctcctgcccctgagagagtacttcaagtatttcagccagaatagtctgcccctgggcggcccaagcagcggcgcccctcctcccagcggcggcagcccagccggctccccaacctctaccgaggagggcacctctgagtccgccacccccgagagcggccctggcacctccaccgagcccagcgagggcagcgcacccggcagccctgccggcagccccacctccacagaggagggaaccagcaccgagcccagcgaaggcagcgccccaggcaccagcaccgagcctagtgagggcggctctggcggcggcagcgcccaggagattaaacggatcaacaagatcagaagaagacttgtgaaagacagcaacaccaagaaggccggcaagacaggccccatgaaaaccctgctggttagagtgatgacacccgatctgagagagcggctggaaaacctgagaaagaagcctgaaaatatcccccagcccatcagcaatacatctagagccaacctgaataagctgctgaccgattacaccgaaatgaagaaggcgatcctgcatgtgtactgggaagagttccagaaggaccctgtgggcctgatgagccgggtggcccagcctgccagcaagaagatcgatcagaacaagctgaaacctgagatggacgagaagggcaacctgaccaccgccggctttgcctgctctcagtgtggccagcccctgttcgtgtacaagctggagcaggtgtctgagaagggcaaggcttacaccaactacttcggacggtgcaatgtggccgagcacgaaaagctgatcctgctggcccagctgaagcccgagaaggatagcgacgaagccgtgacatatagcctgggaaagtttgggcagagggccctggatttctacagcattcatgtgaccaaggagtccacccaccccgtgaagcccctggcccagatcgccggaaacagatacgcctccggacctgtgggaaaggccctgagcgacgcatgtatgggcacaatcgcctccttcctgtctaagtaccaggacatcatcatcgaacaccagaaggtggtgaagggcaaccagaagagactggagagcctgcgggagctggccggcaaggaaaacctggaataccctagcgtgaccctgccacctcagcctcacaccaaggagggcgttgatgcctacaacgaagtgatcgcccgggtgcgaatgtgggtgaacctgaacctgtggcagaagctgaagctaagcagagatgatgccaagcctctgctgagactgaagggattcccttcctttcctctggtcgagagacaggccaacgaagtggactggtgggacatggtgtgtaacgtgaagaagctgatcaacgagaaaaaggaggatggcaaggtgttttggcagaatctggctggctacaagagacaggaagccctgagaccatacctgagcagcgaggaagatcggaagaagggaaagaaattcgctcggtaccagctgggcgacctgctgctgcacctggaaaagaagcacggcgaggactggggaaaggtgtacgacgaggcctgggagcggattgacaagaaagtggaaggcctgagcaagcacatcaagctggaagaggaacggagaagcgaggacgcccagagcaaggccgccctgaccgactggctgcgggctaaggccagcttcgtgatcgagggcctgaaggaggccgacaaggacgagttctgcagatgcgagctgaagctgcagaagtggtacggggacctgcggggaaagcccttcgccatcgaagccgagaacagcatcctggacatcagcggcttcagcaagcagtacaactgtgccttcatctggcagaaggacggcgtgaagaagctgaacctgtacctgatcatcaactacttcaagggcggcaagctgcggttcaagaagatcaaacctgaagccttcgaagccaacagattctacaccgtgatcaacaaaaagagcggcgagatcgtgcccatggaggtgaacttcaacttcgacgaccccaacctgatcatcctgcctctggcctttggcaagagacagggcagagaattcatctggaacgacctgctgtccctggaaaccggcagcctgaagctggccaacggaagagtgatcgagaagacactgtacaacagaagaacccggcaggatgagcctgccctgttcgtggccctgaccttcgagcggcgggaggtcctggactcctccaatatcaaaccaatgaacctgatcggcgtggcaagaggcgaaaacatccccgccgtgatcgccctgaccgaccccgagggctgcccactgagccggtttaaggatagcctgggaaacccaacccacatcctgagaatcggcgagagctataaggagaagcagcggaccatccaggccaagaaggaggtggagcagcggagagccggcggctacagccggaagtacgccagcaaagccaagaatctggcagacgatatggtgagaaacaccgctagagatctgctgtactacgccgtgacccaggatgccatgctgatcttcgccaacctgagccggggcttcggccggcagggcaagcggaccttcatggccgagagacagtacacacggatggaggactggctgaccgccaagctggcctacgagggcctgagcaagacctacctgtccaagacactggcccagtacacctccaagacatgcagcaactgtgggtttaccatcaccagcgccgactacgacagggtgctggagaagctgaagaagacagcaacaggctggatgaccacaattaacggcaaggagctgaaggtggagggccagattacctactacaacagatacaagagacagaacgtagtcaaggacctgtccgtcgagctggatagactgagcgaagaatctgtgaacaacgacatctcctcctggacaaagggcagaagcggagaagctctgagcctcctgaagaaaagattctcccatagacccgtgcaggagaagttcgtgtgcctgaactgcggcttcgagacacacgcagccgagcaagccgccctgaacatcgccagatcctggctgttcctgcggagccaggagtacaagaaataccagacaaacaagacaaccggcaacaccgataagagagccttcgtcgagacctggcagtccttttaccggaagaagcttaaggaggtgtggaaacctgccgtgcggtctggcggatctggcggaggctccacaagcagccaggagagcgtggccttcgaggacgtggccgtgtacttcaccaccaaggagtgggccatcatggtgcccgccgagagggccctgtacagggacgtgatgctggagaactacgaggccgtggccttcgtggtgccccccaccagcaagcccgccctggtgagccacctggagcagggcaaggagagctgcttcatcaggccccaggtggtgctgagcaggagcgactggagggccggcctgaccagccccaagaaaaagagaaaagtctaagctgccttctgcggggcttgccttctggccatgcccttcttctctcccttgcacctgtacctcttggtctttgaataaagcctgagtaggaaggctagcaaaaaaaaaaaaaaaaaaaaaaaaaaaaaaaaaaaaaaaaaaaaaaaaaaaaaaaaaaaaaaaaaaaaaaaaaaaaaaaa

SEQ ID NO: 5802 - RNA, 5797 nt, synthetic construct
  source 1..5797: mol_type = other RNA
aggaaataagagagaaaagaagagtaagaagaaatataagagccaccatggcccctaagaagaagcgtaaagtgagccggatggaacgcctcgtctacgaggtgcggcagaagtgcagaaacatcgaggacatctgcatctcctgcggatctctgaacgtgaccctggagcacccactgttcatcggcggcatgtgccagaactgtaaaaactgttttctggagtgtgcctatcaatacgacgatgacggctaccagagctactgcaccatctgttgcggcggaagagaggtgctgatgtgtggaaataacaactgctgccggtgcttctgcgtggaatgcgtggacctgctggtgggccccggcgccgcccaggccgctattaaggaagatccttggaactgctacatgtgcggccacaagggcacatacggcctgctgagacggagagaggactggcctagcagactgcagatgttcttcgccaataaccacgaccaggagttcgacccccctaaggtgtaccctcccgtccccgccgagaagagaaagcccatccgggtcctgagcctgttcgatggcatcgccaccggtctgctggtgctgaaggacctgggcatccaggtggataggtacattgcctccgaggtgtgcgaggactccatcaccgtgggaatggtgcgtcatcagggcaagatcatgtacgtgggcgacgtgcggagcgtgacacagaagcatatccaggagtggggccctttcgacctggtgatcggcggcagcccttgcaatgacctgagcatcgtgaacccagcccggaagggcctgtacgagggaaccggcagactgttcttcgagttttacagactgctgcacgacgcccggcctaaggaaggcgacgaccggcccttcttttggctgttcgagaatgtggtggccatgggagtcagcgacaagcgggatattagccggttcctggagagcaaccccgtgatgatcgatgccaaggaagtgagcgccgcccaccgggccagatacttctggggcaatctgcctggcatgaacagacccctggccagcaccgtgaacgacaagctggagctgcaggagtgcctggagcacggccggatcgccaagttcagcaaggtgagaaccatcaccacccgaagcaacagcatcaaacaaggcaaggaccagcactttcctgtgttcatgaacgagaaggaggacatcctgtggtgtaccgagatggagagagtgttcgggttcccagtccactacacagatgtcagcaacatgtctagactggccagacagagactgctgggaagaagctggtccgtccctgtgatcagacacctgttcgcccctctgaaggagtacttcgcctgcgtgagcagcggcaacagcaacgccaacagccggggccccagcttctctagcggcctggtgccactgtccctgagagggagccacatgggccccatggagatctacaaaaccgtgagcgcctggaagcggcagcctgtgcgcgtgctgagcctgtttcggaatatcgataaagtcctgaaaagcctgggattcctggagagcggctctggctccggcggtggcaccctgaagtacgtggaggatgtgacaaacgtggtcagacgggatgtggagaagtggggccccttcgatctggtgtacggcagcacccaacccctgggcagctcttgtgaccggtgccctggctggtacatgtttcagttccaccggatcctgcagtacgccctgccgagacaggagtcccagcggccattcttttggattttcatggacaacttgctgctgaccgaggatgaccaggaaactaccactcggttcctgcagaccgaagccgtgaccctgcaggacgtgagaggccgggactaccagaacgccatgcgggtgtggtccaacatccctggactgaaaagcaagcacgcacctctgacccctaaagaagaggagtacctgcaggcccaggtgcggagcagaagcaagctggacgcccctaaggtggatctgctggtgaagaattgcctcctgcccctgagagagtacttcaagtatttcagccagaatagtctgcccctgggcggcccaagcagcggcgcccctcctcccagcggcggcagcccagccggctccccaacctctaccgaggagggcacctctgagtccgccacccccgagagcggccctggcacctccaccgagcccagcgagggcagcgcacccggcagccctgccggcagccccacctccacagaggagggaaccagcaccgagcccagcgaaggcagcgccccaggcaccagcaccgagcctagtgagggcggctctggcggcggcagcgcccaggagattaaacggatcaacaagatcagaagaagacttgtgaaagacagcaacaccaagaaggccggcaagacaggccccatgaaaaccctgctggttagagtgatgacacccgatctgagagagcggctggaaaacctgagaaagaagcctgaaaatatcccccagcccatcagcaatacatctagagccaacctgaataagctgctgaccgattacaccgaaatgaagaaggcgatcctgcatgtgtactgggaagagttccagaaggaccctgtgggcctgatgagccgggtggcccagcctgccagcaagaagatcgatcagaacaagctgaaacctgagatggacgagaagggcaacctgaccaccgccggctttgcctgctctcagtgtggccagcccctgttcgtgtacaagctggagcaggtgtctgagaagggcaaggcttacaccaactacttcggacggtgcaatgtggccgagcacgaaaagctgatcctgctggcccagctgaagcccgagaaggatagcgacgaagccgtgacatatagcctgggaaagtttgggcagagggccctggatttctacagcattcatgtgaccaaggagtccacccaccccgtgaagcccctggcccagatcgccggaaacagatacgcctccggacctgtgggaaaggccctgagcgacgcatgtatgggcacaatcgcctccttcctgtctaagtaccaggacatcatcatcgaacaccagaaggtggtgaagggcaaccagaagagactggagagcctgcgggagctggccggcaaggaaaacctggaataccctagcgtgaccctgccacctcagcctcacaccaaggagggcgttgatgcctacaacgaagtgatcgcccgggtgcgaatgtgggtgaacctgaacctgtggcagaagctgaagctaagcagagatgatgccaagcctctgctgagactgaagggattcccttcctttcctctggtcgagagacaggccaacgaagtggactggtgggacatggtgtgtaacgtgaagaagctgatcaacgagaaaaaggaggatggcaaggtgttttggcagaatctggctggctacaagagacaggaagccctgagaccatacctgagcagcgaggaagatcggaagaagggaaagaaattcgctcggtaccagctgggcgacctgctgctgcacctggaaaagaagcacggcgaggactggggaaaggtgtacgacgaggcctgggagcggattgacaagaaagtggaaggcctgagcaagcacatcaagctggaagaggaacggagaagcgaggacgcccagagcaaggccgccctgaccgactggctgcgggctaaggccagcttcgtgatcgagggcctgaaggaggccgacaaggacgagttctgcagatgcgagctgaagctgcagaagtggtacggggacctgcggggaaagcccttcgccatcgaagccgagaacagcatcctggacatcagcggcttcagcaagcagtacaactgtgccttcatctggcagaaggacggcgtgaagaagctgaacctgtacctgatcatcaactacttcaagggcggcaagctgcggttcaagaagatcaaacctgaagccttcgaagccaacagattctacaccgtgatcaacaaaaagagcggcgagatcgtgcccatggaggtgaacttcaacttcgacgaccccaacctgatcatcctgcctctggcctttggcaagagacagggcagagaattcatctggaacgacctgctgtccctggaaaccggcagcctgaagctggccaacggaagagtgatcgagaagacactgtacaacagaagaacccggcaggatgagcctgccctgttcgtggccctgaccttcgagcggcgggaggtcctggactcctccaatatcaaaccaatgaacctgatcggcgtggcaagaggcgaaaacatccccgccgtgatcgccctgaccgaccccgagggctgcccactgagccggtttaaggatagcctgggaaacccaacccacatcctgagaatcggcgagagctataaggagaagcagcggaccatccaggccaagaaggaggtggagcagcggagagccggcggctacagccggaagtacgccagcaaagccaagaatctggcagacgatatggtgagaaacaccgctagagatctgctgtactacgccgtgacccaggatgccatgctgatcttcgccaacctgagccggggcttcggccggcagggcaagcggaccttcatggccgagagacagtacacacggatggaggactggctgaccgccaagctggcctacgagggcctgagcaagacctacctgtccaagacactggcccagtacacctccaagacatgcagcaactgtgggtttaccatcaccagcgccgactacgacagggtgctggagaagctgaagaagacagcaacaggctggatgaccacaattaacggcaaggagctgaaggtggagggccagattacctactacaacagatacaagagacagaacgtagtcaaggacctgtccgtcgagctggatagactgagcgaagaatctgtgaacaacgacatctcctcctggacaaagggcagaagcggagaagctctgagcctcctgaagaaaagattctcccatagacccgtgcaggagaagttcgtgtgcctgaactgcggcttcgagacacacgcagccgagcaagccgccctgaacatcgccagatcctggctgttcctgcggagccaggagtacaagaaataccagacaaacaagacaaccggcaacaccgataagagagccttcgtcgagacctggcagtccttttaccggaagaagcttaaggaggtgtggaaacctgccgtgcggtctggcggatctggcggaggctccacaagcatggtgagcttcgaggacgtggccgtgctgctgagccaggaggagtgggactgcctgatccccgcccagaggggcctgtacagggacgtgatgctggagacctacggcaacctggtgagcctgggcctgcaggccagcaagcccgacgtgatcagcaggctggagcagggcgacaagccctggaccccccacatcctgaggacccagaggagctggagctggaggcacaagagggagtgctacaccagccccaagaaaaagagaaaagtctaagctgccttctgcggggcttgccttctggccatgcccttcttctctcccttgcacctgtacctcttggtctttgaataaagcctgagtaggaaggctagcaaaaaaaaaaaaaaaaaaaaaaaaaaaaaaaaaaaaaaaaaaaaaaaaaaaaaaaaaaaaaaaaaaaaaaaaaaaaaaaa

SEQ ID NO: 5803 - RNA, 5797 nt, synthetic construct
  source 1..5797: mol_type = other RNA
aggaaataagagagaaaagaagagtaagaagaaatataagagccaccatggcccctaagaagaagcgtaaagtgagccggatggaacgcctcgtctacgaggtgcggcagaagtgcagaaacatcgaggacatctgcatctcctgcggatctctgaacgtgaccctggagcacccactgttcatcggcggcatgtgccagaactgtaaaaactgttttctggagtgtgcctatcaatacgacgatgacggctaccagagctactgcaccatctgttgcggcggaagagaggtgctgatgtgtggaaataacaactgctgccggtgcttctgcgtggaatgcgtggacctgctggtgggccccggcgccgcccaggccgctattaaggaagatccttggaactgctacatgtgcggccacaagggcacatacggcctgctgagacggagagaggactggcctagcagactgcagatgttcttcgccaataaccacgaccaggagttcgacccccctaaggtgtaccctcccgtccccgccgagaagagaaagcccatccgggtcctgagcctgttcgatggcatcgccaccggtctgctggtgctgaaggacctgggcatccaggtggataggtacattgcctccgaggtgtgcgaggactccatcaccgtgggaatggtgcgtcatcagggcaagatcatgtacgtgggcgacgtgcggagcgtgacacagaagcatatccaggagtggggccctttcgacctggtgatcggcggcagcccttgcaatgacctgagcatcgtgaacccagcccggaagggcctgtacgagggaaccggcagactgttcttcgagttttacagactgctgcacgacgcccggcctaaggaaggcgacgaccggcccttcttttggctgttcgagaatgtggtggccatgggagtcagcgacaagcgggatattagccggttcctggagagcaaccccgtgatgatcgatgccaaggaagtgagcgccgcccaccgggccagatacttctggggcaatctgcctggcatgaacagacccctggccagcaccgtgaacgacaagctggagctgcaggagtgcctggagcacggccggatcgccaagttcagcaaggtgagaaccatcaccacccgaagcaacagcatcaaacaaggcaaggaccagcactttcctgtgttcatgaacgagaaggaggacatcctgtggtgtaccgagatggagagagtgttcgggttcccagtccactacacagatgtcagcaacatgtctagactggccagacagagactgctgggaagaagctggtccgtccctgtgatcagacacctgttcgcccctctgaaggagtacttcgcctgcgtgagcagcggcaacagcaacgccaacagccggggccccagcttctctagcggcctggtgccactgtccctgagagggagccacatgggccccatggagatctacaaaaccgtgagcgcctggaagcggcagcctgtgcgcgtgctgagcctgtttcggaatatcgataaagtcctgaaaagcctgggattcctggagagcggctctggctccggcggtggcaccctgaagtacgtggaggatgtgacaaacgtggtcagacgggatgtggagaagtggggccccttcgatctggtgtacggcagcacccaacccctgggcagctcttgtgaccggtgccctggctggtacatgtttcagttccaccggatcctgcagtacgccctgccgagacaggagtcccagcggccattcttttggattttcatggacaacttgctgctgaccgaggatgaccaggaaactaccactcggttcctgcagaccgaagccgtgaccctgcaggacgtgagaggccgggactaccagaacgccatgcgggtgtggtccaacatccctggactgaaaagcaagcacgcacctctgacccctaaagaagaggagtacctgcaggcccaggtgcggagcagaagcaagctggacgcccctaaggtggatctgctggtgaagaattgcctcctgcccctgagagagtacttcaagtatttcagccagaatagtctgcccctgggcggcccaagcagcggcgcccctcctcccagcggcggcagcccagccggctccccaacctctaccgaggagggcacctctgagtccgccacccccgagagcggccctggcacctccaccgagcccagcgagggcagcgcacccggcagccctgccggcagccccacctccacagaggagggaaccagcaccgagcccagcgaaggcagcgccccaggcaccagcaccgagcctagtgagggcggctctggcggcggcagcgcccaggagattaaacggatcaacaagatcagaagaagacttgtgaaagacagcaacaccaagaaggccggcaagacaggccccatgaaaaccctgctggttagagtgatgacacccgatctgagagagcggctggaaaacctgagaaagaagcctgaaaatatcccccagcccatcagcaatacatctagagccaacctgaataagctgctgaccgattacaccgaaatgaagaaggcgatcctgcatgtgtactgggaagagttccagaaggaccctgtgggcctgatgagccgggtggcccagcctgccagcaagaagatcgatcagaacaagctgaaacctgagatggacgagaagggcaacctgaccaccgccggctttgcctgctctcagtgtggccagcccctgttcgtgtacaagctggagcaggtgtctgagaagggcaaggcttacaccaactacttcggacggtgcaatgtggccgagcacgaaaagctgatcctgctggcccagctgaagcccgagaaggatagcgacgaagccgtgacatatagcctgggaaagtttgggcagagggccctggatttctacagcattcatgtgaccaaggagtccacccaccccgtgaagcccctggcccagatcgccggaaacagatacgcctccggacctgtgggaaaggccctgagcgacgcatgtatgggcacaatcgcctccttcctgtctaagtaccaggacatcatcatcgaacaccagaaggtggtgaagggcaaccagaagagactggagagcctgcgggagctggccggcaaggaaaacctggaataccctagcgtgaccctgccacctcagcctcacaccaaggagggcgttgatgcctacaacgaagtgatcgcccgggtgcgaatgtgggtgaacctgaacctgtggcagaagctgaagctaagcagagatgatgccaagcctctgctgagactgaagggattcccttcctttcctctggtcgagagacaggccaacgaagtggactggtgggacatggtgtgtaacgtgaagaagctgatcaacgagaaaaaggaggatggcaaggtgttttggcagaatctggctggctacaagagacaggaagccctgagaccatacctgagcagcgaggaagatcggaagaagggaaagaaattcgctcggtaccagctgggcgacctgctgctgcacctggaaaagaagcacggcgaggactggggaaaggtgtacgacgaggcctgggagcggattgacaagaaagtggaaggcctgagcaagcacatcaagctggaagaggaacggagaagcgaggacgcccagagcaaggccgccctgaccgactggctgcgggctaaggccagcttcgtgatcgagggcctgaaggaggccgacaaggacgagttctgcagatgcgagctgaagctgcagaagtggtacggggacctgcggggaaagcccttcgccatcgaagccgagaacagcatcctggacatcagcggcttcagcaagcagtacaactgtgccttcatctggcagaaggacggcgtgaagaagctgaacctgtacctgatcatcaactacttcaagggcggcaagctgcggttcaagaagatcaaacctgaagccttcgaagccaacagattctacaccgtgatcaacaaaaagagcggcgagatcgtgcccatggaggtgaacttcaacttcgacgaccccaacctgatcatcctgcctctggcctttggcaagagacagggcagagaattcatctggaacgacctgctgtccctggaaaccggcagcctgaagctggccaacggaagagtgatcgagaagacactgtacaacagaagaacccggcaggatgagcctgccctgttcgtggccctgaccttcgagcggcgggaggtcctggactcctccaatatcaaaccaatgaacctgatcggcgtggcaagaggcgaaaacatccccgccgtgatcgccctgaccgaccccgagggctgcccactgagccggtttaaggatagcctgggaaacccaacccacatcctgagaatcggcgagagctataaggagaagcagcggaccatccaggccaagaaggaggtggagcagcggagagccggcggctacagccggaagtacgccagcaaagccaagaatctggcagacgatatggtgagaaacaccgctagagatctgctgtactacgccgtgacccaggatgccatgctgatcttcgccaacctgagccggggcttcggccggcagggcaagcggaccttcatggccgagagacagtacacacggatggaggactggctgaccgccaagctggcctacgagggcctgagcaagacctacctgtccaagacactggcccagtacacctccaagacatgcagcaactgtgggtttaccatcaccagcgccgactacgacagggtgctggagaagctgaagaagacagcaacaggctggatgaccacaattaacggcaaggagctgaaggtggagggccagattacctactacaacagatacaagagacagaacgtagtcaaggacctgtccgtcgagctggatagactgagcgaagaatctgtgaacaacgacatctcctcctggacaaagggcagaagcggagaagctctgagcctcctgaagaaaagattctcccatagacccgtgcaggagaagttcgtgtgcctgaactgcggcttcgagacacacgcagccgagcaagccgccctgaacatcgccagatcctggctgttcctgcggagccaggagtacaagaaataccagacaaacaagacaaccggcaacaccgataagagagccttcgtcgagacctggcagtccttttaccggaagaagcttaaggaggtgtggaaacctgccgtgcggtctggcggatctggcggaggctccacaagccaggccgaggtgaccttcgaggacgtggccgtgctgttcagcagggaggagtggggcaggctgggccccgcccagaggggcctgtacagggacgtgatgctggagacctacaggaacctggtgagcctgggcgccggccccgccgcccccaagcccggcgtgatcacccagctggagaggggcgacgagccctgggtgctggacgcccagggcgccaagggcaaggagaggctgagggtgagcaccagccccaagaaaaagagaaaagtctaagctgccttctgcggggcttgccttctggccatgcccttcttctctcccttgcacctgtacctcttggtctttgaataaagcctgagtaggaaggctagcaaaaaaaaaaaaaaaaaaaaaaaaaaaaaaaaaaaaaaaaaaaaaaaaaaaaaaaaaaaaaaaaaaaaaaaaaaaaaaaa

SEQ ID NO: 5804 - RNA, 5797 nt, synthetic construct
  source 1..5797: mol_type = other RNA
aggaaataagagagaaaagaagagtaagaagaaatataagagccaccatggcccctaagaagaagcgtaaagtgagccggatggaacgcctcgtctacgaggtgcggcagaagtgcagaaacatcgaggacatctgcatctcctgcggatctctgaacgtgaccctggagcacccactgttcatcggcggcatgtgccagaactgtaaaaactgttttctggagtgtgcctatcaatacgacgatgacggctaccagagctactgcaccatctgttgcggcggaagagaggtgctgatgtgtggaaataacaactgctgccggtgcttctgcgtggaatgcgtggacctgctggtgggccccggcgccgcccaggccgctattaaggaagatccttggaactgctacatgtgcggccacaagggcacatacggcctgctgagacggagagaggactggcctagcagactgcagatgttcttcgccaataaccacgaccaggagttcgacccccctaaggtgtaccctcccgtccccgccgagaagagaaagcccatccgggtcctgagcctgttcgatggcatcgccaccggtctgctggtgctgaaggacctgggcatccaggtggataggtacattgcctccgaggtgtgcgaggactccatcaccgtgggaatggtgcgtcatcagggcaagatcatgtacgtgggcgacgtgcggagcgtgacacagaagcatatccaggagtggggccctttcgacctggtgatcggcggcagcccttgcaatgacctgagcatcgtgaacccagcccggaagggcctgtacgagggaaccggcagactgttcttcgagttttacagactgctgcacgacgcccggcctaaggaaggcgacgaccggcccttcttttggctgttcgagaatgtggtggccatgggagtcagcgacaagcgggatattagccggttcctggagagcaaccccgtgatgatcgatgccaaggaagtgagcgccgcccaccgggccagatacttctggggcaatctgcctggcatgaacagacccctggccagcaccgtgaacgacaagctggagctgcaggagtgcctggagcacggccggatcgccaagttcagcaaggtgagaaccatcaccacccgaagcaacagcatcaaacaaggcaaggaccagcactttcctgtgttcatgaacgagaaggaggacatcctgtggtgtaccgagatggagagagtgttcgggttcccagtccactacacagatgtcagcaacatgtctagactggccagacagagactgctgggaagaagctggtccgtccctgtgatcagacacctgttcgcccctctgaaggagtacttcgcctgcgtgagcagcggcaacagcaacgccaacagccggggccccagcttctctagcggcctggtgccactgtccctgagagggagccacatgggccccatggagatctacaaaaccgtgagcgcctggaagcggcagcctgtgcgcgtgctgagcctgtttcggaatatcgataaagtcctgaaaagcctgggattcctggagagcggctctggctccggcggtggcaccctgaagtacgtggaggatgtgacaaacgtggtcagacgggatgtggagaagtggggccccttcgatctggtgtacggcagcacccaacccctgggcagctcttgtgaccggtgccctggctggtacatgtttcagttccaccggatcctgcagtacgccctgccgagacaggagtcccagcggccattcttttggattttcatggacaacttgctgctgaccgaggatgaccaggaaactaccactcggttcctgcagaccgaagccgtgaccctgcaggacgtgagaggccgggactaccagaacgccatgcgggtgtggtccaacatccctggactgaaaagcaagcacgcacctctgacccctaaagaagaggagtacctgcaggcccaggtgcggagcagaagcaagctggacgcccctaaggtggatctgctggtgaagaattgcctcctgcccctgagagagtacttcaagtatttcagccagaatagtctgcccctgggcggcccaagcagcggcgcccctcctcccagcggcggcagcccagccggctccccaacctctaccgaggagggcacctctgagtccgccacccccgagagcggccctggcacctccaccgagcccagcgagggcagcgcacccggcagccctgccggcagccccacctccacagaggagggaaccagcaccgagcccagcgaaggcagcgccccaggcaccagcaccgagcctagtgagggcggctctggcggcggcagcgcccaggagattaaacggatcaacaagatcagaagaagacttgtgaaagacagcaacaccaagaaggccggcaagacaggccccatgaaaaccctgctggttagagtgatgacacccgatctgagagagcggctggaaaacctgagaaagaagcctgaaaatatcccccagcccatcagcaatacatctagagccaacctgaataagctgctgaccgattacaccgaaatgaagaaggcgatcctgcatgtgtactgggaagagttccagaaggaccctgtgggcctgatgagccgggtggcccagcctgccagcaagaagatcgatcagaacaagctgaaacctgagatggacgagaagggcaacctgaccaccgccggctttgcctgctctcagtgtggccagcccctgttcgtgtacaagctggagcaggtgtctgagaagggcaaggcttacaccaactacttcggacggtgcaatgtggccgagcacgaaaagctgatcctgctggcccagctgaagcccgagaaggatagcgacgaagccgtgacatatagcctgggaaagtttgggcagagggccctggatttctacagcattcatgtgaccaaggagtccacccaccccgtgaagcccctggcccagatcgccggaaacagatacgcctccggacctgtgggaaaggccctgagcgacgcatgtatgggcacaatcgcctccttcctgtctaagtaccaggacatcatcatcgaacaccagaaggtggtgaagggcaaccagaagagactggagagcctgcgggagctggccggcaaggaaaacctggaataccctagcgtgaccctgccacctcagcctcacaccaaggagggcgttgatgcctacaacgaagtgatcgcccgggtgcgaatgtgggtgaacctgaacctgtggcagaagctgaagctaagcagagatgatgccaagcctctgctgagactgaagggattcccttcctttcctctggtcgagagacaggccaacgaagtggactggtgggacatggtgtgtaacgtgaagaagctgatcaacgagaaaaaggaggatggcaaggtgttttggcagaatctggctggctacaagagacaggaagccctgagaccatacctgagcagcgaggaagatcggaagaagggaaagaaattcgctcggtaccagctgggcgacctgctgctgcacctggaaaagaagcacggcgaggactggggaaaggtgtacgacgaggcctgggagcggattgacaagaaagtggaaggcctgagcaagcacatcaagctggaagaggaacggagaagcgaggacgcccagagcaaggccgccctgaccgactggctgcgggctaaggccagcttcgtgatcgagggcctgaaggaggccgacaaggacgagttctgcagatgcgagctgaagctgcagaagtggtacggggacctgcggggaaagcccttcgccatcgaagccgagaacagcatcctggacatcagcggcttcagcaagcagtacaactgtgccttcatctggcagaaggacggcgtgaagaagctgaacctgtacctgatcatcaactacttcaagggcggcaagctgcggttcaagaagatcaaacctgaagccttcgaagccaacagattctacaccgtgatcaacaaaaagagcggcgagatcgtgcccatggaggtgaacttcaacttcgacgaccccaacctgatcatcctgcctctggcctttggcaagagacagggcagagaattcatctggaacgacctgctgtccctggaaaccggcagcctgaagctggccaacggaagagtgatcgagaagacactgtacaacagaagaacccggcaggatgagcctgccctgttcgtggccctgaccttcgagcggcgggaggtcctggactcctccaatatcaaaccaatgaacctgatcggcgtggcaagaggcgaaaacatccccgccgtgatcgccctgaccgaccccgagggctgcccactgagccggtttaaggatagcctgggaaacccaacccacatcctgagaatcggcgagagctataaggagaagcagcggaccatccaggccaagaaggaggtggagcagcggagagccggcggctacagccggaagtacgccagcaaagccaagaatctggcagacgatatggtgagaaacaccgctagagatctgctgtactacgccgtgacccaggatgccatgctgatcttcgccaacctgagccggggcttcggccggcagggcaagcggaccttcatggccgagagacagtacacacggatggaggactggctgaccgccaagctggcctacgagggcctgagcaagacctacctgtccaagacactggcccagtacacctccaagacatgcagcaactgtgggtttaccatcaccagcgccgactacgacagggtgctggagaagctgaagaagacagcaacaggctggatgaccacaattaacggcaaggagctgaaggtggagggccagattacctactacaacagatacaagagacagaacgtagtcaaggacctgtccgtcgagctggatagactgagcgaagaatctgtgaacaacgacatctcctcctggacaaagggcagaagcggagaagctctgagcctcctgaagaaaagattctcccatagacccgtgcaggagaagttcgtgtgcctgaactgcggcttcgagacacacgcagccgagcaagccgccctgaacatcgccagatcctggctgttcctgcggagccaggagtacaagaaataccagacaaacaagacaaccggcaacaccgataagagagccttcgtcgagacctggcagtccttttaccggaagaagcttaaggaggtgtggaaacctgccgtgcggtctggcggatctggcggaggctccacaagcccccagaagagcgtgaccttcgaggacgtggccgtgtacttcacccagaccgagtgggacggcctgagccccgcccagagggccctgtacagggacgtgatgctggagaactacggcaacgtggccagcctgggcttcagcctgctgaagcccgccgtgatcctgcagctggagggcgccggcgagctgggcgaccccagcctgctggtggccggcaccgaggtgggcagccagggcgtgtggaccagccccaagaaaaagagaaaagtctaagctgccttctgcggggcttgccttctggccatgcccttcttctctcccttgcacctgtacctcttggtctttgaataaagcctgagtaggaaggctagcaaaaaaaaaaaaaaaaaaaaaaaaaaaaaaaaaaaaaaaaaaaaaaaaaaaaaaaaaaaaaaaaaaaaaaaaaaaaaaaa

SEQ ID NO: 5805 - RNA, 5797 nt, synthetic construct
  source 1..5797: mol_type = other RNA
aggaaataagagagaaaagaagagtaagaagaaatataagagccaccatggcccctaagaagaagcgtaaagtgagccggatggaacgcctcgtctacgaggtgcggcagaagtgcagaaacatcgaggacatctgcatctcctgcggatctctgaacgtgaccctggagcacccactgttcatcggcggcatgtgccagaactgtaaaaactgttttctggagtgtgcctatcaatacgacgatgacggctaccagagctactgcaccatctgttgcggcggaagagaggtgctgatgtgtggaaataacaactgctgccggtgcttctgcgtggaatgcgtggacctgctggtgggccccggcgccgcccaggccgctattaaggaagatccttggaactgctacatgtgcggccacaagggcacatacggcctgctgagacggagagaggactggcctagcagactgcagatgttcttcgccaataaccacgaccaggagttcgacccccctaaggtgtaccctcccgtccccgccgagaagagaaagcccatccgggtcctgagcctgttcgatggcatcgccaccggtctgctggtgctgaaggacctgggcatccaggtggataggtacattgcctccgaggtgtgcgaggactccatcaccgtgggaatggtgcgtcatcagggcaagatcatgtacgtgggcgacgtgcggagcgtgacacagaagcatatccaggagtggggccctttcgacctggtgatcggcggcagcccttgcaatgacctgagcatcgtgaacccagcccggaagggcctgtacgagggaaccggcagactgttcttcgagttttacagactgctgcacgacgcccggcctaaggaaggcgacgaccggcccttcttttggctgttcgagaatgtggtggccatgggagtcagcgacaagcgggatattagccggttcctggagagcaaccccgtgatgatcgatgccaaggaagtgagcgccgcccaccgggccagatacttctggggcaatctgcctggcatgaacagacccctggccagcaccgtgaacgacaagctggagctgcaggagtgcctggagcacggccggatcgccaagttcagcaaggtgagaaccatcaccacccgaagcaacagcatcaaacaaggcaaggaccagcactttcctgtgttcatgaacgagaaggaggacatcctgtggtgtaccgagatggagagagtgttcgggttcccagtccactacacagatgtcagcaacatgtctagactggccagacagagactgctgggaagaagctggtccgtccctgtgatcagacacctgttcgcccctctgaaggagtacttcgcctgcgtgagcagcggcaacagcaacgccaacagccggggccccagcttctctagcggcctggtgccactgtccctgagagggagccacatgggccccatggagatctacaaaaccgtgagcgcctggaagcggcagcctgtgcgcgtgctgagcctgtttcggaatatcgataaagtcctgaaaagcctgggattcctggagagcggctctggctccggcggtggcaccctgaagtacgtggaggatgtgacaaacgtggtcagacgggatgtggagaagtggggccccttcgatctggtgtacggcagcacccaacccctgggcagctcttgtgaccggtgccctggctggtacatgtttcagttccaccggatcctgcagtacgccctgccgagacaggagtcccagcggccattcttttggattttcatggacaacttgctgctgaccgaggatgaccaggaaactaccactcggttcctgcagaccgaagccgtgaccctgcaggacgtgagaggccgggactaccagaacgccatgcgggtgtggtccaacatccctggactgaaaagcaagcacgcacctctgacccctaaagaagaggagtacctgcaggcccaggtgcggagcagaagcaagctggacgcccctaaggtggatctgctggtgaagaattgcctcctgcccctgagagagtacttcaagtatttcagccagaatagtctgcccctgggcggcccaagcagcggcgcccctcctcccagcggcggcagcccagccggctccccaacctctaccgaggagggcacctctgagtccgccacccccgagagcggccctggcacctccaccgagcccagcgagggcagcgcacccggcagccctgccggcagccccacctccacagaggagggaaccagcaccgagcccagcgaaggcagcgccccaggcaccagcaccgagcctagtgagggcggctctggcggcggcagcgcccaggagattaaacggatcaacaagatcagaagaagacttgtgaaagacagcaacaccaagaaggccggcaagacaggccccatgaaaaccctgctggttagagtgatgacacccgatctgagagagcggctggaaaacctgagaaagaagcctgaaaatatcccccagcccatcagcaatacatctagagccaacctgaataagctgctgaccgattacaccgaaatgaagaaggcgatcctgcatgtgtactgggaagagttccagaaggaccctgtgggcctgatgagccgggtggcccagcctgccagcaagaagatcgatcagaacaagctgaaacctgagatggacgagaagggcaacctgaccaccgccggctttgcctgctctcagtgtggccagcccctgttcgtgtacaagctggagcaggtgtctgagaagggcaaggcttacaccaactacttcggacggtgcaatgtggccgagcacgaaaagctgatcctgctggcccagctgaagcccgagaaggatagcgacgaagccgtgacatatagcctgggaaagtttgggcagagggccctggatttctacagcattcatgtgaccaaggagtccacccaccccgtgaagcccctggcccagatcgccggaaacagatacgcctccggacctgtgggaaaggccctgagcgacgcatgtatgggcacaatcgcctccttcctgtctaagtaccaggacatcatcatcgaacaccagaaggtggtgaagggcaaccagaagagactggagagcctgcgggagctggccggcaaggaaaacctggaataccctagcgtgaccctgccacctcagcctcacaccaaggagggcgttgatgcctacaacgaagtgatcgcccgggtgcgaatgtgggtgaacctgaacctgtggcagaagctgaagctaagcagagatgatgccaagcctctgctgagactgaagggattcccttcctttcctctggtcgagagacaggccaacgaagtggactggtgggacatggtgtgtaacgtgaagaagctgatcaacgagaaaaaggaggatggcaaggtgttttggcagaatctggctggctacaagagacaggaagccctgagaccatacctgagcagcgaggaagatcggaagaagggaaagaaattcgctcggtaccagctgggcgacctgctgctgcacctggaaaagaagcacggcgaggactggggaaaggtgtacgacgaggcctgggagcggattgacaagaaagtggaaggcctgagcaagcacatcaagctggaagaggaacggagaagcgaggacgcccagagcaaggccgccctgaccgactggctgcgggctaaggccagcttcgtgatcgagggcctgaaggaggccgacaaggacgagttctgcagatgcgagctgaagctgcagaagtggtacggggacctgcggggaaagcccttcgccatcgaagccgagaacagcatcctggacatcagcggcttcagcaagcagtacaactgtgccttcatctggcagaaggacggcgtgaagaagctgaacctgtacctgatcatcaactacttcaagggcggcaagctgcggttcaagaagatcaaacctgaagccttcgaagccaacagattctacaccgtgatcaacaaaaagagcggcgagatcgtgcccatggaggtgaacttcaacttcgacgaccccaacctgatcatcctgcctctggcctttggcaagagacagggcagagaattcatctggaacgacctgctgtccctggaaaccggcagcctgaagctggccaacggaagagtgatcgagaagacactgtacaacagaagaacccggcaggatgagcctgccctgttcgtggccctgaccttcgagcggcgggaggtcctggactcctccaatatcaaaccaatgaacctgatcggcgtggcaagaggcgaaaacatccccgccgtgatcgccctgaccgaccccgagggctgcccactgagccggtttaaggatagcctgggaaacccaacccacatcctgagaatcggcgagagctataaggagaagcagcggaccatccaggccaagaaggaggtggagcagcggagagccggcggctacagccggaagtacgccagcaaagccaagaatctggcagacgatatggtgagaaacaccgctagagatctgctgtactacgccgtgacccaggatgccatgctgatcttcgccaacctgagccggggcttcggccggcagggcaagcggaccttcatggccgagagacagtacacacggatggaggactggctgaccgccaagctggcctacgagggcctgagcaagacctacctgtccaagacactggcccagtacacctccaagacatgcagcaactgtgggtttaccatcaccagcgccgactacgacagggtgctggagaagctgaagaagacagcaacaggctggatgaccacaattaacggcaaggagctgaaggtggagggccagattacctactacaacagatacaagagacagaacgtagtcaaggacctgtccgtcgagctggatagactgagcgaagaatctgtgaacaacgacatctcctcctggacaaagggcagaagcggagaagctctgagcctcctgaagaaaagattctcccatagacccgtgcaggagaagttcgtgtgcctgaactgcggcttcgagacacacgcagccgagcaagccgccctgaacatcgccagatcctggctgttcctgcggagccaggagtacaagaaataccagacaaacaagacaaccggcaacaccgataagagagccttcgtcgagacctggcagtccttttaccggaagaagcttaaggaggtgtggaaacctgccgtgcggtctggcggatctggcggaggctccacaagcccccaggagctggtgaccttccaggacgtggccgtgtacttcacccccgaggaggtgaggtacctggacagctaccagaaggccctgtacaaggacgtgatgctggagaactacggcaacatggccagcctgggcttccccctgagcaagcccgtgctgatcagccagctggagaggggcgaggagccctgggccatggaccccctggtggccaaggagaggaagaccaggaggggcaccagcaccagccccaagaaaaagagaaaagtctaagctgccttctgcggggcttgccttctggccatgcccttcttctctcccttgcacctgtacctcttggtctttgaataaagcctgagtaggaaggctagcaaaaaaaaaaaaaaaaaaaaaaaaaaaaaaaaaaaaaaaaaaaaaaaaaaaaaaaaaaaaaaaaaaaaaaaaaaaaaaaa

SEQ ID NO: 5806 - RNA, 5797 nt, synthetic construct
  source 1..5797: mol_type = other RNA
aggaaataagagagaaaagaagagtaagaagaaatataagagccaccatggcccctaagaagaagcgtaaagtgagccggatggaacgcctcgtctacgaggtgcggcagaagtgcagaaacatcgaggacatctgcatctcctgcggatctctgaacgtgaccctggagcacccactgttcatcggcggcatgtgccagaactgtaaaaactgttttctggagtgtgcctatcaatacgacgatgacggctaccagagctactgcaccatctgttgcggcggaagagaggtgctgatgtgtggaaataacaactgctgccggtgcttctgcgtggaatgcgtggacctgctggtgggccccggcgccgcccaggccgctattaaggaagatccttggaactgctacatgtgcggccacaagggcacatacggcctgctgagacggagagaggactggcctagcagactgcagatgttcttcgccaataaccacgaccaggagttcgacccccctaaggtgtaccctcccgtccccgccgagaagagaaagcccatccgggtcctgagcctgttcgatggcatcgccaccggtctgctggtgctgaaggacctgggcatccaggtggataggtacattgcctccgaggtgtgcgaggactccatcaccgtgggaatggtgcgtcatcagggcaagatcatgtacgtgggcgacgtgcggagcgtgacacagaagcatatccaggagtggggccctttcgacctggtgatcggcggcagcccttgcaatgacctgagcatcgtgaacccagcccggaagggcctgtacgagggaaccggcagactgttcttcgagttttacagactgctgcacgacgcccggcctaaggaaggcgacgaccggcccttcttttggctgttcgagaatgtggtggccatgggagtcagcgacaagcgggatattagccggttcctggagagcaaccccgtgatgatcgatgccaaggaagtgagcgccgcccaccgggccagatacttctggggcaatctgcctggcatgaacagacccctggccagcaccgtgaacgacaagctggagctgcaggagtgcctggagcacggccggatcgccaagttcagcaaggtgagaaccatcaccacccgaagcaacagcatcaaacaaggcaaggaccagcactttcctgtgttcatgaacgagaaggaggacatcctgtggtgtaccgagatggagagagtgttcgggttcccagtccactacacagatgtcagcaacatgtctagactggccagacagagactgctgggaagaagctggtccgtccctgtgatcagacacctgttcgcccctctgaaggagtacttcgcctgcgtgagcagcggcaacagcaacgccaacagccggggccccagcttctctagcggcctggtgccactgtccctgagagggagccacatgggccccatggagatctacaaaaccgtgagcgcctggaagcggcagcctgtgcgcgtgctgagcctgtttcggaatatcgataaagtcctgaaaagcctgggattcctggagagcggctctggctccggcggtggcaccctgaagtacgtggaggatgtgacaaacgtggtcagacgggatgtggagaagtggggccccttcgatctggtgtacggcagcacccaacccctgggcagctcttgtgaccggtgccctggctggtacatgtttcagttccaccggatcctgcagtacgccctgccgagacaggagtcccagcggccattcttttggattttcatggacaacttgctgctgaccgaggatgaccaggaaactaccactcggttcctgcagaccgaagccgtgaccctgcaggacgtgagaggccgggactaccagaacgccatgcgggtgtggtccaacatccctggactgaaaagcaagcacgcacctctgacccctaaagaagaggagtacctgcaggcccaggtgcggagcagaagcaagctggacgcccctaaggtggatctgctggtgaagaattgcctcctgcccctgagagagtacttcaagtatttcagccagaatagtctgcccctgggcggcccaagcagcggcgcccctcctcccagcggcggcagcccagccggctccccaacctctaccgaggagggcacctctgagtccgccacccccgagagcggccctggcacctccaccgagcccagcgagggcagcgcacccggcagccctgccggcagccccacctccacagaggagggaaccagcaccgagcccagcgaaggcagcgccccaggcaccagcaccgagcctagtgagggcggctctggcggcggcagcgcccaggagattaaacggatcaacaagatcagaagaagacttgtgaaagacagcaacaccaagaaggccggcaagacaggccccatgaaaaccctgctggttagagtgatgacacccgatctgagagagcggctggaaaacctgagaaagaagcctgaaaatatcccccagcccatcagcaatacatctagagccaacctgaataagctgctgaccgattacaccgaaatgaagaaggcgatcctgcatgtgtactgggaagagttccagaaggaccctgtgggcctgatgagccgggtggcccagcctgccagcaagaagatcgatcagaacaagctgaaacctgagatggacgagaagggcaacctgaccaccgccggctttgcctgctctcagtgtggccagcccctgttcgtgtacaagctggagcaggtgtctgagaagggcaaggcttacaccaactacttcggacggtgcaatgtggccgagcacgaaaagctgatcctgctggcccagctgaagcccgagaaggatagcgacgaagccgtgacatatagcctgggaaagtttgggcagagggccctggatttctacagcattcatgtgaccaaggagtccacccaccccgtgaagcccctggcccagatcgccggaaacagatacgcctccggacctgtgggaaaggccctgagcgacgcatgtatgggcacaatcgcctccttcctgtctaagtaccaggacatcatcatcgaacaccagaaggtggtgaagggcaaccagaagagactggagagcctgcgggagctggccggcaaggaaaacctggaataccctagcgtgaccctgccacctcagcctcacaccaaggagggcgttgatgcctacaacgaagtgatcgcccgggtgcgaatgtgggtgaacctgaacctgtggcagaagctgaagctaagcagagatgatgccaagcctctgctgagactgaagggattcccttcctttcctctggtcgagagacaggccaacgaagtggactggtgggacatggtgtgtaacgtgaagaagctgatcaacgagaaaaaggaggatggcaaggtgttttggcagaatctggctggctacaagagacaggaagccctgagaccatacctgagcagcgaggaagatcggaagaagggaaagaaattcgctcggtaccagctgggcgacctgctgctgcacctggaaaagaagcacggcgaggactggggaaaggtgtacgacgaggcctgggagcggattgacaagaaagtggaaggcctgagcaagcacatcaagctggaagaggaacggagaagcgaggacgcccagagcaaggccgccctgaccgactggctgcgggctaaggccagcttcgtgatcgagggcctgaaggaggccgacaaggacgagttctgcagatgcgagctgaagctgcagaagtggtacggggacctgcggggaaagcccttcgccatcgaagccgagaacagcatcctggacatcagcggcttcagcaagcagtacaactgtgccttcatctggcagaaggacggcgtgaagaagctgaacctgtacctgatcatcaactacttcaagggcggcaagctgcggttcaagaagatcaaacctgaagccttcgaagccaacagattctacaccgtgatcaacaaaaagagcggcgagatcgtgcccatggaggtgaacttcaacttcgacgaccccaacctgatcatcctgcctctggcctttggcaagagacagggcagagaattcatctggaacgacctgctgtccctggaaaccggcagcctgaagctggccaacggaagagtgatcgagaagacactgtacaacagaagaacccggcaggatgagcctgccctgttcgtggccctgaccttcgagcggcgggaggtcctggactcctccaatatcaaaccaatgaacctgatcggcgtggcaagaggcgaaaacatccccgccgtgatcgccctgaccgaccccgagggctgcccactgagccggtttaaggatagcctgggaaacccaacccacatcctgagaatcggcgagagctataaggagaagcagcggaccatccaggccaagaaggaggtggagcagcggagagccggcggctacagccggaagtacgccagcaaagccaagaatctggcagacgatatggtgagaaacaccgctagagatctgctgtactacgccgtgacccaggatgccatgctgatcttcgccaacctgagccggggcttcggccggcagggcaagcggaccttcatggccgagagacagtacacacggatggaggactggctgaccgccaagctggcctacgagggcctgagcaagacctacctgtccaagacactggcccagtacacctccaagacatgcagcaactgtgggtttaccatcaccagcgccgactacgacagggtgctggagaagctgaagaagacagcaacaggctggatgaccacaattaacggcaaggagctgaaggtggagggccagattacctactacaacagatacaagagacagaacgtagtcaaggacctgtccgtcgagctggatagactgagcgaagaatctgtgaacaacgacatctcctcctggacaaagggcagaagcggagaagctctgagcctcctgaagaaaagattctcccatagacccgtgcaggagaagttcgtgtgcctgaactgcggcttcgagacacacgcagccgagcaagccgccctgaacatcgccagatcctggctgttcctgcggagccaggagtacaagaaataccagacaaacaagacaaccggcaacaccgataagagagccttcgtcgagacctggcagtccttttaccggaagaagcttaaggaggtgtggaaacctgccgtgcggtctggcggatctggcggaggctccacaagcaccgtgggcagcgtgatgttcagcgacgtgagcgtggacttcagccaggaggagtgggagtgcctggaccccggccagagggacctgtacagggacgtgatgctggagaactacagcaacctgctgagcatgggcctgtacatccccaagccccaggtgatcagcctgctggagcagggcaaggagccctggatggtgggcagggagctgaccaggggcctgtgcagcgacctggagagcatgaccagccccaagaaaaagagaaaagtctaagctgccttctgcggggcttgccttctggccatgcccttcttctctcccttgcacctgtacctcttggtctttgaataaagcctgagtaggaaggctagcaaaaaaaaaaaaaaaaaaaaaaaaaaaaaaaaaaaaaaaaaaaaaaaaaaaaaaaaaaaaaaaaaaaaaaaaaaaaaaaa

SEQ ID NO: 5807 - RNA, 5797 nt, synthetic construct
  source 1..5797: mol_type = other RNA
aggaaataagagagaaaagaagagtaagaagaaatataagagccaccatggcccctaagaagaagcgtaaagtgagccggatggaacgcctcgtctacgaggtgcggcagaagtgcagaaacatcgaggacatctgcatctcctgcggatctctgaacgtgaccctggagcacccactgttcatcggcggcatgtgccagaactgtaaaaactgttttctggagtgtgcctatcaatacgacgatgacggctaccagagctactgcaccatctgttgcggcggaagagaggtgctgatgtgtggaaataacaactgctgccggtgcttctgcgtggaatgcgtggacctgctggtgggccccggcgccgcccaggccgctattaaggaagatccttggaactgctacatgtgcggccacaagggcacatacggcctgctgagacggagagaggactggcctagcagactgcagatgttcttcgccaataaccacgaccaggagttcgacccccctaaggtgtaccctcccgtccccgccgagaagagaaagcccatccgggtcctgagcctgttcgatggcatcgccaccggtctgctggtgctgaaggacctgggcatccaggtggataggtacattgcctccgaggtgtgcgaggactccatcaccgtgggaatggtgcgtcatcagggcaagatcatgtacgtgggcgacgtgcggagcgtgacacagaagcatatccaggagtggggccctttcgacctggtgatcggcggcagcccttgcaatgacctgagcatcgtgaacccagcccggaagggcctgtacgagggaaccggcagactgttcttcgagttttacagactgctgcacgacgcccggcctaaggaaggcgacgaccggcccttcttttggctgttcgagaatgtggtggccatgggagtcagcgacaagcgggatattagccggttcctggagagcaaccccgtgatgatcgatgccaaggaagtgagcgccgcccaccgggccagatacttctggggcaatctgcctggcatgaacagacccctggccagcaccgtgaacgacaagctggagctgcaggagtgcctggagcacggccggatcgccaagttcagcaaggtgagaaccatcaccacccgaagcaacagcatcaaacaaggcaaggaccagcactttcctgtgttcatgaacgagaaggaggacatcctgtggtgtaccgagatggagagagtgttcgggttcccagtccactacacagatgtcagcaacatgtctagactggccagacagagactgctgggaagaagctggtccgtccctgtgatcagacacctgttcgcccctctgaaggagtacttcgcctgcgtgagcagcggcaacagcaacgccaacagccggggccccagcttctctagcggcctggtgccactgtccctgagagggagccacatgggccccatggagatctacaaaaccgtgagcgcctggaagcggcagcctgtgcgcgtgctgagcctgtttcggaatatcgataaagtcctgaaaagcctgggattcctggagagcggctctggctccggcggtggcaccctgaagtacgtggaggatgtgacaaacgtggtcagacgggatgtggagaagtggggccccttcgatctggtgtacggcagcacccaacccctgggcagctcttgtgaccggtgccctggctggtacatgtttcagttccaccggatcctgcagtacgccctgccgagacaggagtcccagcggccattcttttggattttcatggacaacttgctgctgaccgaggatgaccaggaaactaccactcggttcctgcagaccgaagccgtgaccctgcaggacgtgagaggccgggactaccagaacgccatgcgggtgtggtccaacatccctggactgaaaagcaagcacgcacctctgacccctaaagaagaggagtacctgcaggcccaggtgcggagcagaagcaagctggacgcccctaaggtggatctgctggtgaagaattgcctcctgcccctgagagagtacttcaagtatttcagccagaatagtctgcccctgggcggcccaagcagcggcgcccctcctcccagcggcggcagcccagccggctccccaacctctaccgaggagggcacctctgagtccgccacccccgagagcggccctggcacctccaccgagcccagcgagggcagcgcacccggcagccctgccggcagccccacctccacagaggagggaaccagcaccgagcccagcgaaggcagcgccccaggcaccagcaccgagcctagtgagggcggctctggcggcggcagcgcccaggagattaaacggatcaacaagatcagaagaagacttgtgaaagacagcaacaccaagaaggccggcaagacaggccccatgaaaaccctgctggttagagtgatgacacccgatctgagagagcggctggaaaacctgagaaagaagcctgaaaatatcccccagcccatcagcaatacatctagagccaacctgaataagctgctgaccgattacaccgaaatgaagaaggcgatcctgcatgtgtactgggaagagttccagaaggaccctgtgggcctgatgagccgggtggcccagcctgccagcaagaagatcgatcagaacaagctgaaacctgagatggacgagaagggcaacctgaccaccgccggctttgcctgctctcagtgtggccagcccctgttcgtgtacaagctggagcaggtgtctgagaagggcaaggcttacaccaactacttcggacggtgcaatgtggccgagcacgaaaagctgatcctgctggcccagctgaagcccgagaaggatagcgacgaagccgtgacatatagcctgggaaagtttgggcagagggccctggatttctacagcattcatgtgaccaaggagtccacccaccccgtgaagcccctggcccagatcgccggaaacagatacgcctccggacctgtgggaaaggccctgagcgacgcatgtatgggcacaatcgcctccttcctgtctaagtaccaggacatcatcatcgaacaccagaaggtggtgaagggcaaccagaagagactggagagcctgcgggagctggccggcaaggaaaacctggaataccctagcgtgaccctgccacctcagcctcacaccaaggagggcgttgatgcctacaacgaagtgatcgcccgggtgcgaatgtgggtgaacctgaacctgtggcagaagctgaagctaagcagagatgatgccaagcctctgctgagactgaagggattcccttcctttcctctggtcgagagacaggccaacgaagtggactggtgggacatggtgtgtaacgtgaagaagctgatcaacgagaaaaaggaggatggcaaggtgttttggcagaatctggctggctacaagagacaggaagccctgagaccatacctgagcagcgaggaagatcggaagaagggaaagaaattcgctcggtaccagctgggcgacctgctgctgcacctggaaaagaagcacggcgaggactggggaaaggtgtacgacgaggcctgggagcggattgacaagaaagtggaaggcctgagcaagcacatcaagctggaagaggaacggagaagcgaggacgcccagagcaaggccgccctgaccgactggctgcgggctaaggccagcttcgtgatcgagggcctgaaggaggccgacaaggacgagttctgcagatgcgagctgaagctgcagaagtggtacggggacctgcggggaaagcccttcgccatcgaagccgagaacagcatcctggacatcagcggcttcagcaagcagtacaactgtgccttcatctggcagaaggacggcgtgaagaagctgaacctgtacctgatcatcaactacttcaagggcggcaagctgcggttcaagaagatcaaacctgaagccttcgaagccaacagattctacaccgtgatcaacaaaaagagcggcgagatcgtgcccatggaggtgaacttcaacttcgacgaccccaacctgatcatcctgcctctggcctttggcaagagacagggcagagaattcatctggaacgacctgctgtccctggaaaccggcagcctgaagctggccaacggaagagtgatcgagaagacactgtacaacagaagaacccggcaggatgagcctgccctgttcgtggccctgaccttcgagcggcgggaggtcctggactcctccaatatcaaaccaatgaacctgatcggcgtggcaagaggcgaaaacatccccgccgtgatcgccctgaccgaccccgagggctgcccactgagccggtttaaggatagcctgggaaacccaacccacatcctgagaatcggcgagagctataaggagaagcagcggaccatccaggccaagaaggaggtggagcagcggagagccggcggctacagccggaagtacgccagcaaagccaagaatctggcagacgatatggtgagaaacaccgctagagatctgctgtactacgccgtgacccaggatgccatgctgatcttcgccaacctgagccggggcttcggccggcagggcaagcggaccttcatggccgagagacagtacacacggatggaggactggctgaccgccaagctggcctacgagggcctgagcaagacctacctgtccaagacactggcccagtacacctccaagacatgcagcaactgtgggtttaccatcaccagcgccgactacgacagggtgctggagaagctgaagaagacagcaacaggctggatgaccacaattaacggcaaggagctgaaggtggagggccagattacctactacaacagatacaagagacagaacgtagtcaaggacctgtccgtcgagctggatagactgagcgaagaatctgtgaacaacgacatctcctcctggacaaagggcagaagcggagaagctctgagcctcctgaagaaaagattctcccatagacccgtgcaggagaagttcgtgtgcctgaactgcggcttcgagacacacgcagccgagcaagccgccctgaacatcgccagatcctggctgttcctgcggagccaggagtacaagaaataccagacaaacaagacaaccggcaacaccgataagagagccttcgtcgagacctggcagtccttttaccggaagaagcttaaggaggtgtggaaacctgccgtgcggtctggcggatctggcggaggctccacaagcgtgcaggagcccgtgaccttcaaggacgtggccgtggacttcacccaggaggagtggggccagctggacctggtgcagaggaccctgtacagggacgtgatgctggagacctacggccacctgctgagcgtgggcaaccagatcgccaagcccgaggtgatcagcctgctggagcagggcgaggagccctggagcgtggagcaggcctgcccccagcacacctgccccgagtggatgaggaacaccagccccaagaaaaagagaaaagtctaagctgccttctgcggggcttgccttctggccatgcccttcttctctcccttgcacctgtacctcttggtctttgaataaagcctgagtaggaaggctagcaaaaaaaaaaaaaaaaaaaaaaaaaaaaaaaaaaaaaaaaaaaaaaaaaaaaaaaaaaaaaaaaaaaaaaaaaaaaaaaa

SEQ ID NO: 5808 - RNA, 5797 nt, synthetic construct
  source 1..5797: mol_type = other RNA
aggaaataagagagaaaagaagagtaagaagaaatataagagccaccatggcccctaagaagaagcgtaaagtgagccggatggaacgcctcgtctacgaggtgcggcagaagtgcagaaacatcgaggacatctgcatctcctgcggatctctgaacgtgaccctggagcacccactgttcatcggcggcatgtgccagaactgtaaaaactgttttctggagtgtgcctatcaatacgacgatgacggctaccagagctactgcaccatctgttgcggcggaagagaggtgctgatgtgtggaaataacaactgctgccggtgcttctgcgtggaatgcgtggacctgctggtgggccccggcgccgcccaggccgctattaaggaagatccttggaactgctacatgtgcggccacaagggcacatacggcctgctgagacggagagaggactggcctagcagactgcagatgttcttcgccaataaccacgaccaggagttcgacccccctaaggtgtaccctcccgtccccgccgagaagagaaagcccatccgggtcctgagcctgttcgatggcatcgccaccggtctgctggtgctgaaggacctgggcatccaggtggataggtacattgcctccgaggtgtgcgaggactccatcaccgtgggaatggtgcgtcatcagggcaagatcatgtacgtgggcgacgtgcggagcgtgacacagaagcatatccaggagtggggccctttcgacctggtgatcggcggcagcccttgcaatgacctgagcatcgtgaacccagcccggaagggcctgtacgagggaaccggcagactgttcttcgagttttacagactgctgcacgacgcccggcctaaggaaggcgacgaccggcccttcttttggctgttcgagaatgtggtggccatgggagtcagcgacaagcgggatattagccggttcctggagagcaaccccgtgatgatcgatgccaaggaagtgagcgccgcccaccgggccagatacttctggggcaatctgcctggcatgaacagacccctggccagcaccgtgaacgacaagctggagctgcaggagtgcctggagcacggccggatcgccaagttcagcaaggtgagaaccatcaccacccgaagcaacagcatcaaacaaggcaaggaccagcactttcctgtgttcatgaacgagaaggaggacatcctgtggtgtaccgagatggagagagtgttcgggttcccagtccactacacagatgtcagcaacatgtctagactggccagacagagactgctgggaagaagctggtccgtccctgtgatcagacacctgttcgcccctctgaaggagtacttcgcctgcgtgagcagcggcaacagcaacgccaacagccggggccccagcttctctagcggcctggtgccactgtccctgagagggagccacatgggccccatggagatctacaaaaccgtgagcgcctggaagcggcagcctgtgcgcgtgctgagcctgtttcggaatatcgataaagtcctgaaaagcctgggattcctggagagcggctctggctccggcggtggcaccctgaagtacgtggaggatgtgacaaacgtggtcagacgggatgtggagaagtggggccccttcgatctggtgtacggcagcacccaacccctgggcagctcttgtgaccggtgccctggctggtacatgtttcagttccaccggatcctgcagtacgccctgccgagacaggagtcccagcggccattcttttggattttcatggacaacttgctgctgaccgaggatgaccaggaaactaccactcggttcctgcagaccgaagccgtgaccctgcaggacgtgagaggccgggactaccagaacgccatgcgggtgtggtccaacatccctggactgaaaagcaagcacgcacctctgacccctaaagaagaggagtacctgcaggcccaggtgcggagcagaagcaagctggacgcccctaaggtggatctgctggtgaagaattgcctcctgcccctgagagagtacttcaagtatttcagccagaatagtctgcccctgggcggcccaagcagcggcgcccctcctcccagcggcggcagcccagccggctccccaacctctaccgaggagggcacctctgagtccgccacccccgagagcggccctggcacctccaccgagcccagcgagggcagcgcacccggcagccctgccggcagccccacctccacagaggagggaaccagcaccgagcccagcgaaggcagcgccccaggcaccagcaccgagcctagtgagggcggctctggcggcggcagcgcccaggagattaaacggatcaacaagatcagaagaagacttgtgaaagacagcaacaccaagaaggccggcaagacaggccccatgaaaaccctgctggttagagtgatgacacccgatctgagagagcggctggaaaacctgagaaagaagcctgaaaatatcccccagcccatcagcaatacatctagagccaacctgaataagctgctgaccgattacaccgaaatgaagaaggcgatcctgcatgtgtactgggaagagttccagaaggaccctgtgggcctgatgagccgggtggcccagcctgccagcaagaagatcgatcagaacaagctgaaacctgagatggacgagaagggcaacctgaccaccgccggctttgcctgctctcagtgtggccagcccctgttcgtgtacaagctggagcaggtgtctgagaagggcaaggcttacaccaactacttcggacggtgcaatgtggccgagcacgaaaagctgatcctgctggcccagctgaagcccgagaaggatagcgacgaagccgtgacatatagcctgggaaagtttgggcagagggccctggatttctacagcattcatgtgaccaaggagtccacccaccccgtgaagcccctggcccagatcgccggaaacagatacgcctccggacctgtgggaaaggccctgagcgacgcatgtatgggcacaatcgcctccttcctgtctaagtaccaggacatcatcatcgaacaccagaaggtggtgaagggcaaccagaagagactggagagcctgcgggagctggccggcaaggaaaacctggaataccctagcgtgaccctgccacctcagcctcacaccaaggagggcgttgatgcctacaacgaagtgatcgcccgggtgcgaatgtgggtgaacctgaacctgtggcagaagctgaagctaagcagagatgatgccaagcctctgctgagactgaagggattcccttcctttcctctggtcgagagacaggccaacgaagtggactggtgggacatggtgtgtaacgtgaagaagctgatcaacgagaaaaaggaggatggcaaggtgttttggcagaatctggctggctacaagagacaggaagccctgagaccatacctgagcagcgaggaagatcggaagaagggaaagaaattcgctcggtaccagctgggcgacctgctgctgcacctggaaaagaagcacggcgaggactggggaaaggtgtacgacgaggcctgggagcggattgacaagaaagtggaaggcctgagcaagcacatcaagctggaagaggaacggagaagcgaggacgcccagagcaaggccgccctgaccgactggctgcgggctaaggccagcttcgtgatcgagggcctgaaggaggccgacaaggacgagttctgcagatgcgagctgaagctgcagaagtggtacggggacctgcggggaaagcccttcgccatcgaagccgagaacagcatcctggacatcagcggcttcagcaagcagtacaactgtgccttcatctggcagaaggacggcgtgaagaagctgaacctgtacctgatcatcaactacttcaagggcggcaagctgcggttcaagaagatcaaacctgaagccttcgaagccaacagattctacaccgtgatcaacaaaaagagcggcgagatcgtgcccatggaggtgaacttcaacttcgacgaccccaacctgatcatcctgcctctggcctttggcaagagacagggcagagaattcatctggaacgacctgctgtccctggaaaccggcagcctgaagctggccaacggaagagtgatcgagaagacactgtacaacagaagaacccggcaggatgagcctgccctgttcgtggccctgaccttcgagcggcgggaggtcctggactcctccaatatcaaaccaatgaacctgatcggcgtggcaagaggcgaaaacatccccgccgtgatcgccctgaccgaccccgagggctgcccactgagccggtttaaggatagcctgggaaacccaacccacatcctgagaatcggcgagagctataaggagaagcagcggaccatccaggccaagaaggaggtggagcagcggagagccggcggctacagccggaagtacgccagcaaagccaagaatctggcagacgatatggtgagaaacaccgctagagatctgctgtactacgccgtgacccaggatgccatgctgatcttcgccaacctgagccggggcttcggccggcagggcaagcggaccttcatggccgagagacagtacacacggatggaggactggctgaccgccaagctggcctacgagggcctgagcaagacctacctgtccaagacactggcccagtacacctccaagacatgcagcaactgtgggtttaccatcaccagcgccgactacgacagggtgctggagaagctgaagaagacagcaacaggctggatgaccacaattaacggcaaggagctgaaggtggagggccagattacctactacaacagatacaagagacagaacgtagtcaaggacctgtccgtcgagctggatagactgagcgaagaatctgtgaacaacgacatctcctcctggacaaagggcagaagcggagaagctctgagcctcctgaagaaaagattctcccatagacccgtgcaggagaagttcgtgtgcctgaactgcggcttcgagacacacgcagccgagcaagccgccctgaacatcgccagatcctggctgttcctgcggagccaggagtacaagaaataccagacaaacaagacaaccggcaacaccgataagagagccttcgtcgagacctggcagtccttttaccggaagaagcttaaggaggtgtggaaacctgccgtgcggtctggcggatctggcggaggctccacaagcttccaggccagcgtggtgttcgaggacgtggccgtgaacttcacccccgaggagtgggccctgctgaacaggggccagaggaagctgtacagggacgtgatgctggagacctgcaggaacctgagcgccgtgggcaaggacggcagcatccccagcctggtgttcagcgagaagcagaagttccacagcagcggcgacctgaccaggatgcaggagggcctgctgaggagccccctggtggagaccagccccaagaaaaagagaaaagtctaagctgccttctgcggggcttgccttctggccatgcccttcttctctcccttgcacctgtacctcttggtctttgaataaagcctgagtaggaaggctagcaaaaaaaaaaaaaaaaaaaaaaaaaaaaaaaaaaaaaaaaaaaaaaaaaaaaaaaaaaaaaaaaaaaaaaaaaaaaaaaa

SEQ ID NO: 5809 - RNA, 5797 nt, synthetic construct
  source 1..5797: mol_type = other RNA
aggaaataagagagaaaagaagagtaagaagaaatataagagccaccatggcccctaagaagaagcgtaaagtgagccggatggaacgcctcgtctacgaggtgcggcagaagtgcagaaacatcgaggacatctgcatctcctgcggatctctgaacgtgaccctggagcacccactgttcatcggcggcatgtgccagaactgtaaaaactgttttctggagtgtgcctatcaatacgacgatgacggctaccagagctactgcaccatctgttgcggcggaagagaggtgctgatgtgtggaaataacaactgctgccggtgcttctgcgtggaatgcgtggacctgctggtgggccccggcgccgcccaggccgctattaaggaagatccttggaactgctacatgtgcggccacaagggcacatacggcctgctgagacggagagaggactggcctagcagactgcagatgttcttcgccaataaccacgaccaggagttcgacccccctaaggtgtaccctcccgtccccgccgagaagagaaagcccatccgggtcctgagcctgttcgatggcatcgccaccggtctgctggtgctgaaggacctgggcatccaggtggataggtacattgcctccgaggtgtgcgaggactccatcaccgtgggaatggtgcgtcatcagggcaagatcatgtacgtgggcgacgtgcggagcgtgacacagaagcatatccaggagtggggccctttcgacctggtgatcggcggcagcccttgcaatgacctgagcatcgtgaacccagcccggaagggcctgtacgagggaaccggcagactgttcttcgagttttacagactgctgcacgacgcccggcctaaggaaggcgacgaccggcccttcttttggctgttcgagaatgtggtggccatgggagtcagcgacaagcgggatattagccggttcctggagagcaaccccgtgatgatcgatgccaaggaagtgagcgccgcccaccgggccagatacttctggggcaatctgcctggcatgaacagacccctggccagcaccgtgaacgacaagctggagctgcaggagtgcctggagcacggccggatcgccaagttcagcaaggtgagaaccatcaccacccgaagcaacagcatcaaacaaggcaaggaccagcactttcctgtgttcatgaacgagaaggaggacatcctgtggtgtaccgagatggagagagtgttcgggttcccagtccactacacagatgtcagcaacatgtctagactggccagacagagactgctgggaagaagctggtccgtccctgtgatcagacacctgttcgcccctctgaaggagtacttcgcctgcgtgagcagcggcaacagcaacgccaacagccggggccccagcttctctagcggcctggtgccactgtccctgagagggagccacatgggccccatggagatctacaaaaccgtgagcgcctggaagcggcagcctgtgcgcgtgctgagcctgtttcggaatatcgataaagtcctgaaaagcctgggattcctggagagcggctctggctccggcggtggcaccctgaagtacgtggaggatgtgacaaacgtggtcagacgggatgtggagaagtggggccccttcgatctggtgtacggcagcacccaacccctgggcagctcttgtgaccggtgccctggctggtacatgtttcagttccaccggatcctgcagtacgccctgccgagacaggagtcccagcggccattcttttggattttcatggacaacttgctgctgaccgaggatgaccaggaaactaccactcggttcctgcagaccgaagccgtgaccctgcaggacgtgagaggccgggactaccagaacgccatgcgggtgtggtccaacatccctggactgaaaagcaagcacgcacctctgacccctaaagaagaggagtacctgcaggcccaggtgcggagcagaagcaagctggacgcccctaaggtggatctgctggtgaagaattgcctcctgcccctgagagagtacttcaagtatttcagccagaatagtctgcccctgggcggcccaagcagcggcgcccctcctcccagcggcggcagcccagccggctccccaacctctaccgaggagggcacctctgagtccgccacccccgagagcggccctggcacctccaccgagcccagcgagggcagcgcacccggcagccctgccggcagccccacctccacagaggagggaaccagcaccgagcccagcgaaggcagcgccccaggcaccagcaccgagcctagtgagggcggctctggcggcggcagcgcccaggagattaaacggatcaacaagatcagaagaagacttgtgaaagacagcaacaccaagaaggccggcaagacaggccccatgaaaaccctgctggttagagtgatgacacccgatctgagagagcggctggaaaacctgagaaagaagcctgaaaatatcccccagcccatcagcaatacatctagagccaacctgaataagctgctgaccgattacaccgaaatgaagaaggcgatcctgcatgtgtactgggaagagttccagaaggaccctgtgggcctgatgagccgggtggcccagcctgccagcaagaagatcgatcagaacaagctgaaacctgagatggacgagaagggcaacctgaccaccgccggctttgcctgctctcagtgtggccagcccctgttcgtgtacaagctggagcaggtgtctgagaagggcaaggcttacaccaactacttcggacggtgcaatgtggccgagcacgaaaagctgatcctgctggcccagctgaagcccgagaaggatagcgacgaagccgtgacatatagcctgggaaagtttgggcagagggccctggatttctacagcattcatgtgaccaaggagtccacccaccccgtgaagcccctggcccagatcgccggaaacagatacgcctccggacctgtgggaaaggccctgagcgacgcatgtatgggcacaatcgcctccttcctgtctaagtaccaggacatcatcatcgaacaccagaaggtggtgaagggcaaccagaagagactggagagcctgcgggagctggccggcaaggaaaacctggaataccctagcgtgaccctgccacctcagcctcacaccaaggagggcgttgatgcctacaacgaagtgatcgcccgggtgcgaatgtgggtgaacctgaacctgtggcagaagctgaagctaagcagagatgatgccaagcctctgctgagactgaagggattcccttcctttcctctggtcgagagacaggccaacgaagtggactggtgggacatggtgtgtaacgtgaagaagctgatcaacgagaaaaaggaggatggcaaggtgttttggcagaatctggctggctacaagagacaggaagccctgagaccatacctgagcagcgaggaagatcggaagaagggaaagaaattcgctcggtaccagctgggcgacctgctgctgcacctggaaaagaagcacggcgaggactggggaaaggtgtacgacgaggcctgggagcggattgacaagaaagtggaaggcctgagcaagcacatcaagctggaagaggaacggagaagcgaggacgcccagagcaaggccgccctgaccgactggctgcgggctaaggccagcttcgtgatcgagggcctgaaggaggccgacaaggacgagttctgcagatgcgagctgaagctgcagaagtggtacggggacctgcggggaaagcccttcgccatcgaagccgagaacagcatcctggacatcagcggcttcagcaagcagtacaactgtgccttcatctggcagaaggacggcgtgaagaagctgaacctgtacctgatcatcaactacttcaagggcggcaagctgcggttcaagaagatcaaacctgaagccttcgaagccaacagattctacaccgtgatcaacaaaaagagcggcgagatcgtgcccatggaggtgaacttcaacttcgacgaccccaacctgatcatcctgcctctggcctttggcaagagacagggcagagaattcatctggaacgacctgctgtccctggaaaccggcagcctgaagctggccaacggaagagtgatcgagaagacactgtacaacagaagaacccggcaggatgagcctgccctgttcgtggccctgaccttcgagcggcgggaggtcctggactcctccaatatcaaaccaatgaacctgatcggcgtggcaagaggcgaaaacatccccgccgtgatcgccctgaccgaccccgagggctgcccactgagccggtttaaggatagcctgggaaacccaacccacatcctgagaatcggcgagagctataaggagaagcagcggaccatccaggccaagaaggaggtggagcagcggagagccggcggctacagccggaagtacgccagcaaagccaagaatctggcagacgatatggtgagaaacaccgctagagatctgctgtactacgccgtgacccaggatgccatgctgatcttcgccaacctgagccggggcttcggccggcagggcaagcggaccttcatggccgagagacagtacacacggatggaggactggctgaccgccaagctggcctacgagggcctgagcaagacctacctgtccaagacactggcccagtacacctccaagacatgcagcaactgtgggtttaccatcaccagcgccgactacgacagggtgctggagaagctgaagaagacagcaacaggctggatgaccacaattaacggcaaggagctgaaggtggagggccagattacctactacaacagatacaagagacagaacgtagtcaaggacctgtccgtcgagctggatagactgagcgaagaatctgtgaacaacgacatctcctcctggacaaagggcagaagcggagaagctctgagcctcctgaagaaaagattctcccatagacccgtgcaggagaagttcgtgtgcctgaactgcggcttcgagacacacgcagccgagcaagccgccctgaacatcgccagatcctggctgttcctgcggagccaggagtacaagaaataccagacaaacaagacaaccggcaacaccgataagagagccttcgtcgagacctggcagtccttttaccggaagaagcttaaggaggtgtggaaacctgccgtgcggtctggcggatctggcggaggctccacaagcagcctgggcagcgagctgttcagggacgtggccatcgtgttcagccaggaggagtggcagtggctggcccccgcccagagggacctgtacagggacgtgatgctggagacctacagcaacctggtgagcctgggcctggccatcagcaagcccgacgtgatcagcttcctggagcagggcaaggagccctggatggtggagagggtggccaccggcgacctgtgccccgtgctggagagcggcaccagccccaagaaaaagagaaaagtctaagctgccttctgcggggcttgccttctggccatgcccttcttctctcccttgcacctgtacctcttggtctttgaataaagcctgagtaggaaggctagcaaaaaaaaaaaaaaaaaaaaaaaaaaaaaaaaaaaaaaaaaaaaaaaaaaaaaaaaaaaaaaaaaaaaaaaaaaaaaaaa

SEQ ID NO: 5810 - RNA, 5797 nt, synthetic construct
  source 1..5797: mol_type = other RNA
aggaaataagagagaaaagaagagtaagaagaaatataagagccaccatggcccctaagaagaagcgtaaagtgagccggatggaacgcctcgtctacgaggtgcggcagaagtgcagaaacatcgaggacatctgcatctcctgcggatctctgaacgtgaccctggagcacccactgttcatcggcggcatgtgccagaactgtaaaaactgttttctggagtgtgcctatcaatacgacgatgacggctaccagagctactgcaccatctgttgcggcggaagagaggtgctgatgtgtggaaataacaactgctgccggtgcttctgcgtggaatgcgtggacctgctggtgggccccggcgccgcccaggccgctattaaggaagatccttggaactgctacatgtgcggccacaagggcacatacggcctgctgagacggagagaggactggcctagcagactgcagatgttcttcgccaataaccacgaccaggagttcgacccccctaaggtgtaccctcccgtccccgccgagaagagaaagcccatccgggtcctgagcctgttcgatggcatcgccaccggtctgctggtgctgaaggacctgggcatccaggtggataggtacattgcctccgaggtgtgcgaggactccatcaccgtgggaatggtgcgtcatcagggcaagatcatgtacgtgggcgacgtgcggagcgtgacacagaagcatatccaggagtggggccctttcgacctggtgatcggcggcagcccttgcaatgacctgagcatcgtgaacccagcccggaagggcctgtacgagggaaccggcagactgttcttcgagttttacagactgctgcacgacgcccggcctaaggaaggcgacgaccggcccttcttttggctgttcgagaatgtggtggccatgggagtcagcgacaagcgggatattagccggttcctggagagcaaccccgtgatgatcgatgccaaggaagtgagcgccgcccaccgggccagatacttctggggcaatctgcctggcatgaacagacccctggccagcaccgtgaacgacaagctggagctgcaggagtgcctggagcacggccggatcgccaagttcagcaaggtgagaaccatcaccacccgaagcaacagcatcaaacaaggcaaggaccagcactttcctgtgttcatgaacgagaaggaggacatcctgtggtgtaccgagatggagagagtgttcgggttcccagtccactacacagatgtcagcaacatgtctagactggccagacagagactgctgggaagaagctggtccgtccctgtgatcagacacctgttcgcccctctgaaggagtacttcgcctgcgtgagcagcggcaacagcaacgccaacagccggggccccagcttctctagcggcctggtgccactgtccctgagagggagccacatgggccccatggagatctacaaaaccgtgagcgcctggaagcggcagcctgtgcgcgtgctgagcctgtttcggaatatcgataaagtcctgaaaagcctgggattcctggagagcggctctggctccggcggtggcaccctgaagtacgtggaggatgtgacaaacgtggtcagacgggatgtggagaagtggggccccttcgatctggtgtacggcagcacccaacccctgggcagctcttgtgaccggtgccctggctggtacatgtttcagttccaccggatcctgcagtacgccctgccgagacaggagtcccagcggccattcttttggattttcatggacaacttgctgctgaccgaggatgaccaggaaactaccactcggttcctgcagaccgaagccgtgaccctgcaggacgtgagaggccgggactaccagaacgccatgcgggtgtggtccaacatccctggactgaaaagcaagcacgcacctctgacccctaaagaagaggagtacctgcaggcccaggtgcggagcagaagcaagctggacgcccctaaggtggatctgctggtgaagaattgcctcctgcccctgagagagtacttcaagtatttcagccagaatagtctgcccctgggcggcccaagcagcggcgcccctcctcccagcggcggcagcccagccggctccccaacctctaccgaggagggcacctctgagtccgccacccccgagagcggccctggcacctccaccgagcccagcgagggcagcgcacccggcagccctgccggcagccccacctccacagaggagggaaccagcaccgagcccagcgaaggcagcgccccaggcaccagcaccgagcctagtgagggcggctctggcggcggcagcgcccaggagattaaacggatcaacaagatcagaagaagacttgtgaaagacagcaacaccaagaaggccggcaagacaggccccatgaaaaccctgctggttagagtgatgacacccgatctgagagagcggctggaaaacctgagaaagaagcctgaaaatatcccccagcccatcagcaatacatctagagccaacctgaataagctgctgaccgattacaccgaaatgaagaaggcgatcctgcatgtgtactgggaagagttccagaaggaccctgtgggcctgatgagccgggtggcccagcctgccagcaagaagatcgatcagaacaagctgaaacctgagatggacgagaagggcaacctgaccaccgccggctttgcctgctctcagtgtggccagcccctgttcgtgtacaagctggagcaggtgtctgagaagggcaaggcttacaccaactacttcggacggtgcaatgtggccgagcacgaaaagctgatcctgctggcccagctgaagcccgagaaggatagcgacgaagccgtgacatatagcctgggaaagtttgggcagagggccctggatttctacagcattcatgtgaccaaggagtccacccaccccgtgaagcccctggcccagatcgccggaaacagatacgcctccggacctgtgggaaaggccctgagcgacgcatgtatgggcacaatcgcctccttcctgtctaagtaccaggacatcatcatcgaacaccagaaggtggtgaagggcaaccagaagagactggagagcctgcgggagctggccggcaaggaaaacctggaataccctagcgtgaccctgccacctcagcctcacaccaaggagggcgttgatgcctacaacgaagtgatcgcccgggtgcgaatgtgggtgaacctgaacctgtggcagaagctgaagctaagcagagatgatgccaagcctctgctgagactgaagggattcccttcctttcctctggtcgagagacaggccaacgaagtggactggtgggacatggtgtgtaacgtgaagaagctgatcaacgagaaaaaggaggatggcaaggtgttttggcagaatctggctggctacaagagacaggaagccctgagaccatacctgagcagcgaggaagatcggaagaagggaaagaaattcgctcggtaccagctgggcgacctgctgctgcacctggaaaagaagcacggcgaggactggggaaaggtgtacgacgaggcctgggagcggattgacaagaaagtggaaggcctgagcaagcacatcaagctggaagaggaacggagaagcgaggacgcccagagcaaggccgccctgaccgactggctgcgggctaaggccagcttcgtgatcgagggcctgaaggaggccgacaaggacgagttctgcagatgcgagctgaagctgcagaagtggtacggggacctgcggggaaagcccttcgccatcgaagccgagaacagcatcctggacatcagcggcttcagcaagcagtacaactgtgccttcatctggcagaaggacggcgtgaagaagctgaacctgtacctgatcatcaactacttcaagggcggcaagctgcggttcaagaagatcaaacctgaagccttcgaagccaacagattctacaccgtgatcaacaaaaagagcggcgagatcgtgcccatggaggtgaacttcaacttcgacgaccccaacctgatcatcctgcctctggcctttggcaagagacagggcagagaattcatctggaacgacctgctgtccctggaaaccggcagcctgaagctggccaacggaagagtgatcgagaagacactgtacaacagaagaacccggcaggatgagcctgccctgttcgtggccctgaccttcgagcggcgggaggtcctggactcctccaatatcaaaccaatgaacctgatcggcgtggcaagaggcgaaaacatccccgccgtgatcgccctgaccgaccccgagggctgcccactgagccggtttaaggatagcctgggaaacccaacccacatcctgagaatcggcgagagctataaggagaagcagcggaccatccaggccaagaaggaggtggagcagcggagagccggcggctacagccggaagtacgccagcaaagccaagaatctggcagacgatatggtgagaaacaccgctagagatctgctgtactacgccgtgacccaggatgccatgctgatcttcgccaacctgagccggggcttcggccggcagggcaagcggaccttcatggccgagagacagtacacacggatggaggactggctgaccgccaagctggcctacgagggcctgagcaagacctacctgtccaagacactggcccagtacacctccaagacatgcagcaactgtgggtttaccatcaccagcgccgactacgacagggtgctggagaagctgaagaagacagcaacaggctggatgaccacaattaacggcaaggagctgaaggtggagggccagattacctactacaacagatacaagagacagaacgtagtcaaggacctgtccgtcgagctggatagactgagcgaagaatctgtgaacaacgacatctcctcctggacaaagggcagaagcggagaagctctgagcctcctgaagaaaagattctcccatagacccgtgcaggagaagttcgtgtgcctgaactgcggcttcgagacacacgcagccgagcaagccgccctgaacatcgccagatcctggctgttcctgcggagccaggagtacaagaaataccagacaaacaagacaaccggcaacaccgataagagagccttcgtcgagacctggcagtccttttaccggaagaagcttaaggaggtgtggaaacctgccgtgcggtctggcggatctggcggaggctccacaagcccccaggagagcgtggccttcgacgacgtggccgtgtacttcaccaagaaggagtgggccatcatggtgcccgaccagagggccctgtacagggacgtgatgctggagaactacgaggccgtggccttcgtggccgtgccccccaccagcaagcccgccctgatcagccacctggagcagggcaaggagccctgcttcacccagccccagggcgtgctgagcaggagggactggagggccggcaccagccccaagaaaaagagaaaagtctaagctgccttctgcggggcttgccttctggccatgcccttcttctctcccttgcacctgtacctcttggtctttgaataaagcctgagtaggaaggctagcaaaaaaaaaaaaaaaaaaaaaaaaaaaaaaaaaaaaaaaaaaaaaaaaaaaaaaaaaaaaaaaaaaaaaaaaaaaaaaaa

SEQ ID NO: 5811 - RNA, 5797 nt, synthetic construct
  source 1..5797: mol_type = other RNA
aggaaataagagagaaaagaagagtaagaagaaatataagagccaccatggcccctaagaagaagcgtaaagtgagccggatggaacgcctcgtctacgaggtgcggcagaagtgcagaaacatcgaggacatctgcatctcctgcggatctctgaacgtgaccctggagcacccactgttcatcggcggcatgtgccagaactgtaaaaactgttttctggagtgtgcctatcaatacgacgatgacggctaccagagctactgcaccatctgttgcggcggaagagaggtgctgatgtgtggaaataacaactgctgccggtgcttctgcgtggaatgcgtggacctgctggtgggccccggcgccgcccaggccgctattaaggaagatccttggaactgctacatgtgcggccacaagggcacatacggcctgctgagacggagagaggactggcctagcagactgcagatgttcttcgccaataaccacgaccaggagttcgacccccctaaggtgtaccctcccgtccccgccgagaagagaaagcccatccgggtcctgagcctgttcgatggcatcgccaccggtctgctggtgctgaaggacctgggcatccaggtggataggtacattgcctccgaggtgtgcgaggactccatcaccgtgggaatggtgcgtcatcagggcaagatcatgtacgtgggcgacgtgcggagcgtgacacagaagcatatccaggagtggggccctttcgacctggtgatcggcggcagcccttgcaatgacctgagcatcgtgaacccagcccggaagggcctgtacgagggaaccggcagactgttcttcgagttttacagactgctgcacgacgcccggcctaaggaaggcgacgaccggcccttcttttggctgttcgagaatgtggtggccatgggagtcagcgacaagcgggatattagccggttcctggagagcaaccccgtgatgatcgatgccaaggaagtgagcgccgcccaccgggccagatacttctggggcaatctgcctggcatgaacagacccctggccagcaccgtgaacgacaagctggagctgcaggagtgcctggagcacggccggatcgccaagttcagcaaggtgagaaccatcaccacccgaagcaacagcatcaaacaaggcaaggaccagcactttcctgtgttcatgaacgagaaggaggacatcctgtggtgtaccgagatggagagagtgttcgggttcccagtccactacacagatgtcagcaacatgtctagactggccagacagagactgctgggaagaagctggtccgtccctgtgatcagacacctgttcgcccctctgaaggagtacttcgcctgcgtgagcagcggcaacagcaacgccaacagccggggccccagcttctctagcggcctggtgccactgtccctgagagggagccacatgggccccatggagatctacaaaaccgtgagcgcctggaagcggcagcctgtgcgcgtgctgagcctgtttcggaatatcgataaagtcctgaaaagcctgggattcctggagagcggctctggctccggcggtggcaccctgaagtacgtggaggatgtgacaaacgtggtcagacgggatgtggagaagtggggccccttcgatctggtgtacggcagcacccaacccctgggcagctcttgtgaccggtgccctggctggtacatgtttcagttccaccggatcctgcagtacgccctgccgagacaggagtcccagcggccattcttttggattttcatggacaacttgctgctgaccgaggatgaccaggaaactaccactcggttcctgcagaccgaagccgtgaccctgcaggacgtgagaggccgggactaccagaacgccatgcgggtgtggtccaacatccctggactgaaaagcaagcacgcacctctgacccctaaagaagaggagtacctgcaggcccaggtgcggagcagaagcaagctggacgcccctaaggtggatctgctggtgaagaattgcctcctgcccctgagagagtacttcaagtatttcagccagaatagtctgcccctgggcggcccaagcagcggcgcccctcctcccagcggcggcagcccagccggctccccaacctctaccgaggagggcacctctgagtccgccacccccgagagcggccctggcacctccaccgagcccagcgagggcagcgcacccggcagccctgccggcagccccacctccacagaggagggaaccagcaccgagcccagcgaaggcagcgccccaggcaccagcaccgagcctagtgagggcggctctggcggcggcagcgcccaggagattaaacggatcaacaagatcagaagaagacttgtgaaagacagcaacaccaagaaggccggcaagacaggccccatgaaaaccctgctggttagagtgatgacacccgatctgagagagcggctggaaaacctgagaaagaagcctgaaaatatcccccagcccatcagcaatacatctagagccaacctgaataagctgctgaccgattacaccgaaatgaagaaggcgatcctgcatgtgtactgggaagagttccagaaggaccctgtgggcctgatgagccgggtggcccagcctgccagcaagaagatcgatcagaacaagctgaaacctgagatggacgagaagggcaacctgaccaccgccggctttgcctgctctcagtgtggccagcccctgttcgtgtacaagctggagcaggtgtctgagaagggcaaggcttacaccaactacttcggacggtgcaatgtggccgagcacgaaaagctgatcctgctggcccagctgaagcccgagaaggatagcgacgaagccgtgacatatagcctgggaaagtttgggcagagggccctggatttctacagcattcatgtgaccaaggagtccacccaccccgtgaagcccctggcccagatcgccggaaacagatacgcctccggacctgtgggaaaggccctgagcgacgcatgtatgggcacaatcgcctccttcctgtctaagtaccaggacatcatcatcgaacaccagaaggtggtgaagggcaaccagaagagactggagagcctgcgggagctggccggcaaggaaaacctggaataccctagcgtgaccctgccacctcagcctcacaccaaggagggcgttgatgcctacaacgaagtgatcgcccgggtgcgaatgtgggtgaacctgaacctgtggcagaagctgaagctaagcagagatgatgccaagcctctgctgagactgaagggattcccttcctttcctctggtcgagagacaggccaacgaagtggactggtgggacatggtgtgtaacgtgaagaagctgatcaacgagaaaaaggaggatggcaaggtgttttggcagaatctggctggctacaagagacaggaagccctgagaccatacctgagcagcgaggaagatcggaagaagggaaagaaattcgctcggtaccagctgggcgacctgctgctgcacctggaaaagaagcacggcgaggactggggaaaggtgtacgacgaggcctgggagcggattgacaagaaagtggaaggcctgagcaagcacatcaagctggaagaggaacggagaagcgaggacgcccagagcaaggccgccctgaccgactggctgcgggctaaggccagcttcgtgatcgagggcctgaaggaggccgacaaggacgagttctgcagatgcgagctgaagctgcagaagtggtacggggacctgcggggaaagcccttcgccatcgaagccgagaacagcatcctggacatcagcggcttcagcaagcagtacaactgtgccttcatctggcagaaggacggcgtgaagaagctgaacctgtacctgatcatcaactacttcaagggcggcaagctgcggttcaagaagatcaaacctgaagccttcgaagccaacagattctacaccgtgatcaacaaaaagagcggcgagatcgtgcccatggaggtgaacttcaacttcgacgaccccaacctgatcatcctgcctctggcctttggcaagagacagggcagagaattcatctggaacgacctgctgtccctggaaaccggcagcctgaagctggccaacggaagagtgatcgagaagacactgtacaacagaagaacccggcaggatgagcctgccctgttcgtggccctgaccttcgagcggcgggaggtcctggactcctccaatatcaaaccaatgaacctgatcggcgtggcaagaggcgaaaacatccccgccgtgatcgccctgaccgaccccgagggctgcccactgagccggtttaaggatagcctgggaaacccaacccacatcctgagaatcggcgagagctataaggagaagcagcggaccatccaggccaagaaggaggtggagcagcggagagccggcggctacagccggaagtacgccagcaaagccaagaatctggcagacgatatggtgagaaacaccgctagagatctgctgtactacgccgtgacccaggatgccatgctgatcttcgccaacctgagccggggcttcggccggcagggcaagcggaccttcatggccgagagacagtacacacggatggaggactggctgaccgccaagctggcctacgagggcctgagcaagacctacctgtccaagacactggcccagtacacctccaagacatgcagcaactgtgggtttaccatcaccagcgccgactacgacagggtgctggagaagctgaagaagacagcaacaggctggatgaccacaattaacggcaaggagctgaaggtggagggccagattacctactacaacagatacaagagacagaacgtagtcaaggacctgtccgtcgagctggatagactgagcgaagaatctgtgaacaacgacatctcctcctggacaaagggcagaagcggagaagctctgagcctcctgaagaaaagattctcccatagacccgtgcaggagaagttcgtgtgcctgaactgcggcttcgagacacacgcagccgagcaagccgccctgaacatcgccagatcctggctgttcctgcggagccaggagtacaagaaataccagacaaacaagacaaccggcaacaccgataagagagccttcgtcgagacctggcagtccttttaccggaagaagcttaaggaggtgtggaaacctgccgtgcggtctggcggatctggcggaggctccacaagcgagcccggccccgtgaccttcggcgacgtggccgtgtacttcagcagggaggagtggggctgcctgaggcccgcccagagggccctgtacagggacgtgatgagggagacctacagccacctgggcgccctgggcgtggagggcagcaagcccgccctgatcagctgggtggaggaggaggccgagctgtggggccccgccgcccaggaccccgaggtggccaagaggcccaccgaggccgacaccagccccaagaaaaagagaaaagtctaagctgccttctgcggggcttgccttctggccatgcccttcttctctcccttgcacctgtacctcttggtctttgaataaagcctgagtaggaaggctagcaaaaaaaaaaaaaaaaaaaaaaaaaaaaaaaaaaaaaaaaaaaaaaaaaaaaaaaaaaaaaaaaaaaaaaaaaaaaaaaa

SEQ ID NO: 5812 - RNA, 5797 nt, synthetic construct
  source 1..5797: mol_type = other RNA
aggaaataagagagaaaagaagagtaagaagaaatataagagccaccatggcccctaagaagaagcgtaaagtgagccggatggaacgcctcgtctacgaggtgcggcagaagtgcagaaacatcgaggacatctgcatctcctgcggatctctgaacgtgaccctggagcacccactgttcatcggcggcatgtgccagaactgtaaaaactgttttctggagtgtgcctatcaatacgacgatgacggctaccagagctactgcaccatctgttgcggcggaagagaggtgctgatgtgtggaaataacaactgctgccggtgcttctgcgtggaatgcgtggacctgctggtgggccccggcgccgcccaggccgctattaaggaagatccttggaactgctacatgtgcggccacaagggcacatacggcctgctgagacggagagaggactggcctagcagactgcagatgttcttcgccaataaccacgaccaggagttcgacccccctaaggtgtaccctcccgtccccgccgagaagagaaagcccatccgggtcctgagcctgttcgatggcatcgccaccggtctgctggtgctgaaggacctgggcatccaggtggataggtacattgcctccgaggtgtgcgaggactccatcaccgtgggaatggtgcgtcatcagggcaagatcatgtacgtgggcgacgtgcggagcgtgacacagaagcatatccaggagtggggccctttcgacctggtgatcggcggcagcccttgcaatgacctgagcatcgtgaacccagcccggaagggcctgtacgagggaaccggcagactgttcttcgagttttacagactgctgcacgacgcccggcctaaggaaggcgacgaccggcccttcttttggctgttcgagaatgtggtggccatgggagtcagcgacaagcgggatattagccggttcctggagagcaaccccgtgatgatcgatgccaaggaagtgagcgccgcccaccgggccagatacttctggggcaatctgcctggcatgaacagacccctggccagcaccgtgaacgacaagctggagctgcaggagtgcctggagcacggccggatcgccaagttcagcaaggtgagaaccatcaccacccgaagcaacagcatcaaacaaggcaaggaccagcactttcctgtgttcatgaacgagaaggaggacatcctgtggtgtaccgagatggagagagtgttcgggttcccagtccactacacagatgtcagcaacatgtctagactggccagacagagactgctgggaagaagctggtccgtccctgtgatcagacacctgttcgcccctctgaaggagtacttcgcctgcgtgagcagcggcaacagcaacgccaacagccggggccccagcttctctagcggcctggtgccactgtccctgagagggagccacatgggccccatggagatctacaaaaccgtgagcgcctggaagcggcagcctgtgcgcgtgctgagcctgtttcggaatatcgataaagtcctgaaaagcctgggattcctggagagcggctctggctccggcggtggcaccctgaagtacgtggaggatgtgacaaacgtggtcagacgggatgtggagaagtggggccccttcgatctggtgtacggcagcacccaacccctgggcagctcttgtgaccggtgccctggctggtacatgtttcagttccaccggatcctgcagtacgccctgccgagacaggagtcccagcggccattcttttggattttcatggacaacttgctgctgaccgaggatgaccaggaaactaccactcggttcctgcagaccgaagccgtgaccctgcaggacgtgagaggccgggactaccagaacgccatgcgggtgtggtccaacatccctggactgaaaagcaagcacgcacctctgacccctaaagaagaggagtacctgcaggcccaggtgcggagcagaagcaagctggacgcccctaaggtggatctgctggtgaagaattgcctcctgcccctgagagagtacttcaagtatttcagccagaatagtctgcccctgggcggcccaagcagcggcgcccctcctcccagcggcggcagcccagccggctccccaacctctaccgaggagggcacctctgagtccgccacccccgagagcggccctggcacctccaccgagcccagcgagggcagcgcacccggcagccctgccggcagccccacctccacagaggagggaaccagcaccgagcccagcgaaggcagcgccccaggcaccagcaccgagcctagtgagggcggctctggcggcggcagcgcccaggagattaaacggatcaacaagatcagaagaagacttgtgaaagacagcaacaccaagaaggccggcaagacaggccccatgaaaaccctgctggttagagtgatgacacccgatctgagagagcggctggaaaacctgagaaagaagcctgaaaatatcccccagcccatcagcaatacatctagagccaacctgaataagctgctgaccgattacaccgaaatgaagaaggcgatcctgcatgtgtactgggaagagttccagaaggaccctgtgggcctgatgagccgggtggcccagcctgccagcaagaagatcgatcagaacaagctgaaacctgagatggacgagaagggcaacctgaccaccgccggctttgcctgctctcagtgtggccagcccctgttcgtgtacaagctggagcaggtgtctgagaagggcaaggcttacaccaactacttcggacggtgcaatgtggccgagcacgaaaagctgatcctgctggcccagctgaagcccgagaaggatagcgacgaagccgtgacatatagcctgggaaagtttgggcagagggccctggatttctacagcattcatgtgaccaaggagtccacccaccccgtgaagcccctggcccagatcgccggaaacagatacgcctccggacctgtgggaaaggccctgagcgacgcatgtatgggcacaatcgcctccttcctgtctaagtaccaggacatcatcatcgaacaccagaaggtggtgaagggcaaccagaagagactggagagcctgcgggagctggccggcaaggaaaacctggaataccctagcgtgaccctgccacctcagcctcacaccaaggagggcgttgatgcctacaacgaagtgatcgcccgggtgcgaatgtgggtgaacctgaacctgtggcagaagctgaagctaagcagagatgatgccaagcctctgctgagactgaagggattcccttcctttcctctggtcgagagacaggccaacgaagtggactggtgggacatggtgtgtaacgtgaagaagctgatcaacgagaaaaaggaggatggcaaggtgttttggcagaatctggctggctacaagagacaggaagccctgagaccatacctgagcagcgaggaagatcggaagaagggaaagaaattcgctcggtaccagctgggcgacctgctgctgcacctggaaaagaagcacggcgaggactggggaaaggtgtacgacgaggcctgggagcggattgacaagaaagtggaaggcctgagcaagcacatcaagctggaagaggaacggagaagcgaggacgcccagagcaaggccgccctgaccgactggctgcgggctaaggccagcttcgtgatcgagggcctgaaggaggccgacaaggacgagttctgcagatgcgagctgaagctgcagaagtggtacggggacctgcggggaaagcccttcgccatcgaagccgagaacagcatcctggacatcagcggcttcagcaagcagtacaactgtgccttcatctggcagaaggacggcgtgaagaagctgaacctgtacctgatcatcaactacttcaagggcggcaagctgcggttcaagaagatcaaacctgaagccttcgaagccaacagattctacaccgtgatcaacaaaaagagcggcgagatcgtgcccatggaggtgaacttcaacttcgacgaccccaacctgatcatcctgcctctggcctttggcaagagacagggcagagaattcatctggaacgacctgctgtccctggaaaccggcagcctgaagctggccaacggaagagtgatcgagaagacactgtacaacagaagaacccggcaggatgagcctgccctgttcgtggccctgaccttcgagcggcgggaggtcctggactcctccaatatcaaaccaatgaacctgatcggcgtggcaagaggcgaaaacatccccgccgtgatcgccctgaccgaccccgagggctgcccactgagccggtttaaggatagcctgggaaacccaacccacatcctgagaatcggcgagagctataaggagaagcagcggaccatccaggccaagaaggaggtggagcagcggagagccggcggctacagccggaagtacgccagcaaagccaagaatctggcagacgatatggtgagaaacaccgctagagatctgctgtactacgccgtgacccaggatgccatgctgatcttcgccaacctgagccggggcttcggccggcagggcaagcggaccttcatggccgagagacagtacacacggatggaggactggctgaccgccaagctggcctacgagggcctgagcaagacctacctgtccaagacactggcccagtacacctccaagacatgcagcaactgtgggtttaccatcaccagcgccgactacgacagggtgctggagaagctgaagaagacagcaacaggctggatgaccacaattaacggcaaggagctgaaggtggagggccagattacctactacaacagatacaagagacagaacgtagtcaaggacctgtccgtcgagctggatagactgagcgaagaatctgtgaacaacgacatctcctcctggacaaagggcagaagcggagaagctctgagcctcctgaagaaaagattctcccatagacccgtgcaggagaagttcgtgtgcctgaactgcggcttcgagacacacgcagccgagcaagccgccctgaacatcgccagatcctggctgttcctgcggagccaggagtacaagaaataccagacaaacaagacaaccggcaacaccgataagagagccttcgtcgagacctggcagtccttttaccggaagaagcttaaggaggtgtggaaacctgccgtgcggtctggcggatctggcggaggctccacaagcttccaggagagcgtgaccttccaggacgtggccgtggacttcacctgggaggagtggggccacctgggccccgcccagaaggagctgtacagggaggtgatgctggagaactacaggaacctggtgtgcctgggcctggaggtgagcaagcccgacgtggtgtgccagctggagaggggcgaggccccctggatgcccgagggcgccgtgcccaggagctgcagccagaactggggcgccaggaccagccccaagaaaaagagaaaagtctaagctgccttctgcggggcttgccttctggccatgcccttcttctctcccttgcacctgtacctcttggtctttgaataaagcctgagtaggaaggctagcaaaaaaaaaaaaaaaaaaaaaaaaaaaaaaaaaaaaaaaaaaaaaaaaaaaaaaaaaaaaaaaaaaaaaaaaaaaaaaaa

SEQ ID NO: 5813 - RNA, 5797 nt, synthetic construct
  source 1..5797: mol_type = other RNA
aggaaataagagagaaaagaagagtaagaagaaatataagagccaccatggcccctaagaagaagcgtaaagtgagccggatggaacgcctcgtctacgaggtgcggcagaagtgcagaaacatcgaggacatctgcatctcctgcggatctctgaacgtgaccctggagcacccactgttcatcggcggcatgtgccagaactgtaaaaactgttttctggagtgtgcctatcaatacgacgatgacggctaccagagctactgcaccatctgttgcggcggaagagaggtgctgatgtgtggaaataacaactgctgccggtgcttctgcgtggaatgcgtggacctgctggtgggccccggcgccgcccaggccgctattaaggaagatccttggaactgctacatgtgcggccacaagggcacatacggcctgctgagacggagagaggactggcctagcagactgcagatgttcttcgccaataaccacgaccaggagttcgacccccctaaggtgtaccctcccgtccccgccgagaagagaaagcccatccgggtcctgagcctgttcgatggcatcgccaccggtctgctggtgctgaaggacctgggcatccaggtggataggtacattgcctccgaggtgtgcgaggactccatcaccgtgggaatggtgcgtcatcagggcaagatcatgtacgtgggcgacgtgcggagcgtgacacagaagcatatccaggagtggggccctttcgacctggtgatcggcggcagcccttgcaatgacctgagcatcgtgaacccagcccggaagggcctgtacgagggaaccggcagactgttcttcgagttttacagactgctgcacgacgcccggcctaaggaaggcgacgaccggcccttcttttggctgttcgagaatgtggtggccatgggagtcagcgacaagcgggatattagccggttcctggagagcaaccccgtgatgatcgatgccaaggaagtgagcgccgcccaccgggccagatacttctggggcaatctgcctggcatgaacagacccctggccagcaccgtgaacgacaagctggagctgcaggagtgcctggagcacggccggatcgccaagttcagcaaggtgagaaccatcaccacccgaagcaacagcatcaaacaaggcaaggaccagcactttcctgtgttcatgaacgagaaggaggacatcctgtggtgtaccgagatggagagagtgttcgggttcccagtccactacacagatgtcagcaacatgtctagactggccagacagagactgctgggaagaagctggtccgtccctgtgatcagacacctgttcgcccctctgaaggagtacttcgcctgcgtgagcagcggcaacagcaacgccaacagccggggccccagcttctctagcggcctggtgccactgtccctgagagggagccacatgggccccatggagatctacaaaaccgtgagcgcctggaagcggcagcctgtgcgcgtgctgagcctgtttcggaatatcgataaagtcctgaaaagcctgggattcctggagagcggctctggctccggcggtggcaccctgaagtacgtggaggatgtgacaaacgtggtcagacgggatgtggagaagtggggccccttcgatctggtgtacggcagcacccaacccctgggcagctcttgtgaccggtgccctggctggtacatgtttcagttccaccggatcctgcagtacgccctgccgagacaggagtcccagcggccattcttttggattttcatggacaacttgctgctgaccgaggatgaccaggaaactaccactcggttcctgcagaccgaagccgtgaccctgcaggacgtgagaggccgggactaccagaacgccatgcgggtgtggtccaacatccctggactgaaaagcaagcacgcacctctgacccctaaagaagaggagtacctgcaggcccaggtgcggagcagaagcaagctggacgcccctaaggtggatctgctggtgaagaattgcctcctgcccctgagagagtacttcaagtatttcagccagaatagtctgcccctgggcggcccaagcagcggcgcccctcctcccagcggcggcagcccagccggctccccaacctctaccgaggagggcacctctgagtccgccacccccgagagcggccctggcacctccaccgagcccagcgagggcagcgcacccggcagccctgccggcagccccacctccacagaggagggaaccagcaccgagcccagcgaaggcagcgccccaggcaccagcaccgagcctagtgagggcggctctggcggcggcagcgcccaggagattaaacggatcaacaagatcagaagaagacttgtgaaagacagcaacaccaagaaggccggcaagacaggccccatgaaaaccctgctggttagagtgatgacacccgatctgagagagcggctggaaaacctgagaaagaagcctgaaaatatcccccagcccatcagcaatacatctagagccaacctgaataagctgctgaccgattacaccgaaatgaagaaggcgatcctgcatgtgtactgggaagagttccagaaggaccctgtgggcctgatgagccgggtggcccagcctgccagcaagaagatcgatcagaacaagctgaaacctgagatggacgagaagggcaacctgaccaccgccggctttgcctgctctcagtgtggccagcccctgttcgtgtacaagctggagcaggtgtctgagaagggcaaggcttacaccaactacttcggacggtgcaatgtggccgagcacgaaaagctgatcctgctggcccagctgaagcccgagaaggatagcgacgaagccgtgacatatagcctgggaaagtttgggcagagggccctggatttctacagcattcatgtgaccaaggagtccacccaccccgtgaagcccctggcccagatcgccggaaacagatacgcctccggacctgtgggaaaggccctgagcgacgcatgtatgggcacaatcgcctccttcctgtctaagtaccaggacatcatcatcgaacaccagaaggtggtgaagggcaaccagaagagactggagagcctgcgggagctggccggcaaggaaaacctggaataccctagcgtgaccctgccacctcagcctcacaccaaggagggcgttgatgcctacaacgaagtgatcgcccgggtgcgaatgtgggtgaacctgaacctgtggcagaagctgaagctaagcagagatgatgccaagcctctgctgagactgaagggattcccttcctttcctctggtcgagagacaggccaacgaagtggactggtgggacatggtgtgtaacgtgaagaagctgatcaacgagaaaaaggaggatggcaaggtgttttggcagaatctggctggctacaagagacaggaagccctgagaccatacctgagcagcgaggaagatcggaagaagggaaagaaattcgctcggtaccagctgggcgacctgctgctgcacctggaaaagaagcacggcgaggactggggaaaggtgtacgacgaggcctgggagcggattgacaagaaagtggaaggcctgagcaagcacatcaagctggaagaggaacggagaagcgaggacgcccagagcaaggccgccctgaccgactggctgcgggctaaggccagcttcgtgatcgagggcctgaaggaggccgacaaggacgagttctgcagatgcgagctgaagctgcagaagtggtacggggacctgcggggaaagcccttcgccatcgaagccgagaacagcatcctggacatcagcggcttcagcaagcagtacaactgtgccttcatctggcagaaggacggcgtgaagaagctgaacctgtacctgatcatcaactacttcaagggcggcaagctgcggttcaagaagatcaaacctgaagccttcgaagccaacagattctacaccgtgatcaacaaaaagagcggcgagatcgtgcccatggaggtgaacttcaacttcgacgaccccaacctgatcatcctgcctctggcctttggcaagagacagggcagagaattcatctggaacgacctgctgtccctggaaaccggcagcctgaagctggccaacggaagagtgatcgagaagacactgtacaacagaagaacccggcaggatgagcctgccctgttcgtggccctgaccttcgagcggcgggaggtcctggactcctccaatatcaaaccaatgaacctgatcggcgtggcaagaggcgaaaacatccccgccgtgatcgccctgaccgaccccgagggctgcccactgagccggtttaaggatagcctgggaaacccaacccacatcctgagaatcggcgagagctataaggagaagcagcggaccatccaggccaagaaggaggtggagcagcggagagccggcggctacagccggaagtacgccagcaaagccaagaatctggcagacgatatggtgagaaacaccgctagagatctgctgtactacgccgtgacccaggatgccatgctgatcttcgccaacctgagccggggcttcggccggcagggcaagcggaccttcatggccgagagacagtacacacggatggaggactggctgaccgccaagctggcctacgagggcctgagcaagacctacctgtccaagacactggcccagtacacctccaagacatgcagcaactgtgggtttaccatcaccagcgccgactacgacagggtgctggagaagctgaagaagacagcaacaggctggatgaccacaattaacggcaaggagctgaaggtggagggccagattacctactacaacagatacaagagacagaacgtagtcaaggacctgtccgtcgagctggatagactgagcgaagaatctgtgaacaacgacatctcctcctggacaaagggcagaagcggagaagctctgagcctcctgaagaaaagattctcccatagacccgtgcaggagaagttcgtgtgcctgaactgcggcttcgagacacacgcagccgagcaagccgccctgaacatcgccagatcctggctgttcctgcggagccaggagtacaagaaataccagacaaacaagacaaccggcaacaccgataagagagccttcgtcgagacctggcagtccttttaccggaagaagcttaaggaggtgtggaaacctgccgtgcggtctggcggatctggcggaggctccacaagcagccaggagagcgtggccttcgaggacgtggccgtgtacttcaccaccaaggagtgggccatcatggtgcccgccgagagggccctgtacagggacgtgatgctggagaactacgaggccgtggccttcgtggccgtgccccccaccagcaagcccgccctggtgagccacctggagcagggcaaggagagctgcttcatcaggccccccggcgtgctgagcaggagcgactggagggccggcaccagccccaagaaaaagagaaaagtctaagctgccttctgcggggcttgccttctggccatgcccttcttctctcccttgcacctgtacctcttggtctttgaataaagcctgagtaggaaggctagcaaaaaaaaaaaaaaaaaaaaaaaaaaaaaaaaaaaaaaaaaaaaaaaaaaaaaaaaaaaaaaaaaaaaaaaaaaaaaaaa

SEQ ID NO: 5814 - RNA, 5797 nt, synthetic construct
  source 1..5797: mol_type = other RNA
aggaaataagagagaaaagaagagtaagaagaaatataagagccaccatggcccctaagaagaagcgtaaagtgagccggatggaacgcctcgtctacgaggtgcggcagaagtgcagaaacatcgaggacatctgcatctcctgcggatctctgaacgtgaccctggagcacccactgttcatcggcggcatgtgccagaactgtaaaaactgttttctggagtgtgcctatcaatacgacgatgacggctaccagagctactgcaccatctgttgcggcggaagagaggtgctgatgtgtggaaataacaactgctgccggtgcttctgcgtggaatgcgtggacctgctggtgggccccggcgccgcccaggccgctattaaggaagatccttggaactgctacatgtgcggccacaagggcacatacggcctgctgagacggagagaggactggcctagcagactgcagatgttcttcgccaataaccacgaccaggagttcgacccccctaaggtgtaccctcccgtccccgccgagaagagaaagcccatccgggtcctgagcctgttcgatggcatcgccaccggtctgctggtgctgaaggacctgggcatccaggtggataggtacattgcctccgaggtgtgcgaggactccatcaccgtgggaatggtgcgtcatcagggcaagatcatgtacgtgggcgacgtgcggagcgtgacacagaagcatatccaggagtggggccctttcgacctggtgatcggcggcagcccttgcaatgacctgagcatcgtgaacccagcccggaagggcctgtacgagggaaccggcagactgttcttcgagttttacagactgctgcacgacgcccggcctaaggaaggcgacgaccggcccttcttttggctgttcgagaatgtggtggccatgggagtcagcgacaagcgggatattagccggttcctggagagcaaccccgtgatgatcgatgccaaggaagtgagcgccgcccaccgggccagatacttctggggcaatctgcctggcatgaacagacccctggccagcaccgtgaacgacaagctggagctgcaggagtgcctggagcacggccggatcgccaagttcagcaaggtgagaaccatcaccacccgaagcaacagcatcaaacaaggcaaggaccagcactttcctgtgttcatgaacgagaaggaggacatcctgtggtgtaccgagatggagagagtgttcgggttcccagtccactacacagatgtcagcaacatgtctagactggccagacagagactgctgggaagaagctggtccgtccctgtgatcagacacctgttcgcccctctgaaggagtacttcgcctgcgtgagcagcggcaacagcaacgccaacagccggggccccagcttctctagcggcctggtgccactgtccctgagagggagccacatgggccccatggagatctacaaaaccgtgagcgcctggaagcggcagcctgtgcgcgtgctgagcctgtttcggaatatcgataaagtcctgaaaagcctgggattcctggagagcggctctggctccggcggtggcaccctgaagtacgtggaggatgtgacaaacgtggtcagacgggatgtggagaagtggggccccttcgatctggtgtacggcagcacccaacccctgggcagctcttgtgaccggtgccctggctggtacatgtttcagttccaccggatcctgcagtacgccctgccgagacaggagtcccagcggccattcttttggattttcatggacaacttgctgctgaccgaggatgaccaggaaactaccactcggttcctgcagaccgaagccgtgaccctgcaggacgtgagaggccgggactaccagaacgccatgcgggtgtggtccaacatccctggactgaaaagcaagcacgcacctctgacccctaaagaagaggagtacctgcaggcccaggtgcggagcagaagcaagctggacgcccctaaggtggatctgctggtgaagaattgcctcctgcccctgagagagtacttcaagtatttcagccagaatagtctgcccctgggcggcccaagcagcggcgcccctcctcccagcggcggcagcccagccggctccccaacctctaccgaggagggcacctctgagtccgccacccccgagagcggccctggcacctccaccgagcccagcgagggcagcgcacccggcagccctgccggcagccccacctccacagaggagggaaccagcaccgagcccagcgaaggcagcgccccaggcaccagcaccgagcctagtgagggcggctctggcggcggcagcgcccaggagattaaacggatcaacaagatcagaagaagacttgtgaaagacagcaacaccaagaaggccggcaagacaggccccatgaaaaccctgctggttagagtgatgacacccgatctgagagagcggctggaaaacctgagaaagaagcctgaaaatatcccccagcccatcagcaatacatctagagccaacctgaataagctgctgaccgattacaccgaaatgaagaaggcgatcctgcatgtgtactgggaagagttccagaaggaccctgtgggcctgatgagccgggtggcccagcctgccagcaagaagatcgatcagaacaagctgaaacctgagatggacgagaagggcaacctgaccaccgccggctttgcctgctctcagtgtggccagcccctgttcgtgtacaagctggagcaggtgtctgagaagggcaaggcttacaccaactacttcggacggtgcaatgtggccgagcacgaaaagctgatcctgctggcccagctgaagcccgagaaggatagcgacgaagccgtgacatatagcctgggaaagtttgggcagagggccctggatttctacagcattcatgtgaccaaggagtccacccaccccgtgaagcccctggcccagatcgccggaaacagatacgcctccggacctgtgggaaaggccctgagcgacgcatgtatgggcacaatcgcctccttcctgtctaagtaccaggacatcatcatcgaacaccagaaggtggtgaagggcaaccagaagagactggagagcctgcgggagctggccggcaaggaaaacctggaataccctagcgtgaccctgccacctcagcctcacaccaaggagggcgttgatgcctacaacgaagtgatcgcccgggtgcgaatgtgggtgaacctgaacctgtggcagaagctgaagctaagcagagatgatgccaagcctctgctgagactgaagggattcccttcctttcctctggtcgagagacaggccaacgaagtggactggtgggacatggtgtgtaacgtgaagaagctgatcaacgagaaaaaggaggatggcaaggtgttttggcagaatctggctggctacaagagacaggaagccctgagaccatacctgagcagcgaggaagatcggaagaagggaaagaaattcgctcggtaccagctgggcgacctgctgctgcacctggaaaagaagcacggcgaggactggggaaaggtgtacgacgaggcctgggagcggattgacaagaaagtggaaggcctgagcaagcacatcaagctggaagaggaacggagaagcgaggacgcccagagcaaggccgccctgaccgactggctgcgggctaaggccagcttcgtgatcgagggcctgaaggaggccgacaaggacgagttctgcagatgcgagctgaagctgcagaagtggtacggggacctgcggggaaagcccttcgccatcgaagccgagaacagcatcctggacatcagcggcttcagcaagcagtacaactgtgccttcatctggcagaaggacggcgtgaagaagctgaacctgtacctgatcatcaactacttcaagggcggcaagctgcggttcaagaagatcaaacctgaagccttcgaagccaacagattctacaccgtgatcaacaaaaagagcggcgagatcgtgcccatggaggtgaacttcaacttcgacgaccccaacctgatcatcctgcctctggcctttggcaagagacagggcagagaattcatctggaacgacctgctgtccctggaaaccggcagcctgaagctggccaacggaagagtgatcgagaagacactgtacaacagaagaacccggcaggatgagcctgccctgttcgtggccctgaccttcgagcggcgggaggtcctggactcctccaatatcaaaccaatgaacctgatcggcgtggcaagaggcgaaaacatccccgccgtgatcgccctgaccgaccccgagggctgcccactgagccggtttaaggatagcctgggaaacccaacccacatcctgagaatcggcgagagctataaggagaagcagcggaccatccaggccaagaaggaggtggagcagcggagagccggcggctacagccggaagtacgccagcaaagccaagaatctggcagacgatatggtgagaaacaccgctagagatctgctgtactacgccgtgacccaggatgccatgctgatcttcgccaacctgagccggggcttcggccggcagggcaagcggaccttcatggccgagagacagtacacacggatggaggactggctgaccgccaagctggcctacgagggcctgagcaagacctacctgtccaagacactggcccagtacacctccaagacatgcagcaactgtgggtttaccatcaccagcgccgactacgacagggtgctggagaagctgaagaagacagcaacaggctggatgaccacaattaacggcaaggagctgaaggtggagggccagattacctactacaacagatacaagagacagaacgtagtcaaggacctgtccgtcgagctggatagactgagcgaagaatctgtgaacaacgacatctcctcctggacaaagggcagaagcggagaagctctgagcctcctgaagaaaagattctcccatagacccgtgcaggagaagttcgtgtgcctgaactgcggcttcgagacacacgcagccgagcaagccgccctgaacatcgccagatcctggctgttcctgcggagccaggagtacaagaaataccagacaaacaagacaaccggcaacaccgataagagagccttcgtcgagacctggcagtccttttaccggaagaagcttaaggaggtgtggaaacctgccgtgcggtctggcggatctggcggaggctccacaagcaggcccggcgccgtgagcttcgccgacgtggccgtgtacttcagccccgaggagtggggctgcctgaggcccgcccagagggccctgtacagggacgtgatgagggagacctacggccacctgggcgccctgggcttcgccggccccaagcccgccctgatcagctggctggagaggaagaaggaggtgtggagccccgaggccgaggaccccgaggccggcgccaggcaccccggcagcggcaccagccccaagaaaaagagaaaagtctaagctgccttctgcggggcttgccttctggccatgcccttcttctctcccttgcacctgtacctcttggtctttgaataaagcctgagtaggaaggctagcaaaaaaaaaaaaaaaaaaaaaaaaaaaaaaaaaaaaaaaaaaaaaaaaaaaaaaaaaaaaaaaaaaaaaaaaaaaaaaaa

SEQ ID NO: 5815 - RNA, 5797 nt, synthetic construct
  source 1..5797: mol_type = other RNA
aggaaataagagagaaaagaagagtaagaagaaatataagagccaccatggcccctaagaagaagcgtaaagtgagccggatggaacgcctcgtctacgaggtgcggcagaagtgcagaaacatcgaggacatctgcatctcctgcggatctctgaacgtgaccctggagcacccactgttcatcggcggcatgtgccagaactgtaaaaactgttttctggagtgtgcctatcaatacgacgatgacggctaccagagctactgcaccatctgttgcggcggaagagaggtgctgatgtgtggaaataacaactgctgccggtgcttctgcgtggaatgcgtggacctgctggtgggccccggcgccgcccaggccgctattaaggaagatccttggaactgctacatgtgcggccacaagggcacatacggcctgctgagacggagagaggactggcctagcagactgcagatgttcttcgccaataaccacgaccaggagttcgacccccctaaggtgtaccctcccgtccccgccgagaagagaaagcccatccgggtcctgagcctgttcgatggcatcgccaccggtctgctggtgctgaaggacctgggcatccaggtggataggtacattgcctccgaggtgtgcgaggactccatcaccgtgggaatggtgcgtcatcagggcaagatcatgtacgtgggcgacgtgcggagcgtgacacagaagcatatccaggagtggggccctttcgacctggtgatcggcggcagcccttgcaatgacctgagcatcgtgaacccagcccggaagggcctgtacgagggaaccggcagactgttcttcgagttttacagactgctgcacgacgcccggcctaaggaaggcgacgaccggcccttcttttggctgttcgagaatgtggtggccatgggagtcagcgacaagcgggatattagccggttcctggagagcaaccccgtgatgatcgatgccaaggaagtgagcgccgcccaccgggccagatacttctggggcaatctgcctggcatgaacagacccctggccagcaccgtgaacgacaagctggagctgcaggagtgcctggagcacggccggatcgccaagttcagcaaggtgagaaccatcaccacccgaagcaacagcatcaaacaaggcaaggaccagcactttcctgtgttcatgaacgagaaggaggacatcctgtggtgtaccgagatggagagagtgttcgggttcccagtccactacacagatgtcagcaacatgtctagactggccagacagagactgctgggaagaagctggtccgtccctgtgatcagacacctgttcgcccctctgaaggagtacttcgcctgcgtgagcagcggcaacagcaacgccaacagccggggccccagcttctctagcggcctggtgccactgtccctgagagggagccacatgggccccatggagatctacaaaaccgtgagcgcctggaagcggcagcctgtgcgcgtgctgagcctgtttcggaatatcgataaagtcctgaaaagcctgggattcctggagagcggctctggctccggcggtggcaccctgaagtacgtggaggatgtgacaaacgtggtcagacgggatgtggagaagtggggccccttcgatctggtgtacggcagcacccaacccctgggcagctcttgtgaccggtgccctggctggtacatgtttcagttccaccggatcctgcagtacgccctgccgagacaggagtcccagcggccattcttttggattttcatggacaacttgctgctgaccgaggatgaccaggaaactaccactcggttcctgcagaccgaagccgtgaccctgcaggacgtgagaggccgggactaccagaacgccatgcgggtgtggtccaacatccctggactgaaaagcaagcacgcacctctgacccctaaagaagaggagtacctgcaggcccaggtgcggagcagaagcaagctggacgcccctaaggtggatctgctggtgaagaattgcctcctgcccctgagagagtacttcaagtatttcagccagaatagtctgcccctgggcggcccaagcagcggcgcccctcctcccagcggcggcagcccagccggctccccaacctctaccgaggagggcacctctgagtccgccacccccgagagcggccctggcacctccaccgagcccagcgagggcagcgcacccggcagccctgccggcagccccacctccacagaggagggaaccagcaccgagcccagcgaaggcagcgccccaggcaccagcaccgagcctagtgagggcggctctggcggcggcagcgcccaggagattaaacggatcaacaagatcagaagaagacttgtgaaagacagcaacaccaagaaggccggcaagacaggccccatgaaaaccctgctggttagagtgatgacacccgatctgagagagcggctggaaaacctgagaaagaagcctgaaaatatcccccagcccatcagcaatacatctagagccaacctgaataagctgctgaccgattacaccgaaatgaagaaggcgatcctgcatgtgtactgggaagagttccagaaggaccctgtgggcctgatgagccgggtggcccagcctgccagcaagaagatcgatcagaacaagctgaaacctgagatggacgagaagggcaacctgaccaccgccggctttgcctgctctcagtgtggccagcccctgttcgtgtacaagctggagcaggtgtctgagaagggcaaggcttacaccaactacttcggacggtgcaatgtggccgagcacgaaaagctgatcctgctggcccagctgaagcccgagaaggatagcgacgaagccgtgacatatagcctgggaaagtttgggcagagggccctggatttctacagcattcatgtgaccaaggagtccacccaccccgtgaagcccctggcccagatcgccggaaacagatacgcctccggacctgtgggaaaggccctgagcgacgcatgtatgggcacaatcgcctccttcctgtctaagtaccaggacatcatcatcgaacaccagaaggtggtgaagggcaaccagaagagactggagagcctgcgggagctggccggcaaggaaaacctggaataccctagcgtgaccctgccacctcagcctcacaccaaggagggcgttgatgcctacaacgaagtgatcgcccgggtgcgaatgtgggtgaacctgaacctgtggcagaagctgaagctaagcagagatgatgccaagcctctgctgagactgaagggattcccttcctttcctctggtcgagagacaggccaacgaagtggactggtgggacatggtgtgtaacgtgaagaagctgatcaacgagaaaaaggaggatggcaaggtgttttggcagaatctggctggctacaagagacaggaagccctgagaccatacctgagcagcgaggaagatcggaagaagggaaagaaattcgctcggtaccagctgggcgacctgctgctgcacctggaaaagaagcacggcgaggactggggaaaggtgtacgacgaggcctgggagcggattgacaagaaagtggaaggcctgagcaagcacatcaagctggaagaggaacggagaagcgaggacgcccagagcaaggccgccctgaccgactggctgcgggctaaggccagcttcgtgatcgagggcctgaaggaggccgacaaggacgagttctgcagatgcgagctgaagctgcagaagtggtacggggacctgcggggaaagcccttcgccatcgaagccgagaacagcatcctggacatcagcggcttcagcaagcagtacaactgtgccttcatctggcagaaggacggcgtgaagaagctgaacctgtacctgatcatcaactacttcaagggcggcaagctgcggttcaagaagatcaaacctgaagccttcgaagccaacagattctacaccgtgatcaacaaaaagagcggcgagatcgtgcccatggaggtgaacttcaacttcgacgaccccaacctgatcatcctgcctctggcctttggcaagagacagggcagagaattcatctggaacgacctgctgtccctggaaaccggcagcctgaagctggccaacggaagagtgatcgagaagacactgtacaacagaagaacccggcaggatgagcctgccctgttcgtggccctgaccttcgagcggcgggaggtcctggactcctccaatatcaaaccaatgaacctgatcggcgtggcaagaggcgaaaacatccccgccgtgatcgccctgaccgaccccgagggctgcccactgagccggtttaaggatagcctgggaaacccaacccacatcctgagaatcggcgagagctataaggagaagcagcggaccatccaggccaagaaggaggtggagcagcggagagccggcggctacagccggaagtacgccagcaaagccaagaatctggcagacgatatggtgagaaacaccgctagagatctgctgtactacgccgtgacccaggatgccatgctgatcttcgccaacctgagccggggcttcggccggcagggcaagcggaccttcatggccgagagacagtacacacggatggaggactggctgaccgccaagctggcctacgagggcctgagcaagacctacctgtccaagacactggcccagtacacctccaagacatgcagcaactgtgggtttaccatcaccagcgccgactacgacagggtgctggagaagctgaagaagacagcaacaggctggatgaccacaattaacggcaaggagctgaaggtggagggccagattacctactacaacagatacaagagacagaacgtagtcaaggacctgtccgtcgagctggatagactgagcgaagaatctgtgaacaacgacatctcctcctggacaaagggcagaagcggagaagctctgagcctcctgaagaaaagattctcccatagacccgtgcaggagaagttcgtgtgcctgaactgcggcttcgagacacacgcagccgagcaagccgccctgaacatcgccagatcctggctgttcctgcggagccaggagtacaagaaataccagacaaacaagacaaccggcaacaccgataagagagccttcgtcgagacctggcagtccttttaccggaagaagcttaaggaggtgtggaaacctgccgtgcggtctggcggatctggcggaggctccacaagcagccaggagagcgtgaccttcagggacgtggccatcgacttcagccaggaggagtgggagtggctgcagcccgcccagagggacctgtacaggcacgtgatgctggagaactacagccacctggtgagcctgggcctgaacatcagcaagccctacgtggtgagcctgctggagcagggcaagggcccctggctggagaagggcgacgtgaggagggacctgttcagcgagagccacggcgagaccagccccaagaaaaagagaaaagtctaagctgccttctgcggggcttgccttctggccatgcccttcttctctcccttgcacctgtacctcttggtctttgaataaagcctgagtaggaaggctagcaaaaaaaaaaaaaaaaaaaaaaaaaaaaaaaaaaaaaaaaaaaaaaaaaaaaaaaaaaaaaaaaaaaaaaaaaaaaaaaa

SEQ ID NO: 5816 - RNA, 5797 nt, synthetic construct
  source 1..5797: mol_type = other RNA
aggaaataagagagaaaagaagagtaagaagaaatataagagccaccatggcccctaagaagaagcgtaaagtgagccggatggaacgcctcgtctacgaggtgcggcagaagtgcagaaacatcgaggacatctgcatctcctgcggatctctgaacgtgaccctggagcacccactgttcatcggcggcatgtgccagaactgtaaaaactgttttctggagtgtgcctatcaatacgacgatgacggctaccagagctactgcaccatctgttgcggcggaagagaggtgctgatgtgtggaaataacaactgctgccggtgcttctgcgtggaatgcgtggacctgctggtgggccccggcgccgcccaggccgctattaaggaagatccttggaactgctacatgtgcggccacaagggcacatacggcctgctgagacggagagaggactggcctagcagactgcagatgttcttcgccaataaccacgaccaggagttcgacccccctaaggtgtaccctcccgtccccgccgagaagagaaagcccatccgggtcctgagcctgttcgatggcatcgccaccggtctgctggtgctgaaggacctgggcatccaggtggataggtacattgcctccgaggtgtgcgaggactccatcaccgtgggaatggtgcgtcatcagggcaagatcatgtacgtgggcgacgtgcggagcgtgacacagaagcatatccaggagtggggccctttcgacctggtgatcggcggcagcccttgcaatgacctgagcatcgtgaacccagcccggaagggcctgtacgagggaaccggcagactgttcttcgagttttacagactgctgcacgacgcccggcctaaggaaggcgacgaccggcccttcttttggctgttcgagaatgtggtggccatgggagtcagcgacaagcgggatattagccggttcctggagagcaaccccgtgatgatcgatgccaaggaagtgagcgccgcccaccgggccagatacttctggggcaatctgcctggcatgaacagacccctggccagcaccgtgaacgacaagctggagctgcaggagtgcctggagcacggccggatcgccaagttcagcaaggtgagaaccatcaccacccgaagcaacagcatcaaacaaggcaaggaccagcactttcctgtgttcatgaacgagaaggaggacatcctgtggtgtaccgagatggagagagtgttcgggttcccagtccactacacagatgtcagcaacatgtctagactggccagacagagactgctgggaagaagctggtccgtccctgtgatcagacacctgttcgcccctctgaaggagtacttcgcctgcgtgagcagcggcaacagcaacgccaacagccggggccccagcttctctagcggcctggtgccactgtccctgagagggagccacatgggccccatggagatctacaaaaccgtgagcgcctggaagcggcagcctgtgcgcgtgctgagcctgtttcggaatatcgataaagtcctgaaaagcctgggattcctggagagcggctctggctccggcggtggcaccctgaagtacgtggaggatgtgacaaacgtggtcagacgggatgtggagaagtggggccccttcgatctggtgtacggcagcacccaacccctgggcagctcttgtgaccggtgccctggctggtacatgtttcagttccaccggatcctgcagtacgccctgccgagacaggagtcccagcggccattcttttggattttcatggacaacttgctgctgaccgaggatgaccaggaaactaccactcggttcctgcagaccgaagccgtgaccctgcaggacgtgagaggccgggactaccagaacgccatgcgggtgtggtccaacatccctggactgaaaagcaagcacgcacctctgacccctaaagaagaggagtacctgcaggcccaggtgcggagcagaagcaagctggacgcccctaaggtggatctgctggtgaagaattgcctcctgcccctgagagagtacttcaagtatttcagccagaatagtctgcccctgggcggcccaagcagcggcgcccctcctcccagcggcggcagcccagccggctccccaacctctaccgaggagggcacctctgagtccgccacccccgagagcggccctggcacctccaccgagcccagcgagggcagcgcacccggcagccctgccggcagccccacctccacagaggagggaaccagcaccgagcccagcgaaggcagcgccccaggcaccagcaccgagcctagtgagggcggctctggcggcggcagcgcccaggagattaaacggatcaacaagatcagaagaagacttgtgaaagacagcaacaccaagaaggccggcaagacaggccccatgaaaaccctgctggttagagtgatgacacccgatctgagagagcggctggaaaacctgagaaagaagcctgaaaatatcccccagcccatcagcaatacatctagagccaacctgaataagctgctgaccgattacaccgaaatgaagaaggcgatcctgcatgtgtactgggaagagttccagaaggaccctgtgggcctgatgagccgggtggcccagcctgccagcaagaagatcgatcagaacaagctgaaacctgagatggacgagaagggcaacctgaccaccgccggctttgcctgctctcagtgtggccagcccctgttcgtgtacaagctggagcaggtgtctgagaagggcaaggcttacaccaactacttcggacggtgcaatgtggccgagcacgaaaagctgatcctgctggcccagctgaagcccgagaaggatagcgacgaagccgtgacatatagcctgggaaagtttgggcagagggccctggatttctacagcattcatgtgaccaaggagtccacccaccccgtgaagcccctggcccagatcgccggaaacagatacgcctccggacctgtgggaaaggccctgagcgacgcatgtatgggcacaatcgcctccttcctgtctaagtaccaggacatcatcatcgaacaccagaaggtggtgaagggcaaccagaagagactggagagcctgcgggagctggccggcaaggaaaacctggaataccctagcgtgaccctgccacctcagcctcacaccaaggagggcgttgatgcctacaacgaagtgatcgcccgggtgcgaatgtgggtgaacctgaacctgtggcagaagctgaagctaagcagagatgatgccaagcctctgctgagactgaagggattcccttcctttcctctggtcgagagacaggccaacgaagtggactggtgggacatggtgtgtaacgtgaagaagctgatcaacgagaaaaaggaggatggcaaggtgttttggcagaatctggctggctacaagagacaggaagccctgagaccatacctgagcagcgaggaagatcggaagaagggaaagaaattcgctcggtaccagctgggcgacctgctgctgcacctggaaaagaagcacggcgaggactggggaaaggtgtacgacgaggcctgggagcggattgacaagaaagtggaaggcctgagcaagcacatcaagctggaagaggaacggagaagcgaggacgcccagagcaaggccgccctgaccgactggctgcgggctaaggccagcttcgtgatcgagggcctgaaggaggccgacaaggacgagttctgcagatgcgagctgaagctgcagaagtggtacggggacctgcggggaaagcccttcgccatcgaagccgagaacagcatcctggacatcagcggcttcagcaagcagtacaactgtgccttcatctggcagaaggacggcgtgaagaagctgaacctgtacctgatcatcaactacttcaagggcggcaagctgcggttcaagaagatcaaacctgaagccttcgaagccaacagattctacaccgtgatcaacaaaaagagcggcgagatcgtgcccatggaggtgaacttcaacttcgacgaccccaacctgatcatcctgcctctggcctttggcaagagacagggcagagaattcatctggaacgacctgctgtccctggaaaccggcagcctgaagctggccaacggaagagtgatcgagaagacactgtacaacagaagaacccggcaggatgagcctgccctgttcgtggccctgaccttcgagcggcgggaggtcctggactcctccaatatcaaaccaatgaacctgatcggcgtggcaagaggcgaaaacatccccgccgtgatcgccctgaccgaccccgagggctgcccactgagccggtttaaggatagcctgggaaacccaacccacatcctgagaatcggcgagagctataaggagaagcagcggaccatccaggccaagaaggaggtggagcagcggagagccggcggctacagccggaagtacgccagcaaagccaagaatctggcagacgatatggtgagaaacaccgctagagatctgctgtactacgccgtgacccaggatgccatgctgatcttcgccaacctgagccggggcttcggccggcagggcaagcggaccttcatggccgagagacagtacacacggatggaggactggctgaccgccaagctggcctacgagggcctgagcaagacctacctgtccaagacactggcccagtacacctccaagacatgcagcaactgtgggtttaccatcaccagcgccgactacgacagggtgctggagaagctgaagaagacagcaacaggctggatgaccacaattaacggcaaggagctgaaggtggagggccagattacctactacaacagatacaagagacagaacgtagtcaaggacctgtccgtcgagctggatagactgagcgaagaatctgtgaacaacgacatctcctcctggacaaagggcagaagcggagaagctctgagcctcctgaagaaaagattctcccatagacccgtgcaggagaagttcgtgtgcctgaactgcggcttcgagacacacgcagccgagcaagccgccctgaacatcgccagatcctggctgttcctgcggagccaggagtacaagaaataccagacaaacaagacaaccggcaacaccgataagagagccttcgtcgagacctggcagtccttttaccggaagaagcttaaggaggtgtggaaacctgccgtgcggtctggcggatctggcggaggctccacaagcgaggagctgcccgtggtgttcgaggacgtggccgtgtacttcaccagggaggagtggggcgccctggacaagtggcagaaggagctgtacagggacgtgatgcagatgaactacgagctgctggccagcctgggccccgccgccgccaagcccgacctgatcagcaagctggagaggagggccgccccctggatcagggacccccacggccccaagctgggcaagggcaggcccccccccggcaccagccccaagaaaaagagaaaagtctaagctgccttctgcggggcttgccttctggccatgcccttcttctctcccttgcacctgtacctcttggtctttgaataaagcctgagtaggaaggctagcaaaaaaaaaaaaaaaaaaaaaaaaaaaaaaaaaaaaaaaaaaaaaaaaaaaaaaaaaaaaaaaaaaaaaaaaaaaaaaaa

SEQ ID NO: 5817 - RNA, 5797 nt, synthetic construct
  source 1..5797: mol_type = other RNA
aggaaataagagagaaaagaagagtaagaagaaatataagagccaccatggcccctaagaagaagcgtaaagtgagccggatggaacgcctcgtctacgaggtgcggcagaagtgcagaaacatcgaggacatctgcatctcctgcggatctctgaacgtgaccctggagcacccactgttcatcggcggcatgtgccagaactgtaaaaactgttttctggagtgtgcctatcaatacgacgatgacggctaccagagctactgcaccatctgttgcggcggaagagaggtgctgatgtgtggaaataacaactgctgccggtgcttctgcgtggaatgcgtggacctgctggtgggccccggcgccgcccaggccgctattaaggaagatccttggaactgctacatgtgcggccacaagggcacatacggcctgctgagacggagagaggactggcctagcagactgcagatgttcttcgccaataaccacgaccaggagttcgacccccctaaggtgtaccctcccgtccccgccgagaagagaaagcccatccgggtcctgagcctgttcgatggcatcgccaccggtctgctggtgctgaaggacctgggcatccaggtggataggtacattgcctccgaggtgtgcgaggactccatcaccgtgggaatggtgcgtcatcagggcaagatcatgtacgtgggcgacgtgcggagcgtgacacagaagcatatccaggagtggggccctttcgacctggtgatcggcggcagcccttgcaatgacctgagcatcgtgaacccagcccggaagggcctgtacgagggaaccggcagactgttcttcgagttttacagactgctgcacgacgcccggcctaaggaaggcgacgaccggcccttcttttggctgttcgagaatgtggtggccatgggagtcagcgacaagcgggatattagccggttcctggagagcaaccccgtgatgatcgatgccaaggaagtgagcgccgcccaccgggccagatacttctggggcaatctgcctggcatgaacagacccctggccagcaccgtgaacgacaagctggagctgcaggagtgcctggagcacggccggatcgccaagttcagcaaggtgagaaccatcaccacccgaagcaacagcatcaaacaaggcaaggaccagcactttcctgtgttcatgaacgagaaggaggacatcctgtggtgtaccgagatggagagagtgttcgggttcccagtccactacacagatgtcagcaacatgtctagactggccagacagagactgctgggaagaagctggtccgtccctgtgatcagacacctgttcgcccctctgaaggagtacttcgcctgcgtgagcagcggcaacagcaacgccaacagccggggccccagcttctctagcggcctggtgccactgtccctgagagggagccacatgggccccatggagatctacaaaaccgtgagcgcctggaagcggcagcctgtgcgcgtgctgagcctgtttcggaatatcgataaagtcctgaaaagcctgggattcctggagagcggctctggctccggcggtggcaccctgaagtacgtggaggatgtgacaaacgtggtcagacgggatgtggagaagtggggccccttcgatctggtgtacggcagcacccaacccctgggcagctcttgtgaccggtgccctggctggtacatgtttcagttccaccggatcctgcagtacgccctgccgagacaggagtcccagcggccattcttttggattttcatggacaacttgctgctgaccgaggatgaccaggaaactaccactcggttcctgcagaccgaagccgtgaccctgcaggacgtgagaggccgggactaccagaacgccatgcgggtgtggtccaacatccctggactgaaaagcaagcacgcacctctgacccctaaagaagaggagtacctgcaggcccaggtgcggagcagaagcaagctggacgcccctaaggtggatctgctggtgaagaattgcctcctgcccctgagagagtacttcaagtatttcagccagaatagtctgcccctgggcggcccaagcagcggcgcccctcctcccagcggcggcagcccagccggctccccaacctctaccgaggagggcacctctgagtccgccacccccgagagcggccctggcacctccaccgagcccagcgagggcagcgcacccggcagccctgccggcagccccacctccacagaggagggaaccagcaccgagcccagcgaaggcagcgccccaggcaccagcaccgagcctagtgagggcggctctggcggcggcagcgcccaggagattaaacggatcaacaagatcagaagaagacttgtgaaagacagcaacaccaagaaggccggcaagacaggccccatgaaaaccctgctggttagagtgatgacacccgatctgagagagcggctggaaaacctgagaaagaagcctgaaaatatcccccagcccatcagcaatacatctagagccaacctgaataagctgctgaccgattacaccgaaatgaagaaggcgatcctgcatgtgtactgggaagagttccagaaggaccctgtgggcctgatgagccgggtggcccagcctgccagcaagaagatcgatcagaacaagctgaaacctgagatggacgagaagggcaacctgaccaccgccggctttgcctgctctcagtgtggccagcccctgttcgtgtacaagctggagcaggtgtctgagaagggcaaggcttacaccaactacttcggacggtgcaatgtggccgagcacgaaaagctgatcctgctggcccagctgaagcccgagaaggatagcgacgaagccgtgacatatagcctgggaaagtttgggcagagggccctggatttctacagcattcatgtgaccaaggagtccacccaccccgtgaagcccctggcccagatcgccggaaacagatacgcctccggacctgtgggaaaggccctgagcgacgcatgtatgggcacaatcgcctccttcctgtctaagtaccaggacatcatcatcgaacaccagaaggtggtgaagggcaaccagaagagactggagagcctgcgggagctggccggcaaggaaaacctggaataccctagcgtgaccctgccacctcagcctcacaccaaggagggcgttgatgcctacaacgaagtgatcgcccgggtgcgaatgtgggtgaacctgaacctgtggcagaagctgaagctaagcagagatgatgccaagcctctgctgagactgaagggattcccttcctttcctctggtcgagagacaggccaacgaagtggactggtgggacatggtgtgtaacgtgaagaagctgatcaacgagaaaaaggaggatggcaaggtgttttggcagaatctggctggctacaagagacaggaagccctgagaccatacctgagcagcgaggaagatcggaagaagggaaagaaattcgctcggtaccagctgggcgacctgctgctgcacctggaaaagaagcacggcgaggactggggaaaggtgtacgacgaggcctgggagcggattgacaagaaagtggaaggcctgagcaagcacatcaagctggaagaggaacggagaagcgaggacgcccagagcaaggccgccctgaccgactggctgcgggctaaggccagcttcgtgatcgagggcctgaaggaggccgacaaggacgagttctgcagatgcgagctgaagctgcagaagtggtacggggacctgcggggaaagcccttcgccatcgaagccgagaacagcatcctggacatcagcggcttcagcaagcagtacaactgtgccttcatctggcagaaggacggcgtgaagaagctgaacctgtacctgatcatcaactacttcaagggcggcaagctgcggttcaagaagatcaaacctgaagccttcgaagccaacagattctacaccgtgatcaacaaaaagagcggcgagatcgtgcccatggaggtgaacttcaacttcgacgaccccaacctgatcatcctgcctctggcctttggcaagagacagggcagagaattcatctggaacgacctgctgtccctggaaaccggcagcctgaagctggccaacggaagagtgatcgagaagacactgtacaacagaagaacccggcaggatgagcctgccctgttcgtggccctgaccttcgagcggcgggaggtcctggactcctccaatatcaaaccaatgaacctgatcggcgtggcaagaggcgaaaacatccccgccgtgatcgccctgaccgaccccgagggctgcccactgagccggtttaaggatagcctgggaaacccaacccacatcctgagaatcggcgagagctataaggagaagcagcggaccatccaggccaagaaggaggtggagcagcggagagccggcggctacagccggaagtacgccagcaaagccaagaatctggcagacgatatggtgagaaacaccgctagagatctgctgtactacgccgtgacccaggatgccatgctgatcttcgccaacctgagccggggcttcggccggcagggcaagcggaccttcatggccgagagacagtacacacggatggaggactggctgaccgccaagctggcctacgagggcctgagcaagacctacctgtccaagacactggcccagtacacctccaagacatgcagcaactgtgggtttaccatcaccagcgccgactacgacagggtgctggagaagctgaagaagacagcaacaggctggatgaccacaattaacggcaaggagctgaaggtggagggccagattacctactacaacagatacaagagacagaacgtagtcaaggacctgtccgtcgagctggatagactgagcgaagaatctgtgaacaacgacatctcctcctggacaaagggcagaagcggagaagctctgagcctcctgaagaaaagattctcccatagacccgtgcaggagaagttcgtgtgcctgaactgcggcttcgagacacacgcagccgagcaagccgccctgaacatcgccagatcctggctgttcctgcggagccaggagtacaagaaataccagacaaacaagacaaccggcaacaccgataagagagccttcgtcgagacctggcagtccttttaccggaagaagcttaaggaggtgtggaaacctgccgtgcggtctggcggatctggcggaggctccacaagcatgatgttccaggacagcgtggccttcgaggacgtggccgtgaccttcacccaggaggagtgggccctgctggaccccagccagaagaacctgtacagggacgtgatgcaggagaccttcaggaacctggccagcatcggcaagaagtggaagccccagaacatctacgtggagtacgagaacctgaggaggaacctgaggatcgtgggcgagaggctgttcgagagcaaggagggccaccagaccagccccaagaaaaagagaaaagtctaagctgccttctgcggggcttgccttctggccatgcccttcttctctcccttgcacctgtacctcttggtctttgaataaagcctgagtaggaaggctagcaaaaaaaaaaaaaaaaaaaaaaaaaaaaaaaaaaaaaaaaaaaaaaaaaaaaaaaaaaaaaaaaaaaaaaaaaaaaaaaa

SEQ ID NO: 5818 - RNA, 5797 nt, synthetic construct
  source 1..5797: mol_type = other RNA
aggaaataagagagaaaagaagagtaagaagaaatataagagccaccatggcccctaagaagaagcgtaaagtgagccggatggaacgcctcgtctacgaggtgcggcagaagtgcagaaacatcgaggacatctgcatctcctgcggatctctgaacgtgaccctggagcacccactgttcatcggcggcatgtgccagaactgtaaaaactgttttctggagtgtgcctatcaatacgacgatgacggctaccagagctactgcaccatctgttgcggcggaagagaggtgctgatgtgtggaaataacaactgctgccggtgcttctgcgtggaatgcgtggacctgctggtgggccccggcgccgcccaggccgctattaaggaagatccttggaactgctacatgtgcggccacaagggcacatacggcctgctgagacggagagaggactggcctagcagactgcagatgttcttcgccaataaccacgaccaggagttcgacccccctaaggtgtaccctcccgtccccgccgagaagagaaagcccatccgggtcctgagcctgttcgatggcatcgccaccggtctgctggtgctgaaggacctgggcatccaggtggataggtacattgcctccgaggtgtgcgaggactccatcaccgtgggaatggtgcgtcatcagggcaagatcatgtacgtgggcgacgtgcggagcgtgacacagaagcatatccaggagtggggccctttcgacctggtgatcggcggcagcccttgcaatgacctgagcatcgtgaacccagcccggaagggcctgtacgagggaaccggcagactgttcttcgagttttacagactgctgcacgacgcccggcctaaggaaggcgacgaccggcccttcttttggctgttcgagaatgtggtggccatgggagtcagcgacaagcgggatattagccggttcctggagagcaaccccgtgatgatcgatgccaaggaagtgagcgccgcccaccgggccagatacttctggggcaatctgcctggcatgaacagacccctggccagcaccgtgaacgacaagctggagctgcaggagtgcctggagcacggccggatcgccaagttcagcaaggtgagaaccatcaccacccgaagcaacagcatcaaacaaggcaaggaccagcactttcctgtgttcatgaacgagaaggaggacatcctgtggtgtaccgagatggagagagtgttcgggttcccagtccactacacagatgtcagcaacatgtctagactggccagacagagactgctgggaagaagctggtccgtccctgtgatcagacacctgttcgcccctctgaaggagtacttcgcctgcgtgagcagcggcaacagcaacgccaacagccggggccccagcttctctagcggcctggtgccactgtccctgagagggagccacatgggccccatggagatctacaaaaccgtgagcgcctggaagcggcagcctgtgcgcgtgctgagcctgtttcggaatatcgataaagtcctgaaaagcctgggattcctggagagcggctctggctccggcggtggcaccctgaagtacgtggaggatgtgacaaacgtggtcagacgggatgtggagaagtggggccccttcgatctggtgtacggcagcacccaacccctgggcagctcttgtgaccggtgccctggctggtacatgtttcagttccaccggatcctgcagtacgccctgccgagacaggagtcccagcggccattcttttggattttcatggacaacttgctgctgaccgaggatgaccaggaaactaccactcggttcctgcagaccgaagccgtgaccctgcaggacgtgagaggccgggactaccagaacgccatgcgggtgtggtccaacatccctggactgaaaagcaagcacgcacctctgacccctaaagaagaggagtacctgcaggcccaggtgcggagcagaagcaagctggacgcccctaaggtggatctgctggtgaagaattgcctcctgcccctgagagagtacttcaagtatttcagccagaatagtctgcccctgggcggcccaagcagcggcgcccctcctcccagcggcggcagcccagccggctccccaacctctaccgaggagggcacctctgagtccgccacccccgagagcggccctggcacctccaccgagcccagcgagggcagcgcacccggcagccctgccggcagccccacctccacagaggagggaaccagcaccgagcccagcgaaggcagcgccccaggcaccagcaccgagcctagtgagggcggctctggcggcggcagcgcccaggagattaaacggatcaacaagatcagaagaagacttgtgaaagacagcaacaccaagaaggccggcaagacaggccccatgaaaaccctgctggttagagtgatgacacccgatctgagagagcggctggaaaacctgagaaagaagcctgaaaatatcccccagcccatcagcaatacatctagagccaacctgaataagctgctgaccgattacaccgaaatgaagaaggcgatcctgcatgtgtactgggaagagttccagaaggaccctgtgggcctgatgagccgggtggcccagcctgccagcaagaagatcgatcagaacaagctgaaacctgagatggacgagaagggcaacctgaccaccgccggctttgcctgctctcagtgtggccagcccctgttcgtgtacaagctggagcaggtgtctgagaagggcaaggcttacaccaactacttcggacggtgcaatgtggccgagcacgaaaagctgatcctgctggcccagctgaagcccgagaaggatagcgacgaagccgtgacatatagcctgggaaagtttgggcagagggccctggatttctacagcattcatgtgaccaaggagtccacccaccccgtgaagcccctggcccagatcgccggaaacagatacgcctccggacctgtgggaaaggccctgagcgacgcatgtatgggcacaatcgcctccttcctgtctaagtaccaggacatcatcatcgaacaccagaaggtggtgaagggcaaccagaagagactggagagcctgcgggagctggccggcaaggaaaacctggaataccctagcgtgaccctgccacctcagcctcacaccaaggagggcgttgatgcctacaacgaagtgatcgcccgggtgcgaatgtgggtgaacctgaacctgtggcagaagctgaagctaagcagagatgatgccaagcctctgctgagactgaagggattcccttcctttcctctggtcgagagacaggccaacgaagtggactggtgggacatggtgtgtaacgtgaagaagctgatcaacgagaaaaaggaggatggcaaggtgttttggcagaatctggctggctacaagagacaggaagccctgagaccatacctgagcagcgaggaagatcggaagaagggaaagaaattcgctcggtaccagctgggcgacctgctgctgcacctggaaaagaagcacggcgaggactggggaaaggtgtacgacgaggcctgggagcggattgacaagaaagtggaaggcctgagcaagcacatcaagctggaagaggaacggagaagcgaggacgcccagagcaaggccgccctgaccgactggctgcgggctaaggccagcttcgtgatcgagggcctgaaggaggccgacaaggacgagttctgcagatgcgagctgaagctgcagaagtggtacggggacctgcggggaaagcccttcgccatcgaagccgagaacagcatcctggacatcagcggcttcagcaagcagtacaactgtgccttcatctggcagaaggacggcgtgaagaagctgaacctgtacctgatcatcaactacttcaagggcggcaagctgcggttcaagaagatcaaacctgaagccttcgaagccaacagattctacaccgtgatcaacaaaaagagcggcgagatcgtgcccatggaggtgaacttcaacttcgacgaccccaacctgatcatcctgcctctggcctttggcaagagacagggcagagaattcatctggaacgacctgctgtccctggaaaccggcagcctgaagctggccaacggaagagtgatcgagaagacactgtacaacagaagaacccggcaggatgagcctgccctgttcgtggccctgaccttcgagcggcgggaggtcctggactcctccaatatcaaaccaatgaacctgatcggcgtggcaagaggcgaaaacatccccgccgtgatcgccctgaccgaccccgagggctgcccactgagccggtttaaggatagcctgggaaacccaacccacatcctgagaatcggcgagagctataaggagaagcagcggaccatccaggccaagaaggaggtggagcagcggagagccggcggctacagccggaagtacgccagcaaagccaagaatctggcagacgatatggtgagaaacaccgctagagatctgctgtactacgccgtgacccaggatgccatgctgatcttcgccaacctgagccggggcttcggccggcagggcaagcggaccttcatggccgagagacagtacacacggatggaggactggctgaccgccaagctggcctacgagggcctgagcaagacctacctgtccaagacactggcccagtacacctccaagacatgcagcaactgtgggtttaccatcaccagcgccgactacgacagggtgctggagaagctgaagaagacagcaacaggctggatgaccacaattaacggcaaggagctgaaggtggagggccagattacctactacaacagatacaagagacagaacgtagtcaaggacctgtccgtcgagctggatagactgagcgaagaatctgtgaacaacgacatctcctcctggacaaagggcagaagcggagaagctctgagcctcctgaagaaaagattctcccatagacccgtgcaggagaagttcgtgtgcctgaactgcggcttcgagacacacgcagccgagcaagccgccctgaacatcgccagatcctggctgttcctgcggagccaggagtacaagaaataccagacaaacaagacaaccggcaacaccgataagagagccttcgtcgagacctggcagtccttttaccggaagaagcttaaggaggtgtggaaacctgccgtgcggtctggcggatctggcggaggctccacaagcgacagcgtggccttcgaggacgtggccgtgaacttcacccaggaggagtgggccctgctggacaggagccagaagaagctgtacagggaggtgatgcaggagaccctgaggaacctgaccagcatcggcaagacctggagcaaccagaacgccgaggagaggcaccagaaccccaggaggaacctgaggaggctgatcggcgagaggctgttccagagcaaggagagccaccagcacgccgagaccagccccaagaaaaagagaaaagtctaagctgccttctgcggggcttgccttctggccatgcccttcttctctcccttgcacctgtacctcttggtctttgaataaagcctgagtaggaaggctagcaaaaaaaaaaaaaaaaaaaaaaaaaaaaaaaaaaaaaaaaaaaaaaaaaaaaaaaaaaaaaaaaaaaaaaaaaaaaaaaa

SEQ ID NO: 5819 - RNA, 5797 nt, synthetic construct
  source 1..5797: mol_type = other RNA
aggaaataagagagaaaagaagagtaagaagaaatataagagccaccatggcccctaagaagaagcgtaaagtgagccggatggaacgcctcgtctacgaggtgcggcagaagtgcagaaacatcgaggacatctgcatctcctgcggatctctgaacgtgaccctggagcacccactgttcatcggcggcatgtgccagaactgtaaaaactgttttctggagtgtgcctatcaatacgacgatgacggctaccagagctactgcaccatctgttgcggcggaagagaggtgctgatgtgtggaaataacaactgctgccggtgcttctgcgtggaatgcgtggacctgctggtgggccccggcgccgcccaggccgctattaaggaagatccttggaactgctacatgtgcggccacaagggcacatacggcctgctgagacggagagaggactggcctagcagactgcagatgttcttcgccaataaccacgaccaggagttcgacccccctaaggtgtaccctcccgtccccgccgagaagagaaagcccatccgggtcctgagcctgttcgatggcatcgccaccggtctgctggtgctgaaggacctgggcatccaggtggataggtacattgcctccgaggtgtgcgaggactccatcaccgtgggaatggtgcgtcatcagggcaagatcatgtacgtgggcgacgtgcggagcgtgacacagaagcatatccaggagtggggccctttcgacctggtgatcggcggcagcccttgcaatgacctgagcatcgtgaacccagcccggaagggcctgtacgagggaaccggcagactgttcttcgagttttacagactgctgcacgacgcccggcctaaggaaggcgacgaccggcccttcttttggctgttcgagaatgtggtggccatgggagtcagcgacaagcgggatattagccggttcctggagagcaaccccgtgatgatcgatgccaaggaagtgagcgccgcccaccgggccagatacttctggggcaatctgcctggcatgaacagacccctggccagcaccgtgaacgacaagctggagctgcaggagtgcctggagcacggccggatcgccaagttcagcaaggtgagaaccatcaccacccgaagcaacagcatcaaacaaggcaaggaccagcactttcctgtgttcatgaacgagaaggaggacatcctgtggtgtaccgagatggagagagtgttcgggttcccagtccactacacagatgtcagcaacatgtctagactggccagacagagactgctgggaagaagctggtccgtccctgtgatcagacacctgttcgcccctctgaaggagtacttcgcctgcgtgagcagcggcaacagcaacgccaacagccggggccccagcttctctagcggcctggtgccactgtccctgagagggagccacatgggccccatggagatctacaaaaccgtgagcgcctggaagcggcagcctgtgcgcgtgctgagcctgtttcggaatatcgataaagtcctgaaaagcctgggattcctggagagcggctctggctccggcggtggcaccctgaagtacgtggaggatgtgacaaacgtggtcagacgggatgtggagaagtggggccccttcgatctggtgtacggcagcacccaacccctgggcagctcttgtgaccggtgccctggctggtacatgtttcagttccaccggatcctgcagtacgccctgccgagacaggagtcccagcggccattcttttggattttcatggacaacttgctgctgaccgaggatgaccaggaaactaccactcggttcctgcagaccgaagccgtgaccctgcaggacgtgagaggccgggactaccagaacgccatgcgggtgtggtccaacatccctggactgaaaagcaagcacgcacctctgacccctaaagaagaggagtacctgcaggcccaggtgcggagcagaagcaagctggacgcccctaaggtggatctgctggtgaagaattgcctcctgcccctgagagagtacttcaagtatttcagccagaatagtctgcccctgggcggcccaagcagcggcgcccctcctcccagcggcggcagcccagccggctccccaacctctaccgaggagggcacctctgagtccgccacccccgagagcggccctggcacctccaccgagcccagcgagggcagcgcacccggcagccctgccggcagccccacctccacagaggagggaaccagcaccgagcccagcgaaggcagcgccccaggcaccagcaccgagcctagtgagggcggctctggcggcggcagcgcccaggagattaaacggatcaacaagatcagaagaagacttgtgaaagacagcaacaccaagaaggccggcaagacaggccccatgaaaaccctgctggttagagtgatgacacccgatctgagagagcggctggaaaacctgagaaagaagcctgaaaatatcccccagcccatcagcaatacatctagagccaacctgaataagctgctgaccgattacaccgaaatgaagaaggcgatcctgcatgtgtactgggaagagttccagaaggaccctgtgggcctgatgagccgggtggcccagcctgccagcaagaagatcgatcagaacaagctgaaacctgagatggacgagaagggcaacctgaccaccgccggctttgcctgctctcagtgtggccagcccctgttcgtgtacaagctggagcaggtgtctgagaagggcaaggcttacaccaactacttcggacggtgcaatgtggccgagcacgaaaagctgatcctgctggcccagctgaagcccgagaaggatagcgacgaagccgtgacatatagcctgggaaagtttgggcagagggccctggatttctacagcattcatgtgaccaaggagtccacccaccccgtgaagcccctggcccagatcgccggaaacagatacgcctccggacctgtgggaaaggccctgagcgacgcatgtatgggcacaatcgcctccttcctgtctaagtaccaggacatcatcatcgaacaccagaaggtggtgaagggcaaccagaagagactggagagcctgcgggagctggccggcaaggaaaacctggaataccctagcgtgaccctgccacctcagcctcacaccaaggagggcgttgatgcctacaacgaagtgatcgcccgggtgcgaatgtgggtgaacctgaacctgtggcagaagctgaagctaagcagagatgatgccaagcctctgctgagactgaagggattcccttcctttcctctggtcgagagacaggccaacgaagtggactggtgggacatggtgtgtaacgtgaagaagctgatcaacgagaaaaaggaggatggcaaggtgttttggcagaatctggctggctacaagagacaggaagccctgagaccatacctgagcagcgaggaagatcggaagaagggaaagaaattcgctcggtaccagctgggcgacctgctgctgcacctggaaaagaagcacggcgaggactggggaaaggtgtacgacgaggcctgggagcggattgacaagaaagtggaaggcctgagcaagcacatcaagctggaagaggaacggagaagcgaggacgcccagagcaaggccgccctgaccgactggctgcgggctaaggccagcttcgtgatcgagggcctgaaggaggccgacaaggacgagttctgcagatgcgagctgaagctgcagaagtggtacggggacctgcggggaaagcccttcgccatcgaagccgagaacagcatcctggacatcagcggcttcagcaagcagtacaactgtgccttcatctggcagaaggacggcgtgaagaagctgaacctgtacctgatcatcaactacttcaagggcggcaagctgcggttcaagaagatcaaacctgaagccttcgaagccaacagattctacaccgtgatcaacaaaaagagcggcgagatcgtgcccatggaggtgaacttcaacttcgacgaccccaacctgatcatcctgcctctggcctttggcaagagacagggcagagaattcatctggaacgacctgctgtccctggaaaccggcagcctgaagctggccaacggaagagtgatcgagaagacactgtacaacagaagaacccggcaggatgagcctgccctgttcgtggccctgaccttcgagcggcgggaggtcctggactcctccaatatcaaaccaatgaacctgatcggcgtggcaagaggcgaaaacatccccgccgtgatcgccctgaccgaccccgagggctgcccactgagccggtttaaggatagcctgggaaacccaacccacatcctgagaatcggcgagagctataaggagaagcagcggaccatccaggccaagaaggaggtggagcagcggagagccggcggctacagccggaagtacgccagcaaagccaagaatctggcagacgatatggtgagaaacaccgctagagatctgctgtactacgccgtgacccaggatgccatgctgatcttcgccaacctgagccggggcttcggccggcagggcaagcggaccttcatggccgagagacagtacacacggatggaggactggctgaccgccaagctggcctacgagggcctgagcaagacctacctgtccaagacactggcccagtacacctccaagacatgcagcaactgtgggtttaccatcaccagcgccgactacgacagggtgctggagaagctgaagaagacagcaacaggctggatgaccacaattaacggcaaggagctgaaggtggagggccagattacctactacaacagatacaagagacagaacgtagtcaaggacctgtccgtcgagctggatagactgagcgaagaatctgtgaacaacgacatctcctcctggacaaagggcagaagcggagaagctctgagcctcctgaagaaaagattctcccatagacccgtgcaggagaagttcgtgtgcctgaactgcggcttcgagacacacgcagccgagcaagccgccctgaacatcgccagatcctggctgttcctgcggagccaggagtacaagaaataccagacaaacaagacaaccggcaacaccgataagagagccttcgtcgagacctggcagtccttttaccggaagaagcttaaggaggtgtggaaacctgccgtgcggtctggcggatctggcggaggctccacaagcttccagggcagcgtgatgttcagcgacgtgagcatcgacttcagccaggaggagtgggagtacctggacctggagcagagggccctgtacagggacgtgatgctggagaactacagcaacctggtgagcctgggctgcttcatcagcaagcccgacgtgatcagcctgctggagcagggcaaggagccctggaaggtggtgaggaagggcaagaggaggtaccccgacctggagaccaggtacaccagccccaagaaaaagagaaaagtctaagctgccttctgcggggcttgccttctggccatgcccttcttctctcccttgcacctgtacctcttggtctttgaataaagcctgagtaggaaggctagcaaaaaaaaaaaaaaaaaaaaaaaaaaaaaaaaaaaaaaaaaaaaaaaaaaaaaaaaaaaaaaaaaaaaaaaaaaaaaaaa

SEQ ID NO: 5820 - RNA, 5797 nt, synthetic construct
  source 1..5797: mol_type = other RNA
aggaaataagagagaaaagaagagtaagaagaaatataagagccaccatggcccctaagaagaagcgtaaagtgagccggatggaacgcctcgtctacgaggtgcggcagaagtgcagaaacatcgaggacatctgcatctcctgcggatctctgaacgtgaccctggagcacccactgttcatcggcggcatgtgccagaactgtaaaaactgttttctggagtgtgcctatcaatacgacgatgacggctaccagagctactgcaccatctgttgcggcggaagagaggtgctgatgtgtggaaataacaactgctgccggtgcttctgcgtggaatgcgtggacctgctggtgggccccggcgccgcccaggccgctattaaggaagatccttggaactgctacatgtgcggccacaagggcacatacggcctgctgagacggagagaggactggcctagcagactgcagatgttcttcgccaataaccacgaccaggagttcgacccccctaaggtgtaccctcccgtccccgccgagaagagaaagcccatccgggtcctgagcctgttcgatggcatcgccaccggtctgctggtgctgaaggacctgggcatccaggtggataggtacattgcctccgaggtgtgcgaggactccatcaccgtgggaatggtgcgtcatcagggcaagatcatgtacgtgggcgacgtgcggagcgtgacacagaagcatatccaggagtggggccctttcgacctggtgatcggcggcagcccttgcaatgacctgagcatcgtgaacccagcccggaagggcctgtacgagggaaccggcagactgttcttcgagttttacagactgctgcacgacgcccggcctaaggaaggcgacgaccggcccttcttttggctgttcgagaatgtggtggccatgggagtcagcgacaagcgggatattagccggttcctggagagcaaccccgtgatgatcgatgccaaggaagtgagcgccgcccaccgggccagatacttctggggcaatctgcctggcatgaacagacccctggccagcaccgtgaacgacaagctggagctgcaggagtgcctggagcacggccggatcgccaagttcagcaaggtgagaaccatcaccacccgaagcaacagcatcaaacaaggcaaggaccagcactttcctgtgttcatgaacgagaaggaggacatcctgtggtgtaccgagatggagagagtgttcgggttcccagtccactacacagatgtcagcaacatgtctagactggccagacagagactgctgggaagaagctggtccgtccctgtgatcagacacctgttcgcccctctgaaggagtacttcgcctgcgtgagcagcggcaacagcaacgccaacagccggggccccagcttctctagcggcctggtgccactgtccctgagagggagccacatgggccccatggagatctacaaaaccgtgagcgcctggaagcggcagcctgtgcgcgtgctgagcctgtttcggaatatcgataaagtcctgaaaagcctgggattcctggagagcggctctggctccggcggtggcaccctgaagtacgtggaggatgtgacaaacgtggtcagacgggatgtggagaagtggggccccttcgatctggtgtacggcagcacccaacccctgggcagctcttgtgaccggtgccctggctggtacatgtttcagttccaccggatcctgcagtacgccctgccgagacaggagtcccagcggccattcttttggattttcatggacaacttgctgctgaccgaggatgaccaggaaactaccactcggttcctgcagaccgaagccgtgaccctgcaggacgtgagaggccgggactaccagaacgccatgcgggtgtggtccaacatccctggactgaaaagcaagcacgcacctctgacccctaaagaagaggagtacctgcaggcccaggtgcggagcagaagcaagctggacgcccctaaggtggatctgctggtgaagaattgcctcctgcccctgagagagtacttcaagtatttcagccagaatagtctgcccctgggcggcccaagcagcggcgcccctcctcccagcggcggcagcccagccggctccccaacctctaccgaggagggcacctctgagtccgccacccccgagagcggccctggcacctccaccgagcccagcgagggcagcgcacccggcagccctgccggcagccccacctccacagaggagggaaccagcaccgagcccagcgaaggcagcgccccaggcaccagcaccgagcctagtgagggcggctctggcggcggcagcgcccaggagattaaacggatcaacaagatcagaagaagacttgtgaaagacagcaacaccaagaaggccggcaagacaggccccatgaaaaccctgctggttagagtgatgacacccgatctgagagagcggctggaaaacctgagaaagaagcctgaaaatatcccccagcccatcagcaatacatctagagccaacctgaataagctgctgaccgattacaccgaaatgaagaaggcgatcctgcatgtgtactgggaagagttccagaaggaccctgtgggcctgatgagccgggtggcccagcctgccagcaagaagatcgatcagaacaagctgaaacctgagatggacgagaagggcaacctgaccaccgccggctttgcctgctctcagtgtggccagcccctgttcgtgtacaagctggagcaggtgtctgagaagggcaaggcttacaccaactacttcggacggtgcaatgtggccgagcacgaaaagctgatcctgctggcccagctgaagcccgagaaggatagcgacgaagccgtgacatatagcctgggaaagtttgggcagagggccctggatttctacagcattcatgtgaccaaggagtccacccaccccgtgaagcccctggcccagatcgccggaaacagatacgcctccggacctgtgggaaaggccctgagcgacgcatgtatgggcacaatcgcctccttcctgtctaagtaccaggacatcatcatcgaacaccagaaggtggtgaagggcaaccagaagagactggagagcctgcgggagctggccggcaaggaaaacctggaataccctagcgtgaccctgccacctcagcctcacaccaaggagggcgttgatgcctacaacgaagtgatcgcccgggtgcgaatgtgggtgaacctgaacctgtggcagaagctgaagctaagcagagatgatgccaagcctctgctgagactgaagggattcccttcctttcctctggtcgagagacaggccaacgaagtggactggtgggacatggtgtgtaacgtgaagaagctgatcaacgagaaaaaggaggatggcaaggtgttttggcagaatctggctggctacaagagacaggaagccctgagaccatacctgagcagcgaggaagatcggaagaagggaaagaaattcgctcggtaccagctgggcgacctgctgctgcacctggaaaagaagcacggcgaggactggggaaaggtgtacgacgaggcctgggagcggattgacaagaaagtggaaggcctgagcaagcacatcaagctggaagaggaacggagaagcgaggacgcccagagcaaggccgccctgaccgactggctgcgggctaaggccagcttcgtgatcgagggcctgaaggaggccgacaaggacgagttctgcagatgcgagctgaagctgcagaagtggtacggggacctgcggggaaagcccttcgccatcgaagccgagaacagcatcctggacatcagcggcttcagcaagcagtacaactgtgccttcatctggcagaaggacggcgtgaagaagctgaacctgtacctgatcatcaactacttcaagggcggcaagctgcggttcaagaagatcaaacctgaagccttcgaagccaacagattctacaccgtgatcaacaaaaagagcggcgagatcgtgcccatggaggtgaacttcaacttcgacgaccccaacctgatcatcctgcctctggcctttggcaagagacagggcagagaattcatctggaacgacctgctgtccctggaaaccggcagcctgaagctggccaacggaagagtgatcgagaagacactgtacaacagaagaacccggcaggatgagcctgccctgttcgtggccctgaccttcgagcggcgggaggtcctggactcctccaatatcaaaccaatgaacctgatcggcgtggcaagaggcgaaaacatccccgccgtgatcgccctgaccgaccccgagggctgcccactgagccggtttaaggatagcctgggaaacccaacccacatcctgagaatcggcgagagctataaggagaagcagcggaccatccaggccaagaaggaggtggagcagcggagagccggcggctacagccggaagtacgccagcaaagccaagaatctggcagacgatatggtgagaaacaccgctagagatctgctgtactacgccgtgacccaggatgccatgctgatcttcgccaacctgagccggggcttcggccggcagggcaagcggaccttcatggccgagagacagtacacacggatggaggactggctgaccgccaagctggcctacgagggcctgagcaagacctacctgtccaagacactggcccagtacacctccaagacatgcagcaactgtgggtttaccatcaccagcgccgactacgacagggtgctggagaagctgaagaagacagcaacaggctggatgaccacaattaacggcaaggagctgaaggtggagggccagattacctactacaacagatacaagagacagaacgtagtcaaggacctgtccgtcgagctggatagactgagcgaagaatctgtgaacaacgacatctcctcctggacaaagggcagaagcggagaagctctgagcctcctgaagaaaagattctcccatagacccgtgcaggagaagttcgtgtgcctgaactgcggcttcgagacacacgcagccgagcaagccgccctgaacatcgccagatcctggctgttcctgcggagccaggagtacaagaaataccagacaaacaagacaaccggcaacaccgataagagagccttcgtcgagacctggcagtccttttaccggaagaagcttaaggaggtgtggaaacctgccgtgcggtctggcggatctggcggaggctccacaagcagccagagcctggtgaccttcggcgacgtggccgtggagttcagccccgaggagtgggagtggctggacagcgcccagaggagcctgtacaggagcgtgatgctggagaactacaggagcctggtgagcctgggcctgtgcgtgagcaagcccaagatgatcagcagcctggagcagaggaaggagccctgggtggccaagaggaccctgaccaggggcggctgccccgacagcagggccctgaccagccccaagaaaaagagaaaagtctaagctgccttctgcggggcttgccttctggccatgcccttcttctctcccttgcacctgtacctcttggtctttgaataaagcctgagtaggaaggctagcaaaaaaaaaaaaaaaaaaaaaaaaaaaaaaaaaaaaaaaaaaaaaaaaaaaaaaaaaaaaaaaaaaaaaaaaaaaaaaaa

SEQ ID NO: 5821 - RNA, 5797 nt, synthetic construct
  source 1..5797: mol_type = other RNA
aggaaataagagagaaaagaagagtaagaagaaatataagagccaccatggcccctaagaagaagcgtaaagtgagccggatggaacgcctcgtctacgaggtgcggcagaagtgcagaaacatcgaggacatctgcatctcctgcggatctctgaacgtgaccctggagcacccactgttcatcggcggcatgtgccagaactgtaaaaactgttttctggagtgtgcctatcaatacgacgatgacggctaccagagctactgcaccatctgttgcggcggaagagaggtgctgatgtgtggaaataacaactgctgccggtgcttctgcgtggaatgcgtggacctgctggtgggccccggcgccgcccaggccgctattaaggaagatccttggaactgctacatgtgcggccacaagggcacatacggcctgctgagacggagagaggactggcctagcagactgcagatgttcttcgccaataaccacgaccaggagttcgacccccctaaggtgtaccctcccgtccccgccgagaagagaaagcccatccgggtcctgagcctgttcgatggcatcgccaccggtctgctggtgctgaaggacctgggcatccaggtggataggtacattgcctccgaggtgtgcgaggactccatcaccgtgggaatggtgcgtcatcagggcaagatcatgtacgtgggcgacgtgcggagcgtgacacagaagcatatccaggagtggggccctttcgacctggtgatcggcggcagcccttgcaatgacctgagcatcgtgaacccagcccggaagggcctgtacgagggaaccggcagactgttcttcgagttttacagactgctgcacgacgcccggcctaaggaaggcgacgaccggcccttcttttggctgttcgagaatgtggtggccatgggagtcagcgacaagcgggatattagccggttcctggagagcaaccccgtgatgatcgatgccaaggaagtgagcgccgcccaccgggccagatacttctggggcaatctgcctggcatgaacagacccctggccagcaccgtgaacgacaagctggagctgcaggagtgcctggagcacggccggatcgccaagttcagcaaggtgagaaccatcaccacccgaagcaacagcatcaaacaaggcaaggaccagcactttcctgtgttcatgaacgagaaggaggacatcctgtggtgtaccgagatggagagagtgttcgggttcccagtccactacacagatgtcagcaacatgtctagactggccagacagagactgctgggaagaagctggtccgtccctgtgatcagacacctgttcgcccctctgaaggagtacttcgcctgcgtgagcagcggcaacagcaacgccaacagccggggccccagcttctctagcggcctggtgccactgtccctgagagggagccacatgggccccatggagatctacaaaaccgtgagcgcctggaagcggcagcctgtgcgcgtgctgagcctgtttcggaatatcgataaagtcctgaaaagcctgggattcctggagagcggctctggctccggcggtggcaccctgaagtacgtggaggatgtgacaaacgtggtcagacgggatgtggagaagtggggccccttcgatctggtgtacggcagcacccaacccctgggcagctcttgtgaccggtgccctggctggtacatgtttcagttccaccggatcctgcagtacgccctgccgagacaggagtcccagcggccattcttttggattttcatggacaacttgctgctgaccgaggatgaccaggaaactaccactcggttcctgcagaccgaagccgtgaccctgcaggacgtgagaggccgggactaccagaacgccatgcgggtgtggtccaacatccctggactgaaaagcaagcacgcacctctgacccctaaagaagaggagtacctgcaggcccaggtgcggagcagaagcaagctggacgcccctaaggtggatctgctggtgaagaattgcctcctgcccctgagagagtacttcaagtatttcagccagaatagtctgcccctgggcggcccaagcagcggcgcccctcctcccagcggcggcagcccagccggctccccaacctctaccgaggagggcacctctgagtccgccacccccgagagcggccctggcacctccaccgagcccagcgagggcagcgcacccggcagccctgccggcagccccacctccacagaggagggaaccagcaccgagcccagcgaaggcagcgccccaggcaccagcaccgagcctagtgagggcggctctggcggcggcagcgcccaggagattaaacggatcaacaagatcagaagaagacttgtgaaagacagcaacaccaagaaggccggcaagacaggccccatgaaaaccctgctggttagagtgatgacacccgatctgagagagcggctggaaaacctgagaaagaagcctgaaaatatcccccagcccatcagcaatacatctagagccaacctgaataagctgctgaccgattacaccgaaatgaagaaggcgatcctgcatgtgtactgggaagagttccagaaggaccctgtgggcctgatgagccgggtggcccagcctgccagcaagaagatcgatcagaacaagctgaaacctgagatggacgagaagggcaacctgaccaccgccggctttgcctgctctcagtgtggccagcccctgttcgtgtacaagctggagcaggtgtctgagaagggcaaggcttacaccaactacttcggacggtgcaatgtggccgagcacgaaaagctgatcctgctggcccagctgaagcccgagaaggatagcgacgaagccgtgacatatagcctgggaaagtttgggcagagggccctggatttctacagcattcatgtgaccaaggagtccacccaccccgtgaagcccctggcccagatcgccggaaacagatacgcctccggacctgtgggaaaggccctgagcgacgcatgtatgggcacaatcgcctccttcctgtctaagtaccaggacatcatcatcgaacaccagaaggtggtgaagggcaaccagaagagactggagagcctgcgggagctggccggcaaggaaaacctggaataccctagcgtgaccctgccacctcagcctcacaccaaggagggcgttgatgcctacaacgaagtgatcgcccgggtgcgaatgtgggtgaacctgaacctgtggcagaagctgaagctaagcagagatgatgccaagcctctgctgagactgaagggattcccttcctttcctctggtcgagagacaggccaacgaagtggactggtgggacatggtgtgtaacgtgaagaagctgatcaacgagaaaaaggaggatggcaaggtgttttggcagaatctggctggctacaagagacaggaagccctgagaccatacctgagcagcgaggaagatcggaagaagggaaagaaattcgctcggtaccagctgggcgacctgctgctgcacctggaaaagaagcacggcgaggactggggaaaggtgtacgacgaggcctgggagcggattgacaagaaagtggaaggcctgagcaagcacatcaagctggaagaggaacggagaagcgaggacgcccagagcaaggccgccctgaccgactggctgcgggctaaggccagcttcgtgatcgagggcctgaaggaggccgacaaggacgagttctgcagatgcgagctgaagctgcagaagtggtacggggacctgcggggaaagcccttcgccatcgaagccgagaacagcatcctggacatcagcggcttcagcaagcagtacaactgtgccttcatctggcagaaggacggcgtgaagaagctgaacctgtacctgatcatcaactacttcaagggcggcaagctgcggttcaagaagatcaaacctgaagccttcgaagccaacagattctacaccgtgatcaacaaaaagagcggcgagatcgtgcccatggaggtgaacttcaacttcgacgaccccaacctgatcatcctgcctctggcctttggcaagagacagggcagagaattcatctggaacgacctgctgtccctggaaaccggcagcctgaagctggccaacggaagagtgatcgagaagacactgtacaacagaagaacccggcaggatgagcctgccctgttcgtggccctgaccttcgagcggcgggaggtcctggactcctccaatatcaaaccaatgaacctgatcggcgtggcaagaggcgaaaacatccccgccgtgatcgccctgaccgaccccgagggctgcccactgagccggtttaaggatagcctgggaaacccaacccacatcctgagaatcggcgagagctataaggagaagcagcggaccatccaggccaagaaggaggtggagcagcggagagccggcggctacagccggaagtacgccagcaaagccaagaatctggcagacgatatggtgagaaacaccgctagagatctgctgtactacgccgtgacccaggatgccatgctgatcttcgccaacctgagccggggcttcggccggcagggcaagcggaccttcatggccgagagacagtacacacggatggaggactggctgaccgccaagctggcctacgagggcctgagcaagacctacctgtccaagacactggcccagtacacctccaagacatgcagcaactgtgggtttaccatcaccagcgccgactacgacagggtgctggagaagctgaagaagacagcaacaggctggatgaccacaattaacggcaaggagctgaaggtggagggccagattacctactacaacagatacaagagacagaacgtagtcaaggacctgtccgtcgagctggatagactgagcgaagaatctgtgaacaacgacatctcctcctggacaaagggcagaagcggagaagctctgagcctcctgaagaaaagattctcccatagacccgtgcaggagaagttcgtgtgcctgaactgcggcttcgagacacacgcagccgagcaagccgccctgaacatcgccagatcctggctgttcctgcggagccaggagtacaagaaataccagacaaacaagacaaccggcaacaccgataagagagccttcgtcgagacctggcagtccttttaccggaagaagcttaaggaggtgtggaaacctgccgtgcggtctggcggatctggcggaggctccacaagcagccaggagagcgtggccttcgaggacgtggccgtgtacttcaccaccaaggagtgggccatcatggtgcccgccgagagggccctgtacagggacgtgatgctggagaactacgaggccgtggccttcgtggtgccccccaccagcaagcccgccctgatcagccacctggagcagggcaaggagagctgcttcatcaggccccagggcgtgctgagcaggagcgactggagggccggcctgaccagccccaagaaaaagagaaaagtctaagctgccttctgcggggcttgccttctggccatgcccttcttctctcccttgcacctgtacctcttggtctttgaataaagcctgagtaggaaggctagcaaaaaaaaaaaaaaaaaaaaaaaaaaaaaaaaaaaaaaaaaaaaaaaaaaaaaaaaaaaaaaaaaaaaaaaaaaaaaaaa

SEQ ID NO: 5822 - RNA, 5797 nt, synthetic construct
  source 1..5797: mol_type = other RNA
aggaaataagagagaaaagaagagtaagaagaaatataagagccaccatggcccctaagaagaagcgtaaagtgagccggatggaacgcctcgtctacgaggtgcggcagaagtgcagaaacatcgaggacatctgcatctcctgcggatctctgaacgtgaccctggagcacccactgttcatcggcggcatgtgccagaactgtaaaaactgttttctggagtgtgcctatcaatacgacgatgacggctaccagagctactgcaccatctgttgcggcggaagagaggtgctgatgtgtggaaataacaactgctgccggtgcttctgcgtggaatgcgtggacctgctggtgggccccggcgccgcccaggccgctattaaggaagatccttggaactgctacatgtgcggccacaagggcacatacggcctgctgagacggagagaggactggcctagcagactgcagatgttcttcgccaataaccacgaccaggagttcgacccccctaaggtgtaccctcccgtccccgccgagaagagaaagcccatccgggtcctgagcctgttcgatggcatcgccaccggtctgctggtgctgaaggacctgggcatccaggtggataggtacattgcctccgaggtgtgcgaggactccatcaccgtgggaatggtgcgtcatcagggcaagatcatgtacgtgggcgacgtgcggagcgtgacacagaagcatatccaggagtggggccctttcgacctggtgatcggcggcagcccttgcaatgacctgagcatcgtgaacccagcccggaagggcctgtacgagggaaccggcagactgttcttcgagttttacagactgctgcacgacgcccggcctaaggaaggcgacgaccggcccttcttttggctgttcgagaatgtggtggccatgggagtcagcgacaagcgggatattagccggttcctggagagcaaccccgtgatgatcgatgccaaggaagtgagcgccgcccaccgggccagatacttctggggcaatctgcctggcatgaacagacccctggccagcaccgtgaacgacaagctggagctgcaggagtgcctggagcacggccggatcgccaagttcagcaaggtgagaaccatcaccacccgaagcaacagcatcaaacaaggcaaggaccagcactttcctgtgttcatgaacgagaaggaggacatcctgtggtgtaccgagatggagagagtgttcgggttcccagtccactacacagatgtcagcaacatgtctagactggccagacagagactgctgggaagaagctggtccgtccctgtgatcagacacctgttcgcccctctgaaggagtacttcgcctgcgtgagcagcggcaacagcaacgccaacagccggggccccagcttctctagcggcctggtgccactgtccctgagagggagccacatgggccccatggagatctacaaaaccgtgagcgcctggaagcggcagcctgtgcgcgtgctgagcctgtttcggaatatcgataaagtcctgaaaagcctgggattcctggagagcggctctggctccggcggtggcaccctgaagtacgtggaggatgtgacaaacgtggtcagacgggatgtggagaagtggggccccttcgatctggtgtacggcagcacccaacccctgggcagctcttgtgaccggtgccctggctggtacatgtttcagttccaccggatcctgcagtacgccctgccgagacaggagtcccagcggccattcttttggattttcatggacaacttgctgctgaccgaggatgaccaggaaactaccactcggttcctgcagaccgaagccgtgaccctgcaggacgtgagaggccgggactaccagaacgccatgcgggtgtggtccaacatccctggactgaaaagcaagcacgcacctctgacccctaaagaagaggagtacctgcaggcccaggtgcggagcagaagcaagctggacgcccctaaggtggatctgctggtgaagaattgcctcctgcccctgagagagtacttcaagtatttcagccagaatagtctgcccctgggcggcccaagcagcggcgcccctcctcccagcggcggcagcccagccggctccccaacctctaccgaggagggcacctctgagtccgccacccccgagagcggccctggcacctccaccgagcccagcgagggcagcgcacccggcagccctgccggcagccccacctccacagaggagggaaccagcaccgagcccagcgaaggcagcgccccaggcaccagcaccgagcctagtgagggcggctctggcggcggcagcgcccaggagattaaacggatcaacaagatcagaagaagacttgtgaaagacagcaacaccaagaaggccggcaagacaggccccatgaaaaccctgctggttagagtgatgacacccgatctgagagagcggctggaaaacctgagaaagaagcctgaaaatatcccccagcccatcagcaatacatctagagccaacctgaataagctgctgaccgattacaccgaaatgaagaaggcgatcctgcatgtgtactgggaagagttccagaaggaccctgtgggcctgatgagccgggtggcccagcctgccagcaagaagatcgatcagaacaagctgaaacctgagatggacgagaagggcaacctgaccaccgccggctttgcctgctctcagtgtggccagcccctgttcgtgtacaagctggagcaggtgtctgagaagggcaaggcttacaccaactacttcggacggtgcaatgtggccgagcacgaaaagctgatcctgctggcccagctgaagcccgagaaggatagcgacgaagccgtgacatatagcctgggaaagtttgggcagagggccctggatttctacagcattcatgtgaccaaggagtccacccaccccgtgaagcccctggcccagatcgccggaaacagatacgcctccggacctgtgggaaaggccctgagcgacgcatgtatgggcacaatcgcctccttcctgtctaagtaccaggacatcatcatcgaacaccagaaggtggtgaagggcaaccagaagagactggagagcctgcgggagctggccggcaaggaaaacctggaataccctagcgtgaccctgccacctcagcctcacaccaaggagggcgttgatgcctacaacgaagtgatcgcccgggtgcgaatgtgggtgaacctgaacctgtggcagaagctgaagctaagcagagatgatgccaagcctctgctgagactgaagggattcccttcctttcctctggtcgagagacaggccaacgaagtggactggtgggacatggtgtgtaacgtgaagaagctgatcaacgagaaaaaggaggatggcaaggtgttttggcagaatctggctggctacaagagacaggaagccctgagaccatacctgagcagcgaggaagatcggaagaagggaaagaaattcgctcggtaccagctgggcgacctgctgctgcacctggaaaagaagcacggcgaggactggggaaaggtgtacgacgaggcctgggagcggattgacaagaaagtggaaggcctgagcaagcacatcaagctggaagaggaacggagaagcgaggacgcccagagcaaggccgccctgaccgactggctgcgggctaaggccagcttcgtgatcgagggcctgaaggaggccgacaaggacgagttctgcagatgcgagctgaagctgcagaagtggtacggggacctgcggggaaagcccttcgccatcgaagccgagaacagcatcctggacatcagcggcttcagcaagcagtacaactgtgccttcatctggcagaaggacggcgtgaagaagctgaacctgtacctgatcatcaactacttcaagggcggcaagctgcggttcaagaagatcaaacctgaagccttcgaagccaacagattctacaccgtgatcaacaaaaagagcggcgagatcgtgcccatggaggtgaacttcaacttcgacgaccccaacctgatcatcctgcctctggcctttggcaagagacagggcagagaattcatctggaacgacctgctgtccctggaaaccggcagcctgaagctggccaacggaagagtgatcgagaagacactgtacaacagaagaacccggcaggatgagcctgccctgttcgtggccctgaccttcgagcggcgggaggtcctggactcctccaatatcaaaccaatgaacctgatcggcgtggcaagaggcgaaaacatccccgccgtgatcgccctgaccgaccccgagggctgcccactgagccggtttaaggatagcctgggaaacccaacccacatcctgagaatcggcgagagctataaggagaagcagcggaccatccaggccaagaaggaggtggagcagcggagagccggcggctacagccggaagtacgccagcaaagccaagaatctggcagacgatatggtgagaaacaccgctagagatctgctgtactacgccgtgacccaggatgccatgctgatcttcgccaacctgagccggggcttcggccggcagggcaagcggaccttcatggccgagagacagtacacacggatggaggactggctgaccgccaagctggcctacgagggcctgagcaagacctacctgtccaagacactggcccagtacacctccaagacatgcagcaactgtgggtttaccatcaccagcgccgactacgacagggtgctggagaagctgaagaagacagcaacaggctggatgaccacaattaacggcaaggagctgaaggtggagggccagattacctactacaacagatacaagagacagaacgtagtcaaggacctgtccgtcgagctggatagactgagcgaagaatctgtgaacaacgacatctcctcctggacaaagggcagaagcggagaagctctgagcctcctgaagaaaagattctcccatagacccgtgcaggagaagttcgtgtgcctgaactgcggcttcgagacacacgcagccgagcaagccgccctgaacatcgccagatcctggctgttcctgcggagccaggagtacaagaaataccagacaaacaagacaaccggcaacaccgataagagagccttcgtcgagacctggcagtccttttaccggaagaagcttaaggaggtgtggaaacctgccgtgcggtctggcggatctggcggaggctccacaagcagcaaggtgcccgtgaccttcggcgacctggccatctacttcagccaggaggagtgggagtggctgagccccatccagaaggacctgtacgaggacgtgatgctggagaactaccagaacctggtgagcctgggcctgagcttcaggaggcccaacgtgatcaccctgctggagaagggcaaggccccctggatcgtggagcccgtgaggaagaggaggggcgtggacagcggcagcaagagcaccagccccaagaaaaagagaaaagtctaagctgccttctgcggggcttgccttctggccatgcccttcttctctcccttgcacctgtacctcttggtctttgaataaagcctgagtaggaaggctagcaaaaaaaaaaaaaaaaaaaaaaaaaaaaaaaaaaaaaaaaaaaaaaaaaaaaaaaaaaaaaaaaaaaaaaaaaaaaaaaa

SEQ ID NO: 5823 - RNA, 5797 nt, synthetic construct
  source 1..5797: mol_type = other RNA
aggaaataagagagaaaagaagagtaagaagaaatataagagccaccatggcccctaagaagaagcgtaaagtgagccggatggaacgcctcgtctacgaggtgcggcagaagtgcagaaacatcgaggacatctgcatctcctgcggatctctgaacgtgaccctggagcacccactgttcatcggcggcatgtgccagaactgtaaaaactgttttctggagtgtgcctatcaatacgacgatgacggctaccagagctactgcaccatctgttgcggcggaagagaggtgctgatgtgtggaaataacaactgctgccggtgcttctgcgtggaatgcgtggacctgctggtgggccccggcgccgcccaggccgctattaaggaagatccttggaactgctacatgtgcggccacaagggcacatacggcctgctgagacggagagaggactggcctagcagactgcagatgttcttcgccaataaccacgaccaggagttcgacccccctaaggtgtaccctcccgtccccgccgagaagagaaagcccatccgggtcctgagcctgttcgatggcatcgccaccggtctgctggtgctgaaggacctgggcatccaggtggataggtacattgcctccgaggtgtgcgaggactccatcaccgtgggaatggtgcgtcatcagggcaagatcatgtacgtgggcgacgtgcggagcgtgacacagaagcatatccaggagtggggccctttcgacctggtgatcggcggcagcccttgcaatgacctgagcatcgtgaacccagcccggaagggcctgtacgagggaaccggcagactgttcttcgagttttacagactgctgcacgacgcccggcctaaggaaggcgacgaccggcccttcttttggctgttcgagaatgtggtggccatgggagtcagcgacaagcgggatattagccggttcctggagagcaaccccgtgatgatcgatgccaaggaagtgagcgccgcccaccgggccagatacttctggggcaatctgcctggcatgaacagacccctggccagcaccgtgaacgacaagctggagctgcaggagtgcctggagcacggccggatcgccaagttcagcaaggtgagaaccatcaccacccgaagcaacagcatcaaacaaggcaaggaccagcactttcctgtgttcatgaacgagaaggaggacatcctgtggtgtaccgagatggagagagtgttcgggttcccagtccactacacagatgtcagcaacatgtctagactggccagacagagactgctgggaagaagctggtccgtccctgtgatcagacacctgttcgcccctctgaaggagtacttcgcctgcgtgagcagcggcaacagcaacgccaacagccggggccccagcttctctagcggcctggtgccactgtccctgagagggagccacatgggccccatggagatctacaaaaccgtgagcgcctggaagcggcagcctgtgcgcgtgctgagcctgtttcggaatatcgataaagtcctgaaaagcctgggattcctggagagcggctctggctccggcggtggcaccctgaagtacgtggaggatgtgacaaacgtggtcagacgggatgtggagaagtggggccccttcgatctggtgtacggcagcacccaacccctgggcagctcttgtgaccggtgccctggctggtacatgtttcagttccaccggatcctgcagtacgccctgccgagacaggagtcccagcggccattcttttggattttcatggacaacttgctgctgaccgaggatgaccaggaaactaccactcggttcctgcagaccgaagccgtgaccctgcaggacgtgagaggccgggactaccagaacgccatgcgggtgtggtccaacatccctggactgaaaagcaagcacgcacctctgacccctaaagaagaggagtacctgcaggcccaggtgcggagcagaagcaagctggacgcccctaaggtggatctgctggtgaagaattgcctcctgcccctgagagagtacttcaagtatttcagccagaatagtctgcccctgggcggcccaagcagcggcgcccctcctcccagcggcggcagcccagccggctccccaacctctaccgaggagggcacctctgagtccgccacccccgagagcggccctggcacctccaccgagcccagcgagggcagcgcacccggcagccctgccggcagccccacctccacagaggagggaaccagcaccgagcccagcgaaggcagcgccccaggcaccagcaccgagcctagtgagggcggctctggcggcggcagcgcccaggagattaaacggatcaacaagatcagaagaagacttgtgaaagacagcaacaccaagaaggccggcaagacaggccccatgaaaaccctgctggttagagtgatgacacccgatctgagagagcggctggaaaacctgagaaagaagcctgaaaatatcccccagcccatcagcaatacatctagagccaacctgaataagctgctgaccgattacaccgaaatgaagaaggcgatcctgcatgtgtactgggaagagttccagaaggaccctgtgggcctgatgagccgggtggcccagcctgccagcaagaagatcgatcagaacaagctgaaacctgagatggacgagaagggcaacctgaccaccgccggctttgcctgctctcagtgtggccagcccctgttcgtgtacaagctggagcaggtgtctgagaagggcaaggcttacaccaactacttcggacggtgcaatgtggccgagcacgaaaagctgatcctgctggcccagctgaagcccgagaaggatagcgacgaagccgtgacatatagcctgggaaagtttgggcagagggccctggatttctacagcattcatgtgaccaaggagtccacccaccccgtgaagcccctggcccagatcgccggaaacagatacgcctccggacctgtgggaaaggccctgagcgacgcatgtatgggcacaatcgcctccttcctgtctaagtaccaggacatcatcatcgaacaccagaaggtggtgaagggcaaccagaagagactggagagcctgcgggagctggccggcaaggaaaacctggaataccctagcgtgaccctgccacctcagcctcacaccaaggagggcgttgatgcctacaacgaagtgatcgcccgggtgcgaatgtgggtgaacctgaacctgtggcagaagctgaagctaagcagagatgatgccaagcctctgctgagactgaagggattcccttcctttcctctggtcgagagacaggccaacgaagtggactggtgggacatggtgtgtaacgtgaagaagctgatcaacgagaaaaaggaggatggcaaggtgttttggcagaatctggctggctacaagagacaggaagccctgagaccatacctgagcagcgaggaagatcggaagaagggaaagaaattcgctcggtaccagctgggcgacctgctgctgcacctggaaaagaagcacggcgaggactggggaaaggtgtacgacgaggcctgggagcggattgacaagaaagtggaaggcctgagcaagcacatcaagctggaagaggaacggagaagcgaggacgcccagagcaaggccgccctgaccgactggctgcgggctaaggccagcttcgtgatcgagggcctgaaggaggccgacaaggacgagttctgcagatgcgagctgaagctgcagaagtggtacggggacctgcggggaaagcccttcgccatcgaagccgagaacagcatcctggacatcagcggcttcagcaagcagtacaactgtgccttcatctggcagaaggacggcgtgaagaagctgaacctgtacctgatcatcaactacttcaagggcggcaagctgcggttcaagaagatcaaacctgaagccttcgaagccaacagattctacaccgtgatcaacaaaaagagcggcgagatcgtgcccatggaggtgaacttcaacttcgacgaccccaacctgatcatcctgcctctggcctttggcaagagacagggcagagaattcatctggaacgacctgctgtccctggaaaccggcagcctgaagctggccaacggaagagtgatcgagaagacactgtacaacagaagaacccggcaggatgagcctgccctgttcgtggccctgaccttcgagcggcgggaggtcctggactcctccaatatcaaaccaatgaacctgatcggcgtggcaagaggcgaaaacatccccgccgtgatcgccctgaccgaccccgagggctgcccactgagccggtttaaggatagcctgggaaacccaacccacatcctgagaatcggcgagagctataaggagaagcagcggaccatccaggccaagaaggaggtggagcagcggagagccggcggctacagccggaagtacgccagcaaagccaagaatctggcagacgatatggtgagaaacaccgctagagatctgctgtactacgccgtgacccaggatgccatgctgatcttcgccaacctgagccggggcttcggccggcagggcaagcggaccttcatggccgagagacagtacacacggatggaggactggctgaccgccaagctggcctacgagggcctgagcaagacctacctgtccaagacactggcccagtacacctccaagacatgcagcaactgtgggtttaccatcaccagcgccgactacgacagggtgctggagaagctgaagaagacagcaacaggctggatgaccacaattaacggcaaggagctgaaggtggagggccagattacctactacaacagatacaagagacagaacgtagtcaaggacctgtccgtcgagctggatagactgagcgaagaatctgtgaacaacgacatctcctcctggacaaagggcagaagcggagaagctctgagcctcctgaagaaaagattctcccatagacccgtgcaggagaagttcgtgtgcctgaactgcggcttcgagacacacgcagccgagcaagccgccctgaacatcgccagatcctggctgttcctgcggagccaggagtacaagaaataccagacaaacaagacaaccggcaacaccgataagagagccttcgtcgagacctggcagtccttttaccggaagaagcttaaggaggtgtggaaacctgccgtgcggtctggcggatctggcggaggctccacaagcaagcccggcgccgtgagcttcgccgacgtggccgtgtacttcagccccgaggagtggggctgcctgaggcccgcccagagggccctgtacagggacgtgatgagggagacctacggccacctgggcgccctgggcttccccggccccaagcccgccctgatcagctggatggagcaggagagcgaggcctggagcagcgccgcccaggaccccgagaacggcgagagcctgggcggcgccaggaccagccccaagaaaaagagaaaagtctaagctgccttctgcggggcttgccttctggccatgcccttcttctctcccttgcacctgtacctcttggtctttgaataaagcctgagtaggaaggctagcaaaaaaaaaaaaaaaaaaaaaaaaaaaaaaaaaaaaaaaaaaaaaaaaaaaaaaaaaaaaaaaaaaaaaaaaaaaaaaaa

SEQ ID NO: 5824 - RNA, 5797 nt, synthetic construct
  source 1..5797: mol_type = other RNA
aggaaataagagagaaaagaagagtaagaagaaatataagagccaccatggcccctaagaagaagcgtaaagtgagccggatggaacgcctcgtctacgaggtgcggcagaagtgcagaaacatcgaggacatctgcatctcctgcggatctctgaacgtgaccctggagcacccactgttcatcggcggcatgtgccagaactgtaaaaactgttttctggagtgtgcctatcaatacgacgatgacggctaccagagctactgcaccatctgttgcggcggaagagaggtgctgatgtgtggaaataacaactgctgccggtgcttctgcgtggaatgcgtggacctgctggtgggccccggcgccgcccaggccgctattaaggaagatccttggaactgctacatgtgcggccacaagggcacatacggcctgctgagacggagagaggactggcctagcagactgcagatgttcttcgccaataaccacgaccaggagttcgacccccctaaggtgtaccctcccgtccccgccgagaagagaaagcccatccgggtcctgagcctgttcgatggcatcgccaccggtctgctggtgctgaaggacctgggcatccaggtggataggtacattgcctccgaggtgtgcgaggactccatcaccgtgggaatggtgcgtcatcagggcaagatcatgtacgtgggcgacgtgcggagcgtgacacagaagcatatccaggagtggggccctttcgacctggtgatcggcggcagcccttgcaatgacctgagcatcgtgaacccagcccggaagggcctgtacgagggaaccggcagactgttcttcgagttttacagactgctgcacgacgcccggcctaaggaaggcgacgaccggcccttcttttggctgttcgagaatgtggtggccatgggagtcagcgacaagcgggatattagccggttcctggagagcaaccccgtgatgatcgatgccaaggaagtgagcgccgcccaccgggccagatacttctggggcaatctgcctggcatgaacagacccctggccagcaccgtgaacgacaagctggagctgcaggagtgcctggagcacggccggatcgccaagttcagcaaggtgagaaccatcaccacccgaagcaacagcatcaaacaaggcaaggaccagcactttcctgtgttcatgaacgagaaggaggacatcctgtggtgtaccgagatggagagagtgttcgggttcccagtccactacacagatgtcagcaacatgtctagactggccagacagagactgctgggaagaagctggtccgtccctgtgatcagacacctgttcgcccctctgaaggagtacttcgcctgcgtgagcagcggcaacagcaacgccaacagccggggccccagcttctctagcggcctggtgccactgtccctgagagggagccacatgggccccatggagatctacaaaaccgtgagcgcctggaagcggcagcctgtgcgcgtgctgagcctgtttcggaatatcgataaagtcctgaaaagcctgggattcctggagagcggctctggctccggcggtggcaccctgaagtacgtggaggatgtgacaaacgtggtcagacgggatgtggagaagtggggccccttcgatctggtgtacggcagcacccaacccctgggcagctcttgtgaccggtgccctggctggtacatgtttcagttccaccggatcctgcagtacgccctgccgagacaggagtcccagcggccattcttttggattttcatggacaacttgctgctgaccgaggatgaccaggaaactaccactcggttcctgcagaccgaagccgtgaccctgcaggacgtgagaggccgggactaccagaacgccatgcgggtgtggtccaacatccctggactgaaaagcaagcacgcacctctgacccctaaagaagaggagtacctgcaggcccaggtgcggagcagaagcaagctggacgcccctaaggtggatctgctggtgaagaattgcctcctgcccctgagagagtacttcaagtatttcagccagaatagtctgcccctgggcggcccaagcagcggcgcccctcctcccagcggcggcagcccagccggctccccaacctctaccgaggagggcacctctgagtccgccacccccgagagcggccctggcacctccaccgagcccagcgagggcagcgcacccggcagccctgccggcagccccacctccacagaggagggaaccagcaccgagcccagcgaaggcagcgccccaggcaccagcaccgagcctagtgagggcggctctggcggcggcagcgcccaggagattaaacggatcaacaagatcagaagaagacttgtgaaagacagcaacaccaagaaggccggcaagacaggccccatgaaaaccctgctggttagagtgatgacacccgatctgagagagcggctggaaaacctgagaaagaagcctgaaaatatcccccagcccatcagcaatacatctagagccaacctgaataagctgctgaccgattacaccgaaatgaagaaggcgatcctgcatgtgtactgggaagagttccagaaggaccctgtgggcctgatgagccgggtggcccagcctgccagcaagaagatcgatcagaacaagctgaaacctgagatggacgagaagggcaacctgaccaccgccggctttgcctgctctcagtgtggccagcccctgttcgtgtacaagctggagcaggtgtctgagaagggcaaggcttacaccaactacttcggacggtgcaatgtggccgagcacgaaaagctgatcctgctggcccagctgaagcccgagaaggatagcgacgaagccgtgacatatagcctgggaaagtttgggcagagggccctggatttctacagcattcatgtgaccaaggagtccacccaccccgtgaagcccctggcccagatcgccggaaacagatacgcctccggacctgtgggaaaggccctgagcgacgcatgtatgggcacaatcgcctccttcctgtctaagtaccaggacatcatcatcgaacaccagaaggtggtgaagggcaaccagaagagactggagagcctgcgggagctggccggcaaggaaaacctggaataccctagcgtgaccctgccacctcagcctcacaccaaggagggcgttgatgcctacaacgaagtgatcgcccgggtgcgaatgtgggtgaacctgaacctgtggcagaagctgaagctaagcagagatgatgccaagcctctgctgagactgaagggattcccttcctttcctctggtcgagagacaggccaacgaagtggactggtgggacatggtgtgtaacgtgaagaagctgatcaacgagaaaaaggaggatggcaaggtgttttggcagaatctggctggctacaagagacaggaagccctgagaccatacctgagcagcgaggaagatcggaagaagggaaagaaattcgctcggtaccagctgggcgacctgctgctgcacctggaaaagaagcacggcgaggactggggaaaggtgtacgacgaggcctgggagcggattgacaagaaagtggaaggcctgagcaagcacatcaagctggaagaggaacggagaagcgaggacgcccagagcaaggccgccctgaccgactggctgcgggctaaggccagcttcgtgatcgagggcctgaaggaggccgacaaggacgagttctgcagatgcgagctgaagctgcagaagtggtacggggacctgcggggaaagcccttcgccatcgaagccgagaacagcatcctggacatcagcggcttcagcaagcagtacaactgtgccttcatctggcagaaggacggcgtgaagaagctgaacctgtacctgatcatcaactacttcaagggcggcaagctgcggttcaagaagatcaaacctgaagccttcgaagccaacagattctacaccgtgatcaacaaaaagagcggcgagatcgtgcccatggaggtgaacttcaacttcgacgaccccaacctgatcatcctgcctctggcctttggcaagagacagggcagagaattcatctggaacgacctgctgtccctggaaaccggcagcctgaagctggccaacggaagagtgatcgagaagacactgtacaacagaagaacccggcaggatgagcctgccctgttcgtggccctgaccttcgagcggcgggaggtcctggactcctccaatatcaaaccaatgaacctgatcggcgtggcaagaggcgaaaacatccccgccgtgatcgccctgaccgaccccgagggctgcccactgagccggtttaaggatagcctgggaaacccaacccacatcctgagaatcggcgagagctataaggagaagcagcggaccatccaggccaagaaggaggtggagcagcggagagccggcggctacagccggaagtacgccagcaaagccaagaatctggcagacgatatggtgagaaacaccgctagagatctgctgtactacgccgtgacccaggatgccatgctgatcttcgccaacctgagccggggcttcggccggcagggcaagcggaccttcatggccgagagacagtacacacggatggaggactggctgaccgccaagctggcctacgagggcctgagcaagacctacctgtccaagacactggcccagtacacctccaagacatgcagcaactgtgggtttaccatcaccagcgccgactacgacagggtgctggagaagctgaagaagacagcaacaggctggatgaccacaattaacggcaaggagctgaaggtggagggccagattacctactacaacagatacaagagacagaacgtagtcaaggacctgtccgtcgagctggatagactgagcgaagaatctgtgaacaacgacatctcctcctggacaaagggcagaagcggagaagctctgagcctcctgaagaaaagattctcccatagacccgtgcaggagaagttcgtgtgcctgaactgcggcttcgagacacacgcagccgagcaagccgccctgaacatcgccagatcctggctgttcctgcggagccaggagtacaagaaataccagacaaacaagacaaccggcaacaccgataagagagccttcgtcgagacctggcagtccttttaccggaagaagcttaaggaggtgtggaaacctgccgtgcggtctggcggatctggcggaggctccacaagcgtgaggatgcccgtgaccttcgaggacgtggccgtgaccttcacccaggaggagtggggccagctggaccccgcccagaggaccctgtaccaggaggtgatgctggagacctgcggcctgctggtgagcctgggctgccccctgcccaagcccgagctgttctaccccctggaccacagccccgagctgcagaccctgaagaggggcctgagccccaacagctgccccggcgacagcaccaagaccagccccaagaaaaagagaaaagtctaagctgccttctgcggggcttgccttctggccatgcccttcttctctcccttgcacctgtacctcttggtctttgaataaagcctgagtaggaaggctagcaaaaaaaaaaaaaaaaaaaaaaaaaaaaaaaaaaaaaaaaaaaaaaaaaaaaaaaaaaaaaaaaaaaaaaaaaaaaaaaa

SEQ ID NO: 5825 - RNA, 5797 nt, synthetic construct
  source 1..5797: mol_type = other RNA
aggaaataagagagaaaagaagagtaagaagaaatataagagccaccatggcccctaagaagaagcgtaaagtgagccggatggaacgcctcgtctacgaggtgcggcagaagtgcagaaacatcgaggacatctgcatctcctgcggatctctgaacgtgaccctggagcacccactgttcatcggcggcatgtgccagaactgtaaaaactgttttctggagtgtgcctatcaatacgacgatgacggctaccagagctactgcaccatctgttgcggcggaagagaggtgctgatgtgtggaaataacaactgctgccggtgcttctgcgtggaatgcgtggacctgctggtgggccccggcgccgcccaggccgctattaaggaagatccttggaactgctacatgtgcggccacaagggcacatacggcctgctgagacggagagaggactggcctagcagactgcagatgttcttcgccaataaccacgaccaggagttcgacccccctaaggtgtaccctcccgtccccgccgagaagagaaagcccatccgggtcctgagcctgttcgatggcatcgccaccggtctgctggtgctgaaggacctgggcatccaggtggataggtacattgcctccgaggtgtgcgaggactccatcaccgtgggaatggtgcgtcatcagggcaagatcatgtacgtgggcgacgtgcggagcgtgacacagaagcatatccaggagtggggccctttcgacctggtgatcggcggcagcccttgcaatgacctgagcatcgtgaacccagcccggaagggcctgtacgagggaaccggcagactgttcttcgagttttacagactgctgcacgacgcccggcctaaggaaggcgacgaccggcccttcttttggctgttcgagaatgtggtggccatgggagtcagcgacaagcgggatattagccggttcctggagagcaaccccgtgatgatcgatgccaaggaagtgagcgccgcccaccgggccagatacttctggggcaatctgcctggcatgaacagacccctggccagcaccgtgaacgacaagctggagctgcaggagtgcctggagcacggccggatcgccaagttcagcaaggtgagaaccatcaccacccgaagcaacagcatcaaacaaggcaaggaccagcactttcctgtgttcatgaacgagaaggaggacatcctgtggtgtaccgagatggagagagtgttcgggttcccagtccactacacagatgtcagcaacatgtctagactggccagacagagactgctgggaagaagctggtccgtccctgtgatcagacacctgttcgcccctctgaaggagtacttcgcctgcgtgagcagcggcaacagcaacgccaacagccggggccccagcttctctagcggcctggtgccactgtccctgagagggagccacatgggccccatggagatctacaaaaccgtgagcgcctggaagcggcagcctgtgcgcgtgctgagcctgtttcggaatatcgataaagtcctgaaaagcctgggattcctggagagcggctctggctccggcggtggcaccctgaagtacgtggaggatgtgacaaacgtggtcagacgggatgtggagaagtggggccccttcgatctggtgtacggcagcacccaacccctgggcagctcttgtgaccggtgccctggctggtacatgtttcagttccaccggatcctgcagtacgccctgccgagacaggagtcccagcggccattcttttggattttcatggacaacttgctgctgaccgaggatgaccaggaaactaccactcggttcctgcagaccgaagccgtgaccctgcaggacgtgagaggccgggactaccagaacgccatgcgggtgtggtccaacatccctggactgaaaagcaagcacgcacctctgacccctaaagaagaggagtacctgcaggcccaggtgcggagcagaagcaagctggacgcccctaaggtggatctgctggtgaagaattgcctcctgcccctgagagagtacttcaagtatttcagccagaatagtctgcccctgggcggcccaagcagcggcgcccctcctcccagcggcggcagcccagccggctccccaacctctaccgaggagggcacctctgagtccgccacccccgagagcggccctggcacctccaccgagcccagcgagggcagcgcacccggcagccctgccggcagccccacctccacagaggagggaaccagcaccgagcccagcgaaggcagcgccccaggcaccagcaccgagcctagtgagggcggctctggcggcggcagcgcccaggagattaaacggatcaacaagatcagaagaagacttgtgaaagacagcaacaccaagaaggccggcaagacaggccccatgaaaaccctgctggttagagtgatgacacccgatctgagagagcggctggaaaacctgagaaagaagcctgaaaatatcccccagcccatcagcaatacatctagagccaacctgaataagctgctgaccgattacaccgaaatgaagaaggcgatcctgcatgtgtactgggaagagttccagaaggaccctgtgggcctgatgagccgggtggcccagcctgccagcaagaagatcgatcagaacaagctgaaacctgagatggacgagaagggcaacctgaccaccgccggctttgcctgctctcagtgtggccagcccctgttcgtgtacaagctggagcaggtgtctgagaagggcaaggcttacaccaactacttcggacggtgcaatgtggccgagcacgaaaagctgatcctgctggcccagctgaagcccgagaaggatagcgacgaagccgtgacatatagcctgggaaagtttgggcagagggccctggatttctacagcattcatgtgaccaaggagtccacccaccccgtgaagcccctggcccagatcgccggaaacagatacgcctccggacctgtgggaaaggccctgagcgacgcatgtatgggcacaatcgcctccttcctgtctaagtaccaggacatcatcatcgaacaccagaaggtggtgaagggcaaccagaagagactggagagcctgcgggagctggccggcaaggaaaacctggaataccctagcgtgaccctgccacctcagcctcacaccaaggagggcgttgatgcctacaacgaagtgatcgcccgggtgcgaatgtgggtgaacctgaacctgtggcagaagctgaagctaagcagagatgatgccaagcctctgctgagactgaagggattcccttcctttcctctggtcgagagacaggccaacgaagtggactggtgggacatggtgtgtaacgtgaagaagctgatcaacgagaaaaaggaggatggcaaggtgttttggcagaatctggctggctacaagagacaggaagccctgagaccatacctgagcagcgaggaagatcggaagaagggaaagaaattcgctcggtaccagctgggcgacctgctgctgcacctggaaaagaagcacggcgaggactggggaaaggtgtacgacgaggcctgggagcggattgacaagaaagtggaaggcctgagcaagcacatcaagctggaagaggaacggagaagcgaggacgcccagagcaaggccgccctgaccgactggctgcgggctaaggccagcttcgtgatcgagggcctgaaggaggccgacaaggacgagttctgcagatgcgagctgaagctgcagaagtggtacggggacctgcggggaaagcccttcgccatcgaagccgagaacagcatcctggacatcagcggcttcagcaagcagtacaactgtgccttcatctggcagaaggacggcgtgaagaagctgaacctgtacctgatcatcaactacttcaagggcggcaagctgcggttcaagaagatcaaacctgaagccttcgaagccaacagattctacaccgtgatcaacaaaaagagcggcgagatcgtgcccatggaggtgaacttcaacttcgacgaccccaacctgatcatcctgcctctggcctttggcaagagacagggcagagaattcatctggaacgacctgctgtccctggaaaccggcagcctgaagctggccaacggaagagtgatcgagaagacactgtacaacagaagaacccggcaggatgagcctgccctgttcgtggccctgaccttcgagcggcgggaggtcctggactcctccaatatcaaaccaatgaacctgatcggcgtggcaagaggcgaaaacatccccgccgtgatcgccctgaccgaccccgagggctgcccactgagccggtttaaggatagcctgggaaacccaacccacatcctgagaatcggcgagagctataaggagaagcagcggaccatccaggccaagaaggaggtggagcagcggagagccggcggctacagccggaagtacgccagcaaagccaagaatctggcagacgatatggtgagaaacaccgctagagatctgctgtactacgccgtgacccaggatgccatgctgatcttcgccaacctgagccggggcttcggccggcagggcaagcggaccttcatggccgagagacagtacacacggatggaggactggctgaccgccaagctggcctacgagggcctgagcaagacctacctgtccaagacactggcccagtacacctccaagacatgcagcaactgtgggtttaccatcaccagcgccgactacgacagggtgctggagaagctgaagaagacagcaacaggctggatgaccacaattaacggcaaggagctgaaggtggagggccagattacctactacaacagatacaagagacagaacgtagtcaaggacctgtccgtcgagctggatagactgagcgaagaatctgtgaacaacgacatctcctcctggacaaagggcagaagcggagaagctctgagcctcctgaagaaaagattctcccatagacccgtgcaggagaagttcgtgtgcctgaactgcggcttcgagacacacgcagccgagcaagccgccctgaacatcgccagatcctggctgttcctgcggagccaggagtacaagaaataccagacaaacaagacaaccggcaacaccgataagagagccttcgtcgagacctggcagtccttttaccggaagaagcttaaggaggtgtggaaacctgccgtgcggtctggcggatctggcggaggctccacaagcatggccttcgaggacgtggccgtgcacttcagccaggaggagtggggcctgctggacaccgcccagaggagcctgtacaggagggtgatgctggagaacttcgccctgctggccagcctgggcctgagcgtgagcaggccccacgtggtgacccagctggagaggggcgaggagccctgggtgctgagcggcgtggacgtgaccctgccccaggacgcccagaggaggcccaggaggggcagcaccagccccaagaaaaagagaaaagtctaagctgccttctgcggggcttgccttctggccatgcccttcttctctcccttgcacctgtacctcttggtctttgaataaagcctgagtaggaaggctagcaaaaaaaaaaaaaaaaaaaaaaaaaaaaaaaaaaaaaaaaaaaaaaaaaaaaaaaaaaaaaaaaaaaaaaaaaaaaaaaa

SEQ ID NO: 5826 - RNA, 5797 nt, synthetic construct
  source 1..5797: mol_type = other RNA
aggaaataagagagaaaagaagagtaagaagaaatataagagccaccatggcccctaagaagaagcgtaaagtgagccggatggaacgcctcgtctacgaggtgcggcagaagtgcagaaacatcgaggacatctgcatctcctgcggatctctgaacgtgaccctggagcacccactgttcatcggcggcatgtgccagaactgtaaaaactgttttctggagtgtgcctatcaatacgacgatgacggctaccagagctactgcaccatctgttgcggcggaagagaggtgctgatgtgtggaaataacaactgctgccggtgcttctgcgtggaatgcgtggacctgctggtgggccccggcgccgcccaggccgctattaaggaagatccttggaactgctacatgtgcggccacaagggcacatacggcctgctgagacggagagaggactggcctagcagactgcagatgttcttcgccaataaccacgaccaggagttcgacccccctaaggtgtaccctcccgtccccgccgagaagagaaagcccatccgggtcctgagcctgttcgatggcatcgccaccggtctgctggtgctgaaggacctgggcatccaggtggataggtacattgcctccgaggtgtgcgaggactccatcaccgtgggaatggtgcgtcatcagggcaagatcatgtacgtgggcgacgtgcggagcgtgacacagaagcatatccaggagtggggccctttcgacctggtgatcggcggcagcccttgcaatgacctgagcatcgtgaacccagcccggaagggcctgtacgagggaaccggcagactgttcttcgagttttacagactgctgcacgacgcccggcctaaggaaggcgacgaccggcccttcttttggctgttcgagaatgtggtggccatgggagtcagcgacaagcgggatattagccggttcctggagagcaaccccgtgatgatcgatgccaaggaagtgagcgccgcccaccgggccagatacttctggggcaatctgcctggcatgaacagacccctggccagcaccgtgaacgacaagctggagctgcaggagtgcctggagcacggccggatcgccaagttcagcaaggtgagaaccatcaccacccgaagcaacagcatcaaacaaggcaaggaccagcactttcctgtgttcatgaacgagaaggaggacatcctgtggtgtaccgagatggagagagtgttcgggttcccagtccactacacagatgtcagcaacatgtctagactggccagacagagactgctgggaagaagctggtccgtccctgtgatcagacacctgttcgcccctctgaaggagtacttcgcctgcgtgagcagcggcaacagcaacgccaacagccggggccccagcttctctagcggcctggtgccactgtccctgagagggagccacatgggccccatggagatctacaaaaccgtgagcgcctggaagcggcagcctgtgcgcgtgctgagcctgtttcggaatatcgataaagtcctgaaaagcctgggattcctggagagcggctctggctccggcggtggcaccctgaagtacgtggaggatgtgacaaacgtggtcagacgggatgtggagaagtggggccccttcgatctggtgtacggcagcacccaacccctgggcagctcttgtgaccggtgccctggctggtacatgtttcagttccaccggatcctgcagtacgccctgccgagacaggagtcccagcggccattcttttggattttcatggacaacttgctgctgaccgaggatgaccaggaaactaccactcggttcctgcagaccgaagccgtgaccctgcaggacgtgagaggccgggactaccagaacgccatgcgggtgtggtccaacatccctggactgaaaagcaagcacgcacctctgacccctaaagaagaggagtacctgcaggcccaggtgcggagcagaagcaagctggacgcccctaaggtggatctgctggtgaagaattgcctcctgcccctgagagagtacttcaagtatttcagccagaatagtctgcccctgggcggcccaagcagcggcgcccctcctcccagcggcggcagcccagccggctccccaacctctaccgaggagggcacctctgagtccgccacccccgagagcggccctggcacctccaccgagcccagcgagggcagcgcacccggcagccctgccggcagccccacctccacagaggagggaaccagcaccgagcccagcgaaggcagcgccccaggcaccagcaccgagcctagtgagggcggctctggcggcggcagcgcccaggagattaaacggatcaacaagatcagaagaagacttgtgaaagacagcaacaccaagaaggccggcaagacaggccccatgaaaaccctgctggttagagtgatgacacccgatctgagagagcggctggaaaacctgagaaagaagcctgaaaatatcccccagcccatcagcaatacatctagagccaacctgaataagctgctgaccgattacaccgaaatgaagaaggcgatcctgcatgtgtactgggaagagttccagaaggaccctgtgggcctgatgagccgggtggcccagcctgccagcaagaagatcgatcagaacaagctgaaacctgagatggacgagaagggcaacctgaccaccgccggctttgcctgctctcagtgtggccagcccctgttcgtgtacaagctggagcaggtgtctgagaagggcaaggcttacaccaactacttcggacggtgcaatgtggccgagcacgaaaagctgatcctgctggcccagctgaagcccgagaaggatagcgacgaagccgtgacatatagcctgggaaagtttgggcagagggccctggatttctacagcattcatgtgaccaaggagtccacccaccccgtgaagcccctggcccagatcgccggaaacagatacgcctccggacctgtgggaaaggccctgagcgacgcatgtatgggcacaatcgcctccttcctgtctaagtaccaggacatcatcatcgaacaccagaaggtggtgaagggcaaccagaagagactggagagcctgcgggagctggccggcaaggaaaacctggaataccctagcgtgaccctgccacctcagcctcacaccaaggagggcgttgatgcctacaacgaagtgatcgcccgggtgcgaatgtgggtgaacctgaacctgtggcagaagctgaagctaagcagagatgatgccaagcctctgctgagactgaagggattcccttcctttcctctggtcgagagacaggccaacgaagtggactggtgggacatggtgtgtaacgtgaagaagctgatcaacgagaaaaaggaggatggcaaggtgttttggcagaatctggctggctacaagagacaggaagccctgagaccatacctgagcagcgaggaagatcggaagaagggaaagaaattcgctcggtaccagctgggcgacctgctgctgcacctggaaaagaagcacggcgaggactggggaaaggtgtacgacgaggcctgggagcggattgacaagaaagtggaaggcctgagcaagcacatcaagctggaagaggaacggagaagcgaggacgcccagagcaaggccgccctgaccgactggctgcgggctaaggccagcttcgtgatcgagggcctgaaggaggccgacaaggacgagttctgcagatgcgagctgaagctgcagaagtggtacggggacctgcggggaaagcccttcgccatcgaagccgagaacagcatcctggacatcagcggcttcagcaagcagtacaactgtgccttcatctggcagaaggacggcgtgaagaagctgaacctgtacctgatcatcaactacttcaagggcggcaagctgcggttcaagaagatcaaacctgaagccttcgaagccaacagattctacaccgtgatcaacaaaaagagcggcgagatcgtgcccatggaggtgaacttcaacttcgacgaccccaacctgatcatcctgcctctggcctttggcaagagacagggcagagaattcatctggaacgacctgctgtccctggaaaccggcagcctgaagctggccaacggaagagtgatcgagaagacactgtacaacagaagaacccggcaggatgagcctgccctgttcgtggccctgaccttcgagcggcgggaggtcctggactcctccaatatcaaaccaatgaacctgatcggcgtggcaagaggcgaaaacatccccgccgtgatcgccctgaccgaccccgagggctgcccactgagccggtttaaggatagcctgggaaacccaacccacatcctgagaatcggcgagagctataaggagaagcagcggaccatccaggccaagaaggaggtggagcagcggagagccggcggctacagccggaagtacgccagcaaagccaagaatctggcagacgatatggtgagaaacaccgctagagatctgctgtactacgccgtgacccaggatgccatgctgatcttcgccaacctgagccggggcttcggccggcagggcaagcggaccttcatggccgagagacagtacacacggatggaggactggctgaccgccaagctggcctacgagggcctgagcaagacctacctgtccaagacactggcccagtacacctccaagacatgcagcaactgtgggtttaccatcaccagcgccgactacgacagggtgctggagaagctgaagaagacagcaacaggctggatgaccacaattaacggcaaggagctgaaggtggagggccagattacctactacaacagatacaagagacagaacgtagtcaaggacctgtccgtcgagctggatagactgagcgaagaatctgtgaacaacgacatctcctcctggacaaagggcagaagcggagaagctctgagcctcctgaagaaaagattctcccatagacccgtgcaggagaagttcgtgtgcctgaactgcggcttcgagacacacgcagccgagcaagccgccctgaacatcgccagatcctggctgttcctgcggagccaggagtacaagaaataccagacaaacaagacaaccggcaacaccgataagagagccttcgtcgagacctggcagtccttttaccggaagaagcttaaggaggtgtggaaacctgccgtgcggtctggcggatctggcggaggctccacaagcttccagagcgaggtgatgttcagggacgtgaccgtgaacttcagccaggaggagtgggagtgcctgaacagctacgagagggacctgtacaaggacgtgatgctggagaactacagccacctggtgagcctgggctgcagcatcagcaagcccgacgtgatcaccctgctggagcagggcaaggagccctggatgatcgtgagggacgagaggaggaggtggagccaggacctggagaccaggaccagccccaagaaaaagagaaaagtctaagctgccttctgcggggcttgccttctggccatgcccttcttctctcccttgcacctgtacctcttggtctttgaataaagcctgagtaggaaggctagcaaaaaaaaaaaaaaaaaaaaaaaaaaaaaaaaaaaaaaaaaaaaaaaaaaaaaaaaaaaaaaaaaaaaaaaaaaaaaaaa

SEQ ID NO: 5827 - RNA, 5797 nt, synthetic construct
  source 1..5797: mol_type = other RNA
aggaaataagagagaaaagaagagtaagaagaaatataagagccaccatggcccctaagaagaagcgtaaagtgagccggatggaacgcctcgtctacgaggtgcggcagaagtgcagaaacatcgaggacatctgcatctcctgcggatctctgaacgtgaccctggagcacccactgttcatcggcggcatgtgccagaactgtaaaaactgttttctggagtgtgcctatcaatacgacgatgacggctaccagagctactgcaccatctgttgcggcggaagagaggtgctgatgtgtggaaataacaactgctgccggtgcttctgcgtggaatgcgtggacctgctggtgggccccggcgccgcccaggccgctattaaggaagatccttggaactgctacatgtgcggccacaagggcacatacggcctgctgagacggagagaggactggcctagcagactgcagatgttcttcgccaataaccacgaccaggagttcgacccccctaaggtgtaccctcccgtccccgccgagaagagaaagcccatccgggtcctgagcctgttcgatggcatcgccaccggtctgctggtgctgaaggacctgggcatccaggtggataggtacattgcctccgaggtgtgcgaggactccatcaccgtgggaatggtgcgtcatcagggcaagatcatgtacgtgggcgacgtgcggagcgtgacacagaagcatatccaggagtggggccctttcgacctggtgatcggcggcagcccttgcaatgacctgagcatcgtgaacccagcccggaagggcctgtacgagggaaccggcagactgttcttcgagttttacagactgctgcacgacgcccggcctaaggaaggcgacgaccggcccttcttttggctgttcgagaatgtggtggccatgggagtcagcgacaagcgggatattagccggttcctggagagcaaccccgtgatgatcgatgccaaggaagtgagcgccgcccaccgggccagatacttctggggcaatctgcctggcatgaacagacccctggccagcaccgtgaacgacaagctggagctgcaggagtgcctggagcacggccggatcgccaagttcagcaaggtgagaaccatcaccacccgaagcaacagcatcaaacaaggcaaggaccagcactttcctgtgttcatgaacgagaaggaggacatcctgtggtgtaccgagatggagagagtgttcgggttcccagtccactacacagatgtcagcaacatgtctagactggccagacagagactgctgggaagaagctggtccgtccctgtgatcagacacctgttcgcccctctgaaggagtacttcgcctgcgtgagcagcggcaacagcaacgccaacagccggggccccagcttctctagcggcctggtgccactgtccctgagagggagccacatgggccccatggagatctacaaaaccgtgagcgcctggaagcggcagcctgtgcgcgtgctgagcctgtttcggaatatcgataaagtcctgaaaagcctgggattcctggagagcggctctggctccggcggtggcaccctgaagtacgtggaggatgtgacaaacgtggtcagacgggatgtggagaagtggggccccttcgatctggtgtacggcagcacccaacccctgggcagctcttgtgaccggtgccctggctggtacatgtttcagttccaccggatcctgcagtacgccctgccgagacaggagtcccagcggccattcttttggattttcatggacaacttgctgctgaccgaggatgaccaggaaactaccactcggttcctgcagaccgaagccgtgaccctgcaggacgtgagaggccgggactaccagaacgccatgcgggtgtggtccaacatccctggactgaaaagcaagcacgcacctctgacccctaaagaagaggagtacctgcaggcccaggtgcggagcagaagcaagctggacgcccctaaggtggatctgctggtgaagaattgcctcctgcccctgagagagtacttcaagtatttcagccagaatagtctgcccctgggcggcccaagcagcggcgcccctcctcccagcggcggcagcccagccggctccccaacctctaccgaggagggcacctctgagtccgccacccccgagagcggccctggcacctccaccgagcccagcgagggcagcgcacccggcagccctgccggcagccccacctccacagaggagggaaccagcaccgagcccagcgaaggcagcgccccaggcaccagcaccgagcctagtgagggcggctctggcggcggcagcgcccaggagattaaacggatcaacaagatcagaagaagacttgtgaaagacagcaacaccaagaaggccggcaagacaggccccatgaaaaccctgctggttagagtgatgacacccgatctgagagagcggctggaaaacctgagaaagaagcctgaaaatatcccccagcccatcagcaatacatctagagccaacctgaataagctgctgaccgattacaccgaaatgaagaaggcgatcctgcatgtgtactgggaagagttccagaaggaccctgtgggcctgatgagccgggtggcccagcctgccagcaagaagatcgatcagaacaagctgaaacctgagatggacgagaagggcaacctgaccaccgccggctttgcctgctctcagtgtggccagcccctgttcgtgtacaagctggagcaggtgtctgagaagggcaaggcttacaccaactacttcggacggtgcaatgtggccgagcacgaaaagctgatcctgctggcccagctgaagcccgagaaggatagcgacgaagccgtgacatatagcctgggaaagtttgggcagagggccctggatttctacagcattcatgtgaccaaggagtccacccaccccgtgaagcccctggcccagatcgccggaaacagatacgcctccggacctgtgggaaaggccctgagcgacgcatgtatgggcacaatcgcctccttcctgtctaagtaccaggacatcatcatcgaacaccagaaggtggtgaagggcaaccagaagagactggagagcctgcgggagctggccggcaaggaaaacctggaataccctagcgtgaccctgccacctcagcctcacaccaaggagggcgttgatgcctacaacgaagtgatcgcccgggtgcgaatgtgggtgaacctgaacctgtggcagaagctgaagctaagcagagatgatgccaagcctctgctgagactgaagggattcccttcctttcctctggtcgagagacaggccaacgaagtggactggtgggacatggtgtgtaacgtgaagaagctgatcaacgagaaaaaggaggatggcaaggtgttttggcagaatctggctggctacaagagacaggaagccctgagaccatacctgagcagcgaggaagatcggaagaagggaaagaaattcgctcggtaccagctgggcgacctgctgctgcacctggaaaagaagcacggcgaggactggggaaaggtgtacgacgaggcctgggagcggattgacaagaaagtggaaggcctgagcaagcacatcaagctggaagaggaacggagaagcgaggacgcccagagcaaggccgccctgaccgactggctgcgggctaaggccagcttcgtgatcgagggcctgaaggaggccgacaaggacgagttctgcagatgcgagctgaagctgcagaagtggtacggggacctgcggggaaagcccttcgccatcgaagccgagaacagcatcctggacatcagcggcttcagcaagcagtacaactgtgccttcatctggcagaaggacggcgtgaagaagctgaacctgtacctgatcatcaactacttcaagggcggcaagctgcggttcaagaagatcaaacctgaagccttcgaagccaacagattctacaccgtgatcaacaaaaagagcggcgagatcgtgcccatggaggtgaacttcaacttcgacgaccccaacctgatcatcctgcctctggcctttggcaagagacagggcagagaattcatctggaacgacctgctgtccctggaaaccggcagcctgaagctggccaacggaagagtgatcgagaagacactgtacaacagaagaacccggcaggatgagcctgccctgttcgtggccctgaccttcgagcggcgggaggtcctggactcctccaatatcaaaccaatgaacctgatcggcgtggcaagaggcgaaaacatccccgccgtgatcgccctgaccgaccccgagggctgcccactgagccggtttaaggatagcctgggaaacccaacccacatcctgagaatcggcgagagctataaggagaagcagcggaccatccaggccaagaaggaggtggagcagcggagagccggcggctacagccggaagtacgccagcaaagccaagaatctggcagacgatatggtgagaaacaccgctagagatctgctgtactacgccgtgacccaggatgccatgctgatcttcgccaacctgagccggggcttcggccggcagggcaagcggaccttcatggccgagagacagtacacacggatggaggactggctgaccgccaagctggcctacgagggcctgagcaagacctacctgtccaagacactggcccagtacacctccaagacatgcagcaactgtgggtttaccatcaccagcgccgactacgacagggtgctggagaagctgaagaagacagcaacaggctggatgaccacaattaacggcaaggagctgaaggtggagggccagattacctactacaacagatacaagagacagaacgtagtcaaggacctgtccgtcgagctggatagactgagcgaagaatctgtgaacaacgacatctcctcctggacaaagggcagaagcggagaagctctgagcctcctgaagaaaagattctcccatagacccgtgcaggagaagttcgtgtgcctgaactgcggcttcgagacacacgcagccgagcaagccgccctgaacatcgccagatcctggctgttcctgcggagccaggagtacaagaaataccagacaaacaagacaaccggcaacaccgataagagagccttcgtcgagacctggcagtccttttaccggaagaagcttaaggaggtgtggaaacctgccgtgcggtctggcggatctggcggaggctccacaagcgtgcaggagcccgtgaccttcaaggacgtggccgtggacttcacccaggaggagtggggccagctggacctggtgcagaggaccctgtacagggacgtgatgctggagacctacggccacctgctgagcgtgggcaaccagatcgccaagcccgaggtgatcagcctgctggagcagggcgaggagccctggagcgtggagcagacctgcccccagagggcctgccccgagtggatgaggaacaccagccccaagaaaaagagaaaagtctaagctgccttctgcggggcttgccttctggccatgcccttcttctctcccttgcacctgtacctcttggtctttgaataaagcctgagtaggaaggctagcaaaaaaaaaaaaaaaaaaaaaaaaaaaaaaaaaaaaaaaaaaaaaaaaaaaaaaaaaaaaaaaaaaaaaaaaaaaaaaaa

SEQ ID NO: 5828 - RNA, 5797 nt, synthetic construct
  source 1..5797: mol_type = other RNA
aggaaataagagagaaaagaagagtaagaagaaatataagagccaccatggcccctaagaagaagcgtaaagtgagccggatggaacgcctcgtctacgaggtgcggcagaagtgcagaaacatcgaggacatctgcatctcctgcggatctctgaacgtgaccctggagcacccactgttcatcggcggcatgtgccagaactgtaaaaactgttttctggagtgtgcctatcaatacgacgatgacggctaccagagctactgcaccatctgttgcggcggaagagaggtgctgatgtgtggaaataacaactgctgccggtgcttctgcgtggaatgcgtggacctgctggtgggccccggcgccgcccaggccgctattaaggaagatccttggaactgctacatgtgcggccacaagggcacatacggcctgctgagacggagagaggactggcctagcagactgcagatgttcttcgccaataaccacgaccaggagttcgacccccctaaggtgtaccctcccgtccccgccgagaagagaaagcccatccgggtcctgagcctgttcgatggcatcgccaccggtctgctggtgctgaaggacctgggcatccaggtggataggtacattgcctccgaggtgtgcgaggactccatcaccgtgggaatggtgcgtcatcagggcaagatcatgtacgtgggcgacgtgcggagcgtgacacagaagcatatccaggagtggggccctttcgacctggtgatcggcggcagcccttgcaatgacctgagcatcgtgaacccagcccggaagggcctgtacgagggaaccggcagactgttcttcgagttttacagactgctgcacgacgcccggcctaaggaaggcgacgaccggcccttcttttggctgttcgagaatgtggtggccatgggagtcagcgacaagcgggatattagccggttcctggagagcaaccccgtgatgatcgatgccaaggaagtgagcgccgcccaccgggccagatacttctggggcaatctgcctggcatgaacagacccctggccagcaccgtgaacgacaagctggagctgcaggagtgcctggagcacggccggatcgccaagttcagcaaggtgagaaccatcaccacccgaagcaacagcatcaaacaaggcaaggaccagcactttcctgtgttcatgaacgagaaggaggacatcctgtggtgtaccgagatggagagagtgttcgggttcccagtccactacacagatgtcagcaacatgtctagactggccagacagagactgctgggaagaagctggtccgtccctgtgatcagacacctgttcgcccctctgaaggagtacttcgcctgcgtgagcagcggcaacagcaacgccaacagccggggccccagcttctctagcggcctggtgccactgtccctgagagggagccacatgggccccatggagatctacaaaaccgtgagcgcctggaagcggcagcctgtgcgcgtgctgagcctgtttcggaatatcgataaagtcctgaaaagcctgggattcctggagagcggctctggctccggcggtggcaccctgaagtacgtggaggatgtgacaaacgtggtcagacgggatgtggagaagtggggccccttcgatctggtgtacggcagcacccaacccctgggcagctcttgtgaccggtgccctggctggtacatgtttcagttccaccggatcctgcagtacgccctgccgagacaggagtcccagcggccattcttttggattttcatggacaacttgctgctgaccgaggatgaccaggaaactaccactcggttcctgcagaccgaagccgtgaccctgcaggacgtgagaggccgggactaccagaacgccatgcgggtgtggtccaacatccctggactgaaaagcaagcacgcacctctgacccctaaagaagaggagtacctgcaggcccaggtgcggagcagaagcaagctggacgcccctaaggtggatctgctggtgaagaattgcctcctgcccctgagagagtacttcaagtatttcagccagaatagtctgcccctgggcggcccaagcagcggcgcccctcctcccagcggcggcagcccagccggctccccaacctctaccgaggagggcacctctgagtccgccacccccgagagcggccctggcacctccaccgagcccagcgagggcagcgcacccggcagccctgccggcagccccacctccacagaggagggaaccagcaccgagcccagcgaaggcagcgccccaggcaccagcaccgagcctagtgagggcggctctggcggcggcagcgcccaggagattaaacggatcaacaagatcagaagaagacttgtgaaagacagcaacaccaagaaggccggcaagacaggccccatgaaaaccctgctggttagagtgatgacacccgatctgagagagcggctggaaaacctgagaaagaagcctgaaaatatcccccagcccatcagcaatacatctagagccaacctgaataagctgctgaccgattacaccgaaatgaagaaggcgatcctgcatgtgtactgggaagagttccagaaggaccctgtgggcctgatgagccgggtggcccagcctgccagcaagaagatcgatcagaacaagctgaaacctgagatggacgagaagggcaacctgaccaccgccggctttgcctgctctcagtgtggccagcccctgttcgtgtacaagctggagcaggtgtctgagaagggcaaggcttacaccaactacttcggacggtgcaatgtggccgagcacgaaaagctgatcctgctggcccagctgaagcccgagaaggatagcgacgaagccgtgacatatagcctgggaaagtttgggcagagggccctggatttctacagcattcatgtgaccaaggagtccacccaccccgtgaagcccctggcccagatcgccggaaacagatacgcctccggacctgtgggaaaggccctgagcgacgcatgtatgggcacaatcgcctccttcctgtctaagtaccaggacatcatcatcgaacaccagaaggtggtgaagggcaaccagaagagactggagagcctgcgggagctggccggcaaggaaaacctggaataccctagcgtgaccctgccacctcagcctcacaccaaggagggcgttgatgcctacaacgaagtgatcgcccgggtgcgaatgtgggtgaacctgaacctgtggcagaagctgaagctaagcagagatgatgccaagcctctgctgagactgaagggattcccttcctttcctctggtcgagagacaggccaacgaagtggactggtgggacatggtgtgtaacgtgaagaagctgatcaacgagaaaaaggaggatggcaaggtgttttggcagaatctggctggctacaagagacaggaagccctgagaccatacctgagcagcgaggaagatcggaagaagggaaagaaattcgctcggtaccagctgggcgacctgctgctgcacctggaaaagaagcacggcgaggactggggaaaggtgtacgacgaggcctgggagcggattgacaagaaagtggaaggcctgagcaagcacatcaagctggaagaggaacggagaagcgaggacgcccagagcaaggccgccctgaccgactggctgcgggctaaggccagcttcgtgatcgagggcctgaaggaggccgacaaggacgagttctgcagatgcgagctgaagctgcagaagtggtacggggacctgcggggaaagcccttcgccatcgaagccgagaacagcatcctggacatcagcggcttcagcaagcagtacaactgtgccttcatctggcagaaggacggcgtgaagaagctgaacctgtacctgatcatcaactacttcaagggcggcaagctgcggttcaagaagatcaaacctgaagccttcgaagccaacagattctacaccgtgatcaacaaaaagagcggcgagatcgtgcccatggaggtgaacttcaacttcgacgaccccaacctgatcatcctgcctctggcctttggcaagagacagggcagagaattcatctggaacgacctgctgtccctggaaaccggcagcctgaagctggccaacggaagagtgatcgagaagacactgtacaacagaagaacccggcaggatgagcctgccctgttcgtggccctgaccttcgagcggcgggaggtcctggactcctccaatatcaaaccaatgaacctgatcggcgtggcaagaggcgaaaacatccccgccgtgatcgccctgaccgaccccgagggctgcccactgagccggtttaaggatagcctgggaaacccaacccacatcctgagaatcggcgagagctataaggagaagcagcggaccatccaggccaagaaggaggtggagcagcggagagccggcggctacagccggaagtacgccagcaaagccaagaatctggcagacgatatggtgagaaacaccgctagagatctgctgtactacgccgtgacccaggatgccatgctgatcttcgccaacctgagccggggcttcggccggcagggcaagcggaccttcatggccgagagacagtacacacggatggaggactggctgaccgccaagctggcctacgagggcctgagcaagacctacctgtccaagacactggcccagtacacctccaagacatgcagcaactgtgggtttaccatcaccagcgccgactacgacagggtgctggagaagctgaagaagacagcaacaggctggatgaccacaattaacggcaaggagctgaaggtggagggccagattacctactacaacagatacaagagacagaacgtagtcaaggacctgtccgtcgagctggatagactgagcgaagaatctgtgaacaacgacatctcctcctggacaaagggcagaagcggagaagctctgagcctcctgaagaaaagattctcccatagacccgtgcaggagaagttcgtgtgcctgaactgcggcttcgagacacacgcagccgagcaagccgccctgaacatcgccagatcctggctgttcctgcggagccaggagtacaagaaataccagacaaacaagacaaccggcaacaccgataagagagccttcgtcgagacctggcagtccttttaccggaagaagcttaaggaggtgtggaaacctgccgtgcggtctggcggatctggcggaggctccacaagcggcgaggagcccgtgaacttcgaggaggtggccgtgtacttcagcagggaggagtgggccctgctggaccccgcccagagggccctgtacagggacgtgatgctggagacctacgagtgcgtggccagcctggcccccctgcccgcccccaagcccatggtgatcagcctgctggaggagggcgaggagccctggatccccgacgtgggcagccccgaggccgtggccggcgacgtgagccccaccagccccaagaaaaagagaaaagtctaagctgccttctgcggggcttgccttctggccatgcccttcttctctcccttgcacctgtacctcttggtctttgaataaagcctgagtaggaaggctagcaaaaaaaaaaaaaaaaaaaaaaaaaaaaaaaaaaaaaaaaaaaaaaaaaaaaaaaaaaaaaaaaaaaaaaaaaaaaaaaa

SEQ ID NO: 5829 - RNA, 5797 nt, synthetic construct
  source 1..5797: mol_type = other RNA
aggaaataagagagaaaagaagagtaagaagaaatataagagccaccatggcccctaagaagaagcgtaaagtgagccggatggaacgcctcgtctacgaggtgcggcagaagtgcagaaacatcgaggacatctgcatctcctgcggatctctgaacgtgaccctggagcacccactgttcatcggcggcatgtgccagaactgtaaaaactgttttctggagtgtgcctatcaatacgacgatgacggctaccagagctactgcaccatctgttgcggcggaagagaggtgctgatgtgtggaaataacaactgctgccggtgcttctgcgtggaatgcgtggacctgctggtgggccccggcgccgcccaggccgctattaaggaagatccttggaactgctacatgtgcggccacaagggcacatacggcctgctgagacggagagaggactggcctagcagactgcagatgttcttcgccaataaccacgaccaggagttcgacccccctaaggtgtaccctcccgtccccgccgagaagagaaagcccatccgggtcctgagcctgttcgatggcatcgccaccggtctgctggtgctgaaggacctgggcatccaggtggataggtacattgcctccgaggtgtgcgaggactccatcaccgtgggaatggtgcgtcatcagggcaagatcatgtacgtgggcgacgtgcggagcgtgacacagaagcatatccaggagtggggccctttcgacctggtgatcggcggcagcccttgcaatgacctgagcatcgtgaacccagcccggaagggcctgtacgagggaaccggcagactgttcttcgagttttacagactgctgcacgacgcccggcctaaggaaggcgacgaccggcccttcttttggctgttcgagaatgtggtggccatgggagtcagcgacaagcgggatattagccggttcctggagagcaaccccgtgatgatcgatgccaaggaagtgagcgccgcccaccgggccagatacttctggggcaatctgcctggcatgaacagacccctggccagcaccgtgaacgacaagctggagctgcaggagtgcctggagcacggccggatcgccaagttcagcaaggtgagaaccatcaccacccgaagcaacagcatcaaacaaggcaaggaccagcactttcctgtgttcatgaacgagaaggaggacatcctgtggtgtaccgagatggagagagtgttcgggttcccagtccactacacagatgtcagcaacatgtctagactggccagacagagactgctgggaagaagctggtccgtccctgtgatcagacacctgttcgcccctctgaaggagtacttcgcctgcgtgagcagcggcaacagcaacgccaacagccggggccccagcttctctagcggcctggtgccactgtccctgagagggagccacatgggccccatggagatctacaaaaccgtgagcgcctggaagcggcagcctgtgcgcgtgctgagcctgtttcggaatatcgataaagtcctgaaaagcctgggattcctggagagcggctctggctccggcggtggcaccctgaagtacgtggaggatgtgacaaacgtggtcagacgggatgtggagaagtggggccccttcgatctggtgtacggcagcacccaacccctgggcagctcttgtgaccggtgccctggctggtacatgtttcagttccaccggatcctgcagtacgccctgccgagacaggagtcccagcggccattcttttggattttcatggacaacttgctgctgaccgaggatgaccaggaaactaccactcggttcctgcagaccgaagccgtgaccctgcaggacgtgagaggccgggactaccagaacgccatgcgggtgtggtccaacatccctggactgaaaagcaagcacgcacctctgacccctaaagaagaggagtacctgcaggcccaggtgcggagcagaagcaagctggacgcccctaaggtggatctgctggtgaagaattgcctcctgcccctgagagagtacttcaagtatttcagccagaatagtctgcccctgggcggcccaagcagcggcgcccctcctcccagcggcggcagcccagccggctccccaacctctaccgaggagggcacctctgagtccgccacccccgagagcggccctggcacctccaccgagcccagcgagggcagcgcacccggcagccctgccggcagccccacctccacagaggagggaaccagcaccgagcccagcgaaggcagcgccccaggcaccagcaccgagcctagtgagggcggctctggcggcggcagcgcccaggagattaaacggatcaacaagatcagaagaagacttgtgaaagacagcaacaccaagaaggccggcaagacaggccccatgaaaaccctgctggttagagtgatgacacccgatctgagagagcggctggaaaacctgagaaagaagcctgaaaatatcccccagcccatcagcaatacatctagagccaacctgaataagctgctgaccgattacaccgaaatgaagaaggcgatcctgcatgtgtactgggaagagttccagaaggaccctgtgggcctgatgagccgggtggcccagcctgccagcaagaagatcgatcagaacaagctgaaacctgagatggacgagaagggcaacctgaccaccgccggctttgcctgctctcagtgtggccagcccctgttcgtgtacaagctggagcaggtgtctgagaagggcaaggcttacaccaactacttcggacggtgcaatgtggccgagcacgaaaagctgatcctgctggcccagctgaagcccgagaaggatagcgacgaagccgtgacatatagcctgggaaagtttgggcagagggccctggatttctacagcattcatgtgaccaaggagtccacccaccccgtgaagcccctggcccagatcgccggaaacagatacgcctccggacctgtgggaaaggccctgagcgacgcatgtatgggcacaatcgcctccttcctgtctaagtaccaggacatcatcatcgaacaccagaaggtggtgaagggcaaccagaagagactggagagcctgcgggagctggccggcaaggaaaacctggaataccctagcgtgaccctgccacctcagcctcacaccaaggagggcgttgatgcctacaacgaagtgatcgcccgggtgcgaatgtgggtgaacctgaacctgtggcagaagctgaagctaagcagagatgatgccaagcctctgctgagactgaagggattcccttcctttcctctggtcgagagacaggccaacgaagtggactggtgggacatggtgtgtaacgtgaagaagctgatcaacgagaaaaaggaggatggcaaggtgttttggcagaatctggctggctacaagagacaggaagccctgagaccatacctgagcagcgaggaagatcggaagaagggaaagaaattcgctcggtaccagctgggcgacctgctgctgcacctggaaaagaagcacggcgaggactggggaaaggtgtacgacgaggcctgggagcggattgacaagaaagtggaaggcctgagcaagcacatcaagctggaagaggaacggagaagcgaggacgcccagagcaaggccgccctgaccgactggctgcgggctaaggccagcttcgtgatcgagggcctgaaggaggccgacaaggacgagttctgcagatgcgagctgaagctgcagaagtggtacggggacctgcggggaaagcccttcgccatcgaagccgagaacagcatcctggacatcagcggcttcagcaagcagtacaactgtgccttcatctggcagaaggacggcgtgaagaagctgaacctgtacctgatcatcaactacttcaagggcggcaagctgcggttcaagaagatcaaacctgaagccttcgaagccaacagattctacaccgtgatcaacaaaaagagcggcgagatcgtgcccatggaggtgaacttcaacttcgacgaccccaacctgatcatcctgcctctggcctttggcaagagacagggcagagaattcatctggaacgacctgctgtccctggaaaccggcagcctgaagctggccaacggaagagtgatcgagaagacactgtacaacagaagaacccggcaggatgagcctgccctgttcgtggccctgaccttcgagcggcgggaggtcctggactcctccaatatcaaaccaatgaacctgatcggcgtggcaagaggcgaaaacatccccgccgtgatcgccctgaccgaccccgagggctgcccactgagccggtttaaggatagcctgggaaacccaacccacatcctgagaatcggcgagagctataaggagaagcagcggaccatccaggccaagaaggaggtggagcagcggagagccggcggctacagccggaagtacgccagcaaagccaagaatctggcagacgatatggtgagaaacaccgctagagatctgctgtactacgccgtgacccaggatgccatgctgatcttcgccaacctgagccggggcttcggccggcagggcaagcggaccttcatggccgagagacagtacacacggatggaggactggctgaccgccaagctggcctacgagggcctgagcaagacctacctgtccaagacactggcccagtacacctccaagacatgcagcaactgtgggtttaccatcaccagcgccgactacgacagggtgctggagaagctgaagaagacagcaacaggctggatgaccacaattaacggcaaggagctgaaggtggagggccagattacctactacaacagatacaagagacagaacgtagtcaaggacctgtccgtcgagctggatagactgagcgaagaatctgtgaacaacgacatctcctcctggacaaagggcagaagcggagaagctctgagcctcctgaagaaaagattctcccatagacccgtgcaggagaagttcgtgtgcctgaactgcggcttcgagacacacgcagccgagcaagccgccctgaacatcgccagatcctggctgttcctgcggagccaggagtacaagaaataccagacaaacaagacaaccggcaacaccgataagagagccttcgtcgagacctggcagtccttttaccggaagaagcttaaggaggtgtggaaacctgccgtgcggtctggcggatctggcggaggctccacaagccagccccagggcaccatgaccttcaaggacgtggaggtgaccttcagccaggacgagtggggcctgctggacgccagccagaggaacctgtacagggacgtgatgctggagaactacggcaacatggccagcgtggtgggccccttcaccaagcccgccctgatcagctggctggaggccagggagccctggggcctgaacgtgcagggcgtgcagttcaagggcaaccccggcgccgcccccaccagccccaagaaaaagagaaaagtctaagctgccttctgcggggcttgccttctggccatgcccttcttctctcccttgcacctgtacctcttggtctttgaataaagcctgagtaggaaggctagcaaaaaaaaaaaaaaaaaaaaaaaaaaaaaaaaaaaaaaaaaaaaaaaaaaaaaaaaaaaaaaaaaaaaaaaaaaaaaaaa

SEQ ID NO: 5830 - RNA, 5797 nt, synthetic construct
  source 1..5797: mol_type = other RNA
aggaaataagagagaaaagaagagtaagaagaaatataagagccaccatggcccctaagaagaagcgtaaagtgagccggatggaacgcctcgtctacgaggtgcggcagaagtgcagaaacatcgaggacatctgcatctcctgcggatctctgaacgtgaccctggagcacccactgttcatcggcggcatgtgccagaactgtaaaaactgttttctggagtgtgcctatcaatacgacgatgacggctaccagagctactgcaccatctgttgcggcggaagagaggtgctgatgtgtggaaataacaactgctgccggtgcttctgcgtggaatgcgtggacctgctggtgggccccggcgccgcccaggccgctattaaggaagatccttggaactgctacatgtgcggccacaagggcacatacggcctgctgagacggagagaggactggcctagcagactgcagatgttcttcgccaataaccacgaccaggagttcgacccccctaaggtgtaccctcccgtccccgccgagaagagaaagcccatccgggtcctgagcctgttcgatggcatcgccaccggtctgctggtgctgaaggacctgggcatccaggtggataggtacattgcctccgaggtgtgcgaggactccatcaccgtgggaatggtgcgtcatcagggcaagatcatgtacgtgggcgacgtgcggagcgtgacacagaagcatatccaggagtggggccctttcgacctggtgatcggcggcagcccttgcaatgacctgagcatcgtgaacccagcccggaagggcctgtacgagggaaccggcagactgttcttcgagttttacagactgctgcacgacgcccggcctaaggaaggcgacgaccggcccttcttttggctgttcgagaatgtggtggccatgggagtcagcgacaagcgggatattagccggttcctggagagcaaccccgtgatgatcgatgccaaggaagtgagcgccgcccaccgggccagatacttctggggcaatctgcctggcatgaacagacccctggccagcaccgtgaacgacaagctggagctgcaggagtgcctggagcacggccggatcgccaagttcagcaaggtgagaaccatcaccacccgaagcaacagcatcaaacaaggcaaggaccagcactttcctgtgttcatgaacgagaaggaggacatcctgtggtgtaccgagatggagagagtgttcgggttcccagtccactacacagatgtcagcaacatgtctagactggccagacagagactgctgggaagaagctggtccgtccctgtgatcagacacctgttcgcccctctgaaggagtacttcgcctgcgtgagcagcggcaacagcaacgccaacagccggggccccagcttctctagcggcctggtgccactgtccctgagagggagccacatgggccccatggagatctacaaaaccgtgagcgcctggaagcggcagcctgtgcgcgtgctgagcctgtttcggaatatcgataaagtcctgaaaagcctgggattcctggagagcggctctggctccggcggtggcaccctgaagtacgtggaggatgtgacaaacgtggtcagacgggatgtggagaagtggggccccttcgatctggtgtacggcagcacccaacccctgggcagctcttgtgaccggtgccctggctggtacatgtttcagttccaccggatcctgcagtacgccctgccgagacaggagtcccagcggccattcttttggattttcatggacaacttgctgctgaccgaggatgaccaggaaactaccactcggttcctgcagaccgaagccgtgaccctgcaggacgtgagaggccgggactaccagaacgccatgcgggtgtggtccaacatccctggactgaaaagcaagcacgcacctctgacccctaaagaagaggagtacctgcaggcccaggtgcggagcagaagcaagctggacgcccctaaggtggatctgctggtgaagaattgcctcctgcccctgagagagtacttcaagtatttcagccagaatagtctgcccctgggcggcccaagcagcggcgcccctcctcccagcggcggcagcccagccggctccccaacctctaccgaggagggcacctctgagtccgccacccccgagagcggccctggcacctccaccgagcccagcgagggcagcgcacccggcagccctgccggcagccccacctccacagaggagggaaccagcaccgagcccagcgaaggcagcgccccaggcaccagcaccgagcctagtgagggcggctctggcggcggcagcgcccaggagattaaacggatcaacaagatcagaagaagacttgtgaaagacagcaacaccaagaaggccggcaagacaggccccatgaaaaccctgctggttagagtgatgacacccgatctgagagagcggctggaaaacctgagaaagaagcctgaaaatatcccccagcccatcagcaatacatctagagccaacctgaataagctgctgaccgattacaccgaaatgaagaaggcgatcctgcatgtgtactgggaagagttccagaaggaccctgtgggcctgatgagccgggtggcccagcctgccagcaagaagatcgatcagaacaagctgaaacctgagatggacgagaagggcaacctgaccaccgccggctttgcctgctctcagtgtggccagcccctgttcgtgtacaagctggagcaggtgtctgagaagggcaaggcttacaccaactacttcggacggtgcaatgtggccgagcacgaaaagctgatcctgctggcccagctgaagcccgagaaggatagcgacgaagccgtgacatatagcctgggaaagtttgggcagagggccctggatttctacagcattcatgtgaccaaggagtccacccaccccgtgaagcccctggcccagatcgccggaaacagatacgcctccggacctgtgggaaaggccctgagcgacgcatgtatgggcacaatcgcctccttcctgtctaagtaccaggacatcatcatcgaacaccagaaggtggtgaagggcaaccagaagagactggagagcctgcgggagctggccggcaaggaaaacctggaataccctagcgtgaccctgccacctcagcctcacaccaaggagggcgttgatgcctacaacgaagtgatcgcccgggtgcgaatgtgggtgaacctgaacctgtggcagaagctgaagctaagcagagatgatgccaagcctctgctgagactgaagggattcccttcctttcctctggtcgagagacaggccaacgaagtggactggtgggacatggtgtgtaacgtgaagaagctgatcaacgagaaaaaggaggatggcaaggtgttttggcagaatctggctggctacaagagacaggaagccctgagaccatacctgagcagcgaggaagatcggaagaagggaaagaaattcgctcggtaccagctgggcgacctgctgctgcacctggaaaagaagcacggcgaggactggggaaaggtgtacgacgaggcctgggagcggattgacaagaaagtggaaggcctgagcaagcacatcaagctggaagaggaacggagaagcgaggacgcccagagcaaggccgccctgaccgactggctgcgggctaaggccagcttcgtgatcgagggcctgaaggaggccgacaaggacgagttctgcagatgcgagctgaagctgcagaagtggtacggggacctgcggggaaagcccttcgccatcgaagccgagaacagcatcctggacatcagcggcttcagcaagcagtacaactgtgccttcatctggcagaaggacggcgtgaagaagctgaacctgtacctgatcatcaactacttcaagggcggcaagctgcggttcaagaagatcaaacctgaagccttcgaagccaacagattctacaccgtgatcaacaaaaagagcggcgagatcgtgcccatggaggtgaacttcaacttcgacgaccccaacctgatcatcctgcctctggcctttggcaagagacagggcagagaattcatctggaacgacctgctgtccctggaaaccggcagcctgaagctggccaacggaagagtgatcgagaagacactgtacaacagaagaacccggcaggatgagcctgccctgttcgtggccctgaccttcgagcggcgggaggtcctggactcctccaatatcaaaccaatgaacctgatcggcgtggcaagaggcgaaaacatccccgccgtgatcgccctgaccgaccccgagggctgcccactgagccggtttaaggatagcctgggaaacccaacccacatcctgagaatcggcgagagctataaggagaagcagcggaccatccaggccaagaaggaggtggagcagcggagagccggcggctacagccggaagtacgccagcaaagccaagaatctggcagacgatatggtgagaaacaccgctagagatctgctgtactacgccgtgacccaggatgccatgctgatcttcgccaacctgagccggggcttcggccggcagggcaagcggaccttcatggccgagagacagtacacacggatggaggactggctgaccgccaagctggcctacgagggcctgagcaagacctacctgtccaagacactggcccagtacacctccaagacatgcagcaactgtgggtttaccatcaccagcgccgactacgacagggtgctggagaagctgaagaagacagcaacaggctggatgaccacaattaacggcaaggagctgaaggtggagggccagattacctactacaacagatacaagagacagaacgtagtcaaggacctgtccgtcgagctggatagactgagcgaagaatctgtgaacaacgacatctcctcctggacaaagggcagaagcggagaagctctgagcctcctgaagaaaagattctcccatagacccgtgcaggagaagttcgtgtgcctgaactgcggcttcgagacacacgcagccgagcaagccgccctgaacatcgccagatcctggctgttcctgcggagccaggagtacaagaaataccagacaaacaagacaaccggcaacaccgataagagagccttcgtcgagacctggcagtccttttaccggaagaagcttaaggaggtgtggaaacctgccgtgcggtctggcggatctggcggaggctccacaagcaggcccggcgccgtgagcttcgccgacgtggccgtgtacttcagccccgaggagtggggctgcctgaggcccgcccagagggccctgtacagggacgtgatgagggagacctacggccacctgggcgccctgggcttcgccggccccaagcccgccctgatcagctggctggagaggaagaaggaggtgtggagccccgaggccgaggaccccgaggagggcgccaggcaccccggcagcggcaccagccccaagaaaaagagaaaagtctaagctgccttctgcggggcttgccttctggccatgcccttcttctctcccttgcacctgtacctcttggtctttgaataaagcctgagtaggaaggctagcaaaaaaaaaaaaaaaaaaaaaaaaaaaaaaaaaaaaaaaaaaaaaaaaaaaaaaaaaaaaaaaaaaaaaaaaaaaaaaaa

SEQ ID NO: 5831 - RNA, 5797 nt, synthetic construct
  source 1..5797: mol_type = other RNA
aggaaataagagagaaaagaagagtaagaagaaatataagagccaccatggcccctaagaagaagcgtaaagtgagccggatggaacgcctcgtctacgaggtgcggcagaagtgcagaaacatcgaggacatctgcatctcctgcggatctctgaacgtgaccctggagcacccactgttcatcggcggcatgtgccagaactgtaaaaactgttttctggagtgtgcctatcaatacgacgatgacggctaccagagctactgcaccatctgttgcggcggaagagaggtgctgatgtgtggaaataacaactgctgccggtgcttctgcgtggaatgcgtggacctgctggtgggccccggcgccgcccaggccgctattaaggaagatccttggaactgctacatgtgcggccacaagggcacatacggcctgctgagacggagagaggactggcctagcagactgcagatgttcttcgccaataaccacgaccaggagttcgacccccctaaggtgtaccctcccgtccccgccgagaagagaaagcccatccgggtcctgagcctgttcgatggcatcgccaccggtctgctggtgctgaaggacctgggcatccaggtggataggtacattgcctccgaggtgtgcgaggactccatcaccgtgggaatggtgcgtcatcagggcaagatcatgtacgtgggcgacgtgcggagcgtgacacagaagcatatccaggagtggggccctttcgacctggtgatcggcggcagcccttgcaatgacctgagcatcgtgaacccagcccggaagggcctgtacgagggaaccggcagactgttcttcgagttttacagactgctgcacgacgcccggcctaaggaaggcgacgaccggcccttcttttggctgttcgagaatgtggtggccatgggagtcagcgacaagcgggatattagccggttcctggagagcaaccccgtgatgatcgatgccaaggaagtgagcgccgcccaccgggccagatacttctggggcaatctgcctggcatgaacagacccctggccagcaccgtgaacgacaagctggagctgcaggagtgcctggagcacggccggatcgccaagttcagcaaggtgagaaccatcaccacccgaagcaacagcatcaaacaaggcaaggaccagcactttcctgtgttcatgaacgagaaggaggacatcctgtggtgtaccgagatggagagagtgttcgggttcccagtccactacacagatgtcagcaacatgtctagactggccagacagagactgctgggaagaagctggtccgtccctgtgatcagacacctgttcgcccctctgaaggagtacttcgcctgcgtgagcagcggcaacagcaacgccaacagccggggccccagcttctctagcggcctggtgccactgtccctgagagggagccacatgggccccatggagatctacaaaaccgtgagcgcctggaagcggcagcctgtgcgcgtgctgagcctgtttcggaatatcgataaagtcctgaaaagcctgggattcctggagagcggctctggctccggcggtggcaccctgaagtacgtggaggatgtgacaaacgtggtcagacgggatgtggagaagtggggccccttcgatctggtgtacggcagcacccaacccctgggcagctcttgtgaccggtgccctggctggtacatgtttcagttccaccggatcctgcagtacgccctgccgagacaggagtcccagcggccattcttttggattttcatggacaacttgctgctgaccgaggatgaccaggaaactaccactcggttcctgcagaccgaagccgtgaccctgcaggacgtgagaggccgggactaccagaacgccatgcgggtgtggtccaacatccctggactgaaaagcaagcacgcacctctgacccctaaagaagaggagtacctgcaggcccaggtgcggagcagaagcaagctggacgcccctaaggtggatctgctggtgaagaattgcctcctgcccctgagagagtacttcaagtatttcagccagaatagtctgcccctgggcggcccaagcagcggcgcccctcctcccagcggcggcagcccagccggctccccaacctctaccgaggagggcacctctgagtccgccacccccgagagcggccctggcacctccaccgagcccagcgagggcagcgcacccggcagccctgccggcagccccacctccacagaggagggaaccagcaccgagcccagcgaaggcagcgccccaggcaccagcaccgagcctagtgagggcggctctggcggcggcagcgcccaggagattaaacggatcaacaagatcagaagaagacttgtgaaagacagcaacaccaagaaggccggcaagacaggccccatgaaaaccctgctggttagagtgatgacacccgatctgagagagcggctggaaaacctgagaaagaagcctgaaaatatcccccagcccatcagcaatacatctagagccaacctgaataagctgctgaccgattacaccgaaatgaagaaggcgatcctgcatgtgtactgggaagagttccagaaggaccctgtgggcctgatgagccgggtggcccagcctgccagcaagaagatcgatcagaacaagctgaaacctgagatggacgagaagggcaacctgaccaccgccggctttgcctgctctcagtgtggccagcccctgttcgtgtacaagctggagcaggtgtctgagaagggcaaggcttacaccaactacttcggacggtgcaatgtggccgagcacgaaaagctgatcctgctggcccagctgaagcccgagaaggatagcgacgaagccgtgacatatagcctgggaaagtttgggcagagggccctggatttctacagcattcatgtgaccaaggagtccacccaccccgtgaagcccctggcccagatcgccggaaacagatacgcctccggacctgtgggaaaggccctgagcgacgcatgtatgggcacaatcgcctccttcctgtctaagtaccaggacatcatcatcgaacaccagaaggtggtgaagggcaaccagaagagactggagagcctgcgggagctggccggcaaggaaaacctggaataccctagcgtgaccctgccacctcagcctcacaccaaggagggcgttgatgcctacaacgaagtgatcgcccgggtgcgaatgtgggtgaacctgaacctgtggcagaagctgaagctaagcagagatgatgccaagcctctgctgagactgaagggattcccttcctttcctctggtcgagagacaggccaacgaagtggactggtgggacatggtgtgtaacgtgaagaagctgatcaacgagaaaaaggaggatggcaaggtgttttggcagaatctggctggctacaagagacaggaagccctgagaccatacctgagcagcgaggaagatcggaagaagggaaagaaattcgctcggtaccagctgggcgacctgctgctgcacctggaaaagaagcacggcgaggactggggaaaggtgtacgacgaggcctgggagcggattgacaagaaagtggaaggcctgagcaagcacatcaagctggaagaggaacggagaagcgaggacgcccagagcaaggccgccctgaccgactggctgcgggctaaggccagcttcgtgatcgagggcctgaaggaggccgacaaggacgagttctgcagatgcgagctgaagctgcagaagtggtacggggacctgcggggaaagcccttcgccatcgaagccgagaacagcatcctggacatcagcggcttcagcaagcagtacaactgtgccttcatctggcagaaggacggcgtgaagaagctgaacctgtacctgatcatcaactacttcaagggcggcaagctgcggttcaagaagatcaaacctgaagccttcgaagccaacagattctacaccgtgatcaacaaaaagagcggcgagatcgtgcccatggaggtgaacttcaacttcgacgaccccaacctgatcatcctgcctctggcctttggcaagagacagggcagagaattcatctggaacgacctgctgtccctggaaaccggcagcctgaagctggccaacggaagagtgatcgagaagacactgtacaacagaagaacccggcaggatgagcctgccctgttcgtggccctgaccttcgagcggcgggaggtcctggactcctccaatatcaaaccaatgaacctgatcggcgtggcaagaggcgaaaacatccccgccgtgatcgccctgaccgaccccgagggctgcccactgagccggtttaaggatagcctgggaaacccaacccacatcctgagaatcggcgagagctataaggagaagcagcggaccatccaggccaagaaggaggtggagcagcggagagccggcggctacagccggaagtacgccagcaaagccaagaatctggcagacgatatggtgagaaacaccgctagagatctgctgtactacgccgtgacccaggatgccatgctgatcttcgccaacctgagccggggcttcggccggcagggcaagcggaccttcatggccgagagacagtacacacggatggaggactggctgaccgccaagctggcctacgagggcctgagcaagacctacctgtccaagacactggcccagtacacctccaagacatgcagcaactgtgggtttaccatcaccagcgccgactacgacagggtgctggagaagctgaagaagacagcaacaggctggatgaccacaattaacggcaaggagctgaaggtggagggccagattacctactacaacagatacaagagacagaacgtagtcaaggacctgtccgtcgagctggatagactgagcgaagaatctgtgaacaacgacatctcctcctggacaaagggcagaagcggagaagctctgagcctcctgaagaaaagattctcccatagacccgtgcaggagaagttcgtgtgcctgaactgcggcttcgagacacacgcagccgagcaagccgccctgaacatcgccagatcctggctgttcctgcggagccaggagtacaagaaataccagacaaacaagacaaccggcaacaccgataagagagccttcgtcgagacctggcagtccttttaccggaagaagcttaaggaggtgtggaaacctgccgtgcggtctggcggatctggcggaggctccacaagctggcccgagagcgtgaccttcgaggacgtggccgtgtacttcacccagaaccagtgggccagcctggaccccgcccagagggccctgtacagggaggtgatgctggagaactacgccaacgtggccagcctggtggccttccccttccccaagcccgccctgatcagccacctggagaggggcgaggccccctggggccccgacccctgggacaccgagatccccaggggcatcagccagggcaccagccccaagaaaaagagaaaagtctaagctgccttctgcggggcttgccttctggccatgcccttcttctctcccttgcacctgtacctcttggtctttgaataaagcctgagtaggaaggctagcaaaaaaaaaaaaaaaaaaaaaaaaaaaaaaaaaaaaaaaaaaaaaaaaaaaaaaaaaaaaaaaaaaaaaaaaaaaaaaaa

SEQ ID NO: 5832 - RNA, 5797 nt, synthetic construct
  source 1..5797: mol_type = other RNA
aggaaataagagagaaaagaagagtaagaagaaatataagagccaccatggcccctaagaagaagcgtaaagtgagccggatggaacgcctcgtctacgaggtgcggcagaagtgcagaaacatcgaggacatctgcatctcctgcggatctctgaacgtgaccctggagcacccactgttcatcggcggcatgtgccagaactgtaaaaactgttttctggagtgtgcctatcaatacgacgatgacggctaccagagctactgcaccatctgttgcggcggaagagaggtgctgatgtgtggaaataacaactgctgccggtgcttctgcgtggaatgcgtggacctgctggtgggccccggcgccgcccaggccgctattaaggaagatccttggaactgctacatgtgcggccacaagggcacatacggcctgctgagacggagagaggactggcctagcagactgcagatgttcttcgccaataaccacgaccaggagttcgacccccctaaggtgtaccctcccgtccccgccgagaagagaaagcccatccgggtcctgagcctgttcgatggcatcgccaccggtctgctggtgctgaaggacctgggcatccaggtggataggtacattgcctccgaggtgtgcgaggactccatcaccgtgggaatggtgcgtcatcagggcaagatcatgtacgtgggcgacgtgcggagcgtgacacagaagcatatccaggagtggggccctttcgacctggtgatcggcggcagcccttgcaatgacctgagcatcgtgaacccagcccggaagggcctgtacgagggaaccggcagactgttcttcgagttttacagactgctgcacgacgcccggcctaaggaaggcgacgaccggcccttcttttggctgttcgagaatgtggtggccatgggagtcagcgacaagcgggatattagccggttcctggagagcaaccccgtgatgatcgatgccaaggaagtgagcgccgcccaccgggccagatacttctggggcaatctgcctggcatgaacagacccctggccagcaccgtgaacgacaagctggagctgcaggagtgcctggagcacggccggatcgccaagttcagcaaggtgagaaccatcaccacccgaagcaacagcatcaaacaaggcaaggaccagcactttcctgtgttcatgaacgagaaggaggacatcctgtggtgtaccgagatggagagagtgttcgggttcccagtccactacacagatgtcagcaacatgtctagactggccagacagagactgctgggaagaagctggtccgtccctgtgatcagacacctgttcgcccctctgaaggagtacttcgcctgcgtgagcagcggcaacagcaacgccaacagccggggccccagcttctctagcggcctggtgccactgtccctgagagggagccacatgggccccatggagatctacaaaaccgtgagcgcctggaagcggcagcctgtgcgcgtgctgagcctgtttcggaatatcgataaagtcctgaaaagcctgggattcctggagagcggctctggctccggcggtggcaccctgaagtacgtggaggatgtgacaaacgtggtcagacgggatgtggagaagtggggccccttcgatctggtgtacggcagcacccaacccctgggcagctcttgtgaccggtgccctggctggtacatgtttcagttccaccggatcctgcagtacgccctgccgagacaggagtcccagcggccattcttttggattttcatggacaacttgctgctgaccgaggatgaccaggaaactaccactcggttcctgcagaccgaagccgtgaccctgcaggacgtgagaggccgggactaccagaacgccatgcgggtgtggtccaacatccctggactgaaaagcaagcacgcacctctgacccctaaagaagaggagtacctgcaggcccaggtgcggagcagaagcaagctggacgcccctaaggtggatctgctggtgaagaattgcctcctgcccctgagagagtacttcaagtatttcagccagaatagtctgcccctgggcggcccaagcagcggcgcccctcctcccagcggcggcagcccagccggctccccaacctctaccgaggagggcacctctgagtccgccacccccgagagcggccctggcacctccaccgagcccagcgagggcagcgcacccggcagccctgccggcagccccacctccacagaggagggaaccagcaccgagcccagcgaaggcagcgccccaggcaccagcaccgagcctagtgagggcggctctggcggcggcagcgcccaggagattaaacggatcaacaagatcagaagaagacttgtgaaagacagcaacaccaagaaggccggcaagacaggccccatgaaaaccctgctggttagagtgatgacacccgatctgagagagcggctggaaaacctgagaaagaagcctgaaaatatcccccagcccatcagcaatacatctagagccaacctgaataagctgctgaccgattacaccgaaatgaagaaggcgatcctgcatgtgtactgggaagagttccagaaggaccctgtgggcctgatgagccgggtggcccagcctgccagcaagaagatcgatcagaacaagctgaaacctgagatggacgagaagggcaacctgaccaccgccggctttgcctgctctcagtgtggccagcccctgttcgtgtacaagctggagcaggtgtctgagaagggcaaggcttacaccaactacttcggacggtgcaatgtggccgagcacgaaaagctgatcctgctggcccagctgaagcccgagaaggatagcgacgaagccgtgacatatagcctgggaaagtttgggcagagggccctggatttctacagcattcatgtgaccaaggagtccacccaccccgtgaagcccctggcccagatcgccggaaacagatacgcctccggacctgtgggaaaggccctgagcgacgcatgtatgggcacaatcgcctccttcctgtctaagtaccaggacatcatcatcgaacaccagaaggtggtgaagggcaaccagaagagactggagagcctgcgggagctggccggcaaggaaaacctggaataccctagcgtgaccctgccacctcagcctcacaccaaggagggcgttgatgcctacaacgaagtgatcgcccgggtgcgaatgtgggtgaacctgaacctgtggcagaagctgaagctaagcagagatgatgccaagcctctgctgagactgaagggattcccttcctttcctctggtcgagagacaggccaacgaagtggactggtgggacatggtgtgtaacgtgaagaagctgatcaacgagaaaaaggaggatggcaaggtgttttggcagaatctggctggctacaagagacaggaagccctgagaccatacctgagcagcgaggaagatcggaagaagggaaagaaattcgctcggtaccagctgggcgacctgctgctgcacctggaaaagaagcacggcgaggactggggaaaggtgtacgacgaggcctgggagcggattgacaagaaagtggaaggcctgagcaagcacatcaagctggaagaggaacggagaagcgaggacgcccagagcaaggccgccctgaccgactggctgcgggctaaggccagcttcgtgatcgagggcctgaaggaggccgacaaggacgagttctgcagatgcgagctgaagctgcagaagtggtacggggacctgcggggaaagcccttcgccatcgaagccgagaacagcatcctggacatcagcggcttcagcaagcagtacaactgtgccttcatctggcagaaggacggcgtgaagaagctgaacctgtacctgatcatcaactacttcaagggcggcaagctgcggttcaagaagatcaaacctgaagccttcgaagccaacagattctacaccgtgatcaacaaaaagagcggcgagatcgtgcccatggaggtgaacttcaacttcgacgaccccaacctgatcatcctgcctctggcctttggcaagagacagggcagagaattcatctggaacgacctgctgtccctggaaaccggcagcctgaagctggccaacggaagagtgatcgagaagacactgtacaacagaagaacccggcaggatgagcctgccctgttcgtggccctgaccttcgagcggcgggaggtcctggactcctccaatatcaaaccaatgaacctgatcggcgtggcaagaggcgaaaacatccccgccgtgatcgccctgaccgaccccgagggctgcccactgagccggtttaaggatagcctgggaaacccaacccacatcctgagaatcggcgagagctataaggagaagcagcggaccatccaggccaagaaggaggtggagcagcggagagccggcggctacagccggaagtacgccagcaaagccaagaatctggcagacgatatggtgagaaacaccgctagagatctgctgtactacgccgtgacccaggatgccatgctgatcttcgccaacctgagccggggcttcggccggcagggcaagcggaccttcatggccgagagacagtacacacggatggaggactggctgaccgccaagctggcctacgagggcctgagcaagacctacctgtccaagacactggcccagtacacctccaagacatgcagcaactgtgggtttaccatcaccagcgccgactacgacagggtgctggagaagctgaagaagacagcaacaggctggatgaccacaattaacggcaaggagctgaaggtggagggccagattacctactacaacagatacaagagacagaacgtagtcaaggacctgtccgtcgagctggatagactgagcgaagaatctgtgaacaacgacatctcctcctggacaaagggcagaagcggagaagctctgagcctcctgaagaaaagattctcccatagacccgtgcaggagaagttcgtgtgcctgaactgcggcttcgagacacacgcagccgagcaagccgccctgaacatcgccagatcctggctgttcctgcggagccaggagtacaagaaataccagacaaacaagacaaccggcaacaccgataagagagccttcgtcgagacctggcagtccttttaccggaagaagcttaaggaggtgtggaaacctgccgtgcggtctggcggatctggcggaggctccacaagcgtgcaggagcccgtgaccttcaaggacgtggccgtggacttcacccaggaggagtggggccagctggacctggtgcagaggaccctgtacagggacgtgatgctggagacctacggccacctgctgagcgtgggcaaccagatcgccaagcccgaggtgatcagcctgctggagcagggcgaggagccctggagcgtggagcagacctgcccccagaggagctgccccgagtggatgaggaacaccagccccaagaaaaagagaaaagtctaagctgccttctgcggggcttgccttctggccatgcccttcttctctcccttgcacctgtacctcttggtctttgaataaagcctgagtaggaaggctagcaaaaaaaaaaaaaaaaaaaaaaaaaaaaaaaaaaaaaaaaaaaaaaaaaaaaaaaaaaaaaaaaaaaaaaaaaaaaaaaa

SEQ ID NO: 5833 - RNA, 5797 nt, synthetic construct
  source 1..5797: mol_type = other RNA
aggaaataagagagaaaagaagagtaagaagaaatataagagccaccatggcccctaagaagaagcgtaaagtgagccggatggaacgcctcgtctacgaggtgcggcagaagtgcagaaacatcgaggacatctgcatctcctgcggatctctgaacgtgaccctggagcacccactgttcatcggcggcatgtgccagaactgtaaaaactgttttctggagtgtgcctatcaatacgacgatgacggctaccagagctactgcaccatctgttgcggcggaagagaggtgctgatgtgtggaaataacaactgctgccggtgcttctgcgtggaatgcgtggacctgctggtgggccccggcgccgcccaggccgctattaaggaagatccttggaactgctacatgtgcggccacaagggcacatacggcctgctgagacggagagaggactggcctagcagactgcagatgttcttcgccaataaccacgaccaggagttcgacccccctaaggtgtaccctcccgtccccgccgagaagagaaagcccatccgggtcctgagcctgttcgatggcatcgccaccggtctgctggtgctgaaggacctgggcatccaggtggataggtacattgcctccgaggtgtgcgaggactccatcaccgtgggaatggtgcgtcatcagggcaagatcatgtacgtgggcgacgtgcggagcgtgacacagaagcatatccaggagtggggccctttcgacctggtgatcggcggcagcccttgcaatgacctgagcatcgtgaacccagcccggaagggcctgtacgagggaaccggcagactgttcttcgagttttacagactgctgcacgacgcccggcctaaggaaggcgacgaccggcccttcttttggctgttcgagaatgtggtggccatgggagtcagcgacaagcgggatattagccggttcctggagagcaaccccgtgatgatcgatgccaaggaagtgagcgccgcccaccgggccagatacttctggggcaatctgcctggcatgaacagacccctggccagcaccgtgaacgacaagctggagctgcaggagtgcctggagcacggccggatcgccaagttcagcaaggtgagaaccatcaccacccgaagcaacagcatcaaacaaggcaaggaccagcactttcctgtgttcatgaacgagaaggaggacatcctgtggtgtaccgagatggagagagtgttcgggttcccagtccactacacagatgtcagcaacatgtctagactggccagacagagactgctgggaagaagctggtccgtccctgtgatcagacacctgttcgcccctctgaaggagtacttcgcctgcgtgagcagcggcaacagcaacgccaacagccggggccccagcttctctagcggcctggtgccactgtccctgagagggagccacatgggccccatggagatctacaaaaccgtgagcgcctggaagcggcagcctgtgcgcgtgctgagcctgtttcggaatatcgataaagtcctgaaaagcctgggattcctggagagcggctctggctccggcggtggcaccctgaagtacgtggaggatgtgacaaacgtggtcagacgggatgtggagaagtggggccccttcgatctggtgtacggcagcacccaacccctgggcagctcttgtgaccggtgccctggctggtacatgtttcagttccaccggatcctgcagtacgccctgccgagacaggagtcccagcggccattcttttggattttcatggacaacttgctgctgaccgaggatgaccaggaaactaccactcggttcctgcagaccgaagccgtgaccctgcaggacgtgagaggccgggactaccagaacgccatgcgggtgtggtccaacatccctggactgaaaagcaagcacgcacctctgacccctaaagaagaggagtacctgcaggcccaggtgcggagcagaagcaagctggacgcccctaaggtggatctgctggtgaagaattgcctcctgcccctgagagagtacttcaagtatttcagccagaatagtctgcccctgggcggcccaagcagcggcgcccctcctcccagcggcggcagcccagccggctccccaacctctaccgaggagggcacctctgagtccgccacccccgagagcggccctggcacctccaccgagcccagcgagggcagcgcacccggcagccctgccggcagccccacctccacagaggagggaaccagcaccgagcccagcgaaggcagcgccccaggcaccagcaccgagcctagtgagggcggctctggcggcggcagcgcccaggagattaaacggatcaacaagatcagaagaagacttgtgaaagacagcaacaccaagaaggccggcaagacaggccccatgaaaaccctgctggttagagtgatgacacccgatctgagagagcggctggaaaacctgagaaagaagcctgaaaatatcccccagcccatcagcaatacatctagagccaacctgaataagctgctgaccgattacaccgaaatgaagaaggcgatcctgcatgtgtactgggaagagttccagaaggaccctgtgggcctgatgagccgggtggcccagcctgccagcaagaagatcgatcagaacaagctgaaacctgagatggacgagaagggcaacctgaccaccgccggctttgcctgctctcagtgtggccagcccctgttcgtgtacaagctggagcaggtgtctgagaagggcaaggcttacaccaactacttcggacggtgcaatgtggccgagcacgaaaagctgatcctgctggcccagctgaagcccgagaaggatagcgacgaagccgtgacatatagcctgggaaagtttgggcagagggccctggatttctacagcattcatgtgaccaaggagtccacccaccccgtgaagcccctggcccagatcgccggaaacagatacgcctccggacctgtgggaaaggccctgagcgacgcatgtatgggcacaatcgcctccttcctgtctaagtaccaggacatcatcatcgaacaccagaaggtggtgaagggcaaccagaagagactggagagcctgcgggagctggccggcaaggaaaacctggaataccctagcgtgaccctgccacctcagcctcacaccaaggagggcgttgatgcctacaacgaagtgatcgcccgggtgcgaatgtgggtgaacctgaacctgtggcagaagctgaagctaagcagagatgatgccaagcctctgctgagactgaagggattcccttcctttcctctggtcgagagacaggccaacgaagtggactggtgggacatggtgtgtaacgtgaagaagctgatcaacgagaaaaaggaggatggcaaggtgttttggcagaatctggctggctacaagagacaggaagccctgagaccatacctgagcagcgaggaagatcggaagaagggaaagaaattcgctcggtaccagctgggcgacctgctgctgcacctggaaaagaagcacggcgaggactggggaaaggtgtacgacgaggcctgggagcggattgacaagaaagtggaaggcctgagcaagcacatcaagctggaagaggaacggagaagcgaggacgcccagagcaaggccgccctgaccgactggctgcgggctaaggccagcttcgtgatcgagggcctgaaggaggccgacaaggacgagttctgcagatgcgagctgaagctgcagaagtggtacggggacctgcggggaaagcccttcgccatcgaagccgagaacagcatcctggacatcagcggcttcagcaagcagtacaactgtgccttcatctggcagaaggacggcgtgaagaagctgaacctgtacctgatcatcaactacttcaagggcggcaagctgcggttcaagaagatcaaacctgaagccttcgaagccaacagattctacaccgtgatcaacaaaaagagcggcgagatcgtgcccatggaggtgaacttcaacttcgacgaccccaacctgatcatcctgcctctggcctttggcaagagacagggcagagaattcatctggaacgacctgctgtccctggaaaccggcagcctgaagctggccaacggaagagtgatcgagaagacactgtacaacagaagaacccggcaggatgagcctgccctgttcgtggccctgaccttcgagcggcgggaggtcctggactcctccaatatcaaaccaatgaacctgatcggcgtggcaagaggcgaaaacatccccgccgtgatcgccctgaccgaccccgagggctgcccactgagccggtttaaggatagcctgggaaacccaacccacatcctgagaatcggcgagagctataaggagaagcagcggaccatccaggccaagaaggaggtggagcagcggagagccggcggctacagccggaagtacgccagcaaagccaagaatctggcagacgatatggtgagaaacaccgctagagatctgctgtactacgccgtgacccaggatgccatgctgatcttcgccaacctgagccggggcttcggccggcagggcaagcggaccttcatggccgagagacagtacacacggatggaggactggctgaccgccaagctggcctacgagggcctgagcaagacctacctgtccaagacactggcccagtacacctccaagacatgcagcaactgtgggtttaccatcaccagcgccgactacgacagggtgctggagaagctgaagaagacagcaacaggctggatgaccacaattaacggcaaggagctgaaggtggagggccagattacctactacaacagatacaagagacagaacgtagtcaaggacctgtccgtcgagctggatagactgagcgaagaatctgtgaacaacgacatctcctcctggacaaagggcagaagcggagaagctctgagcctcctgaagaaaagattctcccatagacccgtgcaggagaagttcgtgtgcctgaactgcggcttcgagacacacgcagccgagcaagccgccctgaacatcgccagatcctggctgttcctgcggagccaggagtacaagaaataccagacaaacaagacaaccggcaacaccgataagagagccttcgtcgagacctggcagtccttttaccggaagaagcttaaggaggtgtggaaacctgccgtgcggtctggcggatctggcggaggctccacaagcatgcccctgggcagcgagctgttcagggacgtggccatcgtgttcagccaggaggagtggcagtggctggcccccgcccagagggacctgtacagggacgtgatgctggagacctacagcaacctggtgagcctgggcctggccatcagcaagcccgacgtgatcagcttcctggagcagggcaaggagccctggatggtggagagggtggtggccggcggcctgtgccccgaggccgagctgaccagccccaagaaaaagagaaaagtctaagctgccttctgcggggcttgccttctggccatgcccttcttctctcccttgcacctgtacctcttggtctttgaataaagcctgagtaggaaggctagcaaaaaaaaaaaaaaaaaaaaaaaaaaaaaaaaaaaaaaaaaaaaaaaaaaaaaaaaaaaaaaaaaaaaaaaaaaaaaaaa

SEQ ID NO: 5834 - RNA, 5797 nt, synthetic construct
  source 1..5797: mol_type = other RNA
aggaaataagagagaaaagaagagtaagaagaaatataagagccaccatggcccctaagaagaagcgtaaagtgagccggatggaacgcctcgtctacgaggtgcggcagaagtgcagaaacatcgaggacatctgcatctcctgcggatctctgaacgtgaccctggagcacccactgttcatcggcggcatgtgccagaactgtaaaaactgttttctggagtgtgcctatcaatacgacgatgacggctaccagagctactgcaccatctgttgcggcggaagagaggtgctgatgtgtggaaataacaactgctgccggtgcttctgcgtggaatgcgtggacctgctggtgggccccggcgccgcccaggccgctattaaggaagatccttggaactgctacatgtgcggccacaagggcacatacggcctgctgagacggagagaggactggcctagcagactgcagatgttcttcgccaataaccacgaccaggagttcgacccccctaaggtgtaccctcccgtccccgccgagaagagaaagcccatccgggtcctgagcctgttcgatggcatcgccaccggtctgctggtgctgaaggacctgggcatccaggtggataggtacattgcctccgaggtgtgcgaggactccatcaccgtgggaatggtgcgtcatcagggcaagatcatgtacgtgggcgacgtgcggagcgtgacacagaagcatatccaggagtggggccctttcgacctggtgatcggcggcagcccttgcaatgacctgagcatcgtgaacccagcccggaagggcctgtacgagggaaccggcagactgttcttcgagttttacagactgctgcacgacgcccggcctaaggaaggcgacgaccggcccttcttttggctgttcgagaatgtggtggccatgggagtcagcgacaagcgggatattagccggttcctggagagcaaccccgtgatgatcgatgccaaggaagtgagcgccgcccaccgggccagatacttctggggcaatctgcctggcatgaacagacccctggccagcaccgtgaacgacaagctggagctgcaggagtgcctggagcacggccggatcgccaagttcagcaaggtgagaaccatcaccacccgaagcaacagcatcaaacaaggcaaggaccagcactttcctgtgttcatgaacgagaaggaggacatcctgtggtgtaccgagatggagagagtgttcgggttcccagtccactacacagatgtcagcaacatgtctagactggccagacagagactgctgggaagaagctggtccgtccctgtgatcagacacctgttcgcccctctgaaggagtacttcgcctgcgtgagcagcggcaacagcaacgccaacagccggggccccagcttctctagcggcctggtgccactgtccctgagagggagccacatgggccccatggagatctacaaaaccgtgagcgcctggaagcggcagcctgtgcgcgtgctgagcctgtttcggaatatcgataaagtcctgaaaagcctgggattcctggagagcggctctggctccggcggtggcaccctgaagtacgtggaggatgtgacaaacgtggtcagacgggatgtggagaagtggggccccttcgatctggtgtacggcagcacccaacccctgggcagctcttgtgaccggtgccctggctggtacatgtttcagttccaccggatcctgcagtacgccctgccgagacaggagtcccagcggccattcttttggattttcatggacaacttgctgctgaccgaggatgaccaggaaactaccactcggttcctgcagaccgaagccgtgaccctgcaggacgtgagaggccgggactaccagaacgccatgcgggtgtggtccaacatccctggactgaaaagcaagcacgcacctctgacccctaaagaagaggagtacctgcaggcccaggtgcggagcagaagcaagctggacgcccctaaggtggatctgctggtgaagaattgcctcctgcccctgagagagtacttcaagtatttcagccagaatagtctgcccctgggcggcccaagcagcggcgcccctcctcccagcggcggcagcccagccggctccccaacctctaccgaggagggcacctctgagtccgccacccccgagagcggccctggcacctccaccgagcccagcgagggcagcgcacccggcagccctgccggcagccccacctccacagaggagggaaccagcaccgagcccagcgaaggcagcgccccaggcaccagcaccgagcctagtgagggcggctctggcggcggcagcgcccaggagattaaacggatcaacaagatcagaagaagacttgtgaaagacagcaacaccaagaaggccggcaagacaggccccatgaaaaccctgctggttagagtgatgacacccgatctgagagagcggctggaaaacctgagaaagaagcctgaaaatatcccccagcccatcagcaatacatctagagccaacctgaataagctgctgaccgattacaccgaaatgaagaaggcgatcctgcatgtgtactgggaagagttccagaaggaccctgtgggcctgatgagccgggtggcccagcctgccagcaagaagatcgatcagaacaagctgaaacctgagatggacgagaagggcaacctgaccaccgccggctttgcctgctctcagtgtggccagcccctgttcgtgtacaagctggagcaggtgtctgagaagggcaaggcttacaccaactacttcggacggtgcaatgtggccgagcacgaaaagctgatcctgctggcccagctgaagcccgagaaggatagcgacgaagccgtgacatatagcctgggaaagtttgggcagagggccctggatttctacagcattcatgtgaccaaggagtccacccaccccgtgaagcccctggcccagatcgccggaaacagatacgcctccggacctgtgggaaaggccctgagcgacgcatgtatgggcacaatcgcctccttcctgtctaagtaccaggacatcatcatcgaacaccagaaggtggtgaagggcaaccagaagagactggagagcctgcgggagctggccggcaaggaaaacctggaataccctagcgtgaccctgccacctcagcctcacaccaaggagggcgttgatgcctacaacgaagtgatcgcccgggtgcgaatgtgggtgaacctgaacctgtggcagaagctgaagctaagcagagatgatgccaagcctctgctgagactgaagggattcccttcctttcctctggtcgagagacaggccaacgaagtggactggtgggacatggtgtgtaacgtgaagaagctgatcaacgagaaaaaggaggatggcaaggtgttttggcagaatctggctggctacaagagacaggaagccctgagaccatacctgagcagcgaggaagatcggaagaagggaaagaaattcgctcggtaccagctgggcgacctgctgctgcacctggaaaagaagcacggcgaggactggggaaaggtgtacgacgaggcctgggagcggattgacaagaaagtggaaggcctgagcaagcacatcaagctggaagaggaacggagaagcgaggacgcccagagcaaggccgccctgaccgactggctgcgggctaaggccagcttcgtgatcgagggcctgaaggaggccgacaaggacgagttctgcagatgcgagctgaagctgcagaagtggtacggggacctgcggggaaagcccttcgccatcgaagccgagaacagcatcctggacatcagcggcttcagcaagcagtacaactgtgccttcatctggcagaaggacggcgtgaagaagctgaacctgtacctgatcatcaactacttcaagggcggcaagctgcggttcaagaagatcaaacctgaagccttcgaagccaacagattctacaccgtgatcaacaaaaagagcggcgagatcgtgcccatggaggtgaacttcaacttcgacgaccccaacctgatcatcctgcctctggcctttggcaagagacagggcagagaattcatctggaacgacctgctgtccctggaaaccggcagcctgaagctggccaacggaagagtgatcgagaagacactgtacaacagaagaacccggcaggatgagcctgccctgttcgtggccctgaccttcgagcggcgggaggtcctggactcctccaatatcaaaccaatgaacctgatcggcgtggcaagaggcgaaaacatccccgccgtgatcgccctgaccgaccccgagggctgcccactgagccggtttaaggatagcctgggaaacccaacccacatcctgagaatcggcgagagctataaggagaagcagcggaccatccaggccaagaaggaggtggagcagcggagagccggcggctacagccggaagtacgccagcaaagccaagaatctggcagacgatatggtgagaaacaccgctagagatctgctgtactacgccgtgacccaggatgccatgctgatcttcgccaacctgagccggggcttcggccggcagggcaagcggaccttcatggccgagagacagtacacacggatggaggactggctgaccgccaagctggcctacgagggcctgagcaagacctacctgtccaagacactggcccagtacacctccaagacatgcagcaactgtgggtttaccatcaccagcgccgactacgacagggtgctggagaagctgaagaagacagcaacaggctggatgaccacaattaacggcaaggagctgaaggtggagggccagattacctactacaacagatacaagagacagaacgtagtcaaggacctgtccgtcgagctggatagactgagcgaagaatctgtgaacaacgacatctcctcctggacaaagggcagaagcggagaagctctgagcctcctgaagaaaagattctcccatagacccgtgcaggagaagttcgtgtgcctgaactgcggcttcgagacacacgcagccgagcaagccgccctgaacatcgccagatcctggctgttcctgcggagccaggagtacaagaaataccagacaaacaagacaaccggcaacaccgataagagagccttcgtcgagacctggcagtccttttaccggaagaagcttaaggaggtgtggaaacctgccgtgcggtctggcggatctggcggaggctccacaagccagccccaggaggccgtgaccttcaaggacgtggaggtgaccttcagccaggacgagtggggctggctggacgccagccagaggaacctgtacagggacgtgatgctggagaactacggcaacgtggccagcctggtgggccccttcaccaagcccgccctgatcagctggctggaggccagggagccctggggcctgaacgtgcagggcgcccaccccaagggcagccccagcgccgcccccaccagccccaagaaaaagagaaaagtctaagctgccttctgcggggcttgccttctggccatgcccttcttctctcccttgcacctgtacctcttggtctttgaataaagcctgagtaggaaggctagcaaaaaaaaaaaaaaaaaaaaaaaaaaaaaaaaaaaaaaaaaaaaaaaaaaaaaaaaaaaaaaaaaaaaaaaaaaaaaaaa

SEQ ID NO: 5835 - RNA, 5797 nt, synthetic construct
  source 1..5797: mol_type = other RNA
aggaaataagagagaaaagaagagtaagaagaaatataagagccaccatggcccctaagaagaagcgtaaagtgagccggatggaacgcctcgtctacgaggtgcggcagaagtgcagaaacatcgaggacatctgcatctcctgcggatctctgaacgtgaccctggagcacccactgttcatcggcggcatgtgccagaactgtaaaaactgttttctggagtgtgcctatcaatacgacgatgacggctaccagagctactgcaccatctgttgcggcggaagagaggtgctgatgtgtggaaataacaactgctgccggtgcttctgcgtggaatgcgtggacctgctggtgggccccggcgccgcccaggccgctattaaggaagatccttggaactgctacatgtgcggccacaagggcacatacggcctgctgagacggagagaggactggcctagcagactgcagatgttcttcgccaataaccacgaccaggagttcgacccccctaaggtgtaccctcccgtccccgccgagaagagaaagcccatccgggtcctgagcctgttcgatggcatcgccaccggtctgctggtgctgaaggacctgggcatccaggtggataggtacattgcctccgaggtgtgcgaggactccatcaccgtgggaatggtgcgtcatcagggcaagatcatgtacgtgggcgacgtgcggagcgtgacacagaagcatatccaggagtggggccctttcgacctggtgatcggcggcagcccttgcaatgacctgagcatcgtgaacccagcccggaagggcctgtacgagggaaccggcagactgttcttcgagttttacagactgctgcacgacgcccggcctaaggaaggcgacgaccggcccttcttttggctgttcgagaatgtggtggccatgggagtcagcgacaagcgggatattagccggttcctggagagcaaccccgtgatgatcgatgccaaggaagtgagcgccgcccaccgggccagatacttctggggcaatctgcctggcatgaacagacccctggccagcaccgtgaacgacaagctggagctgcaggagtgcctggagcacggccggatcgccaagttcagcaaggtgagaaccatcaccacccgaagcaacagcatcaaacaaggcaaggaccagcactttcctgtgttcatgaacgagaaggaggacatcctgtggtgtaccgagatggagagagtgttcgggttcccagtccactacacagatgtcagcaacatgtctagactggccagacagagactgctgggaagaagctggtccgtccctgtgatcagacacctgttcgcccctctgaaggagtacttcgcctgcgtgagcagcggcaacagcaacgccaacagccggggccccagcttctctagcggcctggtgccactgtccctgagagggagccacatgggccccatggagatctacaaaaccgtgagcgcctggaagcggcagcctgtgcgcgtgctgagcctgtttcggaatatcgataaagtcctgaaaagcctgggattcctggagagcggctctggctccggcggtggcaccctgaagtacgtggaggatgtgacaaacgtggtcagacgggatgtggagaagtggggccccttcgatctggtgtacggcagcacccaacccctgggcagctcttgtgaccggtgccctggctggtacatgtttcagttccaccggatcctgcagtacgccctgccgagacaggagtcccagcggccattcttttggattttcatggacaacttgctgctgaccgaggatgaccaggaaactaccactcggttcctgcagaccgaagccgtgaccctgcaggacgtgagaggccgggactaccagaacgccatgcgggtgtggtccaacatccctggactgaaaagcaagcacgcacctctgacccctaaagaagaggagtacctgcaggcccaggtgcggagcagaagcaagctggacgcccctaaggtggatctgctggtgaagaattgcctcctgcccctgagagagtacttcaagtatttcagccagaatagtctgcccctgggcggcccaagcagcggcgcccctcctcccagcggcggcagcccagccggctccccaacctctaccgaggagggcacctctgagtccgccacccccgagagcggccctggcacctccaccgagcccagcgagggcagcgcacccggcagccctgccggcagccccacctccacagaggagggaaccagcaccgagcccagcgaaggcagcgccccaggcaccagcaccgagcctagtgagggcggctctggcggcggcagcgcccaggagattaaacggatcaacaagatcagaagaagacttgtgaaagacagcaacaccaagaaggccggcaagacaggccccatgaaaaccctgctggttagagtgatgacacccgatctgagagagcggctggaaaacctgagaaagaagcctgaaaatatcccccagcccatcagcaatacatctagagccaacctgaataagctgctgaccgattacaccgaaatgaagaaggcgatcctgcatgtgtactgggaagagttccagaaggaccctgtgggcctgatgagccgggtggcccagcctgccagcaagaagatcgatcagaacaagctgaaacctgagatggacgagaagggcaacctgaccaccgccggctttgcctgctctcagtgtggccagcccctgttcgtgtacaagctggagcaggtgtctgagaagggcaaggcttacaccaactacttcggacggtgcaatgtggccgagcacgaaaagctgatcctgctggcccagctgaagcccgagaaggatagcgacgaagccgtgacatatagcctgggaaagtttgggcagagggccctggatttctacagcattcatgtgaccaaggagtccacccaccccgtgaagcccctggcccagatcgccggaaacagatacgcctccggacctgtgggaaaggccctgagcgacgcatgtatgggcacaatcgcctccttcctgtctaagtaccaggacatcatcatcgaacaccagaaggtggtgaagggcaaccagaagagactggagagcctgcgggagctggccggcaaggaaaacctggaataccctagcgtgaccctgccacctcagcctcacaccaaggagggcgttgatgcctacaacgaagtgatcgcccgggtgcgaatgtgggtgaacctgaacctgtggcagaagctgaagctaagcagagatgatgccaagcctctgctgagactgaagggattcccttcctttcctctggtcgagagacaggccaacgaagtggactggtgggacatggtgtgtaacgtgaagaagctgatcaacgagaaaaaggaggatggcaaggtgttttggcagaatctggctggctacaagagacaggaagccctgagaccatacctgagcagcgaggaagatcggaagaagggaaagaaattcgctcggtaccagctgggcgacctgctgctgcacctggaaaagaagcacggcgaggactggggaaaggtgtacgacgaggcctgggagcggattgacaagaaagtggaaggcctgagcaagcacatcaagctggaagaggaacggagaagcgaggacgcccagagcaaggccgccctgaccgactggctgcgggctaaggccagcttcgtgatcgagggcctgaaggaggccgacaaggacgagttctgcagatgcgagctgaagctgcagaagtggtacggggacctgcggggaaagcccttcgccatcgaagccgagaacagcatcctggacatcagcggcttcagcaagcagtacaactgtgccttcatctggcagaaggacggcgtgaagaagctgaacctgtacctgatcatcaactacttcaagggcggcaagctgcggttcaagaagatcaaacctgaagccttcgaagccaacagattctacaccgtgatcaacaaaaagagcggcgagatcgtgcccatggaggtgaacttcaacttcgacgaccccaacctgatcatcctgcctctggcctttggcaagagacagggcagagaattcatctggaacgacctgctgtccctggaaaccggcagcctgaagctggccaacggaagagtgatcgagaagacactgtacaacagaagaacccggcaggatgagcctgccctgttcgtggccctgaccttcgagcggcgggaggtcctggactcctccaatatcaaaccaatgaacctgatcggcgtggcaagaggcgaaaacatccccgccgtgatcgccctgaccgaccccgagggctgcccactgagccggtttaaggatagcctgggaaacccaacccacatcctgagaatcggcgagagctataaggagaagcagcggaccatccaggccaagaaggaggtggagcagcggagagccggcggctacagccggaagtacgccagcaaagccaagaatctggcagacgatatggtgagaaacaccgctagagatctgctgtactacgccgtgacccaggatgccatgctgatcttcgccaacctgagccggggcttcggccggcagggcaagcggaccttcatggccgagagacagtacacacggatggaggactggctgaccgccaagctggcctacgagggcctgagcaagacctacctgtccaagacactggcccagtacacctccaagacatgcagcaactgtgggtttaccatcaccagcgccgactacgacagggtgctggagaagctgaagaagacagcaacaggctggatgaccacaattaacggcaaggagctgaaggtggagggccagattacctactacaacagatacaagagacagaacgtagtcaaggacctgtccgtcgagctggatagactgagcgaagaatctgtgaacaacgacatctcctcctggacaaagggcagaagcggagaagctctgagcctcctgaagaaaagattctcccatagacccgtgcaggagaagttcgtgtgcctgaactgcggcttcgagacacacgcagccgagcaagccgccctgaacatcgccagatcctggctgttcctgcggagccaggagtacaagaaataccagacaaacaagacaaccggcaacaccgataagagagccttcgtcgagacctggcagtccttttaccggaagaagcttaaggaggtgtggaaacctgccgtgcggtctggcggatctggcggaggctccacaagcgcccacggcagcgtgatgttcagcgacgtgagcatcgacttcagccaggaggagtgggactacctggacctggagcagagggacctgtacagggacgtgatgctggagaactacagcaacctggtgagcctgggctgcttcgtgagcaagcccgacgtgatcttcctgctggagcagggcaaggagccctggaaggtggtgaggaagggcaggaggaggtaccccgacctggagaccaactacaccagccccaagaaaaagagaaaagtctaagctgccttctgcggggcttgccttctggccatgcccttcttctctcccttgcacctgtacctcttggtctttgaataaagcctgagtaggaaggctagcaaaaaaaaaaaaaaaaaaaaaaaaaaaaaaaaaaaaaaaaaaaaaaaaaaaaaaaaaaaaaaaaaaaaaaaaaaaaaaaa

SEQ ID NO: 5836 - RNA, 5797 nt, synthetic construct
  source 1..5797: mol_type = other RNA
aggaaataagagagaaaagaagagtaagaagaaatataagagccaccatggcccctaagaagaagcgtaaagtgagccggatggaacgcctcgtctacgaggtgcggcagaagtgcagaaacatcgaggacatctgcatctcctgcggatctctgaacgtgaccctggagcacccactgttcatcggcggcatgtgccagaactgtaaaaactgttttctggagtgtgcctatcaatacgacgatgacggctaccagagctactgcaccatctgttgcggcggaagagaggtgctgatgtgtggaaataacaactgctgccggtgcttctgcgtggaatgcgtggacctgctggtgggccccggcgccgcccaggccgctattaaggaagatccttggaactgctacatgtgcggccacaagggcacatacggcctgctgagacggagagaggactggcctagcagactgcagatgttcttcgccaataaccacgaccaggagttcgacccccctaaggtgtaccctcccgtccccgccgagaagagaaagcccatccgggtcctgagcctgttcgatggcatcgccaccggtctgctggtgctgaaggacctgggcatccaggtggataggtacattgcctccgaggtgtgcgaggactccatcaccgtgggaatggtgcgtcatcagggcaagatcatgtacgtgggcgacgtgcggagcgtgacacagaagcatatccaggagtggggccctttcgacctggtgatcggcggcagcccttgcaatgacctgagcatcgtgaacccagcccggaagggcctgtacgagggaaccggcagactgttcttcgagttttacagactgctgcacgacgcccggcctaaggaaggcgacgaccggcccttcttttggctgttcgagaatgtggtggccatgggagtcagcgacaagcgggatattagccggttcctggagagcaaccccgtgatgatcgatgccaaggaagtgagcgccgcccaccgggccagatacttctggggcaatctgcctggcatgaacagacccctggccagcaccgtgaacgacaagctggagctgcaggagtgcctggagcacggccggatcgccaagttcagcaaggtgagaaccatcaccacccgaagcaacagcatcaaacaaggcaaggaccagcactttcctgtgttcatgaacgagaaggaggacatcctgtggtgtaccgagatggagagagtgttcgggttcccagtccactacacagatgtcagcaacatgtctagactggccagacagagactgctgggaagaagctggtccgtccctgtgatcagacacctgttcgcccctctgaaggagtacttcgcctgcgtgagcagcggcaacagcaacgccaacagccggggccccagcttctctagcggcctggtgccactgtccctgagagggagccacatgggccccatggagatctacaaaaccgtgagcgcctggaagcggcagcctgtgcgcgtgctgagcctgtttcggaatatcgataaagtcctgaaaagcctgggattcctggagagcggctctggctccggcggtggcaccctgaagtacgtggaggatgtgacaaacgtggtcagacgggatgtggagaagtggggccccttcgatctggtgtacggcagcacccaacccctgggcagctcttgtgaccggtgccctggctggtacatgtttcagttccaccggatcctgcagtacgccctgccgagacaggagtcccagcggccattcttttggattttcatggacaacttgctgctgaccgaggatgaccaggaaactaccactcggttcctgcagaccgaagccgtgaccctgcaggacgtgagaggccgggactaccagaacgccatgcgggtgtggtccaacatccctggactgaaaagcaagcacgcacctctgacccctaaagaagaggagtacctgcaggcccaggtgcggagcagaagcaagctggacgcccctaaggtggatctgctggtgaagaattgcctcctgcccctgagagagtacttcaagtatttcagccagaatagtctgcccctgggcggcccaagcagcggcgcccctcctcccagcggcggcagcccagccggctccccaacctctaccgaggagggcacctctgagtccgccacccccgagagcggccctggcacctccaccgagcccagcgagggcagcgcacccggcagccctgccggcagccccacctccacagaggagggaaccagcaccgagcccagcgaaggcagcgccccaggcaccagcaccgagcctagtgagggcggctctggcggcggcagcgcccaggagattaaacggatcaacaagatcagaagaagacttgtgaaagacagcaacaccaagaaggccggcaagacaggccccatgaaaaccctgctggttagagtgatgacacccgatctgagagagcggctggaaaacctgagaaagaagcctgaaaatatcccccagcccatcagcaatacatctagagccaacctgaataagctgctgaccgattacaccgaaatgaagaaggcgatcctgcatgtgtactgggaagagttccagaaggaccctgtgggcctgatgagccgggtggcccagcctgccagcaagaagatcgatcagaacaagctgaaacctgagatggacgagaagggcaacctgaccaccgccggctttgcctgctctcagtgtggccagcccctgttcgtgtacaagctggagcaggtgtctgagaagggcaaggcttacaccaactacttcggacggtgcaatgtggccgagcacgaaaagctgatcctgctggcccagctgaagcccgagaaggatagcgacgaagccgtgacatatagcctgggaaagtttgggcagagggccctggatttctacagcattcatgtgaccaaggagtccacccaccccgtgaagcccctggcccagatcgccggaaacagatacgcctccggacctgtgggaaaggccctgagcgacgcatgtatgggcacaatcgcctccttcctgtctaagtaccaggacatcatcatcgaacaccagaaggtggtgaagggcaaccagaagagactggagagcctgcgggagctggccggcaaggaaaacctggaataccctagcgtgaccctgccacctcagcctcacaccaaggagggcgttgatgcctacaacgaagtgatcgcccgggtgcgaatgtgggtgaacctgaacctgtggcagaagctgaagctaagcagagatgatgccaagcctctgctgagactgaagggattcccttcctttcctctggtcgagagacaggccaacgaagtggactggtgggacatggtgtgtaacgtgaagaagctgatcaacgagaaaaaggaggatggcaaggtgttttggcagaatctggctggctacaagagacaggaagccctgagaccatacctgagcagcgaggaagatcggaagaagggaaagaaattcgctcggtaccagctgggcgacctgctgctgcacctggaaaagaagcacggcgaggactggggaaaggtgtacgacgaggcctgggagcggattgacaagaaagtggaaggcctgagcaagcacatcaagctggaagaggaacggagaagcgaggacgcccagagcaaggccgccctgaccgactggctgcgggctaaggccagcttcgtgatcgagggcctgaaggaggccgacaaggacgagttctgcagatgcgagctgaagctgcagaagtggtacggggacctgcggggaaagcccttcgccatcgaagccgagaacagcatcctggacatcagcggcttcagcaagcagtacaactgtgccttcatctggcagaaggacggcgtgaagaagctgaacctgtacctgatcatcaactacttcaagggcggcaagctgcggttcaagaagatcaaacctgaagccttcgaagccaacagattctacaccgtgatcaacaaaaagagcggcgagatcgtgcccatggaggtgaacttcaacttcgacgaccccaacctgatcatcctgcctctggcctttggcaagagacagggcagagaattcatctggaacgacctgctgtccctggaaaccggcagcctgaagctggccaacggaagagtgatcgagaagacactgtacaacagaagaacccggcaggatgagcctgccctgttcgtggccctgaccttcgagcggcgggaggtcctggactcctccaatatcaaaccaatgaacctgatcggcgtggcaagaggcgaaaacatccccgccgtgatcgccctgaccgaccccgagggctgcccactgagccggtttaaggatagcctgggaaacccaacccacatcctgagaatcggcgagagctataaggagaagcagcggaccatccaggccaagaaggaggtggagcagcggagagccggcggctacagccggaagtacgccagcaaagccaagaatctggcagacgatatggtgagaaacaccgctagagatctgctgtactacgccgtgacccaggatgccatgctgatcttcgccaacctgagccggggcttcggccggcagggcaagcggaccttcatggccgagagacagtacacacggatggaggactggctgaccgccaagctggcctacgagggcctgagcaagacctacctgtccaagacactggcccagtacacctccaagacatgcagcaactgtgggtttaccatcaccagcgccgactacgacagggtgctggagaagctgaagaagacagcaacaggctggatgaccacaattaacggcaaggagctgaaggtggagggccagattacctactacaacagatacaagagacagaacgtagtcaaggacctgtccgtcgagctggatagactgagcgaagaatctgtgaacaacgacatctcctcctggacaaagggcagaagcggagaagctctgagcctcctgaagaaaagattctcccatagacccgtgcaggagaagttcgtgtgcctgaactgcggcttcgagacacacgcagccgagcaagccgccctgaacatcgccagatcctggctgttcctgcggagccaggagtacaagaaataccagacaaacaagacaaccggcaacaccgataagagagccttcgtcgagacctggcagtccttttaccggaagaagcttaaggaggtgtggaaacctgccgtgcggtctggcggatctggcggaggctccacaagcgtgcaggagcccgtgaccttcaaggacgtggccgtggacttcacccaggaggagtggggccagctggacctggtgcagaggaccctgtacagggacgtgatgctggagacctacggccacctgctgagcgtgggcaaccagatcgccaagcccgaggtgatcagcctgctggagcagggcgaggagccctggagcctggagcagacctgcccccagagggcctgccccgagtggatgaggaacaccagccccaagaaaaagagaaaagtctaagctgccttctgcggggcttgccttctggccatgcccttcttctctcccttgcacctgtacctcttggtctttgaataaagcctgagtaggaaggctagcaaaaaaaaaaaaaaaaaaaaaaaaaaaaaaaaaaaaaaaaaaaaaaaaaaaaaaaaaaaaaaaaaaaaaaaaaaaaaaaa

SEQ ID NO: 5837 - RNA, 5797 nt, synthetic construct
  source 1..5797: mol_type = other RNA
aggaaataagagagaaaagaagagtaagaagaaatataagagccaccatggcccctaagaagaagcgtaaagtgagccggatggaacgcctcgtctacgaggtgcggcagaagtgcagaaacatcgaggacatctgcatctcctgcggatctctgaacgtgaccctggagcacccactgttcatcggcggcatgtgccagaactgtaaaaactgttttctggagtgtgcctatcaatacgacgatgacggctaccagagctactgcaccatctgttgcggcggaagagaggtgctgatgtgtggaaataacaactgctgccggtgcttctgcgtggaatgcgtggacctgctggtgggccccggcgccgcccaggccgctattaaggaagatccttggaactgctacatgtgcggccacaagggcacatacggcctgctgagacggagagaggactggcctagcagactgcagatgttcttcgccaataaccacgaccaggagttcgacccccctaaggtgtaccctcccgtccccgccgagaagagaaagcccatccgggtcctgagcctgttcgatggcatcgccaccggtctgctggtgctgaaggacctgggcatccaggtggataggtacattgcctccgaggtgtgcgaggactccatcaccgtgggaatggtgcgtcatcagggcaagatcatgtacgtgggcgacgtgcggagcgtgacacagaagcatatccaggagtggggccctttcgacctggtgatcggcggcagcccttgcaatgacctgagcatcgtgaacccagcccggaagggcctgtacgagggaaccggcagactgttcttcgagttttacagactgctgcacgacgcccggcctaaggaaggcgacgaccggcccttcttttggctgttcgagaatgtggtggccatgggagtcagcgacaagcgggatattagccggttcctggagagcaaccccgtgatgatcgatgccaaggaagtgagcgccgcccaccgggccagatacttctggggcaatctgcctggcatgaacagacccctggccagcaccgtgaacgacaagctggagctgcaggagtgcctggagcacggccggatcgccaagttcagcaaggtgagaaccatcaccacccgaagcaacagcatcaaacaaggcaaggaccagcactttcctgtgttcatgaacgagaaggaggacatcctgtggtgtaccgagatggagagagtgttcgggttcccagtccactacacagatgtcagcaacatgtctagactggccagacagagactgctgggaagaagctggtccgtccctgtgatcagacacctgttcgcccctctgaaggagtacttcgcctgcgtgagcagcggcaacagcaacgccaacagccggggccccagcttctctagcggcctggtgccactgtccctgagagggagccacatgggccccatggagatctacaaaaccgtgagcgcctggaagcggcagcctgtgcgcgtgctgagcctgtttcggaatatcgataaagtcctgaaaagcctgggattcctggagagcggctctggctccggcggtggcaccctgaagtacgtggaggatgtgacaaacgtggtcagacgggatgtggagaagtggggccccttcgatctggtgtacggcagcacccaacccctgggcagctcttgtgaccggtgccctggctggtacatgtttcagttccaccggatcctgcagtacgccctgccgagacaggagtcccagcggccattcttttggattttcatggacaacttgctgctgaccgaggatgaccaggaaactaccactcggttcctgcagaccgaagccgtgaccctgcaggacgtgagaggccgggactaccagaacgccatgcgggtgtggtccaacatccctggactgaaaagcaagcacgcacctctgacccctaaagaagaggagtacctgcaggcccaggtgcggagcagaagcaagctggacgcccctaaggtggatctgctggtgaagaattgcctcctgcccctgagagagtacttcaagtatttcagccagaatagtctgcccctgggcggcccaagcagcggcgcccctcctcccagcggcggcagcccagccggctccccaacctctaccgaggagggcacctctgagtccgccacccccgagagcggccctggcacctccaccgagcccagcgagggcagcgcacccggcagccctgccggcagccccacctccacagaggagggaaccagcaccgagcccagcgaaggcagcgccccaggcaccagcaccgagcctagtgagggcggctctggcggcggcagcgcccaggagattaaacggatcaacaagatcagaagaagacttgtgaaagacagcaacaccaagaaggccggcaagacaggccccatgaaaaccctgctggttagagtgatgacacccgatctgagagagcggctggaaaacctgagaaagaagcctgaaaatatcccccagcccatcagcaatacatctagagccaacctgaataagctgctgaccgattacaccgaaatgaagaaggcgatcctgcatgtgtactgggaagagttccagaaggaccctgtgggcctgatgagccgggtggcccagcctgccagcaagaagatcgatcagaacaagctgaaacctgagatggacgagaagggcaacctgaccaccgccggctttgcctgctctcagtgtggccagcccctgttcgtgtacaagctggagcaggtgtctgagaagggcaaggcttacaccaactacttcggacggtgcaatgtggccgagcacgaaaagctgatcctgctggcccagctgaagcccgagaaggatagcgacgaagccgtgacatatagcctgggaaagtttgggcagagggccctggatttctacagcattcatgtgaccaaggagtccacccaccccgtgaagcccctggcccagatcgccggaaacagatacgcctccggacctgtgggaaaggccctgagcgacgcatgtatgggcacaatcgcctccttcctgtctaagtaccaggacatcatcatcgaacaccagaaggtggtgaagggcaaccagaagagactggagagcctgcgggagctggccggcaaggaaaacctggaataccctagcgtgaccctgccacctcagcctcacaccaaggagggcgttgatgcctacaacgaagtgatcgcccgggtgcgaatgtgggtgaacctgaacctgtggcagaagctgaagctaagcagagatgatgccaagcctctgctgagactgaagggattcccttcctttcctctggtcgagagacaggccaacgaagtggactggtgggacatggtgtgtaacgtgaagaagctgatcaacgagaaaaaggaggatggcaaggtgttttggcagaatctggctggctacaagagacaggaagccctgagaccatacctgagcagcgaggaagatcggaagaagggaaagaaattcgctcggtaccagctgggcgacctgctgctgcacctggaaaagaagcacggcgaggactggggaaaggtgtacgacgaggcctgggagcggattgacaagaaagtggaaggcctgagcaagcacatcaagctggaagaggaacggagaagcgaggacgcccagagcaaggccgccctgaccgactggctgcgggctaaggccagcttcgtgatcgagggcctgaaggaggccgacaaggacgagttctgcagatgcgagctgaagctgcagaagtggtacggggacctgcggggaaagcccttcgccatcgaagccgagaacagcatcctggacatcagcggcttcagcaagcagtacaactgtgccttcatctggcagaaggacggcgtgaagaagctgaacctgtacctgatcatcaactacttcaagggcggcaagctgcggttcaagaagatcaaacctgaagccttcgaagccaacagattctacaccgtgatcaacaaaaagagcggcgagatcgtgcccatggaggtgaacttcaacttcgacgaccccaacctgatcatcctgcctctggcctttggcaagagacagggcagagaattcatctggaacgacctgctgtccctggaaaccggcagcctgaagctggccaacggaagagtgatcgagaagacactgtacaacagaagaacccggcaggatgagcctgccctgttcgtggccctgaccttcgagcggcgggaggtcctggactcctccaatatcaaaccaatgaacctgatcggcgtggcaagaggcgaaaacatccccgccgtgatcgccctgaccgaccccgagggctgcccactgagccggtttaaggatagcctgggaaacccaacccacatcctgagaatcggcgagagctataaggagaagcagcggaccatccaggccaagaaggaggtggagcagcggagagccggcggctacagccggaagtacgccagcaaagccaagaatctggcagacgatatggtgagaaacaccgctagagatctgctgtactacgccgtgacccaggatgccatgctgatcttcgccaacctgagccggggcttcggccggcagggcaagcggaccttcatggccgagagacagtacacacggatggaggactggctgaccgccaagctggcctacgagggcctgagcaagacctacctgtccaagacactggcccagtacacctccaagacatgcagcaactgtgggtttaccatcaccagcgccgactacgacagggtgctggagaagctgaagaagacagcaacaggctggatgaccacaattaacggcaaggagctgaaggtggagggccagattacctactacaacagatacaagagacagaacgtagtcaaggacctgtccgtcgagctggatagactgagcgaagaatctgtgaacaacgacatctcctcctggacaaagggcagaagcggagaagctctgagcctcctgaagaaaagattctcccatagacccgtgcaggagaagttcgtgtgcctgaactgcggcttcgagacacacgcagccgagcaagccgccctgaacatcgccagatcctggctgttcctgcggagccaggagtacaagaaataccagacaaacaagacaaccggcaacaccgataagagagccttcgtcgagacctggcagtccttttaccggaagaagcttaaggaggtgtggaaacctgccgtgcggtctggcggatctggcggaggctccacaagcttccaggagcccgtgaccttcgaggacgtggccgtgtacttcacccagaacgagtgggccagcctgcaccccatgcagagggccctgtacagggaggtgatgctggagaactacgccaacgtgaccagcctgagcgccttccccttcagcaagcccgacctgatcttccagctggagcagggcgaggccgcctggggccccgacccctggaccctggccggcggcgaggccctgaggggcatgaccagccccaagaaaaagagaaaagtctaagctgccttctgcggggcttgccttctggccatgcccttcttctctcccttgcacctgtacctcttggtctttgaataaagcctgagtaggaaggctagcaaaaaaaaaaaaaaaaaaaaaaaaaaaaaaaaaaaaaaaaaaaaaaaaaaaaaaaaaaaaaaaaaaaaaaaaaaaaaaaa

SEQ ID NO: 5838 - RNA, 5797 nt, synthetic construct
  source 1..5797: mol_type = other RNA
aggaaataagagagaaaagaagagtaagaagaaatataagagccaccatggcccctaagaagaagcgtaaagtgagccggatggaacgcctcgtctacgaggtgcggcagaagtgcagaaacatcgaggacatctgcatctcctgcggatctctgaacgtgaccctggagcacccactgttcatcggcggcatgtgccagaactgtaaaaactgttttctggagtgtgcctatcaatacgacgatgacggctaccagagctactgcaccatctgttgcggcggaagagaggtgctgatgtgtggaaataacaactgctgccggtgcttctgcgtggaatgcgtggacctgctggtgggccccggcgccgcccaggccgctattaaggaagatccttggaactgctacatgtgcggccacaagggcacatacggcctgctgagacggagagaggactggcctagcagactgcagatgttcttcgccaataaccacgaccaggagttcgacccccctaaggtgtaccctcccgtccccgccgagaagagaaagcccatccgggtcctgagcctgttcgatggcatcgccaccggtctgctggtgctgaaggacctgggcatccaggtggataggtacattgcctccgaggtgtgcgaggactccatcaccgtgggaatggtgcgtcatcagggcaagatcatgtacgtgggcgacgtgcggagcgtgacacagaagcatatccaggagtggggccctttcgacctggtgatcggcggcagcccttgcaatgacctgagcatcgtgaacccagcccggaagggcctgtacgagggaaccggcagactgttcttcgagttttacagactgctgcacgacgcccggcctaaggaaggcgacgaccggcccttcttttggctgttcgagaatgtggtggccatgggagtcagcgacaagcgggatattagccggttcctggagagcaaccccgtgatgatcgatgccaaggaagtgagcgccgcccaccgggccagatacttctggggcaatctgcctggcatgaacagacccctggccagcaccgtgaacgacaagctggagctgcaggagtgcctggagcacggccggatcgccaagttcagcaaggtgagaaccatcaccacccgaagcaacagcatcaaacaaggcaaggaccagcactttcctgtgttcatgaacgagaaggaggacatcctgtggtgtaccgagatggagagagtgttcgggttcccagtccactacacagatgtcagcaacatgtctagactggccagacagagactgctgggaagaagctggtccgtccctgtgatcagacacctgttcgcccctctgaaggagtacttcgcctgcgtgagcagcggcaacagcaacgccaacagccggggccccagcttctctagcggcctggtgccactgtccctgagagggagccacatgggccccatggagatctacaaaaccgtgagcgcctggaagcggcagcctgtgcgcgtgctgagcctgtttcggaatatcgataaagtcctgaaaagcctgggattcctggagagcggctctggctccggcggtggcaccctgaagtacgtggaggatgtgacaaacgtggtcagacgggatgtggagaagtggggccccttcgatctggtgtacggcagcacccaacccctgggcagctcttgtgaccggtgccctggctggtacatgtttcagttccaccggatcctgcagtacgccctgccgagacaggagtcccagcggccattcttttggattttcatggacaacttgctgctgaccgaggatgaccaggaaactaccactcggttcctgcagaccgaagccgtgaccctgcaggacgtgagaggccgggactaccagaacgccatgcgggtgtggtccaacatccctggactgaaaagcaagcacgcacctctgacccctaaagaagaggagtacctgcaggcccaggtgcggagcagaagcaagctggacgcccctaaggtggatctgctggtgaagaattgcctcctgcccctgagagagtacttcaagtatttcagccagaatagtctgcccctgggcggcccaagcagcggcgcccctcctcccagcggcggcagcccagccggctccccaacctctaccgaggagggcacctctgagtccgccacccccgagagcggccctggcacctccaccgagcccagcgagggcagcgcacccggcagccctgccggcagccccacctccacagaggagggaaccagcaccgagcccagcgaaggcagcgccccaggcaccagcaccgagcctagtgagggcggctctggcggcggcagcgcccaggagattaaacggatcaacaagatcagaagaagacttgtgaaagacagcaacaccaagaaggccggcaagacaggccccatgaaaaccctgctggttagagtgatgacacccgatctgagagagcggctggaaaacctgagaaagaagcctgaaaatatcccccagcccatcagcaatacatctagagccaacctgaataagctgctgaccgattacaccgaaatgaagaaggcgatcctgcatgtgtactgggaagagttccagaaggaccctgtgggcctgatgagccgggtggcccagcctgccagcaagaagatcgatcagaacaagctgaaacctgagatggacgagaagggcaacctgaccaccgccggctttgcctgctctcagtgtggccagcccctgttcgtgtacaagctggagcaggtgtctgagaagggcaaggcttacaccaactacttcggacggtgcaatgtggccgagcacgaaaagctgatcctgctggcccagctgaagcccgagaaggatagcgacgaagccgtgacatatagcctgggaaagtttgggcagagggccctggatttctacagcattcatgtgaccaaggagtccacccaccccgtgaagcccctggcccagatcgccggaaacagatacgcctccggacctgtgggaaaggccctgagcgacgcatgtatgggcacaatcgcctccttcctgtctaagtaccaggacatcatcatcgaacaccagaaggtggtgaagggcaaccagaagagactggagagcctgcgggagctggccggcaaggaaaacctggaataccctagcgtgaccctgccacctcagcctcacaccaaggagggcgttgatgcctacaacgaagtgatcgcccgggtgcgaatgtgggtgaacctgaacctgtggcagaagctgaagctaagcagagatgatgccaagcctctgctgagactgaagggattcccttcctttcctctggtcgagagacaggccaacgaagtggactggtgggacatggtgtgtaacgtgaagaagctgatcaacgagaaaaaggaggatggcaaggtgttttggcagaatctggctggctacaagagacaggaagccctgagaccatacctgagcagcgaggaagatcggaagaagggaaagaaattcgctcggtaccagctgggcgacctgctgctgcacctggaaaagaagcacggcgaggactggggaaaggtgtacgacgaggcctgggagcggattgacaagaaagtggaaggcctgagcaagcacatcaagctggaagaggaacggagaagcgaggacgcccagagcaaggccgccctgaccgactggctgcgggctaaggccagcttcgtgatcgagggcctgaaggaggccgacaaggacgagttctgcagatgcgagctgaagctgcagaagtggtacggggacctgcggggaaagcccttcgccatcgaagccgagaacagcatcctggacatcagcggcttcagcaagcagtacaactgtgccttcatctggcagaaggacggcgtgaagaagctgaacctgtacctgatcatcaactacttcaagggcggcaagctgcggttcaagaagatcaaacctgaagccttcgaagccaacagattctacaccgtgatcaacaaaaagagcggcgagatcgtgcccatggaggtgaacttcaacttcgacgaccccaacctgatcatcctgcctctggcctttggcaagagacagggcagagaattcatctggaacgacctgctgtccctggaaaccggcagcctgaagctggccaacggaagagtgatcgagaagacactgtacaacagaagaacccggcaggatgagcctgccctgttcgtggccctgaccttcgagcggcgggaggtcctggactcctccaatatcaaaccaatgaacctgatcggcgtggcaagaggcgaaaacatccccgccgtgatcgccctgaccgaccccgagggctgcccactgagccggtttaaggatagcctgggaaacccaacccacatcctgagaatcggcgagagctataaggagaagcagcggaccatccaggccaagaaggaggtggagcagcggagagccggcggctacagccggaagtacgccagcaaagccaagaatctggcagacgatatggtgagaaacaccgctagagatctgctgtactacgccgtgacccaggatgccatgctgatcttcgccaacctgagccggggcttcggccggcagggcaagcggaccttcatggccgagagacagtacacacggatggaggactggctgaccgccaagctggcctacgagggcctgagcaagacctacctgtccaagacactggcccagtacacctccaagacatgcagcaactgtgggtttaccatcaccagcgccgactacgacagggtgctggagaagctgaagaagacagcaacaggctggatgaccacaattaacggcaaggagctgaaggtggagggccagattacctactacaacagatacaagagacagaacgtagtcaaggacctgtccgtcgagctggatagactgagcgaagaatctgtgaacaacgacatctcctcctggacaaagggcagaagcggagaagctctgagcctcctgaagaaaagattctcccatagacccgtgcaggagaagttcgtgtgcctgaactgcggcttcgagacacacgcagccgagcaagccgccctgaacatcgccagatcctggctgttcctgcggagccaggagtacaagaaataccagacaaacaagacaaccggcaacaccgataagagagccttcgtcgagacctggcagtccttttaccggaagaagcttaaggaggtgtggaaacctgccgtgcggtctggcggatctggcggaggctccacaagccagccccagggcaccatgaccttcaaggacgtggaggtgaccttcagccaggacgagtggggcctgctggacgccagccagaggaacctgtacagggacgtgatgctggagaactacggcaacatggccagcgtggtgggccccttcaccaagcccgccctgatcagctggctggaggccagggagccctggggcctgaacgtgcagggcgtgcagctgaagggcaaccccggcgccgcccccaccagccccaagaaaaagagaaaagtctaagctgccttctgcggggcttgccttctggccatgcccttcttctctcccttgcacctgtacctcttggtctttgaataaagcctgagtaggaaggctagcaaaaaaaaaaaaaaaaaaaaaaaaaaaaaaaaaaaaaaaaaaaaaaaaaaaaaaaaaaaaaaaaaaaaaaaaaaaaaaaa

SEQ ID NO: 5839 - RNA, 5797 nt, synthetic construct
  source 1..5797: mol_type = other RNA
aggaaataagagagaaaagaagagtaagaagaaatataagagccaccatggcccctaagaagaagcgtaaagtgagccggatggaacgcctcgtctacgaggtgcggcagaagtgcagaaacatcgaggacatctgcatctcctgcggatctctgaacgtgaccctggagcacccactgttcatcggcggcatgtgccagaactgtaaaaactgttttctggagtgtgcctatcaatacgacgatgacggctaccagagctactgcaccatctgttgcggcggaagagaggtgctgatgtgtggaaataacaactgctgccggtgcttctgcgtggaatgcgtggacctgctggtgggccccggcgccgcccaggccgctattaaggaagatccttggaactgctacatgtgcggccacaagggcacatacggcctgctgagacggagagaggactggcctagcagactgcagatgttcttcgccaataaccacgaccaggagttcgacccccctaaggtgtaccctcccgtccccgccgagaagagaaagcccatccgggtcctgagcctgttcgatggcatcgccaccggtctgctggtgctgaaggacctgggcatccaggtggataggtacattgcctccgaggtgtgcgaggactccatcaccgtgggaatggtgcgtcatcagggcaagatcatgtacgtgggcgacgtgcggagcgtgacacagaagcatatccaggagtggggccctttcgacctggtgatcggcggcagcccttgcaatgacctgagcatcgtgaacccagcccggaagggcctgtacgagggaaccggcagactgttcttcgagttttacagactgctgcacgacgcccggcctaaggaaggcgacgaccggcccttcttttggctgttcgagaatgtggtggccatgggagtcagcgacaagcgggatattagccggttcctggagagcaaccccgtgatgatcgatgccaaggaagtgagcgccgcccaccgggccagatacttctggggcaatctgcctggcatgaacagacccctggccagcaccgtgaacgacaagctggagctgcaggagtgcctggagcacggccggatcgccaagttcagcaaggtgagaaccatcaccacccgaagcaacagcatcaaacaaggcaaggaccagcactttcctgtgttcatgaacgagaaggaggacatcctgtggtgtaccgagatggagagagtgttcgggttcccagtccactacacagatgtcagcaacatgtctagactggccagacagagactgctgggaagaagctggtccgtccctgtgatcagacacctgttcgcccctctgaaggagtacttcgcctgcgtgagcagcggcaacagcaacgccaacagccggggccccagcttctctagcggcctggtgccactgtccctgagagggagccacatgggccccatggagatctacaaaaccgtgagcgcctggaagcggcagcctgtgcgcgtgctgagcctgtttcggaatatcgataaagtcctgaaaagcctgggattcctggagagcggctctggctccggcggtggcaccctgaagtacgtggaggatgtgacaaacgtggtcagacgggatgtggagaagtggggccccttcgatctggtgtacggcagcacccaacccctgggcagctcttgtgaccggtgccctggctggtacatgtttcagttccaccggatcctgcagtacgccctgccgagacaggagtcccagcggccattcttttggattttcatggacaacttgctgctgaccgaggatgaccaggaaactaccactcggttcctgcagaccgaagccgtgaccctgcaggacgtgagaggccgggactaccagaacgccatgcgggtgtggtccaacatccctggactgaaaagcaagcacgcacctctgacccctaaagaagaggagtacctgcaggcccaggtgcggagcagaagcaagctggacgcccctaaggtggatctgctggtgaagaattgcctcctgcccctgagagagtacttcaagtatttcagccagaatagtctgcccctgggcggcccaagcagcggcgcccctcctcccagcggcggcagcccagccggctccccaacctctaccgaggagggcacctctgagtccgccacccccgagagcggccctggcacctccaccgagcccagcgagggcagcgcacccggcagccctgccggcagccccacctccacagaggagggaaccagcaccgagcccagcgaaggcagcgccccaggcaccagcaccgagcctagtgagggcggctctggcggcggcagcgcccaggagattaaacggatcaacaagatcagaagaagacttgtgaaagacagcaacaccaagaaggccggcaagacaggccccatgaaaaccctgctggttagagtgatgacacccgatctgagagagcggctggaaaacctgagaaagaagcctgaaaatatcccccagcccatcagcaatacatctagagccaacctgaataagctgctgaccgattacaccgaaatgaagaaggcgatcctgcatgtgtactgggaagagttccagaaggaccctgtgggcctgatgagccgggtggcccagcctgccagcaagaagatcgatcagaacaagctgaaacctgagatggacgagaagggcaacctgaccaccgccggctttgcctgctctcagtgtggccagcccctgttcgtgtacaagctggagcaggtgtctgagaagggcaaggcttacaccaactacttcggacggtgcaatgtggccgagcacgaaaagctgatcctgctggcccagctgaagcccgagaaggatagcgacgaagccgtgacatatagcctgggaaagtttgggcagagggccctggatttctacagcattcatgtgaccaaggagtccacccaccccgtgaagcccctggcccagatcgccggaaacagatacgcctccggacctgtgggaaaggccctgagcgacgcatgtatgggcacaatcgcctccttcctgtctaagtaccaggacatcatcatcgaacaccagaaggtggtgaagggcaaccagaagagactggagagcctgcgggagctggccggcaaggaaaacctggaataccctagcgtgaccctgccacctcagcctcacaccaaggagggcgttgatgcctacaacgaagtgatcgcccgggtgcgaatgtgggtgaacctgaacctgtggcagaagctgaagctaagcagagatgatgccaagcctctgctgagactgaagggattcccttcctttcctctggtcgagagacaggccaacgaagtggactggtgggacatggtgtgtaacgtgaagaagctgatcaacgagaaaaaggaggatggcaaggtgttttggcagaatctggctggctacaagagacaggaagccctgagaccatacctgagcagcgaggaagatcggaagaagggaaagaaattcgctcggtaccagctgggcgacctgctgctgcacctggaaaagaagcacggcgaggactggggaaaggtgtacgacgaggcctgggagcggattgacaagaaagtggaaggcctgagcaagcacatcaagctggaagaggaacggagaagcgaggacgcccagagcaaggccgccctgaccgactggctgcgggctaaggccagcttcgtgatcgagggcctgaaggaggccgacaaggacgagttctgcagatgcgagctgaagctgcagaagtggtacggggacctgcggggaaagcccttcgccatcgaagccgagaacagcatcctggacatcagcggcttcagcaagcagtacaactgtgccttcatctggcagaaggacggcgtgaagaagctgaacctgtacctgatcatcaactacttcaagggcggcaagctgcggttcaagaagatcaaacctgaagccttcgaagccaacagattctacaccgtgatcaacaaaaagagcggcgagatcgtgcccatggaggtgaacttcaacttcgacgaccccaacctgatcatcctgcctctggcctttggcaagagacagggcagagaattcatctggaacgacctgctgtccctggaaaccggcagcctgaagctggccaacggaagagtgatcgagaagacactgtacaacagaagaacccggcaggatgagcctgccctgttcgtggccctgaccttcgagcggcgggaggtcctggactcctccaatatcaaaccaatgaacctgatcggcgtggcaagaggcgaaaacatccccgccgtgatcgccctgaccgaccccgagggctgcccactgagccggtttaaggatagcctgggaaacccaacccacatcctgagaatcggcgagagctataaggagaagcagcggaccatccaggccaagaaggaggtggagcagcggagagccggcggctacagccggaagtacgccagcaaagccaagaatctggcagacgatatggtgagaaacaccgctagagatctgctgtactacgccgtgacccaggatgccatgctgatcttcgccaacctgagccggggcttcggccggcagggcaagcggaccttcatggccgagagacagtacacacggatggaggactggctgaccgccaagctggcctacgagggcctgagcaagacctacctgtccaagacactggcccagtacacctccaagacatgcagcaactgtgggtttaccatcaccagcgccgactacgacagggtgctggagaagctgaagaagacagcaacaggctggatgaccacaattaacggcaaggagctgaaggtggagggccagattacctactacaacagatacaagagacagaacgtagtcaaggacctgtccgtcgagctggatagactgagcgaagaatctgtgaacaacgacatctcctcctggacaaagggcagaagcggagaagctctgagcctcctgaagaaaagattctcccatagacccgtgcaggagaagttcgtgtgcctgaactgcggcttcgagacacacgcagccgagcaagccgccctgaacatcgccagatcctggctgttcctgcggagccaggagtacaagaaataccagacaaacaagacaaccggcaacaccgataagagagccttcgtcgagacctggcagtccttttaccggaagaagcttaaggaggtgtggaaacctgccgtgcggtctggcggatctggcggaggctccacaagcagccagggcaggctgaggttccaggacgtggccatcgacttcaccctggaggagtgggagtgcctggacctgggccagagggagctgtacagggacgtgatgctggagaactacggcaacctggccagcctgggcctgatcgtgtgcaagcccgacctggtgaccttcctggagaagatgagggacccccaggacgtgaggggcatcgagaccaccgccatccaccccgacctggccagcttcaccagccccaagaaaaagagaaaagtctaagctgccttctgcggggcttgccttctggccatgcccttcttctctcccttgcacctgtacctcttggtctttgaataaagcctgagtaggaaggctagcaaaaaaaaaaaaaaaaaaaaaaaaaaaaaaaaaaaaaaaaaaaaaaaaaaaaaaaaaaaaaaaaaaaaaaaaaaaaaaaa

SEQ ID NO: 5840 - RNA, 5797 nt, synthetic construct
  source 1..5797: mol_type = other RNA
aggaaataagagagaaaagaagagtaagaagaaatataagagccaccatggcccctaagaagaagcgtaaagtgagccggatggaacgcctcgtctacgaggtgcggcagaagtgcagaaacatcgaggacatctgcatctcctgcggatctctgaacgtgaccctggagcacccactgttcatcggcggcatgtgccagaactgtaaaaactgttttctggagtgtgcctatcaatacgacgatgacggctaccagagctactgcaccatctgttgcggcggaagagaggtgctgatgtgtggaaataacaactgctgccggtgcttctgcgtggaatgcgtggacctgctggtgggccccggcgccgcccaggccgctattaaggaagatccttggaactgctacatgtgcggccacaagggcacatacggcctgctgagacggagagaggactggcctagcagactgcagatgttcttcgccaataaccacgaccaggagttcgacccccctaaggtgtaccctcccgtccccgccgagaagagaaagcccatccgggtcctgagcctgttcgatggcatcgccaccggtctgctggtgctgaaggacctgggcatccaggtggataggtacattgcctccgaggtgtgcgaggactccatcaccgtgggaatggtgcgtcatcagggcaagatcatgtacgtgggcgacgtgcggagcgtgacacagaagcatatccaggagtggggccctttcgacctggtgatcggcggcagcccttgcaatgacctgagcatcgtgaacccagcccggaagggcctgtacgagggaaccggcagactgttcttcgagttttacagactgctgcacgacgcccggcctaaggaaggcgacgaccggcccttcttttggctgttcgagaatgtggtggccatgggagtcagcgacaagcgggatattagccggttcctggagagcaaccccgtgatgatcgatgccaaggaagtgagcgccgcccaccgggccagatacttctggggcaatctgcctggcatgaacagacccctggccagcaccgtgaacgacaagctggagctgcaggagtgcctggagcacggccggatcgccaagttcagcaaggtgagaaccatcaccacccgaagcaacagcatcaaacaaggcaaggaccagcactttcctgtgttcatgaacgagaaggaggacatcctgtggtgtaccgagatggagagagtgttcgggttcccagtccactacacagatgtcagcaacatgtctagactggccagacagagactgctgggaagaagctggtccgtccctgtgatcagacacctgttcgcccctctgaaggagtacttcgcctgcgtgagcagcggcaacagcaacgccaacagccggggccccagcttctctagcggcctggtgccactgtccctgagagggagccacatgggccccatggagatctacaaaaccgtgagcgcctggaagcggcagcctgtgcgcgtgctgagcctgtttcggaatatcgataaagtcctgaaaagcctgggattcctggagagcggctctggctccggcggtggcaccctgaagtacgtggaggatgtgacaaacgtggtcagacgggatgtggagaagtggggccccttcgatctggtgtacggcagcacccaacccctgggcagctcttgtgaccggtgccctggctggtacatgtttcagttccaccggatcctgcagtacgccctgccgagacaggagtcccagcggccattcttttggattttcatggacaacttgctgctgaccgaggatgaccaggaaactaccactcggttcctgcagaccgaagccgtgaccctgcaggacgtgagaggccgggactaccagaacgccatgcgggtgtggtccaacatccctggactgaaaagcaagcacgcacctctgacccctaaagaagaggagtacctgcaggcccaggtgcggagcagaagcaagctggacgcccctaaggtggatctgctggtgaagaattgcctcctgcccctgagagagtacttcaagtatttcagccagaatagtctgcccctgggcggcccaagcagcggcgcccctcctcccagcggcggcagcccagccggctccccaacctctaccgaggagggcacctctgagtccgccacccccgagagcggccctggcacctccaccgagcccagcgagggcagcgcacccggcagccctgccggcagccccacctccacagaggagggaaccagcaccgagcccagcgaaggcagcgccccaggcaccagcaccgagcctagtgagggcggctctggcggcggcagcgcccaggagattaaacggatcaacaagatcagaagaagacttgtgaaagacagcaacaccaagaaggccggcaagacaggccccatgaaaaccctgctggttagagtgatgacacccgatctgagagagcggctggaaaacctgagaaagaagcctgaaaatatcccccagcccatcagcaatacatctagagccaacctgaataagctgctgaccgattacaccgaaatgaagaaggcgatcctgcatgtgtactgggaagagttccagaaggaccctgtgggcctgatgagccgggtggcccagcctgccagcaagaagatcgatcagaacaagctgaaacctgagatggacgagaagggcaacctgaccaccgccggctttgcctgctctcagtgtggccagcccctgttcgtgtacaagctggagcaggtgtctgagaagggcaaggcttacaccaactacttcggacggtgcaatgtggccgagcacgaaaagctgatcctgctggcccagctgaagcccgagaaggatagcgacgaagccgtgacatatagcctgggaaagtttgggcagagggccctggatttctacagcattcatgtgaccaaggagtccacccaccccgtgaagcccctggcccagatcgccggaaacagatacgcctccggacctgtgggaaaggccctgagcgacgcatgtatgggcacaatcgcctccttcctgtctaagtaccaggacatcatcatcgaacaccagaaggtggtgaagggcaaccagaagagactggagagcctgcgggagctggccggcaaggaaaacctggaataccctagcgtgaccctgccacctcagcctcacaccaaggagggcgttgatgcctacaacgaagtgatcgcccgggtgcgaatgtgggtgaacctgaacctgtggcagaagctgaagctaagcagagatgatgccaagcctctgctgagactgaagggattcccttcctttcctctggtcgagagacaggccaacgaagtggactggtgggacatggtgtgtaacgtgaagaagctgatcaacgagaaaaaggaggatggcaaggtgttttggcagaatctggctggctacaagagacaggaagccctgagaccatacctgagcagcgaggaagatcggaagaagggaaagaaattcgctcggtaccagctgggcgacctgctgctgcacctggaaaagaagcacggcgaggactggggaaaggtgtacgacgaggcctgggagcggattgacaagaaagtggaaggcctgagcaagcacatcaagctggaagaggaacggagaagcgaggacgcccagagcaaggccgccctgaccgactggctgcgggctaaggccagcttcgtgatcgagggcctgaaggaggccgacaaggacgagttctgcagatgcgagctgaagctgcagaagtggtacggggacctgcggggaaagcccttcgccatcgaagccgagaacagcatcctggacatcagcggcttcagcaagcagtacaactgtgccttcatctggcagaaggacggcgtgaagaagctgaacctgtacctgatcatcaactacttcaagggcggcaagctgcggttcaagaagatcaaacctgaagccttcgaagccaacagattctacaccgtgatcaacaaaaagagcggcgagatcgtgcccatggaggtgaacttcaacttcgacgaccccaacctgatcatcctgcctctggcctttggcaagagacagggcagagaattcatctggaacgacctgctgtccctggaaaccggcagcctgaagctggccaacggaagagtgatcgagaagacactgtacaacagaagaacccggcaggatgagcctgccctgttcgtggccctgaccttcgagcggcgggaggtcctggactcctccaatatcaaaccaatgaacctgatcggcgtggcaagaggcgaaaacatccccgccgtgatcgccctgaccgaccccgagggctgcccactgagccggtttaaggatagcctgggaaacccaacccacatcctgagaatcggcgagagctataaggagaagcagcggaccatccaggccaagaaggaggtggagcagcggagagccggcggctacagccggaagtacgccagcaaagccaagaatctggcagacgatatggtgagaaacaccgctagagatctgctgtactacgccgtgacccaggatgccatgctgatcttcgccaacctgagccggggcttcggccggcagggcaagcggaccttcatggccgagagacagtacacacggatggaggactggctgaccgccaagctggcctacgagggcctgagcaagacctacctgtccaagacactggcccagtacacctccaagacatgcagcaactgtgggtttaccatcaccagcgccgactacgacagggtgctggagaagctgaagaagacagcaacaggctggatgaccacaattaacggcaaggagctgaaggtggagggccagattacctactacaacagatacaagagacagaacgtagtcaaggacctgtccgtcgagctggatagactgagcgaagaatctgtgaacaacgacatctcctcctggacaaagggcagaagcggagaagctctgagcctcctgaagaaaagattctcccatagacccgtgcaggagaagttcgtgtgcctgaactgcggcttcgagacacacgcagccgagcaagccgccctgaacatcgccagatcctggctgttcctgcggagccaggagtacaagaaataccagacaaacaagacaaccggcaacaccgataagagagccttcgtcgagacctggcagtccttttaccggaagaagcttaaggaggtgtggaaacctgccgtgcggtctggcggatctggcggaggctccacaagcgcccaggaccccgtgaccttcgacgacatcagcgtgtacttcagcagggacgagtgggccctgctggacgccggccagaagcagctgtacagggaggtgatggccgagaactacagggccctggtgagcgtgggctacgtgatggaggagcccggcctggtgagccacatcgagcacgagcagcagggcagccccatcaggagcaggagcagcctgcacgccggcaggcactgcggcttcatcaccagccccaagaaaaagagaaaagtctaagctgccttctgcggggcttgccttctggccatgcccttcttctctcccttgcacctgtacctcttggtctttgaataaagcctgagtaggaaggctagcaaaaaaaaaaaaaaaaaaaaaaaaaaaaaaaaaaaaaaaaaaaaaaaaaaaaaaaaaaaaaaaaaaaaaaaaaaaaaaaa

SEQ ID NO: 5841 - RNA, 5797 nt, synthetic construct
  source 1..5797: mol_type = other RNA
aggaaataagagagaaaagaagagtaagaagaaatataagagccaccatggcccctaagaagaagcgtaaagtgagccggatggaacgcctcgtctacgaggtgcggcagaagtgcagaaacatcgaggacatctgcatctcctgcggatctctgaacgtgaccctggagcacccactgttcatcggcggcatgtgccagaactgtaaaaactgttttctggagtgtgcctatcaatacgacgatgacggctaccagagctactgcaccatctgttgcggcggaagagaggtgctgatgtgtggaaataacaactgctgccggtgcttctgcgtggaatgcgtggacctgctggtgggccccggcgccgcccaggccgctattaaggaagatccttggaactgctacatgtgcggccacaagggcacatacggcctgctgagacggagagaggactggcctagcagactgcagatgttcttcgccaataaccacgaccaggagttcgacccccctaaggtgtaccctcccgtccccgccgagaagagaaagcccatccgggtcctgagcctgttcgatggcatcgccaccggtctgctggtgctgaaggacctgggcatccaggtggataggtacattgcctccgaggtgtgcgaggactccatcaccgtgggaatggtgcgtcatcagggcaagatcatgtacgtgggcgacgtgcggagcgtgacacagaagcatatccaggagtggggccctttcgacctggtgatcggcggcagcccttgcaatgacctgagcatcgtgaacccagcccggaagggcctgtacgagggaaccggcagactgttcttcgagttttacagactgctgcacgacgcccggcctaaggaaggcgacgaccggcccttcttttggctgttcgagaatgtggtggccatgggagtcagcgacaagcgggatattagccggttcctggagagcaaccccgtgatgatcgatgccaaggaagtgagcgccgcccaccgggccagatacttctggggcaatctgcctggcatgaacagacccctggccagcaccgtgaacgacaagctggagctgcaggagtgcctggagcacggccggatcgccaagttcagcaaggtgagaaccatcaccacccgaagcaacagcatcaaacaaggcaaggaccagcactttcctgtgttcatgaacgagaaggaggacatcctgtggtgtaccgagatggagagagtgttcgggttcccagtccactacacagatgtcagcaacatgtctagactggccagacagagactgctgggaagaagctggtccgtccctgtgatcagacacctgttcgcccctctgaaggagtacttcgcctgcgtgagcagcggcaacagcaacgccaacagccggggccccagcttctctagcggcctggtgccactgtccctgagagggagccacatgggccccatggagatctacaaaaccgtgagcgcctggaagcggcagcctgtgcgcgtgctgagcctgtttcggaatatcgataaagtcctgaaaagcctgggattcctggagagcggctctggctccggcggtggcaccctgaagtacgtggaggatgtgacaaacgtggtcagacgggatgtggagaagtggggccccttcgatctggtgtacggcagcacccaacccctgggcagctcttgtgaccggtgccctggctggtacatgtttcagttccaccggatcctgcagtacgccctgccgagacaggagtcccagcggccattcttttggattttcatggacaacttgctgctgaccgaggatgaccaggaaactaccactcggttcctgcagaccgaagccgtgaccctgcaggacgtgagaggccgggactaccagaacgccatgcgggtgtggtccaacatccctggactgaaaagcaagcacgcacctctgacccctaaagaagaggagtacctgcaggcccaggtgcggagcagaagcaagctggacgcccctaaggtggatctgctggtgaagaattgcctcctgcccctgagagagtacttcaagtatttcagccagaatagtctgcccctgggcggcccaagcagcggcgcccctcctcccagcggcggcagcccagccggctccccaacctctaccgaggagggcacctctgagtccgccacccccgagagcggccctggcacctccaccgagcccagcgagggcagcgcacccggcagccctgccggcagccccacctccacagaggagggaaccagcaccgagcccagcgaaggcagcgccccaggcaccagcaccgagcctagtgagggcggctctggcggcggcagcgcccaggagattaaacggatcaacaagatcagaagaagacttgtgaaagacagcaacaccaagaaggccggcaagacaggccccatgaaaaccctgctggttagagtgatgacacccgatctgagagagcggctggaaaacctgagaaagaagcctgaaaatatcccccagcccatcagcaatacatctagagccaacctgaataagctgctgaccgattacaccgaaatgaagaaggcgatcctgcatgtgtactgggaagagttccagaaggaccctgtgggcctgatgagccgggtggcccagcctgccagcaagaagatcgatcagaacaagctgaaacctgagatggacgagaagggcaacctgaccaccgccggctttgcctgctctcagtgtggccagcccctgttcgtgtacaagctggagcaggtgtctgagaagggcaaggcttacaccaactacttcggacggtgcaatgtggccgagcacgaaaagctgatcctgctggcccagctgaagcccgagaaggatagcgacgaagccgtgacatatagcctgggaaagtttgggcagagggccctggatttctacagcattcatgtgaccaaggagtccacccaccccgtgaagcccctggcccagatcgccggaaacagatacgcctccggacctgtgggaaaggccctgagcgacgcatgtatgggcacaatcgcctccttcctgtctaagtaccaggacatcatcatcgaacaccagaaggtggtgaagggcaaccagaagagactggagagcctgcgggagctggccggcaaggaaaacctggaataccctagcgtgaccctgccacctcagcctcacaccaaggagggcgttgatgcctacaacgaagtgatcgcccgggtgcgaatgtgggtgaacctgaacctgtggcagaagctgaagctaagcagagatgatgccaagcctctgctgagactgaagggattcccttcctttcctctggtcgagagacaggccaacgaagtggactggtgggacatggtgtgtaacgtgaagaagctgatcaacgagaaaaaggaggatggcaaggtgttttggcagaatctggctggctacaagagacaggaagccctgagaccatacctgagcagcgaggaagatcggaagaagggaaagaaattcgctcggtaccagctgggcgacctgctgctgcacctggaaaagaagcacggcgaggactggggaaaggtgtacgacgaggcctgggagcggattgacaagaaagtggaaggcctgagcaagcacatcaagctggaagaggaacggagaagcgaggacgcccagagcaaggccgccctgaccgactggctgcgggctaaggccagcttcgtgatcgagggcctgaaggaggccgacaaggacgagttctgcagatgcgagctgaagctgcagaagtggtacggggacctgcggggaaagcccttcgccatcgaagccgagaacagcatcctggacatcagcggcttcagcaagcagtacaactgtgccttcatctggcagaaggacggcgtgaagaagctgaacctgtacctgatcatcaactacttcaagggcggcaagctgcggttcaagaagatcaaacctgaagccttcgaagccaacagattctacaccgtgatcaacaaaaagagcggcgagatcgtgcccatggaggtgaacttcaacttcgacgaccccaacctgatcatcctgcctctggcctttggcaagagacagggcagagaattcatctggaacgacctgctgtccctggaaaccggcagcctgaagctggccaacggaagagtgatcgagaagacactgtacaacagaagaacccggcaggatgagcctgccctgttcgtggccctgaccttcgagcggcgggaggtcctggactcctccaatatcaaaccaatgaacctgatcggcgtggcaagaggcgaaaacatccccgccgtgatcgccctgaccgaccccgagggctgcccactgagccggtttaaggatagcctgggaaacccaacccacatcctgagaatcggcgagagctataaggagaagcagcggaccatccaggccaagaaggaggtggagcagcggagagccggcggctacagccggaagtacgccagcaaagccaagaatctggcagacgatatggtgagaaacaccgctagagatctgctgtactacgccgtgacccaggatgccatgctgatcttcgccaacctgagccggggcttcggccggcagggcaagcggaccttcatggccgagagacagtacacacggatggaggactggctgaccgccaagctggcctacgagggcctgagcaagacctacctgtccaagacactggcccagtacacctccaagacatgcagcaactgtgggtttaccatcaccagcgccgactacgacagggtgctggagaagctgaagaagacagcaacaggctggatgaccacaattaacggcaaggagctgaaggtggagggccagattacctactacaacagatacaagagacagaacgtagtcaaggacctgtccgtcgagctggatagactgagcgaagaatctgtgaacaacgacatctcctcctggacaaagggcagaagcggagaagctctgagcctcctgaagaaaagattctcccatagacccgtgcaggagaagttcgtgtgcctgaactgcggcttcgagacacacgcagccgagcaagccgccctgaacatcgccagatcctggctgttcctgcggagccaggagtacaagaaataccagacaaacaagacaaccggcaacaccgataagagagccttcgtcgagacctggcagtccttttaccggaagaagcttaaggaggtgtggaaacctgccgtgcggtctggcggatctggcggaggctccacaagcatggccttcgaggacgtggccgtgtacttcagccaggaggagtggggcctgctggacaccgcccagagggccctgtacaggcacgtgatgctggagaacttcaccctggtgaccagcctgggcctgagcaccagcaggccccacgtggtgatccagctggagaggggcgaggagccctgggtgcccagcggcaaggacatgaccctggccaggaacacctacaggaggctgaacgccggcgagaccagccccaagaaaaagagaaaagtctaagctgccttctgcggggcttgccttctggccatgcccttcttctctcccttgcacctgtacctcttggtctttgaataaagcctgagtaggaaggctagcaaaaaaaaaaaaaaaaaaaaaaaaaaaaaaaaaaaaaaaaaaaaaaaaaaaaaaaaaaaaaaaaaaaaaaaaaaaaaaaa

SEQ ID NO: 5842 - RNA, 5797 nt, synthetic construct
  source 1..5797: mol_type = other RNA
aggaaataagagagaaaagaagagtaagaagaaatataagagccaccatggcccctaagaagaagcgtaaagtgagccggatggaacgcctcgtctacgaggtgcggcagaagtgcagaaacatcgaggacatctgcatctcctgcggatctctgaacgtgaccctggagcacccactgttcatcggcggcatgtgccagaactgtaaaaactgttttctggagtgtgcctatcaatacgacgatgacggctaccagagctactgcaccatctgttgcggcggaagagaggtgctgatgtgtggaaataacaactgctgccggtgcttctgcgtggaatgcgtggacctgctggtgggccccggcgccgcccaggccgctattaaggaagatccttggaactgctacatgtgcggccacaagggcacatacggcctgctgagacggagagaggactggcctagcagactgcagatgttcttcgccaataaccacgaccaggagttcgacccccctaaggtgtaccctcccgtccccgccgagaagagaaagcccatccgggtcctgagcctgttcgatggcatcgccaccggtctgctggtgctgaaggacctgggcatccaggtggataggtacattgcctccgaggtgtgcgaggactccatcaccgtgggaatggtgcgtcatcagggcaagatcatgtacgtgggcgacgtgcggagcgtgacacagaagcatatccaggagtggggccctttcgacctggtgatcggcggcagcccttgcaatgacctgagcatcgtgaacccagcccggaagggcctgtacgagggaaccggcagactgttcttcgagttttacagactgctgcacgacgcccggcctaaggaaggcgacgaccggcccttcttttggctgttcgagaatgtggtggccatgggagtcagcgacaagcgggatattagccggttcctggagagcaaccccgtgatgatcgatgccaaggaagtgagcgccgcccaccgggccagatacttctggggcaatctgcctggcatgaacagacccctggccagcaccgtgaacgacaagctggagctgcaggagtgcctggagcacggccggatcgccaagttcagcaaggtgagaaccatcaccacccgaagcaacagcatcaaacaaggcaaggaccagcactttcctgtgttcatgaacgagaaggaggacatcctgtggtgtaccgagatggagagagtgttcgggttcccagtccactacacagatgtcagcaacatgtctagactggccagacagagactgctgggaagaagctggtccgtccctgtgatcagacacctgttcgcccctctgaaggagtacttcgcctgcgtgagcagcggcaacagcaacgccaacagccggggccccagcttctctagcggcctggtgccactgtccctgagagggagccacatgggccccatggagatctacaaaaccgtgagcgcctggaagcggcagcctgtgcgcgtgctgagcctgtttcggaatatcgataaagtcctgaaaagcctgggattcctggagagcggctctggctccggcggtggcaccctgaagtacgtggaggatgtgacaaacgtggtcagacgggatgtggagaagtggggccccttcgatctggtgtacggcagcacccaacccctgggcagctcttgtgaccggtgccctggctggtacatgtttcagttccaccggatcctgcagtacgccctgccgagacaggagtcccagcggccattcttttggattttcatggacaacttgctgctgaccgaggatgaccaggaaactaccactcggttcctgcagaccgaagccgtgaccctgcaggacgtgagaggccgggactaccagaacgccatgcgggtgtggtccaacatccctggactgaaaagcaagcacgcacctctgacccctaaagaagaggagtacctgcaggcccaggtgcggagcagaagcaagctggacgcccctaaggtggatctgctggtgaagaattgcctcctgcccctgagagagtacttcaagtatttcagccagaatagtctgcccctgggcggcccaagcagcggcgcccctcctcccagcggcggcagcccagccggctccccaacctctaccgaggagggcacctctgagtccgccacccccgagagcggccctggcacctccaccgagcccagcgagggcagcgcacccggcagccctgccggcagccccacctccacagaggagggaaccagcaccgagcccagcgaaggcagcgccccaggcaccagcaccgagcctagtgagggcggctctggcggcggcagcgcccaggagattaaacggatcaacaagatcagaagaagacttgtgaaagacagcaacaccaagaaggccggcaagacaggccccatgaaaaccctgctggttagagtgatgacacccgatctgagagagcggctggaaaacctgagaaagaagcctgaaaatatcccccagcccatcagcaatacatctagagccaacctgaataagctgctgaccgattacaccgaaatgaagaaggcgatcctgcatgtgtactgggaagagttccagaaggaccctgtgggcctgatgagccgggtggcccagcctgccagcaagaagatcgatcagaacaagctgaaacctgagatggacgagaagggcaacctgaccaccgccggctttgcctgctctcagtgtggccagcccctgttcgtgtacaagctggagcaggtgtctgagaagggcaaggcttacaccaactacttcggacggtgcaatgtggccgagcacgaaaagctgatcctgctggcccagctgaagcccgagaaggatagcgacgaagccgtgacatatagcctgggaaagtttgggcagagggccctggatttctacagcattcatgtgaccaaggagtccacccaccccgtgaagcccctggcccagatcgccggaaacagatacgcctccggacctgtgggaaaggccctgagcgacgcatgtatgggcacaatcgcctccttcctgtctaagtaccaggacatcatcatcgaacaccagaaggtggtgaagggcaaccagaagagactggagagcctgcgggagctggccggcaaggaaaacctggaataccctagcgtgaccctgccacctcagcctcacaccaaggagggcgttgatgcctacaacgaagtgatcgcccgggtgcgaatgtgggtgaacctgaacctgtggcagaagctgaagctaagcagagatgatgccaagcctctgctgagactgaagggattcccttcctttcctctggtcgagagacaggccaacgaagtggactggtgggacatggtgtgtaacgtgaagaagctgatcaacgagaaaaaggaggatggcaaggtgttttggcagaatctggctggctacaagagacaggaagccctgagaccatacctgagcagcgaggaagatcggaagaagggaaagaaattcgctcggtaccagctgggcgacctgctgctgcacctggaaaagaagcacggcgaggactggggaaaggtgtacgacgaggcctgggagcggattgacaagaaagtggaaggcctgagcaagcacatcaagctggaagaggaacggagaagcgaggacgcccagagcaaggccgccctgaccgactggctgcgggctaaggccagcttcgtgatcgagggcctgaaggaggccgacaaggacgagttctgcagatgcgagctgaagctgcagaagtggtacggggacctgcggggaaagcccttcgccatcgaagccgagaacagcatcctggacatcagcggcttcagcaagcagtacaactgtgccttcatctggcagaaggacggcgtgaagaagctgaacctgtacctgatcatcaactacttcaagggcggcaagctgcggttcaagaagatcaaacctgaagccttcgaagccaacagattctacaccgtgatcaacaaaaagagcggcgagatcgtgcccatggaggtgaacttcaacttcgacgaccccaacctgatcatcctgcctctggcctttggcaagagacagggcagagaattcatctggaacgacctgctgtccctggaaaccggcagcctgaagctggccaacggaagagtgatcgagaagacactgtacaacagaagaacccggcaggatgagcctgccctgttcgtggccctgaccttcgagcggcgggaggtcctggactcctccaatatcaaaccaatgaacctgatcggcgtggcaagaggcgaaaacatccccgccgtgatcgccctgaccgaccccgagggctgcccactgagccggtttaaggatagcctgggaaacccaacccacatcctgagaatcggcgagagctataaggagaagcagcggaccatccaggccaagaaggaggtggagcagcggagagccggcggctacagccggaagtacgccagcaaagccaagaatctggcagacgatatggtgagaaacaccgctagagatctgctgtactacgccgtgacccaggatgccatgctgatcttcgccaacctgagccggggcttcggccggcagggcaagcggaccttcatggccgagagacagtacacacggatggaggactggctgaccgccaagctggcctacgagggcctgagcaagacctacctgtccaagacactggcccagtacacctccaagacatgcagcaactgtgggtttaccatcaccagcgccgactacgacagggtgctggagaagctgaagaagacagcaacaggctggatgaccacaattaacggcaaggagctgaaggtggagggccagattacctactacaacagatacaagagacagaacgtagtcaaggacctgtccgtcgagctggatagactgagcgaagaatctgtgaacaacgacatctcctcctggacaaagggcagaagcggagaagctctgagcctcctgaagaaaagattctcccatagacccgtgcaggagaagttcgtgtgcctgaactgcggcttcgagacacacgcagccgagcaagccgccctgaacatcgccagatcctggctgttcctgcggagccaggagtacaagaaataccagacaaacaagacaaccggcaacaccgataagagagccttcgtcgagacctggcagtccttttaccggaagaagcttaaggaggtgtggaaacctgccgtgcggtctggcggatctggcggaggctccacaagcatggtgaccttcgaggacgtggccgtgcacttcaccaagaccgagtggaccggcctgagccccgcccagagggccctgtacaggagcgtgatgctggagaacttcggcaacctgaccgccctgggctaccccgtgcccaagcccgccctgatcagcctgctggagggcggcgacatggactggggcctggaggcccaggacgacccccccgccgagaggaccaagaacgtgtgcaaggtgatcaccagccccaagaaaaagagaaaagtctaagctgccttctgcggggcttgccttctggccatgcccttcttctctcccttgcacctgtacctcttggtctttgaataaagcctgagtaggaaggctagcaaaaaaaaaaaaaaaaaaaaaaaaaaaaaaaaaaaaaaaaaaaaaaaaaaaaaaaaaaaaaaaaaaaaaaaaaaaaaaaa

SEQ ID NO: 5843 - RNA, 5797 nt, synthetic construct
  source 1..5797: mol_type = other RNA
aggaaataagagagaaaagaagagtaagaagaaatataagagccaccatggcccctaagaagaagcgtaaagtgagccggatggaacgcctcgtctacgaggtgcggcagaagtgcagaaacatcgaggacatctgcatctcctgcggatctctgaacgtgaccctggagcacccactgttcatcggcggcatgtgccagaactgtaaaaactgttttctggagtgtgcctatcaatacgacgatgacggctaccagagctactgcaccatctgttgcggcggaagagaggtgctgatgtgtggaaataacaactgctgccggtgcttctgcgtggaatgcgtggacctgctggtgggccccggcgccgcccaggccgctattaaggaagatccttggaactgctacatgtgcggccacaagggcacatacggcctgctgagacggagagaggactggcctagcagactgcagatgttcttcgccaataaccacgaccaggagttcgacccccctaaggtgtaccctcccgtccccgccgagaagagaaagcccatccgggtcctgagcctgttcgatggcatcgccaccggtctgctggtgctgaaggacctgggcatccaggtggataggtacattgcctccgaggtgtgcgaggactccatcaccgtgggaatggtgcgtcatcagggcaagatcatgtacgtgggcgacgtgcggagcgtgacacagaagcatatccaggagtggggccctttcgacctggtgatcggcggcagcccttgcaatgacctgagcatcgtgaacccagcccggaagggcctgtacgagggaaccggcagactgttcttcgagttttacagactgctgcacgacgcccggcctaaggaaggcgacgaccggcccttcttttggctgttcgagaatgtggtggccatgggagtcagcgacaagcgggatattagccggttcctggagagcaaccccgtgatgatcgatgccaaggaagtgagcgccgcccaccgggccagatacttctggggcaatctgcctggcatgaacagacccctggccagcaccgtgaacgacaagctggagctgcaggagtgcctggagcacggccggatcgccaagttcagcaaggtgagaaccatcaccacccgaagcaacagcatcaaacaaggcaaggaccagcactttcctgtgttcatgaacgagaaggaggacatcctgtggtgtaccgagatggagagagtgttcgggttcccagtccactacacagatgtcagcaacatgtctagactggccagacagagactgctgggaagaagctggtccgtccctgtgatcagacacctgttcgcccctctgaaggagtacttcgcctgcgtgagcagcggcaacagcaacgccaacagccggggccccagcttctctagcggcctggtgccactgtccctgagagggagccacatgggccccatggagatctacaaaaccgtgagcgcctggaagcggcagcctgtgcgcgtgctgagcctgtttcggaatatcgataaagtcctgaaaagcctgggattcctggagagcggctctggctccggcggtggcaccctgaagtacgtggaggatgtgacaaacgtggtcagacgggatgtggagaagtggggccccttcgatctggtgtacggcagcacccaacccctgggcagctcttgtgaccggtgccctggctggtacatgtttcagttccaccggatcctgcagtacgccctgccgagacaggagtcccagcggccattcttttggattttcatggacaacttgctgctgaccgaggatgaccaggaaactaccactcggttcctgcagaccgaagccgtgaccctgcaggacgtgagaggccgggactaccagaacgccatgcgggtgtggtccaacatccctggactgaaaagcaagcacgcacctctgacccctaaagaagaggagtacctgcaggcccaggtgcggagcagaagcaagctggacgcccctaaggtggatctgctggtgaagaattgcctcctgcccctgagagagtacttcaagtatttcagccagaatagtctgcccctgggcggcccaagcagcggcgcccctcctcccagcggcggcagcccagccggctccccaacctctaccgaggagggcacctctgagtccgccacccccgagagcggccctggcacctccaccgagcccagcgagggcagcgcacccggcagccctgccggcagccccacctccacagaggagggaaccagcaccgagcccagcgaaggcagcgccccaggcaccagcaccgagcctagtgagggcggctctggcggcggcagcgcccaggagattaaacggatcaacaagatcagaagaagacttgtgaaagacagcaacaccaagaaggccggcaagacaggccccatgaaaaccctgctggttagagtgatgacacccgatctgagagagcggctggaaaacctgagaaagaagcctgaaaatatcccccagcccatcagcaatacatctagagccaacctgaataagctgctgaccgattacaccgaaatgaagaaggcgatcctgcatgtgtactgggaagagttccagaaggaccctgtgggcctgatgagccgggtggcccagcctgccagcaagaagatcgatcagaacaagctgaaacctgagatggacgagaagggcaacctgaccaccgccggctttgcctgctctcagtgtggccagcccctgttcgtgtacaagctggagcaggtgtctgagaagggcaaggcttacaccaactacttcggacggtgcaatgtggccgagcacgaaaagctgatcctgctggcccagctgaagcccgagaaggatagcgacgaagccgtgacatatagcctgggaaagtttgggcagagggccctggatttctacagcattcatgtgaccaaggagtccacccaccccgtgaagcccctggcccagatcgccggaaacagatacgcctccggacctgtgggaaaggccctgagcgacgcatgtatgggcacaatcgcctccttcctgtctaagtaccaggacatcatcatcgaacaccagaaggtggtgaagggcaaccagaagagactggagagcctgcgggagctggccggcaaggaaaacctggaataccctagcgtgaccctgccacctcagcctcacaccaaggagggcgttgatgcctacaacgaagtgatcgcccgggtgcgaatgtgggtgaacctgaacctgtggcagaagctgaagctaagcagagatgatgccaagcctctgctgagactgaagggattcccttcctttcctctggtcgagagacaggccaacgaagtggactggtgggacatggtgtgtaacgtgaagaagctgatcaacgagaaaaaggaggatggcaaggtgttttggcagaatctggctggctacaagagacaggaagccctgagaccatacctgagcagcgaggaagatcggaagaagggaaagaaattcgctcggtaccagctgggcgacctgctgctgcacctggaaaagaagcacggcgaggactggggaaaggtgtacgacgaggcctgggagcggattgacaagaaagtggaaggcctgagcaagcacatcaagctggaagaggaacggagaagcgaggacgcccagagcaaggccgccctgaccgactggctgcgggctaaggccagcttcgtgatcgagggcctgaaggaggccgacaaggacgagttctgcagatgcgagctgaagctgcagaagtggtacggggacctgcggggaaagcccttcgccatcgaagccgagaacagcatcctggacatcagcggcttcagcaagcagtacaactgtgccttcatctggcagaaggacggcgtgaagaagctgaacctgtacctgatcatcaactacttcaagggcggcaagctgcggttcaagaagatcaaacctgaagccttcgaagccaacagattctacaccgtgatcaacaaaaagagcggcgagatcgtgcccatggaggtgaacttcaacttcgacgaccccaacctgatcatcctgcctctggcctttggcaagagacagggcagagaattcatctggaacgacctgctgtccctggaaaccggcagcctgaagctggccaacggaagagtgatcgagaagacactgtacaacagaagaacccggcaggatgagcctgccctgttcgtggccctgaccttcgagcggcgggaggtcctggactcctccaatatcaaaccaatgaacctgatcggcgtggcaagaggcgaaaacatccccgccgtgatcgccctgaccgaccccgagggctgcccactgagccggtttaaggatagcctgggaaacccaacccacatcctgagaatcggcgagagctataaggagaagcagcggaccatccaggccaagaaggaggtggagcagcggagagccggcggctacagccggaagtacgccagcaaagccaagaatctggcagacgatatggtgagaaacaccgctagagatctgctgtactacgccgtgacccaggatgccatgctgatcttcgccaacctgagccggggcttcggccggcagggcaagcggaccttcatggccgagagacagtacacacggatggaggactggctgaccgccaagctggcctacgagggcctgagcaagacctacctgtccaagacactggcccagtacacctccaagacatgcagcaactgtgggtttaccatcaccagcgccgactacgacagggtgctggagaagctgaagaagacagcaacaggctggatgaccacaattaacggcaaggagctgaaggtggagggccagattacctactacaacagatacaagagacagaacgtagtcaaggacctgtccgtcgagctggatagactgagcgaagaatctgtgaacaacgacatctcctcctggacaaagggcagaagcggagaagctctgagcctcctgaagaaaagattctcccatagacccgtgcaggagaagttcgtgtgcctgaactgcggcttcgagacacacgcagccgagcaagccgccctgaacatcgccagatcctggctgttcctgcggagccaggagtacaagaaataccagacaaacaagacaaccggcaacaccgataagagagccttcgtcgagacctggcagtccttttaccggaagaagcttaaggaggtgtggaaacctgccgtgcggtctggcggatctggcggaggctccacaagcatggccttcgaggacgtggccgtgtacttcagccaggaggagtggggcctgctggacaccgcccagagggccctgtacaggcacgtgatgctggacaacttcaccctggtgaccagcctgggcctgagcaccagcaggccccacgtggtgatccagctggagaggggcgaggagccctgggtgcccagcggcaaggacatgaccctggccaggaacacctacaggaggctgaacgccggcgagaccagccccaagaaaaagagaaaagtctaagctgccttctgcggggcttgccttctggccatgcccttcttctctcccttgcacctgtacctcttggtctttgaataaagcctgagtaggaaggctagcaaaaaaaaaaaaaaaaaaaaaaaaaaaaaaaaaaaaaaaaaaaaaaaaaaaaaaaaaaaaaaaaaaaaaaaaaaaaaaaa

SEQ ID NO: 5844 - RNA, 5797 nt, synthetic construct
  source 1..5797: mol_type = other RNA
aggaaataagagagaaaagaagagtaagaagaaatataagagccaccatggcccctaagaagaagcgtaaagtgagccggatggaacgcctcgtctacgaggtgcggcagaagtgcagaaacatcgaggacatctgcatctcctgcggatctctgaacgtgaccctggagcacccactgttcatcggcggcatgtgccagaactgtaaaaactgttttctggagtgtgcctatcaatacgacgatgacggctaccagagctactgcaccatctgttgcggcggaagagaggtgctgatgtgtggaaataacaactgctgccggtgcttctgcgtggaatgcgtggacctgctggtgggccccggcgccgcccaggccgctattaaggaagatccttggaactgctacatgtgcggccacaagggcacatacggcctgctgagacggagagaggactggcctagcagactgcagatgttcttcgccaataaccacgaccaggagttcgacccccctaaggtgtaccctcccgtccccgccgagaagagaaagcccatccgggtcctgagcctgttcgatggcatcgccaccggtctgctggtgctgaaggacctgggcatccaggtggataggtacattgcctccgaggtgtgcgaggactccatcaccgtgggaatggtgcgtcatcagggcaagatcatgtacgtgggcgacgtgcggagcgtgacacagaagcatatccaggagtggggccctttcgacctggtgatcggcggcagcccttgcaatgacctgagcatcgtgaacccagcccggaagggcctgtacgagggaaccggcagactgttcttcgagttttacagactgctgcacgacgcccggcctaaggaaggcgacgaccggcccttcttttggctgttcgagaatgtggtggccatgggagtcagcgacaagcgggatattagccggttcctggagagcaaccccgtgatgatcgatgccaaggaagtgagcgccgcccaccgggccagatacttctggggcaatctgcctggcatgaacagacccctggccagcaccgtgaacgacaagctggagctgcaggagtgcctggagcacggccggatcgccaagttcagcaaggtgagaaccatcaccacccgaagcaacagcatcaaacaaggcaaggaccagcactttcctgtgttcatgaacgagaaggaggacatcctgtggtgtaccgagatggagagagtgttcgggttcccagtccactacacagatgtcagcaacatgtctagactggccagacagagactgctgggaagaagctggtccgtccctgtgatcagacacctgttcgcccctctgaaggagtacttcgcctgcgtgagcagcggcaacagcaacgccaacagccggggccccagcttctctagcggcctggtgccactgtccctgagagggagccacatgggccccatggagatctacaaaaccgtgagcgcctggaagcggcagcctgtgcgcgtgctgagcctgtttcggaatatcgataaagtcctgaaaagcctgggattcctggagagcggctctggctccggcggtggcaccctgaagtacgtggaggatgtgacaaacgtggtcagacgggatgtggagaagtggggccccttcgatctggtgtacggcagcacccaacccctgggcagctcttgtgaccggtgccctggctggtacatgtttcagttccaccggatcctgcagtacgccctgccgagacaggagtcccagcggccattcttttggattttcatggacaacttgctgctgaccgaggatgaccaggaaactaccactcggttcctgcagaccgaagccgtgaccctgcaggacgtgagaggccgggactaccagaacgccatgcgggtgtggtccaacatccctggactgaaaagcaagcacgcacctctgacccctaaagaagaggagtacctgcaggcccaggtgcggagcagaagcaagctggacgcccctaaggtggatctgctggtgaagaattgcctcctgcccctgagagagtacttcaagtatttcagccagaatagtctgcccctgggcggcccaagcagcggcgcccctcctcccagcggcggcagcccagccggctccccaacctctaccgaggagggcacctctgagtccgccacccccgagagcggccctggcacctccaccgagcccagcgagggcagcgcacccggcagccctgccggcagccccacctccacagaggagggaaccagcaccgagcccagcgaaggcagcgccccaggcaccagcaccgagcctagtgagggcggctctggcggcggcagcgcccaggagattaaacggatcaacaagatcagaagaagacttgtgaaagacagcaacaccaagaaggccggcaagacaggccccatgaaaaccctgctggttagagtgatgacacccgatctgagagagcggctggaaaacctgagaaagaagcctgaaaatatcccccagcccatcagcaatacatctagagccaacctgaataagctgctgaccgattacaccgaaatgaagaaggcgatcctgcatgtgtactgggaagagttccagaaggaccctgtgggcctgatgagccgggtggcccagcctgccagcaagaagatcgatcagaacaagctgaaacctgagatggacgagaagggcaacctgaccaccgccggctttgcctgctctcagtgtggccagcccctgttcgtgtacaagctggagcaggtgtctgagaagggcaaggcttacaccaactacttcggacggtgcaatgtggccgagcacgaaaagctgatcctgctggcccagctgaagcccgagaaggatagcgacgaagccgtgacatatagcctgggaaagtttgggcagagggccctggatttctacagcattcatgtgaccaaggagtccacccaccccgtgaagcccctggcccagatcgccggaaacagatacgcctccggacctgtgggaaaggccctgagcgacgcatgtatgggcacaatcgcctccttcctgtctaagtaccaggacatcatcatcgaacaccagaaggtggtgaagggcaaccagaagagactggagagcctgcgggagctggccggcaaggaaaacctggaataccctagcgtgaccctgccacctcagcctcacaccaaggagggcgttgatgcctacaacgaagtgatcgcccgggtgcgaatgtgggtgaacctgaacctgtggcagaagctgaagctaagcagagatgatgccaagcctctgctgagactgaagggattcccttcctttcctctggtcgagagacaggccaacgaagtggactggtgggacatggtgtgtaacgtgaagaagctgatcaacgagaaaaaggaggatggcaaggtgttttggcagaatctggctggctacaagagacaggaagccctgagaccatacctgagcagcgaggaagatcggaagaagggaaagaaattcgctcggtaccagctgggcgacctgctgctgcacctggaaaagaagcacggcgaggactggggaaaggtgtacgacgaggcctgggagcggattgacaagaaagtggaaggcctgagcaagcacatcaagctggaagaggaacggagaagcgaggacgcccagagcaaggccgccctgaccgactggctgcgggctaaggccagcttcgtgatcgagggcctgaaggaggccgacaaggacgagttctgcagatgcgagctgaagctgcagaagtggtacggggacctgcggggaaagcccttcgccatcgaagccgagaacagcatcctggacatcagcggcttcagcaagcagtacaactgtgccttcatctggcagaaggacggcgtgaagaagctgaacctgtacctgatcatcaactacttcaagggcggcaagctgcggttcaagaagatcaaacctgaagccttcgaagccaacagattctacaccgtgatcaacaaaaagagcggcgagatcgtgcccatggaggtgaacttcaacttcgacgaccccaacctgatcatcctgcctctggcctttggcaagagacagggcagagaattcatctggaacgacctgctgtccctggaaaccggcagcctgaagctggccaacggaagagtgatcgagaagacactgtacaacagaagaacccggcaggatgagcctgccctgttcgtggccctgaccttcgagcggcgggaggtcctggactcctccaatatcaaaccaatgaacctgatcggcgtggcaagaggcgaaaacatccccgccgtgatcgccctgaccgaccccgagggctgcccactgagccggtttaaggatagcctgggaaacccaacccacatcctgagaatcggcgagagctataaggagaagcagcggaccatccaggccaagaaggaggtggagcagcggagagccggcggctacagccggaagtacgccagcaaagccaagaatctggcagacgatatggtgagaaacaccgctagagatctgctgtactacgccgtgacccaggatgccatgctgatcttcgccaacctgagccggggcttcggccggcagggcaagcggaccttcatggccgagagacagtacacacggatggaggactggctgaccgccaagctggcctacgagggcctgagcaagacctacctgtccaagacactggcccagtacacctccaagacatgcagcaactgtgggtttaccatcaccagcgccgactacgacagggtgctggagaagctgaagaagacagcaacaggctggatgaccacaattaacggcaaggagctgaaggtggagggccagattacctactacaacagatacaagagacagaacgtagtcaaggacctgtccgtcgagctggatagactgagcgaagaatctgtgaacaacgacatctcctcctggacaaagggcagaagcggagaagctctgagcctcctgaagaaaagattctcccatagacccgtgcaggagaagttcgtgtgcctgaactgcggcttcgagacacacgcagccgagcaagccgccctgaacatcgccagatcctggctgttcctgcggagccaggagtacaagaaataccagacaaacaagacaaccggcaacaccgataagagagccttcgtcgagacctggcagtccttttaccggaagaagcttaaggaggtgtggaaacctgccgtgcggtctggcggatctggcggaggctccacaagcgtgcaggagcccgtgaccttcaaggacgtggccgtggacttcacccaggaggagtggggccagctggacctggtgcagaggaccctgtacagggacgtgatgctggagacctacggccacctgctgagcgtgggcaaccagatcaccaagcccgaggtgatcagcctgctggagcagggcgaggagccctggagcgtggagcaggcctacccccagagcacctgccccgagtggatgaggaacaccagccccaagaaaaagagaaaagtctaagctgccttctgcggggcttgccttctggccatgcccttcttctctcccttgcacctgtacctcttggtctttgaataaagcctgagtaggaaggctagcaaaaaaaaaaaaaaaaaaaaaaaaaaaaaaaaaaaaaaaaaaaaaaaaaaaaaaaaaaaaaaaaaaaaaaaaaaaaaaaa

SEQ ID NO: 5845 - RNA, 5797 nt, synthetic construct
  source 1..5797: mol_type = other RNA
aggaaataagagagaaaagaagagtaagaagaaatataagagccaccatggcccctaagaagaagcgtaaagtgagccggatggaacgcctcgtctacgaggtgcggcagaagtgcagaaacatcgaggacatctgcatctcctgcggatctctgaacgtgaccctggagcacccactgttcatcggcggcatgtgccagaactgtaaaaactgttttctggagtgtgcctatcaatacgacgatgacggctaccagagctactgcaccatctgttgcggcggaagagaggtgctgatgtgtggaaataacaactgctgccggtgcttctgcgtggaatgcgtggacctgctggtgggccccggcgccgcccaggccgctattaaggaagatccttggaactgctacatgtgcggccacaagggcacatacggcctgctgagacggagagaggactggcctagcagactgcagatgttcttcgccaataaccacgaccaggagttcgacccccctaaggtgtaccctcccgtccccgccgagaagagaaagcccatccgggtcctgagcctgttcgatggcatcgccaccggtctgctggtgctgaaggacctgggcatccaggtggataggtacattgcctccgaggtgtgcgaggactccatcaccgtgggaatggtgcgtcatcagggcaagatcatgtacgtgggcgacgtgcggagcgtgacacagaagcatatccaggagtggggccctttcgacctggtgatcggcggcagcccttgcaatgacctgagcatcgtgaacccagcccggaagggcctgtacgagggaaccggcagactgttcttcgagttttacagactgctgcacgacgcccggcctaaggaaggcgacgaccggcccttcttttggctgttcgagaatgtggtggccatgggagtcagcgacaagcgggatattagccggttcctggagagcaaccccgtgatgatcgatgccaaggaagtgagcgccgcccaccgggccagatacttctggggcaatctgcctggcatgaacagacccctggccagcaccgtgaacgacaagctggagctgcaggagtgcctggagcacggccggatcgccaagttcagcaaggtgagaaccatcaccacccgaagcaacagcatcaaacaaggcaaggaccagcactttcctgtgttcatgaacgagaaggaggacatcctgtggtgtaccgagatggagagagtgttcgggttcccagtccactacacagatgtcagcaacatgtctagactggccagacagagactgctgggaagaagctggtccgtccctgtgatcagacacctgttcgcccctctgaaggagtacttcgcctgcgtgagcagcggcaacagcaacgccaacagccggggccccagcttctctagcggcctggtgccactgtccctgagagggagccacatgggccccatggagatctacaaaaccgtgagcgcctggaagcggcagcctgtgcgcgtgctgagcctgtttcggaatatcgataaagtcctgaaaagcctgggattcctggagagcggctctggctccggcggtggcaccctgaagtacgtggaggatgtgacaaacgtggtcagacgggatgtggagaagtggggccccttcgatctggtgtacggcagcacccaacccctgggcagctcttgtgaccggtgccctggctggtacatgtttcagttccaccggatcctgcagtacgccctgccgagacaggagtcccagcggccattcttttggattttcatggacaacttgctgctgaccgaggatgaccaggaaactaccactcggttcctgcagaccgaagccgtgaccctgcaggacgtgagaggccgggactaccagaacgccatgcgggtgtggtccaacatccctggactgaaaagcaagcacgcacctctgacccctaaagaagaggagtacctgcaggcccaggtgcggagcagaagcaagctggacgcccctaaggtggatctgctggtgaagaattgcctcctgcccctgagagagtacttcaagtatttcagccagaatagtctgcccctgggcggcccaagcagcggcgcccctcctcccagcggcggcagcccagccggctccccaacctctaccgaggagggcacctctgagtccgccacccccgagagcggccctggcacctccaccgagcccagcgagggcagcgcacccggcagccctgccggcagccccacctccacagaggagggaaccagcaccgagcccagcgaaggcagcgccccaggcaccagcaccgagcctagtgagggcggctctggcggcggcagcgcccaggagattaaacggatcaacaagatcagaagaagacttgtgaaagacagcaacaccaagaaggccggcaagacaggccccatgaaaaccctgctggttagagtgatgacacccgatctgagagagcggctggaaaacctgagaaagaagcctgaaaatatcccccagcccatcagcaatacatctagagccaacctgaataagctgctgaccgattacaccgaaatgaagaaggcgatcctgcatgtgtactgggaagagttccagaaggaccctgtgggcctgatgagccgggtggcccagcctgccagcaagaagatcgatcagaacaagctgaaacctgagatggacgagaagggcaacctgaccaccgccggctttgcctgctctcagtgtggccagcccctgttcgtgtacaagctggagcaggtgtctgagaagggcaaggcttacaccaactacttcggacggtgcaatgtggccgagcacgaaaagctgatcctgctggcccagctgaagcccgagaaggatagcgacgaagccgtgacatatagcctgggaaagtttgggcagagggccctggatttctacagcattcatgtgaccaaggagtccacccaccccgtgaagcccctggcccagatcgccggaaacagatacgcctccggacctgtgggaaaggccctgagcgacgcatgtatgggcacaatcgcctccttcctgtctaagtaccaggacatcatcatcgaacaccagaaggtggtgaagggcaaccagaagagactggagagcctgcgggagctggccggcaaggaaaacctggaataccctagcgtgaccctgccacctcagcctcacaccaaggagggcgttgatgcctacaacgaagtgatcgcccgggtgcgaatgtgggtgaacctgaacctgtggcagaagctgaagctaagcagagatgatgccaagcctctgctgagactgaagggattcccttcctttcctctggtcgagagacaggccaacgaagtggactggtgggacatggtgtgtaacgtgaagaagctgatcaacgagaaaaaggaggatggcaaggtgttttggcagaatctggctggctacaagagacaggaagccctgagaccatacctgagcagcgaggaagatcggaagaagggaaagaaattcgctcggtaccagctgggcgacctgctgctgcacctggaaaagaagcacggcgaggactggggaaaggtgtacgacgaggcctgggagcggattgacaagaaagtggaaggcctgagcaagcacatcaagctggaagaggaacggagaagcgaggacgcccagagcaaggccgccctgaccgactggctgcgggctaaggccagcttcgtgatcgagggcctgaaggaggccgacaaggacgagttctgcagatgcgagctgaagctgcagaagtggtacggggacctgcggggaaagcccttcgccatcgaagccgagaacagcatcctggacatcagcggcttcagcaagcagtacaactgtgccttcatctggcagaaggacggcgtgaagaagctgaacctgtacctgatcatcaactacttcaagggcggcaagctgcggttcaagaagatcaaacctgaagccttcgaagccaacagattctacaccgtgatcaacaaaaagagcggcgagatcgtgcccatggaggtgaacttcaacttcgacgaccccaacctgatcatcctgcctctggcctttggcaagagacagggcagagaattcatctggaacgacctgctgtccctggaaaccggcagcctgaagctggccaacggaagagtgatcgagaagacactgtacaacagaagaacccggcaggatgagcctgccctgttcgtggccctgaccttcgagcggcgggaggtcctggactcctccaatatcaaaccaatgaacctgatcggcgtggcaagaggcgaaaacatccccgccgtgatcgccctgaccgaccccgagggctgcccactgagccggtttaaggatagcctgggaaacccaacccacatcctgagaatcggcgagagctataaggagaagcagcggaccatccaggccaagaaggaggtggagcagcggagagccggcggctacagccggaagtacgccagcaaagccaagaatctggcagacgatatggtgagaaacaccgctagagatctgctgtactacgccgtgacccaggatgccatgctgatcttcgccaacctgagccggggcttcggccggcagggcaagcggaccttcatggccgagagacagtacacacggatggaggactggctgaccgccaagctggcctacgagggcctgagcaagacctacctgtccaagacactggcccagtacacctccaagacatgcagcaactgtgggtttaccatcaccagcgccgactacgacagggtgctggagaagctgaagaagacagcaacaggctggatgaccacaattaacggcaaggagctgaaggtggagggccagattacctactacaacagatacaagagacagaacgtagtcaaggacctgtccgtcgagctggatagactgagcgaagaatctgtgaacaacgacatctcctcctggacaaagggcagaagcggagaagctctgagcctcctgaagaaaagattctcccatagacccgtgcaggagaagttcgtgtgcctgaactgcggcttcgagacacacgcagccgagcaagccgccctgaacatcgccagatcctggctgttcctgcggagccaggagtacaagaaataccagacaaacaagacaaccggcaacaccgataagagagccttcgtcgagacctggcagtccttttaccggaagaagcttaaggaggtgtggaaacctgccgtgcggtctggcggatctggcggaggctccacaagcagcaaggtgcccgtgaccttcggcgacctggccatctacttcagccaggaggagtgggagtggctgagccccatccagaaggacctgtacgaggacgtgatgctggagaactaccagaacctggtgagcctgggcctgagcttcaggaggcccaacgtgatcaccctgctggagaagggcaaggccccctggatggtggagcccgtgaggaagaggaggggcgtggacagcggcagcaagtgcaccagccccaagaaaaagagaaaagtctaagctgccttctgcggggcttgccttctggccatgcccttcttctctcccttgcacctgtacctcttggtctttgaataaagcctgagtaggaaggctagcaaaaaaaaaaaaaaaaaaaaaaaaaaaaaaaaaaaaaaaaaaaaaaaaaaaaaaaaaaaaaaaaaaaaaaaaaaaaaaaa

SEQ ID NO: 5846 - RNA, 5797 nt, synthetic construct
  source 1..5797: mol_type = other RNA
aggaaataagagagaaaagaagagtaagaagaaatataagagccaccatggcccctaagaagaagcgtaaagtgagccggatggaacgcctcgtctacgaggtgcggcagaagtgcagaaacatcgaggacatctgcatctcctgcggatctctgaacgtgaccctggagcacccactgttcatcggcggcatgtgccagaactgtaaaaactgttttctggagtgtgcctatcaatacgacgatgacggctaccagagctactgcaccatctgttgcggcggaagagaggtgctgatgtgtggaaataacaactgctgccggtgcttctgcgtggaatgcgtggacctgctggtgggccccggcgccgcccaggccgctattaaggaagatccttggaactgctacatgtgcggccacaagggcacatacggcctgctgagacggagagaggactggcctagcagactgcagatgttcttcgccaataaccacgaccaggagttcgacccccctaaggtgtaccctcccgtccccgccgagaagagaaagcccatccgggtcctgagcctgttcgatggcatcgccaccggtctgctggtgctgaaggacctgggcatccaggtggataggtacattgcctccgaggtgtgcgaggactccatcaccgtgggaatggtgcgtcatcagggcaagatcatgtacgtgggcgacgtgcggagcgtgacacagaagcatatccaggagtggggccctttcgacctggtgatcggcggcagcccttgcaatgacctgagcatcgtgaacccagcccggaagggcctgtacgagggaaccggcagactgttcttcgagttttacagactgctgcacgacgcccggcctaaggaaggcgacgaccggcccttcttttggctgttcgagaatgtggtggccatgggagtcagcgacaagcgggatattagccggttcctggagagcaaccccgtgatgatcgatgccaaggaagtgagcgccgcccaccgggccagatacttctggggcaatctgcctggcatgaacagacccctggccagcaccgtgaacgacaagctggagctgcaggagtgcctggagcacggccggatcgccaagttcagcaaggtgagaaccatcaccacccgaagcaacagcatcaaacaaggcaaggaccagcactttcctgtgttcatgaacgagaaggaggacatcctgtggtgtaccgagatggagagagtgttcgggttcccagtccactacacagatgtcagcaacatgtctagactggccagacagagactgctgggaagaagctggtccgtccctgtgatcagacacctgttcgcccctctgaaggagtacttcgcctgcgtgagcagcggcaacagcaacgccaacagccggggccccagcttctctagcggcctggtgccactgtccctgagagggagccacatgggccccatggagatctacaaaaccgtgagcgcctggaagcggcagcctgtgcgcgtgctgagcctgtttcggaatatcgataaagtcctgaaaagcctgggattcctggagagcggctctggctccggcggtggcaccctgaagtacgtggaggatgtgacaaacgtggtcagacgggatgtggagaagtggggccccttcgatctggtgtacggcagcacccaacccctgggcagctcttgtgaccggtgccctggctggtacatgtttcagttccaccggatcctgcagtacgccctgccgagacaggagtcccagcggccattcttttggattttcatggacaacttgctgctgaccgaggatgaccaggaaactaccactcggttcctgcagaccgaagccgtgaccctgcaggacgtgagaggccgggactaccagaacgccatgcgggtgtggtccaacatccctggactgaaaagcaagcacgcacctctgacccctaaagaagaggagtacctgcaggcccaggtgcggagcagaagcaagctggacgcccctaaggtggatctgctggtgaagaattgcctcctgcccctgagagagtacttcaagtatttcagccagaatagtctgcccctgggcggcccaagcagcggcgcccctcctcccagcggcggcagcccagccggctccccaacctctaccgaggagggcacctctgagtccgccacccccgagagcggccctggcacctccaccgagcccagcgagggcagcgcacccggcagccctgccggcagccccacctccacagaggagggaaccagcaccgagcccagcgaaggcagcgccccaggcaccagcaccgagcctagtgagggcggctctggcggcggcagcgcccaggagattaaacggatcaacaagatcagaagaagacttgtgaaagacagcaacaccaagaaggccggcaagacaggccccatgaaaaccctgctggttagagtgatgacacccgatctgagagagcggctggaaaacctgagaaagaagcctgaaaatatcccccagcccatcagcaatacatctagagccaacctgaataagctgctgaccgattacaccgaaatgaagaaggcgatcctgcatgtgtactgggaagagttccagaaggaccctgtgggcctgatgagccgggtggcccagcctgccagcaagaagatcgatcagaacaagctgaaacctgagatggacgagaagggcaacctgaccaccgccggctttgcctgctctcagtgtggccagcccctgttcgtgtacaagctggagcaggtgtctgagaagggcaaggcttacaccaactacttcggacggtgcaatgtggccgagcacgaaaagctgatcctgctggcccagctgaagcccgagaaggatagcgacgaagccgtgacatatagcctgggaaagtttgggcagagggccctggatttctacagcattcatgtgaccaaggagtccacccaccccgtgaagcccctggcccagatcgccggaaacagatacgcctccggacctgtgggaaaggccctgagcgacgcatgtatgggcacaatcgcctccttcctgtctaagtaccaggacatcatcatcgaacaccagaaggtggtgaagggcaaccagaagagactggagagcctgcgggagctggccggcaaggaaaacctggaataccctagcgtgaccctgccacctcagcctcacaccaaggagggcgttgatgcctacaacgaagtgatcgcccgggtgcgaatgtgggtgaacctgaacctgtggcagaagctgaagctaagcagagatgatgccaagcctctgctgagactgaagggattcccttcctttcctctggtcgagagacaggccaacgaagtggactggtgggacatggtgtgtaacgtgaagaagctgatcaacgagaaaaaggaggatggcaaggtgttttggcagaatctggctggctacaagagacaggaagccctgagaccatacctgagcagcgaggaagatcggaagaagggaaagaaattcgctcggtaccagctgggcgacctgctgctgcacctggaaaagaagcacggcgaggactggggaaaggtgtacgacgaggcctgggagcggattgacaagaaagtggaaggcctgagcaagcacatcaagctggaagaggaacggagaagcgaggacgcccagagcaaggccgccctgaccgactggctgcgggctaaggccagcttcgtgatcgagggcctgaaggaggccgacaaggacgagttctgcagatgcgagctgaagctgcagaagtggtacggggacctgcggggaaagcccttcgccatcgaagccgagaacagcatcctggacatcagcggcttcagcaagcagtacaactgtgccttcatctggcagaaggacggcgtgaagaagctgaacctgtacctgatcatcaactacttcaagggcggcaagctgcggttcaagaagatcaaacctgaagccttcgaagccaacagattctacaccgtgatcaacaaaaagagcggcgagatcgtgcccatggaggtgaacttcaacttcgacgaccccaacctgatcatcctgcctctggcctttggcaagagacagggcagagaattcatctggaacgacctgctgtccctggaaaccggcagcctgaagctggccaacggaagagtgatcgagaagacactgtacaacagaagaacccggcaggatgagcctgccctgttcgtggccctgaccttcgagcggcgggaggtcctggactcctccaatatcaaaccaatgaacctgatcggcgtggcaagaggcgaaaacatccccgccgtgatcgccctgaccgaccccgagggctgcccactgagccggtttaaggatagcctgggaaacccaacccacatcctgagaatcggcgagagctataaggagaagcagcggaccatccaggccaagaaggaggtggagcagcggagagccggcggctacagccggaagtacgccagcaaagccaagaatctggcagacgatatggtgagaaacaccgctagagatctgctgtactacgccgtgacccaggatgccatgctgatcttcgccaacctgagccggggcttcggccggcagggcaagcggaccttcatggccgagagacagtacacacggatggaggactggctgaccgccaagctggcctacgagggcctgagcaagacctacctgtccaagacactggcccagtacacctccaagacatgcagcaactgtgggtttaccatcaccagcgccgactacgacagggtgctggagaagctgaagaagacagcaacaggctggatgaccacaattaacggcaaggagctgaaggtggagggccagattacctactacaacagatacaagagacagaacgtagtcaaggacctgtccgtcgagctggatagactgagcgaagaatctgtgaacaacgacatctcctcctggacaaagggcagaagcggagaagctctgagcctcctgaagaaaagattctcccatagacccgtgcaggagaagttcgtgtgcctgaactgcggcttcgagacacacgcagccgagcaagccgccctgaacatcgccagatcctggctgttcctgcggagccaggagtacaagaaataccagacaaacaagacaaccggcaacaccgataagagagccttcgtcgagacctggcagtccttttaccggaagaagcttaaggaggtgtggaaacctgccgtgcggtctggcggatctggcggaggctccacaagcatggccgccatgcccctgaaggccaggtaccaggagatggtgaccttcgaggacgtggccgtgcacttcaccaagaccgagtggaccggcctgagccccgcccagagggccctgtacaggagcgtgatgctggagaacttcggcaacctgaccgccctgggctaccccgtgcccaagcccgccctgatcagcctgctggagggcggcgacatggactggggcctggaggcccaggacgaccccaccagccccaagaaaaagagaaaagtctaagctgccttctgcggggcttgccttctggccatgcccttcttctctcccttgcacctgtacctcttggtctttgaataaagcctgagtaggaaggctagcaaaaaaaaaaaaaaaaaaaaaaaaaaaaaaaaaaaaaaaaaaaaaaaaaaaaaaaaaaaaaaaaaaaaaaaaaaaaaaaa

SEQ ID NO: 5847 - RNA, 5797 nt, synthetic construct
  source 1..5797: mol_type = other RNA
aggaaataagagagaaaagaagagtaagaagaaatataagagccaccatggcccctaagaagaagcgtaaagtgagccggatggaacgcctcgtctacgaggtgcggcagaagtgcagaaacatcgaggacatctgcatctcctgcggatctctgaacgtgaccctggagcacccactgttcatcggcggcatgtgccagaactgtaaaaactgttttctggagtgtgcctatcaatacgacgatgacggctaccagagctactgcaccatctgttgcggcggaagagaggtgctgatgtgtggaaataacaactgctgccggtgcttctgcgtggaatgcgtggacctgctggtgggccccggcgccgcccaggccgctattaaggaagatccttggaactgctacatgtgcggccacaagggcacatacggcctgctgagacggagagaggactggcctagcagactgcagatgttcttcgccaataaccacgaccaggagttcgacccccctaaggtgtaccctcccgtccccgccgagaagagaaagcccatccgggtcctgagcctgttcgatggcatcgccaccggtctgctggtgctgaaggacctgggcatccaggtggataggtacattgcctccgaggtgtgcgaggactccatcaccgtgggaatggtgcgtcatcagggcaagatcatgtacgtgggcgacgtgcggagcgtgacacagaagcatatccaggagtggggccctttcgacctggtgatcggcggcagcccttgcaatgacctgagcatcgtgaacccagcccggaagggcctgtacgagggaaccggcagactgttcttcgagttttacagactgctgcacgacgcccggcctaaggaaggcgacgaccggcccttcttttggctgttcgagaatgtggtggccatgggagtcagcgacaagcgggatattagccggttcctggagagcaaccccgtgatgatcgatgccaaggaagtgagcgccgcccaccgggccagatacttctggggcaatctgcctggcatgaacagacccctggccagcaccgtgaacgacaagctggagctgcaggagtgcctggagcacggccggatcgccaagttcagcaaggtgagaaccatcaccacccgaagcaacagcatcaaacaaggcaaggaccagcactttcctgtgttcatgaacgagaaggaggacatcctgtggtgtaccgagatggagagagtgttcgggttcccagtccactacacagatgtcagcaacatgtctagactggccagacagagactgctgggaagaagctggtccgtccctgtgatcagacacctgttcgcccctctgaaggagtacttcgcctgcgtgagcagcggcaacagcaacgccaacagccggggccccagcttctctagcggcctggtgccactgtccctgagagggagccacatgggccccatggagatctacaaaaccgtgagcgcctggaagcggcagcctgtgcgcgtgctgagcctgtttcggaatatcgataaagtcctgaaaagcctgggattcctggagagcggctctggctccggcggtggcaccctgaagtacgtggaggatgtgacaaacgtggtcagacgggatgtggagaagtggggccccttcgatctggtgtacggcagcacccaacccctgggcagctcttgtgaccggtgccctggctggtacatgtttcagttccaccggatcctgcagtacgccctgccgagacaggagtcccagcggccattcttttggattttcatggacaacttgctgctgaccgaggatgaccaggaaactaccactcggttcctgcagaccgaagccgtgaccctgcaggacgtgagaggccgggactaccagaacgccatgcgggtgtggtccaacatccctggactgaaaagcaagcacgcacctctgacccctaaagaagaggagtacctgcaggcccaggtgcggagcagaagcaagctggacgcccctaaggtggatctgctggtgaagaattgcctcctgcccctgagagagtacttcaagtatttcagccagaatagtctgcccctgggcggcccaagcagcggcgcccctcctcccagcggcggcagcccagccggctccccaacctctaccgaggagggcacctctgagtccgccacccccgagagcggccctggcacctccaccgagcccagcgagggcagcgcacccggcagccctgccggcagccccacctccacagaggagggaaccagcaccgagcccagcgaaggcagcgccccaggcaccagcaccgagcctagtgagggcggctctggcggcggcagcgcccaggagattaaacggatcaacaagatcagaagaagacttgtgaaagacagcaacaccaagaaggccggcaagacaggccccatgaaaaccctgctggttagagtgatgacacccgatctgagagagcggctggaaaacctgagaaagaagcctgaaaatatcccccagcccatcagcaatacatctagagccaacctgaataagctgctgaccgattacaccgaaatgaagaaggcgatcctgcatgtgtactgggaagagttccagaaggaccctgtgggcctgatgagccgggtggcccagcctgccagcaagaagatcgatcagaacaagctgaaacctgagatggacgagaagggcaacctgaccaccgccggctttgcctgctctcagtgtggccagcccctgttcgtgtacaagctggagcaggtgtctgagaagggcaaggcttacaccaactacttcggacggtgcaatgtggccgagcacgaaaagctgatcctgctggcccagctgaagcccgagaaggatagcgacgaagccgtgacatatagcctgggaaagtttgggcagagggccctggatttctacagcattcatgtgaccaaggagtccacccaccccgtgaagcccctggcccagatcgccggaaacagatacgcctccggacctgtgggaaaggccctgagcgacgcatgtatgggcacaatcgcctccttcctgtctaagtaccaggacatcatcatcgaacaccagaaggtggtgaagggcaaccagaagagactggagagcctgcgggagctggccggcaaggaaaacctggaataccctagcgtgaccctgccacctcagcctcacaccaaggagggcgttgatgcctacaacgaagtgatcgcccgggtgcgaatgtgggtgaacctgaacctgtggcagaagctgaagctaagcagagatgatgccaagcctctgctgagactgaagggattcccttcctttcctctggtcgagagacaggccaacgaagtggactggtgggacatggtgtgtaacgtgaagaagctgatcaacgagaaaaaggaggatggcaaggtgttttggcagaatctggctggctacaagagacaggaagccctgagaccatacctgagcagcgaggaagatcggaagaagggaaagaaattcgctcggtaccagctgggcgacctgctgctgcacctggaaaagaagcacggcgaggactggggaaaggtgtacgacgaggcctgggagcggattgacaagaaagtggaaggcctgagcaagcacatcaagctggaagaggaacggagaagcgaggacgcccagagcaaggccgccctgaccgactggctgcgggctaaggccagcttcgtgatcgagggcctgaaggaggccgacaaggacgagttctgcagatgcgagctgaagctgcagaagtggtacggggacctgcggggaaagcccttcgccatcgaagccgagaacagcatcctggacatcagcggcttcagcaagcagtacaactgtgccttcatctggcagaaggacggcgtgaagaagctgaacctgtacctgatcatcaactacttcaagggcggcaagctgcggttcaagaagatcaaacctgaagccttcgaagccaacagattctacaccgtgatcaacaaaaagagcggcgagatcgtgcccatggaggtgaacttcaacttcgacgaccccaacctgatcatcctgcctctggcctttggcaagagacagggcagagaattcatctggaacgacctgctgtccctggaaaccggcagcctgaagctggccaacggaagagtgatcgagaagacactgtacaacagaagaacccggcaggatgagcctgccctgttcgtggccctgaccttcgagcggcgggaggtcctggactcctccaatatcaaaccaatgaacctgatcggcgtggcaagaggcgaaaacatccccgccgtgatcgccctgaccgaccccgagggctgcccactgagccggtttaaggatagcctgggaaacccaacccacatcctgagaatcggcgagagctataaggagaagcagcggaccatccaggccaagaaggaggtggagcagcggagagccggcggctacagccggaagtacgccagcaaagccaagaatctggcagacgatatggtgagaaacaccgctagagatctgctgtactacgccgtgacccaggatgccatgctgatcttcgccaacctgagccggggcttcggccggcagggcaagcggaccttcatggccgagagacagtacacacggatggaggactggctgaccgccaagctggcctacgagggcctgagcaagacctacctgtccaagacactggcccagtacacctccaagacatgcagcaactgtgggtttaccatcaccagcgccgactacgacagggtgctggagaagctgaagaagacagcaacaggctggatgaccacaattaacggcaaggagctgaaggtggagggccagattacctactacaacagatacaagagacagaacgtagtcaaggacctgtccgtcgagctggatagactgagcgaagaatctgtgaacaacgacatctcctcctggacaaagggcagaagcggagaagctctgagcctcctgaagaaaagattctcccatagacccgtgcaggagaagttcgtgtgcctgaactgcggcttcgagacacacgcagccgagcaagccgccctgaacatcgccagatcctggctgttcctgcggagccaggagtacaagaaataccagacaaacaagacaaccggcaacaccgataagagagccttcgtcgagacctggcagtccttttaccggaagaagcttaaggaggtgtggaaacctgccgtgcggtctggcggatctggcggaggctccacaagccaggccgaggtgaccttcgaggacgtggccgtgctgctgagcagggaggagtggggcaggctgggccccgtgcagaagggcctgtacagggacgtgatgctggagacctacaggaacctggtgagcctgggcgccggccccgccggccccaagcccgaggtgatcacccagctggagaggggcgacgagccctgggtgcccgacgtgcagggcagggagcagcccaccatcgacggcagcgccaccagccccaagaaaaagagaaaagtctaagctgccttctgcggggcttgccttctggccatgcccttcttctctcccttgcacctgtacctcttggtctttgaataaagcctgagtaggaaggctagcaaaaaaaaaaaaaaaaaaaaaaaaaaaaaaaaaaaaaaaaaaaaaaaaaaaaaaaaaaaaaaaaaaaaaaaaaaaaaaaa

SEQ ID NO: 5848 - RNA, 5797 nt, synthetic construct
  source 1..5797: mol_type = other RNA
aggaaataagagagaaaagaagagtaagaagaaatataagagccaccatggcccctaagaagaagcgtaaagtgagccggatggaacgcctcgtctacgaggtgcggcagaagtgcagaaacatcgaggacatctgcatctcctgcggatctctgaacgtgaccctggagcacccactgttcatcggcggcatgtgccagaactgtaaaaactgttttctggagtgtgcctatcaatacgacgatgacggctaccagagctactgcaccatctgttgcggcggaagagaggtgctgatgtgtggaaataacaactgctgccggtgcttctgcgtggaatgcgtggacctgctggtgggccccggcgccgcccaggccgctattaaggaagatccttggaactgctacatgtgcggccacaagggcacatacggcctgctgagacggagagaggactggcctagcagactgcagatgttcttcgccaataaccacgaccaggagttcgacccccctaaggtgtaccctcccgtccccgccgagaagagaaagcccatccgggtcctgagcctgttcgatggcatcgccaccggtctgctggtgctgaaggacctgggcatccaggtggataggtacattgcctccgaggtgtgcgaggactccatcaccgtgggaatggtgcgtcatcagggcaagatcatgtacgtgggcgacgtgcggagcgtgacacagaagcatatccaggagtggggccctttcgacctggtgatcggcggcagcccttgcaatgacctgagcatcgtgaacccagcccggaagggcctgtacgagggaaccggcagactgttcttcgagttttacagactgctgcacgacgcccggcctaaggaaggcgacgaccggcccttcttttggctgttcgagaatgtggtggccatgggagtcagcgacaagcgggatattagccggttcctggagagcaaccccgtgatgatcgatgccaaggaagtgagcgccgcccaccgggccagatacttctggggcaatctgcctggcatgaacagacccctggccagcaccgtgaacgacaagctggagctgcaggagtgcctggagcacggccggatcgccaagttcagcaaggtgagaaccatcaccacccgaagcaacagcatcaaacaaggcaaggaccagcactttcctgtgttcatgaacgagaaggaggacatcctgtggtgtaccgagatggagagagtgttcgggttcccagtccactacacagatgtcagcaacatgtctagactggccagacagagactgctgggaagaagctggtccgtccctgtgatcagacacctgttcgcccctctgaaggagtacttcgcctgcgtgagcagcggcaacagcaacgccaacagccggggccccagcttctctagcggcctggtgccactgtccctgagagggagccacatgggccccatggagatctacaaaaccgtgagcgcctggaagcggcagcctgtgcgcgtgctgagcctgtttcggaatatcgataaagtcctgaaaagcctgggattcctggagagcggctctggctccggcggtggcaccctgaagtacgtggaggatgtgacaaacgtggtcagacgggatgtggagaagtggggccccttcgatctggtgtacggcagcacccaacccctgggcagctcttgtgaccggtgccctggctggtacatgtttcagttccaccggatcctgcagtacgccctgccgagacaggagtcccagcggccattcttttggattttcatggacaacttgctgctgaccgaggatgaccaggaaactaccactcggttcctgcagaccgaagccgtgaccctgcaggacgtgagaggccgggactaccagaacgccatgcgggtgtggtccaacatccctggactgaaaagcaagcacgcacctctgacccctaaagaagaggagtacctgcaggcccaggtgcggagcagaagcaagctggacgcccctaaggtggatctgctggtgaagaattgcctcctgcccctgagagagtacttcaagtatttcagccagaatagtctgcccctgggcggcccaagcagcggcgcccctcctcccagcggcggcagcccagccggctccccaacctctaccgaggagggcacctctgagtccgccacccccgagagcggccctggcacctccaccgagcccagcgagggcagcgcacccggcagccctgccggcagccccacctccacagaggagggaaccagcaccgagcccagcgaaggcagcgccccaggcaccagcaccgagcctagtgagggcggctctggcggcggcagcgcccaggagattaaacggatcaacaagatcagaagaagacttgtgaaagacagcaacaccaagaaggccggcaagacaggccccatgaaaaccctgctggttagagtgatgacacccgatctgagagagcggctggaaaacctgagaaagaagcctgaaaatatcccccagcccatcagcaatacatctagagccaacctgaataagctgctgaccgattacaccgaaatgaagaaggcgatcctgcatgtgtactgggaagagttccagaaggaccctgtgggcctgatgagccgggtggcccagcctgccagcaagaagatcgatcagaacaagctgaaacctgagatggacgagaagggcaacctgaccaccgccggctttgcctgctctcagtgtggccagcccctgttcgtgtacaagctggagcaggtgtctgagaagggcaaggcttacaccaactacttcggacggtgcaatgtggccgagcacgaaaagctgatcctgctggcccagctgaagcccgagaaggatagcgacgaagccgtgacatatagcctgggaaagtttgggcagagggccctggatttctacagcattcatgtgaccaaggagtccacccaccccgtgaagcccctggcccagatcgccggaaacagatacgcctccggacctgtgggaaaggccctgagcgacgcatgtatgggcacaatcgcctccttcctgtctaagtaccaggacatcatcatcgaacaccagaaggtggtgaagggcaaccagaagagactggagagcctgcgggagctggccggcaaggaaaacctggaataccctagcgtgaccctgccacctcagcctcacaccaaggagggcgttgatgcctacaacgaagtgatcgcccgggtgcgaatgtgggtgaacctgaacctgtggcagaagctgaagctaagcagagatgatgccaagcctctgctgagactgaagggattcccttcctttcctctggtcgagagacaggccaacgaagtggactggtgggacatggtgtgtaacgtgaagaagctgatcaacgagaaaaaggaggatggcaaggtgttttggcagaatctggctggctacaagagacaggaagccctgagaccatacctgagcagcgaggaagatcggaagaagggaaagaaattcgctcggtaccagctgggcgacctgctgctgcacctggaaaagaagcacggcgaggactggggaaaggtgtacgacgaggcctgggagcggattgacaagaaagtggaaggcctgagcaagcacatcaagctggaagaggaacggagaagcgaggacgcccagagcaaggccgccctgaccgactggctgcgggctaaggccagcttcgtgatcgagggcctgaaggaggccgacaaggacgagttctgcagatgcgagctgaagctgcagaagtggtacggggacctgcggggaaagcccttcgccatcgaagccgagaacagcatcctggacatcagcggcttcagcaagcagtacaactgtgccttcatctggcagaaggacggcgtgaagaagctgaacctgtacctgatcatcaactacttcaagggcggcaagctgcggttcaagaagatcaaacctgaagccttcgaagccaacagattctacaccgtgatcaacaaaaagagcggcgagatcgtgcccatggaggtgaacttcaacttcgacgaccccaacctgatcatcctgcctctggcctttggcaagagacagggcagagaattcatctggaacgacctgctgtccctggaaaccggcagcctgaagctggccaacggaagagtgatcgagaagacactgtacaacagaagaacccggcaggatgagcctgccctgttcgtggccctgaccttcgagcggcgggaggtcctggactcctccaatatcaaaccaatgaacctgatcggcgtggcaagaggcgaaaacatccccgccgtgatcgccctgaccgaccccgagggctgcccactgagccggtttaaggatagcctgggaaacccaacccacatcctgagaatcggcgagagctataaggagaagcagcggaccatccaggccaagaaggaggtggagcagcggagagccggcggctacagccggaagtacgccagcaaagccaagaatctggcagacgatatggtgagaaacaccgctagagatctgctgtactacgccgtgacccaggatgccatgctgatcttcgccaacctgagccggggcttcggccggcagggcaagcggaccttcatggccgagagacagtacacacggatggaggactggctgaccgccaagctggcctacgagggcctgagcaagacctacctgtccaagacactggcccagtacacctccaagacatgcagcaactgtgggtttaccatcaccagcgccgactacgacagggtgctggagaagctgaagaagacagcaacaggctggatgaccacaattaacggcaaggagctgaaggtggagggccagattacctactacaacagatacaagagacagaacgtagtcaaggacctgtccgtcgagctggatagactgagcgaagaatctgtgaacaacgacatctcctcctggacaaagggcagaagcggagaagctctgagcctcctgaagaaaagattctcccatagacccgtgcaggagaagttcgtgtgcctgaactgcggcttcgagacacacgcagccgagcaagccgccctgaacatcgccagatcctggctgttcctgcggagccaggagtacaagaaataccagacaaacaagacaaccggcaacaccgataagagagccttcgtcgagacctggcagtccttttaccggaagaagcttaaggaggtgtggaaacctgccgtgcggtctggcggatctggcggaggctccacaagcgcccacggcagcgtgatcttcagcgacgtgagcatcgccttcagccaggaggagtgggagtacctggacctggagcagagggacctgtacagggacgtgatgctggagaactacagcaacctggtgagcctgggctgcttcatcagcaagcccaacgtgatcagcctgctggagcagggcaaggagccctggaaggtggtgaggaaggagaggaggtaccccgacatgggcatcaggtacgagaccagccccaagaaaaagagaaaagtctaagctgccttctgcggggcttgccttctggccatgcccttcttctctcccttgcacctgtacctcttggtctttgaataaagcctgagtaggaaggctagcaaaaaaaaaaaaaaaaaaaaaaaaaaaaaaaaaaaaaaaaaaaaaaaaaaaaaaaaaaaaaaaaaaaaaaaaaaaaaaaa

SEQ ID NO: 5849 - RNA, 5797 nt, synthetic construct
  source 1..5797: mol_type = other RNA
aggaaataagagagaaaagaagagtaagaagaaatataagagccaccatggcccctaagaagaagcgtaaagtgagccggatggaacgcctcgtctacgaggtgcggcagaagtgcagaaacatcgaggacatctgcatctcctgcggatctctgaacgtgaccctggagcacccactgttcatcggcggcatgtgccagaactgtaaaaactgttttctggagtgtgcctatcaatacgacgatgacggctaccagagctactgcaccatctgttgcggcggaagagaggtgctgatgtgtggaaataacaactgctgccggtgcttctgcgtggaatgcgtggacctgctggtgggccccggcgccgcccaggccgctattaaggaagatccttggaactgctacatgtgcggccacaagggcacatacggcctgctgagacggagagaggactggcctagcagactgcagatgttcttcgccaataaccacgaccaggagttcgacccccctaaggtgtaccctcccgtccccgccgagaagagaaagcccatccgggtcctgagcctgttcgatggcatcgccaccggtctgctggtgctgaaggacctgggcatccaggtggataggtacattgcctccgaggtgtgcgaggactccatcaccgtgggaatggtgcgtcatcagggcaagatcatgtacgtgggcgacgtgcggagcgtgacacagaagcatatccaggagtggggccctttcgacctggtgatcggcggcagcccttgcaatgacctgagcatcgtgaacccagcccggaagggcctgtacgagggaaccggcagactgttcttcgagttttacagactgctgcacgacgcccggcctaaggaaggcgacgaccggcccttcttttggctgttcgagaatgtggtggccatgggagtcagcgacaagcgggatattagccggttcctggagagcaaccccgtgatgatcgatgccaaggaagtgagcgccgcccaccgggccagatacttctggggcaatctgcctggcatgaacagacccctggccagcaccgtgaacgacaagctggagctgcaggagtgcctggagcacggccggatcgccaagttcagcaaggtgagaaccatcaccacccgaagcaacagcatcaaacaaggcaaggaccagcactttcctgtgttcatgaacgagaaggaggacatcctgtggtgtaccgagatggagagagtgttcgggttcccagtccactacacagatgtcagcaacatgtctagactggccagacagagactgctgggaagaagctggtccgtccctgtgatcagacacctgttcgcccctctgaaggagtacttcgcctgcgtgagcagcggcaacagcaacgccaacagccggggccccagcttctctagcggcctggtgccactgtccctgagagggagccacatgggccccatggagatctacaaaaccgtgagcgcctggaagcggcagcctgtgcgcgtgctgagcctgtttcggaatatcgataaagtcctgaaaagcctgggattcctggagagcggctctggctccggcggtggcaccctgaagtacgtggaggatgtgacaaacgtggtcagacgggatgtggagaagtggggccccttcgatctggtgtacggcagcacccaacccctgggcagctcttgtgaccggtgccctggctggtacatgtttcagttccaccggatcctgcagtacgccctgccgagacaggagtcccagcggccattcttttggattttcatggacaacttgctgctgaccgaggatgaccaggaaactaccactcggttcctgcagaccgaagccgtgaccctgcaggacgtgagaggccgggactaccagaacgccatgcgggtgtggtccaacatccctggactgaaaagcaagcacgcacctctgacccctaaagaagaggagtacctgcaggcccaggtgcggagcagaagcaagctggacgcccctaaggtggatctgctggtgaagaattgcctcctgcccctgagagagtacttcaagtatttcagccagaatagtctgcccctgggcggcccaagcagcggcgcccctcctcccagcggcggcagcccagccggctccccaacctctaccgaggagggcacctctgagtccgccacccccgagagcggccctggcacctccaccgagcccagcgagggcagcgcacccggcagccctgccggcagccccacctccacagaggagggaaccagcaccgagcccagcgaaggcagcgccccaggcaccagcaccgagcctagtgagggcggctctggcggcggcagcgcccaggagattaaacggatcaacaagatcagaagaagacttgtgaaagacagcaacaccaagaaggccggcaagacaggccccatgaaaaccctgctggttagagtgatgacacccgatctgagagagcggctggaaaacctgagaaagaagcctgaaaatatcccccagcccatcagcaatacatctagagccaacctgaataagctgctgaccgattacaccgaaatgaagaaggcgatcctgcatgtgtactgggaagagttccagaaggaccctgtgggcctgatgagccgggtggcccagcctgccagcaagaagatcgatcagaacaagctgaaacctgagatggacgagaagggcaacctgaccaccgccggctttgcctgctctcagtgtggccagcccctgttcgtgtacaagctggagcaggtgtctgagaagggcaaggcttacaccaactacttcggacggtgcaatgtggccgagcacgaaaagctgatcctgctggcccagctgaagcccgagaaggatagcgacgaagccgtgacatatagcctgggaaagtttgggcagagggccctggatttctacagcattcatgtgaccaaggagtccacccaccccgtgaagcccctggcccagatcgccggaaacagatacgcctccggacctgtgggaaaggccctgagcgacgcatgtatgggcacaatcgcctccttcctgtctaagtaccaggacatcatcatcgaacaccagaaggtggtgaagggcaaccagaagagactggagagcctgcgggagctggccggcaaggaaaacctggaataccctagcgtgaccctgccacctcagcctcacaccaaggagggcgttgatgcctacaacgaagtgatcgcccgggtgcgaatgtgggtgaacctgaacctgtggcagaagctgaagctaagcagagatgatgccaagcctctgctgagactgaagggattcccttcctttcctctggtcgagagacaggccaacgaagtggactggtgggacatggtgtgtaacgtgaagaagctgatcaacgagaaaaaggaggatggcaaggtgttttggcagaatctggctggctacaagagacaggaagccctgagaccatacctgagcagcgaggaagatcggaagaagggaaagaaattcgctcggtaccagctgggcgacctgctgctgcacctggaaaagaagcacggcgaggactggggaaaggtgtacgacgaggcctgggagcggattgacaagaaagtggaaggcctgagcaagcacatcaagctggaagaggaacggagaagcgaggacgcccagagcaaggccgccctgaccgactggctgcgggctaaggccagcttcgtgatcgagggcctgaaggaggccgacaaggacgagttctgcagatgcgagctgaagctgcagaagtggtacggggacctgcggggaaagcccttcgccatcgaagccgagaacagcatcctggacatcagcggcttcagcaagcagtacaactgtgccttcatctggcagaaggacggcgtgaagaagctgaacctgtacctgatcatcaactacttcaagggcggcaagctgcggttcaagaagatcaaacctgaagccttcgaagccaacagattctacaccgtgatcaacaaaaagagcggcgagatcgtgcccatggaggtgaacttcaacttcgacgaccccaacctgatcatcctgcctctggcctttggcaagagacagggcagagaattcatctggaacgacctgctgtccctggaaaccggcagcctgaagctggccaacggaagagtgatcgagaagacactgtacaacagaagaacccggcaggatgagcctgccctgttcgtggccctgaccttcgagcggcgggaggtcctggactcctccaatatcaaaccaatgaacctgatcggcgtggcaagaggcgaaaacatccccgccgtgatcgccctgaccgaccccgagggctgcccactgagccggtttaaggatagcctgggaaacccaacccacatcctgagaatcggcgagagctataaggagaagcagcggaccatccaggccaagaaggaggtggagcagcggagagccggcggctacagccggaagtacgccagcaaagccaagaatctggcagacgatatggtgagaaacaccgctagagatctgctgtactacgccgtgacccaggatgccatgctgatcttcgccaacctgagccggggcttcggccggcagggcaagcggaccttcatggccgagagacagtacacacggatggaggactggctgaccgccaagctggcctacgagggcctgagcaagacctacctgtccaagacactggcccagtacacctccaagacatgcagcaactgtgggtttaccatcaccagcgccgactacgacagggtgctggagaagctgaagaagacagcaacaggctggatgaccacaattaacggcaaggagctgaaggtggagggccagattacctactacaacagatacaagagacagaacgtagtcaaggacctgtccgtcgagctggatagactgagcgaagaatctgtgaacaacgacatctcctcctggacaaagggcagaagcggagaagctctgagcctcctgaagaaaagattctcccatagacccgtgcaggagaagttcgtgtgcctgaactgcggcttcgagacacacgcagccgagcaagccgccctgaacatcgccagatcctggctgttcctgcggagccaggagtacaagaaataccagacaaacaagacaaccggcaacaccgataagagagccttcgtcgagacctggcagtccttttaccggaagaagcttaaggaggtgtggaaacctgccgtgcggtctggcggatctggcggaggctccacaagcaggcccggcgccgtgagcttcgccgacgtggccgtgtacttcagccccgaggagtggggctgcctgaggcccgcccagagggccctgtacagggacgtgatgagggagacctacggccacctgggcgccctgggcttcgccggcagcaagcccgccctgatcagctggctggagaggaagaaggaggtgtggagccccgaggccgaggaccccgaggacggcgccaggcaccccggcagcggcaccagccccaagaaaaagagaaaagtctaagctgccttctgcggggcttgccttctggccatgcccttcttctctcccttgcacctgtacctcttggtctttgaataaagcctgagtaggaaggctagcaaaaaaaaaaaaaaaaaaaaaaaaaaaaaaaaaaaaaaaaaaaaaaaaaaaaaaaaaaaaaaaaaaaaaaaaaaaaaaaa

SEQ ID NO: 5850 - RNA, 5797 nt, synthetic construct
  source 1..5797: mol_type = other RNA
aggaaataagagagaaaagaagagtaagaagaaatataagagccaccatggcccctaagaagaagcgtaaagtgagccggatggaacgcctcgtctacgaggtgcggcagaagtgcagaaacatcgaggacatctgcatctcctgcggatctctgaacgtgaccctggagcacccactgttcatcggcggcatgtgccagaactgtaaaaactgttttctggagtgtgcctatcaatacgacgatgacggctaccagagctactgcaccatctgttgcggcggaagagaggtgctgatgtgtggaaataacaactgctgccggtgcttctgcgtggaatgcgtggacctgctggtgggccccggcgccgcccaggccgctattaaggaagatccttggaactgctacatgtgcggccacaagggcacatacggcctgctgagacggagagaggactggcctagcagactgcagatgttcttcgccaataaccacgaccaggagttcgacccccctaaggtgtaccctcccgtccccgccgagaagagaaagcccatccgggtcctgagcctgttcgatggcatcgccaccggtctgctggtgctgaaggacctgggcatccaggtggataggtacattgcctccgaggtgtgcgaggactccatcaccgtgggaatggtgcgtcatcagggcaagatcatgtacgtgggcgacgtgcggagcgtgacacagaagcatatccaggagtggggccctttcgacctggtgatcggcggcagcccttgcaatgacctgagcatcgtgaacccagcccggaagggcctgtacgagggaaccggcagactgttcttcgagttttacagactgctgcacgacgcccggcctaaggaaggcgacgaccggcccttcttttggctgttcgagaatgtggtggccatgggagtcagcgacaagcgggatattagccggttcctggagagcaaccccgtgatgatcgatgccaaggaagtgagcgccgcccaccgggccagatacttctggggcaatctgcctggcatgaacagacccctggccagcaccgtgaacgacaagctggagctgcaggagtgcctggagcacggccggatcgccaagttcagcaaggtgagaaccatcaccacccgaagcaacagcatcaaacaaggcaaggaccagcactttcctgtgttcatgaacgagaaggaggacatcctgtggtgtaccgagatggagagagtgttcgggttcccagtccactacacagatgtcagcaacatgtctagactggccagacagagactgctgggaagaagctggtccgtccctgtgatcagacacctgttcgcccctctgaaggagtacttcgcctgcgtgagcagcggcaacagcaacgccaacagccggggccccagcttctctagcggcctggtgccactgtccctgagagggagccacatgggccccatggagatctacaaaaccgtgagcgcctggaagcggcagcctgtgcgcgtgctgagcctgtttcggaatatcgataaagtcctgaaaagcctgggattcctggagagcggctctggctccggcggtggcaccctgaagtacgtggaggatgtgacaaacgtggtcagacgggatgtggagaagtggggccccttcgatctggtgtacggcagcacccaacccctgggcagctcttgtgaccggtgccctggctggtacatgtttcagttccaccggatcctgcagtacgccctgccgagacaggagtcccagcggccattcttttggattttcatggacaacttgctgctgaccgaggatgaccaggaaactaccactcggttcctgcagaccgaagccgtgaccctgcaggacgtgagaggccgggactaccagaacgccatgcgggtgtggtccaacatccctggactgaaaagcaagcacgcacctctgacccctaaagaagaggagtacctgcaggcccaggtgcggagcagaagcaagctggacgcccctaaggtggatctgctggtgaagaattgcctcctgcccctgagagagtacttcaagtatttcagccagaatagtctgcccctgggcggcccaagcagcggcgcccctcctcccagcggcggcagcccagccggctccccaacctctaccgaggagggcacctctgagtccgccacccccgagagcggccctggcacctccaccgagcccagcgagggcagcgcacccggcagccctgccggcagccccacctccacagaggagggaaccagcaccgagcccagcgaaggcagcgccccaggcaccagcaccgagcctagtgagggcggctctggcggcggcagcgcccaggagattaaacggatcaacaagatcagaagaagacttgtgaaagacagcaacaccaagaaggccggcaagacaggccccatgaaaaccctgctggttagagtgatgacacccgatctgagagagcggctggaaaacctgagaaagaagcctgaaaatatcccccagcccatcagcaatacatctagagccaacctgaataagctgctgaccgattacaccgaaatgaagaaggcgatcctgcatgtgtactgggaagagttccagaaggaccctgtgggcctgatgagccgggtggcccagcctgccagcaagaagatcgatcagaacaagctgaaacctgagatggacgagaagggcaacctgaccaccgccggctttgcctgctctcagtgtggccagcccctgttcgtgtacaagctggagcaggtgtctgagaagggcaaggcttacaccaactacttcggacggtgcaatgtggccgagcacgaaaagctgatcctgctggcccagctgaagcccgagaaggatagcgacgaagccgtgacatatagcctgggaaagtttgggcagagggccctggatttctacagcattcatgtgaccaaggagtccacccaccccgtgaagcccctggcccagatcgccggaaacagatacgcctccggacctgtgggaaaggccctgagcgacgcatgtatgggcacaatcgcctccttcctgtctaagtaccaggacatcatcatcgaacaccagaaggtggtgaagggcaaccagaagagactggagagcctgcgggagctggccggcaaggaaaacctggaataccctagcgtgaccctgccacctcagcctcacaccaaggagggcgttgatgcctacaacgaagtgatcgcccgggtgcgaatgtgggtgaacctgaacctgtggcagaagctgaagctaagcagagatgatgccaagcctctgctgagactgaagggattcccttcctttcctctggtcgagagacaggccaacgaagtggactggtgggacatggtgtgtaacgtgaagaagctgatcaacgagaaaaaggaggatggcaaggtgttttggcagaatctggctggctacaagagacaggaagccctgagaccatacctgagcagcgaggaagatcggaagaagggaaagaaattcgctcggtaccagctgggcgacctgctgctgcacctggaaaagaagcacggcgaggactggggaaaggtgtacgacgaggcctgggagcggattgacaagaaagtggaaggcctgagcaagcacatcaagctggaagaggaacggagaagcgaggacgcccagagcaaggccgccctgaccgactggctgcgggctaaggccagcttcgtgatcgagggcctgaaggaggccgacaaggacgagttctgcagatgcgagctgaagctgcagaagtggtacggggacctgcggggaaagcccttcgccatcgaagccgagaacagcatcctggacatcagcggcttcagcaagcagtacaactgtgccttcatctggcagaaggacggcgtgaagaagctgaacctgtacctgatcatcaactacttcaagggcggcaagctgcggttcaagaagatcaaacctgaagccttcgaagccaacagattctacaccgtgatcaacaaaaagagcggcgagatcgtgcccatggaggtgaacttcaacttcgacgaccccaacctgatcatcctgcctctggcctttggcaagagacagggcagagaattcatctggaacgacctgctgtccctggaaaccggcagcctgaagctggccaacggaagagtgatcgagaagacactgtacaacagaagaacccggcaggatgagcctgccctgttcgtggccctgaccttcgagcggcgggaggtcctggactcctccaatatcaaaccaatgaacctgatcggcgtggcaagaggcgaaaacatccccgccgtgatcgccctgaccgaccccgagggctgcccactgagccggtttaaggatagcctgggaaacccaacccacatcctgagaatcggcgagagctataaggagaagcagcggaccatccaggccaagaaggaggtggagcagcggagagccggcggctacagccggaagtacgccagcaaagccaagaatctggcagacgatatggtgagaaacaccgctagagatctgctgtactacgccgtgacccaggatgccatgctgatcttcgccaacctgagccggggcttcggccggcagggcaagcggaccttcatggccgagagacagtacacacggatggaggactggctgaccgccaagctggcctacgagggcctgagcaagacctacctgtccaagacactggcccagtacacctccaagacatgcagcaactgtgggtttaccatcaccagcgccgactacgacagggtgctggagaagctgaagaagacagcaacaggctggatgaccacaattaacggcaaggagctgaaggtggagggccagattacctactacaacagatacaagagacagaacgtagtcaaggacctgtccgtcgagctggatagactgagcgaagaatctgtgaacaacgacatctcctcctggacaaagggcagaagcggagaagctctgagcctcctgaagaaaagattctcccatagacccgtgcaggagaagttcgtgtgcctgaactgcggcttcgagacacacgcagccgagcaagccgccctgaacatcgccagatcctggctgttcctgcggagccaggagtacaagaaataccagacaaacaagacaaccggcaacaccgataagagagccttcgtcgagacctggcagtccttttaccggaagaagcttaaggaggtgtggaaacctgccgtgcggtctggcggatctggcggaggctccacaagccaggccgaggtgaccttcgaggacgtggccgtgctgttcagcagggaggagtggggcaggctgggccccgcccagaggggcctgtacagggacgtgatgctggagacctacaggaacctggtgagcctgggcgccggccccgccggccccaagcccggcgtgatcacccagctggagaggggcgacgagccctgggtgctggacgcccagggcgccgagggcaaggagaggctgagggtgagcaccagccccaagaaaaagagaaaagtctaagctgccttctgcggggcttgccttctggccatgcccttcttctctcccttgcacctgtacctcttggtctttgaataaagcctgagtaggaaggctagcaaaaaaaaaaaaaaaaaaaaaaaaaaaaaaaaaaaaaaaaaaaaaaaaaaaaaaaaaaaaaaaaaaaaaaaaaaaaaaaa

SEQ ID NO: 5851 - RNA, 5797 nt, synthetic construct
  source 1..5797: mol_type = other RNA
aggaaataagagagaaaagaagagtaagaagaaatataagagccaccatggcccctaagaagaagcgtaaagtgagccggatggaacgcctcgtctacgaggtgcggcagaagtgcagaaacatcgaggacatctgcatctcctgcggatctctgaacgtgaccctggagcacccactgttcatcggcggcatgtgccagaactgtaaaaactgttttctggagtgtgcctatcaatacgacgatgacggctaccagagctactgcaccatctgttgcggcggaagagaggtgctgatgtgtggaaataacaactgctgccggtgcttctgcgtggaatgcgtggacctgctggtgggccccggcgccgcccaggccgctattaaggaagatccttggaactgctacatgtgcggccacaagggcacatacggcctgctgagacggagagaggactggcctagcagactgcagatgttcttcgccaataaccacgaccaggagttcgacccccctaaggtgtaccctcccgtccccgccgagaagagaaagcccatccgggtcctgagcctgttcgatggcatcgccaccggtctgctggtgctgaaggacctgggcatccaggtggataggtacattgcctccgaggtgtgcgaggactccatcaccgtgggaatggtgcgtcatcagggcaagatcatgtacgtgggcgacgtgcggagcgtgacacagaagcatatccaggagtggggccctttcgacctggtgatcggcggcagcccttgcaatgacctgagcatcgtgaacccagcccggaagggcctgtacgagggaaccggcagactgttcttcgagttttacagactgctgcacgacgcccggcctaaggaaggcgacgaccggcccttcttttggctgttcgagaatgtggtggccatgggagtcagcgacaagcgggatattagccggttcctggagagcaaccccgtgatgatcgatgccaaggaagtgagcgccgcccaccgggccagatacttctggggcaatctgcctggcatgaacagacccctggccagcaccgtgaacgacaagctggagctgcaggagtgcctggagcacggccggatcgccaagttcagcaaggtgagaaccatcaccacccgaagcaacagcatcaaacaaggcaaggaccagcactttcctgtgttcatgaacgagaaggaggacatcctgtggtgtaccgagatggagagagtgttcgggttcccagtccactacacagatgtcagcaacatgtctagactggccagacagagactgctgggaagaagctggtccgtccctgtgatcagacacctgttcgcccctctgaaggagtacttcgcctgcgtgagcagcggcaacagcaacgccaacagccggggccccagcttctctagcggcctggtgccactgtccctgagagggagccacatgggccccatggagatctacaaaaccgtgagcgcctggaagcggcagcctgtgcgcgtgctgagcctgtttcggaatatcgataaagtcctgaaaagcctgggattcctggagagcggctctggctccggcggtggcaccctgaagtacgtggaggatgtgacaaacgtggtcagacgggatgtggagaagtggggccccttcgatctggtgtacggcagcacccaacccctgggcagctcttgtgaccggtgccctggctggtacatgtttcagttccaccggatcctgcagtacgccctgccgagacaggagtcccagcggccattcttttggattttcatggacaacttgctgctgaccgaggatgaccaggaaactaccactcggttcctgcagaccgaagccgtgaccctgcaggacgtgagaggccgggactaccagaacgccatgcgggtgtggtccaacatccctggactgaaaagcaagcacgcacctctgacccctaaagaagaggagtacctgcaggcccaggtgcggagcagaagcaagctggacgcccctaaggtggatctgctggtgaagaattgcctcctgcccctgagagagtacttcaagtatttcagccagaatagtctgcccctgggcggcccaagcagcggcgcccctcctcccagcggcggcagcccagccggctccccaacctctaccgaggagggcacctctgagtccgccacccccgagagcggccctggcacctccaccgagcccagcgagggcagcgcacccggcagccctgccggcagccccacctccacagaggagggaaccagcaccgagcccagcgaaggcagcgccccaggcaccagcaccgagcctagtgagggcggctctggcggcggcagcgcccaggagattaaacggatcaacaagatcagaagaagacttgtgaaagacagcaacaccaagaaggccggcaagacaggccccatgaaaaccctgctggttagagtgatgacacccgatctgagagagcggctggaaaacctgagaaagaagcctgaaaatatcccccagcccatcagcaatacatctagagccaacctgaataagctgctgaccgattacaccgaaatgaagaaggcgatcctgcatgtgtactgggaagagttccagaaggaccctgtgggcctgatgagccgggtggcccagcctgccagcaagaagatcgatcagaacaagctgaaacctgagatggacgagaagggcaacctgaccaccgccggctttgcctgctctcagtgtggccagcccctgttcgtgtacaagctggagcaggtgtctgagaagggcaaggcttacaccaactacttcggacggtgcaatgtggccgagcacgaaaagctgatcctgctggcccagctgaagcccgagaaggatagcgacgaagccgtgacatatagcctgggaaagtttgggcagagggccctggatttctacagcattcatgtgaccaaggagtccacccaccccgtgaagcccctggcccagatcgccggaaacagatacgcctccggacctgtgggaaaggccctgagcgacgcatgtatgggcacaatcgcctccttcctgtctaagtaccaggacatcatcatcgaacaccagaaggtggtgaagggcaaccagaagagactggagagcctgcgggagctggccggcaaggaaaacctggaataccctagcgtgaccctgccacctcagcctcacaccaaggagggcgttgatgcctacaacgaagtgatcgcccgggtgcgaatgtgggtgaacctgaacctgtggcagaagctgaagctaagcagagatgatgccaagcctctgctgagactgaagggattcccttcctttcctctggtcgagagacaggccaacgaagtggactggtgggacatggtgtgtaacgtgaagaagctgatcaacgagaaaaaggaggatggcaaggtgttttggcagaatctggctggctacaagagacaggaagccctgagaccatacctgagcagcgaggaagatcggaagaagggaaagaaattcgctcggtaccagctgggcgacctgctgctgcacctggaaaagaagcacggcgaggactggggaaaggtgtacgacgaggcctgggagcggattgacaagaaagtggaaggcctgagcaagcacatcaagctggaagaggaacggagaagcgaggacgcccagagcaaggccgccctgaccgactggctgcgggctaaggccagcttcgtgatcgagggcctgaaggaggccgacaaggacgagttctgcagatgcgagctgaagctgcagaagtggtacggggacctgcggggaaagcccttcgccatcgaagccgagaacagcatcctggacatcagcggcttcagcaagcagtacaactgtgccttcatctggcagaaggacggcgtgaagaagctgaacctgtacctgatcatcaactacttcaagggcggcaagctgcggttcaagaagatcaaacctgaagccttcgaagccaacagattctacaccgtgatcaacaaaaagagcggcgagatcgtgcccatggaggtgaacttcaacttcgacgaccccaacctgatcatcctgcctctggcctttggcaagagacagggcagagaattcatctggaacgacctgctgtccctggaaaccggcagcctgaagctggccaacggaagagtgatcgagaagacactgtacaacagaagaacccggcaggatgagcctgccctgttcgtggccctgaccttcgagcggcgggaggtcctggactcctccaatatcaaaccaatgaacctgatcggcgtggcaagaggcgaaaacatccccgccgtgatcgccctgaccgaccccgagggctgcccactgagccggtttaaggatagcctgggaaacccaacccacatcctgagaatcggcgagagctataaggagaagcagcggaccatccaggccaagaaggaggtggagcagcggagagccggcggctacagccggaagtacgccagcaaagccaagaatctggcagacgatatggtgagaaacaccgctagagatctgctgtactacgccgtgacccaggatgccatgctgatcttcgccaacctgagccggggcttcggccggcagggcaagcggaccttcatggccgagagacagtacacacggatggaggactggctgaccgccaagctggcctacgagggcctgagcaagacctacctgtccaagacactggcccagtacacctccaagacatgcagcaactgtgggtttaccatcaccagcgccgactacgacagggtgctggagaagctgaagaagacagcaacaggctggatgaccacaattaacggcaaggagctgaaggtggagggccagattacctactacaacagatacaagagacagaacgtagtcaaggacctgtccgtcgagctggatagactgagcgaagaatctgtgaacaacgacatctcctcctggacaaagggcagaagcggagaagctctgagcctcctgaagaaaagattctcccatagacccgtgcaggagaagttcgtgtgcctgaactgcggcttcgagacacacgcagccgagcaagccgccctgaacatcgccagatcctggctgttcctgcggagccaggagtacaagaaataccagacaaacaagacaaccggcaacaccgataagagagccttcgtcgagacctggcagtccttttaccggaagaagcttaaggaggtgtggaaacctgccgtgcggtctggcggatctggcggaggctccacaagcagccagggccccgtgagcttcgaggacgtggccgtggacttcacccaggaggagtggcagcagctggaccccgcccagaggaccctgtacagggacgtgatgctggagaactacagccacctggtgagcgtgggctaccccgtgagcaagcccggcgtgatcagcaagctggagcagggcgaggagccctggatcatgaagagggacatcagcaactggatctaccccgacagggagaccaggaccagccccaagaaaaagagaaaagtctaagctgccttctgcggggcttgccttctggccatgcccttcttctctcccttgcacctgtacctcttggtctttgaataaagcctgagtaggaaggctagcaaaaaaaaaaaaaaaaaaaaaaaaaaaaaaaaaaaaaaaaaaaaaaaaaaaaaaaaaaaaaaaaaaaaaaaaaaaaaaaa

SEQ ID NO: 5852 - RNA, 5797 nt, synthetic construct
  source 1..5797: mol_type = other RNA
aggaaataagagagaaaagaagagtaagaagaaatataagagccaccatggcccctaagaagaagcgtaaagtgagccggatggaacgcctcgtctacgaggtgcggcagaagtgcagaaacatcgaggacatctgcatctcctgcggatctctgaacgtgaccctggagcacccactgttcatcggcggcatgtgccagaactgtaaaaactgttttctggagtgtgcctatcaatacgacgatgacggctaccagagctactgcaccatctgttgcggcggaagagaggtgctgatgtgtggaaataacaactgctgccggtgcttctgcgtggaatgcgtggacctgctggtgggccccggcgccgcccaggccgctattaaggaagatccttggaactgctacatgtgcggccacaagggcacatacggcctgctgagacggagagaggactggcctagcagactgcagatgttcttcgccaataaccacgaccaggagttcgacccccctaaggtgtaccctcccgtccccgccgagaagagaaagcccatccgggtcctgagcctgttcgatggcatcgccaccggtctgctggtgctgaaggacctgggcatccaggtggataggtacattgcctccgaggtgtgcgaggactccatcaccgtgggaatggtgcgtcatcagggcaagatcatgtacgtgggcgacgtgcggagcgtgacacagaagcatatccaggagtggggccctttcgacctggtgatcggcggcagcccttgcaatgacctgagcatcgtgaacccagcccggaagggcctgtacgagggaaccggcagactgttcttcgagttttacagactgctgcacgacgcccggcctaaggaaggcgacgaccggcccttcttttggctgttcgagaatgtggtggccatgggagtcagcgacaagcgggatattagccggttcctggagagcaaccccgtgatgatcgatgccaaggaagtgagcgccgcccaccgggccagatacttctggggcaatctgcctggcatgaacagacccctggccagcaccgtgaacgacaagctggagctgcaggagtgcctggagcacggccggatcgccaagttcagcaaggtgagaaccatcaccacccgaagcaacagcatcaaacaaggcaaggaccagcactttcctgtgttcatgaacgagaaggaggacatcctgtggtgtaccgagatggagagagtgttcgggttcccagtccactacacagatgtcagcaacatgtctagactggccagacagagactgctgggaagaagctggtccgtccctgtgatcagacacctgttcgcccctctgaaggagtacttcgcctgcgtgagcagcggcaacagcaacgccaacagccggggccccagcttctctagcggcctggtgccactgtccctgagagggagccacatgggccccatggagatctacaaaaccgtgagcgcctggaagcggcagcctgtgcgcgtgctgagcctgtttcggaatatcgataaagtcctgaaaagcctgggattcctggagagcggctctggctccggcggtggcaccctgaagtacgtggaggatgtgacaaacgtggtcagacgggatgtggagaagtggggccccttcgatctggtgtacggcagcacccaacccctgggcagctcttgtgaccggtgccctggctggtacatgtttcagttccaccggatcctgcagtacgccctgccgagacaggagtcccagcggccattcttttggattttcatggacaacttgctgctgaccgaggatgaccaggaaactaccactcggttcctgcagaccgaagccgtgaccctgcaggacgtgagaggccgggactaccagaacgccatgcgggtgtggtccaacatccctggactgaaaagcaagcacgcacctctgacccctaaagaagaggagtacctgcaggcccaggtgcggagcagaagcaagctggacgcccctaaggtggatctgctggtgaagaattgcctcctgcccctgagagagtacttcaagtatttcagccagaatagtctgcccctgggcggcccaagcagcggcgcccctcctcccagcggcggcagcccagccggctccccaacctctaccgaggagggcacctctgagtccgccacccccgagagcggccctggcacctccaccgagcccagcgagggcagcgcacccggcagccctgccggcagccccacctccacagaggagggaaccagcaccgagcccagcgaaggcagcgccccaggcaccagcaccgagcctagtgagggcggctctggcggcggcagcgcccaggagattaaacggatcaacaagatcagaagaagacttgtgaaagacagcaacaccaagaaggccggcaagacaggccccatgaaaaccctgctggttagagtgatgacacccgatctgagagagcggctggaaaacctgagaaagaagcctgaaaatatcccccagcccatcagcaatacatctagagccaacctgaataagctgctgaccgattacaccgaaatgaagaaggcgatcctgcatgtgtactgggaagagttccagaaggaccctgtgggcctgatgagccgggtggcccagcctgccagcaagaagatcgatcagaacaagctgaaacctgagatggacgagaagggcaacctgaccaccgccggctttgcctgctctcagtgtggccagcccctgttcgtgtacaagctggagcaggtgtctgagaagggcaaggcttacaccaactacttcggacggtgcaatgtggccgagcacgaaaagctgatcctgctggcccagctgaagcccgagaaggatagcgacgaagccgtgacatatagcctgggaaagtttgggcagagggccctggatttctacagcattcatgtgaccaaggagtccacccaccccgtgaagcccctggcccagatcgccggaaacagatacgcctccggacctgtgggaaaggccctgagcgacgcatgtatgggcacaatcgcctccttcctgtctaagtaccaggacatcatcatcgaacaccagaaggtggtgaagggcaaccagaagagactggagagcctgcgggagctggccggcaaggaaaacctggaataccctagcgtgaccctgccacctcagcctcacaccaaggagggcgttgatgcctacaacgaagtgatcgcccgggtgcgaatgtgggtgaacctgaacctgtggcagaagctgaagctaagcagagatgatgccaagcctctgctgagactgaagggattcccttcctttcctctggtcgagagacaggccaacgaagtggactggtgggacatggtgtgtaacgtgaagaagctgatcaacgagaaaaaggaggatggcaaggtgttttggcagaatctggctggctacaagagacaggaagccctgagaccatacctgagcagcgaggaagatcggaagaagggaaagaaattcgctcggtaccagctgggcgacctgctgctgcacctggaaaagaagcacggcgaggactggggaaaggtgtacgacgaggcctgggagcggattgacaagaaagtggaaggcctgagcaagcacatcaagctggaagaggaacggagaagcgaggacgcccagagcaaggccgccctgaccgactggctgcgggctaaggccagcttcgtgatcgagggcctgaaggaggccgacaaggacgagttctgcagatgcgagctgaagctgcagaagtggtacggggacctgcggggaaagcccttcgccatcgaagccgagaacagcatcctggacatcagcggcttcagcaagcagtacaactgtgccttcatctggcagaaggacggcgtgaagaagctgaacctgtacctgatcatcaactacttcaagggcggcaagctgcggttcaagaagatcaaacctgaagccttcgaagccaacagattctacaccgtgatcaacaaaaagagcggcgagatcgtgcccatggaggtgaacttcaacttcgacgaccccaacctgatcatcctgcctctggcctttggcaagagacagggcagagaattcatctggaacgacctgctgtccctggaaaccggcagcctgaagctggccaacggaagagtgatcgagaagacactgtacaacagaagaacccggcaggatgagcctgccctgttcgtggccctgaccttcgagcggcgggaggtcctggactcctccaatatcaaaccaatgaacctgatcggcgtggcaagaggcgaaaacatccccgccgtgatcgccctgaccgaccccgagggctgcccactgagccggtttaaggatagcctgggaaacccaacccacatcctgagaatcggcgagagctataaggagaagcagcggaccatccaggccaagaaggaggtggagcagcggagagccggcggctacagccggaagtacgccagcaaagccaagaatctggcagacgatatggtgagaaacaccgctagagatctgctgtactacgccgtgacccaggatgccatgctgatcttcgccaacctgagccggggcttcggccggcagggcaagcggaccttcatggccgagagacagtacacacggatggaggactggctgaccgccaagctggcctacgagggcctgagcaagacctacctgtccaagacactggcccagtacacctccaagacatgcagcaactgtgggtttaccatcaccagcgccgactacgacagggtgctggagaagctgaagaagacagcaacaggctggatgaccacaattaacggcaaggagctgaaggtggagggccagattacctactacaacagatacaagagacagaacgtagtcaaggacctgtccgtcgagctggatagactgagcgaagaatctgtgaacaacgacatctcctcctggacaaagggcagaagcggagaagctctgagcctcctgaagaaaagattctcccatagacccgtgcaggagaagttcgtgtgcctgaactgcggcttcgagacacacgcagccgagcaagccgccctgaacatcgccagatcctggctgttcctgcggagccaggagtacaagaaataccagacaaacaagacaaccggcaacaccgataagagagccttcgtcgagacctggcagtccttttaccggaagaagcttaaggaggtgtggaaacctgccgtgcggtctggcggatctggcggaggctccacaagcagccagggcctggtgaccttcggcgacgtggccatcgacttcagccaggaggagtgggagtggctgagccccatccagaggaacctgtacaggaaggtgatgctggagaactacaggaacctggccagcctgggcctgtgcgtgagcaagcccgacgtgatcagcctgctggagcagggcaaggagccctggaccgtgaagaggaagatgaccagggccggctgccccgacctgaaggccgtgaccagccccaagaaaaagagaaaagtctaagctgccttctgcggggcttgccttctggccatgcccttcttctctcccttgcacctgtacctcttggtctttgaataaagcctgagtaggaaggctagcaaaaaaaaaaaaaaaaaaaaaaaaaaaaaaaaaaaaaaaaaaaaaaaaaaaaaaaaaaaaaaaaaaaaaaaaaaaaaaaa

SEQ ID NO: 5853 - RNA, 5797 nt, synthetic construct
  source 1..5797: mol_type = other RNA
aggaaataagagagaaaagaagagtaagaagaaatataagagccaccatggcccctaagaagaagcgtaaagtgagccggatggaacgcctcgtctacgaggtgcggcagaagtgcagaaacatcgaggacatctgcatctcctgcggatctctgaacgtgaccctggagcacccactgttcatcggcggcatgtgccagaactgtaaaaactgttttctggagtgtgcctatcaatacgacgatgacggctaccagagctactgcaccatctgttgcggcggaagagaggtgctgatgtgtggaaataacaactgctgccggtgcttctgcgtggaatgcgtggacctgctggtgggccccggcgccgcccaggccgctattaaggaagatccttggaactgctacatgtgcggccacaagggcacatacggcctgctgagacggagagaggactggcctagcagactgcagatgttcttcgccaataaccacgaccaggagttcgacccccctaaggtgtaccctcccgtccccgccgagaagagaaagcccatccgggtcctgagcctgttcgatggcatcgccaccggtctgctggtgctgaaggacctgggcatccaggtggataggtacattgcctccgaggtgtgcgaggactccatcaccgtgggaatggtgcgtcatcagggcaagatcatgtacgtgggcgacgtgcggagcgtgacacagaagcatatccaggagtggggccctttcgacctggtgatcggcggcagcccttgcaatgacctgagcatcgtgaacccagcccggaagggcctgtacgagggaaccggcagactgttcttcgagttttacagactgctgcacgacgcccggcctaaggaaggcgacgaccggcccttcttttggctgttcgagaatgtggtggccatgggagtcagcgacaagcgggatattagccggttcctggagagcaaccccgtgatgatcgatgccaaggaagtgagcgccgcccaccgggccagatacttctggggcaatctgcctggcatgaacagacccctggccagcaccgtgaacgacaagctggagctgcaggagtgcctggagcacggccggatcgccaagttcagcaaggtgagaaccatcaccacccgaagcaacagcatcaaacaaggcaaggaccagcactttcctgtgttcatgaacgagaaggaggacatcctgtggtgtaccgagatggagagagtgttcgggttcccagtccactacacagatgtcagcaacatgtctagactggccagacagagactgctgggaagaagctggtccgtccctgtgatcagacacctgttcgcccctctgaaggagtacttcgcctgcgtgagcagcggcaacagcaacgccaacagccggggccccagcttctctagcggcctggtgccactgtccctgagagggagccacatgggccccatggagatctacaaaaccgtgagcgcctggaagcggcagcctgtgcgcgtgctgagcctgtttcggaatatcgataaagtcctgaaaagcctgggattcctggagagcggctctggctccggcggtggcaccctgaagtacgtggaggatgtgacaaacgtggtcagacgggatgtggagaagtggggccccttcgatctggtgtacggcagcacccaacccctgggcagctcttgtgaccggtgccctggctggtacatgtttcagttccaccggatcctgcagtacgccctgccgagacaggagtcccagcggccattcttttggattttcatggacaacttgctgctgaccgaggatgaccaggaaactaccactcggttcctgcagaccgaagccgtgaccctgcaggacgtgagaggccgggactaccagaacgccatgcgggtgtggtccaacatccctggactgaaaagcaagcacgcacctctgacccctaaagaagaggagtacctgcaggcccaggtgcggagcagaagcaagctggacgcccctaaggtggatctgctggtgaagaattgcctcctgcccctgagagagtacttcaagtatttcagccagaatagtctgcccctgggcggcccaagcagcggcgcccctcctcccagcggcggcagcccagccggctccccaacctctaccgaggagggcacctctgagtccgccacccccgagagcggccctggcacctccaccgagcccagcgagggcagcgcacccggcagccctgccggcagccccacctccacagaggagggaaccagcaccgagcccagcgaaggcagcgccccaggcaccagcaccgagcctagtgagggcggctctggcggcggcagcgcccaggagattaaacggatcaacaagatcagaagaagacttgtgaaagacagcaacaccaagaaggccggcaagacaggccccatgaaaaccctgctggttagagtgatgacacccgatctgagagagcggctggaaaacctgagaaagaagcctgaaaatatcccccagcccatcagcaatacatctagagccaacctgaataagctgctgaccgattacaccgaaatgaagaaggcgatcctgcatgtgtactgggaagagttccagaaggaccctgtgggcctgatgagccgggtggcccagcctgccagcaagaagatcgatcagaacaagctgaaacctgagatggacgagaagggcaacctgaccaccgccggctttgcctgctctcagtgtggccagcccctgttcgtgtacaagctggagcaggtgtctgagaagggcaaggcttacaccaactacttcggacggtgcaatgtggccgagcacgaaaagctgatcctgctggcccagctgaagcccgagaaggatagcgacgaagccgtgacatatagcctgggaaagtttgggcagagggccctggatttctacagcattcatgtgaccaaggagtccacccaccccgtgaagcccctggcccagatcgccggaaacagatacgcctccggacctgtgggaaaggccctgagcgacgcatgtatgggcacaatcgcctccttcctgtctaagtaccaggacatcatcatcgaacaccagaaggtggtgaagggcaaccagaagagactggagagcctgcgggagctggccggcaaggaaaacctggaataccctagcgtgaccctgccacctcagcctcacaccaaggagggcgttgatgcctacaacgaagtgatcgcccgggtgcgaatgtgggtgaacctgaacctgtggcagaagctgaagctaagcagagatgatgccaagcctctgctgagactgaagggattcccttcctttcctctggtcgagagacaggccaacgaagtggactggtgggacatggtgtgtaacgtgaagaagctgatcaacgagaaaaaggaggatggcaaggtgttttggcagaatctggctggctacaagagacaggaagccctgagaccatacctgagcagcgaggaagatcggaagaagggaaagaaattcgctcggtaccagctgggcgacctgctgctgcacctggaaaagaagcacggcgaggactggggaaaggtgtacgacgaggcctgggagcggattgacaagaaagtggaaggcctgagcaagcacatcaagctggaagaggaacggagaagcgaggacgcccagagcaaggccgccctgaccgactggctgcgggctaaggccagcttcgtgatcgagggcctgaaggaggccgacaaggacgagttctgcagatgcgagctgaagctgcagaagtggtacggggacctgcggggaaagcccttcgccatcgaagccgagaacagcatcctggacatcagcggcttcagcaagcagtacaactgtgccttcatctggcagaaggacggcgtgaagaagctgaacctgtacctgatcatcaactacttcaagggcggcaagctgcggttcaagaagatcaaacctgaagccttcgaagccaacagattctacaccgtgatcaacaaaaagagcggcgagatcgtgcccatggaggtgaacttcaacttcgacgaccccaacctgatcatcctgcctctggcctttggcaagagacagggcagagaattcatctggaacgacctgctgtccctggaaaccggcagcctgaagctggccaacggaagagtgatcgagaagacactgtacaacagaagaacccggcaggatgagcctgccctgttcgtggccctgaccttcgagcggcgggaggtcctggactcctccaatatcaaaccaatgaacctgatcggcgtggcaagaggcgaaaacatccccgccgtgatcgccctgaccgaccccgagggctgcccactgagccggtttaaggatagcctgggaaacccaacccacatcctgagaatcggcgagagctataaggagaagcagcggaccatccaggccaagaaggaggtggagcagcggagagccggcggctacagccggaagtacgccagcaaagccaagaatctggcagacgatatggtgagaaacaccgctagagatctgctgtactacgccgtgacccaggatgccatgctgatcttcgccaacctgagccggggcttcggccggcagggcaagcggaccttcatggccgagagacagtacacacggatggaggactggctgaccgccaagctggcctacgagggcctgagcaagacctacctgtccaagacactggcccagtacacctccaagacatgcagcaactgtgggtttaccatcaccagcgccgactacgacagggtgctggagaagctgaagaagacagcaacaggctggatgaccacaattaacggcaaggagctgaaggtggagggccagattacctactacaacagatacaagagacagaacgtagtcaaggacctgtccgtcgagctggatagactgagcgaagaatctgtgaacaacgacatctcctcctggacaaagggcagaagcggagaagctctgagcctcctgaagaaaagattctcccatagacccgtgcaggagaagttcgtgtgcctgaactgcggcttcgagacacacgcagccgagcaagccgccctgaacatcgccagatcctggctgttcctgcggagccaggagtacaagaaataccagacaaacaagacaaccggcaacaccgataagagagccttcgtcgagacctggcagtccttttaccggaagaagcttaaggaggtgtggaaacctgccgtgcggtctggcggatctggcggaggctccacaagcagccaggagctgctgaccttcaaggacatcagcgtggacttcacccaggaggagtggggccagctggcccccgcccacaggaacctgtacagggaggtgatgctggagaactacggcaacctggtgagcgtggccggctgccagctgagcaagcccagcgtgatcagccagctggagaagggcgaggagccctggatgaccgagaaggagggccccggcgaccccagcagcgacctgaagagcaccagccccaagaaaaagagaaaagtctaagctgccttctgcggggcttgccttctggccatgcccttcttctctcccttgcacctgtacctcttggtctttgaataaagcctgagtaggaaggctagcaaaaaaaaaaaaaaaaaaaaaaaaaaaaaaaaaaaaaaaaaaaaaaaaaaaaaaaaaaaaaaaaaaaaaaaaaaaaaaaa

SEQ ID NO: 5854 - RNA, 5797 nt, synthetic construct
  source 1..5797: mol_type = other RNA
aggaaataagagagaaaagaagagtaagaagaaatataagagccaccatggcccctaagaagaagcgtaaagtgagccggatggaacgcctcgtctacgaggtgcggcagaagtgcagaaacatcgaggacatctgcatctcctgcggatctctgaacgtgaccctggagcacccactgttcatcggcggcatgtgccagaactgtaaaaactgttttctggagtgtgcctatcaatacgacgatgacggctaccagagctactgcaccatctgttgcggcggaagagaggtgctgatgtgtggaaataacaactgctgccggtgcttctgcgtggaatgcgtggacctgctggtgggccccggcgccgcccaggccgctattaaggaagatccttggaactgctacatgtgcggccacaagggcacatacggcctgctgagacggagagaggactggcctagcagactgcagatgttcttcgccaataaccacgaccaggagttcgacccccctaaggtgtaccctcccgtccccgccgagaagagaaagcccatccgggtcctgagcctgttcgatggcatcgccaccggtctgctggtgctgaaggacctgggcatccaggtggataggtacattgcctccgaggtgtgcgaggactccatcaccgtgggaatggtgcgtcatcagggcaagatcatgtacgtgggcgacgtgcggagcgtgacacagaagcatatccaggagtggggccctttcgacctggtgatcggcggcagcccttgcaatgacctgagcatcgtgaacccagcccggaagggcctgtacgagggaaccggcagactgttcttcgagttttacagactgctgcacgacgcccggcctaaggaaggcgacgaccggcccttcttttggctgttcgagaatgtggtggccatgggagtcagcgacaagcgggatattagccggttcctggagagcaaccccgtgatgatcgatgccaaggaagtgagcgccgcccaccgggccagatacttctggggcaatctgcctggcatgaacagacccctggccagcaccgtgaacgacaagctggagctgcaggagtgcctggagcacggccggatcgccaagttcagcaaggtgagaaccatcaccacccgaagcaacagcatcaaacaaggcaaggaccagcactttcctgtgttcatgaacgagaaggaggacatcctgtggtgtaccgagatggagagagtgttcgggttcccagtccactacacagatgtcagcaacatgtctagactggccagacagagactgctgggaagaagctggtccgtccctgtgatcagacacctgttcgcccctctgaaggagtacttcgcctgcgtgagcagcggcaacagcaacgccaacagccggggccccagcttctctagcggcctggtgccactgtccctgagagggagccacatgggccccatggagatctacaaaaccgtgagcgcctggaagcggcagcctgtgcgcgtgctgagcctgtttcggaatatcgataaagtcctgaaaagcctgggattcctggagagcggctctggctccggcggtggcaccctgaagtacgtggaggatgtgacaaacgtggtcagacgggatgtggagaagtggggccccttcgatctggtgtacggcagcacccaacccctgggcagctcttgtgaccggtgccctggctggtacatgtttcagttccaccggatcctgcagtacgccctgccgagacaggagtcccagcggccattcttttggattttcatggacaacttgctgctgaccgaggatgaccaggaaactaccactcggttcctgcagaccgaagccgtgaccctgcaggacgtgagaggccgggactaccagaacgccatgcgggtgtggtccaacatccctggactgaaaagcaagcacgcacctctgacccctaaagaagaggagtacctgcaggcccaggtgcggagcagaagcaagctggacgcccctaaggtggatctgctggtgaagaattgcctcctgcccctgagagagtacttcaagtatttcagccagaatagtctgcccctgggcggcccaagcagcggcgcccctcctcccagcggcggcagcccagccggctccccaacctctaccgaggagggcacctctgagtccgccacccccgagagcggccctggcacctccaccgagcccagcgagggcagcgcacccggcagccctgccggcagccccacctccacagaggagggaaccagcaccgagcccagcgaaggcagcgccccaggcaccagcaccgagcctagtgagggcggctctggcggcggcagcgcccaggagattaaacggatcaacaagatcagaagaagacttgtgaaagacagcaacaccaagaaggccggcaagacaggccccatgaaaaccctgctggttagagtgatgacacccgatctgagagagcggctggaaaacctgagaaagaagcctgaaaatatcccccagcccatcagcaatacatctagagccaacctgaataagctgctgaccgattacaccgaaatgaagaaggcgatcctgcatgtgtactgggaagagttccagaaggaccctgtgggcctgatgagccgggtggcccagcctgccagcaagaagatcgatcagaacaagctgaaacctgagatggacgagaagggcaacctgaccaccgccggctttgcctgctctcagtgtggccagcccctgttcgtgtacaagctggagcaggtgtctgagaagggcaaggcttacaccaactacttcggacggtgcaatgtggccgagcacgaaaagctgatcctgctggcccagctgaagcccgagaaggatagcgacgaagccgtgacatatagcctgggaaagtttgggcagagggccctggatttctacagcattcatgtgaccaaggagtccacccaccccgtgaagcccctggcccagatcgccggaaacagatacgcctccggacctgtgggaaaggccctgagcgacgcatgtatgggcacaatcgcctccttcctgtctaagtaccaggacatcatcatcgaacaccagaaggtggtgaagggcaaccagaagagactggagagcctgcgggagctggccggcaaggaaaacctggaataccctagcgtgaccctgccacctcagcctcacaccaaggagggcgttgatgcctacaacgaagtgatcgcccgggtgcgaatgtgggtgaacctgaacctgtggcagaagctgaagctaagcagagatgatgccaagcctctgctgagactgaagggattcccttcctttcctctggtcgagagacaggccaacgaagtggactggtgggacatggtgtgtaacgtgaagaagctgatcaacgagaaaaaggaggatggcaaggtgttttggcagaatctggctggctacaagagacaggaagccctgagaccatacctgagcagcgaggaagatcggaagaagggaaagaaattcgctcggtaccagctgggcgacctgctgctgcacctggaaaagaagcacggcgaggactggggaaaggtgtacgacgaggcctgggagcggattgacaagaaagtggaaggcctgagcaagcacatcaagctggaagaggaacggagaagcgaggacgcccagagcaaggccgccctgaccgactggctgcgggctaaggccagcttcgtgatcgagggcctgaaggaggccgacaaggacgagttctgcagatgcgagctgaagctgcagaagtggtacggggacctgcggggaaagcccttcgccatcgaagccgagaacagcatcctggacatcagcggcttcagcaagcagtacaactgtgccttcatctggcagaaggacggcgtgaagaagctgaacctgtacctgatcatcaactacttcaagggcggcaagctgcggttcaagaagatcaaacctgaagccttcgaagccaacagattctacaccgtgatcaacaaaaagagcggcgagatcgtgcccatggaggtgaacttcaacttcgacgaccccaacctgatcatcctgcctctggcctttggcaagagacagggcagagaattcatctggaacgacctgctgtccctggaaaccggcagcctgaagctggccaacggaagagtgatcgagaagacactgtacaacagaagaacccggcaggatgagcctgccctgttcgtggccctgaccttcgagcggcgggaggtcctggactcctccaatatcaaaccaatgaacctgatcggcgtggcaagaggcgaaaacatccccgccgtgatcgccctgaccgaccccgagggctgcccactgagccggtttaaggatagcctgggaaacccaacccacatcctgagaatcggcgagagctataaggagaagcagcggaccatccaggccaagaaggaggtggagcagcggagagccggcggctacagccggaagtacgccagcaaagccaagaatctggcagacgatatggtgagaaacaccgctagagatctgctgtactacgccgtgacccaggatgccatgctgatcttcgccaacctgagccggggcttcggccggcagggcaagcggaccttcatggccgagagacagtacacacggatggaggactggctgaccgccaagctggcctacgagggcctgagcaagacctacctgtccaagacactggcccagtacacctccaagacatgcagcaactgtgggtttaccatcaccagcgccgactacgacagggtgctggagaagctgaagaagacagcaacaggctggatgaccacaattaacggcaaggagctgaaggtggagggccagattacctactacaacagatacaagagacagaacgtagtcaaggacctgtccgtcgagctggatagactgagcgaagaatctgtgaacaacgacatctcctcctggacaaagggcagaagcggagaagctctgagcctcctgaagaaaagattctcccatagacccgtgcaggagaagttcgtgtgcctgaactgcggcttcgagacacacgcagccgagcaagccgccctgaacatcgccagatcctggctgttcctgcggagccaggagtacaagaaataccagacaaacaagacaaccggcaacaccgataagagagccttcgtcgagacctggcagtccttttaccggaagaagcttaaggaggtgtggaaacctgccgtgcggtctggcggatctggcggaggctccacaagcatgcccggcccccccggcagcctggagatggaccccctgaccttcagggacgtggccatcgagttcagcctggaggagtggcagtgcctggacaccgcccagcagaacctgtacaggaacgtgatgctggagaactacaagaacctggccttcctgggcatcgccgtgagcaagcccgacctgatcaccaggctggagaaggagaaggagccctggaagatgaagaggcacaggatggtggacaccagccccaagaaaaagagaaaagtctaagctgccttctgcggggcttgccttctggccatgcccttcttctctcccttgcacctgtacctcttggtctttgaataaagcctgagtaggaaggctagcaaaaaaaaaaaaaaaaaaaaaaaaaaaaaaaaaaaaaaaaaaaaaaaaaaaaaaaaaaaaaaaaaaaaaaaaaaaaaaaa

SEQ ID NO: 5855 - RNA, 5797 nt, synthetic construct
  source 1..5797: mol_type = other RNA
aggaaataagagagaaaagaagagtaagaagaaatataagagccaccatggcccctaagaagaagcgtaaagtgagccggatggaacgcctcgtctacgaggtgcggcagaagtgcagaaacatcgaggacatctgcatctcctgcggatctctgaacgtgaccctggagcacccactgttcatcggcggcatgtgccagaactgtaaaaactgttttctggagtgtgcctatcaatacgacgatgacggctaccagagctactgcaccatctgttgcggcggaagagaggtgctgatgtgtggaaataacaactgctgccggtgcttctgcgtggaatgcgtggacctgctggtgggccccggcgccgcccaggccgctattaaggaagatccttggaactgctacatgtgcggccacaagggcacatacggcctgctgagacggagagaggactggcctagcagactgcagatgttcttcgccaataaccacgaccaggagttcgacccccctaaggtgtaccctcccgtccccgccgagaagagaaagcccatccgggtcctgagcctgttcgatggcatcgccaccggtctgctggtgctgaaggacctgggcatccaggtggataggtacattgcctccgaggtgtgcgaggactccatcaccgtgggaatggtgcgtcatcagggcaagatcatgtacgtgggcgacgtgcggagcgtgacacagaagcatatccaggagtggggccctttcgacctggtgatcggcggcagcccttgcaatgacctgagcatcgtgaacccagcccggaagggcctgtacgagggaaccggcagactgttcttcgagttttacagactgctgcacgacgcccggcctaaggaaggcgacgaccggcccttcttttggctgttcgagaatgtggtggccatgggagtcagcgacaagcgggatattagccggttcctggagagcaaccccgtgatgatcgatgccaaggaagtgagcgccgcccaccgggccagatacttctggggcaatctgcctggcatgaacagacccctggccagcaccgtgaacgacaagctggagctgcaggagtgcctggagcacggccggatcgccaagttcagcaaggtgagaaccatcaccacccgaagcaacagcatcaaacaaggcaaggaccagcactttcctgtgttcatgaacgagaaggaggacatcctgtggtgtaccgagatggagagagtgttcgggttcccagtccactacacagatgtcagcaacatgtctagactggccagacagagactgctgggaagaagctggtccgtccctgtgatcagacacctgttcgcccctctgaaggagtacttcgcctgcgtgagcagcggcaacagcaacgccaacagccggggccccagcttctctagcggcctggtgccactgtccctgagagggagccacatgggccccatggagatctacaaaaccgtgagcgcctggaagcggcagcctgtgcgcgtgctgagcctgtttcggaatatcgataaagtcctgaaaagcctgggattcctggagagcggctctggctccggcggtggcaccctgaagtacgtggaggatgtgacaaacgtggtcagacgggatgtggagaagtggggccccttcgatctggtgtacggcagcacccaacccctgggcagctcttgtgaccggtgccctggctggtacatgtttcagttccaccggatcctgcagtacgccctgccgagacaggagtcccagcggccattcttttggattttcatggacaacttgctgctgaccgaggatgaccaggaaactaccactcggttcctgcagaccgaagccgtgaccctgcaggacgtgagaggccgggactaccagaacgccatgcgggtgtggtccaacatccctggactgaaaagcaagcacgcacctctgacccctaaagaagaggagtacctgcaggcccaggtgcggagcagaagcaagctggacgcccctaaggtggatctgctggtgaagaattgcctcctgcccctgagagagtacttcaagtatttcagccagaatagtctgcccctgggcggcccaagcagcggcgcccctcctcccagcggcggcagcccagccggctccccaacctctaccgaggagggcacctctgagtccgccacccccgagagcggccctggcacctccaccgagcccagcgagggcagcgcacccggcagccctgccggcagccccacctccacagaggagggaaccagcaccgagcccagcgaaggcagcgccccaggcaccagcaccgagcctagtgagggcggctctggcggcggcagcgcccaggagattaaacggatcaacaagatcagaagaagacttgtgaaagacagcaacaccaagaaggccggcaagacaggccccatgaaaaccctgctggttagagtgatgacacccgatctgagagagcggctggaaaacctgagaaagaagcctgaaaatatcccccagcccatcagcaatacatctagagccaacctgaataagctgctgaccgattacaccgaaatgaagaaggcgatcctgcatgtgtactgggaagagttccagaaggaccctgtgggcctgatgagccgggtggcccagcctgccagcaagaagatcgatcagaacaagctgaaacctgagatggacgagaagggcaacctgaccaccgccggctttgcctgctctcagtgtggccagcccctgttcgtgtacaagctggagcaggtgtctgagaagggcaaggcttacaccaactacttcggacggtgcaatgtggccgagcacgaaaagctgatcctgctggcccagctgaagcccgagaaggatagcgacgaagccgtgacatatagcctgggaaagtttgggcagagggccctggatttctacagcattcatgtgaccaaggagtccacccaccccgtgaagcccctggcccagatcgccggaaacagatacgcctccggacctgtgggaaaggccctgagcgacgcatgtatgggcacaatcgcctccttcctgtctaagtaccaggacatcatcatcgaacaccagaaggtggtgaagggcaaccagaagagactggagagcctgcgggagctggccggcaaggaaaacctggaataccctagcgtgaccctgccacctcagcctcacaccaaggagggcgttgatgcctacaacgaagtgatcgcccgggtgcgaatgtgggtgaacctgaacctgtggcagaagctgaagctaagcagagatgatgccaagcctctgctgagactgaagggattcccttcctttcctctggtcgagagacaggccaacgaagtggactggtgggacatggtgtgtaacgtgaagaagctgatcaacgagaaaaaggaggatggcaaggtgttttggcagaatctggctggctacaagagacaggaagccctgagaccatacctgagcagcgaggaagatcggaagaagggaaagaaattcgctcggtaccagctgggcgacctgctgctgcacctggaaaagaagcacggcgaggactggggaaaggtgtacgacgaggcctgggagcggattgacaagaaagtggaaggcctgagcaagcacatcaagctggaagaggaacggagaagcgaggacgcccagagcaaggccgccctgaccgactggctgcgggctaaggccagcttcgtgatcgagggcctgaaggaggccgacaaggacgagttctgcagatgcgagctgaagctgcagaagtggtacggggacctgcggggaaagcccttcgccatcgaagccgagaacagcatcctggacatcagcggcttcagcaagcagtacaactgtgccttcatctggcagaaggacggcgtgaagaagctgaacctgtacctgatcatcaactacttcaagggcggcaagctgcggttcaagaagatcaaacctgaagccttcgaagccaacagattctacaccgtgatcaacaaaaagagcggcgagatcgtgcccatggaggtgaacttcaacttcgacgaccccaacctgatcatcctgcctctggcctttggcaagagacagggcagagaattcatctggaacgacctgctgtccctggaaaccggcagcctgaagctggccaacggaagagtgatcgagaagacactgtacaacagaagaacccggcaggatgagcctgccctgttcgtggccctgaccttcgagcggcgggaggtcctggactcctccaatatcaaaccaatgaacctgatcggcgtggcaagaggcgaaaacatccccgccgtgatcgccctgaccgaccccgagggctgcccactgagccggtttaaggatagcctgggaaacccaacccacatcctgagaatcggcgagagctataaggagaagcagcggaccatccaggccaagaaggaggtggagcagcggagagccggcggctacagccggaagtacgccagcaaagccaagaatctggcagacgatatggtgagaaacaccgctagagatctgctgtactacgccgtgacccaggatgccatgctgatcttcgccaacctgagccggggcttcggccggcagggcaagcggaccttcatggccgagagacagtacacacggatggaggactggctgaccgccaagctggcctacgagggcctgagcaagacctacctgtccaagacactggcccagtacacctccaagacatgcagcaactgtgggtttaccatcaccagcgccgactacgacagggtgctggagaagctgaagaagacagcaacaggctggatgaccacaattaacggcaaggagctgaaggtggagggccagattacctactacaacagatacaagagacagaacgtagtcaaggacctgtccgtcgagctggatagactgagcgaagaatctgtgaacaacgacatctcctcctggacaaagggcagaagcggagaagctctgagcctcctgaagaaaagattctcccatagacccgtgcaggagaagttcgtgtgcctgaactgcggcttcgagacacacgcagccgagcaagccgccctgaacatcgccagatcctggctgttcctgcggagccaggagtacaagaaataccagacaaacaagacaaccggcaacaccgataagagagccttcgtcgagacctggcagtccttttaccggaagaagcttaaggaggtgtggaaacctgccgtgcggtctggcggatctggcggaggctccacaagcaacgccgtgacctacaacgacgtgcacgtggacttcacccaggaggagtgggccctgatggaccccagccagaggaacctgtacaaggacgtgatggtggagacctacatgaacctgaccgccatcggctacaactgggaggacctggaggtggaggagcactgccagaacagcctgaagcacggcaggcacaagaggccccacaccaccgagaagagctgcgagtacatgggctgcggcaagaccagccccaagaaaaagagaaaagtctaagctgccttctgcggggcttgccttctggccatgcccttcttctctcccttgcacctgtacctcttggtctttgaataaagcctgagtaggaaggctagcaaaaaaaaaaaaaaaaaaaaaaaaaaaaaaaaaaaaaaaaaaaaaaaaaaaaaaaaaaaaaaaaaaaaaaaaaaaaaaaa

SEQ ID NO: 5856 - RNA, 5797 nt, synthetic construct
  source 1..5797: mol_type = other RNA
aggaaataagagagaaaagaagagtaagaagaaatataagagccaccatggcccctaagaagaagcgtaaagtgagccggatggaacgcctcgtctacgaggtgcggcagaagtgcagaaacatcgaggacatctgcatctcctgcggatctctgaacgtgaccctggagcacccactgttcatcggcggcatgtgccagaactgtaaaaactgttttctggagtgtgcctatcaatacgacgatgacggctaccagagctactgcaccatctgttgcggcggaagagaggtgctgatgtgtggaaataacaactgctgccggtgcttctgcgtggaatgcgtggacctgctggtgggccccggcgccgcccaggccgctattaaggaagatccttggaactgctacatgtgcggccacaagggcacatacggcctgctgagacggagagaggactggcctagcagactgcagatgttcttcgccaataaccacgaccaggagttcgacccccctaaggtgtaccctcccgtccccgccgagaagagaaagcccatccgggtcctgagcctgttcgatggcatcgccaccggtctgctggtgctgaaggacctgggcatccaggtggataggtacattgcctccgaggtgtgcgaggactccatcaccgtgggaatggtgcgtcatcagggcaagatcatgtacgtgggcgacgtgcggagcgtgacacagaagcatatccaggagtggggccctttcgacctggtgatcggcggcagcccttgcaatgacctgagcatcgtgaacccagcccggaagggcctgtacgagggaaccggcagactgttcttcgagttttacagactgctgcacgacgcccggcctaaggaaggcgacgaccggcccttcttttggctgttcgagaatgtggtggccatgggagtcagcgacaagcgggatattagccggttcctggagagcaaccccgtgatgatcgatgccaaggaagtgagcgccgcccaccgggccagatacttctggggcaatctgcctggcatgaacagacccctggccagcaccgtgaacgacaagctggagctgcaggagtgcctggagcacggccggatcgccaagttcagcaaggtgagaaccatcaccacccgaagcaacagcatcaaacaaggcaaggaccagcactttcctgtgttcatgaacgagaaggaggacatcctgtggtgtaccgagatggagagagtgttcgggttcccagtccactacacagatgtcagcaacatgtctagactggccagacagagactgctgggaagaagctggtccgtccctgtgatcagacacctgttcgcccctctgaaggagtacttcgcctgcgtgagcagcggcaacagcaacgccaacagccggggccccagcttctctagcggcctggtgccactgtccctgagagggagccacatgggccccatggagatctacaaaaccgtgagcgcctggaagcggcagcctgtgcgcgtgctgagcctgtttcggaatatcgataaagtcctgaaaagcctgggattcctggagagcggctctggctccggcggtggcaccctgaagtacgtggaggatgtgacaaacgtggtcagacgggatgtggagaagtggggccccttcgatctggtgtacggcagcacccaacccctgggcagctcttgtgaccggtgccctggctggtacatgtttcagttccaccggatcctgcagtacgccctgccgagacaggagtcccagcggccattcttttggattttcatggacaacttgctgctgaccgaggatgaccaggaaactaccactcggttcctgcagaccgaagccgtgaccctgcaggacgtgagaggccgggactaccagaacgccatgcgggtgtggtccaacatccctggactgaaaagcaagcacgcacctctgacccctaaagaagaggagtacctgcaggcccaggtgcggagcagaagcaagctggacgcccctaaggtggatctgctggtgaagaattgcctcctgcccctgagagagtacttcaagtatttcagccagaatagtctgcccctgggcggcccaagcagcggcgcccctcctcccagcggcggcagcccagccggctccccaacctctaccgaggagggcacctctgagtccgccacccccgagagcggccctggcacctccaccgagcccagcgagggcagcgcacccggcagccctgccggcagccccacctccacagaggagggaaccagcaccgagcccagcgaaggcagcgccccaggcaccagcaccgagcctagtgagggcggctctggcggcggcagcgcccaggagattaaacggatcaacaagatcagaagaagacttgtgaaagacagcaacaccaagaaggccggcaagacaggccccatgaaaaccctgctggttagagtgatgacacccgatctgagagagcggctggaaaacctgagaaagaagcctgaaaatatcccccagcccatcagcaatacatctagagccaacctgaataagctgctgaccgattacaccgaaatgaagaaggcgatcctgcatgtgtactgggaagagttccagaaggaccctgtgggcctgatgagccgggtggcccagcctgccagcaagaagatcgatcagaacaagctgaaacctgagatggacgagaagggcaacctgaccaccgccggctttgcctgctctcagtgtggccagcccctgttcgtgtacaagctggagcaggtgtctgagaagggcaaggcttacaccaactacttcggacggtgcaatgtggccgagcacgaaaagctgatcctgctggcccagctgaagcccgagaaggatagcgacgaagccgtgacatatagcctgggaaagtttgggcagagggccctggatttctacagcattcatgtgaccaaggagtccacccaccccgtgaagcccctggcccagatcgccggaaacagatacgcctccggacctgtgggaaaggccctgagcgacgcatgtatgggcacaatcgcctccttcctgtctaagtaccaggacatcatcatcgaacaccagaaggtggtgaagggcaaccagaagagactggagagcctgcgggagctggccggcaaggaaaacctggaataccctagcgtgaccctgccacctcagcctcacaccaaggagggcgttgatgcctacaacgaagtgatcgcccgggtgcgaatgtgggtgaacctgaacctgtggcagaagctgaagctaagcagagatgatgccaagcctctgctgagactgaagggattcccttcctttcctctggtcgagagacaggccaacgaagtggactggtgggacatggtgtgtaacgtgaagaagctgatcaacgagaaaaaggaggatggcaaggtgttttggcagaatctggctggctacaagagacaggaagccctgagaccatacctgagcagcgaggaagatcggaagaagggaaagaaattcgctcggtaccagctgggcgacctgctgctgcacctggaaaagaagcacggcgaggactggggaaaggtgtacgacgaggcctgggagcggattgacaagaaagtggaaggcctgagcaagcacatcaagctggaagaggaacggagaagcgaggacgcccagagcaaggccgccctgaccgactggctgcgggctaaggccagcttcgtgatcgagggcctgaaggaggccgacaaggacgagttctgcagatgcgagctgaagctgcagaagtggtacggggacctgcggggaaagcccttcgccatcgaagccgagaacagcatcctggacatcagcggcttcagcaagcagtacaactgtgccttcatctggcagaaggacggcgtgaagaagctgaacctgtacctgatcatcaactacttcaagggcggcaagctgcggttcaagaagatcaaacctgaagccttcgaagccaacagattctacaccgtgatcaacaaaaagagcggcgagatcgtgcccatggaggtgaacttcaacttcgacgaccccaacctgatcatcctgcctctggcctttggcaagagacagggcagagaattcatctggaacgacctgctgtccctggaaaccggcagcctgaagctggccaacggaagagtgatcgagaagacactgtacaacagaagaacccggcaggatgagcctgccctgttcgtggccctgaccttcgagcggcgggaggtcctggactcctccaatatcaaaccaatgaacctgatcggcgtggcaagaggcgaaaacatccccgccgtgatcgccctgaccgaccccgagggctgcccactgagccggtttaaggatagcctgggaaacccaacccacatcctgagaatcggcgagagctataaggagaagcagcggaccatccaggccaagaaggaggtggagcagcggagagccggcggctacagccggaagtacgccagcaaagccaagaatctggcagacgatatggtgagaaacaccgctagagatctgctgtactacgccgtgacccaggatgccatgctgatcttcgccaacctgagccggggcttcggccggcagggcaagcggaccttcatggccgagagacagtacacacggatggaggactggctgaccgccaagctggcctacgagggcctgagcaagacctacctgtccaagacactggcccagtacacctccaagacatgcagcaactgtgggtttaccatcaccagcgccgactacgacagggtgctggagaagctgaagaagacagcaacaggctggatgaccacaattaacggcaaggagctgaaggtggagggccagattacctactacaacagatacaagagacagaacgtagtcaaggacctgtccgtcgagctggatagactgagcgaagaatctgtgaacaacgacatctcctcctggacaaagggcagaagcggagaagctctgagcctcctgaagaaaagattctcccatagacccgtgcaggagaagttcgtgtgcctgaactgcggcttcgagacacacgcagccgagcaagccgccctgaacatcgccagatcctggctgttcctgcggagccaggagtacaagaaataccagacaaacaagacaaccggcaacaccgataagagagccttcgtcgagacctggcagtccttttaccggaagaagcttaaggaggtgtggaaacctgccgtgcggtctggcggatctggcggaggctccacaagcagccaggagcccgtgaccttcgaggacgtggccgtgtacttcacccagaaccagtgggccagcctggaccccacccagagggccctgtacagggaggtgatgctggagaactacgccaacatcaccagcctggccgccttccccttccccaagcccgacctgatcctgcagctggagaggggcgaggccaggtggggcctggacccctggatcgccatcgagggcgaggccctgggcggcgtgaccagccccaagaaaaagagaaaagtctaagctgccttctgcggggcttgccttctggccatgcccttcttctctcccttgcacctgtacctcttggtctttgaataaagcctgagtaggaaggctagcaaaaaaaaaaaaaaaaaaaaaaaaaaaaaaaaaaaaaaaaaaaaaaaaaaaaaaaaaaaaaaaaaaaaaaaaaaaaaaaa

SEQ ID NO: 5857 - RNA, 5797 nt, synthetic construct
  source 1..5797: mol_type = other RNA
aggaaataagagagaaaagaagagtaagaagaaatataagagccaccatggcccctaagaagaagcgtaaagtgagccggatggaacgcctcgtctacgaggtgcggcagaagtgcagaaacatcgaggacatctgcatctcctgcggatctctgaacgtgaccctggagcacccactgttcatcggcggcatgtgccagaactgtaaaaactgttttctggagtgtgcctatcaatacgacgatgacggctaccagagctactgcaccatctgttgcggcggaagagaggtgctgatgtgtggaaataacaactgctgccggtgcttctgcgtggaatgcgtggacctgctggtgggccccggcgccgcccaggccgctattaaggaagatccttggaactgctacatgtgcggccacaagggcacatacggcctgctgagacggagagaggactggcctagcagactgcagatgttcttcgccaataaccacgaccaggagttcgacccccctaaggtgtaccctcccgtccccgccgagaagagaaagcccatccgggtcctgagcctgttcgatggcatcgccaccggtctgctggtgctgaaggacctgggcatccaggtggataggtacattgcctccgaggtgtgcgaggactccatcaccgtgggaatggtgcgtcatcagggcaagatcatgtacgtgggcgacgtgcggagcgtgacacagaagcatatccaggagtggggccctttcgacctggtgatcggcggcagcccttgcaatgacctgagcatcgtgaacccagcccggaagggcctgtacgagggaaccggcagactgttcttcgagttttacagactgctgcacgacgcccggcctaaggaaggcgacgaccggcccttcttttggctgttcgagaatgtggtggccatgggagtcagcgacaagcgggatattagccggttcctggagagcaaccccgtgatgatcgatgccaaggaagtgagcgccgcccaccgggccagatacttctggggcaatctgcctggcatgaacagacccctggccagcaccgtgaacgacaagctggagctgcaggagtgcctggagcacggccggatcgccaagttcagcaaggtgagaaccatcaccacccgaagcaacagcatcaaacaaggcaaggaccagcactttcctgtgttcatgaacgagaaggaggacatcctgtggtgtaccgagatggagagagtgttcgggttcccagtccactacacagatgtcagcaacatgtctagactggccagacagagactgctgggaagaagctggtccgtccctgtgatcagacacctgttcgcccctctgaaggagtacttcgcctgcgtgagcagcggcaacagcaacgccaacagccggggccccagcttctctagcggcctggtgccactgtccctgagagggagccacatgggccccatggagatctacaaaaccgtgagcgcctggaagcggcagcctgtgcgcgtgctgagcctgtttcggaatatcgataaagtcctgaaaagcctgggattcctggagagcggctctggctccggcggtggcaccctgaagtacgtggaggatgtgacaaacgtggtcagacgggatgtggagaagtggggccccttcgatctggtgtacggcagcacccaacccctgggcagctcttgtgaccggtgccctggctggtacatgtttcagttccaccggatcctgcagtacgccctgccgagacaggagtcccagcggccattcttttggattttcatggacaacttgctgctgaccgaggatgaccaggaaactaccactcggttcctgcagaccgaagccgtgaccctgcaggacgtgagaggccgggactaccagaacgccatgcgggtgtggtccaacatccctggactgaaaagcaagcacgcacctctgacccctaaagaagaggagtacctgcaggcccaggtgcggagcagaagcaagctggacgcccctaaggtggatctgctggtgaagaattgcctcctgcccctgagagagtacttcaagtatttcagccagaatagtctgcccctgggcggcccaagcagcggcgcccctcctcccagcggcggcagcccagccggctccccaacctctaccgaggagggcacctctgagtccgccacccccgagagcggccctggcacctccaccgagcccagcgagggcagcgcacccggcagccctgccggcagccccacctccacagaggagggaaccagcaccgagcccagcgaaggcagcgccccaggcaccagcaccgagcctagtgagggcggctctggcggcggcagcgcccaggagattaaacggatcaacaagatcagaagaagacttgtgaaagacagcaacaccaagaaggccggcaagacaggccccatgaaaaccctgctggttagagtgatgacacccgatctgagagagcggctggaaaacctgagaaagaagcctgaaaatatcccccagcccatcagcaatacatctagagccaacctgaataagctgctgaccgattacaccgaaatgaagaaggcgatcctgcatgtgtactgggaagagttccagaaggaccctgtgggcctgatgagccgggtggcccagcctgccagcaagaagatcgatcagaacaagctgaaacctgagatggacgagaagggcaacctgaccaccgccggctttgcctgctctcagtgtggccagcccctgttcgtgtacaagctggagcaggtgtctgagaagggcaaggcttacaccaactacttcggacggtgcaatgtggccgagcacgaaaagctgatcctgctggcccagctgaagcccgagaaggatagcgacgaagccgtgacatatagcctgggaaagtttgggcagagggccctggatttctacagcattcatgtgaccaaggagtccacccaccccgtgaagcccctggcccagatcgccggaaacagatacgcctccggacctgtgggaaaggccctgagcgacgcatgtatgggcacaatcgcctccttcctgtctaagtaccaggacatcatcatcgaacaccagaaggtggtgaagggcaaccagaagagactggagagcctgcgggagctggccggcaaggaaaacctggaataccctagcgtgaccctgccacctcagcctcacaccaaggagggcgttgatgcctacaacgaagtgatcgcccgggtgcgaatgtgggtgaacctgaacctgtggcagaagctgaagctaagcagagatgatgccaagcctctgctgagactgaagggattcccttcctttcctctggtcgagagacaggccaacgaagtggactggtgggacatggtgtgtaacgtgaagaagctgatcaacgagaaaaaggaggatggcaaggtgttttggcagaatctggctggctacaagagacaggaagccctgagaccatacctgagcagcgaggaagatcggaagaagggaaagaaattcgctcggtaccagctgggcgacctgctgctgcacctggaaaagaagcacggcgaggactggggaaaggtgtacgacgaggcctgggagcggattgacaagaaagtggaaggcctgagcaagcacatcaagctggaagaggaacggagaagcgaggacgcccagagcaaggccgccctgaccgactggctgcgggctaaggccagcttcgtgatcgagggcctgaaggaggccgacaaggacgagttctgcagatgcgagctgaagctgcagaagtggtacggggacctgcggggaaagcccttcgccatcgaagccgagaacagcatcctggacatcagcggcttcagcaagcagtacaactgtgccttcatctggcagaaggacggcgtgaagaagctgaacctgtacctgatcatcaactacttcaagggcggcaagctgcggttcaagaagatcaaacctgaagccttcgaagccaacagattctacaccgtgatcaacaaaaagagcggcgagatcgtgcccatggaggtgaacttcaacttcgacgaccccaacctgatcatcctgcctctggcctttggcaagagacagggcagagaattcatctggaacgacctgctgtccctggaaaccggcagcctgaagctggccaacggaagagtgatcgagaagacactgtacaacagaagaacccggcaggatgagcctgccctgttcgtggccctgaccttcgagcggcgggaggtcctggactcctccaatatcaaaccaatgaacctgatcggcgtggcaagaggcgaaaacatccccgccgtgatcgccctgaccgaccccgagggctgcccactgagccggtttaaggatagcctgggaaacccaacccacatcctgagaatcggcgagagctataaggagaagcagcggaccatccaggccaagaaggaggtggagcagcggagagccggcggctacagccggaagtacgccagcaaagccaagaatctggcagacgatatggtgagaaacaccgctagagatctgctgtactacgccgtgacccaggatgccatgctgatcttcgccaacctgagccggggcttcggccggcagggcaagcggaccttcatggccgagagacagtacacacggatggaggactggctgaccgccaagctggcctacgagggcctgagcaagacctacctgtccaagacactggcccagtacacctccaagacatgcagcaactgtgggtttaccatcaccagcgccgactacgacagggtgctggagaagctgaagaagacagcaacaggctggatgaccacaattaacggcaaggagctgaaggtggagggccagattacctactacaacagatacaagagacagaacgtagtcaaggacctgtccgtcgagctggatagactgagcgaagaatctgtgaacaacgacatctcctcctggacaaagggcagaagcggagaagctctgagcctcctgaagaaaagattctcccatagacccgtgcaggagaagttcgtgtgcctgaactgcggcttcgagacacacgcagccgagcaagccgccctgaacatcgccagatcctggctgttcctgcggagccaggagtacaagaaataccagacaaacaagacaaccggcaacaccgataagagagccttcgtcgagacctggcagtccttttaccggaagaagcttaaggaggtgtggaaacctgccgtgcggtctggcggatctggcggaggctccacaagcgccagggtgagcgtgatgttcagcgacgtgagcatcgccttcagcagggaggagtgggagtacctggacctgagccagagggacctgtacaaggacgtgatgatggagaactacaggaacgtggccagcctgggctacttcatcagcaagcccgacgtgatcagcctgctggagcagggcaaggagccctggaaggtggtgaggaggaggaggaggaaccccgacctggagaccaaggacgagaccagccccaagaaaaagagaaaagtctaagctgccttctgcggggcttgccttctggccatgcccttcttctctcccttgcacctgtacctcttggtctttgaataaagcctgagtaggaaggctagcaaaaaaaaaaaaaaaaaaaaaaaaaaaaaaaaaaaaaaaaaaaaaaaaaaaaaaaaaaaaaaaaaaaaaaaaaaaaaaaa

SEQ ID NO: 5858 - RNA, 5797 nt, synthetic construct
  source 1..5797: mol_type = other RNA
aggaaataagagagaaaagaagagtaagaagaaatataagagccaccatggcccctaagaagaagcgtaaagtgagccggatggaacgcctcgtctacgaggtgcggcagaagtgcagaaacatcgaggacatctgcatctcctgcggatctctgaacgtgaccctggagcacccactgttcatcggcggcatgtgccagaactgtaaaaactgttttctggagtgtgcctatcaatacgacgatgacggctaccagagctactgcaccatctgttgcggcggaagagaggtgctgatgtgtggaaataacaactgctgccggtgcttctgcgtggaatgcgtggacctgctggtgggccccggcgccgcccaggccgctattaaggaagatccttggaactgctacatgtgcggccacaagggcacatacggcctgctgagacggagagaggactggcctagcagactgcagatgttcttcgccaataaccacgaccaggagttcgacccccctaaggtgtaccctcccgtccccgccgagaagagaaagcccatccgggtcctgagcctgttcgatggcatcgccaccggtctgctggtgctgaaggacctgggcatccaggtggataggtacattgcctccgaggtgtgcgaggactccatcaccgtgggaatggtgcgtcatcagggcaagatcatgtacgtgggcgacgtgcggagcgtgacacagaagcatatccaggagtggggccctttcgacctggtgatcggcggcagcccttgcaatgacctgagcatcgtgaacccagcccggaagggcctgtacgagggaaccggcagactgttcttcgagttttacagactgctgcacgacgcccggcctaaggaaggcgacgaccggcccttcttttggctgttcgagaatgtggtggccatgggagtcagcgacaagcgggatattagccggttcctggagagcaaccccgtgatgatcgatgccaaggaagtgagcgccgcccaccgggccagatacttctggggcaatctgcctggcatgaacagacccctggccagcaccgtgaacgacaagctggagctgcaggagtgcctggagcacggccggatcgccaagttcagcaaggtgagaaccatcaccacccgaagcaacagcatcaaacaaggcaaggaccagcactttcctgtgttcatgaacgagaaggaggacatcctgtggtgtaccgagatggagagagtgttcgggttcccagtccactacacagatgtcagcaacatgtctagactggccagacagagactgctgggaagaagctggtccgtccctgtgatcagacacctgttcgcccctctgaaggagtacttcgcctgcgtgagcagcggcaacagcaacgccaacagccggggccccagcttctctagcggcctggtgccactgtccctgagagggagccacatgggccccatggagatctacaaaaccgtgagcgcctggaagcggcagcctgtgcgcgtgctgagcctgtttcggaatatcgataaagtcctgaaaagcctgggattcctggagagcggctctggctccggcggtggcaccctgaagtacgtggaggatgtgacaaacgtggtcagacgggatgtggagaagtggggccccttcgatctggtgtacggcagcacccaacccctgggcagctcttgtgaccggtgccctggctggtacatgtttcagttccaccggatcctgcagtacgccctgccgagacaggagtcccagcggccattcttttggattttcatggacaacttgctgctgaccgaggatgaccaggaaactaccactcggttcctgcagaccgaagccgtgaccctgcaggacgtgagaggccgggactaccagaacgccatgcgggtgtggtccaacatccctggactgaaaagcaagcacgcacctctgacccctaaagaagaggagtacctgcaggcccaggtgcggagcagaagcaagctggacgcccctaaggtggatctgctggtgaagaattgcctcctgcccctgagagagtacttcaagtatttcagccagaatagtctgcccctgggcggcccaagcagcggcgcccctcctcccagcggcggcagcccagccggctccccaacctctaccgaggagggcacctctgagtccgccacccccgagagcggccctggcacctccaccgagcccagcgagggcagcgcacccggcagccctgccggcagccccacctccacagaggagggaaccagcaccgagcccagcgaaggcagcgccccaggcaccagcaccgagcctagtgagggcggctctggcggcggcagcgcccaggagattaaacggatcaacaagatcagaagaagacttgtgaaagacagcaacaccaagaaggccggcaagacaggccccatgaaaaccctgctggttagagtgatgacacccgatctgagagagcggctggaaaacctgagaaagaagcctgaaaatatcccccagcccatcagcaatacatctagagccaacctgaataagctgctgaccgattacaccgaaatgaagaaggcgatcctgcatgtgtactgggaagagttccagaaggaccctgtgggcctgatgagccgggtggcccagcctgccagcaagaagatcgatcagaacaagctgaaacctgagatggacgagaagggcaacctgaccaccgccggctttgcctgctctcagtgtggccagcccctgttcgtgtacaagctggagcaggtgtctgagaagggcaaggcttacaccaactacttcggacggtgcaatgtggccgagcacgaaaagctgatcctgctggcccagctgaagcccgagaaggatagcgacgaagccgtgacatatagcctgggaaagtttgggcagagggccctggatttctacagcattcatgtgaccaaggagtccacccaccccgtgaagcccctggcccagatcgccggaaacagatacgcctccggacctgtgggaaaggccctgagcgacgcatgtatgggcacaatcgcctccttcctgtctaagtaccaggacatcatcatcgaacaccagaaggtggtgaagggcaaccagaagagactggagagcctgcgggagctggccggcaaggaaaacctggaataccctagcgtgaccctgccacctcagcctcacaccaaggagggcgttgatgcctacaacgaagtgatcgcccgggtgcgaatgtgggtgaacctgaacctgtggcagaagctgaagctaagcagagatgatgccaagcctctgctgagactgaagggattcccttcctttcctctggtcgagagacaggccaacgaagtggactggtgggacatggtgtgtaacgtgaagaagctgatcaacgagaaaaaggaggatggcaaggtgttttggcagaatctggctggctacaagagacaggaagccctgagaccatacctgagcagcgaggaagatcggaagaagggaaagaaattcgctcggtaccagctgggcgacctgctgctgcacctggaaaagaagcacggcgaggactggggaaaggtgtacgacgaggcctgggagcggattgacaagaaagtggaaggcctgagcaagcacatcaagctggaagaggaacggagaagcgaggacgcccagagcaaggccgccctgaccgactggctgcgggctaaggccagcttcgtgatcgagggcctgaaggaggccgacaaggacgagttctgcagatgcgagctgaagctgcagaagtggtacggggacctgcggggaaagcccttcgccatcgaagccgagaacagcatcctggacatcagcggcttcagcaagcagtacaactgtgccttcatctggcagaaggacggcgtgaagaagctgaacctgtacctgatcatcaactacttcaagggcggcaagctgcggttcaagaagatcaaacctgaagccttcgaagccaacagattctacaccgtgatcaacaaaaagagcggcgagatcgtgcccatggaggtgaacttcaacttcgacgaccccaacctgatcatcctgcctctggcctttggcaagagacagggcagagaattcatctggaacgacctgctgtccctggaaaccggcagcctgaagctggccaacggaagagtgatcgagaagacactgtacaacagaagaacccggcaggatgagcctgccctgttcgtggccctgaccttcgagcggcgggaggtcctggactcctccaatatcaaaccaatgaacctgatcggcgtggcaagaggcgaaaacatccccgccgtgatcgccctgaccgaccccgagggctgcccactgagccggtttaaggatagcctgggaaacccaacccacatcctgagaatcggcgagagctataaggagaagcagcggaccatccaggccaagaaggaggtggagcagcggagagccggcggctacagccggaagtacgccagcaaagccaagaatctggcagacgatatggtgagaaacaccgctagagatctgctgtactacgccgtgacccaggatgccatgctgatcttcgccaacctgagccggggcttcggccggcagggcaagcggaccttcatggccgagagacagtacacacggatggaggactggctgaccgccaagctggcctacgagggcctgagcaagacctacctgtccaagacactggcccagtacacctccaagacatgcagcaactgtgggtttaccatcaccagcgccgactacgacagggtgctggagaagctgaagaagacagcaacaggctggatgaccacaattaacggcaaggagctgaaggtggagggccagattacctactacaacagatacaagagacagaacgtagtcaaggacctgtccgtcgagctggatagactgagcgaagaatctgtgaacaacgacatctcctcctggacaaagggcagaagcggagaagctctgagcctcctgaagaaaagattctcccatagacccgtgcaggagaagttcgtgtgcctgaactgcggcttcgagacacacgcagccgagcaagccgccctgaacatcgccagatcctggctgttcctgcggagccaggagtacaagaaataccagacaaacaagacaaccggcaacaccgataagagagccttcgtcgagacctggcagtccttttaccggaagaagcttaaggaggtgtggaaacctgccgtgcggtctggcggatctggcggaggctccacaagcaagcccctggccgtgaggttcgccgacgtggccgtgtacttcagccccgaggagtggggctacctgaggcccgcccagagggccctgtacagggacgtgatgcaggagacctacggccacctgggcgccctgggcttccccggccccaagcccgccctgatcagctggatggagcaggagagcgaggcctggagccccgccgcccaggaccccgaggagggcgagaacctgggcggcgccctgaccagccccaagaaaaagagaaaagtctaagctgccttctgcggggcttgccttctggccatgcccttcttctctcccttgcacctgtacctcttggtctttgaataaagcctgagtaggaaggctagcaaaaaaaaaaaaaaaaaaaaaaaaaaaaaaaaaaaaaaaaaaaaaaaaaaaaaaaaaaaaaaaaaaaaaaaaaaaaaaaa

SEQ ID NO: 5859 - RNA, 5797 nt, synthetic construct
  source 1..5797: mol_type = other RNA
aggaaataagagagaaaagaagagtaagaagaaatataagagccaccatggcccctaagaagaagcgtaaagtgagccggatggaacgcctcgtctacgaggtgcggcagaagtgcagaaacatcgaggacatctgcatctcctgcggatctctgaacgtgaccctggagcacccactgttcatcggcggcatgtgccagaactgtaaaaactgttttctggagtgtgcctatcaatacgacgatgacggctaccagagctactgcaccatctgttgcggcggaagagaggtgctgatgtgtggaaataacaactgctgccggtgcttctgcgtggaatgcgtggacctgctggtgggccccggcgccgcccaggccgctattaaggaagatccttggaactgctacatgtgcggccacaagggcacatacggcctgctgagacggagagaggactggcctagcagactgcagatgttcttcgccaataaccacgaccaggagttcgacccccctaaggtgtaccctcccgtccccgccgagaagagaaagcccatccgggtcctgagcctgttcgatggcatcgccaccggtctgctggtgctgaaggacctgggcatccaggtggataggtacattgcctccgaggtgtgcgaggactccatcaccgtgggaatggtgcgtcatcagggcaagatcatgtacgtgggcgacgtgcggagcgtgacacagaagcatatccaggagtggggccctttcgacctggtgatcggcggcagcccttgcaatgacctgagcatcgtgaacccagcccggaagggcctgtacgagggaaccggcagactgttcttcgagttttacagactgctgcacgacgcccggcctaaggaaggcgacgaccggcccttcttttggctgttcgagaatgtggtggccatgggagtcagcgacaagcgggatattagccggttcctggagagcaaccccgtgatgatcgatgccaaggaagtgagcgccgcccaccgggccagatacttctggggcaatctgcctggcatgaacagacccctggccagcaccgtgaacgacaagctggagctgcaggagtgcctggagcacggccggatcgccaagttcagcaaggtgagaaccatcaccacccgaagcaacagcatcaaacaaggcaaggaccagcactttcctgtgttcatgaacgagaaggaggacatcctgtggtgtaccgagatggagagagtgttcgggttcccagtccactacacagatgtcagcaacatgtctagactggccagacagagactgctgggaagaagctggtccgtccctgtgatcagacacctgttcgcccctctgaaggagtacttcgcctgcgtgagcagcggcaacagcaacgccaacagccggggccccagcttctctagcggcctggtgccactgtccctgagagggagccacatgggccccatggagatctacaaaaccgtgagcgcctggaagcggcagcctgtgcgcgtgctgagcctgtttcggaatatcgataaagtcctgaaaagcctgggattcctggagagcggctctggctccggcggtggcaccctgaagtacgtggaggatgtgacaaacgtggtcagacgggatgtggagaagtggggccccttcgatctggtgtacggcagcacccaacccctgggcagctcttgtgaccggtgccctggctggtacatgtttcagttccaccggatcctgcagtacgccctgccgagacaggagtcccagcggccattcttttggattttcatggacaacttgctgctgaccgaggatgaccaggaaactaccactcggttcctgcagaccgaagccgtgaccctgcaggacgtgagaggccgggactaccagaacgccatgcgggtgtggtccaacatccctggactgaaaagcaagcacgcacctctgacccctaaagaagaggagtacctgcaggcccaggtgcggagcagaagcaagctggacgcccctaaggtggatctgctggtgaagaattgcctcctgcccctgagagagtacttcaagtatttcagccagaatagtctgcccctgggcggcccaagcagcggcgcccctcctcccagcggcggcagcccagccggctccccaacctctaccgaggagggcacctctgagtccgccacccccgagagcggccctggcacctccaccgagcccagcgagggcagcgcacccggcagccctgccggcagccccacctccacagaggagggaaccagcaccgagcccagcgaaggcagcgccccaggcaccagcaccgagcctagtgagggcggctctggcggcggcagcgcccaggagattaaacggatcaacaagatcagaagaagacttgtgaaagacagcaacaccaagaaggccggcaagacaggccccatgaaaaccctgctggttagagtgatgacacccgatctgagagagcggctggaaaacctgagaaagaagcctgaaaatatcccccagcccatcagcaatacatctagagccaacctgaataagctgctgaccgattacaccgaaatgaagaaggcgatcctgcatgtgtactgggaagagttccagaaggaccctgtgggcctgatgagccgggtggcccagcctgccagcaagaagatcgatcagaacaagctgaaacctgagatggacgagaagggcaacctgaccaccgccggctttgcctgctctcagtgtggccagcccctgttcgtgtacaagctggagcaggtgtctgagaagggcaaggcttacaccaactacttcggacggtgcaatgtggccgagcacgaaaagctgatcctgctggcccagctgaagcccgagaaggatagcgacgaagccgtgacatatagcctgggaaagtttgggcagagggccctggatttctacagcattcatgtgaccaaggagtccacccaccccgtgaagcccctggcccagatcgccggaaacagatacgcctccggacctgtgggaaaggccctgagcgacgcatgtatgggcacaatcgcctccttcctgtctaagtaccaggacatcatcatcgaacaccagaaggtggtgaagggcaaccagaagagactggagagcctgcgggagctggccggcaaggaaaacctggaataccctagcgtgaccctgccacctcagcctcacaccaaggagggcgttgatgcctacaacgaagtgatcgcccgggtgcgaatgtgggtgaacctgaacctgtggcagaagctgaagctaagcagagatgatgccaagcctctgctgagactgaagggattcccttcctttcctctggtcgagagacaggccaacgaagtggactggtgggacatggtgtgtaacgtgaagaagctgatcaacgagaaaaaggaggatggcaaggtgttttggcagaatctggctggctacaagagacaggaagccctgagaccatacctgagcagcgaggaagatcggaagaagggaaagaaattcgctcggtaccagctgggcgacctgctgctgcacctggaaaagaagcacggcgaggactggggaaaggtgtacgacgaggcctgggagcggattgacaagaaagtggaaggcctgagcaagcacatcaagctggaagaggaacggagaagcgaggacgcccagagcaaggccgccctgaccgactggctgcgggctaaggccagcttcgtgatcgagggcctgaaggaggccgacaaggacgagttctgcagatgcgagctgaagctgcagaagtggtacggggacctgcggggaaagcccttcgccatcgaagccgagaacagcatcctggacatcagcggcttcagcaagcagtacaactgtgccttcatctggcagaaggacggcgtgaagaagctgaacctgtacctgatcatcaactacttcaagggcggcaagctgcggttcaagaagatcaaacctgaagccttcgaagccaacagattctacaccgtgatcaacaaaaagagcggcgagatcgtgcccatggaggtgaacttcaacttcgacgaccccaacctgatcatcctgcctctggcctttggcaagagacagggcagagaattcatctggaacgacctgctgtccctggaaaccggcagcctgaagctggccaacggaagagtgatcgagaagacactgtacaacagaagaacccggcaggatgagcctgccctgttcgtggccctgaccttcgagcggcgggaggtcctggactcctccaatatcaaaccaatgaacctgatcggcgtggcaagaggcgaaaacatccccgccgtgatcgccctgaccgaccccgagggctgcccactgagccggtttaaggatagcctgggaaacccaacccacatcctgagaatcggcgagagctataaggagaagcagcggaccatccaggccaagaaggaggtggagcagcggagagccggcggctacagccggaagtacgccagcaaagccaagaatctggcagacgatatggtgagaaacaccgctagagatctgctgtactacgccgtgacccaggatgccatgctgatcttcgccaacctgagccggggcttcggccggcagggcaagcggaccttcatggccgagagacagtacacacggatggaggactggctgaccgccaagctggcctacgagggcctgagcaagacctacctgtccaagacactggcccagtacacctccaagacatgcagcaactgtgggtttaccatcaccagcgccgactacgacagggtgctggagaagctgaagaagacagcaacaggctggatgaccacaattaacggcaaggagctgaaggtggagggccagattacctactacaacagatacaagagacagaacgtagtcaaggacctgtccgtcgagctggatagactgagcgaagaatctgtgaacaacgacatctcctcctggacaaagggcagaagcggagaagctctgagcctcctgaagaaaagattctcccatagacccgtgcaggagaagttcgtgtgcctgaactgcggcttcgagacacacgcagccgagcaagccgccctgaacatcgccagatcctggctgttcctgcggagccaggagtacaagaaataccagacaaacaagacaaccggcaacaccgataagagagccttcgtcgagacctggcagtccttttaccggaagaagcttaaggaggtgtggaaacctgccgtgcggtctggcggatctggcggaggctccacaagcatggccttcgaggacgtggccgtgtacttcagccaggaggagtggggcctgctggacaccacccagagggccctgtacaggcacgtgatgctggagaacttcaccctggtgaccagcctgggcctgagcaccagcaggccccacgtggtgatccagctggagaggggcgaggagccctgggtgcccagcggcaccgacaccaccctgagcaggaccacctacaggaggaggaaccccggcagcaccagccccaagaaaaagagaaaagtctaagctgccttctgcggggcttgccttctggccatgcccttcttctctcccttgcacctgtacctcttggtctttgaataaagcctgagtaggaaggctagcaaaaaaaaaaaaaaaaaaaaaaaaaaaaaaaaaaaaaaaaaaaaaaaaaaaaaaaaaaaaaaaaaaaaaaaaaaaaaaaa

SEQ ID NO: 5860 - RNA, 5797 nt, synthetic construct
  source 1..5797: mol_type = other RNA
aggaaataagagagaaaagaagagtaagaagaaatataagagccaccatggcccctaagaagaagcgtaaagtgagccggatggaacgcctcgtctacgaggtgcggcagaagtgcagaaacatcgaggacatctgcatctcctgcggatctctgaacgtgaccctggagcacccactgttcatcggcggcatgtgccagaactgtaaaaactgttttctggagtgtgcctatcaatacgacgatgacggctaccagagctactgcaccatctgttgcggcggaagagaggtgctgatgtgtggaaataacaactgctgccggtgcttctgcgtggaatgcgtggacctgctggtgggccccggcgccgcccaggccgctattaaggaagatccttggaactgctacatgtgcggccacaagggcacatacggcctgctgagacggagagaggactggcctagcagactgcagatgttcttcgccaataaccacgaccaggagttcgacccccctaaggtgtaccctcccgtccccgccgagaagagaaagcccatccgggtcctgagcctgttcgatggcatcgccaccggtctgctggtgctgaaggacctgggcatccaggtggataggtacattgcctccgaggtgtgcgaggactccatcaccgtgggaatggtgcgtcatcagggcaagatcatgtacgtgggcgacgtgcggagcgtgacacagaagcatatccaggagtggggccctttcgacctggtgatcggcggcagcccttgcaatgacctgagcatcgtgaacccagcccggaagggcctgtacgagggaaccggcagactgttcttcgagttttacagactgctgcacgacgcccggcctaaggaaggcgacgaccggcccttcttttggctgttcgagaatgtggtggccatgggagtcagcgacaagcgggatattagccggttcctggagagcaaccccgtgatgatcgatgccaaggaagtgagcgccgcccaccgggccagatacttctggggcaatctgcctggcatgaacagacccctggccagcaccgtgaacgacaagctggagctgcaggagtgcctggagcacggccggatcgccaagttcagcaaggtgagaaccatcaccacccgaagcaacagcatcaaacaaggcaaggaccagcactttcctgtgttcatgaacgagaaggaggacatcctgtggtgtaccgagatggagagagtgttcgggttcccagtccactacacagatgtcagcaacatgtctagactggccagacagagactgctgggaagaagctggtccgtccctgtgatcagacacctgttcgcccctctgaaggagtacttcgcctgcgtgagcagcggcaacagcaacgccaacagccggggccccagcttctctagcggcctggtgccactgtccctgagagggagccacatgggccccatggagatctacaaaaccgtgagcgcctggaagcggcagcctgtgcgcgtgctgagcctgtttcggaatatcgataaagtcctgaaaagcctgggattcctggagagcggctctggctccggcggtggcaccctgaagtacgtggaggatgtgacaaacgtggtcagacgggatgtggagaagtggggccccttcgatctggtgtacggcagcacccaacccctgggcagctcttgtgaccggtgccctggctggtacatgtttcagttccaccggatcctgcagtacgccctgccgagacaggagtcccagcggccattcttttggattttcatggacaacttgctgctgaccgaggatgaccaggaaactaccactcggttcctgcagaccgaagccgtgaccctgcaggacgtgagaggccgggactaccagaacgccatgcgggtgtggtccaacatccctggactgaaaagcaagcacgcacctctgacccctaaagaagaggagtacctgcaggcccaggtgcggagcagaagcaagctggacgcccctaaggtggatctgctggtgaagaattgcctcctgcccctgagagagtacttcaagtatttcagccagaatagtctgcccctgggcggcccaagcagcggcgcccctcctcccagcggcggcagcccagccggctccccaacctctaccgaggagggcacctctgagtccgccacccccgagagcggccctggcacctccaccgagcccagcgagggcagcgcacccggcagccctgccggcagccccacctccacagaggagggaaccagcaccgagcccagcgaaggcagcgccccaggcaccagcaccgagcctagtgagggcggctctggcggcggcagcgcccaggagattaaacggatcaacaagatcagaagaagacttgtgaaagacagcaacaccaagaaggccggcaagacaggccccatgaaaaccctgctggttagagtgatgacacccgatctgagagagcggctggaaaacctgagaaagaagcctgaaaatatcccccagcccatcagcaatacatctagagccaacctgaataagctgctgaccgattacaccgaaatgaagaaggcgatcctgcatgtgtactgggaagagttccagaaggaccctgtgggcctgatgagccgggtggcccagcctgccagcaagaagatcgatcagaacaagctgaaacctgagatggacgagaagggcaacctgaccaccgccggctttgcctgctctcagtgtggccagcccctgttcgtgtacaagctggagcaggtgtctgagaagggcaaggcttacaccaactacttcggacggtgcaatgtggccgagcacgaaaagctgatcctgctggcccagctgaagcccgagaaggatagcgacgaagccgtgacatatagcctgggaaagtttgggcagagggccctggatttctacagcattcatgtgaccaaggagtccacccaccccgtgaagcccctggcccagatcgccggaaacagatacgcctccggacctgtgggaaaggccctgagcgacgcatgtatgggcacaatcgcctccttcctgtctaagtaccaggacatcatcatcgaacaccagaaggtggtgaagggcaaccagaagagactggagagcctgcgggagctggccggcaaggaaaacctggaataccctagcgtgaccctgccacctcagcctcacaccaaggagggcgttgatgcctacaacgaagtgatcgcccgggtgcgaatgtgggtgaacctgaacctgtggcagaagctgaagctaagcagagatgatgccaagcctctgctgagactgaagggattcccttcctttcctctggtcgagagacaggccaacgaagtggactggtgggacatggtgtgtaacgtgaagaagctgatcaacgagaaaaaggaggatggcaaggtgttttggcagaatctggctggctacaagagacaggaagccctgagaccatacctgagcagcgaggaagatcggaagaagggaaagaaattcgctcggtaccagctgggcgacctgctgctgcacctggaaaagaagcacggcgaggactggggaaaggtgtacgacgaggcctgggagcggattgacaagaaagtggaaggcctgagcaagcacatcaagctggaagaggaacggagaagcgaggacgcccagagcaaggccgccctgaccgactggctgcgggctaaggccagcttcgtgatcgagggcctgaaggaggccgacaaggacgagttctgcagatgcgagctgaagctgcagaagtggtacggggacctgcggggaaagcccttcgccatcgaagccgagaacagcatcctggacatcagcggcttcagcaagcagtacaactgtgccttcatctggcagaaggacggcgtgaagaagctgaacctgtacctgatcatcaactacttcaagggcggcaagctgcggttcaagaagatcaaacctgaagccttcgaagccaacagattctacaccgtgatcaacaaaaagagcggcgagatcgtgcccatggaggtgaacttcaacttcgacgaccccaacctgatcatcctgcctctggcctttggcaagagacagggcagagaattcatctggaacgacctgctgtccctggaaaccggcagcctgaagctggccaacggaagagtgatcgagaagacactgtacaacagaagaacccggcaggatgagcctgccctgttcgtggccctgaccttcgagcggcgggaggtcctggactcctccaatatcaaaccaatgaacctgatcggcgtggcaagaggcgaaaacatccccgccgtgatcgccctgaccgaccccgagggctgcccactgagccggtttaaggatagcctgggaaacccaacccacatcctgagaatcggcgagagctataaggagaagcagcggaccatccaggccaagaaggaggtggagcagcggagagccggcggctacagccggaagtacgccagcaaagccaagaatctggcagacgatatggtgagaaacaccgctagagatctgctgtactacgccgtgacccaggatgccatgctgatcttcgccaacctgagccggggcttcggccggcagggcaagcggaccttcatggccgagagacagtacacacggatggaggactggctgaccgccaagctggcctacgagggcctgagcaagacctacctgtccaagacactggcccagtacacctccaagacatgcagcaactgtgggtttaccatcaccagcgccgactacgacagggtgctggagaagctgaagaagacagcaacaggctggatgaccacaattaacggcaaggagctgaaggtggagggccagattacctactacaacagatacaagagacagaacgtagtcaaggacctgtccgtcgagctggatagactgagcgaagaatctgtgaacaacgacatctcctcctggacaaagggcagaagcggagaagctctgagcctcctgaagaaaagattctcccatagacccgtgcaggagaagttcgtgtgcctgaactgcggcttcgagacacacgcagccgagcaagccgccctgaacatcgccagatcctggctgttcctgcggagccaggagtacaagaaataccagacaaacaagacaaccggcaacaccgataagagagccttcgtcgagacctggcagtccttttaccggaagaagcttaaggaggtgtggaaacctgccgtgcggtctggcggatctggcggaggctccacaagcgccctggtgaccttcgaggacgtggccgtgaggttcacccaggaggagtgggccctgctggaccccagccagaagatcctgtacagggacgtgatgagggagacctacaggaacctgaccagcgtgggcatcaactgggagtgctgggacctggaggcctgcttcaggagcctgggcaggaacctgagggtgcaggtggtgaagaggaagtgcgagctgaccaacagcggcccctgcgccgagaccagccccaagaaaaagagaaaagtctaagctgccttctgcggggcttgccttctggccatgcccttcttctctcccttgcacctgtacctcttggtctttgaataaagcctgagtaggaaggctagcaaaaaaaaaaaaaaaaaaaaaaaaaaaaaaaaaaaaaaaaaaaaaaaaaaaaaaaaaaaaaaaaaaaaaaaaaaaaaaaa

SEQ ID NO: 5861 - RNA, 5797 nt, synthetic construct
  source 1..5797: mol_type = other RNA
aggaaataagagagaaaagaagagtaagaagaaatataagagccaccatggcccctaagaagaagcgtaaagtgagccggatggaacgcctcgtctacgaggtgcggcagaagtgcagaaacatcgaggacatctgcatctcctgcggatctctgaacgtgaccctggagcacccactgttcatcggcggcatgtgccagaactgtaaaaactgttttctggagtgtgcctatcaatacgacgatgacggctaccagagctactgcaccatctgttgcggcggaagagaggtgctgatgtgtggaaataacaactgctgccggtgcttctgcgtggaatgcgtggacctgctggtgggccccggcgccgcccaggccgctattaaggaagatccttggaactgctacatgtgcggccacaagggcacatacggcctgctgagacggagagaggactggcctagcagactgcagatgttcttcgccaataaccacgaccaggagttcgacccccctaaggtgtaccctcccgtccccgccgagaagagaaagcccatccgggtcctgagcctgttcgatggcatcgccaccggtctgctggtgctgaaggacctgggcatccaggtggataggtacattgcctccgaggtgtgcgaggactccatcaccgtgggaatggtgcgtcatcagggcaagatcatgtacgtgggcgacgtgcggagcgtgacacagaagcatatccaggagtggggccctttcgacctggtgatcggcggcagcccttgcaatgacctgagcatcgtgaacccagcccggaagggcctgtacgagggaaccggcagactgttcttcgagttttacagactgctgcacgacgcccggcctaaggaaggcgacgaccggcccttcttttggctgttcgagaatgtggtggccatgggagtcagcgacaagcgggatattagccggttcctggagagcaaccccgtgatgatcgatgccaaggaagtgagcgccgcccaccgggccagatacttctggggcaatctgcctggcatgaacagacccctggccagcaccgtgaacgacaagctggagctgcaggagtgcctggagcacggccggatcgccaagttcagcaaggtgagaaccatcaccacccgaagcaacagcatcaaacaaggcaaggaccagcactttcctgtgttcatgaacgagaaggaggacatcctgtggtgtaccgagatggagagagtgttcgggttcccagtccactacacagatgtcagcaacatgtctagactggccagacagagactgctgggaagaagctggtccgtccctgtgatcagacacctgttcgcccctctgaaggagtacttcgcctgcgtgagcagcggcaacagcaacgccaacagccggggccccagcttctctagcggcctggtgccactgtccctgagagggagccacatgggccccatggagatctacaaaaccgtgagcgcctggaagcggcagcctgtgcgcgtgctgagcctgtttcggaatatcgataaagtcctgaaaagcctgggattcctggagagcggctctggctccggcggtggcaccctgaagtacgtggaggatgtgacaaacgtggtcagacgggatgtggagaagtggggccccttcgatctggtgtacggcagcacccaacccctgggcagctcttgtgaccggtgccctggctggtacatgtttcagttccaccggatcctgcagtacgccctgccgagacaggagtcccagcggccattcttttggattttcatggacaacttgctgctgaccgaggatgaccaggaaactaccactcggttcctgcagaccgaagccgtgaccctgcaggacgtgagaggccgggactaccagaacgccatgcgggtgtggtccaacatccctggactgaaaagcaagcacgcacctctgacccctaaagaagaggagtacctgcaggcccaggtgcggagcagaagcaagctggacgcccctaaggtggatctgctggtgaagaattgcctcctgcccctgagagagtacttcaagtatttcagccagaatagtctgcccctgggcggcccaagcagcggcgcccctcctcccagcggcggcagcccagccggctccccaacctctaccgaggagggcacctctgagtccgccacccccgagagcggccctggcacctccaccgagcccagcgagggcagcgcacccggcagccctgccggcagccccacctccacagaggagggaaccagcaccgagcccagcgaaggcagcgccccaggcaccagcaccgagcctagtgagggcggctctggcggcggcagcgcccaggagattaaacggatcaacaagatcagaagaagacttgtgaaagacagcaacaccaagaaggccggcaagacaggccccatgaaaaccctgctggttagagtgatgacacccgatctgagagagcggctggaaaacctgagaaagaagcctgaaaatatcccccagcccatcagcaatacatctagagccaacctgaataagctgctgaccgattacaccgaaatgaagaaggcgatcctgcatgtgtactgggaagagttccagaaggaccctgtgggcctgatgagccgggtggcccagcctgccagcaagaagatcgatcagaacaagctgaaacctgagatggacgagaagggcaacctgaccaccgccggctttgcctgctctcagtgtggccagcccctgttcgtgtacaagctggagcaggtgtctgagaagggcaaggcttacaccaactacttcggacggtgcaatgtggccgagcacgaaaagctgatcctgctggcccagctgaagcccgagaaggatagcgacgaagccgtgacatatagcctgggaaagtttgggcagagggccctggatttctacagcattcatgtgaccaaggagtccacccaccccgtgaagcccctggcccagatcgccggaaacagatacgcctccggacctgtgggaaaggccctgagcgacgcatgtatgggcacaatcgcctccttcctgtctaagtaccaggacatcatcatcgaacaccagaaggtggtgaagggcaaccagaagagactggagagcctgcgggagctggccggcaaggaaaacctggaataccctagcgtgaccctgccacctcagcctcacaccaaggagggcgttgatgcctacaacgaagtgatcgcccgggtgcgaatgtgggtgaacctgaacctgtggcagaagctgaagctaagcagagatgatgccaagcctctgctgagactgaagggattcccttcctttcctctggtcgagagacaggccaacgaagtggactggtgggacatggtgtgtaacgtgaagaagctgatcaacgagaaaaaggaggatggcaaggtgttttggcagaatctggctggctacaagagacaggaagccctgagaccatacctgagcagcgaggaagatcggaagaagggaaagaaattcgctcggtaccagctgggcgacctgctgctgcacctggaaaagaagcacggcgaggactggggaaaggtgtacgacgaggcctgggagcggattgacaagaaagtggaaggcctgagcaagcacatcaagctggaagaggaacggagaagcgaggacgcccagagcaaggccgccctgaccgactggctgcgggctaaggccagcttcgtgatcgagggcctgaaggaggccgacaaggacgagttctgcagatgcgagctgaagctgcagaagtggtacggggacctgcggggaaagcccttcgccatcgaagccgagaacagcatcctggacatcagcggcttcagcaagcagtacaactgtgccttcatctggcagaaggacggcgtgaagaagctgaacctgtacctgatcatcaactacttcaagggcggcaagctgcggttcaagaagatcaaacctgaagccttcgaagccaacagattctacaccgtgatcaacaaaaagagcggcgagatcgtgcccatggaggtgaacttcaacttcgacgaccccaacctgatcatcctgcctctggcctttggcaagagacagggcagagaattcatctggaacgacctgctgtccctggaaaccggcagcctgaagctggccaacggaagagtgatcgagaagacactgtacaacagaagaacccggcaggatgagcctgccctgttcgtggccctgaccttcgagcggcgggaggtcctggactcctccaatatcaaaccaatgaacctgatcggcgtggcaagaggcgaaaacatccccgccgtgatcgccctgaccgaccccgagggctgcccactgagccggtttaaggatagcctgggaaacccaacccacatcctgagaatcggcgagagctataaggagaagcagcggaccatccaggccaagaaggaggtggagcagcggagagccggcggctacagccggaagtacgccagcaaagccaagaatctggcagacgatatggtgagaaacaccgctagagatctgctgtactacgccgtgacccaggatgccatgctgatcttcgccaacctgagccggggcttcggccggcagggcaagcggaccttcatggccgagagacagtacacacggatggaggactggctgaccgccaagctggcctacgagggcctgagcaagacctacctgtccaagacactggcccagtacacctccaagacatgcagcaactgtgggtttaccatcaccagcgccgactacgacagggtgctggagaagctgaagaagacagcaacaggctggatgaccacaattaacggcaaggagctgaaggtggagggccagattacctactacaacagatacaagagacagaacgtagtcaaggacctgtccgtcgagctggatagactgagcgaagaatctgtgaacaacgacatctcctcctggacaaagggcagaagcggagaagctctgagcctcctgaagaaaagattctcccatagacccgtgcaggagaagttcgtgtgcctgaactgcggcttcgagacacacgcagccgagcaagccgccctgaacatcgccagatcctggctgttcctgcggagccaggagtacaagaaataccagacaaacaagacaaccggcaacaccgataagagagccttcgtcgagacctggcagtccttttaccggaagaagcttaaggaggtgtggaaacctgccgtgcggtctggcggatctggcggaggctccacaagcgtgctgggcctggtgaccttcggcgacgtggccatcgacttcagcagggaggagtgggagtggctgaacagcgcccagaggaccctgcacagggacgtgatgctggagaactacaggaacctggtgagcctgggcctgtgcgtgagcaagcccgacatgatcagcagcctggagcagaggaaggagccctggatggtgaagaggaagctgaccaggggcaggtgccccgacctgaagaccatgaccagccccaagaaaaagagaaaagtctaagctgccttctgcggggcttgccttctggccatgcccttcttctctcccttgcacctgtacctcttggtctttgaataaagcctgagtaggaaggctagcaaaaaaaaaaaaaaaaaaaaaaaaaaaaaaaaaaaaaaaaaaaaaaaaaaaaaaaaaaaaaaaaaaaaaaaaaaaaaaaa

SEQ ID NO: 5862 - RNA, 5797 nt, synthetic construct
  source 1..5797: mol_type = other RNA
aggaaataagagagaaaagaagagtaagaagaaatataagagccaccatggcccctaagaagaagcgtaaagtgagccggatggaacgcctcgtctacgaggtgcggcagaagtgcagaaacatcgaggacatctgcatctcctgcggatctctgaacgtgaccctggagcacccactgttcatcggcggcatgtgccagaactgtaaaaactgttttctggagtgtgcctatcaatacgacgatgacggctaccagagctactgcaccatctgttgcggcggaagagaggtgctgatgtgtggaaataacaactgctgccggtgcttctgcgtggaatgcgtggacctgctggtgggccccggcgccgcccaggccgctattaaggaagatccttggaactgctacatgtgcggccacaagggcacatacggcctgctgagacggagagaggactggcctagcagactgcagatgttcttcgccaataaccacgaccaggagttcgacccccctaaggtgtaccctcccgtccccgccgagaagagaaagcccatccgggtcctgagcctgttcgatggcatcgccaccggtctgctggtgctgaaggacctgggcatccaggtggataggtacattgcctccgaggtgtgcgaggactccatcaccgtgggaatggtgcgtcatcagggcaagatcatgtacgtgggcgacgtgcggagcgtgacacagaagcatatccaggagtggggccctttcgacctggtgatcggcggcagcccttgcaatgacctgagcatcgtgaacccagcccggaagggcctgtacgagggaaccggcagactgttcttcgagttttacagactgctgcacgacgcccggcctaaggaaggcgacgaccggcccttcttttggctgttcgagaatgtggtggccatgggagtcagcgacaagcgggatattagccggttcctggagagcaaccccgtgatgatcgatgccaaggaagtgagcgccgcccaccgggccagatacttctggggcaatctgcctggcatgaacagacccctggccagcaccgtgaacgacaagctggagctgcaggagtgcctggagcacggccggatcgccaagttcagcaaggtgagaaccatcaccacccgaagcaacagcatcaaacaaggcaaggaccagcactttcctgtgttcatgaacgagaaggaggacatcctgtggtgtaccgagatggagagagtgttcgggttcccagtccactacacagatgtcagcaacatgtctagactggccagacagagactgctgggaagaagctggtccgtccctgtgatcagacacctgttcgcccctctgaaggagtacttcgcctgcgtgagcagcggcaacagcaacgccaacagccggggccccagcttctctagcggcctggtgccactgtccctgagagggagccacatgggccccatggagatctacaaaaccgtgagcgcctggaagcggcagcctgtgcgcgtgctgagcctgtttcggaatatcgataaagtcctgaaaagcctgggattcctggagagcggctctggctccggcggtggcaccctgaagtacgtggaggatgtgacaaacgtggtcagacgggatgtggagaagtggggccccttcgatctggtgtacggcagcacccaacccctgggcagctcttgtgaccggtgccctggctggtacatgtttcagttccaccggatcctgcagtacgccctgccgagacaggagtcccagcggccattcttttggattttcatggacaacttgctgctgaccgaggatgaccaggaaactaccactcggttcctgcagaccgaagccgtgaccctgcaggacgtgagaggccgggactaccagaacgccatgcgggtgtggtccaacatccctggactgaaaagcaagcacgcacctctgacccctaaagaagaggagtacctgcaggcccaggtgcggagcagaagcaagctggacgcccctaaggtggatctgctggtgaagaattgcctcctgcccctgagagagtacttcaagtatttcagccagaatagtctgcccctgggcggcccaagcagcggcgcccctcctcccagcggcggcagcccagccggctccccaacctctaccgaggagggcacctctgagtccgccacccccgagagcggccctggcacctccaccgagcccagcgagggcagcgcacccggcagccctgccggcagccccacctccacagaggagggaaccagcaccgagcccagcgaaggcagcgccccaggcaccagcaccgagcctagtgagggcggctctggcggcggcagcgcccaggagattaaacggatcaacaagatcagaagaagacttgtgaaagacagcaacaccaagaaggccggcaagacaggccccatgaaaaccctgctggttagagtgatgacacccgatctgagagagcggctggaaaacctgagaaagaagcctgaaaatatcccccagcccatcagcaatacatctagagccaacctgaataagctgctgaccgattacaccgaaatgaagaaggcgatcctgcatgtgtactgggaagagttccagaaggaccctgtgggcctgatgagccgggtggcccagcctgccagcaagaagatcgatcagaacaagctgaaacctgagatggacgagaagggcaacctgaccaccgccggctttgcctgctctcagtgtggccagcccctgttcgtgtacaagctggagcaggtgtctgagaagggcaaggcttacaccaactacttcggacggtgcaatgtggccgagcacgaaaagctgatcctgctggcccagctgaagcccgagaaggatagcgacgaagccgtgacatatagcctgggaaagtttgggcagagggccctggatttctacagcattcatgtgaccaaggagtccacccaccccgtgaagcccctggcccagatcgccggaaacagatacgcctccggacctgtgggaaaggccctgagcgacgcatgtatgggcacaatcgcctccttcctgtctaagtaccaggacatcatcatcgaacaccagaaggtggtgaagggcaaccagaagagactggagagcctgcgggagctggccggcaaggaaaacctggaataccctagcgtgaccctgccacctcagcctcacaccaaggagggcgttgatgcctacaacgaagtgatcgcccgggtgcgaatgtgggtgaacctgaacctgtggcagaagctgaagctaagcagagatgatgccaagcctctgctgagactgaagggattcccttcctttcctctggtcgagagacaggccaacgaagtggactggtgggacatggtgtgtaacgtgaagaagctgatcaacgagaaaaaggaggatggcaaggtgttttggcagaatctggctggctacaagagacaggaagccctgagaccatacctgagcagcgaggaagatcggaagaagggaaagaaattcgctcggtaccagctgggcgacctgctgctgcacctggaaaagaagcacggcgaggactggggaaaggtgtacgacgaggcctgggagcggattgacaagaaagtggaaggcctgagcaagcacatcaagctggaagaggaacggagaagcgaggacgcccagagcaaggccgccctgaccgactggctgcgggctaaggccagcttcgtgatcgagggcctgaaggaggccgacaaggacgagttctgcagatgcgagctgaagctgcagaagtggtacggggacctgcggggaaagcccttcgccatcgaagccgagaacagcatcctggacatcagcggcttcagcaagcagtacaactgtgccttcatctggcagaaggacggcgtgaagaagctgaacctgtacctgatcatcaactacttcaagggcggcaagctgcggttcaagaagatcaaacctgaagccttcgaagccaacagattctacaccgtgatcaacaaaaagagcggcgagatcgtgcccatggaggtgaacttcaacttcgacgaccccaacctgatcatcctgcctctggcctttggcaagagacagggcagagaattcatctggaacgacctgctgtccctggaaaccggcagcctgaagctggccaacggaagagtgatcgagaagacactgtacaacagaagaacccggcaggatgagcctgccctgttcgtggccctgaccttcgagcggcgggaggtcctggactcctccaatatcaaaccaatgaacctgatcggcgtggcaagaggcgaaaacatccccgccgtgatcgccctgaccgaccccgagggctgcccactgagccggtttaaggatagcctgggaaacccaacccacatcctgagaatcggcgagagctataaggagaagcagcggaccatccaggccaagaaggaggtggagcagcggagagccggcggctacagccggaagtacgccagcaaagccaagaatctggcagacgatatggtgagaaacaccgctagagatctgctgtactacgccgtgacccaggatgccatgctgatcttcgccaacctgagccggggcttcggccggcagggcaagcggaccttcatggccgagagacagtacacacggatggaggactggctgaccgccaagctggcctacgagggcctgagcaagacctacctgtccaagacactggcccagtacacctccaagacatgcagcaactgtgggtttaccatcaccagcgccgactacgacagggtgctggagaagctgaagaagacagcaacaggctggatgaccacaattaacggcaaggagctgaaggtggagggccagattacctactacaacagatacaagagacagaacgtagtcaaggacctgtccgtcgagctggatagactgagcgaagaatctgtgaacaacgacatctcctcctggacaaagggcagaagcggagaagctctgagcctcctgaagaaaagattctcccatagacccgtgcaggagaagttcgtgtgcctgaactgcggcttcgagacacacgcagccgagcaagccgccctgaacatcgccagatcctggctgttcctgcggagccaggagtacaagaaataccagacaaacaagacaaccggcaacaccgataagagagccttcgtcgagacctggcagtccttttaccggaagaagcttaaggaggtgtggaaacctgccgtgcggtctggcggatctggcggaggctccacaagcggcagcctggaggagggcaggagggccaccggcctgcccgccgcccaggtgcaggagcccgtgaccttcaaggacgtggccgtggacttcacccaggaggagtggggccagctggacctggtgcagaggaccctgtacagggacgtgatgctggagacctacggccacctgctgagcgtgggcaaccagatcgccaagcccgaggtgatcagcctgctggagcagggcgaggagccctggagcaccagccccaagaaaaagagaaaagtctaagctgccttctgcggggcttgccttctggccatgcccttcttctctcccttgcacctgtacctcttggtctttgaataaagcctgagtaggaaggctagcaaaaaaaaaaaaaaaaaaaaaaaaaaaaaaaaaaaaaaaaaaaaaaaaaaaaaaaaaaaaaaaaaaaaaaaaaaaaaaaa

SEQ ID NO: 5863 - RNA, 5797 nt, synthetic construct
  source 1..5797: mol_type = other RNA
aggaaataagagagaaaagaagagtaagaagaaatataagagccaccatggcccctaagaagaagcgtaaagtgagccggatggaacgcctcgtctacgaggtgcggcagaagtgcagaaacatcgaggacatctgcatctcctgcggatctctgaacgtgaccctggagcacccactgttcatcggcggcatgtgccagaactgtaaaaactgttttctggagtgtgcctatcaatacgacgatgacggctaccagagctactgcaccatctgttgcggcggaagagaggtgctgatgtgtggaaataacaactgctgccggtgcttctgcgtggaatgcgtggacctgctggtgggccccggcgccgcccaggccgctattaaggaagatccttggaactgctacatgtgcggccacaagggcacatacggcctgctgagacggagagaggactggcctagcagactgcagatgttcttcgccaataaccacgaccaggagttcgacccccctaaggtgtaccctcccgtccccgccgagaagagaaagcccatccgggtcctgagcctgttcgatggcatcgccaccggtctgctggtgctgaaggacctgggcatccaggtggataggtacattgcctccgaggtgtgcgaggactccatcaccgtgggaatggtgcgtcatcagggcaagatcatgtacgtgggcgacgtgcggagcgtgacacagaagcatatccaggagtggggccctttcgacctggtgatcggcggcagcccttgcaatgacctgagcatcgtgaacccagcccggaagggcctgtacgagggaaccggcagactgttcttcgagttttacagactgctgcacgacgcccggcctaaggaaggcgacgaccggcccttcttttggctgttcgagaatgtggtggccatgggagtcagcgacaagcgggatattagccggttcctggagagcaaccccgtgatgatcgatgccaaggaagtgagcgccgcccaccgggccagatacttctggggcaatctgcctggcatgaacagacccctggccagcaccgtgaacgacaagctggagctgcaggagtgcctggagcacggccggatcgccaagttcagcaaggtgagaaccatcaccacccgaagcaacagcatcaaacaaggcaaggaccagcactttcctgtgttcatgaacgagaaggaggacatcctgtggtgtaccgagatggagagagtgttcgggttcccagtccactacacagatgtcagcaacatgtctagactggccagacagagactgctgggaagaagctggtccgtccctgtgatcagacacctgttcgcccctctgaaggagtacttcgcctgcgtgagcagcggcaacagcaacgccaacagccggggccccagcttctctagcggcctggtgccactgtccctgagagggagccacatgggccccatggagatctacaaaaccgtgagcgcctggaagcggcagcctgtgcgcgtgctgagcctgtttcggaatatcgataaagtcctgaaaagcctgggattcctggagagcggctctggctccggcggtggcaccctgaagtacgtggaggatgtgacaaacgtggtcagacgggatgtggagaagtggggccccttcgatctggtgtacggcagcacccaacccctgggcagctcttgtgaccggtgccctggctggtacatgtttcagttccaccggatcctgcagtacgccctgccgagacaggagtcccagcggccattcttttggattttcatggacaacttgctgctgaccgaggatgaccaggaaactaccactcggttcctgcagaccgaagccgtgaccctgcaggacgtgagaggccgggactaccagaacgccatgcgggtgtggtccaacatccctggactgaaaagcaagcacgcacctctgacccctaaagaagaggagtacctgcaggcccaggtgcggagcagaagcaagctggacgcccctaaggtggatctgctggtgaagaattgcctcctgcccctgagagagtacttcaagtatttcagccagaatagtctgcccctgggcggcccaagcagcggcgcccctcctcccagcggcggcagcccagccggctccccaacctctaccgaggagggcacctctgagtccgccacccccgagagcggccctggcacctccaccgagcccagcgagggcagcgcacccggcagccctgccggcagccccacctccacagaggagggaaccagcaccgagcccagcgaaggcagcgccccaggcaccagcaccgagcctagtgagggcggctctggcggcggcagcgcccaggagattaaacggatcaacaagatcagaagaagacttgtgaaagacagcaacaccaagaaggccggcaagacaggccccatgaaaaccctgctggttagagtgatgacacccgatctgagagagcggctggaaaacctgagaaagaagcctgaaaatatcccccagcccatcagcaatacatctagagccaacctgaataagctgctgaccgattacaccgaaatgaagaaggcgatcctgcatgtgtactgggaagagttccagaaggaccctgtgggcctgatgagccgggtggcccagcctgccagcaagaagatcgatcagaacaagctgaaacctgagatggacgagaagggcaacctgaccaccgccggctttgcctgctctcagtgtggccagcccctgttcgtgtacaagctggagcaggtgtctgagaagggcaaggcttacaccaactacttcggacggtgcaatgtggccgagcacgaaaagctgatcctgctggcccagctgaagcccgagaaggatagcgacgaagccgtgacatatagcctgggaaagtttgggcagagggccctggatttctacagcattcatgtgaccaaggagtccacccaccccgtgaagcccctggcccagatcgccggaaacagatacgcctccggacctgtgggaaaggccctgagcgacgcatgtatgggcacaatcgcctccttcctgtctaagtaccaggacatcatcatcgaacaccagaaggtggtgaagggcaaccagaagagactggagagcctgcgggagctggccggcaaggaaaacctggaataccctagcgtgaccctgccacctcagcctcacaccaaggagggcgttgatgcctacaacgaagtgatcgcccgggtgcgaatgtgggtgaacctgaacctgtggcagaagctgaagctaagcagagatgatgccaagcctctgctgagactgaagggattcccttcctttcctctggtcgagagacaggccaacgaagtggactggtgggacatggtgtgtaacgtgaagaagctgatcaacgagaaaaaggaggatggcaaggtgttttggcagaatctggctggctacaagagacaggaagccctgagaccatacctgagcagcgaggaagatcggaagaagggaaagaaattcgctcggtaccagctgggcgacctgctgctgcacctggaaaagaagcacggcgaggactggggaaaggtgtacgacgaggcctgggagcggattgacaagaaagtggaaggcctgagcaagcacatcaagctggaagaggaacggagaagcgaggacgcccagagcaaggccgccctgaccgactggctgcgggctaaggccagcttcgtgatcgagggcctgaaggaggccgacaaggacgagttctgcagatgcgagctgaagctgcagaagtggtacggggacctgcggggaaagcccttcgccatcgaagccgagaacagcatcctggacatcagcggcttcagcaagcagtacaactgtgccttcatctggcagaaggacggcgtgaagaagctgaacctgtacctgatcatcaactacttcaagggcggcaagctgcggttcaagaagatcaaacctgaagccttcgaagccaacagattctacaccgtgatcaacaaaaagagcggcgagatcgtgcccatggaggtgaacttcaacttcgacgaccccaacctgatcatcctgcctctggcctttggcaagagacagggcagagaattcatctggaacgacctgctgtccctggaaaccggcagcctgaagctggccaacggaagagtgatcgagaagacactgtacaacagaagaacccggcaggatgagcctgccctgttcgtggccctgaccttcgagcggcgggaggtcctggactcctccaatatcaaaccaatgaacctgatcggcgtggcaagaggcgaaaacatccccgccgtgatcgccctgaccgaccccgagggctgcccactgagccggtttaaggatagcctgggaaacccaacccacatcctgagaatcggcgagagctataaggagaagcagcggaccatccaggccaagaaggaggtggagcagcggagagccggcggctacagccggaagtacgccagcaaagccaagaatctggcagacgatatggtgagaaacaccgctagagatctgctgtactacgccgtgacccaggatgccatgctgatcttcgccaacctgagccggggcttcggccggcagggcaagcggaccttcatggccgagagacagtacacacggatggaggactggctgaccgccaagctggcctacgagggcctgagcaagacctacctgtccaagacactggcccagtacacctccaagacatgcagcaactgtgggtttaccatcaccagcgccgactacgacagggtgctggagaagctgaagaagacagcaacaggctggatgaccacaattaacggcaaggagctgaaggtggagggccagattacctactacaacagatacaagagacagaacgtagtcaaggacctgtccgtcgagctggatagactgagcgaagaatctgtgaacaacgacatctcctcctggacaaagggcagaagcggagaagctctgagcctcctgaagaaaagattctcccatagacccgtgcaggagaagttcgtgtgcctgaactgcggcttcgagacacacgcagccgagcaagccgccctgaacatcgccagatcctggctgttcctgcggagccaggagtacaagaaataccagacaaacaagacaaccggcaacaccgataagagagccttcgtcgagacctggcagtccttttaccggaagaagcttaaggaggtgtggaaacctgccgtgcggtctggcggatctggcggaggctccacaagcagcaaggcccccgtgaccttcggcgacctggccatctacttcagccaggaggagtgggagtggctgagccccatccagaaggacctgtacgaggacgtgatgctggagaactacaggaacctggtgagcctgggcctgagcttcaggaggcccaacgtgatcaccctgctggagaagggcaaggccccctggatggtggagcccgtgaggaggaggagggcccccgagctgaccgaggccagcaccagccccaagaaaaagagaaaagtctaagctgccttctgcggggcttgccttctggccatgcccttcttctctcccttgcacctgtacctcttggtctttgaataaagcctgagtaggaaggctagcaaaaaaaaaaaaaaaaaaaaaaaaaaaaaaaaaaaaaaaaaaaaaaaaaaaaaaaaaaaaaaaaaaaaaaaaaaaaaaaa

SEQ ID NO: 5864 - RNA, 5797 nt, synthetic construct
  source 1..5797: mol_type = other RNA
aggaaataagagagaaaagaagagtaagaagaaatataagagccaccatggcccctaagaagaagcgtaaagtgagccggatggaacgcctcgtctacgaggtgcggcagaagtgcagaaacatcgaggacatctgcatctcctgcggatctctgaacgtgaccctggagcacccactgttcatcggcggcatgtgccagaactgtaaaaactgttttctggagtgtgcctatcaatacgacgatgacggctaccagagctactgcaccatctgttgcggcggaagagaggtgctgatgtgtggaaataacaactgctgccggtgcttctgcgtggaatgcgtggacctgctggtgggccccggcgccgcccaggccgctattaaggaagatccttggaactgctacatgtgcggccacaagggcacatacggcctgctgagacggagagaggactggcctagcagactgcagatgttcttcgccaataaccacgaccaggagttcgacccccctaaggtgtaccctcccgtccccgccgagaagagaaagcccatccgggtcctgagcctgttcgatggcatcgccaccggtctgctggtgctgaaggacctgggcatccaggtggataggtacattgcctccgaggtgtgcgaggactccatcaccgtgggaatggtgcgtcatcagggcaagatcatgtacgtgggcgacgtgcggagcgtgacacagaagcatatccaggagtggggccctttcgacctggtgatcggcggcagcccttgcaatgacctgagcatcgtgaacccagcccggaagggcctgtacgagggaaccggcagactgttcttcgagttttacagactgctgcacgacgcccggcctaaggaaggcgacgaccggcccttcttttggctgttcgagaatgtggtggccatgggagtcagcgacaagcgggatattagccggttcctggagagcaaccccgtgatgatcgatgccaaggaagtgagcgccgcccaccgggccagatacttctggggcaatctgcctggcatgaacagacccctggccagcaccgtgaacgacaagctggagctgcaggagtgcctggagcacggccggatcgccaagttcagcaaggtgagaaccatcaccacccgaagcaacagcatcaaacaaggcaaggaccagcactttcctgtgttcatgaacgagaaggaggacatcctgtggtgtaccgagatggagagagtgttcgggttcccagtccactacacagatgtcagcaacatgtctagactggccagacagagactgctgggaagaagctggtccgtccctgtgatcagacacctgttcgcccctctgaaggagtacttcgcctgcgtgagcagcggcaacagcaacgccaacagccggggccccagcttctctagcggcctggtgccactgtccctgagagggagccacatgggccccatggagatctacaaaaccgtgagcgcctggaagcggcagcctgtgcgcgtgctgagcctgtttcggaatatcgataaagtcctgaaaagcctgggattcctggagagcggctctggctccggcggtggcaccctgaagtacgtggaggatgtgacaaacgtggtcagacgggatgtggagaagtggggccccttcgatctggtgtacggcagcacccaacccctgggcagctcttgtgaccggtgccctggctggtacatgtttcagttccaccggatcctgcagtacgccctgccgagacaggagtcccagcggccattcttttggattttcatggacaacttgctgctgaccgaggatgaccaggaaactaccactcggttcctgcagaccgaagccgtgaccctgcaggacgtgagaggccgggactaccagaacgccatgcgggtgtggtccaacatccctggactgaaaagcaagcacgcacctctgacccctaaagaagaggagtacctgcaggcccaggtgcggagcagaagcaagctggacgcccctaaggtggatctgctggtgaagaattgcctcctgcccctgagagagtacttcaagtatttcagccagaatagtctgcccctgggcggcccaagcagcggcgcccctcctcccagcggcggcagcccagccggctccccaacctctaccgaggagggcacctctgagtccgccacccccgagagcggccctggcacctccaccgagcccagcgagggcagcgcacccggcagccctgccggcagccccacctccacagaggagggaaccagcaccgagcccagcgaaggcagcgccccaggcaccagcaccgagcctagtgagggcggctctggcggcggcagcgcccaggagattaaacggatcaacaagatcagaagaagacttgtgaaagacagcaacaccaagaaggccggcaagacaggccccatgaaaaccctgctggttagagtgatgacacccgatctgagagagcggctggaaaacctgagaaagaagcctgaaaatatcccccagcccatcagcaatacatctagagccaacctgaataagctgctgaccgattacaccgaaatgaagaaggcgatcctgcatgtgtactgggaagagttccagaaggaccctgtgggcctgatgagccgggtggcccagcctgccagcaagaagatcgatcagaacaagctgaaacctgagatggacgagaagggcaacctgaccaccgccggctttgcctgctctcagtgtggccagcccctgttcgtgtacaagctggagcaggtgtctgagaagggcaaggcttacaccaactacttcggacggtgcaatgtggccgagcacgaaaagctgatcctgctggcccagctgaagcccgagaaggatagcgacgaagccgtgacatatagcctgggaaagtttgggcagagggccctggatttctacagcattcatgtgaccaaggagtccacccaccccgtgaagcccctggcccagatcgccggaaacagatacgcctccggacctgtgggaaaggccctgagcgacgcatgtatgggcacaatcgcctccttcctgtctaagtaccaggacatcatcatcgaacaccagaaggtggtgaagggcaaccagaagagactggagagcctgcgggagctggccggcaaggaaaacctggaataccctagcgtgaccctgccacctcagcctcacaccaaggagggcgttgatgcctacaacgaagtgatcgcccgggtgcgaatgtgggtgaacctgaacctgtggcagaagctgaagctaagcagagatgatgccaagcctctgctgagactgaagggattcccttcctttcctctggtcgagagacaggccaacgaagtggactggtgggacatggtgtgtaacgtgaagaagctgatcaacgagaaaaaggaggatggcaaggtgttttggcagaatctggctggctacaagagacaggaagccctgagaccatacctgagcagcgaggaagatcggaagaagggaaagaaattcgctcggtaccagctgggcgacctgctgctgcacctggaaaagaagcacggcgaggactggggaaaggtgtacgacgaggcctgggagcggattgacaagaaagtggaaggcctgagcaagcacatcaagctggaagaggaacggagaagcgaggacgcccagagcaaggccgccctgaccgactggctgcgggctaaggccagcttcgtgatcgagggcctgaaggaggccgacaaggacgagttctgcagatgcgagctgaagctgcagaagtggtacggggacctgcggggaaagcccttcgccatcgaagccgagaacagcatcctggacatcagcggcttcagcaagcagtacaactgtgccttcatctggcagaaggacggcgtgaagaagctgaacctgtacctgatcatcaactacttcaagggcggcaagctgcggttcaagaagatcaaacctgaagccttcgaagccaacagattctacaccgtgatcaacaaaaagagcggcgagatcgtgcccatggaggtgaacttcaacttcgacgaccccaacctgatcatcctgcctctggcctttggcaagagacagggcagagaattcatctggaacgacctgctgtccctggaaaccggcagcctgaagctggccaacggaagagtgatcgagaagacactgtacaacagaagaacccggcaggatgagcctgccctgttcgtggccctgaccttcgagcggcgggaggtcctggactcctccaatatcaaaccaatgaacctgatcggcgtggcaagaggcgaaaacatccccgccgtgatcgccctgaccgaccccgagggctgcccactgagccggtttaaggatagcctgggaaacccaacccacatcctgagaatcggcgagagctataaggagaagcagcggaccatccaggccaagaaggaggtggagcagcggagagccggcggctacagccggaagtacgccagcaaagccaagaatctggcagacgatatggtgagaaacaccgctagagatctgctgtactacgccgtgacccaggatgccatgctgatcttcgccaacctgagccggggcttcggccggcagggcaagcggaccttcatggccgagagacagtacacacggatggaggactggctgaccgccaagctggcctacgagggcctgagcaagacctacctgtccaagacactggcccagtacacctccaagacatgcagcaactgtgggtttaccatcaccagcgccgactacgacagggtgctggagaagctgaagaagacagcaacaggctggatgaccacaattaacggcaaggagctgaaggtggagggccagattacctactacaacagatacaagagacagaacgtagtcaaggacctgtccgtcgagctggatagactgagcgaagaatctgtgaacaacgacatctcctcctggacaaagggcagaagcggagaagctctgagcctcctgaagaaaagattctcccatagacccgtgcaggagaagttcgtgtgcctgaactgcggcttcgagacacacgcagccgagcaagccgccctgaacatcgccagatcctggctgttcctgcggagccaggagtacaagaaataccagacaaacaagacaaccggcaacaccgataagagagccttcgtcgagacctggcagtccttttaccggaagaagcttaaggaggtgtggaaacctgccgtgcggtctggcggatctggcggaggctccacaagcccccagggcctggtgaccttcggcgacgtggccgtggacttcagccaggaggagtgggagtggctgaaccccaaccagaggaccctgtacaggaaggtgatgctggagaactacaagaacctggccagcctgggcctgtgcgtgagcaagcccgacgtgatcagcagcctggagcagggcaaggagccctggaccgtgaagaggaagatgaccagggcctggtgccccgacctgaagatcgtgaccagccccaagaaaaagagaaaagtctaagctgccttctgcggggcttgccttctggccatgcccttcttctctcccttgcacctgtacctcttggtctttgaataaagcctgagtaggaaggctagcaaaaaaaaaaaaaaaaaaaaaaaaaaaaaaaaaaaaaaaaaaaaaaaaaaaaaaaaaaaaaaaaaaaaaaaaaaaaaaaa

SEQ ID NO: 5865 - RNA, 5797 nt, synthetic construct
  source 1..5797: mol_type = other RNA
aggaaataagagagaaaagaagagtaagaagaaatataagagccaccatggcccctaagaagaagcgtaaagtgagccggatggaacgcctcgtctacgaggtgcggcagaagtgcagaaacatcgaggacatctgcatctcctgcggatctctgaacgtgaccctggagcacccactgttcatcggcggcatgtgccagaactgtaaaaactgttttctggagtgtgcctatcaatacgacgatgacggctaccagagctactgcaccatctgttgcggcggaagagaggtgctgatgtgtggaaataacaactgctgccggtgcttctgcgtggaatgcgtggacctgctggtgggccccggcgccgcccaggccgctattaaggaagatccttggaactgctacatgtgcggccacaagggcacatacggcctgctgagacggagagaggactggcctagcagactgcagatgttcttcgccaataaccacgaccaggagttcgacccccctaaggtgtaccctcccgtccccgccgagaagagaaagcccatccgggtcctgagcctgttcgatggcatcgccaccggtctgctggtgctgaaggacctgggcatccaggtggataggtacattgcctccgaggtgtgcgaggactccatcaccgtgggaatggtgcgtcatcagggcaagatcatgtacgtgggcgacgtgcggagcgtgacacagaagcatatccaggagtggggccctttcgacctggtgatcggcggcagcccttgcaatgacctgagcatcgtgaacccagcccggaagggcctgtacgagggaaccggcagactgttcttcgagttttacagactgctgcacgacgcccggcctaaggaaggcgacgaccggcccttcttttggctgttcgagaatgtggtggccatgggagtcagcgacaagcgggatattagccggttcctggagagcaaccccgtgatgatcgatgccaaggaagtgagcgccgcccaccgggccagatacttctggggcaatctgcctggcatgaacagacccctggccagcaccgtgaacgacaagctggagctgcaggagtgcctggagcacggccggatcgccaagttcagcaaggtgagaaccatcaccacccgaagcaacagcatcaaacaaggcaaggaccagcactttcctgtgttcatgaacgagaaggaggacatcctgtggtgtaccgagatggagagagtgttcgggttcccagtccactacacagatgtcagcaacatgtctagactggccagacagagactgctgggaagaagctggtccgtccctgtgatcagacacctgttcgcccctctgaaggagtacttcgcctgcgtgagcagcggcaacagcaacgccaacagccggggccccagcttctctagcggcctggtgccactgtccctgagagggagccacatgggccccatggagatctacaaaaccgtgagcgcctggaagcggcagcctgtgcgcgtgctgagcctgtttcggaatatcgataaagtcctgaaaagcctgggattcctggagagcggctctggctccggcggtggcaccctgaagtacgtggaggatgtgacaaacgtggtcagacgggatgtggagaagtggggccccttcgatctggtgtacggcagcacccaacccctgggcagctcttgtgaccggtgccctggctggtacatgtttcagttccaccggatcctgcagtacgccctgccgagacaggagtcccagcggccattcttttggattttcatggacaacttgctgctgaccgaggatgaccaggaaactaccactcggttcctgcagaccgaagccgtgaccctgcaggacgtgagaggccgggactaccagaacgccatgcgggtgtggtccaacatccctggactgaaaagcaagcacgcacctctgacccctaaagaagaggagtacctgcaggcccaggtgcggagcagaagcaagctggacgcccctaaggtggatctgctggtgaagaattgcctcctgcccctgagagagtacttcaagtatttcagccagaatagtctgcccctgggcggcccaagcagcggcgcccctcctcccagcggcggcagcccagccggctccccaacctctaccgaggagggcacctctgagtccgccacccccgagagcggccctggcacctccaccgagcccagcgagggcagcgcacccggcagccctgccggcagccccacctccacagaggagggaaccagcaccgagcccagcgaaggcagcgccccaggcaccagcaccgagcctagtgagggcggctctggcggcggcagcgcccaggagattaaacggatcaacaagatcagaagaagacttgtgaaagacagcaacaccaagaaggccggcaagacaggccccatgaaaaccctgctggttagagtgatgacacccgatctgagagagcggctggaaaacctgagaaagaagcctgaaaatatcccccagcccatcagcaatacatctagagccaacctgaataagctgctgaccgattacaccgaaatgaagaaggcgatcctgcatgtgtactgggaagagttccagaaggaccctgtgggcctgatgagccgggtggcccagcctgccagcaagaagatcgatcagaacaagctgaaacctgagatggacgagaagggcaacctgaccaccgccggctttgcctgctctcagtgtggccagcccctgttcgtgtacaagctggagcaggtgtctgagaagggcaaggcttacaccaactacttcggacggtgcaatgtggccgagcacgaaaagctgatcctgctggcccagctgaagcccgagaaggatagcgacgaagccgtgacatatagcctgggaaagtttgggcagagggccctggatttctacagcattcatgtgaccaaggagtccacccaccccgtgaagcccctggcccagatcgccggaaacagatacgcctccggacctgtgggaaaggccctgagcgacgcatgtatgggcacaatcgcctccttcctgtctaagtaccaggacatcatcatcgaacaccagaaggtggtgaagggcaaccagaagagactggagagcctgcgggagctggccggcaaggaaaacctggaataccctagcgtgaccctgccacctcagcctcacaccaaggagggcgttgatgcctacaacgaagtgatcgcccgggtgcgaatgtgggtgaacctgaacctgtggcagaagctgaagctaagcagagatgatgccaagcctctgctgagactgaagggattcccttcctttcctctggtcgagagacaggccaacgaagtggactggtgggacatggtgtgtaacgtgaagaagctgatcaacgagaaaaaggaggatggcaaggtgttttggcagaatctggctggctacaagagacaggaagccctgagaccatacctgagcagcgaggaagatcggaagaagggaaagaaattcgctcggtaccagctgggcgacctgctgctgcacctggaaaagaagcacggcgaggactggggaaaggtgtacgacgaggcctgggagcggattgacaagaaagtggaaggcctgagcaagcacatcaagctggaagaggaacggagaagcgaggacgcccagagcaaggccgccctgaccgactggctgcgggctaaggccagcttcgtgatcgagggcctgaaggaggccgacaaggacgagttctgcagatgcgagctgaagctgcagaagtggtacggggacctgcggggaaagcccttcgccatcgaagccgagaacagcatcctggacatcagcggcttcagcaagcagtacaactgtgccttcatctggcagaaggacggcgtgaagaagctgaacctgtacctgatcatcaactacttcaagggcggcaagctgcggttcaagaagatcaaacctgaagccttcgaagccaacagattctacaccgtgatcaacaaaaagagcggcgagatcgtgcccatggaggtgaacttcaacttcgacgaccccaacctgatcatcctgcctctggcctttggcaagagacagggcagagaattcatctggaacgacctgctgtccctggaaaccggcagcctgaagctggccaacggaagagtgatcgagaagacactgtacaacagaagaacccggcaggatgagcctgccctgttcgtggccctgaccttcgagcggcgggaggtcctggactcctccaatatcaaaccaatgaacctgatcggcgtggcaagaggcgaaaacatccccgccgtgatcgccctgaccgaccccgagggctgcccactgagccggtttaaggatagcctgggaaacccaacccacatcctgagaatcggcgagagctataaggagaagcagcggaccatccaggccaagaaggaggtggagcagcggagagccggcggctacagccggaagtacgccagcaaagccaagaatctggcagacgatatggtgagaaacaccgctagagatctgctgtactacgccgtgacccaggatgccatgctgatcttcgccaacctgagccggggcttcggccggcagggcaagcggaccttcatggccgagagacagtacacacggatggaggactggctgaccgccaagctggcctacgagggcctgagcaagacctacctgtccaagacactggcccagtacacctccaagacatgcagcaactgtgggtttaccatcaccagcgccgactacgacagggtgctggagaagctgaagaagacagcaacaggctggatgaccacaattaacggcaaggagctgaaggtggagggccagattacctactacaacagatacaagagacagaacgtagtcaaggacctgtccgtcgagctggatagactgagcgaagaatctgtgaacaacgacatctcctcctggacaaagggcagaagcggagaagctctgagcctcctgaagaaaagattctcccatagacccgtgcaggagaagttcgtgtgcctgaactgcggcttcgagacacacgcagccgagcaagccgccctgaacatcgccagatcctggctgttcctgcggagccaggagtacaagaaataccagacaaacaagacaaccggcaacaccgataagagagccttcgtcgagacctggcagtccttttaccggaagaagcttaaggaggtgtggaaacctgccgtgcggtctggcggatctggcggaggctccacaagcgccagggagagcgtggtgttcagcgacgtgagcatcgccttcagccaggaggagtgggcccacctggacctggagcagaaggacctgtacagggacgtgatgctggagaactacagcaacctggtgagcctggccggctgcttcgtgagcaagcccgacgtgatcagcctgctggagcagggcaaggagccctggaagatcgtgaggaagggcaggaggaggtaccccgacctggagaccaggaccagccccaagaaaaagagaaaagtctaagctgccttctgcggggcttgccttctggccatgcccttcttctctcccttgcacctgtacctcttggtctttgaataaagcctgagtaggaaggctagcaaaaaaaaaaaaaaaaaaaaaaaaaaaaaaaaaaaaaaaaaaaaaaaaaaaaaaaaaaaaaaaaaaaaaaaaaaaaaaaa

SEQ ID NO: 5866 - RNA, 5797 nt, synthetic construct
  source 1..5797: mol_type = other RNA
aggaaataagagagaaaagaagagtaagaagaaatataagagccaccatggcccctaagaagaagcgtaaagtgagccggatggaacgcctcgtctacgaggtgcggcagaagtgcagaaacatcgaggacatctgcatctcctgcggatctctgaacgtgaccctggagcacccactgttcatcggcggcatgtgccagaactgtaaaaactgttttctggagtgtgcctatcaatacgacgatgacggctaccagagctactgcaccatctgttgcggcggaagagaggtgctgatgtgtggaaataacaactgctgccggtgcttctgcgtggaatgcgtggacctgctggtgggccccggcgccgcccaggccgctattaaggaagatccttggaactgctacatgtgcggccacaagggcacatacggcctgctgagacggagagaggactggcctagcagactgcagatgttcttcgccaataaccacgaccaggagttcgacccccctaaggtgtaccctcccgtccccgccgagaagagaaagcccatccgggtcctgagcctgttcgatggcatcgccaccggtctgctggtgctgaaggacctgggcatccaggtggataggtacattgcctccgaggtgtgcgaggactccatcaccgtgggaatggtgcgtcatcagggcaagatcatgtacgtgggcgacgtgcggagcgtgacacagaagcatatccaggagtggggccctttcgacctggtgatcggcggcagcccttgcaatgacctgagcatcgtgaacccagcccggaagggcctgtacgagggaaccggcagactgttcttcgagttttacagactgctgcacgacgcccggcctaaggaaggcgacgaccggcccttcttttggctgttcgagaatgtggtggccatgggagtcagcgacaagcgggatattagccggttcctggagagcaaccccgtgatgatcgatgccaaggaagtgagcgccgcccaccgggccagatacttctggggcaatctgcctggcatgaacagacccctggccagcaccgtgaacgacaagctggagctgcaggagtgcctggagcacggccggatcgccaagttcagcaaggtgagaaccatcaccacccgaagcaacagcatcaaacaaggcaaggaccagcactttcctgtgttcatgaacgagaaggaggacatcctgtggtgtaccgagatggagagagtgttcgggttcccagtccactacacagatgtcagcaacatgtctagactggccagacagagactgctgggaagaagctggtccgtccctgtgatcagacacctgttcgcccctctgaaggagtacttcgcctgcgtgagcagcggcaacagcaacgccaacagccggggccccagcttctctagcggcctggtgccactgtccctgagagggagccacatgggccccatggagatctacaaaaccgtgagcgcctggaagcggcagcctgtgcgcgtgctgagcctgtttcggaatatcgataaagtcctgaaaagcctgggattcctggagagcggctctggctccggcggtggcaccctgaagtacgtggaggatgtgacaaacgtggtcagacgggatgtggagaagtggggccccttcgatctggtgtacggcagcacccaacccctgggcagctcttgtgaccggtgccctggctggtacatgtttcagttccaccggatcctgcagtacgccctgccgagacaggagtcccagcggccattcttttggattttcatggacaacttgctgctgaccgaggatgaccaggaaactaccactcggttcctgcagaccgaagccgtgaccctgcaggacgtgagaggccgggactaccagaacgccatgcgggtgtggtccaacatccctggactgaaaagcaagcacgcacctctgacccctaaagaagaggagtacctgcaggcccaggtgcggagcagaagcaagctggacgcccctaaggtggatctgctggtgaagaattgcctcctgcccctgagagagtacttcaagtatttcagccagaatagtctgcccctgggcggcccaagcagcggcgcccctcctcccagcggcggcagcccagccggctccccaacctctaccgaggagggcacctctgagtccgccacccccgagagcggccctggcacctccaccgagcccagcgagggcagcgcacccggcagccctgccggcagccccacctccacagaggagggaaccagcaccgagcccagcgaaggcagcgccccaggcaccagcaccgagcctagtgagggcggctctggcggcggcagcgcccaggagattaaacggatcaacaagatcagaagaagacttgtgaaagacagcaacaccaagaaggccggcaagacaggccccatgaaaaccctgctggttagagtgatgacacccgatctgagagagcggctggaaaacctgagaaagaagcctgaaaatatcccccagcccatcagcaatacatctagagccaacctgaataagctgctgaccgattacaccgaaatgaagaaggcgatcctgcatgtgtactgggaagagttccagaaggaccctgtgggcctgatgagccgggtggcccagcctgccagcaagaagatcgatcagaacaagctgaaacctgagatggacgagaagggcaacctgaccaccgccggctttgcctgctctcagtgtggccagcccctgttcgtgtacaagctggagcaggtgtctgagaagggcaaggcttacaccaactacttcggacggtgcaatgtggccgagcacgaaaagctgatcctgctggcccagctgaagcccgagaaggatagcgacgaagccgtgacatatagcctgggaaagtttgggcagagggccctggatttctacagcattcatgtgaccaaggagtccacccaccccgtgaagcccctggcccagatcgccggaaacagatacgcctccggacctgtgggaaaggccctgagcgacgcatgtatgggcacaatcgcctccttcctgtctaagtaccaggacatcatcatcgaacaccagaaggtggtgaagggcaaccagaagagactggagagcctgcgggagctggccggcaaggaaaacctggaataccctagcgtgaccctgccacctcagcctcacaccaaggagggcgttgatgcctacaacgaagtgatcgcccgggtgcgaatgtgggtgaacctgaacctgtggcagaagctgaagctaagcagagatgatgccaagcctctgctgagactgaagggattcccttcctttcctctggtcgagagacaggccaacgaagtggactggtgggacatggtgtgtaacgtgaagaagctgatcaacgagaaaaaggaggatggcaaggtgttttggcagaatctggctggctacaagagacaggaagccctgagaccatacctgagcagcgaggaagatcggaagaagggaaagaaattcgctcggtaccagctgggcgacctgctgctgcacctggaaaagaagcacggcgaggactggggaaaggtgtacgacgaggcctgggagcggattgacaagaaagtggaaggcctgagcaagcacatcaagctggaagaggaacggagaagcgaggacgcccagagcaaggccgccctgaccgactggctgcgggctaaggccagcttcgtgatcgagggcctgaaggaggccgacaaggacgagttctgcagatgcgagctgaagctgcagaagtggtacggggacctgcggggaaagcccttcgccatcgaagccgagaacagcatcctggacatcagcggcttcagcaagcagtacaactgtgccttcatctggcagaaggacggcgtgaagaagctgaacctgtacctgatcatcaactacttcaagggcggcaagctgcggttcaagaagatcaaacctgaagccttcgaagccaacagattctacaccgtgatcaacaaaaagagcggcgagatcgtgcccatggaggtgaacttcaacttcgacgaccccaacctgatcatcctgcctctggcctttggcaagagacagggcagagaattcatctggaacgacctgctgtccctggaaaccggcagcctgaagctggccaacggaagagtgatcgagaagacactgtacaacagaagaacccggcaggatgagcctgccctgttcgtggccctgaccttcgagcggcgggaggtcctggactcctccaatatcaaaccaatgaacctgatcggcgtggcaagaggcgaaaacatccccgccgtgatcgccctgaccgaccccgagggctgcccactgagccggtttaaggatagcctgggaaacccaacccacatcctgagaatcggcgagagctataaggagaagcagcggaccatccaggccaagaaggaggtggagcagcggagagccggcggctacagccggaagtacgccagcaaagccaagaatctggcagacgatatggtgagaaacaccgctagagatctgctgtactacgccgtgacccaggatgccatgctgatcttcgccaacctgagccggggcttcggccggcagggcaagcggaccttcatggccgagagacagtacacacggatggaggactggctgaccgccaagctggcctacgagggcctgagcaagacctacctgtccaagacactggcccagtacacctccaagacatgcagcaactgtgggtttaccatcaccagcgccgactacgacagggtgctggagaagctgaagaagacagcaacaggctggatgaccacaattaacggcaaggagctgaaggtggagggccagattacctactacaacagatacaagagacagaacgtagtcaaggacctgtccgtcgagctggatagactgagcgaagaatctgtgaacaacgacatctcctcctggacaaagggcagaagcggagaagctctgagcctcctgaagaaaagattctcccatagacccgtgcaggagaagttcgtgtgcctgaactgcggcttcgagacacacgcagccgagcaagccgccctgaacatcgccagatcctggctgttcctgcggagccaggagtacaagaaataccagacaaacaagacaaccggcaacaccgataagagagccttcgtcgagacctggcagtccttttaccggaagaagcttaaggaggtgtggaaacctgccgtgcggtctggcggatctggcggaggctccacaagcatgatcgagtaccagatccccgtgagcttcaaggacgtggtggtgggcttcacccaggaggagtggcaccagctgagccccgcccagagggccctgtacagggacgtgatgctggagacctacagcaacctggtgagcgtgggctacgagggcaccaagcccgacgtgatcctgaggctggagcaggaggaggccccctggatcggcgaggccgcctgccccggctgccactgctggggcaagaccagccccaagaaaaagagaaaagtctaagctgccttctgcggggcttgccttctggccatgcccttcttctctcccttgcacctgtacctcttggtctttgaataaagcctgagtaggaaggctagcaaaaaaaaaaaaaaaaaaaaaaaaaaaaaaaaaaaaaaaaaaaaaaaaaaaaaaaaaaaaaaaaaaaaaaaaaaaaaaaa

SEQ ID NO: 5867 - RNA, 5797 nt, synthetic construct
  source 1..5797: mol_type = other RNA
aggaaataagagagaaaagaagagtaagaagaaatataagagccaccatggcccctaagaagaagcgtaaagtgagccggatggaacgcctcgtctacgaggtgcggcagaagtgcagaaacatcgaggacatctgcatctcctgcggatctctgaacgtgaccctggagcacccactgttcatcggcggcatgtgccagaactgtaaaaactgttttctggagtgtgcctatcaatacgacgatgacggctaccagagctactgcaccatctgttgcggcggaagagaggtgctgatgtgtggaaataacaactgctgccggtgcttctgcgtggaatgcgtggacctgctggtgggccccggcgccgcccaggccgctattaaggaagatccttggaactgctacatgtgcggccacaagggcacatacggcctgctgagacggagagaggactggcctagcagactgcagatgttcttcgccaataaccacgaccaggagttcgacccccctaaggtgtaccctcccgtccccgccgagaagagaaagcccatccgggtcctgagcctgttcgatggcatcgccaccggtctgctggtgctgaaggacctgggcatccaggtggataggtacattgcctccgaggtgtgcgaggactccatcaccgtgggaatggtgcgtcatcagggcaagatcatgtacgtgggcgacgtgcggagcgtgacacagaagcatatccaggagtggggccctttcgacctggtgatcggcggcagcccttgcaatgacctgagcatcgtgaacccagcccggaagggcctgtacgagggaaccggcagactgttcttcgagttttacagactgctgcacgacgcccggcctaaggaaggcgacgaccggcccttcttttggctgttcgagaatgtggtggccatgggagtcagcgacaagcgggatattagccggttcctggagagcaaccccgtgatgatcgatgccaaggaagtgagcgccgcccaccgggccagatacttctggggcaatctgcctggcatgaacagacccctggccagcaccgtgaacgacaagctggagctgcaggagtgcctggagcacggccggatcgccaagttcagcaaggtgagaaccatcaccacccgaagcaacagcatcaaacaaggcaaggaccagcactttcctgtgttcatgaacgagaaggaggacatcctgtggtgtaccgagatggagagagtgttcgggttcccagtccactacacagatgtcagcaacatgtctagactggccagacagagactgctgggaagaagctggtccgtccctgtgatcagacacctgttcgcccctctgaaggagtacttcgcctgcgtgagcagcggcaacagcaacgccaacagccggggccccagcttctctagcggcctggtgccactgtccctgagagggagccacatgggccccatggagatctacaaaaccgtgagcgcctggaagcggcagcctgtgcgcgtgctgagcctgtttcggaatatcgataaagtcctgaaaagcctgggattcctggagagcggctctggctccggcggtggcaccctgaagtacgtggaggatgtgacaaacgtggtcagacgggatgtggagaagtggggccccttcgatctggtgtacggcagcacccaacccctgggcagctcttgtgaccggtgccctggctggtacatgtttcagttccaccggatcctgcagtacgccctgccgagacaggagtcccagcggccattcttttggattttcatggacaacttgctgctgaccgaggatgaccaggaaactaccactcggttcctgcagaccgaagccgtgaccctgcaggacgtgagaggccgggactaccagaacgccatgcgggtgtggtccaacatccctggactgaaaagcaagcacgcacctctgacccctaaagaagaggagtacctgcaggcccaggtgcggagcagaagcaagctggacgcccctaaggtggatctgctggtgaagaattgcctcctgcccctgagagagtacttcaagtatttcagccagaatagtctgcccctgggcggcccaagcagcggcgcccctcctcccagcggcggcagcccagccggctccccaacctctaccgaggagggcacctctgagtccgccacccccgagagcggccctggcacctccaccgagcccagcgagggcagcgcacccggcagccctgccggcagccccacctccacagaggagggaaccagcaccgagcccagcgaaggcagcgccccaggcaccagcaccgagcctagtgagggcggctctggcggcggcagcgcccaggagattaaacggatcaacaagatcagaagaagacttgtgaaagacagcaacaccaagaaggccggcaagacaggccccatgaaaaccctgctggttagagtgatgacacccgatctgagagagcggctggaaaacctgagaaagaagcctgaaaatatcccccagcccatcagcaatacatctagagccaacctgaataagctgctgaccgattacaccgaaatgaagaaggcgatcctgcatgtgtactgggaagagttccagaaggaccctgtgggcctgatgagccgggtggcccagcctgccagcaagaagatcgatcagaacaagctgaaacctgagatggacgagaagggcaacctgaccaccgccggctttgcctgctctcagtgtggccagcccctgttcgtgtacaagctggagcaggtgtctgagaagggcaaggcttacaccaactacttcggacggtgcaatgtggccgagcacgaaaagctgatcctgctggcccagctgaagcccgagaaggatagcgacgaagccgtgacatatagcctgggaaagtttgggcagagggccctggatttctacagcattcatgtgaccaaggagtccacccaccccgtgaagcccctggcccagatcgccggaaacagatacgcctccggacctgtgggaaaggccctgagcgacgcatgtatgggcacaatcgcctccttcctgtctaagtaccaggacatcatcatcgaacaccagaaggtggtgaagggcaaccagaagagactggagagcctgcgggagctggccggcaaggaaaacctggaataccctagcgtgaccctgccacctcagcctcacaccaaggagggcgttgatgcctacaacgaagtgatcgcccgggtgcgaatgtgggtgaacctgaacctgtggcagaagctgaagctaagcagagatgatgccaagcctctgctgagactgaagggattcccttcctttcctctggtcgagagacaggccaacgaagtggactggtgggacatggtgtgtaacgtgaagaagctgatcaacgagaaaaaggaggatggcaaggtgttttggcagaatctggctggctacaagagacaggaagccctgagaccatacctgagcagcgaggaagatcggaagaagggaaagaaattcgctcggtaccagctgggcgacctgctgctgcacctggaaaagaagcacggcgaggactggggaaaggtgtacgacgaggcctgggagcggattgacaagaaagtggaaggcctgagcaagcacatcaagctggaagaggaacggagaagcgaggacgcccagagcaaggccgccctgaccgactggctgcgggctaaggccagcttcgtgatcgagggcctgaaggaggccgacaaggacgagttctgcagatgcgagctgaagctgcagaagtggtacggggacctgcggggaaagcccttcgccatcgaagccgagaacagcatcctggacatcagcggcttcagcaagcagtacaactgtgccttcatctggcagaaggacggcgtgaagaagctgaacctgtacctgatcatcaactacttcaagggcggcaagctgcggttcaagaagatcaaacctgaagccttcgaagccaacagattctacaccgtgatcaacaaaaagagcggcgagatcgtgcccatggaggtgaacttcaacttcgacgaccccaacctgatcatcctgcctctggcctttggcaagagacagggcagagaattcatctggaacgacctgctgtccctggaaaccggcagcctgaagctggccaacggaagagtgatcgagaagacactgtacaacagaagaacccggcaggatgagcctgccctgttcgtggccctgaccttcgagcggcgggaggtcctggactcctccaatatcaaaccaatgaacctgatcggcgtggcaagaggcgaaaacatccccgccgtgatcgccctgaccgaccccgagggctgcccactgagccggtttaaggatagcctgggaaacccaacccacatcctgagaatcggcgagagctataaggagaagcagcggaccatccaggccaagaaggaggtggagcagcggagagccggcggctacagccggaagtacgccagcaaagccaagaatctggcagacgatatggtgagaaacaccgctagagatctgctgtactacgccgtgacccaggatgccatgctgatcttcgccaacctgagccggggcttcggccggcagggcaagcggaccttcatggccgagagacagtacacacggatggaggactggctgaccgccaagctggcctacgagggcctgagcaagacctacctgtccaagacactggcccagtacacctccaagacatgcagcaactgtgggtttaccatcaccagcgccgactacgacagggtgctggagaagctgaagaagacagcaacaggctggatgaccacaattaacggcaaggagctgaaggtggagggccagattacctactacaacagatacaagagacagaacgtagtcaaggacctgtccgtcgagctggatagactgagcgaagaatctgtgaacaacgacatctcctcctggacaaagggcagaagcggagaagctctgagcctcctgaagaaaagattctcccatagacccgtgcaggagaagttcgtgtgcctgaactgcggcttcgagacacacgcagccgagcaagccgccctgaacatcgccagatcctggctgttcctgcggagccaggagtacaagaaataccagacaaacaagacaaccggcaacaccgataagagagccttcgtcgagacctggcagtccttttaccggaagaagcttaaggaggtgtggaaacctgccgtgcggtctggcggatctggcggaggctccacaagcccccaggagagcgtgaccttcaaggacatcgccgtggacttcacccaggaggagtgggccctgctggacgccagccagaggaagctgtacagggacgtgatgctggagaacatcggccacctggtgagcgtgggctacagggtgtgcaagagcgacgtgatcagccagctgcagcagggcgtggagctgtggagggagggcaggggcttcccccagggcgtgatccccgacaggaagagcagcaccagccccaagaaaaagagaaaagtctaagctgccttctgcggggcttgccttctggccatgcccttcttctctcccttgcacctgtacctcttggtctttgaataaagcctgagtaggaaggctagcaaaaaaaaaaaaaaaaaaaaaaaaaaaaaaaaaaaaaaaaaaaaaaaaaaaaaaaaaaaaaaaaaaaaaaaaaaaaaaaa

SEQ ID NO: 5868 - RNA, 5797 nt, synthetic construct
  source 1..5797: mol_type = other RNA
aggaaataagagagaaaagaagagtaagaagaaatataagagccaccatggcccctaagaagaagcgtaaagtgagccggatggaacgcctcgtctacgaggtgcggcagaagtgcagaaacatcgaggacatctgcatctcctgcggatctctgaacgtgaccctggagcacccactgttcatcggcggcatgtgccagaactgtaaaaactgttttctggagtgtgcctatcaatacgacgatgacggctaccagagctactgcaccatctgttgcggcggaagagaggtgctgatgtgtggaaataacaactgctgccggtgcttctgcgtggaatgcgtggacctgctggtgggccccggcgccgcccaggccgctattaaggaagatccttggaactgctacatgtgcggccacaagggcacatacggcctgctgagacggagagaggactggcctagcagactgcagatgttcttcgccaataaccacgaccaggagttcgacccccctaaggtgtaccctcccgtccccgccgagaagagaaagcccatccgggtcctgagcctgttcgatggcatcgccaccggtctgctggtgctgaaggacctgggcatccaggtggataggtacattgcctccgaggtgtgcgaggactccatcaccgtgggaatggtgcgtcatcagggcaagatcatgtacgtgggcgacgtgcggagcgtgacacagaagcatatccaggagtggggccctttcgacctggtgatcggcggcagcccttgcaatgacctgagcatcgtgaacccagcccggaagggcctgtacgagggaaccggcagactgttcttcgagttttacagactgctgcacgacgcccggcctaaggaaggcgacgaccggcccttcttttggctgttcgagaatgtggtggccatgggagtcagcgacaagcgggatattagccggttcctggagagcaaccccgtgatgatcgatgccaaggaagtgagcgccgcccaccgggccagatacttctggggcaatctgcctggcatgaacagacccctggccagcaccgtgaacgacaagctggagctgcaggagtgcctggagcacggccggatcgccaagttcagcaaggtgagaaccatcaccacccgaagcaacagcatcaaacaaggcaaggaccagcactttcctgtgttcatgaacgagaaggaggacatcctgtggtgtaccgagatggagagagtgttcgggttcccagtccactacacagatgtcagcaacatgtctagactggccagacagagactgctgggaagaagctggtccgtccctgtgatcagacacctgttcgcccctctgaaggagtacttcgcctgcgtgagcagcggcaacagcaacgccaacagccggggccccagcttctctagcggcctggtgccactgtccctgagagggagccacatgggccccatggagatctacaaaaccgtgagcgcctggaagcggcagcctgtgcgcgtgctgagcctgtttcggaatatcgataaagtcctgaaaagcctgggattcctggagagcggctctggctccggcggtggcaccctgaagtacgtggaggatgtgacaaacgtggtcagacgggatgtggagaagtggggccccttcgatctggtgtacggcagcacccaacccctgggcagctcttgtgaccggtgccctggctggtacatgtttcagttccaccggatcctgcagtacgccctgccgagacaggagtcccagcggccattcttttggattttcatggacaacttgctgctgaccgaggatgaccaggaaactaccactcggttcctgcagaccgaagccgtgaccctgcaggacgtgagaggccgggactaccagaacgccatgcgggtgtggtccaacatccctggactgaaaagcaagcacgcacctctgacccctaaagaagaggagtacctgcaggcccaggtgcggagcagaagcaagctggacgcccctaaggtggatctgctggtgaagaattgcctcctgcccctgagagagtacttcaagtatttcagccagaatagtctgcccctgggcggcccaagcagcggcgcccctcctcccagcggcggcagcccagccggctccccaacctctaccgaggagggcacctctgagtccgccacccccgagagcggccctggcacctccaccgagcccagcgagggcagcgcacccggcagccctgccggcagccccacctccacagaggagggaaccagcaccgagcccagcgaaggcagcgccccaggcaccagcaccgagcctagtgagggcggctctggcggcggcagcgcccaggagattaaacggatcaacaagatcagaagaagacttgtgaaagacagcaacaccaagaaggccggcaagacaggccccatgaaaaccctgctggttagagtgatgacacccgatctgagagagcggctggaaaacctgagaaagaagcctgaaaatatcccccagcccatcagcaatacatctagagccaacctgaataagctgctgaccgattacaccgaaatgaagaaggcgatcctgcatgtgtactgggaagagttccagaaggaccctgtgggcctgatgagccgggtggcccagcctgccagcaagaagatcgatcagaacaagctgaaacctgagatggacgagaagggcaacctgaccaccgccggctttgcctgctctcagtgtggccagcccctgttcgtgtacaagctggagcaggtgtctgagaagggcaaggcttacaccaactacttcggacggtgcaatgtggccgagcacgaaaagctgatcctgctggcccagctgaagcccgagaaggatagcgacgaagccgtgacatatagcctgggaaagtttgggcagagggccctggatttctacagcattcatgtgaccaaggagtccacccaccccgtgaagcccctggcccagatcgccggaaacagatacgcctccggacctgtgggaaaggccctgagcgacgcatgtatgggcacaatcgcctccttcctgtctaagtaccaggacatcatcatcgaacaccagaaggtggtgaagggcaaccagaagagactggagagcctgcgggagctggccggcaaggaaaacctggaataccctagcgtgaccctgccacctcagcctcacaccaaggagggcgttgatgcctacaacgaagtgatcgcccgggtgcgaatgtgggtgaacctgaacctgtggcagaagctgaagctaagcagagatgatgccaagcctctgctgagactgaagggattcccttcctttcctctggtcgagagacaggccaacgaagtggactggtgggacatggtgtgtaacgtgaagaagctgatcaacgagaaaaaggaggatggcaaggtgttttggcagaatctggctggctacaagagacaggaagccctgagaccatacctgagcagcgaggaagatcggaagaagggaaagaaattcgctcggtaccagctgggcgacctgctgctgcacctggaaaagaagcacggcgaggactggggaaaggtgtacgacgaggcctgggagcggattgacaagaaagtggaaggcctgagcaagcacatcaagctggaagaggaacggagaagcgaggacgcccagagcaaggccgccctgaccgactggctgcgggctaaggccagcttcgtgatcgagggcctgaaggaggccgacaaggacgagttctgcagatgcgagctgaagctgcagaagtggtacggggacctgcggggaaagcccttcgccatcgaagccgagaacagcatcctggacatcagcggcttcagcaagcagtacaactgtgccttcatctggcagaaggacggcgtgaagaagctgaacctgtacctgatcatcaactacttcaagggcggcaagctgcggttcaagaagatcaaacctgaagccttcgaagccaacagattctacaccgtgatcaacaaaaagagcggcgagatcgtgcccatggaggtgaacttcaacttcgacgaccccaacctgatcatcctgcctctggcctttggcaagagacagggcagagaattcatctggaacgacctgctgtccctggaaaccggcagcctgaagctggccaacggaagagtgatcgagaagacactgtacaacagaagaacccggcaggatgagcctgccctgttcgtggccctgaccttcgagcggcgggaggtcctggactcctccaatatcaaaccaatgaacctgatcggcgtggcaagaggcgaaaacatccccgccgtgatcgccctgaccgaccccgagggctgcccactgagccggtttaaggatagcctgggaaacccaacccacatcctgagaatcggcgagagctataaggagaagcagcggaccatccaggccaagaaggaggtggagcagcggagagccggcggctacagccggaagtacgccagcaaagccaagaatctggcagacgatatggtgagaaacaccgctagagatctgctgtactacgccgtgacccaggatgccatgctgatcttcgccaacctgagccggggcttcggccggcagggcaagcggaccttcatggccgagagacagtacacacggatggaggactggctgaccgccaagctggcctacgagggcctgagcaagacctacctgtccaagacactggcccagtacacctccaagacatgcagcaactgtgggtttaccatcaccagcgccgactacgacagggtgctggagaagctgaagaagacagcaacaggctggatgaccacaattaacggcaaggagctgaaggtggagggccagattacctactacaacagatacaagagacagaacgtagtcaaggacctgtccgtcgagctggatagactgagcgaagaatctgtgaacaacgacatctcctcctggacaaagggcagaagcggagaagctctgagcctcctgaagaaaagattctcccatagacccgtgcaggagaagttcgtgtgcctgaactgcggcttcgagacacacgcagccgagcaagccgccctgaacatcgccagatcctggctgttcctgcggagccaggagtacaagaaataccagacaaacaagacaaccggcaacaccgataagagagccttcgtcgagacctggcagtccttttaccggaagaagcttaaggaggtgtggaaacctgccgtgcggtctggcggatctggcggaggctccacaagcatgaacgtggaggtggtgaaggtgatgccccaggacctggtgaccttcaaggacgtggccatcgacttcagccaggaggagtggcagtggatgaaccccgcccagaagaggctgtacaggagcatgatgctggagaactaccagagcctggtgagcctgggcctgtgcatcagcaagccctacgtgatcagcctgctggagcagggcagggagccctgggagatgaccagcgagatgaccaggaccagccccaagaaaaagagaaaagtctaagctgccttctgcggggcttgccttctggccatgcccttcttctctcccttgcacctgtacctcttggtctttgaataaagcctgagtaggaaggctagcaaaaaaaaaaaaaaaaaaaaaaaaaaaaaaaaaaaaaaaaaaaaaaaaaaaaaaaaaaaaaaaaaaaaaaaaaaaaaaaa

SEQ ID NO: 5869 - RNA, 5797 nt, synthetic construct
  source 1..5797: mol_type = other RNA
aggaaataagagagaaaagaagagtaagaagaaatataagagccaccatggcccctaagaagaagcgtaaagtgagccggatggaacgcctcgtctacgaggtgcggcagaagtgcagaaacatcgaggacatctgcatctcctgcggatctctgaacgtgaccctggagcacccactgttcatcggcggcatgtgccagaactgtaaaaactgttttctggagtgtgcctatcaatacgacgatgacggctaccagagctactgcaccatctgttgcggcggaagagaggtgctgatgtgtggaaataacaactgctgccggtgcttctgcgtggaatgcgtggacctgctggtgggccccggcgccgcccaggccgctattaaggaagatccttggaactgctacatgtgcggccacaagggcacatacggcctgctgagacggagagaggactggcctagcagactgcagatgttcttcgccaataaccacgaccaggagttcgacccccctaaggtgtaccctcccgtccccgccgagaagagaaagcccatccgggtcctgagcctgttcgatggcatcgccaccggtctgctggtgctgaaggacctgggcatccaggtggataggtacattgcctccgaggtgtgcgaggactccatcaccgtgggaatggtgcgtcatcagggcaagatcatgtacgtgggcgacgtgcggagcgtgacacagaagcatatccaggagtggggccctttcgacctggtgatcggcggcagcccttgcaatgacctgagcatcgtgaacccagcccggaagggcctgtacgagggaaccggcagactgttcttcgagttttacagactgctgcacgacgcccggcctaaggaaggcgacgaccggcccttcttttggctgttcgagaatgtggtggccatgggagtcagcgacaagcgggatattagccggttcctggagagcaaccccgtgatgatcgatgccaaggaagtgagcgccgcccaccgggccagatacttctggggcaatctgcctggcatgaacagacccctggccagcaccgtgaacgacaagctggagctgcaggagtgcctggagcacggccggatcgccaagttcagcaaggtgagaaccatcaccacccgaagcaacagcatcaaacaaggcaaggaccagcactttcctgtgttcatgaacgagaaggaggacatcctgtggtgtaccgagatggagagagtgttcgggttcccagtccactacacagatgtcagcaacatgtctagactggccagacagagactgctgggaagaagctggtccgtccctgtgatcagacacctgttcgcccctctgaaggagtacttcgcctgcgtgagcagcggcaacagcaacgccaacagccggggccccagcttctctagcggcctggtgccactgtccctgagagggagccacatgggccccatggagatctacaaaaccgtgagcgcctggaagcggcagcctgtgcgcgtgctgagcctgtttcggaatatcgataaagtcctgaaaagcctgggattcctggagagcggctctggctccggcggtggcaccctgaagtacgtggaggatgtgacaaacgtggtcagacgggatgtggagaagtggggccccttcgatctggtgtacggcagcacccaacccctgggcagctcttgtgaccggtgccctggctggtacatgtttcagttccaccggatcctgcagtacgccctgccgagacaggagtcccagcggccattcttttggattttcatggacaacttgctgctgaccgaggatgaccaggaaactaccactcggttcctgcagaccgaagccgtgaccctgcaggacgtgagaggccgggactaccagaacgccatgcgggtgtggtccaacatccctggactgaaaagcaagcacgcacctctgacccctaaagaagaggagtacctgcaggcccaggtgcggagcagaagcaagctggacgcccctaaggtggatctgctggtgaagaattgcctcctgcccctgagagagtacttcaagtatttcagccagaatagtctgcccctgggcggcccaagcagcggcgcccctcctcccagcggcggcagcccagccggctccccaacctctaccgaggagggcacctctgagtccgccacccccgagagcggccctggcacctccaccgagcccagcgagggcagcgcacccggcagccctgccggcagccccacctccacagaggagggaaccagcaccgagcccagcgaaggcagcgccccaggcaccagcaccgagcctagtgagggcggctctggcggcggcagcgcccaggagattaaacggatcaacaagatcagaagaagacttgtgaaagacagcaacaccaagaaggccggcaagacaggccccatgaaaaccctgctggttagagtgatgacacccgatctgagagagcggctggaaaacctgagaaagaagcctgaaaatatcccccagcccatcagcaatacatctagagccaacctgaataagctgctgaccgattacaccgaaatgaagaaggcgatcctgcatgtgtactgggaagagttccagaaggaccctgtgggcctgatgagccgggtggcccagcctgccagcaagaagatcgatcagaacaagctgaaacctgagatggacgagaagggcaacctgaccaccgccggctttgcctgctctcagtgtggccagcccctgttcgtgtacaagctggagcaggtgtctgagaagggcaaggcttacaccaactacttcggacggtgcaatgtggccgagcacgaaaagctgatcctgctggcccagctgaagcccgagaaggatagcgacgaagccgtgacatatagcctgggaaagtttgggcagagggccctggatttctacagcattcatgtgaccaaggagtccacccaccccgtgaagcccctggcccagatcgccggaaacagatacgcctccggacctgtgggaaaggccctgagcgacgcatgtatgggcacaatcgcctccttcctgtctaagtaccaggacatcatcatcgaacaccagaaggtggtgaagggcaaccagaagagactggagagcctgcgggagctggccggcaaggaaaacctggaataccctagcgtgaccctgccacctcagcctcacaccaaggagggcgttgatgcctacaacgaagtgatcgcccgggtgcgaatgtgggtgaacctgaacctgtggcagaagctgaagctaagcagagatgatgccaagcctctgctgagactgaagggattcccttcctttcctctggtcgagagacaggccaacgaagtggactggtgggacatggtgtgtaacgtgaagaagctgatcaacgagaaaaaggaggatggcaaggtgttttggcagaatctggctggctacaagagacaggaagccctgagaccatacctgagcagcgaggaagatcggaagaagggaaagaaattcgctcggtaccagctgggcgacctgctgctgcacctggaaaagaagcacggcgaggactggggaaaggtgtacgacgaggcctgggagcggattgacaagaaagtggaaggcctgagcaagcacatcaagctggaagaggaacggagaagcgaggacgcccagagcaaggccgccctgaccgactggctgcgggctaaggccagcttcgtgatcgagggcctgaaggaggccgacaaggacgagttctgcagatgcgagctgaagctgcagaagtggtacggggacctgcggggaaagcccttcgccatcgaagccgagaacagcatcctggacatcagcggcttcagcaagcagtacaactgtgccttcatctggcagaaggacggcgtgaagaagctgaacctgtacctgatcatcaactacttcaagggcggcaagctgcggttcaagaagatcaaacctgaagccttcgaagccaacagattctacaccgtgatcaacaaaaagagcggcgagatcgtgcccatggaggtgaacttcaacttcgacgaccccaacctgatcatcctgcctctggcctttggcaagagacagggcagagaattcatctggaacgacctgctgtccctggaaaccggcagcctgaagctggccaacggaagagtgatcgagaagacactgtacaacagaagaacccggcaggatgagcctgccctgttcgtggccctgaccttcgagcggcgggaggtcctggactcctccaatatcaaaccaatgaacctgatcggcgtggcaagaggcgaaaacatccccgccgtgatcgccctgaccgaccccgagggctgcccactgagccggtttaaggatagcctgggaaacccaacccacatcctgagaatcggcgagagctataaggagaagcagcggaccatccaggccaagaaggaggtggagcagcggagagccggcggctacagccggaagtacgccagcaaagccaagaatctggcagacgatatggtgagaaacaccgctagagatctgctgtactacgccgtgacccaggatgccatgctgatcttcgccaacctgagccggggcttcggccggcagggcaagcggaccttcatggccgagagacagtacacacggatggaggactggctgaccgccaagctggcctacgagggcctgagcaagacctacctgtccaagacactggcccagtacacctccaagacatgcagcaactgtgggtttaccatcaccagcgccgactacgacagggtgctggagaagctgaagaagacagcaacaggctggatgaccacaattaacggcaaggagctgaaggtggagggccagattacctactacaacagatacaagagacagaacgtagtcaaggacctgtccgtcgagctggatagactgagcgaagaatctgtgaacaacgacatctcctcctggacaaagggcagaagcggagaagctctgagcctcctgaagaaaagattctcccatagacccgtgcaggagaagttcgtgtgcctgaactgcggcttcgagacacacgcagccgagcaagccgccctgaacatcgccagatcctggctgttcctgcggagccaggagtacaagaaataccagacaaacaagacaaccggcaacaccgataagagagccttcgtcgagacctggcagtccttttaccggaagaagcttaaggaggtgtggaaacctgccgtgcggtctggcggatctggcggaggctccacaagcgcccacatggccttcagggacgtggccgtggacttcacccaggaggagtggatgctgctgagccccgcccagaggagcctgtacagggaggtgatgctggagaactacagcaacatggtgagcctgggcatccccttcagcaagcccaagctgatcacccagctggagcagggcaaggagacctggagggaggagaggaagtgcccccccgccacctgcagcgccgagccccagcccgagctgaccagccccaagaaaaagagaaaagtctaagctgccttctgcggggcttgccttctggccatgcccttcttctctcccttgcacctgtacctcttggtctttgaataaagcctgagtaggaaggctagcaaaaaaaaaaaaaaaaaaaaaaaaaaaaaaaaaaaaaaaaaaaaaaaaaaaaaaaaaaaaaaaaaaaaaaaaaaaaaaaa

SEQ ID NO: 5870 - RNA, 5797 nt, synthetic construct
  source 1..5797: mol_type = other RNA
aggaaataagagagaaaagaagagtaagaagaaatataagagccaccatggcccctaagaagaagcgtaaagtgagccggatggaacgcctcgtctacgaggtgcggcagaagtgcagaaacatcgaggacatctgcatctcctgcggatctctgaacgtgaccctggagcacccactgttcatcggcggcatgtgccagaactgtaaaaactgttttctggagtgtgcctatcaatacgacgatgacggctaccagagctactgcaccatctgttgcggcggaagagaggtgctgatgtgtggaaataacaactgctgccggtgcttctgcgtggaatgcgtggacctgctggtgggccccggcgccgcccaggccgctattaaggaagatccttggaactgctacatgtgcggccacaagggcacatacggcctgctgagacggagagaggactggcctagcagactgcagatgttcttcgccaataaccacgaccaggagttcgacccccctaaggtgtaccctcccgtccccgccgagaagagaaagcccatccgggtcctgagcctgttcgatggcatcgccaccggtctgctggtgctgaaggacctgggcatccaggtggataggtacattgcctccgaggtgtgcgaggactccatcaccgtgggaatggtgcgtcatcagggcaagatcatgtacgtgggcgacgtgcggagcgtgacacagaagcatatccaggagtggggccctttcgacctggtgatcggcggcagcccttgcaatgacctgagcatcgtgaacccagcccggaagggcctgtacgagggaaccggcagactgttcttcgagttttacagactgctgcacgacgcccggcctaaggaaggcgacgaccggcccttcttttggctgttcgagaatgtggtggccatgggagtcagcgacaagcgggatattagccggttcctggagagcaaccccgtgatgatcgatgccaaggaagtgagcgccgcccaccgggccagatacttctggggcaatctgcctggcatgaacagacccctggccagcaccgtgaacgacaagctggagctgcaggagtgcctggagcacggccggatcgccaagttcagcaaggtgagaaccatcaccacccgaagcaacagcatcaaacaaggcaaggaccagcactttcctgtgttcatgaacgagaaggaggacatcctgtggtgtaccgagatggagagagtgttcgggttcccagtccactacacagatgtcagcaacatgtctagactggccagacagagactgctgggaagaagctggtccgtccctgtgatcagacacctgttcgcccctctgaaggagtacttcgcctgcgtgagcagcggcaacagcaacgccaacagccggggccccagcttctctagcggcctggtgccactgtccctgagagggagccacatgggccccatggagatctacaaaaccgtgagcgcctggaagcggcagcctgtgcgcgtgctgagcctgtttcggaatatcgataaagtcctgaaaagcctgggattcctggagagcggctctggctccggcggtggcaccctgaagtacgtggaggatgtgacaaacgtggtcagacgggatgtggagaagtggggccccttcgatctggtgtacggcagcacccaacccctgggcagctcttgtgaccggtgccctggctggtacatgtttcagttccaccggatcctgcagtacgccctgccgagacaggagtcccagcggccattcttttggattttcatggacaacttgctgctgaccgaggatgaccaggaaactaccactcggttcctgcagaccgaagccgtgaccctgcaggacgtgagaggccgggactaccagaacgccatgcgggtgtggtccaacatccctggactgaaaagcaagcacgcacctctgacccctaaagaagaggagtacctgcaggcccaggtgcggagcagaagcaagctggacgcccctaaggtggatctgctggtgaagaattgcctcctgcccctgagagagtacttcaagtatttcagccagaatagtctgcccctgggcggcccaagcagcggcgcccctcctcccagcggcggcagcccagccggctccccaacctctaccgaggagggcacctctgagtccgccacccccgagagcggccctggcacctccaccgagcccagcgagggcagcgcacccggcagccctgccggcagccccacctccacagaggagggaaccagcaccgagcccagcgaaggcagcgccccaggcaccagcaccgagcctagtgagggcggctctggcggcggcagcgcccaggagattaaacggatcaacaagatcagaagaagacttgtgaaagacagcaacaccaagaaggccggcaagacaggccccatgaaaaccctgctggttagagtgatgacacccgatctgagagagcggctggaaaacctgagaaagaagcctgaaaatatcccccagcccatcagcaatacatctagagccaacctgaataagctgctgaccgattacaccgaaatgaagaaggcgatcctgcatgtgtactgggaagagttccagaaggaccctgtgggcctgatgagccgggtggcccagcctgccagcaagaagatcgatcagaacaagctgaaacctgagatggacgagaagggcaacctgaccaccgccggctttgcctgctctcagtgtggccagcccctgttcgtgtacaagctggagcaggtgtctgagaagggcaaggcttacaccaactacttcggacggtgcaatgtggccgagcacgaaaagctgatcctgctggcccagctgaagcccgagaaggatagcgacgaagccgtgacatatagcctgggaaagtttgggcagagggccctggatttctacagcattcatgtgaccaaggagtccacccaccccgtgaagcccctggcccagatcgccggaaacagatacgcctccggacctgtgggaaaggccctgagcgacgcatgtatgggcacaatcgcctccttcctgtctaagtaccaggacatcatcatcgaacaccagaaggtggtgaagggcaaccagaagagactggagagcctgcgggagctggccggcaaggaaaacctggaataccctagcgtgaccctgccacctcagcctcacaccaaggagggcgttgatgcctacaacgaagtgatcgcccgggtgcgaatgtgggtgaacctgaacctgtggcagaagctgaagctaagcagagatgatgccaagcctctgctgagactgaagggattcccttcctttcctctggtcgagagacaggccaacgaagtggactggtgggacatggtgtgtaacgtgaagaagctgatcaacgagaaaaaggaggatggcaaggtgttttggcagaatctggctggctacaagagacaggaagccctgagaccatacctgagcagcgaggaagatcggaagaagggaaagaaattcgctcggtaccagctgggcgacctgctgctgcacctggaaaagaagcacggcgaggactggggaaaggtgtacgacgaggcctgggagcggattgacaagaaagtggaaggcctgagcaagcacatcaagctggaagaggaacggagaagcgaggacgcccagagcaaggccgccctgaccgactggctgcgggctaaggccagcttcgtgatcgagggcctgaaggaggccgacaaggacgagttctgcagatgcgagctgaagctgcagaagtggtacggggacctgcggggaaagcccttcgccatcgaagccgagaacagcatcctggacatcagcggcttcagcaagcagtacaactgtgccttcatctggcagaaggacggcgtgaagaagctgaacctgtacctgatcatcaactacttcaagggcggcaagctgcggttcaagaagatcaaacctgaagccttcgaagccaacagattctacaccgtgatcaacaaaaagagcggcgagatcgtgcccatggaggtgaacttcaacttcgacgaccccaacctgatcatcctgcctctggcctttggcaagagacagggcagagaattcatctggaacgacctgctgtccctggaaaccggcagcctgaagctggccaacggaagagtgatcgagaagacactgtacaacagaagaacccggcaggatgagcctgccctgttcgtggccctgaccttcgagcggcgggaggtcctggactcctccaatatcaaaccaatgaacctgatcggcgtggcaagaggcgaaaacatccccgccgtgatcgccctgaccgaccccgagggctgcccactgagccggtttaaggatagcctgggaaacccaacccacatcctgagaatcggcgagagctataaggagaagcagcggaccatccaggccaagaaggaggtggagcagcggagagccggcggctacagccggaagtacgccagcaaagccaagaatctggcagacgatatggtgagaaacaccgctagagatctgctgtactacgccgtgacccaggatgccatgctgatcttcgccaacctgagccggggcttcggccggcagggcaagcggaccttcatggccgagagacagtacacacggatggaggactggctgaccgccaagctggcctacgagggcctgagcaagacctacctgtccaagacactggcccagtacacctccaagacatgcagcaactgtgggtttaccatcaccagcgccgactacgacagggtgctggagaagctgaagaagacagcaacaggctggatgaccacaattaacggcaaggagctgaaggtggagggccagattacctactacaacagatacaagagacagaacgtagtcaaggacctgtccgtcgagctggatagactgagcgaagaatctgtgaacaacgacatctcctcctggacaaagggcagaagcggagaagctctgagcctcctgaagaaaagattctcccatagacccgtgcaggagaagttcgtgtgcctgaactgcggcttcgagacacacgcagccgagcaagccgccctgaacatcgccagatcctggctgttcctgcggagccaggagtacaagaaataccagacaaacaagacaaccggcaacaccgataagagagccttcgtcgagacctggcagtccttttaccggaagaagcttaaggaggtgtggaaacctgccgtgcggtctggcggatctggcggaggctccacaagcttccagggcagcgtgaccttcagggacgtggccatcgacttcagccaggaggagtgggcctggctgcagcccgcccagagggacctgtacaggcacgtgatgctggagaactacggccacctggtgagcctgggcctgaacatcagcaagcccgacgtggtgagcctgctggagcagggcaaggagccctggctgggcaagggcgacgtgaggaccgacttcttccccgtgagcgagagcaacaccagccccaagaaaaagagaaaagtctaagctgccttctgcggggcttgccttctggccatgcccttcttctctcccttgcacctgtacctcttggtctttgaataaagcctgagtaggaaggctagcaaaaaaaaaaaaaaaaaaaaaaaaaaaaaaaaaaaaaaaaaaaaaaaaaaaaaaaaaaaaaaaaaaaaaaaaaaaaaaaa

SEQ ID NO: 5871 - RNA, 5797 nt, synthetic construct
  source 1..5797: mol_type = other RNA
aggaaataagagagaaaagaagagtaagaagaaatataagagccaccatggcccctaagaagaagcgtaaagtgagccggatggaacgcctcgtctacgaggtgcggcagaagtgcagaaacatcgaggacatctgcatctcctgcggatctctgaacgtgaccctggagcacccactgttcatcggcggcatgtgccagaactgtaaaaactgttttctggagtgtgcctatcaatacgacgatgacggctaccagagctactgcaccatctgttgcggcggaagagaggtgctgatgtgtggaaataacaactgctgccggtgcttctgcgtggaatgcgtggacctgctggtgggccccggcgccgcccaggccgctattaaggaagatccttggaactgctacatgtgcggccacaagggcacatacggcctgctgagacggagagaggactggcctagcagactgcagatgttcttcgccaataaccacgaccaggagttcgacccccctaaggtgtaccctcccgtccccgccgagaagagaaagcccatccgggtcctgagcctgttcgatggcatcgccaccggtctgctggtgctgaaggacctgggcatccaggtggataggtacattgcctccgaggtgtgcgaggactccatcaccgtgggaatggtgcgtcatcagggcaagatcatgtacgtgggcgacgtgcggagcgtgacacagaagcatatccaggagtggggccctttcgacctggtgatcggcggcagcccttgcaatgacctgagcatcgtgaacccagcccggaagggcctgtacgagggaaccggcagactgttcttcgagttttacagactgctgcacgacgcccggcctaaggaaggcgacgaccggcccttcttttggctgttcgagaatgtggtggccatgggagtcagcgacaagcgggatattagccggttcctggagagcaaccccgtgatgatcgatgccaaggaagtgagcgccgcccaccgggccagatacttctggggcaatctgcctggcatgaacagacccctggccagcaccgtgaacgacaagctggagctgcaggagtgcctggagcacggccggatcgccaagttcagcaaggtgagaaccatcaccacccgaagcaacagcatcaaacaaggcaaggaccagcactttcctgtgttcatgaacgagaaggaggacatcctgtggtgtaccgagatggagagagtgttcgggttcccagtccactacacagatgtcagcaacatgtctagactggccagacagagactgctgggaagaagctggtccgtccctgtgatcagacacctgttcgcccctctgaaggagtacttcgcctgcgtgagcagcggcaacagcaacgccaacagccggggccccagcttctctagcggcctggtgccactgtccctgagagggagccacatgggccccatggagatctacaaaaccgtgagcgcctggaagcggcagcctgtgcgcgtgctgagcctgtttcggaatatcgataaagtcctgaaaagcctgggattcctggagagcggctctggctccggcggtggcaccctgaagtacgtggaggatgtgacaaacgtggtcagacgggatgtggagaagtggggccccttcgatctggtgtacggcagcacccaacccctgggcagctcttgtgaccggtgccctggctggtacatgtttcagttccaccggatcctgcagtacgccctgccgagacaggagtcccagcggccattcttttggattttcatggacaacttgctgctgaccgaggatgaccaggaaactaccactcggttcctgcagaccgaagccgtgaccctgcaggacgtgagaggccgggactaccagaacgccatgcgggtgtggtccaacatccctggactgaaaagcaagcacgcacctctgacccctaaagaagaggagtacctgcaggcccaggtgcggagcagaagcaagctggacgcccctaaggtggatctgctggtgaagaattgcctcctgcccctgagagagtacttcaagtatttcagccagaatagtctgcccctgggcggcccaagcagcggcgcccctcctcccagcggcggcagcccagccggctccccaacctctaccgaggagggcacctctgagtccgccacccccgagagcggccctggcacctccaccgagcccagcgagggcagcgcacccggcagccctgccggcagccccacctccacagaggagggaaccagcaccgagcccagcgaaggcagcgccccaggcaccagcaccgagcctagtgagggcggctctggcggcggcagcgcccaggagattaaacggatcaacaagatcagaagaagacttgtgaaagacagcaacaccaagaaggccggcaagacaggccccatgaaaaccctgctggttagagtgatgacacccgatctgagagagcggctggaaaacctgagaaagaagcctgaaaatatcccccagcccatcagcaatacatctagagccaacctgaataagctgctgaccgattacaccgaaatgaagaaggcgatcctgcatgtgtactgggaagagttccagaaggaccctgtgggcctgatgagccgggtggcccagcctgccagcaagaagatcgatcagaacaagctgaaacctgagatggacgagaagggcaacctgaccaccgccggctttgcctgctctcagtgtggccagcccctgttcgtgtacaagctggagcaggtgtctgagaagggcaaggcttacaccaactacttcggacggtgcaatgtggccgagcacgaaaagctgatcctgctggcccagctgaagcccgagaaggatagcgacgaagccgtgacatatagcctgggaaagtttgggcagagggccctggatttctacagcattcatgtgaccaaggagtccacccaccccgtgaagcccctggcccagatcgccggaaacagatacgcctccggacctgtgggaaaggccctgagcgacgcatgtatgggcacaatcgcctccttcctgtctaagtaccaggacatcatcatcgaacaccagaaggtggtgaagggcaaccagaagagactggagagcctgcgggagctggccggcaaggaaaacctggaataccctagcgtgaccctgccacctcagcctcacaccaaggagggcgttgatgcctacaacgaagtgatcgcccgggtgcgaatgtgggtgaacctgaacctgtggcagaagctgaagctaagcagagatgatgccaagcctctgctgagactgaagggattcccttcctttcctctggtcgagagacaggccaacgaagtggactggtgggacatggtgtgtaacgtgaagaagctgatcaacgagaaaaaggaggatggcaaggtgttttggcagaatctggctggctacaagagacaggaagccctgagaccatacctgagcagcgaggaagatcggaagaagggaaagaaattcgctcggtaccagctgggcgacctgctgctgcacctggaaaagaagcacggcgaggactggggaaaggtgtacgacgaggcctgggagcggattgacaagaaagtggaaggcctgagcaagcacatcaagctggaagaggaacggagaagcgaggacgcccagagcaaggccgccctgaccgactggctgcgggctaaggccagcttcgtgatcgagggcctgaaggaggccgacaaggacgagttctgcagatgcgagctgaagctgcagaagtggtacggggacctgcggggaaagcccttcgccatcgaagccgagaacagcatcctggacatcagcggcttcagcaagcagtacaactgtgccttcatctggcagaaggacggcgtgaagaagctgaacctgtacctgatcatcaactacttcaagggcggcaagctgcggttcaagaagatcaaacctgaagccttcgaagccaacagattctacaccgtgatcaacaaaaagagcggcgagatcgtgcccatggaggtgaacttcaacttcgacgaccccaacctgatcatcctgcctctggcctttggcaagagacagggcagagaattcatctggaacgacctgctgtccctggaaaccggcagcctgaagctggccaacggaagagtgatcgagaagacactgtacaacagaagaacccggcaggatgagcctgccctgttcgtggccctgaccttcgagcggcgggaggtcctggactcctccaatatcaaaccaatgaacctgatcggcgtggcaagaggcgaaaacatccccgccgtgatcgccctgaccgaccccgagggctgcccactgagccggtttaaggatagcctgggaaacccaacccacatcctgagaatcggcgagagctataaggagaagcagcggaccatccaggccaagaaggaggtggagcagcggagagccggcggctacagccggaagtacgccagcaaagccaagaatctggcagacgatatggtgagaaacaccgctagagatctgctgtactacgccgtgacccaggatgccatgctgatcttcgccaacctgagccggggcttcggccggcagggcaagcggaccttcatggccgagagacagtacacacggatggaggactggctgaccgccaagctggcctacgagggcctgagcaagacctacctgtccaagacactggcccagtacacctccaagacatgcagcaactgtgggtttaccatcaccagcgccgactacgacagggtgctggagaagctgaagaagacagcaacaggctggatgaccacaattaacggcaaggagctgaaggtggagggccagattacctactacaacagatacaagagacagaacgtagtcaaggacctgtccgtcgagctggatagactgagcgaagaatctgtgaacaacgacatctcctcctggacaaagggcagaagcggagaagctctgagcctcctgaagaaaagattctcccatagacccgtgcaggagaagttcgtgtgcctgaactgcggcttcgagacacacgcagccgagcaagccgccctgaacatcgccagatcctggctgttcctgcggagccaggagtacaagaaataccagacaaacaagacaaccggcaacaccgataagagagccttcgtcgagacctggcagtccttttaccggaagaagcttaaggaggtgtggaaacctgccgtgcggtctggcggatctggcggaggctccacaagcgagcaggagagcgtgagcttcaaggacgtgaccatcgacttcagcagggaggagtggcagcagctggacttcgcccagaagagcctgtacagggacgtgatgctggagaactacttcaacctgatcagcgtgggctgccaggtgcccaagcccgaggtgatcttcaacctggagcaggtggagaacagctgcatgctgcacaggaagatcagcaggcagagctgcctggacggcgacatcggcaccagccccaagaaaaagagaaaagtctaagctgccttctgcggggcttgccttctggccatgcccttcttctctcccttgcacctgtacctcttggtctttgaataaagcctgagtaggaaggctagcaaaaaaaaaaaaaaaaaaaaaaaaaaaaaaaaaaaaaaaaaaaaaaaaaaaaaaaaaaaaaaaaaaaaaaaaaaaaaaaa

SEQ ID NO: 5872 - RNA, 5797 nt, synthetic construct
  source 1..5797: mol_type = other RNA
aggaaataagagagaaaagaagagtaagaagaaatataagagccaccatggcccctaagaagaagcgtaaagtgagccggatggaacgcctcgtctacgaggtgcggcagaagtgcagaaacatcgaggacatctgcatctcctgcggatctctgaacgtgaccctggagcacccactgttcatcggcggcatgtgccagaactgtaaaaactgttttctggagtgtgcctatcaatacgacgatgacggctaccagagctactgcaccatctgttgcggcggaagagaggtgctgatgtgtggaaataacaactgctgccggtgcttctgcgtggaatgcgtggacctgctggtgggccccggcgccgcccaggccgctattaaggaagatccttggaactgctacatgtgcggccacaagggcacatacggcctgctgagacggagagaggactggcctagcagactgcagatgttcttcgccaataaccacgaccaggagttcgacccccctaaggtgtaccctcccgtccccgccgagaagagaaagcccatccgggtcctgagcctgttcgatggcatcgccaccggtctgctggtgctgaaggacctgggcatccaggtggataggtacattgcctccgaggtgtgcgaggactccatcaccgtgggaatggtgcgtcatcagggcaagatcatgtacgtgggcgacgtgcggagcgtgacacagaagcatatccaggagtggggccctttcgacctggtgatcggcggcagcccttgcaatgacctgagcatcgtgaacccagcccggaagggcctgtacgagggaaccggcagactgttcttcgagttttacagactgctgcacgacgcccggcctaaggaaggcgacgaccggcccttcttttggctgttcgagaatgtggtggccatgggagtcagcgacaagcgggatattagccggttcctggagagcaaccccgtgatgatcgatgccaaggaagtgagcgccgcccaccgggccagatacttctggggcaatctgcctggcatgaacagacccctggccagcaccgtgaacgacaagctggagctgcaggagtgcctggagcacggccggatcgccaagttcagcaaggtgagaaccatcaccacccgaagcaacagcatcaaacaaggcaaggaccagcactttcctgtgttcatgaacgagaaggaggacatcctgtggtgtaccgagatggagagagtgttcgggttcccagtccactacacagatgtcagcaacatgtctagactggccagacagagactgctgggaagaagctggtccgtccctgtgatcagacacctgttcgcccctctgaaggagtacttcgcctgcgtgagcagcggcaacagcaacgccaacagccggggccccagcttctctagcggcctggtgccactgtccctgagagggagccacatgggccccatggagatctacaaaaccgtgagcgcctggaagcggcagcctgtgcgcgtgctgagcctgtttcggaatatcgataaagtcctgaaaagcctgggattcctggagagcggctctggctccggcggtggcaccctgaagtacgtggaggatgtgacaaacgtggtcagacgggatgtggagaagtggggccccttcgatctggtgtacggcagcacccaacccctgggcagctcttgtgaccggtgccctggctggtacatgtttcagttccaccggatcctgcagtacgccctgccgagacaggagtcccagcggccattcttttggattttcatggacaacttgctgctgaccgaggatgaccaggaaactaccactcggttcctgcagaccgaagccgtgaccctgcaggacgtgagaggccgggactaccagaacgccatgcgggtgtggtccaacatccctggactgaaaagcaagcacgcacctctgacccctaaagaagaggagtacctgcaggcccaggtgcggagcagaagcaagctggacgcccctaaggtggatctgctggtgaagaattgcctcctgcccctgagagagtacttcaagtatttcagccagaatagtctgcccctgggcggcccaagcagcggcgcccctcctcccagcggcggcagcccagccggctccccaacctctaccgaggagggcacctctgagtccgccacccccgagagcggccctggcacctccaccgagcccagcgagggcagcgcacccggcagccctgccggcagccccacctccacagaggagggaaccagcaccgagcccagcgaaggcagcgccccaggcaccagcaccgagcctagtgagggcggctctggcggcggcagcgcccaggagattaaacggatcaacaagatcagaagaagacttgtgaaagacagcaacaccaagaaggccggcaagacaggccccatgaaaaccctgctggttagagtgatgacacccgatctgagagagcggctggaaaacctgagaaagaagcctgaaaatatcccccagcccatcagcaatacatctagagccaacctgaataagctgctgaccgattacaccgaaatgaagaaggcgatcctgcatgtgtactgggaagagttccagaaggaccctgtgggcctgatgagccgggtggcccagcctgccagcaagaagatcgatcagaacaagctgaaacctgagatggacgagaagggcaacctgaccaccgccggctttgcctgctctcagtgtggccagcccctgttcgtgtacaagctggagcaggtgtctgagaagggcaaggcttacaccaactacttcggacggtgcaatgtggccgagcacgaaaagctgatcctgctggcccagctgaagcccgagaaggatagcgacgaagccgtgacatatagcctgggaaagtttgggcagagggccctggatttctacagcattcatgtgaccaaggagtccacccaccccgtgaagcccctggcccagatcgccggaaacagatacgcctccggacctgtgggaaaggccctgagcgacgcatgtatgggcacaatcgcctccttcctgtctaagtaccaggacatcatcatcgaacaccagaaggtggtgaagggcaaccagaagagactggagagcctgcgggagctggccggcaaggaaaacctggaataccctagcgtgaccctgccacctcagcctcacaccaaggagggcgttgatgcctacaacgaagtgatcgcccgggtgcgaatgtgggtgaacctgaacctgtggcagaagctgaagctaagcagagatgatgccaagcctctgctgagactgaagggattcccttcctttcctctggtcgagagacaggccaacgaagtggactggtgggacatggtgtgtaacgtgaagaagctgatcaacgagaaaaaggaggatggcaaggtgttttggcagaatctggctggctacaagagacaggaagccctgagaccatacctgagcagcgaggaagatcggaagaagggaaagaaattcgctcggtaccagctgggcgacctgctgctgcacctggaaaagaagcacggcgaggactggggaaaggtgtacgacgaggcctgggagcggattgacaagaaagtggaaggcctgagcaagcacatcaagctggaagaggaacggagaagcgaggacgcccagagcaaggccgccctgaccgactggctgcgggctaaggccagcttcgtgatcgagggcctgaaggaggccgacaaggacgagttctgcagatgcgagctgaagctgcagaagtggtacggggacctgcggggaaagcccttcgccatcgaagccgagaacagcatcctggacatcagcggcttcagcaagcagtacaactgtgccttcatctggcagaaggacggcgtgaagaagctgaacctgtacctgatcatcaactacttcaagggcggcaagctgcggttcaagaagatcaaacctgaagccttcgaagccaacagattctacaccgtgatcaacaaaaagagcggcgagatcgtgcccatggaggtgaacttcaacttcgacgaccccaacctgatcatcctgcctctggcctttggcaagagacagggcagagaattcatctggaacgacctgctgtccctggaaaccggcagcctgaagctggccaacggaagagtgatcgagaagacactgtacaacagaagaacccggcaggatgagcctgccctgttcgtggccctgaccttcgagcggcgggaggtcctggactcctccaatatcaaaccaatgaacctgatcggcgtggcaagaggcgaaaacatccccgccgtgatcgccctgaccgaccccgagggctgcccactgagccggtttaaggatagcctgggaaacccaacccacatcctgagaatcggcgagagctataaggagaagcagcggaccatccaggccaagaaggaggtggagcagcggagagccggcggctacagccggaagtacgccagcaaagccaagaatctggcagacgatatggtgagaaacaccgctagagatctgctgtactacgccgtgacccaggatgccatgctgatcttcgccaacctgagccggggcttcggccggcagggcaagcggaccttcatggccgagagacagtacacacggatggaggactggctgaccgccaagctggcctacgagggcctgagcaagacctacctgtccaagacactggcccagtacacctccaagacatgcagcaactgtgggtttaccatcaccagcgccgactacgacagggtgctggagaagctgaagaagacagcaacaggctggatgaccacaattaacggcaaggagctgaaggtggagggccagattacctactacaacagatacaagagacagaacgtagtcaaggacctgtccgtcgagctggatagactgagcgaagaatctgtgaacaacgacatctcctcctggacaaagggcagaagcggagaagctctgagcctcctgaagaaaagattctcccatagacccgtgcaggagaagttcgtgtgcctgaactgcggcttcgagacacacgcagccgagcaagccgccctgaacatcgccagatcctggctgttcctgcggagccaggagtacaagaaataccagacaaacaagacaaccggcaacaccgataagagagccttcgtcgagacctggcagtccttttaccggaagaagcttaaggaggtgtggaaacctgccgtgcggtctggcggatctggcggaggctccacaagcatggccgccggccagcccgaggccaggccccaggtgagcctgaccttcgaggacgtggccgtgctgttcaccagggacgagtggaggaagctggcccccagccagaggaacctgtacagggacgtgatgctggagaactacaggaacctggtgagcctgggcctgcccttcaccaagcccaaggtgatcagcctgctgcagcagggcgaggacccctggaaggtggagaaggactgcttcggcaccagccccaagaaaaagagaaaagtctaagctgccttctgcggggcttgccttctggccatgcccttcttctctcccttgcacctgtacctcttggtctttgaataaagcctgagtaggaaggctagcaaaaaaaaaaaaaaaaaaaaaaaaaaaaaaaaaaaaaaaaaaaaaaaaaaaaaaaaaaaaaaaaaaaaaaaaaaaaaaaa

SEQ ID NO: 5873 - RNA, 5797 nt, synthetic construct
  source 1..5797: mol_type = other RNA
aggaaataagagagaaaagaagagtaagaagaaatataagagccaccatggcccctaagaagaagcgtaaagtgagccggatggaacgcctcgtctacgaggtgcggcagaagtgcagaaacatcgaggacatctgcatctcctgcggatctctgaacgtgaccctggagcacccactgttcatcggcggcatgtgccagaactgtaaaaactgttttctggagtgtgcctatcaatacgacgatgacggctaccagagctactgcaccatctgttgcggcggaagagaggtgctgatgtgtggaaataacaactgctgccggtgcttctgcgtggaatgcgtggacctgctggtgggccccggcgccgcccaggccgctattaaggaagatccttggaactgctacatgtgcggccacaagggcacatacggcctgctgagacggagagaggactggcctagcagactgcagatgttcttcgccaataaccacgaccaggagttcgacccccctaaggtgtaccctcccgtccccgccgagaagagaaagcccatccgggtcctgagcctgttcgatggcatcgccaccggtctgctggtgctgaaggacctgggcatccaggtggataggtacattgcctccgaggtgtgcgaggactccatcaccgtgggaatggtgcgtcatcagggcaagatcatgtacgtgggcgacgtgcggagcgtgacacagaagcatatccaggagtggggccctttcgacctggtgatcggcggcagcccttgcaatgacctgagcatcgtgaacccagcccggaagggcctgtacgagggaaccggcagactgttcttcgagttttacagactgctgcacgacgcccggcctaaggaaggcgacgaccggcccttcttttggctgttcgagaatgtggtggccatgggagtcagcgacaagcgggatattagccggttcctggagagcaaccccgtgatgatcgatgccaaggaagtgagcgccgcccaccgggccagatacttctggggcaatctgcctggcatgaacagacccctggccagcaccgtgaacgacaagctggagctgcaggagtgcctggagcacggccggatcgccaagttcagcaaggtgagaaccatcaccacccgaagcaacagcatcaaacaaggcaaggaccagcactttcctgtgttcatgaacgagaaggaggacatcctgtggtgtaccgagatggagagagtgttcgggttcccagtccactacacagatgtcagcaacatgtctagactggccagacagagactgctgggaagaagctggtccgtccctgtgatcagacacctgttcgcccctctgaaggagtacttcgcctgcgtgagcagcggcaacagcaacgccaacagccggggccccagcttctctagcggcctggtgccactgtccctgagagggagccacatgggccccatggagatctacaaaaccgtgagcgcctggaagcggcagcctgtgcgcgtgctgagcctgtttcggaatatcgataaagtcctgaaaagcctgggattcctggagagcggctctggctccggcggtggcaccctgaagtacgtggaggatgtgacaaacgtggtcagacgggatgtggagaagtggggccccttcgatctggtgtacggcagcacccaacccctgggcagctcttgtgaccggtgccctggctggtacatgtttcagttccaccggatcctgcagtacgccctgccgagacaggagtcccagcggccattcttttggattttcatggacaacttgctgctgaccgaggatgaccaggaaactaccactcggttcctgcagaccgaagccgtgaccctgcaggacgtgagaggccgggactaccagaacgccatgcgggtgtggtccaacatccctggactgaaaagcaagcacgcacctctgacccctaaagaagaggagtacctgcaggcccaggtgcggagcagaagcaagctggacgcccctaaggtggatctgctggtgaagaattgcctcctgcccctgagagagtacttcaagtatttcagccagaatagtctgcccctgggcggcccaagcagcggcgcccctcctcccagcggcggcagcccagccggctccccaacctctaccgaggagggcacctctgagtccgccacccccgagagcggccctggcacctccaccgagcccagcgagggcagcgcacccggcagccctgccggcagccccacctccacagaggagggaaccagcaccgagcccagcgaaggcagcgccccaggcaccagcaccgagcctagtgagggcggctctggcggcggcagcgcccaggagattaaacggatcaacaagatcagaagaagacttgtgaaagacagcaacaccaagaaggccggcaagacaggccccatgaaaaccctgctggttagagtgatgacacccgatctgagagagcggctggaaaacctgagaaagaagcctgaaaatatcccccagcccatcagcaatacatctagagccaacctgaataagctgctgaccgattacaccgaaatgaagaaggcgatcctgcatgtgtactgggaagagttccagaaggaccctgtgggcctgatgagccgggtggcccagcctgccagcaagaagatcgatcagaacaagctgaaacctgagatggacgagaagggcaacctgaccaccgccggctttgcctgctctcagtgtggccagcccctgttcgtgtacaagctggagcaggtgtctgagaagggcaaggcttacaccaactacttcggacggtgcaatgtggccgagcacgaaaagctgatcctgctggcccagctgaagcccgagaaggatagcgacgaagccgtgacatatagcctgggaaagtttgggcagagggccctggatttctacagcattcatgtgaccaaggagtccacccaccccgtgaagcccctggcccagatcgccggaaacagatacgcctccggacctgtgggaaaggccctgagcgacgcatgtatgggcacaatcgcctccttcctgtctaagtaccaggacatcatcatcgaacaccagaaggtggtgaagggcaaccagaagagactggagagcctgcgggagctggccggcaaggaaaacctggaataccctagcgtgaccctgccacctcagcctcacaccaaggagggcgttgatgcctacaacgaagtgatcgcccgggtgcgaatgtgggtgaacctgaacctgtggcagaagctgaagctaagcagagatgatgccaagcctctgctgagactgaagggattcccttcctttcctctggtcgagagacaggccaacgaagtggactggtgggacatggtgtgtaacgtgaagaagctgatcaacgagaaaaaggaggatggcaaggtgttttggcagaatctggctggctacaagagacaggaagccctgagaccatacctgagcagcgaggaagatcggaagaagggaaagaaattcgctcggtaccagctgggcgacctgctgctgcacctggaaaagaagcacggcgaggactggggaaaggtgtacgacgaggcctgggagcggattgacaagaaagtggaaggcctgagcaagcacatcaagctggaagaggaacggagaagcgaggacgcccagagcaaggccgccctgaccgactggctgcgggctaaggccagcttcgtgatcgagggcctgaaggaggccgacaaggacgagttctgcagatgcgagctgaagctgcagaagtggtacggggacctgcggggaaagcccttcgccatcgaagccgagaacagcatcctggacatcagcggcttcagcaagcagtacaactgtgccttcatctggcagaaggacggcgtgaagaagctgaacctgtacctgatcatcaactacttcaagggcggcaagctgcggttcaagaagatcaaacctgaagccttcgaagccaacagattctacaccgtgatcaacaaaaagagcggcgagatcgtgcccatggaggtgaacttcaacttcgacgaccccaacctgatcatcctgcctctggcctttggcaagagacagggcagagaattcatctggaacgacctgctgtccctggaaaccggcagcctgaagctggccaacggaagagtgatcgagaagacactgtacaacagaagaacccggcaggatgagcctgccctgttcgtggccctgaccttcgagcggcgggaggtcctggactcctccaatatcaaaccaatgaacctgatcggcgtggcaagaggcgaaaacatccccgccgtgatcgccctgaccgaccccgagggctgcccactgagccggtttaaggatagcctgggaaacccaacccacatcctgagaatcggcgagagctataaggagaagcagcggaccatccaggccaagaaggaggtggagcagcggagagccggcggctacagccggaagtacgccagcaaagccaagaatctggcagacgatatggtgagaaacaccgctagagatctgctgtactacgccgtgacccaggatgccatgctgatcttcgccaacctgagccggggcttcggccggcagggcaagcggaccttcatggccgagagacagtacacacggatggaggactggctgaccgccaagctggcctacgagggcctgagcaagacctacctgtccaagacactggcccagtacacctccaagacatgcagcaactgtgggtttaccatcaccagcgccgactacgacagggtgctggagaagctgaagaagacagcaacaggctggatgaccacaattaacggcaaggagctgaaggtggagggccagattacctactacaacagatacaagagacagaacgtagtcaaggacctgtccgtcgagctggatagactgagcgaagaatctgtgaacaacgacatctcctcctggacaaagggcagaagcggagaagctctgagcctcctgaagaaaagattctcccatagacccgtgcaggagaagttcgtgtgcctgaactgcggcttcgagacacacgcagccgagcaagccgccctgaacatcgccagatcctggctgttcctgcggagccaggagtacaagaaataccagacaaacaagacaaccggcaacaccgataagagagccttcgtcgagacctggcagtccttttaccggaagaagcttaaggaggtgtggaaacctgccgtgcggtctggcggatctggcggaggctccacaagccagatgcccgtgaagttcgaggacatcgccgtgagcttcagccaggaggagtgggagtacctgaacgaggagcagaaggagctgtacagggaggtgatggaggagaactaccagaccctgatcagcctgggcaccggcagcccccccatcacccccgacatcatcagccacatcgagaggggcgaggagccctacatcagggaggagcccggcagcgaggagaggggccccgtgaggagcagcaccagccccaagaaaaagagaaaagtctaagctgccttctgcggggcttgccttctggccatgcccttcttctctcccttgcacctgtacctcttggtctttgaataaagcctgagtaggaaggctagcaaaaaaaaaaaaaaaaaaaaaaaaaaaaaaaaaaaaaaaaaaaaaaaaaaaaaaaaaaaaaaaaaaaaaaaaaaaaaaaa

SEQ ID NO: 5874 - RNA, 5797 nt, synthetic construct
  source 1..5797: mol_type = other RNA
aggaaataagagagaaaagaagagtaagaagaaatataagagccaccatggcccctaagaagaagcgtaaagtgagccggatggaacgcctcgtctacgaggtgcggcagaagtgcagaaacatcgaggacatctgcatctcctgcggatctctgaacgtgaccctggagcacccactgttcatcggcggcatgtgccagaactgtaaaaactgttttctggagtgtgcctatcaatacgacgatgacggctaccagagctactgcaccatctgttgcggcggaagagaggtgctgatgtgtggaaataacaactgctgccggtgcttctgcgtggaatgcgtggacctgctggtgggccccggcgccgcccaggccgctattaaggaagatccttggaactgctacatgtgcggccacaagggcacatacggcctgctgagacggagagaggactggcctagcagactgcagatgttcttcgccaataaccacgaccaggagttcgacccccctaaggtgtaccctcccgtccccgccgagaagagaaagcccatccgggtcctgagcctgttcgatggcatcgccaccggtctgctggtgctgaaggacctgggcatccaggtggataggtacattgcctccgaggtgtgcgaggactccatcaccgtgggaatggtgcgtcatcagggcaagatcatgtacgtgggcgacgtgcggagcgtgacacagaagcatatccaggagtggggccctttcgacctggtgatcggcggcagcccttgcaatgacctgagcatcgtgaacccagcccggaagggcctgtacgagggaaccggcagactgttcttcgagttttacagactgctgcacgacgcccggcctaaggaaggcgacgaccggcccttcttttggctgttcgagaatgtggtggccatgggagtcagcgacaagcgggatattagccggttcctggagagcaaccccgtgatgatcgatgccaaggaagtgagcgccgcccaccgggccagatacttctggggcaatctgcctggcatgaacagacccctggccagcaccgtgaacgacaagctggagctgcaggagtgcctggagcacggccggatcgccaagttcagcaaggtgagaaccatcaccacccgaagcaacagcatcaaacaaggcaaggaccagcactttcctgtgttcatgaacgagaaggaggacatcctgtggtgtaccgagatggagagagtgttcgggttcccagtccactacacagatgtcagcaacatgtctagactggccagacagagactgctgggaagaagctggtccgtccctgtgatcagacacctgttcgcccctctgaaggagtacttcgcctgcgtgagcagcggcaacagcaacgccaacagccggggccccagcttctctagcggcctggtgccactgtccctgagagggagccacatgggccccatggagatctacaaaaccgtgagcgcctggaagcggcagcctgtgcgcgtgctgagcctgtttcggaatatcgataaagtcctgaaaagcctgggattcctggagagcggctctggctccggcggtggcaccctgaagtacgtggaggatgtgacaaacgtggtcagacgggatgtggagaagtggggccccttcgatctggtgtacggcagcacccaacccctgggcagctcttgtgaccggtgccctggctggtacatgtttcagttccaccggatcctgcagtacgccctgccgagacaggagtcccagcggccattcttttggattttcatggacaacttgctgctgaccgaggatgaccaggaaactaccactcggttcctgcagaccgaagccgtgaccctgcaggacgtgagaggccgggactaccagaacgccatgcgggtgtggtccaacatccctggactgaaaagcaagcacgcacctctgacccctaaagaagaggagtacctgcaggcccaggtgcggagcagaagcaagctggacgcccctaaggtggatctgctggtgaagaattgcctcctgcccctgagagagtacttcaagtatttcagccagaatagtctgcccctgggcggcccaagcagcggcgcccctcctcccagcggcggcagcccagccggctccccaacctctaccgaggagggcacctctgagtccgccacccccgagagcggccctggcacctccaccgagcccagcgagggcagcgcacccggcagccctgccggcagccccacctccacagaggagggaaccagcaccgagcccagcgaaggcagcgccccaggcaccagcaccgagcctagtgagggcggctctggcggcggcagcgcccaggagattaaacggatcaacaagatcagaagaagacttgtgaaagacagcaacaccaagaaggccggcaagacaggccccatgaaaaccctgctggttagagtgatgacacccgatctgagagagcggctggaaaacctgagaaagaagcctgaaaatatcccccagcccatcagcaatacatctagagccaacctgaataagctgctgaccgattacaccgaaatgaagaaggcgatcctgcatgtgtactgggaagagttccagaaggaccctgtgggcctgatgagccgggtggcccagcctgccagcaagaagatcgatcagaacaagctgaaacctgagatggacgagaagggcaacctgaccaccgccggctttgcctgctctcagtgtggccagcccctgttcgtgtacaagctggagcaggtgtctgagaagggcaaggcttacaccaactacttcggacggtgcaatgtggccgagcacgaaaagctgatcctgctggcccagctgaagcccgagaaggatagcgacgaagccgtgacatatagcctgggaaagtttgggcagagggccctggatttctacagcattcatgtgaccaaggagtccacccaccccgtgaagcccctggcccagatcgccggaaacagatacgcctccggacctgtgggaaaggccctgagcgacgcatgtatgggcacaatcgcctccttcctgtctaagtaccaggacatcatcatcgaacaccagaaggtggtgaagggcaaccagaagagactggagagcctgcgggagctggccggcaaggaaaacctggaataccctagcgtgaccctgccacctcagcctcacaccaaggagggcgttgatgcctacaacgaagtgatcgcccgggtgcgaatgtgggtgaacctgaacctgtggcagaagctgaagctaagcagagatgatgccaagcctctgctgagactgaagggattcccttcctttcctctggtcgagagacaggccaacgaagtggactggtgggacatggtgtgtaacgtgaagaagctgatcaacgagaaaaaggaggatggcaaggtgttttggcagaatctggctggctacaagagacaggaagccctgagaccatacctgagcagcgaggaagatcggaagaagggaaagaaattcgctcggtaccagctgggcgacctgctgctgcacctggaaaagaagcacggcgaggactggggaaaggtgtacgacgaggcctgggagcggattgacaagaaagtggaaggcctgagcaagcacatcaagctggaagaggaacggagaagcgaggacgcccagagcaaggccgccctgaccgactggctgcgggctaaggccagcttcgtgatcgagggcctgaaggaggccgacaaggacgagttctgcagatgcgagctgaagctgcagaagtggtacggggacctgcggggaaagcccttcgccatcgaagccgagaacagcatcctggacatcagcggcttcagcaagcagtacaactgtgccttcatctggcagaaggacggcgtgaagaagctgaacctgtacctgatcatcaactacttcaagggcggcaagctgcggttcaagaagatcaaacctgaagccttcgaagccaacagattctacaccgtgatcaacaaaaagagcggcgagatcgtgcccatggaggtgaacttcaacttcgacgaccccaacctgatcatcctgcctctggcctttggcaagagacagggcagagaattcatctggaacgacctgctgtccctggaaaccggcagcctgaagctggccaacggaagagtgatcgagaagacactgtacaacagaagaacccggcaggatgagcctgccctgttcgtggccctgaccttcgagcggcgggaggtcctggactcctccaatatcaaaccaatgaacctgatcggcgtggcaagaggcgaaaacatccccgccgtgatcgccctgaccgaccccgagggctgcccactgagccggtttaaggatagcctgggaaacccaacccacatcctgagaatcggcgagagctataaggagaagcagcggaccatccaggccaagaaggaggtggagcagcggagagccggcggctacagccggaagtacgccagcaaagccaagaatctggcagacgatatggtgagaaacaccgctagagatctgctgtactacgccgtgacccaggatgccatgctgatcttcgccaacctgagccggggcttcggccggcagggcaagcggaccttcatggccgagagacagtacacacggatggaggactggctgaccgccaagctggcctacgagggcctgagcaagacctacctgtccaagacactggcccagtacacctccaagacatgcagcaactgtgggtttaccatcaccagcgccgactacgacagggtgctggagaagctgaagaagacagcaacaggctggatgaccacaattaacggcaaggagctgaaggtggagggccagattacctactacaacagatacaagagacagaacgtagtcaaggacctgtccgtcgagctggatagactgagcgaagaatctgtgaacaacgacatctcctcctggacaaagggcagaagcggagaagctctgagcctcctgaagaaaagattctcccatagacccgtgcaggagaagttcgtgtgcctgaactgcggcttcgagacacacgcagccgagcaagccgccctgaacatcgccagatcctggctgttcctgcggagccaggagtacaagaaataccagacaaacaagacaaccggcaacaccgataagagagccttcgtcgagacctggcagtccttttaccggaagaagcttaaggaggtgtggaaacctgccgtgcggtctggcggatctggcggaggctccacaagcgccagcgcccaggtgaccttcgaggacatcgccgtgagcttctgccacgaggagtggaggtacctggacgagggccagaaggagctgtacaaggaggtgatgaaggagaactacgagaccctgatcagcctgggcttcctgtgcgagaagcccagcctgatcagcaagatcgagcaggaggaggacccctgcgtgagggaccagcagaacagcagggagaggaggaggaggctgaagaacttcaccagccccaagaaaaagagaaaagtctaagctgccttctgcggggcttgccttctggccatgcccttcttctctcccttgcacctgtacctcttggtctttgaataaagcctgagtaggaaggctagcaaaaaaaaaaaaaaaaaaaaaaaaaaaaaaaaaaaaaaaaaaaaaaaaaaaaaaaaaaaaaaaaaaaaaaaaaaaaaaaa

SEQ ID NO: 5875 - RNA, 5797 nt, synthetic construct
  source 1..5797: mol_type = other RNA
aggaaataagagagaaaagaagagtaagaagaaatataagagccaccatggcccctaagaagaagcgtaaagtgagccggatggaacgcctcgtctacgaggtgcggcagaagtgcagaaacatcgaggacatctgcatctcctgcggatctctgaacgtgaccctggagcacccactgttcatcggcggcatgtgccagaactgtaaaaactgttttctggagtgtgcctatcaatacgacgatgacggctaccagagctactgcaccatctgttgcggcggaagagaggtgctgatgtgtggaaataacaactgctgccggtgcttctgcgtggaatgcgtggacctgctggtgggccccggcgccgcccaggccgctattaaggaagatccttggaactgctacatgtgcggccacaagggcacatacggcctgctgagacggagagaggactggcctagcagactgcagatgttcttcgccaataaccacgaccaggagttcgacccccctaaggtgtaccctcccgtccccgccgagaagagaaagcccatccgggtcctgagcctgttcgatggcatcgccaccggtctgctggtgctgaaggacctgggcatccaggtggataggtacattgcctccgaggtgtgcgaggactccatcaccgtgggaatggtgcgtcatcagggcaagatcatgtacgtgggcgacgtgcggagcgtgacacagaagcatatccaggagtggggccctttcgacctggtgatcggcggcagcccttgcaatgacctgagcatcgtgaacccagcccggaagggcctgtacgagggaaccggcagactgttcttcgagttttacagactgctgcacgacgcccggcctaaggaaggcgacgaccggcccttcttttggctgttcgagaatgtggtggccatgggagtcagcgacaagcgggatattagccggttcctggagagcaaccccgtgatgatcgatgccaaggaagtgagcgccgcccaccgggccagatacttctggggcaatctgcctggcatgaacagacccctggccagcaccgtgaacgacaagctggagctgcaggagtgcctggagcacggccggatcgccaagttcagcaaggtgagaaccatcaccacccgaagcaacagcatcaaacaaggcaaggaccagcactttcctgtgttcatgaacgagaaggaggacatcctgtggtgtaccgagatggagagagtgttcgggttcccagtccactacacagatgtcagcaacatgtctagactggccagacagagactgctgggaagaagctggtccgtccctgtgatcagacacctgttcgcccctctgaaggagtacttcgcctgcgtgagcagcggcaacagcaacgccaacagccggggccccagcttctctagcggcctggtgccactgtccctgagagggagccacatgggccccatggagatctacaaaaccgtgagcgcctggaagcggcagcctgtgcgcgtgctgagcctgtttcggaatatcgataaagtcctgaaaagcctgggattcctggagagcggctctggctccggcggtggcaccctgaagtacgtggaggatgtgacaaacgtggtcagacgggatgtggagaagtggggccccttcgatctggtgtacggcagcacccaacccctgggcagctcttgtgaccggtgccctggctggtacatgtttcagttccaccggatcctgcagtacgccctgccgagacaggagtcccagcggccattcttttggattttcatggacaacttgctgctgaccgaggatgaccaggaaactaccactcggttcctgcagaccgaagccgtgaccctgcaggacgtgagaggccgggactaccagaacgccatgcgggtgtggtccaacatccctggactgaaaagcaagcacgcacctctgacccctaaagaagaggagtacctgcaggcccaggtgcggagcagaagcaagctggacgcccctaaggtggatctgctggtgaagaattgcctcctgcccctgagagagtacttcaagtatttcagccagaatagtctgcccctgggcggcccaagcagcggcgcccctcctcccagcggcggcagcccagccggctccccaacctctaccgaggagggcacctctgagtccgccacccccgagagcggccctggcacctccaccgagcccagcgagggcagcgcacccggcagccctgccggcagccccacctccacagaggagggaaccagcaccgagcccagcgaaggcagcgccccaggcaccagcaccgagcctagtgagggcggctctggcggcggcagcgcccaggagattaaacggatcaacaagatcagaagaagacttgtgaaagacagcaacaccaagaaggccggcaagacaggccccatgaaaaccctgctggttagagtgatgacacccgatctgagagagcggctggaaaacctgagaaagaagcctgaaaatatcccccagcccatcagcaatacatctagagccaacctgaataagctgctgaccgattacaccgaaatgaagaaggcgatcctgcatgtgtactgggaagagttccagaaggaccctgtgggcctgatgagccgggtggcccagcctgccagcaagaagatcgatcagaacaagctgaaacctgagatggacgagaagggcaacctgaccaccgccggctttgcctgctctcagtgtggccagcccctgttcgtgtacaagctggagcaggtgtctgagaagggcaaggcttacaccaactacttcggacggtgcaatgtggccgagcacgaaaagctgatcctgctggcccagctgaagcccgagaaggatagcgacgaagccgtgacatatagcctgggaaagtttgggcagagggccctggatttctacagcattcatgtgaccaaggagtccacccaccccgtgaagcccctggcccagatcgccggaaacagatacgcctccggacctgtgggaaaggccctgagcgacgcatgtatgggcacaatcgcctccttcctgtctaagtaccaggacatcatcatcgaacaccagaaggtggtgaagggcaaccagaagagactggagagcctgcgggagctggccggcaaggaaaacctggaataccctagcgtgaccctgccacctcagcctcacaccaaggagggcgttgatgcctacaacgaagtgatcgcccgggtgcgaatgtgggtgaacctgaacctgtggcagaagctgaagctaagcagagatgatgccaagcctctgctgagactgaagggattcccttcctttcctctggtcgagagacaggccaacgaagtggactggtgggacatggtgtgtaacgtgaagaagctgatcaacgagaaaaaggaggatggcaaggtgttttggcagaatctggctggctacaagagacaggaagccctgagaccatacctgagcagcgaggaagatcggaagaagggaaagaaattcgctcggtaccagctgggcgacctgctgctgcacctggaaaagaagcacggcgaggactggggaaaggtgtacgacgaggcctgggagcggattgacaagaaagtggaaggcctgagcaagcacatcaagctggaagaggaacggagaagcgaggacgcccagagcaaggccgccctgaccgactggctgcgggctaaggccagcttcgtgatcgagggcctgaaggaggccgacaaggacgagttctgcagatgcgagctgaagctgcagaagtggtacggggacctgcggggaaagcccttcgccatcgaagccgagaacagcatcctggacatcagcggcttcagcaagcagtacaactgtgccttcatctggcagaaggacggcgtgaagaagctgaacctgtacctgatcatcaactacttcaagggcggcaagctgcggttcaagaagatcaaacctgaagccttcgaagccaacagattctacaccgtgatcaacaaaaagagcggcgagatcgtgcccatggaggtgaacttcaacttcgacgaccccaacctgatcatcctgcctctggcctttggcaagagacagggcagagaattcatctggaacgacctgctgtccctggaaaccggcagcctgaagctggccaacggaagagtgatcgagaagacactgtacaacagaagaacccggcaggatgagcctgccctgttcgtggccctgaccttcgagcggcgggaggtcctggactcctccaatatcaaaccaatgaacctgatcggcgtggcaagaggcgaaaacatccccgccgtgatcgccctgaccgaccccgagggctgcccactgagccggtttaaggatagcctgggaaacccaacccacatcctgagaatcggcgagagctataaggagaagcagcggaccatccaggccaagaaggaggtggagcagcggagagccggcggctacagccggaagtacgccagcaaagccaagaatctggcagacgatatggtgagaaacaccgctagagatctgctgtactacgccgtgacccaggatgccatgctgatcttcgccaacctgagccggggcttcggccggcagggcaagcggaccttcatggccgagagacagtacacacggatggaggactggctgaccgccaagctggcctacgagggcctgagcaagacctacctgtccaagacactggcccagtacacctccaagacatgcagcaactgtgggtttaccatcaccagcgccgactacgacagggtgctggagaagctgaagaagacagcaacaggctggatgaccacaattaacggcaaggagctgaaggtggagggccagattacctactacaacagatacaagagacagaacgtagtcaaggacctgtccgtcgagctggatagactgagcgaagaatctgtgaacaacgacatctcctcctggacaaagggcagaagcggagaagctctgagcctcctgaagaaaagattctcccatagacccgtgcaggagaagttcgtgtgcctgaactgcggcttcgagacacacgcagccgagcaagccgccctgaacatcgccagatcctggctgttcctgcggagccaggagtacaagaaataccagacaaacaagacaaccggcaacaccgataagagagccttcgtcgagacctggcagtccttttaccggaagaagcttaaggaggtgtggaaacctgccgtgcggtctggcggatctggcggaggctccacaagcagccagggcctggtgaccttcggcgacgtggccgtggacttcagccaggaggagtgggcctggctgagcaccacccagaggaccctgtacaggaaggtgaccctggagaactacaggaacctggccagcctgggcctgtgcgtgagcaagcccgccgtgatcagcctgctggagcagggcaaggagccctggatcgtgaagaggaagatgaccaggggcggctgccccgacctgaacgccgtgaccagccccaagaaaaagagaaaagtctaagctgccttctgcggggcttgccttctggccatgcccttcttctctcccttgcacctgtacctcttggtctttgaataaagcctgagtaggaaggctagcaaaaaaaaaaaaaaaaaaaaaaaaaaaaaaaaaaaaaaaaaaaaaaaaaaaaaaaaaaaaaaaaaaaaaaaaaaaaaaaa

SEQ ID NO: 5876 - RNA, 5797 nt, synthetic construct
  source 1..5797: mol_type = other RNA
aggaaataagagagaaaagaagagtaagaagaaatataagagccaccatggcccctaagaagaagcgtaaagtgagccggatggaacgcctcgtctacgaggtgcggcagaagtgcagaaacatcgaggacatctgcatctcctgcggatctctgaacgtgaccctggagcacccactgttcatcggcggcatgtgccagaactgtaaaaactgttttctggagtgtgcctatcaatacgacgatgacggctaccagagctactgcaccatctgttgcggcggaagagaggtgctgatgtgtggaaataacaactgctgccggtgcttctgcgtggaatgcgtggacctgctggtgggccccggcgccgcccaggccgctattaaggaagatccttggaactgctacatgtgcggccacaagggcacatacggcctgctgagacggagagaggactggcctagcagactgcagatgttcttcgccaataaccacgaccaggagttcgacccccctaaggtgtaccctcccgtccccgccgagaagagaaagcccatccgggtcctgagcctgttcgatggcatcgccaccggtctgctggtgctgaaggacctgggcatccaggtggataggtacattgcctccgaggtgtgcgaggactccatcaccgtgggaatggtgcgtcatcagggcaagatcatgtacgtgggcgacgtgcggagcgtgacacagaagcatatccaggagtggggccctttcgacctggtgatcggcggcagcccttgcaatgacctgagcatcgtgaacccagcccggaagggcctgtacgagggaaccggcagactgttcttcgagttttacagactgctgcacgacgcccggcctaaggaaggcgacgaccggcccttcttttggctgttcgagaatgtggtggccatgggagtcagcgacaagcgggatattagccggttcctggagagcaaccccgtgatgatcgatgccaaggaagtgagcgccgcccaccgggccagatacttctggggcaatctgcctggcatgaacagacccctggccagcaccgtgaacgacaagctggagctgcaggagtgcctggagcacggccggatcgccaagttcagcaaggtgagaaccatcaccacccgaagcaacagcatcaaacaaggcaaggaccagcactttcctgtgttcatgaacgagaaggaggacatcctgtggtgtaccgagatggagagagtgttcgggttcccagtccactacacagatgtcagcaacatgtctagactggccagacagagactgctgggaagaagctggtccgtccctgtgatcagacacctgttcgcccctctgaaggagtacttcgcctgcgtgagcagcggcaacagcaacgccaacagccggggccccagcttctctagcggcctggtgccactgtccctgagagggagccacatgggccccatggagatctacaaaaccgtgagcgcctggaagcggcagcctgtgcgcgtgctgagcctgtttcggaatatcgataaagtcctgaaaagcctgggattcctggagagcggctctggctccggcggtggcaccctgaagtacgtggaggatgtgacaaacgtggtcagacgggatgtggagaagtggggccccttcgatctggtgtacggcagcacccaacccctgggcagctcttgtgaccggtgccctggctggtacatgtttcagttccaccggatcctgcagtacgccctgccgagacaggagtcccagcggccattcttttggattttcatggacaacttgctgctgaccgaggatgaccaggaaactaccactcggttcctgcagaccgaagccgtgaccctgcaggacgtgagaggccgggactaccagaacgccatgcgggtgtggtccaacatccctggactgaaaagcaagcacgcacctctgacccctaaagaagaggagtacctgcaggcccaggtgcggagcagaagcaagctggacgcccctaaggtggatctgctggtgaagaattgcctcctgcccctgagagagtacttcaagtatttcagccagaatagtctgcccctgggcggcccaagcagcggcgcccctcctcccagcggcggcagcccagccggctccccaacctctaccgaggagggcacctctgagtccgccacccccgagagcggccctggcacctccaccgagcccagcgagggcagcgcacccggcagccctgccggcagccccacctccacagaggagggaaccagcaccgagcccagcgaaggcagcgccccaggcaccagcaccgagcctagtgagggcggctctggcggcggcagcgcccaggagattaaacggatcaacaagatcagaagaagacttgtgaaagacagcaacaccaagaaggccggcaagacaggccccatgaaaaccctgctggttagagtgatgacacccgatctgagagagcggctggaaaacctgagaaagaagcctgaaaatatcccccagcccatcagcaatacatctagagccaacctgaataagctgctgaccgattacaccgaaatgaagaaggcgatcctgcatgtgtactgggaagagttccagaaggaccctgtgggcctgatgagccgggtggcccagcctgccagcaagaagatcgatcagaacaagctgaaacctgagatggacgagaagggcaacctgaccaccgccggctttgcctgctctcagtgtggccagcccctgttcgtgtacaagctggagcaggtgtctgagaagggcaaggcttacaccaactacttcggacggtgcaatgtggccgagcacgaaaagctgatcctgctggcccagctgaagcccgagaaggatagcgacgaagccgtgacatatagcctgggaaagtttgggcagagggccctggatttctacagcattcatgtgaccaaggagtccacccaccccgtgaagcccctggcccagatcgccggaaacagatacgcctccggacctgtgggaaaggccctgagcgacgcatgtatgggcacaatcgcctccttcctgtctaagtaccaggacatcatcatcgaacaccagaaggtggtgaagggcaaccagaagagactggagagcctgcgggagctggccggcaaggaaaacctggaataccctagcgtgaccctgccacctcagcctcacaccaaggagggcgttgatgcctacaacgaagtgatcgcccgggtgcgaatgtgggtgaacctgaacctgtggcagaagctgaagctaagcagagatgatgccaagcctctgctgagactgaagggattcccttcctttcctctggtcgagagacaggccaacgaagtggactggtgggacatggtgtgtaacgtgaagaagctgatcaacgagaaaaaggaggatggcaaggtgttttggcagaatctggctggctacaagagacaggaagccctgagaccatacctgagcagcgaggaagatcggaagaagggaaagaaattcgctcggtaccagctgggcgacctgctgctgcacctggaaaagaagcacggcgaggactggggaaaggtgtacgacgaggcctgggagcggattgacaagaaagtggaaggcctgagcaagcacatcaagctggaagaggaacggagaagcgaggacgcccagagcaaggccgccctgaccgactggctgcgggctaaggccagcttcgtgatcgagggcctgaaggaggccgacaaggacgagttctgcagatgcgagctgaagctgcagaagtggtacggggacctgcggggaaagcccttcgccatcgaagccgagaacagcatcctggacatcagcggcttcagcaagcagtacaactgtgccttcatctggcagaaggacggcgtgaagaagctgaacctgtacctgatcatcaactacttcaagggcggcaagctgcggttcaagaagatcaaacctgaagccttcgaagccaacagattctacaccgtgatcaacaaaaagagcggcgagatcgtgcccatggaggtgaacttcaacttcgacgaccccaacctgatcatcctgcctctggcctttggcaagagacagggcagagaattcatctggaacgacctgctgtccctggaaaccggcagcctgaagctggccaacggaagagtgatcgagaagacactgtacaacagaagaacccggcaggatgagcctgccctgttcgtggccctgaccttcgagcggcgggaggtcctggactcctccaatatcaaaccaatgaacctgatcggcgtggcaagaggcgaaaacatccccgccgtgatcgccctgaccgaccccgagggctgcccactgagccggtttaaggatagcctgggaaacccaacccacatcctgagaatcggcgagagctataaggagaagcagcggaccatccaggccaagaaggaggtggagcagcggagagccggcggctacagccggaagtacgccagcaaagccaagaatctggcagacgatatggtgagaaacaccgctagagatctgctgtactacgccgtgacccaggatgccatgctgatcttcgccaacctgagccggggcttcggccggcagggcaagcggaccttcatggccgagagacagtacacacggatggaggactggctgaccgccaagctggcctacgagggcctgagcaagacctacctgtccaagacactggcccagtacacctccaagacatgcagcaactgtgggtttaccatcaccagcgccgactacgacagggtgctggagaagctgaagaagacagcaacaggctggatgaccacaattaacggcaaggagctgaaggtggagggccagattacctactacaacagatacaagagacagaacgtagtcaaggacctgtccgtcgagctggatagactgagcgaagaatctgtgaacaacgacatctcctcctggacaaagggcagaagcggagaagctctgagcctcctgaagaaaagattctcccatagacccgtgcaggagaagttcgtgtgcctgaactgcggcttcgagacacacgcagccgagcaagccgccctgaacatcgccagatcctggctgttcctgcggagccaggagtacaagaaataccagacaaacaagacaaccggcaacaccgataagagagccttcgtcgagacctggcagtccttttaccggaagaagcttaaggaggtgtggaaacctgccgtgcggtctggcggatctggcggaggctccacaagcagcaaggtgcccgtgaccttcggcgacctggccatctacttcagccaggaggagtgggagtggctgagccccatccagaaggacctgtacgaggacgtgatgctggagaactaccagaacctggtgagcctgggcctgagcttcaggaggcccaacgtgatcaccctgctggagaagggcaaggccccctggatggtggagcccgccaggaagaggaggggcgtggacagcggcagcaagtgcaccagccccaagaaaaagagaaaagtctaagctgccttctgcggggcttgccttctggccatgcccttcttctctcccttgcacctgtacctcttggtctttgaataaagcctgagtaggaaggctagcaaaaaaaaaaaaaaaaaaaaaaaaaaaaaaaaaaaaaaaaaaaaaaaaaaaaaaaaaaaaaaaaaaaaaaaaaaaaaaaa

SEQ ID NO: 5877 - RNA, 5797 nt, synthetic construct
  source 1..5797: mol_type = other RNA
aggaaataagagagaaaagaagagtaagaagaaatataagagccaccatggcccctaagaagaagcgtaaagtgagccggatggaacgcctcgtctacgaggtgcggcagaagtgcagaaacatcgaggacatctgcatctcctgcggatctctgaacgtgaccctggagcacccactgttcatcggcggcatgtgccagaactgtaaaaactgttttctggagtgtgcctatcaatacgacgatgacggctaccagagctactgcaccatctgttgcggcggaagagaggtgctgatgtgtggaaataacaactgctgccggtgcttctgcgtggaatgcgtggacctgctggtgggccccggcgccgcccaggccgctattaaggaagatccttggaactgctacatgtgcggccacaagggcacatacggcctgctgagacggagagaggactggcctagcagactgcagatgttcttcgccaataaccacgaccaggagttcgacccccctaaggtgtaccctcccgtccccgccgagaagagaaagcccatccgggtcctgagcctgttcgatggcatcgccaccggtctgctggtgctgaaggacctgggcatccaggtggataggtacattgcctccgaggtgtgcgaggactccatcaccgtgggaatggtgcgtcatcagggcaagatcatgtacgtgggcgacgtgcggagcgtgacacagaagcatatccaggagtggggccctttcgacctggtgatcggcggcagcccttgcaatgacctgagcatcgtgaacccagcccggaagggcctgtacgagggaaccggcagactgttcttcgagttttacagactgctgcacgacgcccggcctaaggaaggcgacgaccggcccttcttttggctgttcgagaatgtggtggccatgggagtcagcgacaagcgggatattagccggttcctggagagcaaccccgtgatgatcgatgccaaggaagtgagcgccgcccaccgggccagatacttctggggcaatctgcctggcatgaacagacccctggccagcaccgtgaacgacaagctggagctgcaggagtgcctggagcacggccggatcgccaagttcagcaaggtgagaaccatcaccacccgaagcaacagcatcaaacaaggcaaggaccagcactttcctgtgttcatgaacgagaaggaggacatcctgtggtgtaccgagatggagagagtgttcgggttcccagtccactacacagatgtcagcaacatgtctagactggccagacagagactgctgggaagaagctggtccgtccctgtgatcagacacctgttcgcccctctgaaggagtacttcgcctgcgtgagcagcggcaacagcaacgccaacagccggggccccagcttctctagcggcctggtgccactgtccctgagagggagccacatgggccccatggagatctacaaaaccgtgagcgcctggaagcggcagcctgtgcgcgtgctgagcctgtttcggaatatcgataaagtcctgaaaagcctgggattcctggagagcggctctggctccggcggtggcaccctgaagtacgtggaggatgtgacaaacgtggtcagacgggatgtggagaagtggggccccttcgatctggtgtacggcagcacccaacccctgggcagctcttgtgaccggtgccctggctggtacatgtttcagttccaccggatcctgcagtacgccctgccgagacaggagtcccagcggccattcttttggattttcatggacaacttgctgctgaccgaggatgaccaggaaactaccactcggttcctgcagaccgaagccgtgaccctgcaggacgtgagaggccgggactaccagaacgccatgcgggtgtggtccaacatccctggactgaaaagcaagcacgcacctctgacccctaaagaagaggagtacctgcaggcccaggtgcggagcagaagcaagctggacgcccctaaggtggatctgctggtgaagaattgcctcctgcccctgagagagtacttcaagtatttcagccagaatagtctgcccctgggcggcccaagcagcggcgcccctcctcccagcggcggcagcccagccggctccccaacctctaccgaggagggcacctctgagtccgccacccccgagagcggccctggcacctccaccgagcccagcgagggcagcgcacccggcagccctgccggcagccccacctccacagaggagggaaccagcaccgagcccagcgaaggcagcgccccaggcaccagcaccgagcctagtgagggcggctctggcggcggcagcgcccaggagattaaacggatcaacaagatcagaagaagacttgtgaaagacagcaacaccaagaaggccggcaagacaggccccatgaaaaccctgctggttagagtgatgacacccgatctgagagagcggctggaaaacctgagaaagaagcctgaaaatatcccccagcccatcagcaatacatctagagccaacctgaataagctgctgaccgattacaccgaaatgaagaaggcgatcctgcatgtgtactgggaagagttccagaaggaccctgtgggcctgatgagccgggtggcccagcctgccagcaagaagatcgatcagaacaagctgaaacctgagatggacgagaagggcaacctgaccaccgccggctttgcctgctctcagtgtggccagcccctgttcgtgtacaagctggagcaggtgtctgagaagggcaaggcttacaccaactacttcggacggtgcaatgtggccgagcacgaaaagctgatcctgctggcccagctgaagcccgagaaggatagcgacgaagccgtgacatatagcctgggaaagtttgggcagagggccctggatttctacagcattcatgtgaccaaggagtccacccaccccgtgaagcccctggcccagatcgccggaaacagatacgcctccggacctgtgggaaaggccctgagcgacgcatgtatgggcacaatcgcctccttcctgtctaagtaccaggacatcatcatcgaacaccagaaggtggtgaagggcaaccagaagagactggagagcctgcgggagctggccggcaaggaaaacctggaataccctagcgtgaccctgccacctcagcctcacaccaaggagggcgttgatgcctacaacgaagtgatcgcccgggtgcgaatgtgggtgaacctgaacctgtggcagaagctgaagctaagcagagatgatgccaagcctctgctgagactgaagggattcccttcctttcctctggtcgagagacaggccaacgaagtggactggtgggacatggtgtgtaacgtgaagaagctgatcaacgagaaaaaggaggatggcaaggtgttttggcagaatctggctggctacaagagacaggaagccctgagaccatacctgagcagcgaggaagatcggaagaagggaaagaaattcgctcggtaccagctgggcgacctgctgctgcacctggaaaagaagcacggcgaggactggggaaaggtgtacgacgaggcctgggagcggattgacaagaaagtggaaggcctgagcaagcacatcaagctggaagaggaacggagaagcgaggacgcccagagcaaggccgccctgaccgactggctgcgggctaaggccagcttcgtgatcgagggcctgaaggaggccgacaaggacgagttctgcagatgcgagctgaagctgcagaagtggtacggggacctgcggggaaagcccttcgccatcgaagccgagaacagcatcctggacatcagcggcttcagcaagcagtacaactgtgccttcatctggcagaaggacggcgtgaagaagctgaacctgtacctgatcatcaactacttcaagggcggcaagctgcggttcaagaagatcaaacctgaagccttcgaagccaacagattctacaccgtgatcaacaaaaagagcggcgagatcgtgcccatggaggtgaacttcaacttcgacgaccccaacctgatcatcctgcctctggcctttggcaagagacagggcagagaattcatctggaacgacctgctgtccctggaaaccggcagcctgaagctggccaacggaagagtgatcgagaagacactgtacaacagaagaacccggcaggatgagcctgccctgttcgtggccctgaccttcgagcggcgggaggtcctggactcctccaatatcaaaccaatgaacctgatcggcgtggcaagaggcgaaaacatccccgccgtgatcgccctgaccgaccccgagggctgcccactgagccggtttaaggatagcctgggaaacccaacccacatcctgagaatcggcgagagctataaggagaagcagcggaccatccaggccaagaaggaggtggagcagcggagagccggcggctacagccggaagtacgccagcaaagccaagaatctggcagacgatatggtgagaaacaccgctagagatctgctgtactacgccgtgacccaggatgccatgctgatcttcgccaacctgagccggggcttcggccggcagggcaagcggaccttcatggccgagagacagtacacacggatggaggactggctgaccgccaagctggcctacgagggcctgagcaagacctacctgtccaagacactggcccagtacacctccaagacatgcagcaactgtgggtttaccatcaccagcgccgactacgacagggtgctggagaagctgaagaagacagcaacaggctggatgaccacaattaacggcaaggagctgaaggtggagggccagattacctactacaacagatacaagagacagaacgtagtcaaggacctgtccgtcgagctggatagactgagcgaagaatctgtgaacaacgacatctcctcctggacaaagggcagaagcggagaagctctgagcctcctgaagaaaagattctcccatagacccgtgcaggagaagttcgtgtgcctgaactgcggcttcgagacacacgcagccgagcaagccgccctgaacatcgccagatcctggctgttcctgcggagccaggagtacaagaaataccagacaaacaagacaaccggcaacaccgataagagagccttcgtcgagacctggcagtccttttaccggaagaagcttaaggaggtgtggaaacctgccgtgcggtctggcggatctggcggaggctccacaagcctgcaggagctgctgaccttcaaggacgtgagcgtggagttcagcgtggacgagtgggcctgcctggaccccgcccagcagaccctgtacagggacgtgatgctggagaactacaggcacctggtgttcctgggcctgacccccagcaagccccacctgatcacctgcctggagcagagcaaggagccctggaaggtgaaggcctaccagaccgtggtgaagcaccccgccgtgagcaaccacaccagccccaagaaaaagagaaaagtctaagctgccttctgcggggcttgccttctggccatgcccttcttctctcccttgcacctgtacctcttggtctttgaataaagcctgagtaggaaggctagcaaaaaaaaaaaaaaaaaaaaaaaaaaaaaaaaaaaaaaaaaaaaaaaaaaaaaaaaaaaaaaaaaaaaaaaaaaaaaaaa

SEQ ID NO: 5878 - RNA, 5794 nt, synthetic construct
  source 1..5794: mol_type = other RNA
aggaaataagagagaaaagaagagtaagaagaaatataagagccaccatggcccctaagaagaagcgtaaagtgagccggatggaacgcctcgtctacgaggtgcggcagaagtgcagaaacatcgaggacatctgcatctcctgcggatctctgaacgtgaccctggagcacccactgttcatcggcggcatgtgccagaactgtaaaaactgttttctggagtgtgcctatcaatacgacgatgacggctaccagagctactgcaccatctgttgcggcggaagagaggtgctgatgtgtggaaataacaactgctgccggtgcttctgcgtggaatgcgtggacctgctggtgggccccggcgccgcccaggccgctattaaggaagatccttggaactgctacatgtgcggccacaagggcacatacggcctgctgagacggagagaggactggcctagcagactgcagatgttcttcgccaataaccacgaccaggagttcgacccccctaaggtgtaccctcccgtccccgccgagaagagaaagcccatccgggtcctgagcctgttcgatggcatcgccaccggtctgctggtgctgaaggacctgggcatccaggtggataggtacattgcctccgaggtgtgcgaggactccatcaccgtgggaatggtgcgtcatcagggcaagatcatgtacgtgggcgacgtgcggagcgtgacacagaagcatatccaggagtggggccctttcgacctggtgatcggcggcagcccttgcaatgacctgagcatcgtgaacccagcccggaagggcctgtacgagggaaccggcagactgttcttcgagttttacagactgctgcacgacgcccggcctaaggaaggcgacgaccggcccttcttttggctgttcgagaatgtggtggccatgggagtcagcgacaagcgggatattagccggttcctggagagcaaccccgtgatgatcgatgccaaggaagtgagcgccgcccaccgggccagatacttctggggcaatctgcctggcatgaacagacccctggccagcaccgtgaacgacaagctggagctgcaggagtgcctggagcacggccggatcgccaagttcagcaaggtgagaaccatcaccacccgaagcaacagcatcaaacaaggcaaggaccagcactttcctgtgttcatgaacgagaaggaggacatcctgtggtgtaccgagatggagagagtgttcgggttcccagtccactacacagatgtcagcaacatgtctagactggccagacagagactgctgggaagaagctggtccgtccctgtgatcagacacctgttcgcccctctgaaggagtacttcgcctgcgtgagcagcggcaacagcaacgccaacagccggggccccagcttctctagcggcctggtgccactgtccctgagagggagccacatgggccccatggagatctacaaaaccgtgagcgcctggaagcggcagcctgtgcgcgtgctgagcctgtttcggaatatcgataaagtcctgaaaagcctgggattcctggagagcggctctggctccggcggtggcaccctgaagtacgtggaggatgtgacaaacgtggtcagacgggatgtggagaagtggggccccttcgatctggtgtacggcagcacccaacccctgggcagctcttgtgaccggtgccctggctggtacatgtttcagttccaccggatcctgcagtacgccctgccgagacaggagtcccagcggccattcttttggattttcatggacaacttgctgctgaccgaggatgaccaggaaactaccactcggttcctgcagaccgaagccgtgaccctgcaggacgtgagaggccgggactaccagaacgccatgcgggtgtggtccaacatccctggactgaaaagcaagcacgcacctctgacccctaaagaagaggagtacctgcaggcccaggtgcggagcagaagcaagctggacgcccctaaggtggatctgctggtgaagaattgcctcctgcccctgagagagtacttcaagtatttcagccagaatagtctgcccctgggcggcccaagcagcggcgcccctcctcccagcggcggcagcccagccggctccccaacctctaccgaggagggcacctctgagtccgccacccccgagagcggccctggcacctccaccgagcccagcgagggcagcgcacccggcagccctgccggcagccccacctccacagaggagggaaccagcaccgagcccagcgaaggcagcgccccaggcaccagcaccgagcctagtgagggcggctctggcggcggcagcgcccaggagattaaacggatcaacaagatcagaagaagacttgtgaaagacagcaacaccaagaaggccggcaagacaggccccatgaaaaccctgctggttagagtgatgacacccgatctgagagagcggctggaaaacctgagaaagaagcctgaaaatatcccccagcccatcagcaatacatctagagccaacctgaataagctgctgaccgattacaccgaaatgaagaaggcgatcctgcatgtgtactgggaagagttccagaaggaccctgtgggcctgatgagccgggtggcccagcctgccagcaagaagatcgatcagaacaagctgaaacctgagatggacgagaagggcaacctgaccaccgccggctttgcctgctctcagtgtggccagcccctgttcgtgtacaagctggagcaggtgtctgagaagggcaaggcttacaccaactacttcggacggtgcaatgtggccgagcacgaaaagctgatcctgctggcccagctgaagcccgagaaggatagcgacgaagccgtgacatatagcctgggaaagtttgggcagagggccctggatttctacagcattcatgtgaccaaggagtccacccaccccgtgaagcccctggcccagatcgccggaaacagatacgcctccggacctgtgggaaaggccctgagcgacgcatgtatgggcacaatcgcctccttcctgtctaagtaccaggacatcatcatcgaacaccagaaggtggtgaagggcaaccagaagagactggagagcctgcgggagctggccggcaaggaaaacctggaataccctagcgtgaccctgccacctcagcctcacaccaaggagggcgttgatgcctacaacgaagtgatcgcccgggtgcgaatgtgggtgaacctgaacctgtggcagaagctgaagctaagcagagatgatgccaagcctctgctgagactgaagggattcccttcctttcctctggtcgagagacaggccaacgaagtggactggtgggacatggtgtgtaacgtgaagaagctgatcaacgagaaaaaggaggatggcaaggtgttttggcagaatctggctggctacaagagacaggaagccctgagaccatacctgagcagcgaggaagatcggaagaagggaaagaaattcgctcggtaccagctgggcgacctgctgctgcacctggaaaagaagcacggcgaggactggggaaaggtgtacgacgaggcctgggagcggattgacaagaaagtggaaggcctgagcaagcacatcaagctggaagaggaacggagaagcgaggacgcccagagcaaggccgccctgaccgactggctgcgggctaaggccagcttcgtgatcgagggcctgaaggaggccgacaaggacgagttctgcagatgcgagctgaagctgcagaagtggtacggggacctgcggggaaagcccttcgccatcgaagccgagaacagcatcctggacatcagcggcttcagcaagcagtacaactgtgccttcatctggcagaaggacggcgtgaagaagctgaacctgtacctgatcatcaactacttcaagggcggcaagctgcggttcaagaagatcaaacctgaagccttcgaagccaacagattctacaccgtgatcaacaaaaagagcggcgagatcgtgcccatggaggtgaacttcaacttcgacgaccccaacctgatcatcctgcctctggcctttggcaagagacagggcagagaattcatctggaacgacctgctgtccctggaaaccggcagcctgaagctggccaacggaagagtgatcgagaagacactgtacaacagaagaacccggcaggatgagcctgccctgttcgtggccctgaccttcgagcggcgggaggtcctggactcctccaatatcaaaccaatgaacctgatcggcgtggcaagaggcgaaaacatccccgccgtgatcgccctgaccgaccccgagggctgcccactgagccggtttaaggatagcctgggaaacccaacccacatcctgagaatcggcgagagctataaggagaagcagcggaccatccaggccaagaaggaggtggagcagcggagagccggcggctacagccggaagtacgccagcaaagccaagaatctggcagacgatatggtgagaaacaccgctagagatctgctgtactacgccgtgacccaggatgccatgctgatcttcgccaacctgagccggggcttcggccggcagggcaagcggaccttcatggccgagagacagtacacacggatggaggactggctgaccgccaagctggcctacgagggcctgagcaagacctacctgtccaagacactggcccagtacacctccaagacatgcagcaactgtgggtttaccatcaccagcgccgactacgacagggtgctggagaagctgaagaagacagcaacaggctggatgaccacaattaacggcaaggagctgaaggtggagggccagattacctactacaacagatacaagagacagaacgtagtcaaggacctgtccgtcgagctggatagactgagcgaagaatctgtgaacaacgacatctcctcctggacaaagggcagaagcggagaagctctgagcctcctgaagaaaagattctcccatagacccgtgcaggagaagttcgtgtgcctgaactgcggcttcgagacacacgcagccgagcaagccgccctgaacatcgccagatcctggctgttcctgcggagccaggagtacaagaaataccagacaaacaagacaaccggcaacaccgataagagagccttcgtcgagacctggcagtccttttaccggaagaagcttaaggaggtgtggaaacctgccgtgcggtctggcggatctggcggaggctccacaagcaacgtggaggtggtgaaggtgatgccccaggacctggtgaccttcaaggacgtggccatcgacttcagccaggaggagtggcagtggatgaaccccgcccagaagagactgtacagaagcatgatgctggagaactaccagagcctggtgagcctgggcctgtgcatcagcaagccctacgtgatcagcctgctggagcagggcagagagccctgggagatgaccagcgagatgaccagaaccagccccaagaaaaagagaaaagtctaagctgccttctgcggggcttgccttctggccatgcccttcttctctcccttgcacctgtacctcttggtctttgaataaagcctgagtaggaaggctagcaaaaaaaaaaaaaaaaaaaaaaaaaaaaaaaaaaaaaaaaaaaaaaaaaaaaaaaaaaaaaaaaaaaaaaaaaaaaaaaa

SEQ ID NO: 5879 - RNA, 5797 nt, synthetic construct
  source 1..5797: mol_type = other RNA
aggaaataagagagaaaagaagagtaagaagaaatataagagccaccatggcccctaagaagaagcgtaaagtgagccggatggaacgcctcgtctacgaggtgcggcagaagtgcagaaacatcgaggacatctgcatctcctgcggatctctgaacgtgaccctggagcacccactgttcatcggcggcatgtgccagaactgtaaaaactgttttctggagtgtgcctatcaatacgacgatgacggctaccagagctactgcaccatctgttgcggcggaagagaggtgctgatgtgtggaaataacaactgctgccggtgcttctgcgtggaatgcgtggacctgctggtgggccccggcgccgcccaggccgctattaaggaagatccttggaactgctacatgtgcggccacaagggcacatacggcctgctgagacggagagaggactggcctagcagactgcagatgttcttcgccaataaccacgaccaggagttcgacccccctaaggtgtaccctcccgtccccgccgagaagagaaagcccatccgggtcctgagcctgttcgatggcatcgccaccggtctgctggtgctgaaggacctgggcatccaggtggataggtacattgcctccgaggtgtgcgaggactccatcaccgtgggaatggtgcgtcatcagggcaagatcatgtacgtgggcgacgtgcggagcgtgacacagaagcatatccaggagtggggccctttcgacctggtgatcggcggcagcccttgcaatgacctgagcatcgtgaacccagcccggaagggcctgtacgagggaaccggcagactgttcttcgagttttacagactgctgcacgacgcccggcctaaggaaggcgacgaccggcccttcttttggctgttcgagaatgtggtggccatgggagtcagcgacaagcgggatattagccggttcctggagagcaaccccgtgatgatcgatgccaaggaagtgagcgccgcccaccgggccagatacttctggggcaatctgcctggcatgaacagacccctggccagcaccgtgaacgacaagctggagctgcaggagtgcctggagcacggccggatcgccaagttcagcaaggtgagaaccatcaccacccgaagcaacagcatcaaacaaggcaaggaccagcactttcctgtgttcatgaacgagaaggaggacatcctgtggtgtaccgagatggagagagtgttcgggttcccagtccactacacagatgtcagcaacatgtctagactggccagacagagactgctgggaagaagctggtccgtccctgtgatcagacacctgttcgcccctctgaaggagtacttcgcctgcgtgagcagcggcaacagcaacgccaacagccggggccccagcttctctagcggcctggtgccactgtccctgagagggagccacatgggccccatggagatctacaaaaccgtgagcgcctggaagcggcagcctgtgcgcgtgctgagcctgtttcggaatatcgataaagtcctgaaaagcctgggattcctggagagcggctctggctccggcggtggcaccctgaagtacgtggaggatgtgacaaacgtggtcagacgggatgtggagaagtggggccccttcgatctggtgtacggcagcacccaacccctgggcagctcttgtgaccggtgccctggctggtacatgtttcagttccaccggatcctgcagtacgccctgccgagacaggagtcccagcggccattcttttggattttcatggacaacttgctgctgaccgaggatgaccaggaaactaccactcggttcctgcagaccgaagccgtgaccctgcaggacgtgagaggccgggactaccagaacgccatgcgggtgtggtccaacatccctggactgaaaagcaagcacgcacctctgacccctaaagaagaggagtacctgcaggcccaggtgcggagcagaagcaagctggacgcccctaaggtggatctgctggtgaagaattgcctcctgcccctgagagagtacttcaagtatttcagccagaatagtctgcccctgggcggcccaagcagcggcgcccctcctcccagcggcggcagcccagccggctccccaacctctaccgaggagggcacctctgagtccgccacccccgagagcggccctggcacctccaccgagcccagcgagggcagcgcacccggcagccctgccggcagccccacctccacagaggagggaaccagcaccgagcccagcgaaggcagcgccccaggcaccagcaccgagcctagtgagggcggctctggcggcggcagcgcccaggagattaaacggatcaacaagatcagaagaagacttgtgaaagacagcaacaccaagaaggccggcaagacaggccccatgaaaaccctgctggttagagtgatgacacccgatctgagagagcggctggaaaacctgagaaagaagcctgaaaatatcccccagcccatcagcaatacatctagagccaacctgaataagctgctgaccgattacaccgaaatgaagaaggcgatcctgcatgtgtactgggaagagttccagaaggaccctgtgggcctgatgagccgggtggcccagcctgccagcaagaagatcgatcagaacaagctgaaacctgagatggacgagaagggcaacctgaccaccgccggctttgcctgctctcagtgtggccagcccctgttcgtgtacaagctggagcaggtgtctgagaagggcaaggcttacaccaactacttcggacggtgcaatgtggccgagcacgaaaagctgatcctgctggcccagctgaagcccgagaaggatagcgacgaagccgtgacatatagcctgggaaagtttgggcagagggccctggatttctacagcattcatgtgaccaaggagtccacccaccccgtgaagcccctggcccagatcgccggaaacagatacgcctccggacctgtgggaaaggccctgagcgacgcatgtatgggcacaatcgcctccttcctgtctaagtaccaggacatcatcatcgaacaccagaaggtggtgaagggcaaccagaagagactggagagcctgcgggagctggccggcaaggaaaacctggaataccctagcgtgaccctgccacctcagcctcacaccaaggagggcgttgatgcctacaacgaagtgatcgcccgggtgcgaatgtgggtgaacctgaacctgtggcagaagctgaagctaagcagagatgatgccaagcctctgctgagactgaagggattcccttcctttcctctggtcgagagacaggccaacgaagtggactggtgggacatggtgtgtaacgtgaagaagctgatcaacgagaaaaaggaggatggcaaggtgttttggcagaatctggctggctacaagagacaggaagccctgagaccatacctgagcagcgaggaagatcggaagaagggaaagaaattcgctcggtaccagctgggcgacctgctgctgcacctggaaaagaagcacggcgaggactggggaaaggtgtacgacgaggcctgggagcggattgacaagaaagtggaaggcctgagcaagcacatcaagctggaagaggaacggagaagcgaggacgcccagagcaaggccgccctgaccgactggctgcgggctaaggccagcttcgtgatcgagggcctgaaggaggccgacaaggacgagttctgcagatgcgagctgaagctgcagaagtggtacggggacctgcggggaaagcccttcgccatcgaagccgagaacagcatcctggacatcagcggcttcagcaagcagtacaactgtgccttcatctggcagaaggacggcgtgaagaagctgaacctgtacctgatcatcaactacttcaagggcggcaagctgcggttcaagaagatcaaacctgaagccttcgaagccaacagattctacaccgtgatcaacaaaaagagcggcgagatcgtgcccatggaggtgaacttcaacttcgacgaccccaacctgatcatcctgcctctggcctttggcaagagacagggcagagaattcatctggaacgacctgctgtccctggaaaccggcagcctgaagctggccaacggaagagtgatcgagaagacactgtacaacagaagaacccggcaggatgagcctgccctgttcgtggccctgaccttcgagcggcgggaggtcctggactcctccaatatcaaaccaatgaacctgatcggcgtggcaagaggcgaaaacatccccgccgtgatcgccctgaccgaccccgagggctgcccactgagccggtttaaggatagcctgggaaacccaacccacatcctgagaatcggcgagagctataaggagaagcagcggaccatccaggccaagaaggaggtggagcagcggagagccggcggctacagccggaagtacgccagcaaagccaagaatctggcagacgatatggtgagaaacaccgctagagatctgctgtactacgccgtgacccaggatgccatgctgatcttcgccaacctgagccggggcttcggccggcagggcaagcggaccttcatggccgagagacagtacacacggatggaggactggctgaccgccaagctggcctacgagggcctgagcaagacctacctgtccaagacactggcccagtacacctccaagacatgcagcaactgtgggtttaccatcaccagcgccgactacgacagggtgctggagaagctgaagaagacagcaacaggctggatgaccacaattaacggcaaggagctgaaggtggagggccagattacctactacaacagatacaagagacagaacgtagtcaaggacctgtccgtcgagctggatagactgagcgaagaatctgtgaacaacgacatctcctcctggacaaagggcagaagcggagaagctctgagcctcctgaagaaaagattctcccatagacccgtgcaggagaagttcgtgtgcctgaactgcggcttcgagacacacgcagccgagcaagccgccctgaacatcgccagatcctggctgttcctgcggagccaggagtacaagaaataccagacaaacaagacaaccggcaacaccgataagagagccttcgtcgagacctggcagtccttttaccggaagaagcttaaggaggtgtggaaacctgccgtgcggtctggcggatctggcggaggctccacaagcttccaggagagcgtggccttcgaggacgtggccgtgtacttcacccagaaccagtggggcagcctggaccccgcccagagggccctgtacagcgaggtgatgctggagaactacgccaacgtggccagcctggtggccttccccttccccaagcccgccctgatcagccacctggagaagggcgaggccccctggggccccgacccctgggacgccgagatccccagcggcatcaaccagggcaccagccccaagaaaaagagaaaagtctaagctgccttctgcggggcttgccttctggccatgcccttcttctctcccttgcacctgtacctcttggtctttgaataaagcctgagtaggaaggctagcaaaaaaaaaaaaaaaaaaaaaaaaaaaaaaaaaaaaaaaaaaaaaaaaaaaaaaaaaaaaaaaaaaaaaaaaaaaaaaaa

SEQ ID NO: 5880 - RNA, 5797 nt, synthetic construct
  source 1..5797: mol_type = other RNA
aggaaataagagagaaaagaagagtaagaagaaatataagagccaccatggcccctaagaagaagcgtaaagtgagccggatggaacgcctcgtctacgaggtgcggcagaagtgcagaaacatcgaggacatctgcatctcctgcggatctctgaacgtgaccctggagcacccactgttcatcggcggcatgtgccagaactgtaaaaactgttttctggagtgtgcctatcaatacgacgatgacggctaccagagctactgcaccatctgttgcggcggaagagaggtgctgatgtgtggaaataacaactgctgccggtgcttctgcgtggaatgcgtggacctgctggtgggccccggcgccgcccaggccgctattaaggaagatccttggaactgctacatgtgcggccacaagggcacatacggcctgctgagacggagagaggactggcctagcagactgcagatgttcttcgccaataaccacgaccaggagttcgacccccctaaggtgtaccctcccgtccccgccgagaagagaaagcccatccgggtcctgagcctgttcgatggcatcgccaccggtctgctggtgctgaaggacctgggcatccaggtggataggtacattgcctccgaggtgtgcgaggactccatcaccgtgggaatggtgcgtcatcagggcaagatcatgtacgtgggcgacgtgcggagcgtgacacagaagcatatccaggagtggggccctttcgacctggtgatcggcggcagcccttgcaatgacctgagcatcgtgaacccagcccggaagggcctgtacgagggaaccggcagactgttcttcgagttttacagactgctgcacgacgcccggcctaaggaaggcgacgaccggcccttcttttggctgttcgagaatgtggtggccatgggagtcagcgacaagcgggatattagccggttcctggagagcaaccccgtgatgatcgatgccaaggaagtgagcgccgcccaccgggccagatacttctggggcaatctgcctggcatgaacagacccctggccagcaccgtgaacgacaagctggagctgcaggagtgcctggagcacggccggatcgccaagttcagcaaggtgagaaccatcaccacccgaagcaacagcatcaaacaaggcaaggaccagcactttcctgtgttcatgaacgagaaggaggacatcctgtggtgtaccgagatggagagagtgttcgggttcccagtccactacacagatgtcagcaacatgtctagactggccagacagagactgctgggaagaagctggtccgtccctgtgatcagacacctgttcgcccctctgaaggagtacttcgcctgcgtgagcagcggcaacagcaacgccaacagccggggccccagcttctctagcggcctggtgccactgtccctgagagggagccacatgggccccatggagatctacaaaaccgtgagcgcctggaagcggcagcctgtgcgcgtgctgagcctgtttcggaatatcgataaagtcctgaaaagcctgggattcctggagagcggctctggctccggcggtggcaccctgaagtacgtggaggatgtgacaaacgtggtcagacgggatgtggagaagtggggccccttcgatctggtgtacggcagcacccaacccctgggcagctcttgtgaccggtgccctggctggtacatgtttcagttccaccggatcctgcagtacgccctgccgagacaggagtcccagcggccattcttttggattttcatggacaacttgctgctgaccgaggatgaccaggaaactaccactcggttcctgcagaccgaagccgtgaccctgcaggacgtgagaggccgggactaccagaacgccatgcgggtgtggtccaacatccctggactgaaaagcaagcacgcacctctgacccctaaagaagaggagtacctgcaggcccaggtgcggagcagaagcaagctggacgcccctaaggtggatctgctggtgaagaattgcctcctgcccctgagagagtacttcaagtatttcagccagaatagtctgcccctgggcggcccaagcagcggcgcccctcctcccagcggcggcagcccagccggctccccaacctctaccgaggagggcacctctgagtccgccacccccgagagcggccctggcacctccaccgagcccagcgagggcagcgcacccggcagccctgccggcagccccacctccacagaggagggaaccagcaccgagcccagcgaaggcagcgccccaggcaccagcaccgagcctagtgagggcggctctggcggcggcagcgcccaggagattaaacggatcaacaagatcagaagaagacttgtgaaagacagcaacaccaagaaggccggcaagacaggccccatgaaaaccctgctggttagagtgatgacacccgatctgagagagcggctggaaaacctgagaaagaagcctgaaaatatcccccagcccatcagcaatacatctagagccaacctgaataagctgctgaccgattacaccgaaatgaagaaggcgatcctgcatgtgtactgggaagagttccagaaggaccctgtgggcctgatgagccgggtggcccagcctgccagcaagaagatcgatcagaacaagctgaaacctgagatggacgagaagggcaacctgaccaccgccggctttgcctgctctcagtgtggccagcccctgttcgtgtacaagctggagcaggtgtctgagaagggcaaggcttacaccaactacttcggacggtgcaatgtggccgagcacgaaaagctgatcctgctggcccagctgaagcccgagaaggatagcgacgaagccgtgacatatagcctgggaaagtttgggcagagggccctggatttctacagcattcatgtgaccaaggagtccacccaccccgtgaagcccctggcccagatcgccggaaacagatacgcctccggacctgtgggaaaggccctgagcgacgcatgtatgggcacaatcgcctccttcctgtctaagtaccaggacatcatcatcgaacaccagaaggtggtgaagggcaaccagaagagactggagagcctgcgggagctggccggcaaggaaaacctggaataccctagcgtgaccctgccacctcagcctcacaccaaggagggcgttgatgcctacaacgaagtgatcgcccgggtgcgaatgtgggtgaacctgaacctgtggcagaagctgaagctaagcagagatgatgccaagcctctgctgagactgaagggattcccttcctttcctctggtcgagagacaggccaacgaagtggactggtgggacatggtgtgtaacgtgaagaagctgatcaacgagaaaaaggaggatggcaaggtgttttggcagaatctggctggctacaagagacaggaagccctgagaccatacctgagcagcgaggaagatcggaagaagggaaagaaattcgctcggtaccagctgggcgacctgctgctgcacctggaaaagaagcacggcgaggactggggaaaggtgtacgacgaggcctgggagcggattgacaagaaagtggaaggcctgagcaagcacatcaagctggaagaggaacggagaagcgaggacgcccagagcaaggccgccctgaccgactggctgcgggctaaggccagcttcgtgatcgagggcctgaaggaggccgacaaggacgagttctgcagatgcgagctgaagctgcagaagtggtacggggacctgcggggaaagcccttcgccatcgaagccgagaacagcatcctggacatcagcggcttcagcaagcagtacaactgtgccttcatctggcagaaggacggcgtgaagaagctgaacctgtacctgatcatcaactacttcaagggcggcaagctgcggttcaagaagatcaaacctgaagccttcgaagccaacagattctacaccgtgatcaacaaaaagagcggcgagatcgtgcccatggaggtgaacttcaacttcgacgaccccaacctgatcatcctgcctctggcctttggcaagagacagggcagagaattcatctggaacgacctgctgtccctggaaaccggcagcctgaagctggccaacggaagagtgatcgagaagacactgtacaacagaagaacccggcaggatgagcctgccctgttcgtggccctgaccttcgagcggcgggaggtcctggactcctccaatatcaaaccaatgaacctgatcggcgtggcaagaggcgaaaacatccccgccgtgatcgccctgaccgaccccgagggctgcccactgagccggtttaaggatagcctgggaaacccaacccacatcctgagaatcggcgagagctataaggagaagcagcggaccatccaggccaagaaggaggtggagcagcggagagccggcggctacagccggaagtacgccagcaaagccaagaatctggcagacgatatggtgagaaacaccgctagagatctgctgtactacgccgtgacccaggatgccatgctgatcttcgccaacctgagccggggcttcggccggcagggcaagcggaccttcatggccgagagacagtacacacggatggaggactggctgaccgccaagctggcctacgagggcctgagcaagacctacctgtccaagacactggcccagtacacctccaagacatgcagcaactgtgggtttaccatcaccagcgccgactacgacagggtgctggagaagctgaagaagacagcaacaggctggatgaccacaattaacggcaaggagctgaaggtggagggccagattacctactacaacagatacaagagacagaacgtagtcaaggacctgtccgtcgagctggatagactgagcgaagaatctgtgaacaacgacatctcctcctggacaaagggcagaagcggagaagctctgagcctcctgaagaaaagattctcccatagacccgtgcaggagaagttcgtgtgcctgaactgcggcttcgagacacacgcagccgagcaagccgccctgaacatcgccagatcctggctgttcctgcggagccaggagtacaagaaataccagacaaacaagacaaccggcaacaccgataagagagccttcgtcgagacctggcagtccttttaccggaagaagcttaaggaggtgtggaaacctgccgtgcggtctggcggatctggcggaggctccacaagcccccagaagagcgtgaccttcgaggacgtggccgtgtacttcacccaggccgagtgggacggcctgagccccgcccagaggaccctgtacagggacgtgatgctggagaactacggcaacgtggccagcctgggcttccccctgctgaagcccgccgtgatcagccagctggagggcggcggcgagctgggcggccccagccccctggccgccggcaccggcctgaggggcctgtggaccgtgaccagccccaagaaaaagagaaaagtctaagctgccttctgcggggcttgccttctggccatgcccttcttctctcccttgcacctgtacctcttggtctttgaataaagcctgagtaggaaggctagcaaaaaaaaaaaaaaaaaaaaaaaaaaaaaaaaaaaaaaaaaaaaaaaaaaaaaaaaaaaaaaaaaaaaaaaaaaaaaaaa

SEQ ID NO: 5881 - RNA, 5797 nt, synthetic construct
  source 1..5797: mol_type = other RNA
aggaaataagagagaaaagaagagtaagaagaaatataagagccaccatggcccctaagaagaagcgtaaagtgagccggatggaacgcctcgtctacgaggtgcggcagaagtgcagaaacatcgaggacatctgcatctcctgcggatctctgaacgtgaccctggagcacccactgttcatcggcggcatgtgccagaactgtaaaaactgttttctggagtgtgcctatcaatacgacgatgacggctaccagagctactgcaccatctgttgcggcggaagagaggtgctgatgtgtggaaataacaactgctgccggtgcttctgcgtggaatgcgtggacctgctggtgggccccggcgccgcccaggccgctattaaggaagatccttggaactgctacatgtgcggccacaagggcacatacggcctgctgagacggagagaggactggcctagcagactgcagatgttcttcgccaataaccacgaccaggagttcgacccccctaaggtgtaccctcccgtccccgccgagaagagaaagcccatccgggtcctgagcctgttcgatggcatcgccaccggtctgctggtgctgaaggacctgggcatccaggtggataggtacattgcctccgaggtgtgcgaggactccatcaccgtgggaatggtgcgtcatcagggcaagatcatgtacgtgggcgacgtgcggagcgtgacacagaagcatatccaggagtggggccctttcgacctggtgatcggcggcagcccttgcaatgacctgagcatcgtgaacccagcccggaagggcctgtacgagggaaccggcagactgttcttcgagttttacagactgctgcacgacgcccggcctaaggaaggcgacgaccggcccttcttttggctgttcgagaatgtggtggccatgggagtcagcgacaagcgggatattagccggttcctggagagcaaccccgtgatgatcgatgccaaggaagtgagcgccgcccaccgggccagatacttctggggcaatctgcctggcatgaacagacccctggccagcaccgtgaacgacaagctggagctgcaggagtgcctggagcacggccggatcgccaagttcagcaaggtgagaaccatcaccacccgaagcaacagcatcaaacaaggcaaggaccagcactttcctgtgttcatgaacgagaaggaggacatcctgtggtgtaccgagatggagagagtgttcgggttcccagtccactacacagatgtcagcaacatgtctagactggccagacagagactgctgggaagaagctggtccgtccctgtgatcagacacctgttcgcccctctgaaggagtacttcgcctgcgtgagcagcggcaacagcaacgccaacagccggggccccagcttctctagcggcctggtgccactgtccctgagagggagccacatgggccccatggagatctacaaaaccgtgagcgcctggaagcggcagcctgtgcgcgtgctgagcctgtttcggaatatcgataaagtcctgaaaagcctgggattcctggagagcggctctggctccggcggtggcaccctgaagtacgtggaggatgtgacaaacgtggtcagacgggatgtggagaagtggggccccttcgatctggtgtacggcagcacccaacccctgggcagctcttgtgaccggtgccctggctggtacatgtttcagttccaccggatcctgcagtacgccctgccgagacaggagtcccagcggccattcttttggattttcatggacaacttgctgctgaccgaggatgaccaggaaactaccactcggttcctgcagaccgaagccgtgaccctgcaggacgtgagaggccgggactaccagaacgccatgcgggtgtggtccaacatccctggactgaaaagcaagcacgcacctctgacccctaaagaagaggagtacctgcaggcccaggtgcggagcagaagcaagctggacgcccctaaggtggatctgctggtgaagaattgcctcctgcccctgagagagtacttcaagtatttcagccagaatagtctgcccctgggcggcccaagcagcggcgcccctcctcccagcggcggcagcccagccggctccccaacctctaccgaggagggcacctctgagtccgccacccccgagagcggccctggcacctccaccgagcccagcgagggcagcgcacccggcagccctgccggcagccccacctccacagaggagggaaccagcaccgagcccagcgaaggcagcgccccaggcaccagcaccgagcctagtgagggcggctctggcggcggcagcgcccaggagattaaacggatcaacaagatcagaagaagacttgtgaaagacagcaacaccaagaaggccggcaagacaggccccatgaaaaccctgctggttagagtgatgacacccgatctgagagagcggctggaaaacctgagaaagaagcctgaaaatatcccccagcccatcagcaatacatctagagccaacctgaataagctgctgaccgattacaccgaaatgaagaaggcgatcctgcatgtgtactgggaagagttccagaaggaccctgtgggcctgatgagccgggtggcccagcctgccagcaagaagatcgatcagaacaagctgaaacctgagatggacgagaagggcaacctgaccaccgccggctttgcctgctctcagtgtggccagcccctgttcgtgtacaagctggagcaggtgtctgagaagggcaaggcttacaccaactacttcggacggtgcaatgtggccgagcacgaaaagctgatcctgctggcccagctgaagcccgagaaggatagcgacgaagccgtgacatatagcctgggaaagtttgggcagagggccctggatttctacagcattcatgtgaccaaggagtccacccaccccgtgaagcccctggcccagatcgccggaaacagatacgcctccggacctgtgggaaaggccctgagcgacgcatgtatgggcacaatcgcctccttcctgtctaagtaccaggacatcatcatcgaacaccagaaggtggtgaagggcaaccagaagagactggagagcctgcgggagctggccggcaaggaaaacctggaataccctagcgtgaccctgccacctcagcctcacaccaaggagggcgttgatgcctacaacgaagtgatcgcccgggtgcgaatgtgggtgaacctgaacctgtggcagaagctgaagctaagcagagatgatgccaagcctctgctgagactgaagggattcccttcctttcctctggtcgagagacaggccaacgaagtggactggtgggacatggtgtgtaacgtgaagaagctgatcaacgagaaaaaggaggatggcaaggtgttttggcagaatctggctggctacaagagacaggaagccctgagaccatacctgagcagcgaggaagatcggaagaagggaaagaaattcgctcggtaccagctgggcgacctgctgctgcacctggaaaagaagcacggcgaggactggggaaaggtgtacgacgaggcctgggagcggattgacaagaaagtggaaggcctgagcaagcacatcaagctggaagaggaacggagaagcgaggacgcccagagcaaggccgccctgaccgactggctgcgggctaaggccagcttcgtgatcgagggcctgaaggaggccgacaaggacgagttctgcagatgcgagctgaagctgcagaagtggtacggggacctgcggggaaagcccttcgccatcgaagccgagaacagcatcctggacatcagcggcttcagcaagcagtacaactgtgccttcatctggcagaaggacggcgtgaagaagctgaacctgtacctgatcatcaactacttcaagggcggcaagctgcggttcaagaagatcaaacctgaagccttcgaagccaacagattctacaccgtgatcaacaaaaagagcggcgagatcgtgcccatggaggtgaacttcaacttcgacgaccccaacctgatcatcctgcctctggcctttggcaagagacagggcagagaattcatctggaacgacctgctgtccctggaaaccggcagcctgaagctggccaacggaagagtgatcgagaagacactgtacaacagaagaacccggcaggatgagcctgccctgttcgtggccctgaccttcgagcggcgggaggtcctggactcctccaatatcaaaccaatgaacctgatcggcgtggcaagaggcgaaaacatccccgccgtgatcgccctgaccgaccccgagggctgcccactgagccggtttaaggatagcctgggaaacccaacccacatcctgagaatcggcgagagctataaggagaagcagcggaccatccaggccaagaaggaggtggagcagcggagagccggcggctacagccggaagtacgccagcaaagccaagaatctggcagacgatatggtgagaaacaccgctagagatctgctgtactacgccgtgacccaggatgccatgctgatcttcgccaacctgagccggggcttcggccggcagggcaagcggaccttcatggccgagagacagtacacacggatggaggactggctgaccgccaagctggcctacgagggcctgagcaagacctacctgtccaagacactggcccagtacacctccaagacatgcagcaactgtgggtttaccatcaccagcgccgactacgacagggtgctggagaagctgaagaagacagcaacaggctggatgaccacaattaacggcaaggagctgaaggtggagggccagattacctactacaacagatacaagagacagaacgtagtcaaggacctgtccgtcgagctggatagactgagcgaagaatctgtgaacaacgacatctcctcctggacaaagggcagaagcggagaagctctgagcctcctgaagaaaagattctcccatagacccgtgcaggagaagttcgtgtgcctgaactgcggcttcgagacacacgcagccgagcaagccgccctgaacatcgccagatcctggctgttcctgcggagccaggagtacaagaaataccagacaaacaagacaaccggcaacaccgataagagagccttcgtcgagacctggcagtccttttaccggaagaagcttaaggaggtgtggaaacctgccgtgcggtctggcggatctggcggaggctccacaagcatggccttcgaggacgtggccgtgtacttcagccaggaggagtgggtgttcctggacgccgcccagagggccctgtacaggcacgtgatgctggagaacttcgccctggtggacagcatcggcctgagcatcagcaggcccagggtgatcatccagctgcagaggggcgaggagccctgggtgagcaacaggaccaacaccggccccggcaggggcaccaggaggaggcccagcctgggcagcaccagccccaagaaaaagagaaaagtctaagctgccttctgcggggcttgccttctggccatgcccttcttctctcccttgcacctgtacctcttggtctttgaataaagcctgagtaggaaggctagcaaaaaaaaaaaaaaaaaaaaaaaaaaaaaaaaaaaaaaaaaaaaaaaaaaaaaaaaaaaaaaaaaaaaaaaaaaaaaaaa

SEQ ID NO: 5882 - RNA, 5797 nt, synthetic construct
  source 1..5797: mol_type = other RNA
aggaaataagagagaaaagaagagtaagaagaaatataagagccaccatggcccctaagaagaagcgtaaagtgagccggatggaacgcctcgtctacgaggtgcggcagaagtgcagaaacatcgaggacatctgcatctcctgcggatctctgaacgtgaccctggagcacccactgttcatcggcggcatgtgccagaactgtaaaaactgttttctggagtgtgcctatcaatacgacgatgacggctaccagagctactgcaccatctgttgcggcggaagagaggtgctgatgtgtggaaataacaactgctgccggtgcttctgcgtggaatgcgtggacctgctggtgggccccggcgccgcccaggccgctattaaggaagatccttggaactgctacatgtgcggccacaagggcacatacggcctgctgagacggagagaggactggcctagcagactgcagatgttcttcgccaataaccacgaccaggagttcgacccccctaaggtgtaccctcccgtccccgccgagaagagaaagcccatccgggtcctgagcctgttcgatggcatcgccaccggtctgctggtgctgaaggacctgggcatccaggtggataggtacattgcctccgaggtgtgcgaggactccatcaccgtgggaatggtgcgtcatcagggcaagatcatgtacgtgggcgacgtgcggagcgtgacacagaagcatatccaggagtggggccctttcgacctggtgatcggcggcagcccttgcaatgacctgagcatcgtgaacccagcccggaagggcctgtacgagggaaccggcagactgttcttcgagttttacagactgctgcacgacgcccggcctaaggaaggcgacgaccggcccttcttttggctgttcgagaatgtggtggccatgggagtcagcgacaagcgggatattagccggttcctggagagcaaccccgtgatgatcgatgccaaggaagtgagcgccgcccaccgggccagatacttctggggcaatctgcctggcatgaacagacccctggccagcaccgtgaacgacaagctggagctgcaggagtgcctggagcacggccggatcgccaagttcagcaaggtgagaaccatcaccacccgaagcaacagcatcaaacaaggcaaggaccagcactttcctgtgttcatgaacgagaaggaggacatcctgtggtgtaccgagatggagagagtgttcgggttcccagtccactacacagatgtcagcaacatgtctagactggccagacagagactgctgggaagaagctggtccgtccctgtgatcagacacctgttcgcccctctgaaggagtacttcgcctgcgtgagcagcggcaacagcaacgccaacagccggggccccagcttctctagcggcctggtgccactgtccctgagagggagccacatgggccccatggagatctacaaaaccgtgagcgcctggaagcggcagcctgtgcgcgtgctgagcctgtttcggaatatcgataaagtcctgaaaagcctgggattcctggagagcggctctggctccggcggtggcaccctgaagtacgtggaggatgtgacaaacgtggtcagacgggatgtggagaagtggggccccttcgatctggtgtacggcagcacccaacccctgggcagctcttgtgaccggtgccctggctggtacatgtttcagttccaccggatcctgcagtacgccctgccgagacaggagtcccagcggccattcttttggattttcatggacaacttgctgctgaccgaggatgaccaggaaactaccactcggttcctgcagaccgaagccgtgaccctgcaggacgtgagaggccgggactaccagaacgccatgcgggtgtggtccaacatccctggactgaaaagcaagcacgcacctctgacccctaaagaagaggagtacctgcaggcccaggtgcggagcagaagcaagctggacgcccctaaggtggatctgctggtgaagaattgcctcctgcccctgagagagtacttcaagtatttcagccagaatagtctgcccctgggcggcccaagcagcggcgcccctcctcccagcggcggcagcccagccggctccccaacctctaccgaggagggcacctctgagtccgccacccccgagagcggccctggcacctccaccgagcccagcgagggcagcgcacccggcagccctgccggcagccccacctccacagaggagggaaccagcaccgagcccagcgaaggcagcgccccaggcaccagcaccgagcctagtgagggcggctctggcggcggcagcgcccaggagattaaacggatcaacaagatcagaagaagacttgtgaaagacagcaacaccaagaaggccggcaagacaggccccatgaaaaccctgctggttagagtgatgacacccgatctgagagagcggctggaaaacctgagaaagaagcctgaaaatatcccccagcccatcagcaatacatctagagccaacctgaataagctgctgaccgattacaccgaaatgaagaaggcgatcctgcatgtgtactgggaagagttccagaaggaccctgtgggcctgatgagccgggtggcccagcctgccagcaagaagatcgatcagaacaagctgaaacctgagatggacgagaagggcaacctgaccaccgccggctttgcctgctctcagtgtggccagcccctgttcgtgtacaagctggagcaggtgtctgagaagggcaaggcttacaccaactacttcggacggtgcaatgtggccgagcacgaaaagctgatcctgctggcccagctgaagcccgagaaggatagcgacgaagccgtgacatatagcctgggaaagtttgggcagagggccctggatttctacagcattcatgtgaccaaggagtccacccaccccgtgaagcccctggcccagatcgccggaaacagatacgcctccggacctgtgggaaaggccctgagcgacgcatgtatgggcacaatcgcctccttcctgtctaagtaccaggacatcatcatcgaacaccagaaggtggtgaagggcaaccagaagagactggagagcctgcgggagctggccggcaaggaaaacctggaataccctagcgtgaccctgccacctcagcctcacaccaaggagggcgttgatgcctacaacgaagtgatcgcccgggtgcgaatgtgggtgaacctgaacctgtggcagaagctgaagctaagcagagatgatgccaagcctctgctgagactgaagggattcccttcctttcctctggtcgagagacaggccaacgaagtggactggtgggacatggtgtgtaacgtgaagaagctgatcaacgagaaaaaggaggatggcaaggtgttttggcagaatctggctggctacaagagacaggaagccctgagaccatacctgagcagcgaggaagatcggaagaagggaaagaaattcgctcggtaccagctgggcgacctgctgctgcacctggaaaagaagcacggcgaggactggggaaaggtgtacgacgaggcctgggagcggattgacaagaaagtggaaggcctgagcaagcacatcaagctggaagaggaacggagaagcgaggacgcccagagcaaggccgccctgaccgactggctgcgggctaaggccagcttcgtgatcgagggcctgaaggaggccgacaaggacgagttctgcagatgcgagctgaagctgcagaagtggtacggggacctgcggggaaagcccttcgccatcgaagccgagaacagcatcctggacatcagcggcttcagcaagcagtacaactgtgccttcatctggcagaaggacggcgtgaagaagctgaacctgtacctgatcatcaactacttcaagggcggcaagctgcggttcaagaagatcaaacctgaagccttcgaagccaacagattctacaccgtgatcaacaaaaagagcggcgagatcgtgcccatggaggtgaacttcaacttcgacgaccccaacctgatcatcctgcctctggcctttggcaagagacagggcagagaattcatctggaacgacctgctgtccctggaaaccggcagcctgaagctggccaacggaagagtgatcgagaagacactgtacaacagaagaacccggcaggatgagcctgccctgttcgtggccctgaccttcgagcggcgggaggtcctggactcctccaatatcaaaccaatgaacctgatcggcgtggcaagaggcgaaaacatccccgccgtgatcgccctgaccgaccccgagggctgcccactgagccggtttaaggatagcctgggaaacccaacccacatcctgagaatcggcgagagctataaggagaagcagcggaccatccaggccaagaaggaggtggagcagcggagagccggcggctacagccggaagtacgccagcaaagccaagaatctggcagacgatatggtgagaaacaccgctagagatctgctgtactacgccgtgacccaggatgccatgctgatcttcgccaacctgagccggggcttcggccggcagggcaagcggaccttcatggccgagagacagtacacacggatggaggactggctgaccgccaagctggcctacgagggcctgagcaagacctacctgtccaagacactggcccagtacacctccaagacatgcagcaactgtgggtttaccatcaccagcgccgactacgacagggtgctggagaagctgaagaagacagcaacaggctggatgaccacaattaacggcaaggagctgaaggtggagggccagattacctactacaacagatacaagagacagaacgtagtcaaggacctgtccgtcgagctggatagactgagcgaagaatctgtgaacaacgacatctcctcctggacaaagggcagaagcggagaagctctgagcctcctgaagaaaagattctcccatagacccgtgcaggagaagttcgtgtgcctgaactgcggcttcgagacacacgcagccgagcaagccgccctgaacatcgccagatcctggctgttcctgcggagccaggagtacaagaaataccagacaaacaagacaaccggcaacaccgataagagagccttcgtcgagacctggcagtccttttaccggaagaagcttaaggaggtgtggaaacctgccgtgcggtctggcggatctggcggaggctccacaagcgcccacggcagcgtgatgttcaacgacgtgagcatcgtgttcagccaggaggagtgggagtacctggacctggagcagagggacctgtacagggacgtgatgctggagaactacagcaacctggtgagcctgggctgcttcatcagcaagcccgacgtgatcagcctgctggagcagggcaaggagccctggaaggtggtgaggaagggcaggaggcagtaccccgacctggagaccaggtacaccagccccaagaaaaagagaaaagtctaagctgccttctgcggggcttgccttctggccatgcccttcttctctcccttgcacctgtacctcttggtctttgaataaagcctgagtaggaaggctagcaaaaaaaaaaaaaaaaaaaaaaaaaaaaaaaaaaaaaaaaaaaaaaaaaaaaaaaaaaaaaaaaaaaaaaaaaaaaaaaa

SEQ ID NO: 5883 - RNA, 5797 nt, synthetic construct
  source 1..5797: mol_type = other RNA
aggaaataagagagaaaagaagagtaagaagaaatataagagccaccatggcccctaagaagaagcgtaaagtgagccggatggaacgcctcgtctacgaggtgcggcagaagtgcagaaacatcgaggacatctgcatctcctgcggatctctgaacgtgaccctggagcacccactgttcatcggcggcatgtgccagaactgtaaaaactgttttctggagtgtgcctatcaatacgacgatgacggctaccagagctactgcaccatctgttgcggcggaagagaggtgctgatgtgtggaaataacaactgctgccggtgcttctgcgtggaatgcgtggacctgctggtgggccccggcgccgcccaggccgctattaaggaagatccttggaactgctacatgtgcggccacaagggcacatacggcctgctgagacggagagaggactggcctagcagactgcagatgttcttcgccaataaccacgaccaggagttcgacccccctaaggtgtaccctcccgtccccgccgagaagagaaagcccatccgggtcctgagcctgttcgatggcatcgccaccggtctgctggtgctgaaggacctgggcatccaggtggataggtacattgcctccgaggtgtgcgaggactccatcaccgtgggaatggtgcgtcatcagggcaagatcatgtacgtgggcgacgtgcggagcgtgacacagaagcatatccaggagtggggccctttcgacctggtgatcggcggcagcccttgcaatgacctgagcatcgtgaacccagcccggaagggcctgtacgagggaaccggcagactgttcttcgagttttacagactgctgcacgacgcccggcctaaggaaggcgacgaccggcccttcttttggctgttcgagaatgtggtggccatgggagtcagcgacaagcgggatattagccggttcctggagagcaaccccgtgatgatcgatgccaaggaagtgagcgccgcccaccgggccagatacttctggggcaatctgcctggcatgaacagacccctggccagcaccgtgaacgacaagctggagctgcaggagtgcctggagcacggccggatcgccaagttcagcaaggtgagaaccatcaccacccgaagcaacagcatcaaacaaggcaaggaccagcactttcctgtgttcatgaacgagaaggaggacatcctgtggtgtaccgagatggagagagtgttcgggttcccagtccactacacagatgtcagcaacatgtctagactggccagacagagactgctgggaagaagctggtccgtccctgtgatcagacacctgttcgcccctctgaaggagtacttcgcctgcgtgagcagcggcaacagcaacgccaacagccggggccccagcttctctagcggcctggtgccactgtccctgagagggagccacatgggccccatggagatctacaaaaccgtgagcgcctggaagcggcagcctgtgcgcgtgctgagcctgtttcggaatatcgataaagtcctgaaaagcctgggattcctggagagcggctctggctccggcggtggcaccctgaagtacgtggaggatgtgacaaacgtggtcagacgggatgtggagaagtggggccccttcgatctggtgtacggcagcacccaacccctgggcagctcttgtgaccggtgccctggctggtacatgtttcagttccaccggatcctgcagtacgccctgccgagacaggagtcccagcggccattcttttggattttcatggacaacttgctgctgaccgaggatgaccaggaaactaccactcggttcctgcagaccgaagccgtgaccctgcaggacgtgagaggccgggactaccagaacgccatgcgggtgtggtccaacatccctggactgaaaagcaagcacgcacctctgacccctaaagaagaggagtacctgcaggcccaggtgcggagcagaagcaagctggacgcccctaaggtggatctgctggtgaagaattgcctcctgcccctgagagagtacttcaagtatttcagccagaatagtctgcccctgggcggcccaagcagcggcgcccctcctcccagcggcggcagcccagccggctccccaacctctaccgaggagggcacctctgagtccgccacccccgagagcggccctggcacctccaccgagcccagcgagggcagcgcacccggcagccctgccggcagccccacctccacagaggagggaaccagcaccgagcccagcgaaggcagcgccccaggcaccagcaccgagcctagtgagggcggctctggcggcggcagcgcccaggagattaaacggatcaacaagatcagaagaagacttgtgaaagacagcaacaccaagaaggccggcaagacaggccccatgaaaaccctgctggttagagtgatgacacccgatctgagagagcggctggaaaacctgagaaagaagcctgaaaatatcccccagcccatcagcaatacatctagagccaacctgaataagctgctgaccgattacaccgaaatgaagaaggcgatcctgcatgtgtactgggaagagttccagaaggaccctgtgggcctgatgagccgggtggcccagcctgccagcaagaagatcgatcagaacaagctgaaacctgagatggacgagaagggcaacctgaccaccgccggctttgcctgctctcagtgtggccagcccctgttcgtgtacaagctggagcaggtgtctgagaagggcaaggcttacaccaactacttcggacggtgcaatgtggccgagcacgaaaagctgatcctgctggcccagctgaagcccgagaaggatagcgacgaagccgtgacatatagcctgggaaagtttgggcagagggccctggatttctacagcattcatgtgaccaaggagtccacccaccccgtgaagcccctggcccagatcgccggaaacagatacgcctccggacctgtgggaaaggccctgagcgacgcatgtatgggcacaatcgcctccttcctgtctaagtaccaggacatcatcatcgaacaccagaaggtggtgaagggcaaccagaagagactggagagcctgcgggagctggccggcaaggaaaacctggaataccctagcgtgaccctgccacctcagcctcacaccaaggagggcgttgatgcctacaacgaagtgatcgcccgggtgcgaatgtgggtgaacctgaacctgtggcagaagctgaagctaagcagagatgatgccaagcctctgctgagactgaagggattcccttcctttcctctggtcgagagacaggccaacgaagtggactggtgggacatggtgtgtaacgtgaagaagctgatcaacgagaaaaaggaggatggcaaggtgttttggcagaatctggctggctacaagagacaggaagccctgagaccatacctgagcagcgaggaagatcggaagaagggaaagaaattcgctcggtaccagctgggcgacctgctgctgcacctggaaaagaagcacggcgaggactggggaaaggtgtacgacgaggcctgggagcggattgacaagaaagtggaaggcctgagcaagcacatcaagctggaagaggaacggagaagcgaggacgcccagagcaaggccgccctgaccgactggctgcgggctaaggccagcttcgtgatcgagggcctgaaggaggccgacaaggacgagttctgcagatgcgagctgaagctgcagaagtggtacggggacctgcggggaaagcccttcgccatcgaagccgagaacagcatcctggacatcagcggcttcagcaagcagtacaactgtgccttcatctggcagaaggacggcgtgaagaagctgaacctgtacctgatcatcaactacttcaagggcggcaagctgcggttcaagaagatcaaacctgaagccttcgaagccaacagattctacaccgtgatcaacaaaaagagcggcgagatcgtgcccatggaggtgaacttcaacttcgacgaccccaacctgatcatcctgcctctggcctttggcaagagacagggcagagaattcatctggaacgacctgctgtccctggaaaccggcagcctgaagctggccaacggaagagtgatcgagaagacactgtacaacagaagaacccggcaggatgagcctgccctgttcgtggccctgaccttcgagcggcgggaggtcctggactcctccaatatcaaaccaatgaacctgatcggcgtggcaagaggcgaaaacatccccgccgtgatcgccctgaccgaccccgagggctgcccactgagccggtttaaggatagcctgggaaacccaacccacatcctgagaatcggcgagagctataaggagaagcagcggaccatccaggccaagaaggaggtggagcagcggagagccggcggctacagccggaagtacgccagcaaagccaagaatctggcagacgatatggtgagaaacaccgctagagatctgctgtactacgccgtgacccaggatgccatgctgatcttcgccaacctgagccggggcttcggccggcagggcaagcggaccttcatggccgagagacagtacacacggatggaggactggctgaccgccaagctggcctacgagggcctgagcaagacctacctgtccaagacactggcccagtacacctccaagacatgcagcaactgtgggtttaccatcaccagcgccgactacgacagggtgctggagaagctgaagaagacagcaacaggctggatgaccacaattaacggcaaggagctgaaggtggagggccagattacctactacaacagatacaagagacagaacgtagtcaaggacctgtccgtcgagctggatagactgagcgaagaatctgtgaacaacgacatctcctcctggacaaagggcagaagcggagaagctctgagcctcctgaagaaaagattctcccatagacccgtgcaggagaagttcgtgtgcctgaactgcggcttcgagacacacgcagccgagcaagccgccctgaacatcgccagatcctggctgttcctgcggagccaggagtacaagaaataccagacaaacaagacaaccggcaacaccgataagagagccttcgtcgagacctggcagtccttttaccggaagaagcttaaggaggtgtggaaacctgccgtgcggtctggcggatctggcggaggctccacaagcgcccacggcagcgtgatgttcaacgacgtgagcatcgtgttcagccaggaggagtgggagtacctggacctggagcagagggacctgtacagggacgtgatgctggagaactacagcaacctggtgagcctgggctgcttcatcagcaagcccgacgtgatcagcctgctggagcagggcaaggagccctggaaggtggtgaggaagggcaggaggaggtaccccgacctggagaccaggtacaccagccccaagaaaaagagaaaagtctaagctgccttctgcggggcttgccttctggccatgcccttcttctctcccttgcacctgtacctcttggtctttgaataaagcctgagtaggaaggctagcaaaaaaaaaaaaaaaaaaaaaaaaaaaaaaaaaaaaaaaaaaaaaaaaaaaaaaaaaaaaaaaaaaaaaaaaaaaaaaaa

SEQ ID NO: 5884 - RNA, 5797 nt, synthetic construct
  source 1..5797: mol_type = other RNA
aggaaataagagagaaaagaagagtaagaagaaatataagagccaccatggcccctaagaagaagcgtaaagtgagccggatggaacgcctcgtctacgaggtgcggcagaagtgcagaaacatcgaggacatctgcatctcctgcggatctctgaacgtgaccctggagcacccactgttcatcggcggcatgtgccagaactgtaaaaactgttttctggagtgtgcctatcaatacgacgatgacggctaccagagctactgcaccatctgttgcggcggaagagaggtgctgatgtgtggaaataacaactgctgccggtgcttctgcgtggaatgcgtggacctgctggtgggccccggcgccgcccaggccgctattaaggaagatccttggaactgctacatgtgcggccacaagggcacatacggcctgctgagacggagagaggactggcctagcagactgcagatgttcttcgccaataaccacgaccaggagttcgacccccctaaggtgtaccctcccgtccccgccgagaagagaaagcccatccgggtcctgagcctgttcgatggcatcgccaccggtctgctggtgctgaaggacctgggcatccaggtggataggtacattgcctccgaggtgtgcgaggactccatcaccgtgggaatggtgcgtcatcagggcaagatcatgtacgtgggcgacgtgcggagcgtgacacagaagcatatccaggagtggggccctttcgacctggtgatcggcggcagcccttgcaatgacctgagcatcgtgaacccagcccggaagggcctgtacgagggaaccggcagactgttcttcgagttttacagactgctgcacgacgcccggcctaaggaaggcgacgaccggcccttcttttggctgttcgagaatgtggtggccatgggagtcagcgacaagcgggatattagccggttcctggagagcaaccccgtgatgatcgatgccaaggaagtgagcgccgcccaccgggccagatacttctggggcaatctgcctggcatgaacagacccctggccagcaccgtgaacgacaagctggagctgcaggagtgcctggagcacggccggatcgccaagttcagcaaggtgagaaccatcaccacccgaagcaacagcatcaaacaaggcaaggaccagcactttcctgtgttcatgaacgagaaggaggacatcctgtggtgtaccgagatggagagagtgttcgggttcccagtccactacacagatgtcagcaacatgtctagactggccagacagagactgctgggaagaagctggtccgtccctgtgatcagacacctgttcgcccctctgaaggagtacttcgcctgcgtgagcagcggcaacagcaacgccaacagccggggccccagcttctctagcggcctggtgccactgtccctgagagggagccacatgggccccatggagatctacaaaaccgtgagcgcctggaagcggcagcctgtgcgcgtgctgagcctgtttcggaatatcgataaagtcctgaaaagcctgggattcctggagagcggctctggctccggcggtggcaccctgaagtacgtggaggatgtgacaaacgtggtcagacgggatgtggagaagtggggccccttcgatctggtgtacggcagcacccaacccctgggcagctcttgtgaccggtgccctggctggtacatgtttcagttccaccggatcctgcagtacgccctgccgagacaggagtcccagcggccattcttttggattttcatggacaacttgctgctgaccgaggatgaccaggaaactaccactcggttcctgcagaccgaagccgtgaccctgcaggacgtgagaggccgggactaccagaacgccatgcgggtgtggtccaacatccctggactgaaaagcaagcacgcacctctgacccctaaagaagaggagtacctgcaggcccaggtgcggagcagaagcaagctggacgcccctaaggtggatctgctggtgaagaattgcctcctgcccctgagagagtacttcaagtatttcagccagaatagtctgcccctgggcggcccaagcagcggcgcccctcctcccagcggcggcagcccagccggctccccaacctctaccgaggagggcacctctgagtccgccacccccgagagcggccctggcacctccaccgagcccagcgagggcagcgcacccggcagccctgccggcagccccacctccacagaggagggaaccagcaccgagcccagcgaaggcagcgccccaggcaccagcaccgagcctagtgagggcggctctggcggcggcagcgcccaggagattaaacggatcaacaagatcagaagaagacttgtgaaagacagcaacaccaagaaggccggcaagacaggccccatgaaaaccctgctggttagagtgatgacacccgatctgagagagcggctggaaaacctgagaaagaagcctgaaaatatcccccagcccatcagcaatacatctagagccaacctgaataagctgctgaccgattacaccgaaatgaagaaggcgatcctgcatgtgtactgggaagagttccagaaggaccctgtgggcctgatgagccgggtggcccagcctgccagcaagaagatcgatcagaacaagctgaaacctgagatggacgagaagggcaacctgaccaccgccggctttgcctgctctcagtgtggccagcccctgttcgtgtacaagctggagcaggtgtctgagaagggcaaggcttacaccaactacttcggacggtgcaatgtggccgagcacgaaaagctgatcctgctggcccagctgaagcccgagaaggatagcgacgaagccgtgacatatagcctgggaaagtttgggcagagggccctggatttctacagcattcatgtgaccaaggagtccacccaccccgtgaagcccctggcccagatcgccggaaacagatacgcctccggacctgtgggaaaggccctgagcgacgcatgtatgggcacaatcgcctccttcctgtctaagtaccaggacatcatcatcgaacaccagaaggtggtgaagggcaaccagaagagactggagagcctgcgggagctggccggcaaggaaaacctggaataccctagcgtgaccctgccacctcagcctcacaccaaggagggcgttgatgcctacaacgaagtgatcgcccgggtgcgaatgtgggtgaacctgaacctgtggcagaagctgaagctaagcagagatgatgccaagcctctgctgagactgaagggattcccttcctttcctctggtcgagagacaggccaacgaagtggactggtgggacatggtgtgtaacgtgaagaagctgatcaacgagaaaaaggaggatggcaaggtgttttggcagaatctggctggctacaagagacaggaagccctgagaccatacctgagcagcgaggaagatcggaagaagggaaagaaattcgctcggtaccagctgggcgacctgctgctgcacctggaaaagaagcacggcgaggactggggaaaggtgtacgacgaggcctgggagcggattgacaagaaagtggaaggcctgagcaagcacatcaagctggaagaggaacggagaagcgaggacgcccagagcaaggccgccctgaccgactggctgcgggctaaggccagcttcgtgatcgagggcctgaaggaggccgacaaggacgagttctgcagatgcgagctgaagctgcagaagtggtacggggacctgcggggaaagcccttcgccatcgaagccgagaacagcatcctggacatcagcggcttcagcaagcagtacaactgtgccttcatctggcagaaggacggcgtgaagaagctgaacctgtacctgatcatcaactacttcaagggcggcaagctgcggttcaagaagatcaaacctgaagccttcgaagccaacagattctacaccgtgatcaacaaaaagagcggcgagatcgtgcccatggaggtgaacttcaacttcgacgaccccaacctgatcatcctgcctctggcctttggcaagagacagggcagagaattcatctggaacgacctgctgtccctggaaaccggcagcctgaagctggccaacggaagagtgatcgagaagacactgtacaacagaagaacccggcaggatgagcctgccctgttcgtggccctgaccttcgagcggcgggaggtcctggactcctccaatatcaaaccaatgaacctgatcggcgtggcaagaggcgaaaacatccccgccgtgatcgccctgaccgaccccgagggctgcccactgagccggtttaaggatagcctgggaaacccaacccacatcctgagaatcggcgagagctataaggagaagcagcggaccatccaggccaagaaggaggtggagcagcggagagccggcggctacagccggaagtacgccagcaaagccaagaatctggcagacgatatggtgagaaacaccgctagagatctgctgtactacgccgtgacccaggatgccatgctgatcttcgccaacctgagccggggcttcggccggcagggcaagcggaccttcatggccgagagacagtacacacggatggaggactggctgaccgccaagctggcctacgagggcctgagcaagacctacctgtccaagacactggcccagtacacctccaagacatgcagcaactgtgggtttaccatcaccagcgccgactacgacagggtgctggagaagctgaagaagacagcaacaggctggatgaccacaattaacggcaaggagctgaaggtggagggccagattacctactacaacagatacaagagacagaacgtagtcaaggacctgtccgtcgagctggatagactgagcgaagaatctgtgaacaacgacatctcctcctggacaaagggcagaagcggagaagctctgagcctcctgaagaaaagattctcccatagacccgtgcaggagaagttcgtgtgcctgaactgcggcttcgagacacacgcagccgagcaagccgccctgaacatcgccagatcctggctgttcctgcggagccaggagtacaagaaataccagacaaacaagacaaccggcaacaccgataagagagccttcgtcgagacctggcagtccttttaccggaagaagcttaaggaggtgtggaaacctgccgtgcggtctggcggatctggcggaggctccacaagcgcccaccacctggtgatgttcagggacgtggccgtggacttcagccaggaggagtgggagtgcctgaacccctaccagaggaacctgtacagggacgtgatcctggagaactacagcaacctggtgagcgtggccggctgcagcatcagcaagcccgacgtgatcaccctgctggagcagggcaaggagccctggatggtggtgagggacgagaggaggaggagcctggacctggagagcaggaccagccccaagaaaaagagaaaagtctaagctgccttctgcggggcttgccttctggccatgcccttcttctctcccttgcacctgtacctcttggtctttgaataaagcctgagtaggaaggctagcaaaaaaaaaaaaaaaaaaaaaaaaaaaaaaaaaaaaaaaaaaaaaaaaaaaaaaaaaaaaaaaaaaaaaaaaaaaaaaaa

SEQ ID NO: 5885 - RNA, 5797 nt, synthetic construct
  source 1..5797: mol_type = other RNA
aggaaataagagagaaaagaagagtaagaagaaatataagagccaccatggcccctaagaagaagcgtaaagtgagccggatggaacgcctcgtctacgaggtgcggcagaagtgcagaaacatcgaggacatctgcatctcctgcggatctctgaacgtgaccctggagcacccactgttcatcggcggcatgtgccagaactgtaaaaactgttttctggagtgtgcctatcaatacgacgatgacggctaccagagctactgcaccatctgttgcggcggaagagaggtgctgatgtgtggaaataacaactgctgccggtgcttctgcgtggaatgcgtggacctgctggtgggccccggcgccgcccaggccgctattaaggaagatccttggaactgctacatgtgcggccacaagggcacatacggcctgctgagacggagagaggactggcctagcagactgcagatgttcttcgccaataaccacgaccaggagttcgacccccctaaggtgtaccctcccgtccccgccgagaagagaaagcccatccgggtcctgagcctgttcgatggcatcgccaccggtctgctggtgctgaaggacctgggcatccaggtggataggtacattgcctccgaggtgtgcgaggactccatcaccgtgggaatggtgcgtcatcagggcaagatcatgtacgtgggcgacgtgcggagcgtgacacagaagcatatccaggagtggggccctttcgacctggtgatcggcggcagcccttgcaatgacctgagcatcgtgaacccagcccggaagggcctgtacgagggaaccggcagactgttcttcgagttttacagactgctgcacgacgcccggcctaaggaaggcgacgaccggcccttcttttggctgttcgagaatgtggtggccatgggagtcagcgacaagcgggatattagccggttcctggagagcaaccccgtgatgatcgatgccaaggaagtgagcgccgcccaccgggccagatacttctggggcaatctgcctggcatgaacagacccctggccagcaccgtgaacgacaagctggagctgcaggagtgcctggagcacggccggatcgccaagttcagcaaggtgagaaccatcaccacccgaagcaacagcatcaaacaaggcaaggaccagcactttcctgtgttcatgaacgagaaggaggacatcctgtggtgtaccgagatggagagagtgttcgggttcccagtccactacacagatgtcagcaacatgtctagactggccagacagagactgctgggaagaagctggtccgtccctgtgatcagacacctgttcgcccctctgaaggagtacttcgcctgcgtgagcagcggcaacagcaacgccaacagccggggccccagcttctctagcggcctggtgccactgtccctgagagggagccacatgggccccatggagatctacaaaaccgtgagcgcctggaagcggcagcctgtgcgcgtgctgagcctgtttcggaatatcgataaagtcctgaaaagcctgggattcctggagagcggctctggctccggcggtggcaccctgaagtacgtggaggatgtgacaaacgtggtcagacgggatgtggagaagtggggccccttcgatctggtgtacggcagcacccaacccctgggcagctcttgtgaccggtgccctggctggtacatgtttcagttccaccggatcctgcagtacgccctgccgagacaggagtcccagcggccattcttttggattttcatggacaacttgctgctgaccgaggatgaccaggaaactaccactcggttcctgcagaccgaagccgtgaccctgcaggacgtgagaggccgggactaccagaacgccatgcgggtgtggtccaacatccctggactgaaaagcaagcacgcacctctgacccctaaagaagaggagtacctgcaggcccaggtgcggagcagaagcaagctggacgcccctaaggtggatctgctggtgaagaattgcctcctgcccctgagagagtacttcaagtatttcagccagaatagtctgcccctgggcggcccaagcagcggcgcccctcctcccagcggcggcagcccagccggctccccaacctctaccgaggagggcacctctgagtccgccacccccgagagcggccctggcacctccaccgagcccagcgagggcagcgcacccggcagccctgccggcagccccacctccacagaggagggaaccagcaccgagcccagcgaaggcagcgccccaggcaccagcaccgagcctagtgagggcggctctggcggcggcagcgcccaggagattaaacggatcaacaagatcagaagaagacttgtgaaagacagcaacaccaagaaggccggcaagacaggccccatgaaaaccctgctggttagagtgatgacacccgatctgagagagcggctggaaaacctgagaaagaagcctgaaaatatcccccagcccatcagcaatacatctagagccaacctgaataagctgctgaccgattacaccgaaatgaagaaggcgatcctgcatgtgtactgggaagagttccagaaggaccctgtgggcctgatgagccgggtggcccagcctgccagcaagaagatcgatcagaacaagctgaaacctgagatggacgagaagggcaacctgaccaccgccggctttgcctgctctcagtgtggccagcccctgttcgtgtacaagctggagcaggtgtctgagaagggcaaggcttacaccaactacttcggacggtgcaatgtggccgagcacgaaaagctgatcctgctggcccagctgaagcccgagaaggatagcgacgaagccgtgacatatagcctgggaaagtttgggcagagggccctggatttctacagcattcatgtgaccaaggagtccacccaccccgtgaagcccctggcccagatcgccggaaacagatacgcctccggacctgtgggaaaggccctgagcgacgcatgtatgggcacaatcgcctccttcctgtctaagtaccaggacatcatcatcgaacaccagaaggtggtgaagggcaaccagaagagactggagagcctgcgggagctggccggcaaggaaaacctggaataccctagcgtgaccctgccacctcagcctcacaccaaggagggcgttgatgcctacaacgaagtgatcgcccgggtgcgaatgtgggtgaacctgaacctgtggcagaagctgaagctaagcagagatgatgccaagcctctgctgagactgaagggattcccttcctttcctctggtcgagagacaggccaacgaagtggactggtgggacatggtgtgtaacgtgaagaagctgatcaacgagaaaaaggaggatggcaaggtgttttggcagaatctggctggctacaagagacaggaagccctgagaccatacctgagcagcgaggaagatcggaagaagggaaagaaattcgctcggtaccagctgggcgacctgctgctgcacctggaaaagaagcacggcgaggactggggaaaggtgtacgacgaggcctgggagcggattgacaagaaagtggaaggcctgagcaagcacatcaagctggaagaggaacggagaagcgaggacgcccagagcaaggccgccctgaccgactggctgcgggctaaggccagcttcgtgatcgagggcctgaaggaggccgacaaggacgagttctgcagatgcgagctgaagctgcagaagtggtacggggacctgcggggaaagcccttcgccatcgaagccgagaacagcatcctggacatcagcggcttcagcaagcagtacaactgtgccttcatctggcagaaggacggcgtgaagaagctgaacctgtacctgatcatcaactacttcaagggcggcaagctgcggttcaagaagatcaaacctgaagccttcgaagccaacagattctacaccgtgatcaacaaaaagagcggcgagatcgtgcccatggaggtgaacttcaacttcgacgaccccaacctgatcatcctgcctctggcctttggcaagagacagggcagagaattcatctggaacgacctgctgtccctggaaaccggcagcctgaagctggccaacggaagagtgatcgagaagacactgtacaacagaagaacccggcaggatgagcctgccctgttcgtggccctgaccttcgagcggcgggaggtcctggactcctccaatatcaaaccaatgaacctgatcggcgtggcaagaggcgaaaacatccccgccgtgatcgccctgaccgaccccgagggctgcccactgagccggtttaaggatagcctgggaaacccaacccacatcctgagaatcggcgagagctataaggagaagcagcggaccatccaggccaagaaggaggtggagcagcggagagccggcggctacagccggaagtacgccagcaaagccaagaatctggcagacgatatggtgagaaacaccgctagagatctgctgtactacgccgtgacccaggatgccatgctgatcttcgccaacctgagccggggcttcggccggcagggcaagcggaccttcatggccgagagacagtacacacggatggaggactggctgaccgccaagctggcctacgagggcctgagcaagacctacctgtccaagacactggcccagtacacctccaagacatgcagcaactgtgggtttaccatcaccagcgccgactacgacagggtgctggagaagctgaagaagacagcaacaggctggatgaccacaattaacggcaaggagctgaaggtggagggccagattacctactacaacagatacaagagacagaacgtagtcaaggacctgtccgtcgagctggatagactgagcgaagaatctgtgaacaacgacatctcctcctggacaaagggcagaagcggagaagctctgagcctcctgaagaaaagattctcccatagacccgtgcaggagaagttcgtgtgcctgaactgcggcttcgagacacacgcagccgagcaagccgccctgaacatcgccagatcctggctgttcctgcggagccaggagtacaagaaataccagacaaacaagacaaccggcaacaccgataagagagccttcgtcgagacctggcagtccttttaccggaagaagcttaaggaggtgtggaaacctgccgtgcggtctggcggatctggcggaggctccacaagcgcccacggcagcgtgatgttcagcgacgtgagcatcgacttcagccaggaggagtgggactacctggacctggagcagagggacctgtacagggacgtgatgctggagaactacagcaacctggtgagcctgggctgcttcgtgagcaagcccgacgtgatcagcctgctggagcagggcaaggagccctggaaggtggtgaggaagggcaggaggaggtaccccgacctggagaccaactacaccagccccaagaaaaagagaaaagtctaagctgccttctgcggggcttgccttctggccatgcccttcttctctcccttgcacctgtacctcttggtctttgaataaagcctgagtaggaaggctagcaaaaaaaaaaaaaaaaaaaaaaaaaaaaaaaaaaaaaaaaaaaaaaaaaaaaaaaaaaaaaaaaaaaaaaaaaaaaaaaa

SEQ ID NO: 5886 - RNA, 5797 nt, synthetic construct
  source 1..5797: mol_type = other RNA
aggaaataagagagaaaagaagagtaagaagaaatataagagccaccatggcccctaagaagaagcgtaaagtgagccggatggaacgcctcgtctacgaggtgcggcagaagtgcagaaacatcgaggacatctgcatctcctgcggatctctgaacgtgaccctggagcacccactgttcatcggcggcatgtgccagaactgtaaaaactgttttctggagtgtgcctatcaatacgacgatgacggctaccagagctactgcaccatctgttgcggcggaagagaggtgctgatgtgtggaaataacaactgctgccggtgcttctgcgtggaatgcgtggacctgctggtgggccccggcgccgcccaggccgctattaaggaagatccttggaactgctacatgtgcggccacaagggcacatacggcctgctgagacggagagaggactggcctagcagactgcagatgttcttcgccaataaccacgaccaggagttcgacccccctaaggtgtaccctcccgtccccgccgagaagagaaagcccatccgggtcctgagcctgttcgatggcatcgccaccggtctgctggtgctgaaggacctgggcatccaggtggataggtacattgcctccgaggtgtgcgaggactccatcaccgtgggaatggtgcgtcatcagggcaagatcatgtacgtgggcgacgtgcggagcgtgacacagaagcatatccaggagtggggccctttcgacctggtgatcggcggcagcccttgcaatgacctgagcatcgtgaacccagcccggaagggcctgtacgagggaaccggcagactgttcttcgagttttacagactgctgcacgacgcccggcctaaggaaggcgacgaccggcccttcttttggctgttcgagaatgtggtggccatgggagtcagcgacaagcgggatattagccggttcctggagagcaaccccgtgatgatcgatgccaaggaagtgagcgccgcccaccgggccagatacttctggggcaatctgcctggcatgaacagacccctggccagcaccgtgaacgacaagctggagctgcaggagtgcctggagcacggccggatcgccaagttcagcaaggtgagaaccatcaccacccgaagcaacagcatcaaacaaggcaaggaccagcactttcctgtgttcatgaacgagaaggaggacatcctgtggtgtaccgagatggagagagtgttcgggttcccagtccactacacagatgtcagcaacatgtctagactggccagacagagactgctgggaagaagctggtccgtccctgtgatcagacacctgttcgcccctctgaaggagtacttcgcctgcgtgagcagcggcaacagcaacgccaacagccggggccccagcttctctagcggcctggtgccactgtccctgagagggagccacatgggccccatggagatctacaaaaccgtgagcgcctggaagcggcagcctgtgcgcgtgctgagcctgtttcggaatatcgataaagtcctgaaaagcctgggattcctggagagcggctctggctccggcggtggcaccctgaagtacgtggaggatgtgacaaacgtggtcagacgggatgtggagaagtggggccccttcgatctggtgtacggcagcacccaacccctgggcagctcttgtgaccggtgccctggctggtacatgtttcagttccaccggatcctgcagtacgccctgccgagacaggagtcccagcggccattcttttggattttcatggacaacttgctgctgaccgaggatgaccaggaaactaccactcggttcctgcagaccgaagccgtgaccctgcaggacgtgagaggccgggactaccagaacgccatgcgggtgtggtccaacatccctggactgaaaagcaagcacgcacctctgacccctaaagaagaggagtacctgcaggcccaggtgcggagcagaagcaagctggacgcccctaaggtggatctgctggtgaagaattgcctcctgcccctgagagagtacttcaagtatttcagccagaatagtctgcccctgggcggcccaagcagcggcgcccctcctcccagcggcggcagcccagccggctccccaacctctaccgaggagggcacctctgagtccgccacccccgagagcggccctggcacctccaccgagcccagcgagggcagcgcacccggcagccctgccggcagccccacctccacagaggagggaaccagcaccgagcccagcgaaggcagcgccccaggcaccagcaccgagcctagtgagggcggctctggcggcggcagcgcccaggagattaaacggatcaacaagatcagaagaagacttgtgaaagacagcaacaccaagaaggccggcaagacaggccccatgaaaaccctgctggttagagtgatgacacccgatctgagagagcggctggaaaacctgagaaagaagcctgaaaatatcccccagcccatcagcaatacatctagagccaacctgaataagctgctgaccgattacaccgaaatgaagaaggcgatcctgcatgtgtactgggaagagttccagaaggaccctgtgggcctgatgagccgggtggcccagcctgccagcaagaagatcgatcagaacaagctgaaacctgagatggacgagaagggcaacctgaccaccgccggctttgcctgctctcagtgtggccagcccctgttcgtgtacaagctggagcaggtgtctgagaagggcaaggcttacaccaactacttcggacggtgcaatgtggccgagcacgaaaagctgatcctgctggcccagctgaagcccgagaaggatagcgacgaagccgtgacatatagcctgggaaagtttgggcagagggccctggatttctacagcattcatgtgaccaaggagtccacccaccccgtgaagcccctggcccagatcgccggaaacagatacgcctccggacctgtgggaaaggccctgagcgacgcatgtatgggcacaatcgcctccttcctgtctaagtaccaggacatcatcatcgaacaccagaaggtggtgaagggcaaccagaagagactggagagcctgcgggagctggccggcaaggaaaacctggaataccctagcgtgaccctgccacctcagcctcacaccaaggagggcgttgatgcctacaacgaagtgatcgcccgggtgcgaatgtgggtgaacctgaacctgtggcagaagctgaagctaagcagagatgatgccaagcctctgctgagactgaagggattcccttcctttcctctggtcgagagacaggccaacgaagtggactggtgggacatggtgtgtaacgtgaagaagctgatcaacgagaaaaaggaggatggcaaggtgttttggcagaatctggctggctacaagagacaggaagccctgagaccatacctgagcagcgaggaagatcggaagaagggaaagaaattcgctcggtaccagctgggcgacctgctgctgcacctggaaaagaagcacggcgaggactggggaaaggtgtacgacgaggcctgggagcggattgacaagaaagtggaaggcctgagcaagcacatcaagctggaagaggaacggagaagcgaggacgcccagagcaaggccgccctgaccgactggctgcgggctaaggccagcttcgtgatcgagggcctgaaggaggccgacaaggacgagttctgcagatgcgagctgaagctgcagaagtggtacggggacctgcggggaaagcccttcgccatcgaagccgagaacagcatcctggacatcagcggcttcagcaagcagtacaactgtgccttcatctggcagaaggacggcgtgaagaagctgaacctgtacctgatcatcaactacttcaagggcggcaagctgcggttcaagaagatcaaacctgaagccttcgaagccaacagattctacaccgtgatcaacaaaaagagcggcgagatcgtgcccatggaggtgaacttcaacttcgacgaccccaacctgatcatcctgcctctggcctttggcaagagacagggcagagaattcatctggaacgacctgctgtccctggaaaccggcagcctgaagctggccaacggaagagtgatcgagaagacactgtacaacagaagaacccggcaggatgagcctgccctgttcgtggccctgaccttcgagcggcgggaggtcctggactcctccaatatcaaaccaatgaacctgatcggcgtggcaagaggcgaaaacatccccgccgtgatcgccctgaccgaccccgagggctgcccactgagccggtttaaggatagcctgggaaacccaacccacatcctgagaatcggcgagagctataaggagaagcagcggaccatccaggccaagaaggaggtggagcagcggagagccggcggctacagccggaagtacgccagcaaagccaagaatctggcagacgatatggtgagaaacaccgctagagatctgctgtactacgccgtgacccaggatgccatgctgatcttcgccaacctgagccggggcttcggccggcagggcaagcggaccttcatggccgagagacagtacacacggatggaggactggctgaccgccaagctggcctacgagggcctgagcaagacctacctgtccaagacactggcccagtacacctccaagacatgcagcaactgtgggtttaccatcaccagcgccgactacgacagggtgctggagaagctgaagaagacagcaacaggctggatgaccacaattaacggcaaggagctgaaggtggagggccagattacctactacaacagatacaagagacagaacgtagtcaaggacctgtccgtcgagctggatagactgagcgaagaatctgtgaacaacgacatctcctcctggacaaagggcagaagcggagaagctctgagcctcctgaagaaaagattctcccatagacccgtgcaggagaagttcgtgtgcctgaactgcggcttcgagacacacgcagccgagcaagccgccctgaacatcgccagatcctggctgttcctgcggagccaggagtacaagaaataccagacaaacaagacaaccggcaacaccgataagagagccttcgtcgagacctggcagtccttttaccggaagaagcttaaggaggtgtggaaacctgccgtgcggtctggcggatctggcggaggctccacaagcttccaggtgagcgtgaccttccaggacgtggccgtggacttcagcagggacgagtggaagaggctggacgacgcccagaaggccctgtacagggacgtgatgctggagaactacgagaacctggtgagcctgggcctgcccgtgagcaagctggacgtgatcagcctgctggagaggagggaggcccccaggagggccaaggagagggtgcccagggacctgccccccgacagcatcagccagaccagccccaagaaaaagagaaaagtctaagctgccttctgcggggcttgccttctggccatgcccttcttctctcccttgcacctgtacctcttggtctttgaataaagcctgagtaggaaggctagcaaaaaaaaaaaaaaaaaaaaaaaaaaaaaaaaaaaaaaaaaaaaaaaaaaaaaaaaaaaaaaaaaaaaaaaaaaaaaaaa

SEQ ID NO: 5887 - RNA, 5797 nt, synthetic construct
  source 1..5797: mol_type = other RNA
aggaaataagagagaaaagaagagtaagaagaaatataagagccaccatggcccctaagaagaagcgtaaagtgagccggatggaacgcctcgtctacgaggtgcggcagaagtgcagaaacatcgaggacatctgcatctcctgcggatctctgaacgtgaccctggagcacccactgttcatcggcggcatgtgccagaactgtaaaaactgttttctggagtgtgcctatcaatacgacgatgacggctaccagagctactgcaccatctgttgcggcggaagagaggtgctgatgtgtggaaataacaactgctgccggtgcttctgcgtggaatgcgtggacctgctggtgggccccggcgccgcccaggccgctattaaggaagatccttggaactgctacatgtgcggccacaagggcacatacggcctgctgagacggagagaggactggcctagcagactgcagatgttcttcgccaataaccacgaccaggagttcgacccccctaaggtgtaccctcccgtccccgccgagaagagaaagcccatccgggtcctgagcctgttcgatggcatcgccaccggtctgctggtgctgaaggacctgggcatccaggtggataggtacattgcctccgaggtgtgcgaggactccatcaccgtgggaatggtgcgtcatcagggcaagatcatgtacgtgggcgacgtgcggagcgtgacacagaagcatatccaggagtggggccctttcgacctggtgatcggcggcagcccttgcaatgacctgagcatcgtgaacccagcccggaagggcctgtacgagggaaccggcagactgttcttcgagttttacagactgctgcacgacgcccggcctaaggaaggcgacgaccggcccttcttttggctgttcgagaatgtggtggccatgggagtcagcgacaagcgggatattagccggttcctggagagcaaccccgtgatgatcgatgccaaggaagtgagcgccgcccaccgggccagatacttctggggcaatctgcctggcatgaacagacccctggccagcaccgtgaacgacaagctggagctgcaggagtgcctggagcacggccggatcgccaagttcagcaaggtgagaaccatcaccacccgaagcaacagcatcaaacaaggcaaggaccagcactttcctgtgttcatgaacgagaaggaggacatcctgtggtgtaccgagatggagagagtgttcgggttcccagtccactacacagatgtcagcaacatgtctagactggccagacagagactgctgggaagaagctggtccgtccctgtgatcagacacctgttcgcccctctgaaggagtacttcgcctgcgtgagcagcggcaacagcaacgccaacagccggggccccagcttctctagcggcctggtgccactgtccctgagagggagccacatgggccccatggagatctacaaaaccgtgagcgcctggaagcggcagcctgtgcgcgtgctgagcctgtttcggaatatcgataaagtcctgaaaagcctgggattcctggagagcggctctggctccggcggtggcaccctgaagtacgtggaggatgtgacaaacgtggtcagacgggatgtggagaagtggggccccttcgatctggtgtacggcagcacccaacccctgggcagctcttgtgaccggtgccctggctggtacatgtttcagttccaccggatcctgcagtacgccctgccgagacaggagtcccagcggccattcttttggattttcatggacaacttgctgctgaccgaggatgaccaggaaactaccactcggttcctgcagaccgaagccgtgaccctgcaggacgtgagaggccgggactaccagaacgccatgcgggtgtggtccaacatccctggactgaaaagcaagcacgcacctctgacccctaaagaagaggagtacctgcaggcccaggtgcggagcagaagcaagctggacgcccctaaggtggatctgctggtgaagaattgcctcctgcccctgagagagtacttcaagtatttcagccagaatagtctgcccctgggcggcccaagcagcggcgcccctcctcccagcggcggcagcccagccggctccccaacctctaccgaggagggcacctctgagtccgccacccccgagagcggccctggcacctccaccgagcccagcgagggcagcgcacccggcagccctgccggcagccccacctccacagaggagggaaccagcaccgagcccagcgaaggcagcgccccaggcaccagcaccgagcctagtgagggcggctctggcggcggcagcgcccaggagattaaacggatcaacaagatcagaagaagacttgtgaaagacagcaacaccaagaaggccggcaagacaggccccatgaaaaccctgctggttagagtgatgacacccgatctgagagagcggctggaaaacctgagaaagaagcctgaaaatatcccccagcccatcagcaatacatctagagccaacctgaataagctgctgaccgattacaccgaaatgaagaaggcgatcctgcatgtgtactgggaagagttccagaaggaccctgtgggcctgatgagccgggtggcccagcctgccagcaagaagatcgatcagaacaagctgaaacctgagatggacgagaagggcaacctgaccaccgccggctttgcctgctctcagtgtggccagcccctgttcgtgtacaagctggagcaggtgtctgagaagggcaaggcttacaccaactacttcggacggtgcaatgtggccgagcacgaaaagctgatcctgctggcccagctgaagcccgagaaggatagcgacgaagccgtgacatatagcctgggaaagtttgggcagagggccctggatttctacagcattcatgtgaccaaggagtccacccaccccgtgaagcccctggcccagatcgccggaaacagatacgcctccggacctgtgggaaaggccctgagcgacgcatgtatgggcacaatcgcctccttcctgtctaagtaccaggacatcatcatcgaacaccagaaggtggtgaagggcaaccagaagagactggagagcctgcgggagctggccggcaaggaaaacctggaataccctagcgtgaccctgccacctcagcctcacaccaaggagggcgttgatgcctacaacgaagtgatcgcccgggtgcgaatgtgggtgaacctgaacctgtggcagaagctgaagctaagcagagatgatgccaagcctctgctgagactgaagggattcccttcctttcctctggtcgagagacaggccaacgaagtggactggtgggacatggtgtgtaacgtgaagaagctgatcaacgagaaaaaggaggatggcaaggtgttttggcagaatctggctggctacaagagacaggaagccctgagaccatacctgagcagcgaggaagatcggaagaagggaaagaaattcgctcggtaccagctgggcgacctgctgctgcacctggaaaagaagcacggcgaggactggggaaaggtgtacgacgaggcctgggagcggattgacaagaaagtggaaggcctgagcaagcacatcaagctggaagaggaacggagaagcgaggacgcccagagcaaggccgccctgaccgactggctgcgggctaaggccagcttcgtgatcgagggcctgaaggaggccgacaaggacgagttctgcagatgcgagctgaagctgcagaagtggtacggggacctgcggggaaagcccttcgccatcgaagccgagaacagcatcctggacatcagcggcttcagcaagcagtacaactgtgccttcatctggcagaaggacggcgtgaagaagctgaacctgtacctgatcatcaactacttcaagggcggcaagctgcggttcaagaagatcaaacctgaagccttcgaagccaacagattctacaccgtgatcaacaaaaagagcggcgagatcgtgcccatggaggtgaacttcaacttcgacgaccccaacctgatcatcctgcctctggcctttggcaagagacagggcagagaattcatctggaacgacctgctgtccctggaaaccggcagcctgaagctggccaacggaagagtgatcgagaagacactgtacaacagaagaacccggcaggatgagcctgccctgttcgtggccctgaccttcgagcggcgggaggtcctggactcctccaatatcaaaccaatgaacctgatcggcgtggcaagaggcgaaaacatccccgccgtgatcgccctgaccgaccccgagggctgcccactgagccggtttaaggatagcctgggaaacccaacccacatcctgagaatcggcgagagctataaggagaagcagcggaccatccaggccaagaaggaggtggagcagcggagagccggcggctacagccggaagtacgccagcaaagccaagaatctggcagacgatatggtgagaaacaccgctagagatctgctgtactacgccgtgacccaggatgccatgctgatcttcgccaacctgagccggggcttcggccggcagggcaagcggaccttcatggccgagagacagtacacacggatggaggactggctgaccgccaagctggcctacgagggcctgagcaagacctacctgtccaagacactggcccagtacacctccaagacatgcagcaactgtgggtttaccatcaccagcgccgactacgacagggtgctggagaagctgaagaagacagcaacaggctggatgaccacaattaacggcaaggagctgaaggtggagggccagattacctactacaacagatacaagagacagaacgtagtcaaggacctgtccgtcgagctggatagactgagcgaagaatctgtgaacaacgacatctcctcctggacaaagggcagaagcggagaagctctgagcctcctgaagaaaagattctcccatagacccgtgcaggagaagttcgtgtgcctgaactgcggcttcgagacacacgcagccgagcaagccgccctgaacatcgccagatcctggctgttcctgcggagccaggagtacaagaaataccagacaaacaagacaaccggcaacaccgataagagagccttcgtcgagacctggcagtccttttaccggaagaagcttaaggaggtgtggaaacctgccgtgcggtctggcggatctggcggaggctccacaagccaggccgaggtgaccttcgaggacgtggccgtgctgttcagcagggaggagtggggcaggctgagccccgcccagaggggcctgtacagggacgtgatgctggagacctacaggaacctggtgagcctgggcgccggccccgccggccccaagcccggcgtgatcacccagctggagaggggcgacgagccctgggtgctggacgcccagggcgccaagggcaaggagaggctgagggtgagcaccagccccaagaaaaagagaaaagtctaagctgccttctgcggggcttgccttctggccatgcccttcttctctcccttgcacctgtacctcttggtctttgaataaagcctgagtaggaaggctagcaaaaaaaaaaaaaaaaaaaaaaaaaaaaaaaaaaaaaaaaaaaaaaaaaaaaaaaaaaaaaaaaaaaaaaaaaaaaaaaa

SEQ ID NO: 5888 - RNA, 5797 nt, synthetic construct
  source 1..5797: mol_type = other RNA
aggaaataagagagaaaagaagagtaagaagaaatataagagccaccatggcccctaagaagaagcgtaaagtgagccggatggaacgcctcgtctacgaggtgcggcagaagtgcagaaacatcgaggacatctgcatctcctgcggatctctgaacgtgaccctggagcacccactgttcatcggcggcatgtgccagaactgtaaaaactgttttctggagtgtgcctatcaatacgacgatgacggctaccagagctactgcaccatctgttgcggcggaagagaggtgctgatgtgtggaaataacaactgctgccggtgcttctgcgtggaatgcgtggacctgctggtgggccccggcgccgcccaggccgctattaaggaagatccttggaactgctacatgtgcggccacaagggcacatacggcctgctgagacggagagaggactggcctagcagactgcagatgttcttcgccaataaccacgaccaggagttcgacccccctaaggtgtaccctcccgtccccgccgagaagagaaagcccatccgggtcctgagcctgttcgatggcatcgccaccggtctgctggtgctgaaggacctgggcatccaggtggataggtacattgcctccgaggtgtgcgaggactccatcaccgtgggaatggtgcgtcatcagggcaagatcatgtacgtgggcgacgtgcggagcgtgacacagaagcatatccaggagtggggccctttcgacctggtgatcggcggcagcccttgcaatgacctgagcatcgtgaacccagcccggaagggcctgtacgagggaaccggcagactgttcttcgagttttacagactgctgcacgacgcccggcctaaggaaggcgacgaccggcccttcttttggctgttcgagaatgtggtggccatgggagtcagcgacaagcgggatattagccggttcctggagagcaaccccgtgatgatcgatgccaaggaagtgagcgccgcccaccgggccagatacttctggggcaatctgcctggcatgaacagacccctggccagcaccgtgaacgacaagctggagctgcaggagtgcctggagcacggccggatcgccaagttcagcaaggtgagaaccatcaccacccgaagcaacagcatcaaacaaggcaaggaccagcactttcctgtgttcatgaacgagaaggaggacatcctgtggtgtaccgagatggagagagtgttcgggttcccagtccactacacagatgtcagcaacatgtctagactggccagacagagactgctgggaagaagctggtccgtccctgtgatcagacacctgttcgcccctctgaaggagtacttcgcctgcgtgagcagcggcaacagcaacgccaacagccggggccccagcttctctagcggcctggtgccactgtccctgagagggagccacatgggccccatggagatctacaaaaccgtgagcgcctggaagcggcagcctgtgcgcgtgctgagcctgtttcggaatatcgataaagtcctgaaaagcctgggattcctggagagcggctctggctccggcggtggcaccctgaagtacgtggaggatgtgacaaacgtggtcagacgggatgtggagaagtggggccccttcgatctggtgtacggcagcacccaacccctgggcagctcttgtgaccggtgccctggctggtacatgtttcagttccaccggatcctgcagtacgccctgccgagacaggagtcccagcggccattcttttggattttcatggacaacttgctgctgaccgaggatgaccaggaaactaccactcggttcctgcagaccgaagccgtgaccctgcaggacgtgagaggccgggactaccagaacgccatgcgggtgtggtccaacatccctggactgaaaagcaagcacgcacctctgacccctaaagaagaggagtacctgcaggcccaggtgcggagcagaagcaagctggacgcccctaaggtggatctgctggtgaagaattgcctcctgcccctgagagagtacttcaagtatttcagccagaatagtctgcccctgggcggcccaagcagcggcgcccctcctcccagcggcggcagcccagccggctccccaacctctaccgaggagggcacctctgagtccgccacccccgagagcggccctggcacctccaccgagcccagcgagggcagcgcacccggcagccctgccggcagccccacctccacagaggagggaaccagcaccgagcccagcgaaggcagcgccccaggcaccagcaccgagcctagtgagggcggctctggcggcggcagcgcccaggagattaaacggatcaacaagatcagaagaagacttgtgaaagacagcaacaccaagaaggccggcaagacaggccccatgaaaaccctgctggttagagtgatgacacccgatctgagagagcggctggaaaacctgagaaagaagcctgaaaatatcccccagcccatcagcaatacatctagagccaacctgaataagctgctgaccgattacaccgaaatgaagaaggcgatcctgcatgtgtactgggaagagttccagaaggaccctgtgggcctgatgagccgggtggcccagcctgccagcaagaagatcgatcagaacaagctgaaacctgagatggacgagaagggcaacctgaccaccgccggctttgcctgctctcagtgtggccagcccctgttcgtgtacaagctggagcaggtgtctgagaagggcaaggcttacaccaactacttcggacggtgcaatgtggccgagcacgaaaagctgatcctgctggcccagctgaagcccgagaaggatagcgacgaagccgtgacatatagcctgggaaagtttgggcagagggccctggatttctacagcattcatgtgaccaaggagtccacccaccccgtgaagcccctggcccagatcgccggaaacagatacgcctccggacctgtgggaaaggccctgagcgacgcatgtatgggcacaatcgcctccttcctgtctaagtaccaggacatcatcatcgaacaccagaaggtggtgaagggcaaccagaagagactggagagcctgcgggagctggccggcaaggaaaacctggaataccctagcgtgaccctgccacctcagcctcacaccaaggagggcgttgatgcctacaacgaagtgatcgcccgggtgcgaatgtgggtgaacctgaacctgtggcagaagctgaagctaagcagagatgatgccaagcctctgctgagactgaagggattcccttcctttcctctggtcgagagacaggccaacgaagtggactggtgggacatggtgtgtaacgtgaagaagctgatcaacgagaaaaaggaggatggcaaggtgttttggcagaatctggctggctacaagagacaggaagccctgagaccatacctgagcagcgaggaagatcggaagaagggaaagaaattcgctcggtaccagctgggcgacctgctgctgcacctggaaaagaagcacggcgaggactggggaaaggtgtacgacgaggcctgggagcggattgacaagaaagtggaaggcctgagcaagcacatcaagctggaagaggaacggagaagcgaggacgcccagagcaaggccgccctgaccgactggctgcgggctaaggccagcttcgtgatcgagggcctgaaggaggccgacaaggacgagttctgcagatgcgagctgaagctgcagaagtggtacggggacctgcggggaaagcccttcgccatcgaagccgagaacagcatcctggacatcagcggcttcagcaagcagtacaactgtgccttcatctggcagaaggacggcgtgaagaagctgaacctgtacctgatcatcaactacttcaagggcggcaagctgcggttcaagaagatcaaacctgaagccttcgaagccaacagattctacaccgtgatcaacaaaaagagcggcgagatcgtgcccatggaggtgaacttcaacttcgacgaccccaacctgatcatcctgcctctggcctttggcaagagacagggcagagaattcatctggaacgacctgctgtccctggaaaccggcagcctgaagctggccaacggaagagtgatcgagaagacactgtacaacagaagaacccggcaggatgagcctgccctgttcgtggccctgaccttcgagcggcgggaggtcctggactcctccaatatcaaaccaatgaacctgatcggcgtggcaagaggcgaaaacatccccgccgtgatcgccctgaccgaccccgagggctgcccactgagccggtttaaggatagcctgggaaacccaacccacatcctgagaatcggcgagagctataaggagaagcagcggaccatccaggccaagaaggaggtggagcagcggagagccggcggctacagccggaagtacgccagcaaagccaagaatctggcagacgatatggtgagaaacaccgctagagatctgctgtactacgccgtgacccaggatgccatgctgatcttcgccaacctgagccggggcttcggccggcagggcaagcggaccttcatggccgagagacagtacacacggatggaggactggctgaccgccaagctggcctacgagggcctgagcaagacctacctgtccaagacactggcccagtacacctccaagacatgcagcaactgtgggtttaccatcaccagcgccgactacgacagggtgctggagaagctgaagaagacagcaacaggctggatgaccacaattaacggcaaggagctgaaggtggagggccagattacctactacaacagatacaagagacagaacgtagtcaaggacctgtccgtcgagctggatagactgagcgaagaatctgtgaacaacgacatctcctcctggacaaagggcagaagcggagaagctctgagcctcctgaagaaaagattctcccatagacccgtgcaggagaagttcgtgtgcctgaactgcggcttcgagacacacgcagccgagcaagccgccctgaacatcgccagatcctggctgttcctgcggagccaggagtacaagaaataccagacaaacaagacaaccggcaacaccgataagagagccttcgtcgagacctggcagtccttttaccggaagaagcttaaggaggtgtggaaacctgccgtgcggtctggcggatctggcggaggctccacaagcggcaagatgagcgtgaccttcgaggacgtggccctgtacttcagccccgaggagtgggccaagctgagcggctgccagaggcagctgtaccaggaggtgatgctggagaactaccagatggtggccagcctgggctgggccaacgtgaagcccgagatcatctgcaagatggagagggaggagaccccctgcgtgcccgacgtgcccggcaagcagcagaggcaccagagccccgtgcccgtgaccagccccaagaaaaagagaaaagtctaagctgccttctgcggggcttgccttctggccatgcccttcttctctcccttgcacctgtacctcttggtctttgaataaagcctgagtaggaaggctagcaaaaaaaaaaaaaaaaaaaaaaaaaaaaaaaaaaaaaaaaaaaaaaaaaaaaaaaaaaaaaaaaaaaaaaaaaaaaaaaa

SEQ ID NO: 5889 - RNA, 5794 nt, synthetic construct
  source 1..5794: mol_type = other RNA
aggaaataagagagaaaagaagagtaagaagaaatataagagccaccatggcccctaagaagaagcgtaaagtgagccggatggaacgcctcgtctacgaggtgcggcagaagtgcagaaacatcgaggacatctgcatctcctgcggatctctgaacgtgaccctggagcacccactgttcatcggcggcatgtgccagaactgtaaaaactgttttctggagtgtgcctatcaatacgacgatgacggctaccagagctactgcaccatctgttgcggcggaagagaggtgctgatgtgtggaaataacaactgctgccggtgcttctgcgtggaatgcgtggacctgctggtgggccccggcgccgcccaggccgctattaaggaagatccttggaactgctacatgtgcggccacaagggcacatacggcctgctgagacggagagaggactggcctagcagactgcagatgttcttcgccaataaccacgaccaggagttcgacccccctaaggtgtaccctcccgtccccgccgagaagagaaagcccatccgggtcctgagcctgttcgatggcatcgccaccggtctgctggtgctgaaggacctgggcatccaggtggataggtacattgcctccgaggtgtgcgaggactccatcaccgtgggaatggtgcgtcatcagggcaagatcatgtacgtgggcgacgtgcggagcgtgacacagaagcatatccaggagtggggccctttcgacctggtgatcggcggcagcccttgcaatgacctgagcatcgtgaacccagcccggaagggcctgtacgagggaaccggcagactgttcttcgagttttacagactgctgcacgacgcccggcctaaggaaggcgacgaccggcccttcttttggctgttcgagaatgtggtggccatgggagtcagcgacaagcgggatattagccggttcctggagagcaaccccgtgatgatcgatgccaaggaagtgagcgccgcccaccgggccagatacttctggggcaatctgcctggcatgaacagacccctggccagcaccgtgaacgacaagctggagctgcaggagtgcctggagcacggccggatcgccaagttcagcaaggtgagaaccatcaccacccgaagcaacagcatcaaacaaggcaaggaccagcactttcctgtgttcatgaacgagaaggaggacatcctgtggtgtaccgagatggagagagtgttcgggttcccagtccactacacagatgtcagcaacatgtctagactggccagacagagactgctgggaagaagctggtccgtccctgtgatcagacacctgttcgcccctctgaaggagtacttcgcctgcgtgagcagcggcaacagcaacgccaacagccggggccccagcttctctagcggcctggtgccactgtccctgagagggagccacatgggccccatggagatctacaaaaccgtgagcgcctggaagcggcagcctgtgcgcgtgctgagcctgtttcggaatatcgataaagtcctgaaaagcctgggattcctggagagcggctctggctccggcggtggcaccctgaagtacgtggaggatgtgacaaacgtggtcagacgggatgtggagaagtggggccccttcgatctggtgtacggcagcacccaacccctgggcagctcttgtgaccggtgccctggctggtacatgtttcagttccaccggatcctgcagtacgccctgccgagacaggagtcccagcggccattcttttggattttcatggacaacttgctgctgaccgaggatgaccaggaaactaccactcggttcctgcagaccgaagccgtgaccctgcaggacgtgagaggccgggactaccagaacgccatgcgggtgtggtccaacatccctggactgaaaagcaagcacgcacctctgacccctaaagaagaggagtacctgcaggcccaggtgcggagcagaagcaagctggacgcccctaaggtggatctgctggtgaagaattgcctcctgcccctgagagagtacttcaagtatttcagccagaatagtctgcccctgggcggcccaagcagcggcgcccctcctcccagcggcggcagcccagccggctccccaacctctaccgaggagggcacctctgagtccgccacccccgagagcggccctggcacctccaccgagcccagcgagggcagcgcacccggcagccctgccggcagccccacctccacagaggagggaaccagcaccgagcccagcgaaggcagcgccccaggcaccagcaccgagcctagtgagggcggctctggcggcggcagcgcccaggagattaaacggatcaacaagatcagaagaagacttgtgaaagacagcaacaccaagaaggccggcaagacaggccccatgaaaaccctgctggttagagtgatgacacccgatctgagagagcggctggaaaacctgagaaagaagcctgaaaatatcccccagcccatcagcaatacatctagagccaacctgaataagctgctgaccgattacaccgaaatgaagaaggcgatcctgcatgtgtactgggaagagttccagaaggaccctgtgggcctgatgagccgggtggcccagcctgccagcaagaagatcgatcagaacaagctgaaacctgagatggacgagaagggcaacctgaccaccgccggctttgcctgctctcagtgtggccagcccctgttcgtgtacaagctggagcaggtgtctgagaagggcaaggcttacaccaactacttcggacggtgcaatgtggccgagcacgaaaagctgatcctgctggcccagctgaagcccgagaaggatagcgacgaagccgtgacatatagcctgggaaagtttgggcagagggccctggatttctacagcattcatgtgaccaaggagtccacccaccccgtgaagcccctggcccagatcgccggaaacagatacgcctccggacctgtgggaaaggccctgagcgacgcatgtatgggcacaatcgcctccttcctgtctaagtaccaggacatcatcatcgaacaccagaaggtggtgaagggcaaccagaagagactggagagcctgcgggagctggccggcaaggaaaacctggaataccctagcgtgaccctgccacctcagcctcacaccaaggagggcgttgatgcctacaacgaagtgatcgcccgggtgcgaatgtgggtgaacctgaacctgtggcagaagctgaagctaagcagagatgatgccaagcctctgctgagactgaagggattcccttcctttcctctggtcgagagacaggccaacgaagtggactggtgggacatggtgtgtaacgtgaagaagctgatcaacgagaaaaaggaggatggcaaggtgttttggcagaatctggctggctacaagagacaggaagccctgagaccatacctgagcagcgaggaagatcggaagaagggaaagaaattcgctcggtaccagctgggcgacctgctgctgcacctggaaaagaagcacggcgaggactggggaaaggtgtacgacgaggcctgggagcggattgacaagaaagtggaaggcctgagcaagcacatcaagctggaagaggaacggagaagcgaggacgcccagagcaaggccgccctgaccgactggctgcgggctaaggccagcttcgtgatcgagggcctgaaggaggccgacaaggacgagttctgcagatgcgagctgaagctgcagaagtggtacggggacctgcggggaaagcccttcgccatcgaagccgagaacagcatcctggacatcagcggcttcagcaagcagtacaactgtgccttcatctggcagaaggacggcgtgaagaagctgaacctgtacctgatcatcaactacttcaagggcggcaagctgcggttcaagaagatcaaacctgaagccttcgaagccaacagattctacaccgtgatcaacaaaaagagcggcgagatcgtgcccatggaggtgaacttcaacttcgacgaccccaacctgatcatcctgcctctggcctttggcaagagacagggcagagaattcatctggaacgacctgctgtccctggaaaccggcagcctgaagctggccaacggaagagtgatcgagaagacactgtacaacagaagaacccggcaggatgagcctgccctgttcgtggccctgaccttcgagcggcgggaggtcctggactcctccaatatcaaaccaatgaacctgatcggcgtggcaagaggcgaaaacatccccgccgtgatcgccctgaccgaccccgagggctgcccactgagccggtttaaggatagcctgggaaacccaacccacatcctgagaatcggcgagagctataaggagaagcagcggaccatccaggccaagaaggaggtggagcagcggagagccggcggctacagccggaagtacgccagcaaagccaagaatctggcagacgatatggtgagaaacaccgctagagatctgctgtactacgccgtgacccaggatgccatgctgatcttcgccaacctgagccggggcttcggccggcagggcaagcggaccttcatggccgagagacagtacacacggatggaggactggctgaccgccaagctggcctacgagggcctgagcaagacctacctgtccaagacactggcccagtacacctccaagacatgcagcaactgtgggtttaccatcaccagcgccgactacgacagggtgctggagaagctgaagaagacagcaacaggctggatgaccacaattaacggcaaggagctgaaggtggagggccagattacctactacaacagatacaagagacagaacgtagtcaaggacctgtccgtcgagctggatagactgagcgaagaatctgtgaacaacgacatctcctcctggacaaagggcagaagcggagaagctctgagcctcctgaagaaaagattctcccatagacccgtgcaggagaagttcgtgtgcctgaactgcggcttcgagacacacgcagccgagcaagccgccctgaacatcgccagatcctggctgttcctgcggagccaggagtacaagaaataccagacaaacaagacaaccggcaacaccgataagagagccttcgtcgagacctggcagtccttttaccggaagaagcttaaggaggtgtggaaacctgccgtgcggtctggcggatctggcggaggctccacaagcagagagagcctggaggacgaggtgacccccggcctgcccaccgccgagagccaggagctgctgaccttcaaggacatcagcatcgacttcacccaggaggagtggggccagctggcccccgcccaccagaacctgtacagagaggtgatgctggagaactacagcaacctggtgagcgtgggctaccagctgagcaagcccagcgtgatcagccagctggagaagggcgaggagccctggaccagccccaagaaaaagagaaaagtctaagctgccttctgcggggcttgccttctggccatgcccttcttctctcccttgcacctgtacctcttggtctttgaataaagcctgagtaggaaggctagcaaaaaaaaaaaaaaaaaaaaaaaaaaaaaaaaaaaaaaaaaaaaaaaaaaaaaaaaaaaaaaaaaaaaaaaaaaaaaaaa

SEQ ID NO: 5890 - RNA, 5797 nt, synthetic construct
  source 1..5797: mol_type = other RNA
aggaaataagagagaaaagaagagtaagaagaaatataagagccaccatggcccctaagaagaagcgtaaagtgagccggatggaacgcctcgtctacgaggtgcggcagaagtgcagaaacatcgaggacatctgcatctcctgcggatctctgaacgtgaccctggagcacccactgttcatcggcggcatgtgccagaactgtaaaaactgttttctggagtgtgcctatcaatacgacgatgacggctaccagagctactgcaccatctgttgcggcggaagagaggtgctgatgtgtggaaataacaactgctgccggtgcttctgcgtggaatgcgtggacctgctggtgggccccggcgccgcccaggccgctattaaggaagatccttggaactgctacatgtgcggccacaagggcacatacggcctgctgagacggagagaggactggcctagcagactgcagatgttcttcgccaataaccacgaccaggagttcgacccccctaaggtgtaccctcccgtccccgccgagaagagaaagcccatccgggtcctgagcctgttcgatggcatcgccaccggtctgctggtgctgaaggacctgggcatccaggtggataggtacattgcctccgaggtgtgcgaggactccatcaccgtgggaatggtgcgtcatcagggcaagatcatgtacgtgggcgacgtgcggagcgtgacacagaagcatatccaggagtggggccctttcgacctggtgatcggcggcagcccttgcaatgacctgagcatcgtgaacccagcccggaagggcctgtacgagggaaccggcagactgttcttcgagttttacagactgctgcacgacgcccggcctaaggaaggcgacgaccggcccttcttttggctgttcgagaatgtggtggccatgggagtcagcgacaagcgggatattagccggttcctggagagcaaccccgtgatgatcgatgccaaggaagtgagcgccgcccaccgggccagatacttctggggcaatctgcctggcatgaacagacccctggccagcaccgtgaacgacaagctggagctgcaggagtgcctggagcacggccggatcgccaagttcagcaaggtgagaaccatcaccacccgaagcaacagcatcaaacaaggcaaggaccagcactttcctgtgttcatgaacgagaaggaggacatcctgtggtgtaccgagatggagagagtgttcgggttcccagtccactacacagatgtcagcaacatgtctagactggccagacagagactgctgggaagaagctggtccgtccctgtgatcagacacctgttcgcccctctgaaggagtacttcgcctgcgtgagcagcggcaacagcaacgccaacagccggggccccagcttctctagcggcctggtgccactgtccctgagagggagccacatgggccccatggagatctacaaaaccgtgagcgcctggaagcggcagcctgtgcgcgtgctgagcctgtttcggaatatcgataaagtcctgaaaagcctgggattcctggagagcggctctggctccggcggtggcaccctgaagtacgtggaggatgtgacaaacgtggtcagacgggatgtggagaagtggggccccttcgatctggtgtacggcagcacccaacccctgggcagctcttgtgaccggtgccctggctggtacatgtttcagttccaccggatcctgcagtacgccctgccgagacaggagtcccagcggccattcttttggattttcatggacaacttgctgctgaccgaggatgaccaggaaactaccactcggttcctgcagaccgaagccgtgaccctgcaggacgtgagaggccgggactaccagaacgccatgcgggtgtggtccaacatccctggactgaaaagcaagcacgcacctctgacccctaaagaagaggagtacctgcaggcccaggtgcggagcagaagcaagctggacgcccctaaggtggatctgctggtgaagaattgcctcctgcccctgagagagtacttcaagtatttcagccagaatagtctgcccctgggcggcccaagcagcggcgcccctcctcccagcggcggcagcccagccggctccccaacctctaccgaggagggcacctctgagtccgccacccccgagagcggccctggcacctccaccgagcccagcgagggcagcgcacccggcagccctgccggcagccccacctccacagaggagggaaccagcaccgagcccagcgaaggcagcgccccaggcaccagcaccgagcctagtgagggcggctctggcggcggcagcgcccaggagattaaacggatcaacaagatcagaagaagacttgtgaaagacagcaacaccaagaaggccggcaagacaggccccatgaaaaccctgctggttagagtgatgacacccgatctgagagagcggctggaaaacctgagaaagaagcctgaaaatatcccccagcccatcagcaatacatctagagccaacctgaataagctgctgaccgattacaccgaaatgaagaaggcgatcctgcatgtgtactgggaagagttccagaaggaccctgtgggcctgatgagccgggtggcccagcctgccagcaagaagatcgatcagaacaagctgaaacctgagatggacgagaagggcaacctgaccaccgccggctttgcctgctctcagtgtggccagcccctgttcgtgtacaagctggagcaggtgtctgagaagggcaaggcttacaccaactacttcggacggtgcaatgtggccgagcacgaaaagctgatcctgctggcccagctgaagcccgagaaggatagcgacgaagccgtgacatatagcctgggaaagtttgggcagagggccctggatttctacagcattcatgtgaccaaggagtccacccaccccgtgaagcccctggcccagatcgccggaaacagatacgcctccggacctgtgggaaaggccctgagcgacgcatgtatgggcacaatcgcctccttcctgtctaagtaccaggacatcatcatcgaacaccagaaggtggtgaagggcaaccagaagagactggagagcctgcgggagctggccggcaaggaaaacctggaataccctagcgtgaccctgccacctcagcctcacaccaaggagggcgttgatgcctacaacgaagtgatcgcccgggtgcgaatgtgggtgaacctgaacctgtggcagaagctgaagctaagcagagatgatgccaagcctctgctgagactgaagggattcccttcctttcctctggtcgagagacaggccaacgaagtggactggtgggacatggtgtgtaacgtgaagaagctgatcaacgagaaaaaggaggatggcaaggtgttttggcagaatctggctggctacaagagacaggaagccctgagaccatacctgagcagcgaggaagatcggaagaagggaaagaaattcgctcggtaccagctgggcgacctgctgctgcacctggaaaagaagcacggcgaggactggggaaaggtgtacgacgaggcctgggagcggattgacaagaaagtggaaggcctgagcaagcacatcaagctggaagaggaacggagaagcgaggacgcccagagcaaggccgccctgaccgactggctgcgggctaaggccagcttcgtgatcgagggcctgaaggaggccgacaaggacgagttctgcagatgcgagctgaagctgcagaagtggtacggggacctgcggggaaagcccttcgccatcgaagccgagaacagcatcctggacatcagcggcttcagcaagcagtacaactgtgccttcatctggcagaaggacggcgtgaagaagctgaacctgtacctgatcatcaactacttcaagggcggcaagctgcggttcaagaagatcaaacctgaagccttcgaagccaacagattctacaccgtgatcaacaaaaagagcggcgagatcgtgcccatggaggtgaacttcaacttcgacgaccccaacctgatcatcctgcctctggcctttggcaagagacagggcagagaattcatctggaacgacctgctgtccctggaaaccggcagcctgaagctggccaacggaagagtgatcgagaagacactgtacaacagaagaacccggcaggatgagcctgccctgttcgtggccctgaccttcgagcggcgggaggtcctggactcctccaatatcaaaccaatgaacctgatcggcgtggcaagaggcgaaaacatccccgccgtgatcgccctgaccgaccccgagggctgcccactgagccggtttaaggatagcctgggaaacccaacccacatcctgagaatcggcgagagctataaggagaagcagcggaccatccaggccaagaaggaggtggagcagcggagagccggcggctacagccggaagtacgccagcaaagccaagaatctggcagacgatatggtgagaaacaccgctagagatctgctgtactacgccgtgacccaggatgccatgctgatcttcgccaacctgagccggggcttcggccggcagggcaagcggaccttcatggccgagagacagtacacacggatggaggactggctgaccgccaagctggcctacgagggcctgagcaagacctacctgtccaagacactggcccagtacacctccaagacatgcagcaactgtgggtttaccatcaccagcgccgactacgacagggtgctggagaagctgaagaagacagcaacaggctggatgaccacaattaacggcaaggagctgaaggtggagggccagattacctactacaacagatacaagagacagaacgtagtcaaggacctgtccgtcgagctggatagactgagcgaagaatctgtgaacaacgacatctcctcctggacaaagggcagaagcggagaagctctgagcctcctgaagaaaagattctcccatagacccgtgcaggagaagttcgtgtgcctgaactgcggcttcgagacacacgcagccgagcaagccgccctgaacatcgccagatcctggctgttcctgcggagccaggagtacaagaaataccagacaaacaagacaaccggcaacaccgataagagagccttcgtcgagacctggcagtccttttaccggaagaagcttaaggaggtgtggaaacctgccgtgcggtctggcggatctggcggaggctccacaagcgcccaccacctggtgatgttcagggacgtggccgtggacttcagcaaggaggagtgggagtgcctgaacagctaccagaggaacctgtacagggacgtgatcctggagaactacagcaacctggtgagcgtgggctgcagcatcagcaagcccgacgtgatcaccctgctggagcagggcaaggagccctggatggtggtgagggacgagaggaggaggaggagcctggacctggagagcaggaccagccccaagaaaaagagaaaagtctaagctgccttctgcggggcttgccttctggccatgcccttcttctctcccttgcacctgtacctcttggtctttgaataaagcctgagtaggaaggctagcaaaaaaaaaaaaaaaaaaaaaaaaaaaaaaaaaaaaaaaaaaaaaaaaaaaaaaaaaaaaaaaaaaaaaaaaaaaaaaaa

SEQ ID NO: 5891 - RNA, 5797 nt, synthetic construct
  source 1..5797: mol_type = other RNA
aggaaataagagagaaaagaagagtaagaagaaatataagagccaccatggcccctaagaagaagcgtaaagtgagccggatggaacgcctcgtctacgaggtgcggcagaagtgcagaaacatcgaggacatctgcatctcctgcggatctctgaacgtgaccctggagcacccactgttcatcggcggcatgtgccagaactgtaaaaactgttttctggagtgtgcctatcaatacgacgatgacggctaccagagctactgcaccatctgttgcggcggaagagaggtgctgatgtgtggaaataacaactgctgccggtgcttctgcgtggaatgcgtggacctgctggtgggccccggcgccgcccaggccgctattaaggaagatccttggaactgctacatgtgcggccacaagggcacatacggcctgctgagacggagagaggactggcctagcagactgcagatgttcttcgccaataaccacgaccaggagttcgacccccctaaggtgtaccctcccgtccccgccgagaagagaaagcccatccgggtcctgagcctgttcgatggcatcgccaccggtctgctggtgctgaaggacctgggcatccaggtggataggtacattgcctccgaggtgtgcgaggactccatcaccgtgggaatggtgcgtcatcagggcaagatcatgtacgtgggcgacgtgcggagcgtgacacagaagcatatccaggagtggggccctttcgacctggtgatcggcggcagcccttgcaatgacctgagcatcgtgaacccagcccggaagggcctgtacgagggaaccggcagactgttcttcgagttttacagactgctgcacgacgcccggcctaaggaaggcgacgaccggcccttcttttggctgttcgagaatgtggtggccatgggagtcagcgacaagcgggatattagccggttcctggagagcaaccccgtgatgatcgatgccaaggaagtgagcgccgcccaccgggccagatacttctggggcaatctgcctggcatgaacagacccctggccagcaccgtgaacgacaagctggagctgcaggagtgcctggagcacggccggatcgccaagttcagcaaggtgagaaccatcaccacccgaagcaacagcatcaaacaaggcaaggaccagcactttcctgtgttcatgaacgagaaggaggacatcctgtggtgtaccgagatggagagagtgttcgggttcccagtccactacacagatgtcagcaacatgtctagactggccagacagagactgctgggaagaagctggtccgtccctgtgatcagacacctgttcgcccctctgaaggagtacttcgcctgcgtgagcagcggcaacagcaacgccaacagccggggccccagcttctctagcggcctggtgccactgtccctgagagggagccacatgggccccatggagatctacaaaaccgtgagcgcctggaagcggcagcctgtgcgcgtgctgagcctgtttcggaatatcgataaagtcctgaaaagcctgggattcctggagagcggctctggctccggcggtggcaccctgaagtacgtggaggatgtgacaaacgtggtcagacgggatgtggagaagtggggccccttcgatctggtgtacggcagcacccaacccctgggcagctcttgtgaccggtgccctggctggtacatgtttcagttccaccggatcctgcagtacgccctgccgagacaggagtcccagcggccattcttttggattttcatggacaacttgctgctgaccgaggatgaccaggaaactaccactcggttcctgcagaccgaagccgtgaccctgcaggacgtgagaggccgggactaccagaacgccatgcgggtgtggtccaacatccctggactgaaaagcaagcacgcacctctgacccctaaagaagaggagtacctgcaggcccaggtgcggagcagaagcaagctggacgcccctaaggtggatctgctggtgaagaattgcctcctgcccctgagagagtacttcaagtatttcagccagaatagtctgcccctgggcggcccaagcagcggcgcccctcctcccagcggcggcagcccagccggctccccaacctctaccgaggagggcacctctgagtccgccacccccgagagcggccctggcacctccaccgagcccagcgagggcagcgcacccggcagccctgccggcagccccacctccacagaggagggaaccagcaccgagcccagcgaaggcagcgccccaggcaccagcaccgagcctagtgagggcggctctggcggcggcagcgcccaggagattaaacggatcaacaagatcagaagaagacttgtgaaagacagcaacaccaagaaggccggcaagacaggccccatgaaaaccctgctggttagagtgatgacacccgatctgagagagcggctggaaaacctgagaaagaagcctgaaaatatcccccagcccatcagcaatacatctagagccaacctgaataagctgctgaccgattacaccgaaatgaagaaggcgatcctgcatgtgtactgggaagagttccagaaggaccctgtgggcctgatgagccgggtggcccagcctgccagcaagaagatcgatcagaacaagctgaaacctgagatggacgagaagggcaacctgaccaccgccggctttgcctgctctcagtgtggccagcccctgttcgtgtacaagctggagcaggtgtctgagaagggcaaggcttacaccaactacttcggacggtgcaatgtggccgagcacgaaaagctgatcctgctggcccagctgaagcccgagaaggatagcgacgaagccgtgacatatagcctgggaaagtttgggcagagggccctggatttctacagcattcatgtgaccaaggagtccacccaccccgtgaagcccctggcccagatcgccggaaacagatacgcctccggacctgtgggaaaggccctgagcgacgcatgtatgggcacaatcgcctccttcctgtctaagtaccaggacatcatcatcgaacaccagaaggtggtgaagggcaaccagaagagactggagagcctgcgggagctggccggcaaggaaaacctggaataccctagcgtgaccctgccacctcagcctcacaccaaggagggcgttgatgcctacaacgaagtgatcgcccgggtgcgaatgtgggtgaacctgaacctgtggcagaagctgaagctaagcagagatgatgccaagcctctgctgagactgaagggattcccttcctttcctctggtcgagagacaggccaacgaagtggactggtgggacatggtgtgtaacgtgaagaagctgatcaacgagaaaaaggaggatggcaaggtgttttggcagaatctggctggctacaagagacaggaagccctgagaccatacctgagcagcgaggaagatcggaagaagggaaagaaattcgctcggtaccagctgggcgacctgctgctgcacctggaaaagaagcacggcgaggactggggaaaggtgtacgacgaggcctgggagcggattgacaagaaagtggaaggcctgagcaagcacatcaagctggaagaggaacggagaagcgaggacgcccagagcaaggccgccctgaccgactggctgcgggctaaggccagcttcgtgatcgagggcctgaaggaggccgacaaggacgagttctgcagatgcgagctgaagctgcagaagtggtacggggacctgcggggaaagcccttcgccatcgaagccgagaacagcatcctggacatcagcggcttcagcaagcagtacaactgtgccttcatctggcagaaggacggcgtgaagaagctgaacctgtacctgatcatcaactacttcaagggcggcaagctgcggttcaagaagatcaaacctgaagccttcgaagccaacagattctacaccgtgatcaacaaaaagagcggcgagatcgtgcccatggaggtgaacttcaacttcgacgaccccaacctgatcatcctgcctctggcctttggcaagagacagggcagagaattcatctggaacgacctgctgtccctggaaaccggcagcctgaagctggccaacggaagagtgatcgagaagacactgtacaacagaagaacccggcaggatgagcctgccctgttcgtggccctgaccttcgagcggcgggaggtcctggactcctccaatatcaaaccaatgaacctgatcggcgtggcaagaggcgaaaacatccccgccgtgatcgccctgaccgaccccgagggctgcccactgagccggtttaaggatagcctgggaaacccaacccacatcctgagaatcggcgagagctataaggagaagcagcggaccatccaggccaagaaggaggtggagcagcggagagccggcggctacagccggaagtacgccagcaaagccaagaatctggcagacgatatggtgagaaacaccgctagagatctgctgtactacgccgtgacccaggatgccatgctgatcttcgccaacctgagccggggcttcggccggcagggcaagcggaccttcatggccgagagacagtacacacggatggaggactggctgaccgccaagctggcctacgagggcctgagcaagacctacctgtccaagacactggcccagtacacctccaagacatgcagcaactgtgggtttaccatcaccagcgccgactacgacagggtgctggagaagctgaagaagacagcaacaggctggatgaccacaattaacggcaaggagctgaaggtggagggccagattacctactacaacagatacaagagacagaacgtagtcaaggacctgtccgtcgagctggatagactgagcgaagaatctgtgaacaacgacatctcctcctggacaaagggcagaagcggagaagctctgagcctcctgaagaaaagattctcccatagacccgtgcaggagaagttcgtgtgcctgaactgcggcttcgagacacacgcagccgagcaagccgccctgaacatcgccagatcctggctgttcctgcggagccaggagtacaagaaataccagacaaacaagacaaccggcaacaccgataagagagccttcgtcgagacctggcagtccttttaccggaagaagcttaaggaggtgtggaaacctgccgtgcggtctggcggatctggcggaggctccacaagcagccaggagcccgtgaccttcgaggacgtggccgtgtacttcacccagaaccagtgggccagcctggaccccatgcagagggccctgtacctggaggtgatgctggagaactacgccaacatcaccagcctggccgccctgcccttccccaagcccgacctgatcctgcagctggagcagggcgaggccccctgggacctggacccctggacccccctggagggcgaggccctggagggcgtgaccagccccaagaaaaagagaaaagtctaagctgccttctgcggggcttgccttctggccatgcccttcttctctcccttgcacctgtacctcttggtctttgaataaagcctgagtaggaaggctagcaaaaaaaaaaaaaaaaaaaaaaaaaaaaaaaaaaaaaaaaaaaaaaaaaaaaaaaaaaaaaaaaaaaaaaaaaaaaaaaa

SEQ ID NO: 5892 - RNA, 5797 nt, synthetic construct
  source 1..5797: mol_type = other RNA
aggaaataagagagaaaagaagagtaagaagaaatataagagccaccatggcccctaagaagaagcgtaaagtgagccggatggaacgcctcgtctacgaggtgcggcagaagtgcagaaacatcgaggacatctgcatctcctgcggatctctgaacgtgaccctggagcacccactgttcatcggcggcatgtgccagaactgtaaaaactgttttctggagtgtgcctatcaatacgacgatgacggctaccagagctactgcaccatctgttgcggcggaagagaggtgctgatgtgtggaaataacaactgctgccggtgcttctgcgtggaatgcgtggacctgctggtgggccccggcgccgcccaggccgctattaaggaagatccttggaactgctacatgtgcggccacaagggcacatacggcctgctgagacggagagaggactggcctagcagactgcagatgttcttcgccaataaccacgaccaggagttcgacccccctaaggtgtaccctcccgtccccgccgagaagagaaagcccatccgggtcctgagcctgttcgatggcatcgccaccggtctgctggtgctgaaggacctgggcatccaggtggataggtacattgcctccgaggtgtgcgaggactccatcaccgtgggaatggtgcgtcatcagggcaagatcatgtacgtgggcgacgtgcggagcgtgacacagaagcatatccaggagtggggccctttcgacctggtgatcggcggcagcccttgcaatgacctgagcatcgtgaacccagcccggaagggcctgtacgagggaaccggcagactgttcttcgagttttacagactgctgcacgacgcccggcctaaggaaggcgacgaccggcccttcttttggctgttcgagaatgtggtggccatgggagtcagcgacaagcgggatattagccggttcctggagagcaaccccgtgatgatcgatgccaaggaagtgagcgccgcccaccgggccagatacttctggggcaatctgcctggcatgaacagacccctggccagcaccgtgaacgacaagctggagctgcaggagtgcctggagcacggccggatcgccaagttcagcaaggtgagaaccatcaccacccgaagcaacagcatcaaacaaggcaaggaccagcactttcctgtgttcatgaacgagaaggaggacatcctgtggtgtaccgagatggagagagtgttcgggttcccagtccactacacagatgtcagcaacatgtctagactggccagacagagactgctgggaagaagctggtccgtccctgtgatcagacacctgttcgcccctctgaaggagtacttcgcctgcgtgagcagcggcaacagcaacgccaacagccggggccccagcttctctagcggcctggtgccactgtccctgagagggagccacatgggccccatggagatctacaaaaccgtgagcgcctggaagcggcagcctgtgcgcgtgctgagcctgtttcggaatatcgataaagtcctgaaaagcctgggattcctggagagcggctctggctccggcggtggcaccctgaagtacgtggaggatgtgacaaacgtggtcagacgggatgtggagaagtggggccccttcgatctggtgtacggcagcacccaacccctgggcagctcttgtgaccggtgccctggctggtacatgtttcagttccaccggatcctgcagtacgccctgccgagacaggagtcccagcggccattcttttggattttcatggacaacttgctgctgaccgaggatgaccaggaaactaccactcggttcctgcagaccgaagccgtgaccctgcaggacgtgagaggccgggactaccagaacgccatgcgggtgtggtccaacatccctggactgaaaagcaagcacgcacctctgacccctaaagaagaggagtacctgcaggcccaggtgcggagcagaagcaagctggacgcccctaaggtggatctgctggtgaagaattgcctcctgcccctgagagagtacttcaagtatttcagccagaatagtctgcccctgggcggcccaagcagcggcgcccctcctcccagcggcggcagcccagccggctccccaacctctaccgaggagggcacctctgagtccgccacccccgagagcggccctggcacctccaccgagcccagcgagggcagcgcacccggcagccctgccggcagccccacctccacagaggagggaaccagcaccgagcccagcgaaggcagcgccccaggcaccagcaccgagcctagtgagggcggctctggcggcggcagcgcccaggagattaaacggatcaacaagatcagaagaagacttgtgaaagacagcaacaccaagaaggccggcaagacaggccccatgaaaaccctgctggttagagtgatgacacccgatctgagagagcggctggaaaacctgagaaagaagcctgaaaatatcccccagcccatcagcaatacatctagagccaacctgaataagctgctgaccgattacaccgaaatgaagaaggcgatcctgcatgtgtactgggaagagttccagaaggaccctgtgggcctgatgagccgggtggcccagcctgccagcaagaagatcgatcagaacaagctgaaacctgagatggacgagaagggcaacctgaccaccgccggctttgcctgctctcagtgtggccagcccctgttcgtgtacaagctggagcaggtgtctgagaagggcaaggcttacaccaactacttcggacggtgcaatgtggccgagcacgaaaagctgatcctgctggcccagctgaagcccgagaaggatagcgacgaagccgtgacatatagcctgggaaagtttgggcagagggccctggatttctacagcattcatgtgaccaaggagtccacccaccccgtgaagcccctggcccagatcgccggaaacagatacgcctccggacctgtgggaaaggccctgagcgacgcatgtatgggcacaatcgcctccttcctgtctaagtaccaggacatcatcatcgaacaccagaaggtggtgaagggcaaccagaagagactggagagcctgcgggagctggccggcaaggaaaacctggaataccctagcgtgaccctgccacctcagcctcacaccaaggagggcgttgatgcctacaacgaagtgatcgcccgggtgcgaatgtgggtgaacctgaacctgtggcagaagctgaagctaagcagagatgatgccaagcctctgctgagactgaagggattcccttcctttcctctggtcgagagacaggccaacgaagtggactggtgggacatggtgtgtaacgtgaagaagctgatcaacgagaaaaaggaggatggcaaggtgttttggcagaatctggctggctacaagagacaggaagccctgagaccatacctgagcagcgaggaagatcggaagaagggaaagaaattcgctcggtaccagctgggcgacctgctgctgcacctggaaaagaagcacggcgaggactggggaaaggtgtacgacgaggcctgggagcggattgacaagaaagtggaaggcctgagcaagcacatcaagctggaagaggaacggagaagcgaggacgcccagagcaaggccgccctgaccgactggctgcgggctaaggccagcttcgtgatcgagggcctgaaggaggccgacaaggacgagttctgcagatgcgagctgaagctgcagaagtggtacggggacctgcggggaaagcccttcgccatcgaagccgagaacagcatcctggacatcagcggcttcagcaagcagtacaactgtgccttcatctggcagaaggacggcgtgaagaagctgaacctgtacctgatcatcaactacttcaagggcggcaagctgcggttcaagaagatcaaacctgaagccttcgaagccaacagattctacaccgtgatcaacaaaaagagcggcgagatcgtgcccatggaggtgaacttcaacttcgacgaccccaacctgatcatcctgcctctggcctttggcaagagacagggcagagaattcatctggaacgacctgctgtccctggaaaccggcagcctgaagctggccaacggaagagtgatcgagaagacactgtacaacagaagaacccggcaggatgagcctgccctgttcgtggccctgaccttcgagcggcgggaggtcctggactcctccaatatcaaaccaatgaacctgatcggcgtggcaagaggcgaaaacatccccgccgtgatcgccctgaccgaccccgagggctgcccactgagccggtttaaggatagcctgggaaacccaacccacatcctgagaatcggcgagagctataaggagaagcagcggaccatccaggccaagaaggaggtggagcagcggagagccggcggctacagccggaagtacgccagcaaagccaagaatctggcagacgatatggtgagaaacaccgctagagatctgctgtactacgccgtgacccaggatgccatgctgatcttcgccaacctgagccggggcttcggccggcagggcaagcggaccttcatggccgagagacagtacacacggatggaggactggctgaccgccaagctggcctacgagggcctgagcaagacctacctgtccaagacactggcccagtacacctccaagacatgcagcaactgtgggtttaccatcaccagcgccgactacgacagggtgctggagaagctgaagaagacagcaacaggctggatgaccacaattaacggcaaggagctgaaggtggagggccagattacctactacaacagatacaagagacagaacgtagtcaaggacctgtccgtcgagctggatagactgagcgaagaatctgtgaacaacgacatctcctcctggacaaagggcagaagcggagaagctctgagcctcctgaagaaaagattctcccatagacccgtgcaggagaagttcgtgtgcctgaactgcggcttcgagacacacgcagccgagcaagccgccctgaacatcgccagatcctggctgttcctgcggagccaggagtacaagaaataccagacaaacaagacaaccggcaacaccgataagagagccttcgtcgagacctggcagtccttttaccggaagaagcttaaggaggtgtggaaacctgccgtgcggtctggcggatctggcggaggctccacaagcctgcccggcctgatggccttcgaggacgtggccgtgtacttcagccaggaggagtggggcctgctggacgccgtgcagagggccctgtacaggcacgtgatgctggagaacttcgccctggtggccagcctgggcctgagcgccagccccccccacgtggtgatccagctgcagaggggcgaggagccctgggtgcccagcggcctggacatgaccagcgccaggaacggccacaggaggcccaccagccccaagaaaaagagaaaagtctaagctgccttctgcggggcttgccttctggccatgcccttcttctctcccttgcacctgtacctcttggtctttgaataaagcctgagtaggaaggctagcaaaaaaaaaaaaaaaaaaaaaaaaaaaaaaaaaaaaaaaaaaaaaaaaaaaaaaaaaaaaaaaaaaaaaaaaaaaaaaaa

SEQ ID NO: 5893 - RNA, 5797 nt, synthetic construct
  source 1..5797: mol_type = other RNA
aggaaataagagagaaaagaagagtaagaagaaatataagagccaccatggcccctaagaagaagcgtaaagtgagccggatggaacgcctcgtctacgaggtgcggcagaagtgcagaaacatcgaggacatctgcatctcctgcggatctctgaacgtgaccctggagcacccactgttcatcggcggcatgtgccagaactgtaaaaactgttttctggagtgtgcctatcaatacgacgatgacggctaccagagctactgcaccatctgttgcggcggaagagaggtgctgatgtgtggaaataacaactgctgccggtgcttctgcgtggaatgcgtggacctgctggtgggccccggcgccgcccaggccgctattaaggaagatccttggaactgctacatgtgcggccacaagggcacatacggcctgctgagacggagagaggactggcctagcagactgcagatgttcttcgccaataaccacgaccaggagttcgacccccctaaggtgtaccctcccgtccccgccgagaagagaaagcccatccgggtcctgagcctgttcgatggcatcgccaccggtctgctggtgctgaaggacctgggcatccaggtggataggtacattgcctccgaggtgtgcgaggactccatcaccgtgggaatggtgcgtcatcagggcaagatcatgtacgtgggcgacgtgcggagcgtgacacagaagcatatccaggagtggggccctttcgacctggtgatcggcggcagcccttgcaatgacctgagcatcgtgaacccagcccggaagggcctgtacgagggaaccggcagactgttcttcgagttttacagactgctgcacgacgcccggcctaaggaaggcgacgaccggcccttcttttggctgttcgagaatgtggtggccatgggagtcagcgacaagcgggatattagccggttcctggagagcaaccccgtgatgatcgatgccaaggaagtgagcgccgcccaccgggccagatacttctggggcaatctgcctggcatgaacagacccctggccagcaccgtgaacgacaagctggagctgcaggagtgcctggagcacggccggatcgccaagttcagcaaggtgagaaccatcaccacccgaagcaacagcatcaaacaaggcaaggaccagcactttcctgtgttcatgaacgagaaggaggacatcctgtggtgtaccgagatggagagagtgttcgggttcccagtccactacacagatgtcagcaacatgtctagactggccagacagagactgctgggaagaagctggtccgtccctgtgatcagacacctgttcgcccctctgaaggagtacttcgcctgcgtgagcagcggcaacagcaacgccaacagccggggccccagcttctctagcggcctggtgccactgtccctgagagggagccacatgggccccatggagatctacaaaaccgtgagcgcctggaagcggcagcctgtgcgcgtgctgagcctgtttcggaatatcgataaagtcctgaaaagcctgggattcctggagagcggctctggctccggcggtggcaccctgaagtacgtggaggatgtgacaaacgtggtcagacgggatgtggagaagtggggccccttcgatctggtgtacggcagcacccaacccctgggcagctcttgtgaccggtgccctggctggtacatgtttcagttccaccggatcctgcagtacgccctgccgagacaggagtcccagcggccattcttttggattttcatggacaacttgctgctgaccgaggatgaccaggaaactaccactcggttcctgcagaccgaagccgtgaccctgcaggacgtgagaggccgggactaccagaacgccatgcgggtgtggtccaacatccctggactgaaaagcaagcacgcacctctgacccctaaagaagaggagtacctgcaggcccaggtgcggagcagaagcaagctggacgcccctaaggtggatctgctggtgaagaattgcctcctgcccctgagagagtacttcaagtatttcagccagaatagtctgcccctgggcggcccaagcagcggcgcccctcctcccagcggcggcagcccagccggctccccaacctctaccgaggagggcacctctgagtccgccacccccgagagcggccctggcacctccaccgagcccagcgagggcagcgcacccggcagccctgccggcagccccacctccacagaggagggaaccagcaccgagcccagcgaaggcagcgccccaggcaccagcaccgagcctagtgagggcggctctggcggcggcagcgcccaggagattaaacggatcaacaagatcagaagaagacttgtgaaagacagcaacaccaagaaggccggcaagacaggccccatgaaaaccctgctggttagagtgatgacacccgatctgagagagcggctggaaaacctgagaaagaagcctgaaaatatcccccagcccatcagcaatacatctagagccaacctgaataagctgctgaccgattacaccgaaatgaagaaggcgatcctgcatgtgtactgggaagagttccagaaggaccctgtgggcctgatgagccgggtggcccagcctgccagcaagaagatcgatcagaacaagctgaaacctgagatggacgagaagggcaacctgaccaccgccggctttgcctgctctcagtgtggccagcccctgttcgtgtacaagctggagcaggtgtctgagaagggcaaggcttacaccaactacttcggacggtgcaatgtggccgagcacgaaaagctgatcctgctggcccagctgaagcccgagaaggatagcgacgaagccgtgacatatagcctgggaaagtttgggcagagggccctggatttctacagcattcatgtgaccaaggagtccacccaccccgtgaagcccctggcccagatcgccggaaacagatacgcctccggacctgtgggaaaggccctgagcgacgcatgtatgggcacaatcgcctccttcctgtctaagtaccaggacatcatcatcgaacaccagaaggtggtgaagggcaaccagaagagactggagagcctgcgggagctggccggcaaggaaaacctggaataccctagcgtgaccctgccacctcagcctcacaccaaggagggcgttgatgcctacaacgaagtgatcgcccgggtgcgaatgtgggtgaacctgaacctgtggcagaagctgaagctaagcagagatgatgccaagcctctgctgagactgaagggattcccttcctttcctctggtcgagagacaggccaacgaagtggactggtgggacatggtgtgtaacgtgaagaagctgatcaacgagaaaaaggaggatggcaaggtgttttggcagaatctggctggctacaagagacaggaagccctgagaccatacctgagcagcgaggaagatcggaagaagggaaagaaattcgctcggtaccagctgggcgacctgctgctgcacctggaaaagaagcacggcgaggactggggaaaggtgtacgacgaggcctgggagcggattgacaagaaagtggaaggcctgagcaagcacatcaagctggaagaggaacggagaagcgaggacgcccagagcaaggccgccctgaccgactggctgcgggctaaggccagcttcgtgatcgagggcctgaaggaggccgacaaggacgagttctgcagatgcgagctgaagctgcagaagtggtacggggacctgcggggaaagcccttcgccatcgaagccgagaacagcatcctggacatcagcggcttcagcaagcagtacaactgtgccttcatctggcagaaggacggcgtgaagaagctgaacctgtacctgatcatcaactacttcaagggcggcaagctgcggttcaagaagatcaaacctgaagccttcgaagccaacagattctacaccgtgatcaacaaaaagagcggcgagatcgtgcccatggaggtgaacttcaacttcgacgaccccaacctgatcatcctgcctctggcctttggcaagagacagggcagagaattcatctggaacgacctgctgtccctggaaaccggcagcctgaagctggccaacggaagagtgatcgagaagacactgtacaacagaagaacccggcaggatgagcctgccctgttcgtggccctgaccttcgagcggcgggaggtcctggactcctccaatatcaaaccaatgaacctgatcggcgtggcaagaggcgaaaacatccccgccgtgatcgccctgaccgaccccgagggctgcccactgagccggtttaaggatagcctgggaaacccaacccacatcctgagaatcggcgagagctataaggagaagcagcggaccatccaggccaagaaggaggtggagcagcggagagccggcggctacagccggaagtacgccagcaaagccaagaatctggcagacgatatggtgagaaacaccgctagagatctgctgtactacgccgtgacccaggatgccatgctgatcttcgccaacctgagccggggcttcggccggcagggcaagcggaccttcatggccgagagacagtacacacggatggaggactggctgaccgccaagctggcctacgagggcctgagcaagacctacctgtccaagacactggcccagtacacctccaagacatgcagcaactgtgggtttaccatcaccagcgccgactacgacagggtgctggagaagctgaagaagacagcaacaggctggatgaccacaattaacggcaaggagctgaaggtggagggccagattacctactacaacagatacaagagacagaacgtagtcaaggacctgtccgtcgagctggatagactgagcgaagaatctgtgaacaacgacatctcctcctggacaaagggcagaagcggagaagctctgagcctcctgaagaaaagattctcccatagacccgtgcaggagaagttcgtgtgcctgaactgcggcttcgagacacacgcagccgagcaagccgccctgaacatcgccagatcctggctgttcctgcggagccaggagtacaagaaataccagacaaacaagacaaccggcaacaccgataagagagccttcgtcgagacctggcagtccttttaccggaagaagcttaaggaggtgtggaaacctgccgtgcggtctggcggatctggcggaggctccacaagctgctaccaggacagcgtgaccttcgacgacgtggccgtggacttcacccaggaggagtggaccctgctggacagcacccagaggagcctgtacagcgacgtgatgctggagaactacaagaacctggccaccgtgggcggccagatcatcaagcccagcctgatcagctggctggagcaggaggagagcaggaccgtgcagggcggcgtgctgaggggcaggaagacccagtggaggggcaccaccagccccaagaaaaagagaaaagtctaagctgccttctgcggggcttgccttctggccatgcccttcttctctcccttgcacctgtacctcttggtctttgaataaagcctgagtaggaaggctagcaaaaaaaaaaaaaaaaaaaaaaaaaaaaaaaaaaaaaaaaaaaaaaaaaaaaaaaaaaaaaaaaaaaaaaaaaaaaaaaa

SEQ ID NO: 5894 - RNA, 5797 nt, synthetic construct
  source 1..5797: mol_type = other RNA
aggaaataagagagaaaagaagagtaagaagaaatataagagccaccatggcccctaagaagaagcgtaaagtgagccggatggaacgcctcgtctacgaggtgcggcagaagtgcagaaacatcgaggacatctgcatctcctgcggatctctgaacgtgaccctggagcacccactgttcatcggcggcatgtgccagaactgtaaaaactgttttctggagtgtgcctatcaatacgacgatgacggctaccagagctactgcaccatctgttgcggcggaagagaggtgctgatgtgtggaaataacaactgctgccggtgcttctgcgtggaatgcgtggacctgctggtgggccccggcgccgcccaggccgctattaaggaagatccttggaactgctacatgtgcggccacaagggcacatacggcctgctgagacggagagaggactggcctagcagactgcagatgttcttcgccaataaccacgaccaggagttcgacccccctaaggtgtaccctcccgtccccgccgagaagagaaagcccatccgggtcctgagcctgttcgatggcatcgccaccggtctgctggtgctgaaggacctgggcatccaggtggataggtacattgcctccgaggtgtgcgaggactccatcaccgtgggaatggtgcgtcatcagggcaagatcatgtacgtgggcgacgtgcggagcgtgacacagaagcatatccaggagtggggccctttcgacctggtgatcggcggcagcccttgcaatgacctgagcatcgtgaacccagcccggaagggcctgtacgagggaaccggcagactgttcttcgagttttacagactgctgcacgacgcccggcctaaggaaggcgacgaccggcccttcttttggctgttcgagaatgtggtggccatgggagtcagcgacaagcgggatattagccggttcctggagagcaaccccgtgatgatcgatgccaaggaagtgagcgccgcccaccgggccagatacttctggggcaatctgcctggcatgaacagacccctggccagcaccgtgaacgacaagctggagctgcaggagtgcctggagcacggccggatcgccaagttcagcaaggtgagaaccatcaccacccgaagcaacagcatcaaacaaggcaaggaccagcactttcctgtgttcatgaacgagaaggaggacatcctgtggtgtaccgagatggagagagtgttcgggttcccagtccactacacagatgtcagcaacatgtctagactggccagacagagactgctgggaagaagctggtccgtccctgtgatcagacacctgttcgcccctctgaaggagtacttcgcctgcgtgagcagcggcaacagcaacgccaacagccggggccccagcttctctagcggcctggtgccactgtccctgagagggagccacatgggccccatggagatctacaaaaccgtgagcgcctggaagcggcagcctgtgcgcgtgctgagcctgtttcggaatatcgataaagtcctgaaaagcctgggattcctggagagcggctctggctccggcggtggcaccctgaagtacgtggaggatgtgacaaacgtggtcagacgggatgtggagaagtggggccccttcgatctggtgtacggcagcacccaacccctgggcagctcttgtgaccggtgccctggctggtacatgtttcagttccaccggatcctgcagtacgccctgccgagacaggagtcccagcggccattcttttggattttcatggacaacttgctgctgaccgaggatgaccaggaaactaccactcggttcctgcagaccgaagccgtgaccctgcaggacgtgagaggccgggactaccagaacgccatgcgggtgtggtccaacatccctggactgaaaagcaagcacgcacctctgacccctaaagaagaggagtacctgcaggcccaggtgcggagcagaagcaagctggacgcccctaaggtggatctgctggtgaagaattgcctcctgcccctgagagagtacttcaagtatttcagccagaatagtctgcccctgggcggcccaagcagcggcgcccctcctcccagcggcggcagcccagccggctccccaacctctaccgaggagggcacctctgagtccgccacccccgagagcggccctggcacctccaccgagcccagcgagggcagcgcacccggcagccctgccggcagccccacctccacagaggagggaaccagcaccgagcccagcgaaggcagcgccccaggcaccagcaccgagcctagtgagggcggctctggcggcggcagcgcccaggagattaaacggatcaacaagatcagaagaagacttgtgaaagacagcaacaccaagaaggccggcaagacaggccccatgaaaaccctgctggttagagtgatgacacccgatctgagagagcggctggaaaacctgagaaagaagcctgaaaatatcccccagcccatcagcaatacatctagagccaacctgaataagctgctgaccgattacaccgaaatgaagaaggcgatcctgcatgtgtactgggaagagttccagaaggaccctgtgggcctgatgagccgggtggcccagcctgccagcaagaagatcgatcagaacaagctgaaacctgagatggacgagaagggcaacctgaccaccgccggctttgcctgctctcagtgtggccagcccctgttcgtgtacaagctggagcaggtgtctgagaagggcaaggcttacaccaactacttcggacggtgcaatgtggccgagcacgaaaagctgatcctgctggcccagctgaagcccgagaaggatagcgacgaagccgtgacatatagcctgggaaagtttgggcagagggccctggatttctacagcattcatgtgaccaaggagtccacccaccccgtgaagcccctggcccagatcgccggaaacagatacgcctccggacctgtgggaaaggccctgagcgacgcatgtatgggcacaatcgcctccttcctgtctaagtaccaggacatcatcatcgaacaccagaaggtggtgaagggcaaccagaagagactggagagcctgcgggagctggccggcaaggaaaacctggaataccctagcgtgaccctgccacctcagcctcacaccaaggagggcgttgatgcctacaacgaagtgatcgcccgggtgcgaatgtgggtgaacctgaacctgtggcagaagctgaagctaagcagagatgatgccaagcctctgctgagactgaagggattcccttcctttcctctggtcgagagacaggccaacgaagtggactggtgggacatggtgtgtaacgtgaagaagctgatcaacgagaaaaaggaggatggcaaggtgttttggcagaatctggctggctacaagagacaggaagccctgagaccatacctgagcagcgaggaagatcggaagaagggaaagaaattcgctcggtaccagctgggcgacctgctgctgcacctggaaaagaagcacggcgaggactggggaaaggtgtacgacgaggcctgggagcggattgacaagaaagtggaaggcctgagcaagcacatcaagctggaagaggaacggagaagcgaggacgcccagagcaaggccgccctgaccgactggctgcgggctaaggccagcttcgtgatcgagggcctgaaggaggccgacaaggacgagttctgcagatgcgagctgaagctgcagaagtggtacggggacctgcggggaaagcccttcgccatcgaagccgagaacagcatcctggacatcagcggcttcagcaagcagtacaactgtgccttcatctggcagaaggacggcgtgaagaagctgaacctgtacctgatcatcaactacttcaagggcggcaagctgcggttcaagaagatcaaacctgaagccttcgaagccaacagattctacaccgtgatcaacaaaaagagcggcgagatcgtgcccatggaggtgaacttcaacttcgacgaccccaacctgatcatcctgcctctggcctttggcaagagacagggcagagaattcatctggaacgacctgctgtccctggaaaccggcagcctgaagctggccaacggaagagtgatcgagaagacactgtacaacagaagaacccggcaggatgagcctgccctgttcgtggccctgaccttcgagcggcgggaggtcctggactcctccaatatcaaaccaatgaacctgatcggcgtggcaagaggcgaaaacatccccgccgtgatcgccctgaccgaccccgagggctgcccactgagccggtttaaggatagcctgggaaacccaacccacatcctgagaatcggcgagagctataaggagaagcagcggaccatccaggccaagaaggaggtggagcagcggagagccggcggctacagccggaagtacgccagcaaagccaagaatctggcagacgatatggtgagaaacaccgctagagatctgctgtactacgccgtgacccaggatgccatgctgatcttcgccaacctgagccggggcttcggccggcagggcaagcggaccttcatggccgagagacagtacacacggatggaggactggctgaccgccaagctggcctacgagggcctgagcaagacctacctgtccaagacactggcccagtacacctccaagacatgcagcaactgtgggtttaccatcaccagcgccgactacgacagggtgctggagaagctgaagaagacagcaacaggctggatgaccacaattaacggcaaggagctgaaggtggagggccagattacctactacaacagatacaagagacagaacgtagtcaaggacctgtccgtcgagctggatagactgagcgaagaatctgtgaacaacgacatctcctcctggacaaagggcagaagcggagaagctctgagcctcctgaagaaaagattctcccatagacccgtgcaggagaagttcgtgtgcctgaactgcggcttcgagacacacgcagccgagcaagccgccctgaacatcgccagatcctggctgttcctgcggagccaggagtacaagaaataccagacaaacaagacaaccggcaacaccgataagagagccttcgtcgagacctggcagtccttttaccggaagaagcttaaggaggtgtggaaacctgccgtgcggtctggcggatctggcggaggctccacaagccaggagcccgtgaccttcgaggacgtggccgtgtacttcacccagaaccagtgggccagcctggacagcgcccagagggccctgtacagggaggtgatgctggagaactacgccaacgtggccagcctggtggtgagccccttccccaggcccgacctgatcagccagctggagaggggcgaggccccctgggaccccgacccctgggaggccgaggacctgaggggcatctgccccggcggcaccagccccaagaaaaagagaaaagtctaagctgccttctgcggggcttgccttctggccatgcccttcttctctcccttgcacctgtacctcttggtctttgaataaagcctgagtaggaaggctagcaaaaaaaaaaaaaaaaaaaaaaaaaaaaaaaaaaaaaaaaaaaaaaaaaaaaaaaaaaaaaaaaaaaaaaaaaaaaaaaa

SEQ ID NO: 5895 - RNA, 5797 nt, synthetic construct
  source 1..5797: mol_type = other RNA
aggaaataagagagaaaagaagagtaagaagaaatataagagccaccatggcccctaagaagaagcgtaaagtgagccggatggaacgcctcgtctacgaggtgcggcagaagtgcagaaacatcgaggacatctgcatctcctgcggatctctgaacgtgaccctggagcacccactgttcatcggcggcatgtgccagaactgtaaaaactgttttctggagtgtgcctatcaatacgacgatgacggctaccagagctactgcaccatctgttgcggcggaagagaggtgctgatgtgtggaaataacaactgctgccggtgcttctgcgtggaatgcgtggacctgctggtgggccccggcgccgcccaggccgctattaaggaagatccttggaactgctacatgtgcggccacaagggcacatacggcctgctgagacggagagaggactggcctagcagactgcagatgttcttcgccaataaccacgaccaggagttcgacccccctaaggtgtaccctcccgtccccgccgagaagagaaagcccatccgggtcctgagcctgttcgatggcatcgccaccggtctgctggtgctgaaggacctgggcatccaggtggataggtacattgcctccgaggtgtgcgaggactccatcaccgtgggaatggtgcgtcatcagggcaagatcatgtacgtgggcgacgtgcggagcgtgacacagaagcatatccaggagtggggccctttcgacctggtgatcggcggcagcccttgcaatgacctgagcatcgtgaacccagcccggaagggcctgtacgagggaaccggcagactgttcttcgagttttacagactgctgcacgacgcccggcctaaggaaggcgacgaccggcccttcttttggctgttcgagaatgtggtggccatgggagtcagcgacaagcgggatattagccggttcctggagagcaaccccgtgatgatcgatgccaaggaagtgagcgccgcccaccgggccagatacttctggggcaatctgcctggcatgaacagacccctggccagcaccgtgaacgacaagctggagctgcaggagtgcctggagcacggccggatcgccaagttcagcaaggtgagaaccatcaccacccgaagcaacagcatcaaacaaggcaaggaccagcactttcctgtgttcatgaacgagaaggaggacatcctgtggtgtaccgagatggagagagtgttcgggttcccagtccactacacagatgtcagcaacatgtctagactggccagacagagactgctgggaagaagctggtccgtccctgtgatcagacacctgttcgcccctctgaaggagtacttcgcctgcgtgagcagcggcaacagcaacgccaacagccggggccccagcttctctagcggcctggtgccactgtccctgagagggagccacatgggccccatggagatctacaaaaccgtgagcgcctggaagcggcagcctgtgcgcgtgctgagcctgtttcggaatatcgataaagtcctgaaaagcctgggattcctggagagcggctctggctccggcggtggcaccctgaagtacgtggaggatgtgacaaacgtggtcagacgggatgtggagaagtggggccccttcgatctggtgtacggcagcacccaacccctgggcagctcttgtgaccggtgccctggctggtacatgtttcagttccaccggatcctgcagtacgccctgccgagacaggagtcccagcggccattcttttggattttcatggacaacttgctgctgaccgaggatgaccaggaaactaccactcggttcctgcagaccgaagccgtgaccctgcaggacgtgagaggccgggactaccagaacgccatgcgggtgtggtccaacatccctggactgaaaagcaagcacgcacctctgacccctaaagaagaggagtacctgcaggcccaggtgcggagcagaagcaagctggacgcccctaaggtggatctgctggtgaagaattgcctcctgcccctgagagagtacttcaagtatttcagccagaatagtctgcccctgggcggcccaagcagcggcgcccctcctcccagcggcggcagcccagccggctccccaacctctaccgaggagggcacctctgagtccgccacccccgagagcggccctggcacctccaccgagcccagcgagggcagcgcacccggcagccctgccggcagccccacctccacagaggagggaaccagcaccgagcccagcgaaggcagcgccccaggcaccagcaccgagcctagtgagggcggctctggcggcggcagcgcccaggagattaaacggatcaacaagatcagaagaagacttgtgaaagacagcaacaccaagaaggccggcaagacaggccccatgaaaaccctgctggttagagtgatgacacccgatctgagagagcggctggaaaacctgagaaagaagcctgaaaatatcccccagcccatcagcaatacatctagagccaacctgaataagctgctgaccgattacaccgaaatgaagaaggcgatcctgcatgtgtactgggaagagttccagaaggaccctgtgggcctgatgagccgggtggcccagcctgccagcaagaagatcgatcagaacaagctgaaacctgagatggacgagaagggcaacctgaccaccgccggctttgcctgctctcagtgtggccagcccctgttcgtgtacaagctggagcaggtgtctgagaagggcaaggcttacaccaactacttcggacggtgcaatgtggccgagcacgaaaagctgatcctgctggcccagctgaagcccgagaaggatagcgacgaagccgtgacatatagcctgggaaagtttgggcagagggccctggatttctacagcattcatgtgaccaaggagtccacccaccccgtgaagcccctggcccagatcgccggaaacagatacgcctccggacctgtgggaaaggccctgagcgacgcatgtatgggcacaatcgcctccttcctgtctaagtaccaggacatcatcatcgaacaccagaaggtggtgaagggcaaccagaagagactggagagcctgcgggagctggccggcaaggaaaacctggaataccctagcgtgaccctgccacctcagcctcacaccaaggagggcgttgatgcctacaacgaagtgatcgcccgggtgcgaatgtgggtgaacctgaacctgtggcagaagctgaagctaagcagagatgatgccaagcctctgctgagactgaagggattcccttcctttcctctggtcgagagacaggccaacgaagtggactggtgggacatggtgtgtaacgtgaagaagctgatcaacgagaaaaaggaggatggcaaggtgttttggcagaatctggctggctacaagagacaggaagccctgagaccatacctgagcagcgaggaagatcggaagaagggaaagaaattcgctcggtaccagctgggcgacctgctgctgcacctggaaaagaagcacggcgaggactggggaaaggtgtacgacgaggcctgggagcggattgacaagaaagtggaaggcctgagcaagcacatcaagctggaagaggaacggagaagcgaggacgcccagagcaaggccgccctgaccgactggctgcgggctaaggccagcttcgtgatcgagggcctgaaggaggccgacaaggacgagttctgcagatgcgagctgaagctgcagaagtggtacggggacctgcggggaaagcccttcgccatcgaagccgagaacagcatcctggacatcagcggcttcagcaagcagtacaactgtgccttcatctggcagaaggacggcgtgaagaagctgaacctgtacctgatcatcaactacttcaagggcggcaagctgcggttcaagaagatcaaacctgaagccttcgaagccaacagattctacaccgtgatcaacaaaaagagcggcgagatcgtgcccatggaggtgaacttcaacttcgacgaccccaacctgatcatcctgcctctggcctttggcaagagacagggcagagaattcatctggaacgacctgctgtccctggaaaccggcagcctgaagctggccaacggaagagtgatcgagaagacactgtacaacagaagaacccggcaggatgagcctgccctgttcgtggccctgaccttcgagcggcgggaggtcctggactcctccaatatcaaaccaatgaacctgatcggcgtggcaagaggcgaaaacatccccgccgtgatcgccctgaccgaccccgagggctgcccactgagccggtttaaggatagcctgggaaacccaacccacatcctgagaatcggcgagagctataaggagaagcagcggaccatccaggccaagaaggaggtggagcagcggagagccggcggctacagccggaagtacgccagcaaagccaagaatctggcagacgatatggtgagaaacaccgctagagatctgctgtactacgccgtgacccaggatgccatgctgatcttcgccaacctgagccggggcttcggccggcagggcaagcggaccttcatggccgagagacagtacacacggatggaggactggctgaccgccaagctggcctacgagggcctgagcaagacctacctgtccaagacactggcccagtacacctccaagacatgcagcaactgtgggtttaccatcaccagcgccgactacgacagggtgctggagaagctgaagaagacagcaacaggctggatgaccacaattaacggcaaggagctgaaggtggagggccagattacctactacaacagatacaagagacagaacgtagtcaaggacctgtccgtcgagctggatagactgagcgaagaatctgtgaacaacgacatctcctcctggacaaagggcagaagcggagaagctctgagcctcctgaagaaaagattctcccatagacccgtgcaggagaagttcgtgtgcctgaactgcggcttcgagacacacgcagccgagcaagccgccctgaacatcgccagatcctggctgttcctgcggagccaggagtacaagaaataccagacaaacaagacaaccggcaacaccgataagagagccttcgtcgagacctggcagtccttttaccggaagaagcttaaggaggtgtggaaacctgccgtgcggtctggcggatctggcggaggctccacaagcatgcccctgggcagcgagctgttcagggacgtggccatcgtgttcagccaggaggagtggcagtggctggcccccgcccagagggacctgtacagggacgtgatgctggagacctacagcaacctggtgagcctgggcctggccatcagcaagcccgacgtgatcagcttcctggagcagggcaaggagccctggatggtggagagggtggtggccggcggcctgtgccccgtgctggagagcaccagccccaagaaaaagagaaaagtctaagctgccttctgcggggcttgccttctggccatgcccttcttctctcccttgcacctgtacctcttggtctttgaataaagcctgagtaggaaggctagcaaaaaaaaaaaaaaaaaaaaaaaaaaaaaaaaaaaaaaaaaaaaaaaaaaaaaaaaaaaaaaaaaaaaaaaaaaaaaaaa

SEQ ID NO: 5896 - RNA, 5797 nt, synthetic construct
  source 1..5797: mol_type = other RNA
aggaaataagagagaaaagaagagtaagaagaaatataagagccaccatggcccctaagaagaagcgtaaagtgagccggatggaacgcctcgtctacgaggtgcggcagaagtgcagaaacatcgaggacatctgcatctcctgcggatctctgaacgtgaccctggagcacccactgttcatcggcggcatgtgccagaactgtaaaaactgttttctggagtgtgcctatcaatacgacgatgacggctaccagagctactgcaccatctgttgcggcggaagagaggtgctgatgtgtggaaataacaactgctgccggtgcttctgcgtggaatgcgtggacctgctggtgggccccggcgccgcccaggccgctattaaggaagatccttggaactgctacatgtgcggccacaagggcacatacggcctgctgagacggagagaggactggcctagcagactgcagatgttcttcgccaataaccacgaccaggagttcgacccccctaaggtgtaccctcccgtccccgccgagaagagaaagcccatccgggtcctgagcctgttcgatggcatcgccaccggtctgctggtgctgaaggacctgggcatccaggtggataggtacattgcctccgaggtgtgcgaggactccatcaccgtgggaatggtgcgtcatcagggcaagatcatgtacgtgggcgacgtgcggagcgtgacacagaagcatatccaggagtggggccctttcgacctggtgatcggcggcagcccttgcaatgacctgagcatcgtgaacccagcccggaagggcctgtacgagggaaccggcagactgttcttcgagttttacagactgctgcacgacgcccggcctaaggaaggcgacgaccggcccttcttttggctgttcgagaatgtggtggccatgggagtcagcgacaagcgggatattagccggttcctggagagcaaccccgtgatgatcgatgccaaggaagtgagcgccgcccaccgggccagatacttctggggcaatctgcctggcatgaacagacccctggccagcaccgtgaacgacaagctggagctgcaggagtgcctggagcacggccggatcgccaagttcagcaaggtgagaaccatcaccacccgaagcaacagcatcaaacaaggcaaggaccagcactttcctgtgttcatgaacgagaaggaggacatcctgtggtgtaccgagatggagagagtgttcgggttcccagtccactacacagatgtcagcaacatgtctagactggccagacagagactgctgggaagaagctggtccgtccctgtgatcagacacctgttcgcccctctgaaggagtacttcgcctgcgtgagcagcggcaacagcaacgccaacagccggggccccagcttctctagcggcctggtgccactgtccctgagagggagccacatgggccccatggagatctacaaaaccgtgagcgcctggaagcggcagcctgtgcgcgtgctgagcctgtttcggaatatcgataaagtcctgaaaagcctgggattcctggagagcggctctggctccggcggtggcaccctgaagtacgtggaggatgtgacaaacgtggtcagacgggatgtggagaagtggggccccttcgatctggtgtacggcagcacccaacccctgggcagctcttgtgaccggtgccctggctggtacatgtttcagttccaccggatcctgcagtacgccctgccgagacaggagtcccagcggccattcttttggattttcatggacaacttgctgctgaccgaggatgaccaggaaactaccactcggttcctgcagaccgaagccgtgaccctgcaggacgtgagaggccgggactaccagaacgccatgcgggtgtggtccaacatccctggactgaaaagcaagcacgcacctctgacccctaaagaagaggagtacctgcaggcccaggtgcggagcagaagcaagctggacgcccctaaggtggatctgctggtgaagaattgcctcctgcccctgagagagtacttcaagtatttcagccagaatagtctgcccctgggcggcccaagcagcggcgcccctcctcccagcggcggcagcccagccggctccccaacctctaccgaggagggcacctctgagtccgccacccccgagagcggccctggcacctccaccgagcccagcgagggcagcgcacccggcagccctgccggcagccccacctccacagaggagggaaccagcaccgagcccagcgaaggcagcgccccaggcaccagcaccgagcctagtgagggcggctctggcggcggcagcgcccaggagattaaacggatcaacaagatcagaagaagacttgtgaaagacagcaacaccaagaaggccggcaagacaggccccatgaaaaccctgctggttagagtgatgacacccgatctgagagagcggctggaaaacctgagaaagaagcctgaaaatatcccccagcccatcagcaatacatctagagccaacctgaataagctgctgaccgattacaccgaaatgaagaaggcgatcctgcatgtgtactgggaagagttccagaaggaccctgtgggcctgatgagccgggtggcccagcctgccagcaagaagatcgatcagaacaagctgaaacctgagatggacgagaagggcaacctgaccaccgccggctttgcctgctctcagtgtggccagcccctgttcgtgtacaagctggagcaggtgtctgagaagggcaaggcttacaccaactacttcggacggtgcaatgtggccgagcacgaaaagctgatcctgctggcccagctgaagcccgagaaggatagcgacgaagccgtgacatatagcctgggaaagtttgggcagagggccctggatttctacagcattcatgtgaccaaggagtccacccaccccgtgaagcccctggcccagatcgccggaaacagatacgcctccggacctgtgggaaaggccctgagcgacgcatgtatgggcacaatcgcctccttcctgtctaagtaccaggacatcatcatcgaacaccagaaggtggtgaagggcaaccagaagagactggagagcctgcgggagctggccggcaaggaaaacctggaataccctagcgtgaccctgccacctcagcctcacaccaaggagggcgttgatgcctacaacgaagtgatcgcccgggtgcgaatgtgggtgaacctgaacctgtggcagaagctgaagctaagcagagatgatgccaagcctctgctgagactgaagggattcccttcctttcctctggtcgagagacaggccaacgaagtggactggtgggacatggtgtgtaacgtgaagaagctgatcaacgagaaaaaggaggatggcaaggtgttttggcagaatctggctggctacaagagacaggaagccctgagaccatacctgagcagcgaggaagatcggaagaagggaaagaaattcgctcggtaccagctgggcgacctgctgctgcacctggaaaagaagcacggcgaggactggggaaaggtgtacgacgaggcctgggagcggattgacaagaaagtggaaggcctgagcaagcacatcaagctggaagaggaacggagaagcgaggacgcccagagcaaggccgccctgaccgactggctgcgggctaaggccagcttcgtgatcgagggcctgaaggaggccgacaaggacgagttctgcagatgcgagctgaagctgcagaagtggtacggggacctgcggggaaagcccttcgccatcgaagccgagaacagcatcctggacatcagcggcttcagcaagcagtacaactgtgccttcatctggcagaaggacggcgtgaagaagctgaacctgtacctgatcatcaactacttcaagggcggcaagctgcggttcaagaagatcaaacctgaagccttcgaagccaacagattctacaccgtgatcaacaaaaagagcggcgagatcgtgcccatggaggtgaacttcaacttcgacgaccccaacctgatcatcctgcctctggcctttggcaagagacagggcagagaattcatctggaacgacctgctgtccctggaaaccggcagcctgaagctggccaacggaagagtgatcgagaagacactgtacaacagaagaacccggcaggatgagcctgccctgttcgtggccctgaccttcgagcggcgggaggtcctggactcctccaatatcaaaccaatgaacctgatcggcgtggcaagaggcgaaaacatccccgccgtgatcgccctgaccgaccccgagggctgcccactgagccggtttaaggatagcctgggaaacccaacccacatcctgagaatcggcgagagctataaggagaagcagcggaccatccaggccaagaaggaggtggagcagcggagagccggcggctacagccggaagtacgccagcaaagccaagaatctggcagacgatatggtgagaaacaccgctagagatctgctgtactacgccgtgacccaggatgccatgctgatcttcgccaacctgagccggggcttcggccggcagggcaagcggaccttcatggccgagagacagtacacacggatggaggactggctgaccgccaagctggcctacgagggcctgagcaagacctacctgtccaagacactggcccagtacacctccaagacatgcagcaactgtgggtttaccatcaccagcgccgactacgacagggtgctggagaagctgaagaagacagcaacaggctggatgaccacaattaacggcaaggagctgaaggtggagggccagattacctactacaacagatacaagagacagaacgtagtcaaggacctgtccgtcgagctggatagactgagcgaagaatctgtgaacaacgacatctcctcctggacaaagggcagaagcggagaagctctgagcctcctgaagaaaagattctcccatagacccgtgcaggagaagttcgtgtgcctgaactgcggcttcgagacacacgcagccgagcaagccgccctgaacatcgccagatcctggctgttcctgcggagccaggagtacaagaaataccagacaaacaagacaaccggcaacaccgataagagagccttcgtcgagacctggcagtccttttaccggaagaagcttaaggaggtgtggaaacctgccgtgcggtctggcggatctggcggaggctccacaagcctggcccccgaggaccacggcagcagctacgagggcagcgtgagcttcagggacgtggccatcgacttcagcagggaggagtggaggcacctggacctgagccagaggaacctgtacagggacgtgatgctggagacctacagccacctgctgagcgtgggctaccaggtgcccgaggccgaggtggtgatgctggagcagggcaaggagccctgggccctgcagggcgagaggcccaggcacaccagccccaagaaaaagagaaaagtctaagctgccttctgcggggcttgccttctggccatgcccttcttctctcccttgcacctgtacctcttggtctttgaataaagcctgagtaggaaggctagcaaaaaaaaaaaaaaaaaaaaaaaaaaaaaaaaaaaaaaaaaaaaaaaaaaaaaaaaaaaaaaaaaaaaaaaaaaaaaaaa

SEQ ID NO: 5897 - RNA, 5797 nt, synthetic construct
  source 1..5797: mol_type = other RNA
aggaaataagagagaaaagaagagtaagaagaaatataagagccaccatggcccctaagaagaagcgtaaagtgagccggatggaacgcctcgtctacgaggtgcggcagaagtgcagaaacatcgaggacatctgcatctcctgcggatctctgaacgtgaccctggagcacccactgttcatcggcggcatgtgccagaactgtaaaaactgttttctggagtgtgcctatcaatacgacgatgacggctaccagagctactgcaccatctgttgcggcggaagagaggtgctgatgtgtggaaataacaactgctgccggtgcttctgcgtggaatgcgtggacctgctggtgggccccggcgccgcccaggccgctattaaggaagatccttggaactgctacatgtgcggccacaagggcacatacggcctgctgagacggagagaggactggcctagcagactgcagatgttcttcgccaataaccacgaccaggagttcgacccccctaaggtgtaccctcccgtccccgccgagaagagaaagcccatccgggtcctgagcctgttcgatggcatcgccaccggtctgctggtgctgaaggacctgggcatccaggtggataggtacattgcctccgaggtgtgcgaggactccatcaccgtgggaatggtgcgtcatcagggcaagatcatgtacgtgggcgacgtgcggagcgtgacacagaagcatatccaggagtggggccctttcgacctggtgatcggcggcagcccttgcaatgacctgagcatcgtgaacccagcccggaagggcctgtacgagggaaccggcagactgttcttcgagttttacagactgctgcacgacgcccggcctaaggaaggcgacgaccggcccttcttttggctgttcgagaatgtggtggccatgggagtcagcgacaagcgggatattagccggttcctggagagcaaccccgtgatgatcgatgccaaggaagtgagcgccgcccaccgggccagatacttctggggcaatctgcctggcatgaacagacccctggccagcaccgtgaacgacaagctggagctgcaggagtgcctggagcacggccggatcgccaagttcagcaaggtgagaaccatcaccacccgaagcaacagcatcaaacaaggcaaggaccagcactttcctgtgttcatgaacgagaaggaggacatcctgtggtgtaccgagatggagagagtgttcgggttcccagtccactacacagatgtcagcaacatgtctagactggccagacagagactgctgggaagaagctggtccgtccctgtgatcagacacctgttcgcccctctgaaggagtacttcgcctgcgtgagcagcggcaacagcaacgccaacagccggggccccagcttctctagcggcctggtgccactgtccctgagagggagccacatgggccccatggagatctacaaaaccgtgagcgcctggaagcggcagcctgtgcgcgtgctgagcctgtttcggaatatcgataaagtcctgaaaagcctgggattcctggagagcggctctggctccggcggtggcaccctgaagtacgtggaggatgtgacaaacgtggtcagacgggatgtggagaagtggggccccttcgatctggtgtacggcagcacccaacccctgggcagctcttgtgaccggtgccctggctggtacatgtttcagttccaccggatcctgcagtacgccctgccgagacaggagtcccagcggccattcttttggattttcatggacaacttgctgctgaccgaggatgaccaggaaactaccactcggttcctgcagaccgaagccgtgaccctgcaggacgtgagaggccgggactaccagaacgccatgcgggtgtggtccaacatccctggactgaaaagcaagcacgcacctctgacccctaaagaagaggagtacctgcaggcccaggtgcggagcagaagcaagctggacgcccctaaggtggatctgctggtgaagaattgcctcctgcccctgagagagtacttcaagtatttcagccagaatagtctgcccctgggcggcccaagcagcggcgcccctcctcccagcggcggcagcccagccggctccccaacctctaccgaggagggcacctctgagtccgccacccccgagagcggccctggcacctccaccgagcccagcgagggcagcgcacccggcagccctgccggcagccccacctccacagaggagggaaccagcaccgagcccagcgaaggcagcgccccaggcaccagcaccgagcctagtgagggcggctctggcggcggcagcgcccaggagattaaacggatcaacaagatcagaagaagacttgtgaaagacagcaacaccaagaaggccggcaagacaggccccatgaaaaccctgctggttagagtgatgacacccgatctgagagagcggctggaaaacctgagaaagaagcctgaaaatatcccccagcccatcagcaatacatctagagccaacctgaataagctgctgaccgattacaccgaaatgaagaaggcgatcctgcatgtgtactgggaagagttccagaaggaccctgtgggcctgatgagccgggtggcccagcctgccagcaagaagatcgatcagaacaagctgaaacctgagatggacgagaagggcaacctgaccaccgccggctttgcctgctctcagtgtggccagcccctgttcgtgtacaagctggagcaggtgtctgagaagggcaaggcttacaccaactacttcggacggtgcaatgtggccgagcacgaaaagctgatcctgctggcccagctgaagcccgagaaggatagcgacgaagccgtgacatatagcctgggaaagtttgggcagagggccctggatttctacagcattcatgtgaccaaggagtccacccaccccgtgaagcccctggcccagatcgccggaaacagatacgcctccggacctgtgggaaaggccctgagcgacgcatgtatgggcacaatcgcctccttcctgtctaagtaccaggacatcatcatcgaacaccagaaggtggtgaagggcaaccagaagagactggagagcctgcgggagctggccggcaaggaaaacctggaataccctagcgtgaccctgccacctcagcctcacaccaaggagggcgttgatgcctacaacgaagtgatcgcccgggtgcgaatgtgggtgaacctgaacctgtggcagaagctgaagctaagcagagatgatgccaagcctctgctgagactgaagggattcccttcctttcctctggtcgagagacaggccaacgaagtggactggtgggacatggtgtgtaacgtgaagaagctgatcaacgagaaaaaggaggatggcaaggtgttttggcagaatctggctggctacaagagacaggaagccctgagaccatacctgagcagcgaggaagatcggaagaagggaaagaaattcgctcggtaccagctgggcgacctgctgctgcacctggaaaagaagcacggcgaggactggggaaaggtgtacgacgaggcctgggagcggattgacaagaaagtggaaggcctgagcaagcacatcaagctggaagaggaacggagaagcgaggacgcccagagcaaggccgccctgaccgactggctgcgggctaaggccagcttcgtgatcgagggcctgaaggaggccgacaaggacgagttctgcagatgcgagctgaagctgcagaagtggtacggggacctgcggggaaagcccttcgccatcgaagccgagaacagcatcctggacatcagcggcttcagcaagcagtacaactgtgccttcatctggcagaaggacggcgtgaagaagctgaacctgtacctgatcatcaactacttcaagggcggcaagctgcggttcaagaagatcaaacctgaagccttcgaagccaacagattctacaccgtgatcaacaaaaagagcggcgagatcgtgcccatggaggtgaacttcaacttcgacgaccccaacctgatcatcctgcctctggcctttggcaagagacagggcagagaattcatctggaacgacctgctgtccctggaaaccggcagcctgaagctggccaacggaagagtgatcgagaagacactgtacaacagaagaacccggcaggatgagcctgccctgttcgtggccctgaccttcgagcggcgggaggtcctggactcctccaatatcaaaccaatgaacctgatcggcgtggcaagaggcgaaaacatccccgccgtgatcgccctgaccgaccccgagggctgcccactgagccggtttaaggatagcctgggaaacccaacccacatcctgagaatcggcgagagctataaggagaagcagcggaccatccaggccaagaaggaggtggagcagcggagagccggcggctacagccggaagtacgccagcaaagccaagaatctggcagacgatatggtgagaaacaccgctagagatctgctgtactacgccgtgacccaggatgccatgctgatcttcgccaacctgagccggggcttcggccggcagggcaagcggaccttcatggccgagagacagtacacacggatggaggactggctgaccgccaagctggcctacgagggcctgagcaagacctacctgtccaagacactggcccagtacacctccaagacatgcagcaactgtgggtttaccatcaccagcgccgactacgacagggtgctggagaagctgaagaagacagcaacaggctggatgaccacaattaacggcaaggagctgaaggtggagggccagattacctactacaacagatacaagagacagaacgtagtcaaggacctgtccgtcgagctggatagactgagcgaagaatctgtgaacaacgacatctcctcctggacaaagggcagaagcggagaagctctgagcctcctgaagaaaagattctcccatagacccgtgcaggagaagttcgtgtgcctgaactgcggcttcgagacacacgcagccgagcaagccgccctgaacatcgccagatcctggctgttcctgcggagccaggagtacaagaaataccagacaaacaagacaaccggcaacaccgataagagagccttcgtcgagacctggcagtccttttaccggaagaagcttaaggaggtgtggaaacctgccgtgcggtctggcggatctggcggaggctccacaagcgacgaggccctgatggccttcaaggacgtggccgtggccttcacccagaaggagtggaagctgctgagccccgcccagaggaccctgtacagggacgtgatgctggagaactacagccacatggtgagcctgggcatcgccttccccaagcccaagctgatcacccagctggagcagggcgaggagccctggagggaggagagcgagagcctgctggacctgtgccccgccgagcccaggaccaccagccccaagaaaaagagaaaagtctaagctgccttctgcggggcttgccttctggccatgcccttcttctctcccttgcacctgtacctcttggtctttgaataaagcctgagtaggaaggctagcaaaaaaaaaaaaaaaaaaaaaaaaaaaaaaaaaaaaaaaaaaaaaaaaaaaaaaaaaaaaaaaaaaaaaaaaaaaaaaaa

SEQ ID NO: 5898 - RNA, 5797 nt, synthetic construct
  source 1..5797: mol_type = other RNA
aggaaataagagagaaaagaagagtaagaagaaatataagagccaccatggcccctaagaagaagcgtaaagtgagccggatggaacgcctcgtctacgaggtgcggcagaagtgcagaaacatcgaggacatctgcatctcctgcggatctctgaacgtgaccctggagcacccactgttcatcggcggcatgtgccagaactgtaaaaactgttttctggagtgtgcctatcaatacgacgatgacggctaccagagctactgcaccatctgttgcggcggaagagaggtgctgatgtgtggaaataacaactgctgccggtgcttctgcgtggaatgcgtggacctgctggtgggccccggcgccgcccaggccgctattaaggaagatccttggaactgctacatgtgcggccacaagggcacatacggcctgctgagacggagagaggactggcctagcagactgcagatgttcttcgccaataaccacgaccaggagttcgacccccctaaggtgtaccctcccgtccccgccgagaagagaaagcccatccgggtcctgagcctgttcgatggcatcgccaccggtctgctggtgctgaaggacctgggcatccaggtggataggtacattgcctccgaggtgtgcgaggactccatcaccgtgggaatggtgcgtcatcagggcaagatcatgtacgtgggcgacgtgcggagcgtgacacagaagcatatccaggagtggggccctttcgacctggtgatcggcggcagcccttgcaatgacctgagcatcgtgaacccagcccggaagggcctgtacgagggaaccggcagactgttcttcgagttttacagactgctgcacgacgcccggcctaaggaaggcgacgaccggcccttcttttggctgttcgagaatgtggtggccatgggagtcagcgacaagcgggatattagccggttcctggagagcaaccccgtgatgatcgatgccaaggaagtgagcgccgcccaccgggccagatacttctggggcaatctgcctggcatgaacagacccctggccagcaccgtgaacgacaagctggagctgcaggagtgcctggagcacggccggatcgccaagttcagcaaggtgagaaccatcaccacccgaagcaacagcatcaaacaaggcaaggaccagcactttcctgtgttcatgaacgagaaggaggacatcctgtggtgtaccgagatggagagagtgttcgggttcccagtccactacacagatgtcagcaacatgtctagactggccagacagagactgctgggaagaagctggtccgtccctgtgatcagacacctgttcgcccctctgaaggagtacttcgcctgcgtgagcagcggcaacagcaacgccaacagccggggccccagcttctctagcggcctggtgccactgtccctgagagggagccacatgggccccatggagatctacaaaaccgtgagcgcctggaagcggcagcctgtgcgcgtgctgagcctgtttcggaatatcgataaagtcctgaaaagcctgggattcctggagagcggctctggctccggcggtggcaccctgaagtacgtggaggatgtgacaaacgtggtcagacgggatgtggagaagtggggccccttcgatctggtgtacggcagcacccaacccctgggcagctcttgtgaccggtgccctggctggtacatgtttcagttccaccggatcctgcagtacgccctgccgagacaggagtcccagcggccattcttttggattttcatggacaacttgctgctgaccgaggatgaccaggaaactaccactcggttcctgcagaccgaagccgtgaccctgcaggacgtgagaggccgggactaccagaacgccatgcgggtgtggtccaacatccctggactgaaaagcaagcacgcacctctgacccctaaagaagaggagtacctgcaggcccaggtgcggagcagaagcaagctggacgcccctaaggtggatctgctggtgaagaattgcctcctgcccctgagagagtacttcaagtatttcagccagaatagtctgcccctgggcggcccaagcagcggcgcccctcctcccagcggcggcagcccagccggctccccaacctctaccgaggagggcacctctgagtccgccacccccgagagcggccctggcacctccaccgagcccagcgagggcagcgcacccggcagccctgccggcagccccacctccacagaggagggaaccagcaccgagcccagcgaaggcagcgccccaggcaccagcaccgagcctagtgagggcggctctggcggcggcagcgcccaggagattaaacggatcaacaagatcagaagaagacttgtgaaagacagcaacaccaagaaggccggcaagacaggccccatgaaaaccctgctggttagagtgatgacacccgatctgagagagcggctggaaaacctgagaaagaagcctgaaaatatcccccagcccatcagcaatacatctagagccaacctgaataagctgctgaccgattacaccgaaatgaagaaggcgatcctgcatgtgtactgggaagagttccagaaggaccctgtgggcctgatgagccgggtggcccagcctgccagcaagaagatcgatcagaacaagctgaaacctgagatggacgagaagggcaacctgaccaccgccggctttgcctgctctcagtgtggccagcccctgttcgtgtacaagctggagcaggtgtctgagaagggcaaggcttacaccaactacttcggacggtgcaatgtggccgagcacgaaaagctgatcctgctggcccagctgaagcccgagaaggatagcgacgaagccgtgacatatagcctgggaaagtttgggcagagggccctggatttctacagcattcatgtgaccaaggagtccacccaccccgtgaagcccctggcccagatcgccggaaacagatacgcctccggacctgtgggaaaggccctgagcgacgcatgtatgggcacaatcgcctccttcctgtctaagtaccaggacatcatcatcgaacaccagaaggtggtgaagggcaaccagaagagactggagagcctgcgggagctggccggcaaggaaaacctggaataccctagcgtgaccctgccacctcagcctcacaccaaggagggcgttgatgcctacaacgaagtgatcgcccgggtgcgaatgtgggtgaacctgaacctgtggcagaagctgaagctaagcagagatgatgccaagcctctgctgagactgaagggattcccttcctttcctctggtcgagagacaggccaacgaagtggactggtgggacatggtgtgtaacgtgaagaagctgatcaacgagaaaaaggaggatggcaaggtgttttggcagaatctggctggctacaagagacaggaagccctgagaccatacctgagcagcgaggaagatcggaagaagggaaagaaattcgctcggtaccagctgggcgacctgctgctgcacctggaaaagaagcacggcgaggactggggaaaggtgtacgacgaggcctgggagcggattgacaagaaagtggaaggcctgagcaagcacatcaagctggaagaggaacggagaagcgaggacgcccagagcaaggccgccctgaccgactggctgcgggctaaggccagcttcgtgatcgagggcctgaaggaggccgacaaggacgagttctgcagatgcgagctgaagctgcagaagtggtacggggacctgcggggaaagcccttcgccatcgaagccgagaacagcatcctggacatcagcggcttcagcaagcagtacaactgtgccttcatctggcagaaggacggcgtgaagaagctgaacctgtacctgatcatcaactacttcaagggcggcaagctgcggttcaagaagatcaaacctgaagccttcgaagccaacagattctacaccgtgatcaacaaaaagagcggcgagatcgtgcccatggaggtgaacttcaacttcgacgaccccaacctgatcatcctgcctctggcctttggcaagagacagggcagagaattcatctggaacgacctgctgtccctggaaaccggcagcctgaagctggccaacggaagagtgatcgagaagacactgtacaacagaagaacccggcaggatgagcctgccctgttcgtggccctgaccttcgagcggcgggaggtcctggactcctccaatatcaaaccaatgaacctgatcggcgtggcaagaggcgaaaacatccccgccgtgatcgccctgaccgaccccgagggctgcccactgagccggtttaaggatagcctgggaaacccaacccacatcctgagaatcggcgagagctataaggagaagcagcggaccatccaggccaagaaggaggtggagcagcggagagccggcggctacagccggaagtacgccagcaaagccaagaatctggcagacgatatggtgagaaacaccgctagagatctgctgtactacgccgtgacccaggatgccatgctgatcttcgccaacctgagccggggcttcggccggcagggcaagcggaccttcatggccgagagacagtacacacggatggaggactggctgaccgccaagctggcctacgagggcctgagcaagacctacctgtccaagacactggcccagtacacctccaagacatgcagcaactgtgggtttaccatcaccagcgccgactacgacagggtgctggagaagctgaagaagacagcaacaggctggatgaccacaattaacggcaaggagctgaaggtggagggccagattacctactacaacagatacaagagacagaacgtagtcaaggacctgtccgtcgagctggatagactgagcgaagaatctgtgaacaacgacatctcctcctggacaaagggcagaagcggagaagctctgagcctcctgaagaaaagattctcccatagacccgtgcaggagaagttcgtgtgcctgaactgcggcttcgagacacacgcagccgagcaagccgccctgaacatcgccagatcctggctgttcctgcggagccaggagtacaagaaataccagacaaacaagacaaccggcaacaccgataagagagccttcgtcgagacctggcagtccttttaccggaagaagcttaaggaggtgtggaaacctgccgtgcggtctggcggatctggcggaggctccacaagcgcccaggagagcgtgatgttcagcgacgtgagcatcgacttcagccaggaggagtgggagtgcctgaacgacgaccagagggccctgtacagggacgtgatgctggagaactacagcaacctggtgagcatgggccacagcatcagcaagcccgacgtgatcagcttcctggagcagggcaaggagccctggctggtggacagggagctgaccaggggccagtggcccgtgctggagagcaggaccagccccaagaaaaagagaaaagtctaagctgccttctgcggggcttgccttctggccatgcccttcttctctcccttgcacctgtacctcttggtctttgaataaagcctgagtaggaaggctagcaaaaaaaaaaaaaaaaaaaaaaaaaaaaaaaaaaaaaaaaaaaaaaaaaaaaaaaaaaaaaaaaaaaaaaaaaaaaaaaa

SEQ ID NO: 5899 - RNA, 5797 nt, synthetic construct
  source 1..5797: mol_type = other RNA
aggaaataagagagaaaagaagagtaagaagaaatataagagccaccatggcccctaagaagaagcgtaaagtgagccggatggaacgcctcgtctacgaggtgcggcagaagtgcagaaacatcgaggacatctgcatctcctgcggatctctgaacgtgaccctggagcacccactgttcatcggcggcatgtgccagaactgtaaaaactgttttctggagtgtgcctatcaatacgacgatgacggctaccagagctactgcaccatctgttgcggcggaagagaggtgctgatgtgtggaaataacaactgctgccggtgcttctgcgtggaatgcgtggacctgctggtgggccccggcgccgcccaggccgctattaaggaagatccttggaactgctacatgtgcggccacaagggcacatacggcctgctgagacggagagaggactggcctagcagactgcagatgttcttcgccaataaccacgaccaggagttcgacccccctaaggtgtaccctcccgtccccgccgagaagagaaagcccatccgggtcctgagcctgttcgatggcatcgccaccggtctgctggtgctgaaggacctgggcatccaggtggataggtacattgcctccgaggtgtgcgaggactccatcaccgtgggaatggtgcgtcatcagggcaagatcatgtacgtgggcgacgtgcggagcgtgacacagaagcatatccaggagtggggccctttcgacctggtgatcggcggcagcccttgcaatgacctgagcatcgtgaacccagcccggaagggcctgtacgagggaaccggcagactgttcttcgagttttacagactgctgcacgacgcccggcctaaggaaggcgacgaccggcccttcttttggctgttcgagaatgtggtggccatgggagtcagcgacaagcgggatattagccggttcctggagagcaaccccgtgatgatcgatgccaaggaagtgagcgccgcccaccgggccagatacttctggggcaatctgcctggcatgaacagacccctggccagcaccgtgaacgacaagctggagctgcaggagtgcctggagcacggccggatcgccaagttcagcaaggtgagaaccatcaccacccgaagcaacagcatcaaacaaggcaaggaccagcactttcctgtgttcatgaacgagaaggaggacatcctgtggtgtaccgagatggagagagtgttcgggttcccagtccactacacagatgtcagcaacatgtctagactggccagacagagactgctgggaagaagctggtccgtccctgtgatcagacacctgttcgcccctctgaaggagtacttcgcctgcgtgagcagcggcaacagcaacgccaacagccggggccccagcttctctagcggcctggtgccactgtccctgagagggagccacatgggccccatggagatctacaaaaccgtgagcgcctggaagcggcagcctgtgcgcgtgctgagcctgtttcggaatatcgataaagtcctgaaaagcctgggattcctggagagcggctctggctccggcggtggcaccctgaagtacgtggaggatgtgacaaacgtggtcagacgggatgtggagaagtggggccccttcgatctggtgtacggcagcacccaacccctgggcagctcttgtgaccggtgccctggctggtacatgtttcagttccaccggatcctgcagtacgccctgccgagacaggagtcccagcggccattcttttggattttcatggacaacttgctgctgaccgaggatgaccaggaaactaccactcggttcctgcagaccgaagccgtgaccctgcaggacgtgagaggccgggactaccagaacgccatgcgggtgtggtccaacatccctggactgaaaagcaagcacgcacctctgacccctaaagaagaggagtacctgcaggcccaggtgcggagcagaagcaagctggacgcccctaaggtggatctgctggtgaagaattgcctcctgcccctgagagagtacttcaagtatttcagccagaatagtctgcccctgggcggcccaagcagcggcgcccctcctcccagcggcggcagcccagccggctccccaacctctaccgaggagggcacctctgagtccgccacccccgagagcggccctggcacctccaccgagcccagcgagggcagcgcacccggcagccctgccggcagccccacctccacagaggagggaaccagcaccgagcccagcgaaggcagcgccccaggcaccagcaccgagcctagtgagggcggctctggcggcggcagcgcccaggagattaaacggatcaacaagatcagaagaagacttgtgaaagacagcaacaccaagaaggccggcaagacaggccccatgaaaaccctgctggttagagtgatgacacccgatctgagagagcggctggaaaacctgagaaagaagcctgaaaatatcccccagcccatcagcaatacatctagagccaacctgaataagctgctgaccgattacaccgaaatgaagaaggcgatcctgcatgtgtactgggaagagttccagaaggaccctgtgggcctgatgagccgggtggcccagcctgccagcaagaagatcgatcagaacaagctgaaacctgagatggacgagaagggcaacctgaccaccgccggctttgcctgctctcagtgtggccagcccctgttcgtgtacaagctggagcaggtgtctgagaagggcaaggcttacaccaactacttcggacggtgcaatgtggccgagcacgaaaagctgatcctgctggcccagctgaagcccgagaaggatagcgacgaagccgtgacatatagcctgggaaagtttgggcagagggccctggatttctacagcattcatgtgaccaaggagtccacccaccccgtgaagcccctggcccagatcgccggaaacagatacgcctccggacctgtgggaaaggccctgagcgacgcatgtatgggcacaatcgcctccttcctgtctaagtaccaggacatcatcatcgaacaccagaaggtggtgaagggcaaccagaagagactggagagcctgcgggagctggccggcaaggaaaacctggaataccctagcgtgaccctgccacctcagcctcacaccaaggagggcgttgatgcctacaacgaagtgatcgcccgggtgcgaatgtgggtgaacctgaacctgtggcagaagctgaagctaagcagagatgatgccaagcctctgctgagactgaagggattcccttcctttcctctggtcgagagacaggccaacgaagtggactggtgggacatggtgtgtaacgtgaagaagctgatcaacgagaaaaaggaggatggcaaggtgttttggcagaatctggctggctacaagagacaggaagccctgagaccatacctgagcagcgaggaagatcggaagaagggaaagaaattcgctcggtaccagctgggcgacctgctgctgcacctggaaaagaagcacggcgaggactggggaaaggtgtacgacgaggcctgggagcggattgacaagaaagtggaaggcctgagcaagcacatcaagctggaagaggaacggagaagcgaggacgcccagagcaaggccgccctgaccgactggctgcgggctaaggccagcttcgtgatcgagggcctgaaggaggccgacaaggacgagttctgcagatgcgagctgaagctgcagaagtggtacggggacctgcggggaaagcccttcgccatcgaagccgagaacagcatcctggacatcagcggcttcagcaagcagtacaactgtgccttcatctggcagaaggacggcgtgaagaagctgaacctgtacctgatcatcaactacttcaagggcggcaagctgcggttcaagaagatcaaacctgaagccttcgaagccaacagattctacaccgtgatcaacaaaaagagcggcgagatcgtgcccatggaggtgaacttcaacttcgacgaccccaacctgatcatcctgcctctggcctttggcaagagacagggcagagaattcatctggaacgacctgctgtccctggaaaccggcagcctgaagctggccaacggaagagtgatcgagaagacactgtacaacagaagaacccggcaggatgagcctgccctgttcgtggccctgaccttcgagcggcgggaggtcctggactcctccaatatcaaaccaatgaacctgatcggcgtggcaagaggcgaaaacatccccgccgtgatcgccctgaccgaccccgagggctgcccactgagccggtttaaggatagcctgggaaacccaacccacatcctgagaatcggcgagagctataaggagaagcagcggaccatccaggccaagaaggaggtggagcagcggagagccggcggctacagccggaagtacgccagcaaagccaagaatctggcagacgatatggtgagaaacaccgctagagatctgctgtactacgccgtgacccaggatgccatgctgatcttcgccaacctgagccggggcttcggccggcagggcaagcggaccttcatggccgagagacagtacacacggatggaggactggctgaccgccaagctggcctacgagggcctgagcaagacctacctgtccaagacactggcccagtacacctccaagacatgcagcaactgtgggtttaccatcaccagcgccgactacgacagggtgctggagaagctgaagaagacagcaacaggctggatgaccacaattaacggcaaggagctgaaggtggagggccagattacctactacaacagatacaagagacagaacgtagtcaaggacctgtccgtcgagctggatagactgagcgaagaatctgtgaacaacgacatctcctcctggacaaagggcagaagcggagaagctctgagcctcctgaagaaaagattctcccatagacccgtgcaggagaagttcgtgtgcctgaactgcggcttcgagacacacgcagccgagcaagccgccctgaacatcgccagatcctggctgttcctgcggagccaggagtacaagaaataccagacaaacaagacaaccggcaacaccgataagagagccttcgtcgagacctggcagtccttttaccggaagaagcttaaggaggtgtggaaacctgccgtgcggtctggcggatctggcggaggctccacaagcccccaggtgctggtgagcttcgaggaggtggccgtgctgctgagccaggaggagtggggccacctgggccccgaccagaagaggctgtacagggacgtgatgctggagacctacggcaacctggtgagcctgggcctgcagggcagcaagcccgacgtgatcagcaagctggagcagggcgaggagccctgggccccccacagccccaggatcgagggcagctggatctggaggaggaggaggaccagccccaagaaaaagagaaaagtctaagctgccttctgcggggcttgccttctggccatgcccttcttctctcccttgcacctgtacctcttggtctttgaataaagcctgagtaggaaggctagcaaaaaaaaaaaaaaaaaaaaaaaaaaaaaaaaaaaaaaaaaaaaaaaaaaaaaaaaaaaaaaaaaaaaaaaaaaaaaaaa

SEQ ID NO: 5900 - RNA, 5797 nt, synthetic construct
  source 1..5797: mol_type = other RNA
aggaaataagagagaaaagaagagtaagaagaaatataagagccaccatggcccctaagaagaagcgtaaagtgagccggatggaacgcctcgtctacgaggtgcggcagaagtgcagaaacatcgaggacatctgcatctcctgcggatctctgaacgtgaccctggagcacccactgttcatcggcggcatgtgccagaactgtaaaaactgttttctggagtgtgcctatcaatacgacgatgacggctaccagagctactgcaccatctgttgcggcggaagagaggtgctgatgtgtggaaataacaactgctgccggtgcttctgcgtggaatgcgtggacctgctggtgggccccggcgccgcccaggccgctattaaggaagatccttggaactgctacatgtgcggccacaagggcacatacggcctgctgagacggagagaggactggcctagcagactgcagatgttcttcgccaataaccacgaccaggagttcgacccccctaaggtgtaccctcccgtccccgccgagaagagaaagcccatccgggtcctgagcctgttcgatggcatcgccaccggtctgctggtgctgaaggacctgggcatccaggtggataggtacattgcctccgaggtgtgcgaggactccatcaccgtgggaatggtgcgtcatcagggcaagatcatgtacgtgggcgacgtgcggagcgtgacacagaagcatatccaggagtggggccctttcgacctggtgatcggcggcagcccttgcaatgacctgagcatcgtgaacccagcccggaagggcctgtacgagggaaccggcagactgttcttcgagttttacagactgctgcacgacgcccggcctaaggaaggcgacgaccggcccttcttttggctgttcgagaatgtggtggccatgggagtcagcgacaagcgggatattagccggttcctggagagcaaccccgtgatgatcgatgccaaggaagtgagcgccgcccaccgggccagatacttctggggcaatctgcctggcatgaacagacccctggccagcaccgtgaacgacaagctggagctgcaggagtgcctggagcacggccggatcgccaagttcagcaaggtgagaaccatcaccacccgaagcaacagcatcaaacaaggcaaggaccagcactttcctgtgttcatgaacgagaaggaggacatcctgtggtgtaccgagatggagagagtgttcgggttcccagtccactacacagatgtcagcaacatgtctagactggccagacagagactgctgggaagaagctggtccgtccctgtgatcagacacctgttcgcccctctgaaggagtacttcgcctgcgtgagcagcggcaacagcaacgccaacagccggggccccagcttctctagcggcctggtgccactgtccctgagagggagccacatgggccccatggagatctacaaaaccgtgagcgcctggaagcggcagcctgtgcgcgtgctgagcctgtttcggaatatcgataaagtcctgaaaagcctgggattcctggagagcggctctggctccggcggtggcaccctgaagtacgtggaggatgtgacaaacgtggtcagacgggatgtggagaagtggggccccttcgatctggtgtacggcagcacccaacccctgggcagctcttgtgaccggtgccctggctggtacatgtttcagttccaccggatcctgcagtacgccctgccgagacaggagtcccagcggccattcttttggattttcatggacaacttgctgctgaccgaggatgaccaggaaactaccactcggttcctgcagaccgaagccgtgaccctgcaggacgtgagaggccgggactaccagaacgccatgcgggtgtggtccaacatccctggactgaaaagcaagcacgcacctctgacccctaaagaagaggagtacctgcaggcccaggtgcggagcagaagcaagctggacgcccctaaggtggatctgctggtgaagaattgcctcctgcccctgagagagtacttcaagtatttcagccagaatagtctgcccctgggcggcccaagcagcggcgcccctcctcccagcggcggcagcccagccggctccccaacctctaccgaggagggcacctctgagtccgccacccccgagagcggccctggcacctccaccgagcccagcgagggcagcgcacccggcagccctgccggcagccccacctccacagaggagggaaccagcaccgagcccagcgaaggcagcgccccaggcaccagcaccgagcctagtgagggcggctctggcggcggcagcgcccaggagattaaacggatcaacaagatcagaagaagacttgtgaaagacagcaacaccaagaaggccggcaagacaggccccatgaaaaccctgctggttagagtgatgacacccgatctgagagagcggctggaaaacctgagaaagaagcctgaaaatatcccccagcccatcagcaatacatctagagccaacctgaataagctgctgaccgattacaccgaaatgaagaaggcgatcctgcatgtgtactgggaagagttccagaaggaccctgtgggcctgatgagccgggtggcccagcctgccagcaagaagatcgatcagaacaagctgaaacctgagatggacgagaagggcaacctgaccaccgccggctttgcctgctctcagtgtggccagcccctgttcgtgtacaagctggagcaggtgtctgagaagggcaaggcttacaccaactacttcggacggtgcaatgtggccgagcacgaaaagctgatcctgctggcccagctgaagcccgagaaggatagcgacgaagccgtgacatatagcctgggaaagtttgggcagagggccctggatttctacagcattcatgtgaccaaggagtccacccaccccgtgaagcccctggcccagatcgccggaaacagatacgcctccggacctgtgggaaaggccctgagcgacgcatgtatgggcacaatcgcctccttcctgtctaagtaccaggacatcatcatcgaacaccagaaggtggtgaagggcaaccagaagagactggagagcctgcgggagctggccggcaaggaaaacctggaataccctagcgtgaccctgccacctcagcctcacaccaaggagggcgttgatgcctacaacgaagtgatcgcccgggtgcgaatgtgggtgaacctgaacctgtggcagaagctgaagctaagcagagatgatgccaagcctctgctgagactgaagggattcccttcctttcctctggtcgagagacaggccaacgaagtggactggtgggacatggtgtgtaacgtgaagaagctgatcaacgagaaaaaggaggatggcaaggtgttttggcagaatctggctggctacaagagacaggaagccctgagaccatacctgagcagcgaggaagatcggaagaagggaaagaaattcgctcggtaccagctgggcgacctgctgctgcacctggaaaagaagcacggcgaggactggggaaaggtgtacgacgaggcctgggagcggattgacaagaaagtggaaggcctgagcaagcacatcaagctggaagaggaacggagaagcgaggacgcccagagcaaggccgccctgaccgactggctgcgggctaaggccagcttcgtgatcgagggcctgaaggaggccgacaaggacgagttctgcagatgcgagctgaagctgcagaagtggtacggggacctgcggggaaagcccttcgccatcgaagccgagaacagcatcctggacatcagcggcttcagcaagcagtacaactgtgccttcatctggcagaaggacggcgtgaagaagctgaacctgtacctgatcatcaactacttcaagggcggcaagctgcggttcaagaagatcaaacctgaagccttcgaagccaacagattctacaccgtgatcaacaaaaagagcggcgagatcgtgcccatggaggtgaacttcaacttcgacgaccccaacctgatcatcctgcctctggcctttggcaagagacagggcagagaattcatctggaacgacctgctgtccctggaaaccggcagcctgaagctggccaacggaagagtgatcgagaagacactgtacaacagaagaacccggcaggatgagcctgccctgttcgtggccctgaccttcgagcggcgggaggtcctggactcctccaatatcaaaccaatgaacctgatcggcgtggcaagaggcgaaaacatccccgccgtgatcgccctgaccgaccccgagggctgcccactgagccggtttaaggatagcctgggaaacccaacccacatcctgagaatcggcgagagctataaggagaagcagcggaccatccaggccaagaaggaggtggagcagcggagagccggcggctacagccggaagtacgccagcaaagccaagaatctggcagacgatatggtgagaaacaccgctagagatctgctgtactacgccgtgacccaggatgccatgctgatcttcgccaacctgagccggggcttcggccggcagggcaagcggaccttcatggccgagagacagtacacacggatggaggactggctgaccgccaagctggcctacgagggcctgagcaagacctacctgtccaagacactggcccagtacacctccaagacatgcagcaactgtgggtttaccatcaccagcgccgactacgacagggtgctggagaagctgaagaagacagcaacaggctggatgaccacaattaacggcaaggagctgaaggtggagggccagattacctactacaacagatacaagagacagaacgtagtcaaggacctgtccgtcgagctggatagactgagcgaagaatctgtgaacaacgacatctcctcctggacaaagggcagaagcggagaagctctgagcctcctgaagaaaagattctcccatagacccgtgcaggagaagttcgtgtgcctgaactgcggcttcgagacacacgcagccgagcaagccgccctgaacatcgccagatcctggctgttcctgcggagccaggagtacaagaaataccagacaaacaagacaaccggcaacaccgataagagagccttcgtcgagacctggcagtccttttaccggaagaagcttaaggaggtgtggaaacctgccgtgcggtctggcggatctggcggaggctccacaagcctgatcaacgccgtgacctacaacgacgtgcacatcaacttcacccaggaggagtgggccctgctggaccccagccagaagagcctgtacaaggacgtgatgctggagacctacaggaacctgaccgccatcggctacagctgcgaggaccacaacatcgaggagcactgccagagcagcaccaggcacaggaggtacgagaggaggcacagcagggagaagcccagcgagtacagccagtgcaccagccccaagaaaaagagaaaagtctaagctgccttctgcggggcttgccttctggccatgcccttcttctctcccttgcacctgtacctcttggtctttgaataaagcctgagtaggaaggctagcaaaaaaaaaaaaaaaaaaaaaaaaaaaaaaaaaaaaaaaaaaaaaaaaaaaaaaaaaaaaaaaaaaaaaaaaaaaaaaaa

SEQ ID NO: 5901 - RNA, 5797 nt, synthetic construct
  source 1..5797: mol_type = other RNA
aggaaataagagagaaaagaagagtaagaagaaatataagagccaccatggcccctaagaagaagcgtaaagtgagccggatggaacgcctcgtctacgaggtgcggcagaagtgcagaaacatcgaggacatctgcatctcctgcggatctctgaacgtgaccctggagcacccactgttcatcggcggcatgtgccagaactgtaaaaactgttttctggagtgtgcctatcaatacgacgatgacggctaccagagctactgcaccatctgttgcggcggaagagaggtgctgatgtgtggaaataacaactgctgccggtgcttctgcgtggaatgcgtggacctgctggtgggccccggcgccgcccaggccgctattaaggaagatccttggaactgctacatgtgcggccacaagggcacatacggcctgctgagacggagagaggactggcctagcagactgcagatgttcttcgccaataaccacgaccaggagttcgacccccctaaggtgtaccctcccgtccccgccgagaagagaaagcccatccgggtcctgagcctgttcgatggcatcgccaccggtctgctggtgctgaaggacctgggcatccaggtggataggtacattgcctccgaggtgtgcgaggactccatcaccgtgggaatggtgcgtcatcagggcaagatcatgtacgtgggcgacgtgcggagcgtgacacagaagcatatccaggagtggggccctttcgacctggtgatcggcggcagcccttgcaatgacctgagcatcgtgaacccagcccggaagggcctgtacgagggaaccggcagactgttcttcgagttttacagactgctgcacgacgcccggcctaaggaaggcgacgaccggcccttcttttggctgttcgagaatgtggtggccatgggagtcagcgacaagcgggatattagccggttcctggagagcaaccccgtgatgatcgatgccaaggaagtgagcgccgcccaccgggccagatacttctggggcaatctgcctggcatgaacagacccctggccagcaccgtgaacgacaagctggagctgcaggagtgcctggagcacggccggatcgccaagttcagcaaggtgagaaccatcaccacccgaagcaacagcatcaaacaaggcaaggaccagcactttcctgtgttcatgaacgagaaggaggacatcctgtggtgtaccgagatggagagagtgttcgggttcccagtccactacacagatgtcagcaacatgtctagactggccagacagagactgctgggaagaagctggtccgtccctgtgatcagacacctgttcgcccctctgaaggagtacttcgcctgcgtgagcagcggcaacagcaacgccaacagccggggccccagcttctctagcggcctggtgccactgtccctgagagggagccacatgggccccatggagatctacaaaaccgtgagcgcctggaagcggcagcctgtgcgcgtgctgagcctgtttcggaatatcgataaagtcctgaaaagcctgggattcctggagagcggctctggctccggcggtggcaccctgaagtacgtggaggatgtgacaaacgtggtcagacgggatgtggagaagtggggccccttcgatctggtgtacggcagcacccaacccctgggcagctcttgtgaccggtgccctggctggtacatgtttcagttccaccggatcctgcagtacgccctgccgagacaggagtcccagcggccattcttttggattttcatggacaacttgctgctgaccgaggatgaccaggaaactaccactcggttcctgcagaccgaagccgtgaccctgcaggacgtgagaggccgggactaccagaacgccatgcgggtgtggtccaacatccctggactgaaaagcaagcacgcacctctgacccctaaagaagaggagtacctgcaggcccaggtgcggagcagaagcaagctggacgcccctaaggtggatctgctggtgaagaattgcctcctgcccctgagagagtacttcaagtatttcagccagaatagtctgcccctgggcggcccaagcagcggcgcccctcctcccagcggcggcagcccagccggctccccaacctctaccgaggagggcacctctgagtccgccacccccgagagcggccctggcacctccaccgagcccagcgagggcagcgcacccggcagccctgccggcagccccacctccacagaggagggaaccagcaccgagcccagcgaaggcagcgccccaggcaccagcaccgagcctagtgagggcggctctggcggcggcagcgcccaggagattaaacggatcaacaagatcagaagaagacttgtgaaagacagcaacaccaagaaggccggcaagacaggccccatgaaaaccctgctggttagagtgatgacacccgatctgagagagcggctggaaaacctgagaaagaagcctgaaaatatcccccagcccatcagcaatacatctagagccaacctgaataagctgctgaccgattacaccgaaatgaagaaggcgatcctgcatgtgtactgggaagagttccagaaggaccctgtgggcctgatgagccgggtggcccagcctgccagcaagaagatcgatcagaacaagctgaaacctgagatggacgagaagggcaacctgaccaccgccggctttgcctgctctcagtgtggccagcccctgttcgtgtacaagctggagcaggtgtctgagaagggcaaggcttacaccaactacttcggacggtgcaatgtggccgagcacgaaaagctgatcctgctggcccagctgaagcccgagaaggatagcgacgaagccgtgacatatagcctgggaaagtttgggcagagggccctggatttctacagcattcatgtgaccaaggagtccacccaccccgtgaagcccctggcccagatcgccggaaacagatacgcctccggacctgtgggaaaggccctgagcgacgcatgtatgggcacaatcgcctccttcctgtctaagtaccaggacatcatcatcgaacaccagaaggtggtgaagggcaaccagaagagactggagagcctgcgggagctggccggcaaggaaaacctggaataccctagcgtgaccctgccacctcagcctcacaccaaggagggcgttgatgcctacaacgaagtgatcgcccgggtgcgaatgtgggtgaacctgaacctgtggcagaagctgaagctaagcagagatgatgccaagcctctgctgagactgaagggattcccttcctttcctctggtcgagagacaggccaacgaagtggactggtgggacatggtgtgtaacgtgaagaagctgatcaacgagaaaaaggaggatggcaaggtgttttggcagaatctggctggctacaagagacaggaagccctgagaccatacctgagcagcgaggaagatcggaagaagggaaagaaattcgctcggtaccagctgggcgacctgctgctgcacctggaaaagaagcacggcgaggactggggaaaggtgtacgacgaggcctgggagcggattgacaagaaagtggaaggcctgagcaagcacatcaagctggaagaggaacggagaagcgaggacgcccagagcaaggccgccctgaccgactggctgcgggctaaggccagcttcgtgatcgagggcctgaaggaggccgacaaggacgagttctgcagatgcgagctgaagctgcagaagtggtacggggacctgcggggaaagcccttcgccatcgaagccgagaacagcatcctggacatcagcggcttcagcaagcagtacaactgtgccttcatctggcagaaggacggcgtgaagaagctgaacctgtacctgatcatcaactacttcaagggcggcaagctgcggttcaagaagatcaaacctgaagccttcgaagccaacagattctacaccgtgatcaacaaaaagagcggcgagatcgtgcccatggaggtgaacttcaacttcgacgaccccaacctgatcatcctgcctctggcctttggcaagagacagggcagagaattcatctggaacgacctgctgtccctggaaaccggcagcctgaagctggccaacggaagagtgatcgagaagacactgtacaacagaagaacccggcaggatgagcctgccctgttcgtggccctgaccttcgagcggcgggaggtcctggactcctccaatatcaaaccaatgaacctgatcggcgtggcaagaggcgaaaacatccccgccgtgatcgccctgaccgaccccgagggctgcccactgagccggtttaaggatagcctgggaaacccaacccacatcctgagaatcggcgagagctataaggagaagcagcggaccatccaggccaagaaggaggtggagcagcggagagccggcggctacagccggaagtacgccagcaaagccaagaatctggcagacgatatggtgagaaacaccgctagagatctgctgtactacgccgtgacccaggatgccatgctgatcttcgccaacctgagccggggcttcggccggcagggcaagcggaccttcatggccgagagacagtacacacggatggaggactggctgaccgccaagctggcctacgagggcctgagcaagacctacctgtccaagacactggcccagtacacctccaagacatgcagcaactgtgggtttaccatcaccagcgccgactacgacagggtgctggagaagctgaagaagacagcaacaggctggatgaccacaattaacggcaaggagctgaaggtggagggccagattacctactacaacagatacaagagacagaacgtagtcaaggacctgtccgtcgagctggatagactgagcgaagaatctgtgaacaacgacatctcctcctggacaaagggcagaagcggagaagctctgagcctcctgaagaaaagattctcccatagacccgtgcaggagaagttcgtgtgcctgaactgcggcttcgagacacacgcagccgagcaagccgccctgaacatcgccagatcctggctgttcctgcggagccaggagtacaagaaataccagacaaacaagacaaccggcaacaccgataagagagccttcgtcgagacctggcagtccttttaccggaagaagcttaaggaggtgtggaaacctgccgtgcggtctggcggatctggcggaggctccacaagcaggcccgagagcgtgaccttcgaggacgtggccgtgtacttcagcgagaacgagtggatcggcctgggccccgcccagagggccctgtacagggacgtgatgctggagaactacggcgccgtggccagcctggccgccttccccttccccaagcccgccctgatcagccagctggagaggggcgaggccccctggtgcagcgtgccctggggcgccctggacggcgaggaccccaggagcatcaccagccccaagaaaaagagaaaagtctaagctgccttctgcggggcttgccttctggccatgcccttcttctctcccttgcacctgtacctcttggtctttgaataaagcctgagtaggaaggctagcaaaaaaaaaaaaaaaaaaaaaaaaaaaaaaaaaaaaaaaaaaaaaaaaaaaaaaaaaaaaaaaaaaaaaaaaaaaaaaaa

SEQ ID NO: 5902 - RNA, 5797 nt, synthetic construct
  source 1..5797: mol_type = other RNA
aggaaataagagagaaaagaagagtaagaagaaatataagagccaccatggcccctaagaagaagcgtaaagtgagccggatggaacgcctcgtctacgaggtgcggcagaagtgcagaaacatcgaggacatctgcatctcctgcggatctctgaacgtgaccctggagcacccactgttcatcggcggcatgtgccagaactgtaaaaactgttttctggagtgtgcctatcaatacgacgatgacggctaccagagctactgcaccatctgttgcggcggaagagaggtgctgatgtgtggaaataacaactgctgccggtgcttctgcgtggaatgcgtggacctgctggtgggccccggcgccgcccaggccgctattaaggaagatccttggaactgctacatgtgcggccacaagggcacatacggcctgctgagacggagagaggactggcctagcagactgcagatgttcttcgccaataaccacgaccaggagttcgacccccctaaggtgtaccctcccgtccccgccgagaagagaaagcccatccgggtcctgagcctgttcgatggcatcgccaccggtctgctggtgctgaaggacctgggcatccaggtggataggtacattgcctccgaggtgtgcgaggactccatcaccgtgggaatggtgcgtcatcagggcaagatcatgtacgtgggcgacgtgcggagcgtgacacagaagcatatccaggagtggggccctttcgacctggtgatcggcggcagcccttgcaatgacctgagcatcgtgaacccagcccggaagggcctgtacgagggaaccggcagactgttcttcgagttttacagactgctgcacgacgcccggcctaaggaaggcgacgaccggcccttcttttggctgttcgagaatgtggtggccatgggagtcagcgacaagcgggatattagccggttcctggagagcaaccccgtgatgatcgatgccaaggaagtgagcgccgcccaccgggccagatacttctggggcaatctgcctggcatgaacagacccctggccagcaccgtgaacgacaagctggagctgcaggagtgcctggagcacggccggatcgccaagttcagcaaggtgagaaccatcaccacccgaagcaacagcatcaaacaaggcaaggaccagcactttcctgtgttcatgaacgagaaggaggacatcctgtggtgtaccgagatggagagagtgttcgggttcccagtccactacacagatgtcagcaacatgtctagactggccagacagagactgctgggaagaagctggtccgtccctgtgatcagacacctgttcgcccctctgaaggagtacttcgcctgcgtgagcagcggcaacagcaacgccaacagccggggccccagcttctctagcggcctggtgccactgtccctgagagggagccacatgggccccatggagatctacaaaaccgtgagcgcctggaagcggcagcctgtgcgcgtgctgagcctgtttcggaatatcgataaagtcctgaaaagcctgggattcctggagagcggctctggctccggcggtggcaccctgaagtacgtggaggatgtgacaaacgtggtcagacgggatgtggagaagtggggccccttcgatctggtgtacggcagcacccaacccctgggcagctcttgtgaccggtgccctggctggtacatgtttcagttccaccggatcctgcagtacgccctgccgagacaggagtcccagcggccattcttttggattttcatggacaacttgctgctgaccgaggatgaccaggaaactaccactcggttcctgcagaccgaagccgtgaccctgcaggacgtgagaggccgggactaccagaacgccatgcgggtgtggtccaacatccctggactgaaaagcaagcacgcacctctgacccctaaagaagaggagtacctgcaggcccaggtgcggagcagaagcaagctggacgcccctaaggtggatctgctggtgaagaattgcctcctgcccctgagagagtacttcaagtatttcagccagaatagtctgcccctgggcggcccaagcagcggcgcccctcctcccagcggcggcagcccagccggctccccaacctctaccgaggagggcacctctgagtccgccacccccgagagcggccctggcacctccaccgagcccagcgagggcagcgcacccggcagccctgccggcagccccacctccacagaggagggaaccagcaccgagcccagcgaaggcagcgccccaggcaccagcaccgagcctagtgagggcggctctggcggcggcagcgcccaggagattaaacggatcaacaagatcagaagaagacttgtgaaagacagcaacaccaagaaggccggcaagacaggccccatgaaaaccctgctggttagagtgatgacacccgatctgagagagcggctggaaaacctgagaaagaagcctgaaaatatcccccagcccatcagcaatacatctagagccaacctgaataagctgctgaccgattacaccgaaatgaagaaggcgatcctgcatgtgtactgggaagagttccagaaggaccctgtgggcctgatgagccgggtggcccagcctgccagcaagaagatcgatcagaacaagctgaaacctgagatggacgagaagggcaacctgaccaccgccggctttgcctgctctcagtgtggccagcccctgttcgtgtacaagctggagcaggtgtctgagaagggcaaggcttacaccaactacttcggacggtgcaatgtggccgagcacgaaaagctgatcctgctggcccagctgaagcccgagaaggatagcgacgaagccgtgacatatagcctgggaaagtttgggcagagggccctggatttctacagcattcatgtgaccaaggagtccacccaccccgtgaagcccctggcccagatcgccggaaacagatacgcctccggacctgtgggaaaggccctgagcgacgcatgtatgggcacaatcgcctccttcctgtctaagtaccaggacatcatcatcgaacaccagaaggtggtgaagggcaaccagaagagactggagagcctgcgggagctggccggcaaggaaaacctggaataccctagcgtgaccctgccacctcagcctcacaccaaggagggcgttgatgcctacaacgaagtgatcgcccgggtgcgaatgtgggtgaacctgaacctgtggcagaagctgaagctaagcagagatgatgccaagcctctgctgagactgaagggattcccttcctttcctctggtcgagagacaggccaacgaagtggactggtgggacatggtgtgtaacgtgaagaagctgatcaacgagaaaaaggaggatggcaaggtgttttggcagaatctggctggctacaagagacaggaagccctgagaccatacctgagcagcgaggaagatcggaagaagggaaagaaattcgctcggtaccagctgggcgacctgctgctgcacctggaaaagaagcacggcgaggactggggaaaggtgtacgacgaggcctgggagcggattgacaagaaagtggaaggcctgagcaagcacatcaagctggaagaggaacggagaagcgaggacgcccagagcaaggccgccctgaccgactggctgcgggctaaggccagcttcgtgatcgagggcctgaaggaggccgacaaggacgagttctgcagatgcgagctgaagctgcagaagtggtacggggacctgcggggaaagcccttcgccatcgaagccgagaacagcatcctggacatcagcggcttcagcaagcagtacaactgtgccttcatctggcagaaggacggcgtgaagaagctgaacctgtacctgatcatcaactacttcaagggcggcaagctgcggttcaagaagatcaaacctgaagccttcgaagccaacagattctacaccgtgatcaacaaaaagagcggcgagatcgtgcccatggaggtgaacttcaacttcgacgaccccaacctgatcatcctgcctctggcctttggcaagagacagggcagagaattcatctggaacgacctgctgtccctggaaaccggcagcctgaagctggccaacggaagagtgatcgagaagacactgtacaacagaagaacccggcaggatgagcctgccctgttcgtggccctgaccttcgagcggcgggaggtcctggactcctccaatatcaaaccaatgaacctgatcggcgtggcaagaggcgaaaacatccccgccgtgatcgccctgaccgaccccgagggctgcccactgagccggtttaaggatagcctgggaaacccaacccacatcctgagaatcggcgagagctataaggagaagcagcggaccatccaggccaagaaggaggtggagcagcggagagccggcggctacagccggaagtacgccagcaaagccaagaatctggcagacgatatggtgagaaacaccgctagagatctgctgtactacgccgtgacccaggatgccatgctgatcttcgccaacctgagccggggcttcggccggcagggcaagcggaccttcatggccgagagacagtacacacggatggaggactggctgaccgccaagctggcctacgagggcctgagcaagacctacctgtccaagacactggcccagtacacctccaagacatgcagcaactgtgggtttaccatcaccagcgccgactacgacagggtgctggagaagctgaagaagacagcaacaggctggatgaccacaattaacggcaaggagctgaaggtggagggccagattacctactacaacagatacaagagacagaacgtagtcaaggacctgtccgtcgagctggatagactgagcgaagaatctgtgaacaacgacatctcctcctggacaaagggcagaagcggagaagctctgagcctcctgaagaaaagattctcccatagacccgtgcaggagaagttcgtgtgcctgaactgcggcttcgagacacacgcagccgagcaagccgccctgaacatcgccagatcctggctgttcctgcggagccaggagtacaagaaataccagacaaacaagacaaccggcaacaccgataagagagccttcgtcgagacctggcagtccttttaccggaagaagcttaaggaggtgtggaaacctgccgtgcggtctggcggatctggcggaggctccacaagcttccaggccagcgtgaccttcaaggacgtggccgtggacttcacctgggaggagtggaggctgctggaccccccccagaaggagctgttctgggaggtgatgctggagaactacaggaacctggtgtgcctgggcctggccgacagcaacaaggacgtgatgatgagcaagctggagagcggcgagccccactggatccccaccggcggcgtgctgaggagctgctggcccggctgggagagcaccagccccaagaaaaagagaaaagtctaagctgccttctgcggggcttgccttctggccatgcccttcttctctcccttgcacctgtacctcttggtctttgaataaagcctgagtaggaaggctagcaaaaaaaaaaaaaaaaaaaaaaaaaaaaaaaaaaaaaaaaaaaaaaaaaaaaaaaaaaaaaaaaaaaaaaaaaaaaaaaa

SEQ ID NO: 5903 - RNA, 5797 nt, synthetic construct
  source 1..5797: mol_type = other RNA
aggaaataagagagaaaagaagagtaagaagaaatataagagccaccatggcccctaagaagaagcgtaaagtgagccggatggaacgcctcgtctacgaggtgcggcagaagtgcagaaacatcgaggacatctgcatctcctgcggatctctgaacgtgaccctggagcacccactgttcatcggcggcatgtgccagaactgtaaaaactgttttctggagtgtgcctatcaatacgacgatgacggctaccagagctactgcaccatctgttgcggcggaagagaggtgctgatgtgtggaaataacaactgctgccggtgcttctgcgtggaatgcgtggacctgctggtgggccccggcgccgcccaggccgctattaaggaagatccttggaactgctacatgtgcggccacaagggcacatacggcctgctgagacggagagaggactggcctagcagactgcagatgttcttcgccaataaccacgaccaggagttcgacccccctaaggtgtaccctcccgtccccgccgagaagagaaagcccatccgggtcctgagcctgttcgatggcatcgccaccggtctgctggtgctgaaggacctgggcatccaggtggataggtacattgcctccgaggtgtgcgaggactccatcaccgtgggaatggtgcgtcatcagggcaagatcatgtacgtgggcgacgtgcggagcgtgacacagaagcatatccaggagtggggccctttcgacctggtgatcggcggcagcccttgcaatgacctgagcatcgtgaacccagcccggaagggcctgtacgagggaaccggcagactgttcttcgagttttacagactgctgcacgacgcccggcctaaggaaggcgacgaccggcccttcttttggctgttcgagaatgtggtggccatgggagtcagcgacaagcgggatattagccggttcctggagagcaaccccgtgatgatcgatgccaaggaagtgagcgccgcccaccgggccagatacttctggggcaatctgcctggcatgaacagacccctggccagcaccgtgaacgacaagctggagctgcaggagtgcctggagcacggccggatcgccaagttcagcaaggtgagaaccatcaccacccgaagcaacagcatcaaacaaggcaaggaccagcactttcctgtgttcatgaacgagaaggaggacatcctgtggtgtaccgagatggagagagtgttcgggttcccagtccactacacagatgtcagcaacatgtctagactggccagacagagactgctgggaagaagctggtccgtccctgtgatcagacacctgttcgcccctctgaaggagtacttcgcctgcgtgagcagcggcaacagcaacgccaacagccggggccccagcttctctagcggcctggtgccactgtccctgagagggagccacatgggccccatggagatctacaaaaccgtgagcgcctggaagcggcagcctgtgcgcgtgctgagcctgtttcggaatatcgataaagtcctgaaaagcctgggattcctggagagcggctctggctccggcggtggcaccctgaagtacgtggaggatgtgacaaacgtggtcagacgggatgtggagaagtggggccccttcgatctggtgtacggcagcacccaacccctgggcagctcttgtgaccggtgccctggctggtacatgtttcagttccaccggatcctgcagtacgccctgccgagacaggagtcccagcggccattcttttggattttcatggacaacttgctgctgaccgaggatgaccaggaaactaccactcggttcctgcagaccgaagccgtgaccctgcaggacgtgagaggccgggactaccagaacgccatgcgggtgtggtccaacatccctggactgaaaagcaagcacgcacctctgacccctaaagaagaggagtacctgcaggcccaggtgcggagcagaagcaagctggacgcccctaaggtggatctgctggtgaagaattgcctcctgcccctgagagagtacttcaagtatttcagccagaatagtctgcccctgggcggcccaagcagcggcgcccctcctcccagcggcggcagcccagccggctccccaacctctaccgaggagggcacctctgagtccgccacccccgagagcggccctggcacctccaccgagcccagcgagggcagcgcacccggcagccctgccggcagccccacctccacagaggagggaaccagcaccgagcccagcgaaggcagcgccccaggcaccagcaccgagcctagtgagggcggctctggcggcggcagcgcccaggagattaaacggatcaacaagatcagaagaagacttgtgaaagacagcaacaccaagaaggccggcaagacaggccccatgaaaaccctgctggttagagtgatgacacccgatctgagagagcggctggaaaacctgagaaagaagcctgaaaatatcccccagcccatcagcaatacatctagagccaacctgaataagctgctgaccgattacaccgaaatgaagaaggcgatcctgcatgtgtactgggaagagttccagaaggaccctgtgggcctgatgagccgggtggcccagcctgccagcaagaagatcgatcagaacaagctgaaacctgagatggacgagaagggcaacctgaccaccgccggctttgcctgctctcagtgtggccagcccctgttcgtgtacaagctggagcaggtgtctgagaagggcaaggcttacaccaactacttcggacggtgcaatgtggccgagcacgaaaagctgatcctgctggcccagctgaagcccgagaaggatagcgacgaagccgtgacatatagcctgggaaagtttgggcagagggccctggatttctacagcattcatgtgaccaaggagtccacccaccccgtgaagcccctggcccagatcgccggaaacagatacgcctccggacctgtgggaaaggccctgagcgacgcatgtatgggcacaatcgcctccttcctgtctaagtaccaggacatcatcatcgaacaccagaaggtggtgaagggcaaccagaagagactggagagcctgcgggagctggccggcaaggaaaacctggaataccctagcgtgaccctgccacctcagcctcacaccaaggagggcgttgatgcctacaacgaagtgatcgcccgggtgcgaatgtgggtgaacctgaacctgtggcagaagctgaagctaagcagagatgatgccaagcctctgctgagactgaagggattcccttcctttcctctggtcgagagacaggccaacgaagtggactggtgggacatggtgtgtaacgtgaagaagctgatcaacgagaaaaaggaggatggcaaggtgttttggcagaatctggctggctacaagagacaggaagccctgagaccatacctgagcagcgaggaagatcggaagaagggaaagaaattcgctcggtaccagctgggcgacctgctgctgcacctggaaaagaagcacggcgaggactggggaaaggtgtacgacgaggcctgggagcggattgacaagaaagtggaaggcctgagcaagcacatcaagctggaagaggaacggagaagcgaggacgcccagagcaaggccgccctgaccgactggctgcgggctaaggccagcttcgtgatcgagggcctgaaggaggccgacaaggacgagttctgcagatgcgagctgaagctgcagaagtggtacggggacctgcggggaaagcccttcgccatcgaagccgagaacagcatcctggacatcagcggcttcagcaagcagtacaactgtgccttcatctggcagaaggacggcgtgaagaagctgaacctgtacctgatcatcaactacttcaagggcggcaagctgcggttcaagaagatcaaacctgaagccttcgaagccaacagattctacaccgtgatcaacaaaaagagcggcgagatcgtgcccatggaggtgaacttcaacttcgacgaccccaacctgatcatcctgcctctggcctttggcaagagacagggcagagaattcatctggaacgacctgctgtccctggaaaccggcagcctgaagctggccaacggaagagtgatcgagaagacactgtacaacagaagaacccggcaggatgagcctgccctgttcgtggccctgaccttcgagcggcgggaggtcctggactcctccaatatcaaaccaatgaacctgatcggcgtggcaagaggcgaaaacatccccgccgtgatcgccctgaccgaccccgagggctgcccactgagccggtttaaggatagcctgggaaacccaacccacatcctgagaatcggcgagagctataaggagaagcagcggaccatccaggccaagaaggaggtggagcagcggagagccggcggctacagccggaagtacgccagcaaagccaagaatctggcagacgatatggtgagaaacaccgctagagatctgctgtactacgccgtgacccaggatgccatgctgatcttcgccaacctgagccggggcttcggccggcagggcaagcggaccttcatggccgagagacagtacacacggatggaggactggctgaccgccaagctggcctacgagggcctgagcaagacctacctgtccaagacactggcccagtacacctccaagacatgcagcaactgtgggtttaccatcaccagcgccgactacgacagggtgctggagaagctgaagaagacagcaacaggctggatgaccacaattaacggcaaggagctgaaggtggagggccagattacctactacaacagatacaagagacagaacgtagtcaaggacctgtccgtcgagctggatagactgagcgaagaatctgtgaacaacgacatctcctcctggacaaagggcagaagcggagaagctctgagcctcctgaagaaaagattctcccatagacccgtgcaggagaagttcgtgtgcctgaactgcggcttcgagacacacgcagccgagcaagccgccctgaacatcgccagatcctggctgttcctgcggagccaggagtacaagaaataccagacaaacaagacaaccggcaacaccgataagagagccttcgtcgagacctggcagtccttttaccggaagaagcttaaggaggtgtggaaacctgccgtgcggtctggcggatctggcggaggctccacaagcagccaggagagcgtgaccttccaggacgtgaccgtggacttcacccaggaggagtggtgcatgctggactgcagccagaagaagctgtacagggaggtgatgctggagaacgtgcagaacctgctgagcgtgggcctgcccgtgcccagggagaacctgctgagcagctgccagcagggcgacagcccctggctgctggagcagaagggcaccaggatcttcagggccgacgccgagatctgcaccagccccaagaaaaagagaaaagtctaagctgccttctgcggggcttgccttctggccatgcccttcttctctcccttgcacctgtacctcttggtctttgaataaagcctgagtaggaaggctagcaaaaaaaaaaaaaaaaaaaaaaaaaaaaaaaaaaaaaaaaaaaaaaaaaaaaaaaaaaaaaaaaaaaaaaaaaaaaaaaa

SEQ ID NO: 5904 - RNA, 5797 nt, synthetic construct
  source 1..5797: mol_type = other RNA
aggaaataagagagaaaagaagagtaagaagaaatataagagccaccatggcccctaagaagaagcgtaaagtgagccggatggaacgcctcgtctacgaggtgcggcagaagtgcagaaacatcgaggacatctgcatctcctgcggatctctgaacgtgaccctggagcacccactgttcatcggcggcatgtgccagaactgtaaaaactgttttctggagtgtgcctatcaatacgacgatgacggctaccagagctactgcaccatctgttgcggcggaagagaggtgctgatgtgtggaaataacaactgctgccggtgcttctgcgtggaatgcgtggacctgctggtgggccccggcgccgcccaggccgctattaaggaagatccttggaactgctacatgtgcggccacaagggcacatacggcctgctgagacggagagaggactggcctagcagactgcagatgttcttcgccaataaccacgaccaggagttcgacccccctaaggtgtaccctcccgtccccgccgagaagagaaagcccatccgggtcctgagcctgttcgatggcatcgccaccggtctgctggtgctgaaggacctgggcatccaggtggataggtacattgcctccgaggtgtgcgaggactccatcaccgtgggaatggtgcgtcatcagggcaagatcatgtacgtgggcgacgtgcggagcgtgacacagaagcatatccaggagtggggccctttcgacctggtgatcggcggcagcccttgcaatgacctgagcatcgtgaacccagcccggaagggcctgtacgagggaaccggcagactgttcttcgagttttacagactgctgcacgacgcccggcctaaggaaggcgacgaccggcccttcttttggctgttcgagaatgtggtggccatgggagtcagcgacaagcgggatattagccggttcctggagagcaaccccgtgatgatcgatgccaaggaagtgagcgccgcccaccgggccagatacttctggggcaatctgcctggcatgaacagacccctggccagcaccgtgaacgacaagctggagctgcaggagtgcctggagcacggccggatcgccaagttcagcaaggtgagaaccatcaccacccgaagcaacagcatcaaacaaggcaaggaccagcactttcctgtgttcatgaacgagaaggaggacatcctgtggtgtaccgagatggagagagtgttcgggttcccagtccactacacagatgtcagcaacatgtctagactggccagacagagactgctgggaagaagctggtccgtccctgtgatcagacacctgttcgcccctctgaaggagtacttcgcctgcgtgagcagcggcaacagcaacgccaacagccggggccccagcttctctagcggcctggtgccactgtccctgagagggagccacatgggccccatggagatctacaaaaccgtgagcgcctggaagcggcagcctgtgcgcgtgctgagcctgtttcggaatatcgataaagtcctgaaaagcctgggattcctggagagcggctctggctccggcggtggcaccctgaagtacgtggaggatgtgacaaacgtggtcagacgggatgtggagaagtggggccccttcgatctggtgtacggcagcacccaacccctgggcagctcttgtgaccggtgccctggctggtacatgtttcagttccaccggatcctgcagtacgccctgccgagacaggagtcccagcggccattcttttggattttcatggacaacttgctgctgaccgaggatgaccaggaaactaccactcggttcctgcagaccgaagccgtgaccctgcaggacgtgagaggccgggactaccagaacgccatgcgggtgtggtccaacatccctggactgaaaagcaagcacgcacctctgacccctaaagaagaggagtacctgcaggcccaggtgcggagcagaagcaagctggacgcccctaaggtggatctgctggtgaagaattgcctcctgcccctgagagagtacttcaagtatttcagccagaatagtctgcccctgggcggcccaagcagcggcgcccctcctcccagcggcggcagcccagccggctccccaacctctaccgaggagggcacctctgagtccgccacccccgagagcggccctggcacctccaccgagcccagcgagggcagcgcacccggcagccctgccggcagccccacctccacagaggagggaaccagcaccgagcccagcgaaggcagcgccccaggcaccagcaccgagcctagtgagggcggctctggcggcggcagcgcccaggagattaaacggatcaacaagatcagaagaagacttgtgaaagacagcaacaccaagaaggccggcaagacaggccccatgaaaaccctgctggttagagtgatgacacccgatctgagagagcggctggaaaacctgagaaagaagcctgaaaatatcccccagcccatcagcaatacatctagagccaacctgaataagctgctgaccgattacaccgaaatgaagaaggcgatcctgcatgtgtactgggaagagttccagaaggaccctgtgggcctgatgagccgggtggcccagcctgccagcaagaagatcgatcagaacaagctgaaacctgagatggacgagaagggcaacctgaccaccgccggctttgcctgctctcagtgtggccagcccctgttcgtgtacaagctggagcaggtgtctgagaagggcaaggcttacaccaactacttcggacggtgcaatgtggccgagcacgaaaagctgatcctgctggcccagctgaagcccgagaaggatagcgacgaagccgtgacatatagcctgggaaagtttgggcagagggccctggatttctacagcattcatgtgaccaaggagtccacccaccccgtgaagcccctggcccagatcgccggaaacagatacgcctccggacctgtgggaaaggccctgagcgacgcatgtatgggcacaatcgcctccttcctgtctaagtaccaggacatcatcatcgaacaccagaaggtggtgaagggcaaccagaagagactggagagcctgcgggagctggccggcaaggaaaacctggaataccctagcgtgaccctgccacctcagcctcacaccaaggagggcgttgatgcctacaacgaagtgatcgcccgggtgcgaatgtgggtgaacctgaacctgtggcagaagctgaagctaagcagagatgatgccaagcctctgctgagactgaagggattcccttcctttcctctggtcgagagacaggccaacgaagtggactggtgggacatggtgtgtaacgtgaagaagctgatcaacgagaaaaaggaggatggcaaggtgttttggcagaatctggctggctacaagagacaggaagccctgagaccatacctgagcagcgaggaagatcggaagaagggaaagaaattcgctcggtaccagctgggcgacctgctgctgcacctggaaaagaagcacggcgaggactggggaaaggtgtacgacgaggcctgggagcggattgacaagaaagtggaaggcctgagcaagcacatcaagctggaagaggaacggagaagcgaggacgcccagagcaaggccgccctgaccgactggctgcgggctaaggccagcttcgtgatcgagggcctgaaggaggccgacaaggacgagttctgcagatgcgagctgaagctgcagaagtggtacggggacctgcggggaaagcccttcgccatcgaagccgagaacagcatcctggacatcagcggcttcagcaagcagtacaactgtgccttcatctggcagaaggacggcgtgaagaagctgaacctgtacctgatcatcaactacttcaagggcggcaagctgcggttcaagaagatcaaacctgaagccttcgaagccaacagattctacaccgtgatcaacaaaaagagcggcgagatcgtgcccatggaggtgaacttcaacttcgacgaccccaacctgatcatcctgcctctggcctttggcaagagacagggcagagaattcatctggaacgacctgctgtccctggaaaccggcagcctgaagctggccaacggaagagtgatcgagaagacactgtacaacagaagaacccggcaggatgagcctgccctgttcgtggccctgaccttcgagcggcgggaggtcctggactcctccaatatcaaaccaatgaacctgatcggcgtggcaagaggcgaaaacatccccgccgtgatcgccctgaccgaccccgagggctgcccactgagccggtttaaggatagcctgggaaacccaacccacatcctgagaatcggcgagagctataaggagaagcagcggaccatccaggccaagaaggaggtggagcagcggagagccggcggctacagccggaagtacgccagcaaagccaagaatctggcagacgatatggtgagaaacaccgctagagatctgctgtactacgccgtgacccaggatgccatgctgatcttcgccaacctgagccggggcttcggccggcagggcaagcggaccttcatggccgagagacagtacacacggatggaggactggctgaccgccaagctggcctacgagggcctgagcaagacctacctgtccaagacactggcccagtacacctccaagacatgcagcaactgtgggtttaccatcaccagcgccgactacgacagggtgctggagaagctgaagaagacagcaacaggctggatgaccacaattaacggcaaggagctgaaggtggagggccagattacctactacaacagatacaagagacagaacgtagtcaaggacctgtccgtcgagctggatagactgagcgaagaatctgtgaacaacgacatctcctcctggacaaagggcagaagcggagaagctctgagcctcctgaagaaaagattctcccatagacccgtgcaggagaagttcgtgtgcctgaactgcggcttcgagacacacgcagccgagcaagccgccctgaacatcgccagatcctggctgttcctgcggagccaggagtacaagaaataccagacaaacaagacaaccggcaacaccgataagagagccttcgtcgagacctggcagtccttttaccggaagaagcttaaggaggtgtggaaacctgccgtgcggtctggcggatctggcggaggctccacaagcctgcaggagcccgtgagcttcgaggaggtggccgtgtacttcagcagggaggagtgggccctgctggaccccgcccagagggccctgtacagggacgtgatgctggagacctacgagtgcgtggccagcctggcccccctgcccgcccccaagcccatggtgatcagcctgctggaggagggcgaggagccctgggtgcccgacgtgggcagccccgaggccgtggccggcgacgtgagccccaccagccccaagaaaaagagaaaagtctaagctgccttctgcggggcttgccttctggccatgcccttcttctctcccttgcacctgtacctcttggtctttgaataaagcctgagtaggaaggctagcaaaaaaaaaaaaaaaaaaaaaaaaaaaaaaaaaaaaaaaaaaaaaaaaaaaaaaaaaaaaaaaaaaaaaaaaaaaaaaaa

SEQ ID NO: 5905 - RNA, 5797 nt, synthetic construct
  source 1..5797: mol_type = other RNA
aggaaataagagagaaaagaagagtaagaagaaatataagagccaccatggcccctaagaagaagcgtaaagtgagccggatggaacgcctcgtctacgaggtgcggcagaagtgcagaaacatcgaggacatctgcatctcctgcggatctctgaacgtgaccctggagcacccactgttcatcggcggcatgtgccagaactgtaaaaactgttttctggagtgtgcctatcaatacgacgatgacggctaccagagctactgcaccatctgttgcggcggaagagaggtgctgatgtgtggaaataacaactgctgccggtgcttctgcgtggaatgcgtggacctgctggtgggccccggcgccgcccaggccgctattaaggaagatccttggaactgctacatgtgcggccacaagggcacatacggcctgctgagacggagagaggactggcctagcagactgcagatgttcttcgccaataaccacgaccaggagttcgacccccctaaggtgtaccctcccgtccccgccgagaagagaaagcccatccgggtcctgagcctgttcgatggcatcgccaccggtctgctggtgctgaaggacctgggcatccaggtggataggtacattgcctccgaggtgtgcgaggactccatcaccgtgggaatggtgcgtcatcagggcaagatcatgtacgtgggcgacgtgcggagcgtgacacagaagcatatccaggagtggggccctttcgacctggtgatcggcggcagcccttgcaatgacctgagcatcgtgaacccagcccggaagggcctgtacgagggaaccggcagactgttcttcgagttttacagactgctgcacgacgcccggcctaaggaaggcgacgaccggcccttcttttggctgttcgagaatgtggtggccatgggagtcagcgacaagcgggatattagccggttcctggagagcaaccccgtgatgatcgatgccaaggaagtgagcgccgcccaccgggccagatacttctggggcaatctgcctggcatgaacagacccctggccagcaccgtgaacgacaagctggagctgcaggagtgcctggagcacggccggatcgccaagttcagcaaggtgagaaccatcaccacccgaagcaacagcatcaaacaaggcaaggaccagcactttcctgtgttcatgaacgagaaggaggacatcctgtggtgtaccgagatggagagagtgttcgggttcccagtccactacacagatgtcagcaacatgtctagactggccagacagagactgctgggaagaagctggtccgtccctgtgatcagacacctgttcgcccctctgaaggagtacttcgcctgcgtgagcagcggcaacagcaacgccaacagccggggccccagcttctctagcggcctggtgccactgtccctgagagggagccacatgggccccatggagatctacaaaaccgtgagcgcctggaagcggcagcctgtgcgcgtgctgagcctgtttcggaatatcgataaagtcctgaaaagcctgggattcctggagagcggctctggctccggcggtggcaccctgaagtacgtggaggatgtgacaaacgtggtcagacgggatgtggagaagtggggccccttcgatctggtgtacggcagcacccaacccctgggcagctcttgtgaccggtgccctggctggtacatgtttcagttccaccggatcctgcagtacgccctgccgagacaggagtcccagcggccattcttttggattttcatggacaacttgctgctgaccgaggatgaccaggaaactaccactcggttcctgcagaccgaagccgtgaccctgcaggacgtgagaggccgggactaccagaacgccatgcgggtgtggtccaacatccctggactgaaaagcaagcacgcacctctgacccctaaagaagaggagtacctgcaggcccaggtgcggagcagaagcaagctggacgcccctaaggtggatctgctggtgaagaattgcctcctgcccctgagagagtacttcaagtatttcagccagaatagtctgcccctgggcggcccaagcagcggcgcccctcctcccagcggcggcagcccagccggctccccaacctctaccgaggagggcacctctgagtccgccacccccgagagcggccctggcacctccaccgagcccagcgagggcagcgcacccggcagccctgccggcagccccacctccacagaggagggaaccagcaccgagcccagcgaaggcagcgccccaggcaccagcaccgagcctagtgagggcggctctggcggcggcagcgcccaggagattaaacggatcaacaagatcagaagaagacttgtgaaagacagcaacaccaagaaggccggcaagacaggccccatgaaaaccctgctggttagagtgatgacacccgatctgagagagcggctggaaaacctgagaaagaagcctgaaaatatcccccagcccatcagcaatacatctagagccaacctgaataagctgctgaccgattacaccgaaatgaagaaggcgatcctgcatgtgtactgggaagagttccagaaggaccctgtgggcctgatgagccgggtggcccagcctgccagcaagaagatcgatcagaacaagctgaaacctgagatggacgagaagggcaacctgaccaccgccggctttgcctgctctcagtgtggccagcccctgttcgtgtacaagctggagcaggtgtctgagaagggcaaggcttacaccaactacttcggacggtgcaatgtggccgagcacgaaaagctgatcctgctggcccagctgaagcccgagaaggatagcgacgaagccgtgacatatagcctgggaaagtttgggcagagggccctggatttctacagcattcatgtgaccaaggagtccacccaccccgtgaagcccctggcccagatcgccggaaacagatacgcctccggacctgtgggaaaggccctgagcgacgcatgtatgggcacaatcgcctccttcctgtctaagtaccaggacatcatcatcgaacaccagaaggtggtgaagggcaaccagaagagactggagagcctgcgggagctggccggcaaggaaaacctggaataccctagcgtgaccctgccacctcagcctcacaccaaggagggcgttgatgcctacaacgaagtgatcgcccgggtgcgaatgtgggtgaacctgaacctgtggcagaagctgaagctaagcagagatgatgccaagcctctgctgagactgaagggattcccttcctttcctctggtcgagagacaggccaacgaagtggactggtgggacatggtgtgtaacgtgaagaagctgatcaacgagaaaaaggaggatggcaaggtgttttggcagaatctggctggctacaagagacaggaagccctgagaccatacctgagcagcgaggaagatcggaagaagggaaagaaattcgctcggtaccagctgggcgacctgctgctgcacctggaaaagaagcacggcgaggactggggaaaggtgtacgacgaggcctgggagcggattgacaagaaagtggaaggcctgagcaagcacatcaagctggaagaggaacggagaagcgaggacgcccagagcaaggccgccctgaccgactggctgcgggctaaggccagcttcgtgatcgagggcctgaaggaggccgacaaggacgagttctgcagatgcgagctgaagctgcagaagtggtacggggacctgcggggaaagcccttcgccatcgaagccgagaacagcatcctggacatcagcggcttcagcaagcagtacaactgtgccttcatctggcagaaggacggcgtgaagaagctgaacctgtacctgatcatcaactacttcaagggcggcaagctgcggttcaagaagatcaaacctgaagccttcgaagccaacagattctacaccgtgatcaacaaaaagagcggcgagatcgtgcccatggaggtgaacttcaacttcgacgaccccaacctgatcatcctgcctctggcctttggcaagagacagggcagagaattcatctggaacgacctgctgtccctggaaaccggcagcctgaagctggccaacggaagagtgatcgagaagacactgtacaacagaagaacccggcaggatgagcctgccctgttcgtggccctgaccttcgagcggcgggaggtcctggactcctccaatatcaaaccaatgaacctgatcggcgtggcaagaggcgaaaacatccccgccgtgatcgccctgaccgaccccgagggctgcccactgagccggtttaaggatagcctgggaaacccaacccacatcctgagaatcggcgagagctataaggagaagcagcggaccatccaggccaagaaggaggtggagcagcggagagccggcggctacagccggaagtacgccagcaaagccaagaatctggcagacgatatggtgagaaacaccgctagagatctgctgtactacgccgtgacccaggatgccatgctgatcttcgccaacctgagccggggcttcggccggcagggcaagcggaccttcatggccgagagacagtacacacggatggaggactggctgaccgccaagctggcctacgagggcctgagcaagacctacctgtccaagacactggcccagtacacctccaagacatgcagcaactgtgggtttaccatcaccagcgccgactacgacagggtgctggagaagctgaagaagacagcaacaggctggatgaccacaattaacggcaaggagctgaaggtggagggccagattacctactacaacagatacaagagacagaacgtagtcaaggacctgtccgtcgagctggatagactgagcgaagaatctgtgaacaacgacatctcctcctggacaaagggcagaagcggagaagctctgagcctcctgaagaaaagattctcccatagacccgtgcaggagaagttcgtgtgcctgaactgcggcttcgagacacacgcagccgagcaagccgccctgaacatcgccagatcctggctgttcctgcggagccaggagtacaagaaataccagacaaacaagacaaccggcaacaccgataagagagccttcgtcgagacctggcagtccttttaccggaagaagcttaaggaggtgtggaaacctgccgtgcggtctggcggatctggcggaggctccacaagcagccaggagctgctgaccttcaaggacatcttcgtggacttcacccaggaggagtggggccagctggcccccgcccacaggaacctgtacagggaggtgatgctggagaactacggcaacctggtgagcgtgggctaccagctgagcaagcccggcgtgatcagccagctggagaagggcgaggagccctggctgatcgagagggagatcagcggcagccccagcagcgacctggagaacaagaccagccccaagaaaaagagaaaagtctaagctgccttctgcggggcttgccttctggccatgcccttcttctctcccttgcacctgtacctcttggtctttgaataaagcctgagtaggaaggctagcaaaaaaaaaaaaaaaaaaaaaaaaaaaaaaaaaaaaaaaaaaaaaaaaaaaaaaaaaaaaaaaaaaaaaaaaaaaaaaaa

SEQ ID NO: 5906 - RNA, 5797 nt, synthetic construct
  source 1..5797: mol_type = other RNA
aggaaataagagagaaaagaagagtaagaagaaatataagagccaccatggcccctaagaagaagcgtaaagtgagccggatggaacgcctcgtctacgaggtgcggcagaagtgcagaaacatcgaggacatctgcatctcctgcggatctctgaacgtgaccctggagcacccactgttcatcggcggcatgtgccagaactgtaaaaactgttttctggagtgtgcctatcaatacgacgatgacggctaccagagctactgcaccatctgttgcggcggaagagaggtgctgatgtgtggaaataacaactgctgccggtgcttctgcgtggaatgcgtggacctgctggtgggccccggcgccgcccaggccgctattaaggaagatccttggaactgctacatgtgcggccacaagggcacatacggcctgctgagacggagagaggactggcctagcagactgcagatgttcttcgccaataaccacgaccaggagttcgacccccctaaggtgtaccctcccgtccccgccgagaagagaaagcccatccgggtcctgagcctgttcgatggcatcgccaccggtctgctggtgctgaaggacctgggcatccaggtggataggtacattgcctccgaggtgtgcgaggactccatcaccgtgggaatggtgcgtcatcagggcaagatcatgtacgtgggcgacgtgcggagcgtgacacagaagcatatccaggagtggggccctttcgacctggtgatcggcggcagcccttgcaatgacctgagcatcgtgaacccagcccggaagggcctgtacgagggaaccggcagactgttcttcgagttttacagactgctgcacgacgcccggcctaaggaaggcgacgaccggcccttcttttggctgttcgagaatgtggtggccatgggagtcagcgacaagcgggatattagccggttcctggagagcaaccccgtgatgatcgatgccaaggaagtgagcgccgcccaccgggccagatacttctggggcaatctgcctggcatgaacagacccctggccagcaccgtgaacgacaagctggagctgcaggagtgcctggagcacggccggatcgccaagttcagcaaggtgagaaccatcaccacccgaagcaacagcatcaaacaaggcaaggaccagcactttcctgtgttcatgaacgagaaggaggacatcctgtggtgtaccgagatggagagagtgttcgggttcccagtccactacacagatgtcagcaacatgtctagactggccagacagagactgctgggaagaagctggtccgtccctgtgatcagacacctgttcgcccctctgaaggagtacttcgcctgcgtgagcagcggcaacagcaacgccaacagccggggccccagcttctctagcggcctggtgccactgtccctgagagggagccacatgggccccatggagatctacaaaaccgtgagcgcctggaagcggcagcctgtgcgcgtgctgagcctgtttcggaatatcgataaagtcctgaaaagcctgggattcctggagagcggctctggctccggcggtggcaccctgaagtacgtggaggatgtgacaaacgtggtcagacgggatgtggagaagtggggccccttcgatctggtgtacggcagcacccaacccctgggcagctcttgtgaccggtgccctggctggtacatgtttcagttccaccggatcctgcagtacgccctgccgagacaggagtcccagcggccattcttttggattttcatggacaacttgctgctgaccgaggatgaccaggaaactaccactcggttcctgcagaccgaagccgtgaccctgcaggacgtgagaggccgggactaccagaacgccatgcgggtgtggtccaacatccctggactgaaaagcaagcacgcacctctgacccctaaagaagaggagtacctgcaggcccaggtgcggagcagaagcaagctggacgcccctaaggtggatctgctggtgaagaattgcctcctgcccctgagagagtacttcaagtatttcagccagaatagtctgcccctgggcggcccaagcagcggcgcccctcctcccagcggcggcagcccagccggctccccaacctctaccgaggagggcacctctgagtccgccacccccgagagcggccctggcacctccaccgagcccagcgagggcagcgcacccggcagccctgccggcagccccacctccacagaggagggaaccagcaccgagcccagcgaaggcagcgccccaggcaccagcaccgagcctagtgagggcggctctggcggcggcagcgcccaggagattaaacggatcaacaagatcagaagaagacttgtgaaagacagcaacaccaagaaggccggcaagacaggccccatgaaaaccctgctggttagagtgatgacacccgatctgagagagcggctggaaaacctgagaaagaagcctgaaaatatcccccagcccatcagcaatacatctagagccaacctgaataagctgctgaccgattacaccgaaatgaagaaggcgatcctgcatgtgtactgggaagagttccagaaggaccctgtgggcctgatgagccgggtggcccagcctgccagcaagaagatcgatcagaacaagctgaaacctgagatggacgagaagggcaacctgaccaccgccggctttgcctgctctcagtgtggccagcccctgttcgtgtacaagctggagcaggtgtctgagaagggcaaggcttacaccaactacttcggacggtgcaatgtggccgagcacgaaaagctgatcctgctggcccagctgaagcccgagaaggatagcgacgaagccgtgacatatagcctgggaaagtttgggcagagggccctggatttctacagcattcatgtgaccaaggagtccacccaccccgtgaagcccctggcccagatcgccggaaacagatacgcctccggacctgtgggaaaggccctgagcgacgcatgtatgggcacaatcgcctccttcctgtctaagtaccaggacatcatcatcgaacaccagaaggtggtgaagggcaaccagaagagactggagagcctgcgggagctggccggcaaggaaaacctggaataccctagcgtgaccctgccacctcagcctcacaccaaggagggcgttgatgcctacaacgaagtgatcgcccgggtgcgaatgtgggtgaacctgaacctgtggcagaagctgaagctaagcagagatgatgccaagcctctgctgagactgaagggattcccttcctttcctctggtcgagagacaggccaacgaagtggactggtgggacatggtgtgtaacgtgaagaagctgatcaacgagaaaaaggaggatggcaaggtgttttggcagaatctggctggctacaagagacaggaagccctgagaccatacctgagcagcgaggaagatcggaagaagggaaagaaattcgctcggtaccagctgggcgacctgctgctgcacctggaaaagaagcacggcgaggactggggaaaggtgtacgacgaggcctgggagcggattgacaagaaagtggaaggcctgagcaagcacatcaagctggaagaggaacggagaagcgaggacgcccagagcaaggccgccctgaccgactggctgcgggctaaggccagcttcgtgatcgagggcctgaaggaggccgacaaggacgagttctgcagatgcgagctgaagctgcagaagtggtacggggacctgcggggaaagcccttcgccatcgaagccgagaacagcatcctggacatcagcggcttcagcaagcagtacaactgtgccttcatctggcagaaggacggcgtgaagaagctgaacctgtacctgatcatcaactacttcaagggcggcaagctgcggttcaagaagatcaaacctgaagccttcgaagccaacagattctacaccgtgatcaacaaaaagagcggcgagatcgtgcccatggaggtgaacttcaacttcgacgaccccaacctgatcatcctgcctctggcctttggcaagagacagggcagagaattcatctggaacgacctgctgtccctggaaaccggcagcctgaagctggccaacggaagagtgatcgagaagacactgtacaacagaagaacccggcaggatgagcctgccctgttcgtggccctgaccttcgagcggcgggaggtcctggactcctccaatatcaaaccaatgaacctgatcggcgtggcaagaggcgaaaacatccccgccgtgatcgccctgaccgaccccgagggctgcccactgagccggtttaaggatagcctgggaaacccaacccacatcctgagaatcggcgagagctataaggagaagcagcggaccatccaggccaagaaggaggtggagcagcggagagccggcggctacagccggaagtacgccagcaaagccaagaatctggcagacgatatggtgagaaacaccgctagagatctgctgtactacgccgtgacccaggatgccatgctgatcttcgccaacctgagccggggcttcggccggcagggcaagcggaccttcatggccgagagacagtacacacggatggaggactggctgaccgccaagctggcctacgagggcctgagcaagacctacctgtccaagacactggcccagtacacctccaagacatgcagcaactgtgggtttaccatcaccagcgccgactacgacagggtgctggagaagctgaagaagacagcaacaggctggatgaccacaattaacggcaaggagctgaaggtggagggccagattacctactacaacagatacaagagacagaacgtagtcaaggacctgtccgtcgagctggatagactgagcgaagaatctgtgaacaacgacatctcctcctggacaaagggcagaagcggagaagctctgagcctcctgaagaaaagattctcccatagacccgtgcaggagaagttcgtgtgcctgaactgcggcttcgagacacacgcagccgagcaagccgccctgaacatcgccagatcctggctgttcctgcggagccaggagtacaagaaataccagacaaacaagacaaccggcaacaccgataagagagccttcgtcgagacctggcagtccttttaccggaagaagcttaaggaggtgtggaaacctgccgtgcggtctggcggatctggcggaggctccacaagcccccagaagagcgtgaccttcgaggacgtggccgtgtacttcacccagaccgagtgggacggcctgagccccgcccagagggccctgtacagggacgtgatgctggagaactacggcaacgtggccagcctgggcttcagcctgctgaagcccgccgtgatcagccagctggagggcgccggcgagctggagggccccagccccctggtggccggcaccgagatcggcccccagggcctgtggaccagccccaagaaaaagagaaaagtctaagctgccttctgcggggcttgccttctggccatgcccttcttctctcccttgcacctgtacctcttggtctttgaataaagcctgagtaggaaggctagcaaaaaaaaaaaaaaaaaaaaaaaaaaaaaaaaaaaaaaaaaaaaaaaaaaaaaaaaaaaaaaaaaaaaaaaaaaaaaaaa

SEQ ID NO: 5907 - RNA, 5797 nt, synthetic construct
  source 1..5797: mol_type = other RNA
aggaaataagagagaaaagaagagtaagaagaaatataagagccaccatggcccctaagaagaagcgtaaagtgagccggatggaacgcctcgtctacgaggtgcggcagaagtgcagaaacatcgaggacatctgcatctcctgcggatctctgaacgtgaccctggagcacccactgttcatcggcggcatgtgccagaactgtaaaaactgttttctggagtgtgcctatcaatacgacgatgacggctaccagagctactgcaccatctgttgcggcggaagagaggtgctgatgtgtggaaataacaactgctgccggtgcttctgcgtggaatgcgtggacctgctggtgggccccggcgccgcccaggccgctattaaggaagatccttggaactgctacatgtgcggccacaagggcacatacggcctgctgagacggagagaggactggcctagcagactgcagatgttcttcgccaataaccacgaccaggagttcgacccccctaaggtgtaccctcccgtccccgccgagaagagaaagcccatccgggtcctgagcctgttcgatggcatcgccaccggtctgctggtgctgaaggacctgggcatccaggtggataggtacattgcctccgaggtgtgcgaggactccatcaccgtgggaatggtgcgtcatcagggcaagatcatgtacgtgggcgacgtgcggagcgtgacacagaagcatatccaggagtggggccctttcgacctggtgatcggcggcagcccttgcaatgacctgagcatcgtgaacccagcccggaagggcctgtacgagggaaccggcagactgttcttcgagttttacagactgctgcacgacgcccggcctaaggaaggcgacgaccggcccttcttttggctgttcgagaatgtggtggccatgggagtcagcgacaagcgggatattagccggttcctggagagcaaccccgtgatgatcgatgccaaggaagtgagcgccgcccaccgggccagatacttctggggcaatctgcctggcatgaacagacccctggccagcaccgtgaacgacaagctggagctgcaggagtgcctggagcacggccggatcgccaagttcagcaaggtgagaaccatcaccacccgaagcaacagcatcaaacaaggcaaggaccagcactttcctgtgttcatgaacgagaaggaggacatcctgtggtgtaccgagatggagagagtgttcgggttcccagtccactacacagatgtcagcaacatgtctagactggccagacagagactgctgggaagaagctggtccgtccctgtgatcagacacctgttcgcccctctgaaggagtacttcgcctgcgtgagcagcggcaacagcaacgccaacagccggggccccagcttctctagcggcctggtgccactgtccctgagagggagccacatgggccccatggagatctacaaaaccgtgagcgcctggaagcggcagcctgtgcgcgtgctgagcctgtttcggaatatcgataaagtcctgaaaagcctgggattcctggagagcggctctggctccggcggtggcaccctgaagtacgtggaggatgtgacaaacgtggtcagacgggatgtggagaagtggggccccttcgatctggtgtacggcagcacccaacccctgggcagctcttgtgaccggtgccctggctggtacatgtttcagttccaccggatcctgcagtacgccctgccgagacaggagtcccagcggccattcttttggattttcatggacaacttgctgctgaccgaggatgaccaggaaactaccactcggttcctgcagaccgaagccgtgaccctgcaggacgtgagaggccgggactaccagaacgccatgcgggtgtggtccaacatccctggactgaaaagcaagcacgcacctctgacccctaaagaagaggagtacctgcaggcccaggtgcggagcagaagcaagctggacgcccctaaggtggatctgctggtgaagaattgcctcctgcccctgagagagtacttcaagtatttcagccagaatagtctgcccctgggcggcccaagcagcggcgcccctcctcccagcggcggcagcccagccggctccccaacctctaccgaggagggcacctctgagtccgccacccccgagagcggccctggcacctccaccgagcccagcgagggcagcgcacccggcagccctgccggcagccccacctccacagaggagggaaccagcaccgagcccagcgaaggcagcgccccaggcaccagcaccgagcctagtgagggcggctctggcggcggcagcgcccaggagattaaacggatcaacaagatcagaagaagacttgtgaaagacagcaacaccaagaaggccggcaagacaggccccatgaaaaccctgctggttagagtgatgacacccgatctgagagagcggctggaaaacctgagaaagaagcctgaaaatatcccccagcccatcagcaatacatctagagccaacctgaataagctgctgaccgattacaccgaaatgaagaaggcgatcctgcatgtgtactgggaagagttccagaaggaccctgtgggcctgatgagccgggtggcccagcctgccagcaagaagatcgatcagaacaagctgaaacctgagatggacgagaagggcaacctgaccaccgccggctttgcctgctctcagtgtggccagcccctgttcgtgtacaagctggagcaggtgtctgagaagggcaaggcttacaccaactacttcggacggtgcaatgtggccgagcacgaaaagctgatcctgctggcccagctgaagcccgagaaggatagcgacgaagccgtgacatatagcctgggaaagtttgggcagagggccctggatttctacagcattcatgtgaccaaggagtccacccaccccgtgaagcccctggcccagatcgccggaaacagatacgcctccggacctgtgggaaaggccctgagcgacgcatgtatgggcacaatcgcctccttcctgtctaagtaccaggacatcatcatcgaacaccagaaggtggtgaagggcaaccagaagagactggagagcctgcgggagctggccggcaaggaaaacctggaataccctagcgtgaccctgccacctcagcctcacaccaaggagggcgttgatgcctacaacgaagtgatcgcccgggtgcgaatgtgggtgaacctgaacctgtggcagaagctgaagctaagcagagatgatgccaagcctctgctgagactgaagggattcccttcctttcctctggtcgagagacaggccaacgaagtggactggtgggacatggtgtgtaacgtgaagaagctgatcaacgagaaaaaggaggatggcaaggtgttttggcagaatctggctggctacaagagacaggaagccctgagaccatacctgagcagcgaggaagatcggaagaagggaaagaaattcgctcggtaccagctgggcgacctgctgctgcacctggaaaagaagcacggcgaggactggggaaaggtgtacgacgaggcctgggagcggattgacaagaaagtggaaggcctgagcaagcacatcaagctggaagaggaacggagaagcgaggacgcccagagcaaggccgccctgaccgactggctgcgggctaaggccagcttcgtgatcgagggcctgaaggaggccgacaaggacgagttctgcagatgcgagctgaagctgcagaagtggtacggggacctgcggggaaagcccttcgccatcgaagccgagaacagcatcctggacatcagcggcttcagcaagcagtacaactgtgccttcatctggcagaaggacggcgtgaagaagctgaacctgtacctgatcatcaactacttcaagggcggcaagctgcggttcaagaagatcaaacctgaagccttcgaagccaacagattctacaccgtgatcaacaaaaagagcggcgagatcgtgcccatggaggtgaacttcaacttcgacgaccccaacctgatcatcctgcctctggcctttggcaagagacagggcagagaattcatctggaacgacctgctgtccctggaaaccggcagcctgaagctggccaacggaagagtgatcgagaagacactgtacaacagaagaacccggcaggatgagcctgccctgttcgtggccctgaccttcgagcggcgggaggtcctggactcctccaatatcaaaccaatgaacctgatcggcgtggcaagaggcgaaaacatccccgccgtgatcgccctgaccgaccccgagggctgcccactgagccggtttaaggatagcctgggaaacccaacccacatcctgagaatcggcgagagctataaggagaagcagcggaccatccaggccaagaaggaggtggagcagcggagagccggcggctacagccggaagtacgccagcaaagccaagaatctggcagacgatatggtgagaaacaccgctagagatctgctgtactacgccgtgacccaggatgccatgctgatcttcgccaacctgagccggggcttcggccggcagggcaagcggaccttcatggccgagagacagtacacacggatggaggactggctgaccgccaagctggcctacgagggcctgagcaagacctacctgtccaagacactggcccagtacacctccaagacatgcagcaactgtgggtttaccatcaccagcgccgactacgacagggtgctggagaagctgaagaagacagcaacaggctggatgaccacaattaacggcaaggagctgaaggtggagggccagattacctactacaacagatacaagagacagaacgtagtcaaggacctgtccgtcgagctggatagactgagcgaagaatctgtgaacaacgacatctcctcctggacaaagggcagaagcggagaagctctgagcctcctgaagaaaagattctcccatagacccgtgcaggagaagttcgtgtgcctgaactgcggcttcgagacacacgcagccgagcaagccgccctgaacatcgccagatcctggctgttcctgcggagccaggagtacaagaaataccagacaaacaagacaaccggcaacaccgataagagagccttcgtcgagacctggcagtccttttaccggaagaagcttaaggaggtgtggaaacctgccgtgcggtctggcggatctggcggaggctccacaagcagccagaaggccctgaccttccaggacgtggccgtggagttcacccaggaggagtggggcctgctggagcccgcccagaagaacatgcacagggacgtgatgctggagaactacgagaacttcgtgagcctgggcctgcccgtgcccaagagcgccctgatcttccacctggagaggagggagaccccctggctgcccagcggcgaggtgctgaggaacacctaccccgactacctggtgcagaccagccccaagaaaaagagaaaagtctaagctgccttctgcggggcttgccttctggccatgcccttcttctctcccttgcacctgtacctcttggtctttgaataaagcctgagtaggaaggctagcaaaaaaaaaaaaaaaaaaaaaaaaaaaaaaaaaaaaaaaaaaaaaaaaaaaaaaaaaaaaaaaaaaaaaaaaaaaaaaaa

SEQ ID NO: 5908 - RNA, 5797 nt, synthetic construct
  source 1..5797: mol_type = other RNA
aggaaataagagagaaaagaagagtaagaagaaatataagagccaccatggcccctaagaagaagcgtaaagtgagccggatggaacgcctcgtctacgaggtgcggcagaagtgcagaaacatcgaggacatctgcatctcctgcggatctctgaacgtgaccctggagcacccactgttcatcggcggcatgtgccagaactgtaaaaactgttttctggagtgtgcctatcaatacgacgatgacggctaccagagctactgcaccatctgttgcggcggaagagaggtgctgatgtgtggaaataacaactgctgccggtgcttctgcgtggaatgcgtggacctgctggtgggccccggcgccgcccaggccgctattaaggaagatccttggaactgctacatgtgcggccacaagggcacatacggcctgctgagacggagagaggactggcctagcagactgcagatgttcttcgccaataaccacgaccaggagttcgacccccctaaggtgtaccctcccgtccccgccgagaagagaaagcccatccgggtcctgagcctgttcgatggcatcgccaccggtctgctggtgctgaaggacctgggcatccaggtggataggtacattgcctccgaggtgtgcgaggactccatcaccgtgggaatggtgcgtcatcagggcaagatcatgtacgtgggcgacgtgcggagcgtgacacagaagcatatccaggagtggggccctttcgacctggtgatcggcggcagcccttgcaatgacctgagcatcgtgaacccagcccggaagggcctgtacgagggaaccggcagactgttcttcgagttttacagactgctgcacgacgcccggcctaaggaaggcgacgaccggcccttcttttggctgttcgagaatgtggtggccatgggagtcagcgacaagcgggatattagccggttcctggagagcaaccccgtgatgatcgatgccaaggaagtgagcgccgcccaccgggccagatacttctggggcaatctgcctggcatgaacagacccctggccagcaccgtgaacgacaagctggagctgcaggagtgcctggagcacggccggatcgccaagttcagcaaggtgagaaccatcaccacccgaagcaacagcatcaaacaaggcaaggaccagcactttcctgtgttcatgaacgagaaggaggacatcctgtggtgtaccgagatggagagagtgttcgggttcccagtccactacacagatgtcagcaacatgtctagactggccagacagagactgctgggaagaagctggtccgtccctgtgatcagacacctgttcgcccctctgaaggagtacttcgcctgcgtgagcagcggcaacagcaacgccaacagccggggccccagcttctctagcggcctggtgccactgtccctgagagggagccacatgggccccatggagatctacaaaaccgtgagcgcctggaagcggcagcctgtgcgcgtgctgagcctgtttcggaatatcgataaagtcctgaaaagcctgggattcctggagagcggctctggctccggcggtggcaccctgaagtacgtggaggatgtgacaaacgtggtcagacgggatgtggagaagtggggccccttcgatctggtgtacggcagcacccaacccctgggcagctcttgtgaccggtgccctggctggtacatgtttcagttccaccggatcctgcagtacgccctgccgagacaggagtcccagcggccattcttttggattttcatggacaacttgctgctgaccgaggatgaccaggaaactaccactcggttcctgcagaccgaagccgtgaccctgcaggacgtgagaggccgggactaccagaacgccatgcgggtgtggtccaacatccctggactgaaaagcaagcacgcacctctgacccctaaagaagaggagtacctgcaggcccaggtgcggagcagaagcaagctggacgcccctaaggtggatctgctggtgaagaattgcctcctgcccctgagagagtacttcaagtatttcagccagaatagtctgcccctgggcggcccaagcagcggcgcccctcctcccagcggcggcagcccagccggctccccaacctctaccgaggagggcacctctgagtccgccacccccgagagcggccctggcacctccaccgagcccagcgagggcagcgcacccggcagccctgccggcagccccacctccacagaggagggaaccagcaccgagcccagcgaaggcagcgccccaggcaccagcaccgagcctagtgagggcggctctggcggcggcagcgcccaggagattaaacggatcaacaagatcagaagaagacttgtgaaagacagcaacaccaagaaggccggcaagacaggccccatgaaaaccctgctggttagagtgatgacacccgatctgagagagcggctggaaaacctgagaaagaagcctgaaaatatcccccagcccatcagcaatacatctagagccaacctgaataagctgctgaccgattacaccgaaatgaagaaggcgatcctgcatgtgtactgggaagagttccagaaggaccctgtgggcctgatgagccgggtggcccagcctgccagcaagaagatcgatcagaacaagctgaaacctgagatggacgagaagggcaacctgaccaccgccggctttgcctgctctcagtgtggccagcccctgttcgtgtacaagctggagcaggtgtctgagaagggcaaggcttacaccaactacttcggacggtgcaatgtggccgagcacgaaaagctgatcctgctggcccagctgaagcccgagaaggatagcgacgaagccgtgacatatagcctgggaaagtttgggcagagggccctggatttctacagcattcatgtgaccaaggagtccacccaccccgtgaagcccctggcccagatcgccggaaacagatacgcctccggacctgtgggaaaggccctgagcgacgcatgtatgggcacaatcgcctccttcctgtctaagtaccaggacatcatcatcgaacaccagaaggtggtgaagggcaaccagaagagactggagagcctgcgggagctggccggcaaggaaaacctggaataccctagcgtgaccctgccacctcagcctcacaccaaggagggcgttgatgcctacaacgaagtgatcgcccgggtgcgaatgtgggtgaacctgaacctgtggcagaagctgaagctaagcagagatgatgccaagcctctgctgagactgaagggattcccttcctttcctctggtcgagagacaggccaacgaagtggactggtgggacatggtgtgtaacgtgaagaagctgatcaacgagaaaaaggaggatggcaaggtgttttggcagaatctggctggctacaagagacaggaagccctgagaccatacctgagcagcgaggaagatcggaagaagggaaagaaattcgctcggtaccagctgggcgacctgctgctgcacctggaaaagaagcacggcgaggactggggaaaggtgtacgacgaggcctgggagcggattgacaagaaagtggaaggcctgagcaagcacatcaagctggaagaggaacggagaagcgaggacgcccagagcaaggccgccctgaccgactggctgcgggctaaggccagcttcgtgatcgagggcctgaaggaggccgacaaggacgagttctgcagatgcgagctgaagctgcagaagtggtacggggacctgcggggaaagcccttcgccatcgaagccgagaacagcatcctggacatcagcggcttcagcaagcagtacaactgtgccttcatctggcagaaggacggcgtgaagaagctgaacctgtacctgatcatcaactacttcaagggcggcaagctgcggttcaagaagatcaaacctgaagccttcgaagccaacagattctacaccgtgatcaacaaaaagagcggcgagatcgtgcccatggaggtgaacttcaacttcgacgaccccaacctgatcatcctgcctctggcctttggcaagagacagggcagagaattcatctggaacgacctgctgtccctggaaaccggcagcctgaagctggccaacggaagagtgatcgagaagacactgtacaacagaagaacccggcaggatgagcctgccctgttcgtggccctgaccttcgagcggcgggaggtcctggactcctccaatatcaaaccaatgaacctgatcggcgtggcaagaggcgaaaacatccccgccgtgatcgccctgaccgaccccgagggctgcccactgagccggtttaaggatagcctgggaaacccaacccacatcctgagaatcggcgagagctataaggagaagcagcggaccatccaggccaagaaggaggtggagcagcggagagccggcggctacagccggaagtacgccagcaaagccaagaatctggcagacgatatggtgagaaacaccgctagagatctgctgtactacgccgtgacccaggatgccatgctgatcttcgccaacctgagccggggcttcggccggcagggcaagcggaccttcatggccgagagacagtacacacggatggaggactggctgaccgccaagctggcctacgagggcctgagcaagacctacctgtccaagacactggcccagtacacctccaagacatgcagcaactgtgggtttaccatcaccagcgccgactacgacagggtgctggagaagctgaagaagacagcaacaggctggatgaccacaattaacggcaaggagctgaaggtggagggccagattacctactacaacagatacaagagacagaacgtagtcaaggacctgtccgtcgagctggatagactgagcgaagaatctgtgaacaacgacatctcctcctggacaaagggcagaagcggagaagctctgagcctcctgaagaaaagattctcccatagacccgtgcaggagaagttcgtgtgcctgaactgcggcttcgagacacacgcagccgagcaagccgccctgaacatcgccagatcctggctgttcctgcggagccaggagtacaagaaataccagacaaacaagacaaccggcaacaccgataagagagccttcgtcgagacctggcagtccttttaccggaagaagcttaaggaggtgtggaaacctgccgtgcggtctggcggatctggcggaggctccacaagcccccaggagcccgtgaccttcgaggacgtggccgtgtacttcacccagaaccagtgggccagcctggaccccacccagagggccctgtacagggaggtgatgctggagaactacgccagcgtggccagcctggtggtgttccccttccccaagcccgacctggtgagccagctggagagggaggaggccccctggggccccgacccctgggaggccgaggtgctgaggggcatctgccccggcaccagccccaagaaaaagagaaaagtctaagctgccttctgcggggcttgccttctggccatgcccttcttctctcccttgcacctgtacctcttggtctttgaataaagcctgagtaggaaggctagcaaaaaaaaaaaaaaaaaaaaaaaaaaaaaaaaaaaaaaaaaaaaaaaaaaaaaaaaaaaaaaaaaaaaaaaaaaaaaaaa

SEQ ID NO: 5909 - RNA, 5797 nt, synthetic construct
  source 1..5797: mol_type = other RNA
aggaaataagagagaaaagaagagtaagaagaaatataagagccaccatggcccctaagaagaagcgtaaagtgagccggatggaacgcctcgtctacgaggtgcggcagaagtgcagaaacatcgaggacatctgcatctcctgcggatctctgaacgtgaccctggagcacccactgttcatcggcggcatgtgccagaactgtaaaaactgttttctggagtgtgcctatcaatacgacgatgacggctaccagagctactgcaccatctgttgcggcggaagagaggtgctgatgtgtggaaataacaactgctgccggtgcttctgcgtggaatgcgtggacctgctggtgggccccggcgccgcccaggccgctattaaggaagatccttggaactgctacatgtgcggccacaagggcacatacggcctgctgagacggagagaggactggcctagcagactgcagatgttcttcgccaataaccacgaccaggagttcgacccccctaaggtgtaccctcccgtccccgccgagaagagaaagcccatccgggtcctgagcctgttcgatggcatcgccaccggtctgctggtgctgaaggacctgggcatccaggtggataggtacattgcctccgaggtgtgcgaggactccatcaccgtgggaatggtgcgtcatcagggcaagatcatgtacgtgggcgacgtgcggagcgtgacacagaagcatatccaggagtggggccctttcgacctggtgatcggcggcagcccttgcaatgacctgagcatcgtgaacccagcccggaagggcctgtacgagggaaccggcagactgttcttcgagttttacagactgctgcacgacgcccggcctaaggaaggcgacgaccggcccttcttttggctgttcgagaatgtggtggccatgggagtcagcgacaagcgggatattagccggttcctggagagcaaccccgtgatgatcgatgccaaggaagtgagcgccgcccaccgggccagatacttctggggcaatctgcctggcatgaacagacccctggccagcaccgtgaacgacaagctggagctgcaggagtgcctggagcacggccggatcgccaagttcagcaaggtgagaaccatcaccacccgaagcaacagcatcaaacaaggcaaggaccagcactttcctgtgttcatgaacgagaaggaggacatcctgtggtgtaccgagatggagagagtgttcgggttcccagtccactacacagatgtcagcaacatgtctagactggccagacagagactgctgggaagaagctggtccgtccctgtgatcagacacctgttcgcccctctgaaggagtacttcgcctgcgtgagcagcggcaacagcaacgccaacagccggggccccagcttctctagcggcctggtgccactgtccctgagagggagccacatgggccccatggagatctacaaaaccgtgagcgcctggaagcggcagcctgtgcgcgtgctgagcctgtttcggaatatcgataaagtcctgaaaagcctgggattcctggagagcggctctggctccggcggtggcaccctgaagtacgtggaggatgtgacaaacgtggtcagacgggatgtggagaagtggggccccttcgatctggtgtacggcagcacccaacccctgggcagctcttgtgaccggtgccctggctggtacatgtttcagttccaccggatcctgcagtacgccctgccgagacaggagtcccagcggccattcttttggattttcatggacaacttgctgctgaccgaggatgaccaggaaactaccactcggttcctgcagaccgaagccgtgaccctgcaggacgtgagaggccgggactaccagaacgccatgcgggtgtggtccaacatccctggactgaaaagcaagcacgcacctctgacccctaaagaagaggagtacctgcaggcccaggtgcggagcagaagcaagctggacgcccctaaggtggatctgctggtgaagaattgcctcctgcccctgagagagtacttcaagtatttcagccagaatagtctgcccctgggcggcccaagcagcggcgcccctcctcccagcggcggcagcccagccggctccccaacctctaccgaggagggcacctctgagtccgccacccccgagagcggccctggcacctccaccgagcccagcgagggcagcgcacccggcagccctgccggcagccccacctccacagaggagggaaccagcaccgagcccagcgaaggcagcgccccaggcaccagcaccgagcctagtgagggcggctctggcggcggcagcgcccaggagattaaacggatcaacaagatcagaagaagacttgtgaaagacagcaacaccaagaaggccggcaagacaggccccatgaaaaccctgctggttagagtgatgacacccgatctgagagagcggctggaaaacctgagaaagaagcctgaaaatatcccccagcccatcagcaatacatctagagccaacctgaataagctgctgaccgattacaccgaaatgaagaaggcgatcctgcatgtgtactgggaagagttccagaaggaccctgtgggcctgatgagccgggtggcccagcctgccagcaagaagatcgatcagaacaagctgaaacctgagatggacgagaagggcaacctgaccaccgccggctttgcctgctctcagtgtggccagcccctgttcgtgtacaagctggagcaggtgtctgagaagggcaaggcttacaccaactacttcggacggtgcaatgtggccgagcacgaaaagctgatcctgctggcccagctgaagcccgagaaggatagcgacgaagccgtgacatatagcctgggaaagtttgggcagagggccctggatttctacagcattcatgtgaccaaggagtccacccaccccgtgaagcccctggcccagatcgccggaaacagatacgcctccggacctgtgggaaaggccctgagcgacgcatgtatgggcacaatcgcctccttcctgtctaagtaccaggacatcatcatcgaacaccagaaggtggtgaagggcaaccagaagagactggagagcctgcgggagctggccggcaaggaaaacctggaataccctagcgtgaccctgccacctcagcctcacaccaaggagggcgttgatgcctacaacgaagtgatcgcccgggtgcgaatgtgggtgaacctgaacctgtggcagaagctgaagctaagcagagatgatgccaagcctctgctgagactgaagggattcccttcctttcctctggtcgagagacaggccaacgaagtggactggtgggacatggtgtgtaacgtgaagaagctgatcaacgagaaaaaggaggatggcaaggtgttttggcagaatctggctggctacaagagacaggaagccctgagaccatacctgagcagcgaggaagatcggaagaagggaaagaaattcgctcggtaccagctgggcgacctgctgctgcacctggaaaagaagcacggcgaggactggggaaaggtgtacgacgaggcctgggagcggattgacaagaaagtggaaggcctgagcaagcacatcaagctggaagaggaacggagaagcgaggacgcccagagcaaggccgccctgaccgactggctgcgggctaaggccagcttcgtgatcgagggcctgaaggaggccgacaaggacgagttctgcagatgcgagctgaagctgcagaagtggtacggggacctgcggggaaagcccttcgccatcgaagccgagaacagcatcctggacatcagcggcttcagcaagcagtacaactgtgccttcatctggcagaaggacggcgtgaagaagctgaacctgtacctgatcatcaactacttcaagggcggcaagctgcggttcaagaagatcaaacctgaagccttcgaagccaacagattctacaccgtgatcaacaaaaagagcggcgagatcgtgcccatggaggtgaacttcaacttcgacgaccccaacctgatcatcctgcctctggcctttggcaagagacagggcagagaattcatctggaacgacctgctgtccctggaaaccggcagcctgaagctggccaacggaagagtgatcgagaagacactgtacaacagaagaacccggcaggatgagcctgccctgttcgtggccctgaccttcgagcggcgggaggtcctggactcctccaatatcaaaccaatgaacctgatcggcgtggcaagaggcgaaaacatccccgccgtgatcgccctgaccgaccccgagggctgcccactgagccggtttaaggatagcctgggaaacccaacccacatcctgagaatcggcgagagctataaggagaagcagcggaccatccaggccaagaaggaggtggagcagcggagagccggcggctacagccggaagtacgccagcaaagccaagaatctggcagacgatatggtgagaaacaccgctagagatctgctgtactacgccgtgacccaggatgccatgctgatcttcgccaacctgagccggggcttcggccggcagggcaagcggaccttcatggccgagagacagtacacacggatggaggactggctgaccgccaagctggcctacgagggcctgagcaagacctacctgtccaagacactggcccagtacacctccaagacatgcagcaactgtgggtttaccatcaccagcgccgactacgacagggtgctggagaagctgaagaagacagcaacaggctggatgaccacaattaacggcaaggagctgaaggtggagggccagattacctactacaacagatacaagagacagaacgtagtcaaggacctgtccgtcgagctggatagactgagcgaagaatctgtgaacaacgacatctcctcctggacaaagggcagaagcggagaagctctgagcctcctgaagaaaagattctcccatagacccgtgcaggagaagttcgtgtgcctgaactgcggcttcgagacacacgcagccgagcaagccgccctgaacatcgccagatcctggctgttcctgcggagccaggagtacaagaaataccagacaaacaagacaaccggcaacaccgataagagagccttcgtcgagacctggcagtccttttaccggaagaagcttaaggaggtgtggaaacctgccgtgcggtctggcggatctggcggaggctccacaagcttccagcacctggtgatgttcagggacgtggccgtggacttcagccaggaggagtgggagtgcctgaacagctaccagaggaacctgtacagggacgtgatcctggagaactacagcaacctggtgagcgtggccggctgcagcatcagcaagcccgacgtgatcaccctgctggagcagggcaaggagccctggatggtggtgagggacgagaggaggaggagcctggacctggagagcaggaccagccccaagaaaaagagaaaagtctaagctgccttctgcggggcttgccttctggccatgcccttcttctctcccttgcacctgtacctcttggtctttgaataaagcctgagtaggaaggctagcaaaaaaaaaaaaaaaaaaaaaaaaaaaaaaaaaaaaaaaaaaaaaaaaaaaaaaaaaaaaaaaaaaaaaaaaaaaaaaaa

SEQ ID NO: 5910 - RNA, 5797 nt, synthetic construct
  source 1..5797: mol_type = other RNA
aggaaataagagagaaaagaagagtaagaagaaatataagagccaccatggcccctaagaagaagcgtaaagtgagccggatggaacgcctcgtctacgaggtgcggcagaagtgcagaaacatcgaggacatctgcatctcctgcggatctctgaacgtgaccctggagcacccactgttcatcggcggcatgtgccagaactgtaaaaactgttttctggagtgtgcctatcaatacgacgatgacggctaccagagctactgcaccatctgttgcggcggaagagaggtgctgatgtgtggaaataacaactgctgccggtgcttctgcgtggaatgcgtggacctgctggtgggccccggcgccgcccaggccgctattaaggaagatccttggaactgctacatgtgcggccacaagggcacatacggcctgctgagacggagagaggactggcctagcagactgcagatgttcttcgccaataaccacgaccaggagttcgacccccctaaggtgtaccctcccgtccccgccgagaagagaaagcccatccgggtcctgagcctgttcgatggcatcgccaccggtctgctggtgctgaaggacctgggcatccaggtggataggtacattgcctccgaggtgtgcgaggactccatcaccgtgggaatggtgcgtcatcagggcaagatcatgtacgtgggcgacgtgcggagcgtgacacagaagcatatccaggagtggggccctttcgacctggtgatcggcggcagcccttgcaatgacctgagcatcgtgaacccagcccggaagggcctgtacgagggaaccggcagactgttcttcgagttttacagactgctgcacgacgcccggcctaaggaaggcgacgaccggcccttcttttggctgttcgagaatgtggtggccatgggagtcagcgacaagcgggatattagccggttcctggagagcaaccccgtgatgatcgatgccaaggaagtgagcgccgcccaccgggccagatacttctggggcaatctgcctggcatgaacagacccctggccagcaccgtgaacgacaagctggagctgcaggagtgcctggagcacggccggatcgccaagttcagcaaggtgagaaccatcaccacccgaagcaacagcatcaaacaaggcaaggaccagcactttcctgtgttcatgaacgagaaggaggacatcctgtggtgtaccgagatggagagagtgttcgggttcccagtccactacacagatgtcagcaacatgtctagactggccagacagagactgctgggaagaagctggtccgtccctgtgatcagacacctgttcgcccctctgaaggagtacttcgcctgcgtgagcagcggcaacagcaacgccaacagccggggccccagcttctctagcggcctggtgccactgtccctgagagggagccacatgggccccatggagatctacaaaaccgtgagcgcctggaagcggcagcctgtgcgcgtgctgagcctgtttcggaatatcgataaagtcctgaaaagcctgggattcctggagagcggctctggctccggcggtggcaccctgaagtacgtggaggatgtgacaaacgtggtcagacgggatgtggagaagtggggccccttcgatctggtgtacggcagcacccaacccctgggcagctcttgtgaccggtgccctggctggtacatgtttcagttccaccggatcctgcagtacgccctgccgagacaggagtcccagcggccattcttttggattttcatggacaacttgctgctgaccgaggatgaccaggaaactaccactcggttcctgcagaccgaagccgtgaccctgcaggacgtgagaggccgggactaccagaacgccatgcgggtgtggtccaacatccctggactgaaaagcaagcacgcacctctgacccctaaagaagaggagtacctgcaggcccaggtgcggagcagaagcaagctggacgcccctaaggtggatctgctggtgaagaattgcctcctgcccctgagagagtacttcaagtatttcagccagaatagtctgcccctgggcggcccaagcagcggcgcccctcctcccagcggcggcagcccagccggctccccaacctctaccgaggagggcacctctgagtccgccacccccgagagcggccctggcacctccaccgagcccagcgagggcagcgcacccggcagccctgccggcagccccacctccacagaggagggaaccagcaccgagcccagcgaaggcagcgccccaggcaccagcaccgagcctagtgagggcggctctggcggcggcagcgcccaggagattaaacggatcaacaagatcagaagaagacttgtgaaagacagcaacaccaagaaggccggcaagacaggccccatgaaaaccctgctggttagagtgatgacacccgatctgagagagcggctggaaaacctgagaaagaagcctgaaaatatcccccagcccatcagcaatacatctagagccaacctgaataagctgctgaccgattacaccgaaatgaagaaggcgatcctgcatgtgtactgggaagagttccagaaggaccctgtgggcctgatgagccgggtggcccagcctgccagcaagaagatcgatcagaacaagctgaaacctgagatggacgagaagggcaacctgaccaccgccggctttgcctgctctcagtgtggccagcccctgttcgtgtacaagctggagcaggtgtctgagaagggcaaggcttacaccaactacttcggacggtgcaatgtggccgagcacgaaaagctgatcctgctggcccagctgaagcccgagaaggatagcgacgaagccgtgacatatagcctgggaaagtttgggcagagggccctggatttctacagcattcatgtgaccaaggagtccacccaccccgtgaagcccctggcccagatcgccggaaacagatacgcctccggacctgtgggaaaggccctgagcgacgcatgtatgggcacaatcgcctccttcctgtctaagtaccaggacatcatcatcgaacaccagaaggtggtgaagggcaaccagaagagactggagagcctgcgggagctggccggcaaggaaaacctggaataccctagcgtgaccctgccacctcagcctcacaccaaggagggcgttgatgcctacaacgaagtgatcgcccgggtgcgaatgtgggtgaacctgaacctgtggcagaagctgaagctaagcagagatgatgccaagcctctgctgagactgaagggattcccttcctttcctctggtcgagagacaggccaacgaagtggactggtgggacatggtgtgtaacgtgaagaagctgatcaacgagaaaaaggaggatggcaaggtgttttggcagaatctggctggctacaagagacaggaagccctgagaccatacctgagcagcgaggaagatcggaagaagggaaagaaattcgctcggtaccagctgggcgacctgctgctgcacctggaaaagaagcacggcgaggactggggaaaggtgtacgacgaggcctgggagcggattgacaagaaagtggaaggcctgagcaagcacatcaagctggaagaggaacggagaagcgaggacgcccagagcaaggccgccctgaccgactggctgcgggctaaggccagcttcgtgatcgagggcctgaaggaggccgacaaggacgagttctgcagatgcgagctgaagctgcagaagtggtacggggacctgcggggaaagcccttcgccatcgaagccgagaacagcatcctggacatcagcggcttcagcaagcagtacaactgtgccttcatctggcagaaggacggcgtgaagaagctgaacctgtacctgatcatcaactacttcaagggcggcaagctgcggttcaagaagatcaaacctgaagccttcgaagccaacagattctacaccgtgatcaacaaaaagagcggcgagatcgtgcccatggaggtgaacttcaacttcgacgaccccaacctgatcatcctgcctctggcctttggcaagagacagggcagagaattcatctggaacgacctgctgtccctggaaaccggcagcctgaagctggccaacggaagagtgatcgagaagacactgtacaacagaagaacccggcaggatgagcctgccctgttcgtggccctgaccttcgagcggcgggaggtcctggactcctccaatatcaaaccaatgaacctgatcggcgtggcaagaggcgaaaacatccccgccgtgatcgccctgaccgaccccgagggctgcccactgagccggtttaaggatagcctgggaaacccaacccacatcctgagaatcggcgagagctataaggagaagcagcggaccatccaggccaagaaggaggtggagcagcggagagccggcggctacagccggaagtacgccagcaaagccaagaatctggcagacgatatggtgagaaacaccgctagagatctgctgtactacgccgtgacccaggatgccatgctgatcttcgccaacctgagccggggcttcggccggcagggcaagcggaccttcatggccgagagacagtacacacggatggaggactggctgaccgccaagctggcctacgagggcctgagcaagacctacctgtccaagacactggcccagtacacctccaagacatgcagcaactgtgggtttaccatcaccagcgccgactacgacagggtgctggagaagctgaagaagacagcaacaggctggatgaccacaattaacggcaaggagctgaaggtggagggccagattacctactacaacagatacaagagacagaacgtagtcaaggacctgtccgtcgagctggatagactgagcgaagaatctgtgaacaacgacatctcctcctggacaaagggcagaagcggagaagctctgagcctcctgaagaaaagattctcccatagacccgtgcaggagaagttcgtgtgcctgaactgcggcttcgagacacacgcagccgagcaagccgccctgaacatcgccagatcctggctgttcctgcggagccaggagtacaagaaataccagacaaacaagacaaccggcaacaccgataagagagccttcgtcgagacctggcagtccttttaccggaagaagcttaaggaggtgtggaaacctgccgtgcggtctggcggatctggcggaggctccacaagcccccaggagcccgtgaccttcaaggacgtggccgtggacttcagccaggaggagtggggcctgctgggccccgcccagaggcacctgtacagggacgtgatgctggagaactacaggaacctggtgagcctgggcctgatcctggccaagcccgaggtggtgtgccacctggagcagggcggcgagctgtggaagcccgagcacggcgtgctgtgcagcggcgacggcgagctgtgggtgaggaccagccccaagaaaaagagaaaagtctaagctgccttctgcggggcttgccttctggccatgcccttcttctctcccttgcacctgtacctcttggtctttgaataaagcctgagtaggaaggctagcaaaaaaaaaaaaaaaaaaaaaaaaaaaaaaaaaaaaaaaaaaaaaaaaaaaaaaaaaaaaaaaaaaaaaaaaaaaaaaaa

SEQ ID NO: 5911 - RNA, 5797 nt, synthetic construct
  source 1..5797: mol_type = other RNA
aggaaataagagagaaaagaagagtaagaagaaatataagagccaccatggcccctaagaagaagcgtaaagtgagccggatggaacgcctcgtctacgaggtgcggcagaagtgcagaaacatcgaggacatctgcatctcctgcggatctctgaacgtgaccctggagcacccactgttcatcggcggcatgtgccagaactgtaaaaactgttttctggagtgtgcctatcaatacgacgatgacggctaccagagctactgcaccatctgttgcggcggaagagaggtgctgatgtgtggaaataacaactgctgccggtgcttctgcgtggaatgcgtggacctgctggtgggccccggcgccgcccaggccgctattaaggaagatccttggaactgctacatgtgcggccacaagggcacatacggcctgctgagacggagagaggactggcctagcagactgcagatgttcttcgccaataaccacgaccaggagttcgacccccctaaggtgtaccctcccgtccccgccgagaagagaaagcccatccgggtcctgagcctgttcgatggcatcgccaccggtctgctggtgctgaaggacctgggcatccaggtggataggtacattgcctccgaggtgtgcgaggactccatcaccgtgggaatggtgcgtcatcagggcaagatcatgtacgtgggcgacgtgcggagcgtgacacagaagcatatccaggagtggggccctttcgacctggtgatcggcggcagcccttgcaatgacctgagcatcgtgaacccagcccggaagggcctgtacgagggaaccggcagactgttcttcgagttttacagactgctgcacgacgcccggcctaaggaaggcgacgaccggcccttcttttggctgttcgagaatgtggtggccatgggagtcagcgacaagcgggatattagccggttcctggagagcaaccccgtgatgatcgatgccaaggaagtgagcgccgcccaccgggccagatacttctggggcaatctgcctggcatgaacagacccctggccagcaccgtgaacgacaagctggagctgcaggagtgcctggagcacggccggatcgccaagttcagcaaggtgagaaccatcaccacccgaagcaacagcatcaaacaaggcaaggaccagcactttcctgtgttcatgaacgagaaggaggacatcctgtggtgtaccgagatggagagagtgttcgggttcccagtccactacacagatgtcagcaacatgtctagactggccagacagagactgctgggaagaagctggtccgtccctgtgatcagacacctgttcgcccctctgaaggagtacttcgcctgcgtgagcagcggcaacagcaacgccaacagccggggccccagcttctctagcggcctggtgccactgtccctgagagggagccacatgggccccatggagatctacaaaaccgtgagcgcctggaagcggcagcctgtgcgcgtgctgagcctgtttcggaatatcgataaagtcctgaaaagcctgggattcctggagagcggctctggctccggcggtggcaccctgaagtacgtggaggatgtgacaaacgtggtcagacgggatgtggagaagtggggccccttcgatctggtgtacggcagcacccaacccctgggcagctcttgtgaccggtgccctggctggtacatgtttcagttccaccggatcctgcagtacgccctgccgagacaggagtcccagcggccattcttttggattttcatggacaacttgctgctgaccgaggatgaccaggaaactaccactcggttcctgcagaccgaagccgtgaccctgcaggacgtgagaggccgggactaccagaacgccatgcgggtgtggtccaacatccctggactgaaaagcaagcacgcacctctgacccctaaagaagaggagtacctgcaggcccaggtgcggagcagaagcaagctggacgcccctaaggtggatctgctggtgaagaattgcctcctgcccctgagagagtacttcaagtatttcagccagaatagtctgcccctgggcggcccaagcagcggcgcccctcctcccagcggcggcagcccagccggctccccaacctctaccgaggagggcacctctgagtccgccacccccgagagcggccctggcacctccaccgagcccagcgagggcagcgcacccggcagccctgccggcagccccacctccacagaggagggaaccagcaccgagcccagcgaaggcagcgccccaggcaccagcaccgagcctagtgagggcggctctggcggcggcagcgcccaggagattaaacggatcaacaagatcagaagaagacttgtgaaagacagcaacaccaagaaggccggcaagacaggccccatgaaaaccctgctggttagagtgatgacacccgatctgagagagcggctggaaaacctgagaaagaagcctgaaaatatcccccagcccatcagcaatacatctagagccaacctgaataagctgctgaccgattacaccgaaatgaagaaggcgatcctgcatgtgtactgggaagagttccagaaggaccctgtgggcctgatgagccgggtggcccagcctgccagcaagaagatcgatcagaacaagctgaaacctgagatggacgagaagggcaacctgaccaccgccggctttgcctgctctcagtgtggccagcccctgttcgtgtacaagctggagcaggtgtctgagaagggcaaggcttacaccaactacttcggacggtgcaatgtggccgagcacgaaaagctgatcctgctggcccagctgaagcccgagaaggatagcgacgaagccgtgacatatagcctgggaaagtttgggcagagggccctggatttctacagcattcatgtgaccaaggagtccacccaccccgtgaagcccctggcccagatcgccggaaacagatacgcctccggacctgtgggaaaggccctgagcgacgcatgtatgggcacaatcgcctccttcctgtctaagtaccaggacatcatcatcgaacaccagaaggtggtgaagggcaaccagaagagactggagagcctgcgggagctggccggcaaggaaaacctggaataccctagcgtgaccctgccacctcagcctcacaccaaggagggcgttgatgcctacaacgaagtgatcgcccgggtgcgaatgtgggtgaacctgaacctgtggcagaagctgaagctaagcagagatgatgccaagcctctgctgagactgaagggattcccttcctttcctctggtcgagagacaggccaacgaagtggactggtgggacatggtgtgtaacgtgaagaagctgatcaacgagaaaaaggaggatggcaaggtgttttggcagaatctggctggctacaagagacaggaagccctgagaccatacctgagcagcgaggaagatcggaagaagggaaagaaattcgctcggtaccagctgggcgacctgctgctgcacctggaaaagaagcacggcgaggactggggaaaggtgtacgacgaggcctgggagcggattgacaagaaagtggaaggcctgagcaagcacatcaagctggaagaggaacggagaagcgaggacgcccagagcaaggccgccctgaccgactggctgcgggctaaggccagcttcgtgatcgagggcctgaaggaggccgacaaggacgagttctgcagatgcgagctgaagctgcagaagtggtacggggacctgcggggaaagcccttcgccatcgaagccgagaacagcatcctggacatcagcggcttcagcaagcagtacaactgtgccttcatctggcagaaggacggcgtgaagaagctgaacctgtacctgatcatcaactacttcaagggcggcaagctgcggttcaagaagatcaaacctgaagccttcgaagccaacagattctacaccgtgatcaacaaaaagagcggcgagatcgtgcccatggaggtgaacttcaacttcgacgaccccaacctgatcatcctgcctctggcctttggcaagagacagggcagagaattcatctggaacgacctgctgtccctggaaaccggcagcctgaagctggccaacggaagagtgatcgagaagacactgtacaacagaagaacccggcaggatgagcctgccctgttcgtggccctgaccttcgagcggcgggaggtcctggactcctccaatatcaaaccaatgaacctgatcggcgtggcaagaggcgaaaacatccccgccgtgatcgccctgaccgaccccgagggctgcccactgagccggtttaaggatagcctgggaaacccaacccacatcctgagaatcggcgagagctataaggagaagcagcggaccatccaggccaagaaggaggtggagcagcggagagccggcggctacagccggaagtacgccagcaaagccaagaatctggcagacgatatggtgagaaacaccgctagagatctgctgtactacgccgtgacccaggatgccatgctgatcttcgccaacctgagccggggcttcggccggcagggcaagcggaccttcatggccgagagacagtacacacggatggaggactggctgaccgccaagctggcctacgagggcctgagcaagacctacctgtccaagacactggcccagtacacctccaagacatgcagcaactgtgggtttaccatcaccagcgccgactacgacagggtgctggagaagctgaagaagacagcaacaggctggatgaccacaattaacggcaaggagctgaaggtggagggccagattacctactacaacagatacaagagacagaacgtagtcaaggacctgtccgtcgagctggatagactgagcgaagaatctgtgaacaacgacatctcctcctggacaaagggcagaagcggagaagctctgagcctcctgaagaaaagattctcccatagacccgtgcaggagaagttcgtgtgcctgaactgcggcttcgagacacacgcagccgagcaagccgccctgaacatcgccagatcctggctgttcctgcggagccaggagtacaagaaataccagacaaacaagacaaccggcaacaccgataagagagccttcgtcgagacctggcagtccttttaccggaagaagcttaaggaggtgtggaaacctgccgtgcggtctggcggatctggcggaggctccacaagcaagcccaggaccgtgagcttcgccgacgtggccgtgtacttcagcagggaggagtggggctgcctgaggcccgcccagagggccctgtacagggacgtgatgagggagacctacggccacctgggcgccctgggcttccccggccccaagcccgccctgatcagctggatggagcaggagaccgaggcctggagccccgccgcccaggaccccgagaagggcgagaggctgggcggcgccaggaccagccccaagaaaaagagaaaagtctaagctgccttctgcggggcttgccttctggccatgcccttcttctctcccttgcacctgtacctcttggtctttgaataaagcctgagtaggaaggctagcaaaaaaaaaaaaaaaaaaaaaaaaaaaaaaaaaaaaaaaaaaaaaaaaaaaaaaaaaaaaaaaaaaaaaaaaaaaaaaaa

SEQ ID NO: 5912 - RNA, 5797 nt, synthetic construct
  source 1..5797: mol_type = other RNA
aggaaataagagagaaaagaagagtaagaagaaatataagagccaccatggcccctaagaagaagcgtaaagtgagccggatggaacgcctcgtctacgaggtgcggcagaagtgcagaaacatcgaggacatctgcatctcctgcggatctctgaacgtgaccctggagcacccactgttcatcggcggcatgtgccagaactgtaaaaactgttttctggagtgtgcctatcaatacgacgatgacggctaccagagctactgcaccatctgttgcggcggaagagaggtgctgatgtgtggaaataacaactgctgccggtgcttctgcgtggaatgcgtggacctgctggtgggccccggcgccgcccaggccgctattaaggaagatccttggaactgctacatgtgcggccacaagggcacatacggcctgctgagacggagagaggactggcctagcagactgcagatgttcttcgccaataaccacgaccaggagttcgacccccctaaggtgtaccctcccgtccccgccgagaagagaaagcccatccgggtcctgagcctgttcgatggcatcgccaccggtctgctggtgctgaaggacctgggcatccaggtggataggtacattgcctccgaggtgtgcgaggactccatcaccgtgggaatggtgcgtcatcagggcaagatcatgtacgtgggcgacgtgcggagcgtgacacagaagcatatccaggagtggggccctttcgacctggtgatcggcggcagcccttgcaatgacctgagcatcgtgaacccagcccggaagggcctgtacgagggaaccggcagactgttcttcgagttttacagactgctgcacgacgcccggcctaaggaaggcgacgaccggcccttcttttggctgttcgagaatgtggtggccatgggagtcagcgacaagcgggatattagccggttcctggagagcaaccccgtgatgatcgatgccaaggaagtgagcgccgcccaccgggccagatacttctggggcaatctgcctggcatgaacagacccctggccagcaccgtgaacgacaagctggagctgcaggagtgcctggagcacggccggatcgccaagttcagcaaggtgagaaccatcaccacccgaagcaacagcatcaaacaaggcaaggaccagcactttcctgtgttcatgaacgagaaggaggacatcctgtggtgtaccgagatggagagagtgttcgggttcccagtccactacacagatgtcagcaacatgtctagactggccagacagagactgctgggaagaagctggtccgtccctgtgatcagacacctgttcgcccctctgaaggagtacttcgcctgcgtgagcagcggcaacagcaacgccaacagccggggccccagcttctctagcggcctggtgccactgtccctgagagggagccacatgggccccatggagatctacaaaaccgtgagcgcctggaagcggcagcctgtgcgcgtgctgagcctgtttcggaatatcgataaagtcctgaaaagcctgggattcctggagagcggctctggctccggcggtggcaccctgaagtacgtggaggatgtgacaaacgtggtcagacgggatgtggagaagtggggccccttcgatctggtgtacggcagcacccaacccctgggcagctcttgtgaccggtgccctggctggtacatgtttcagttccaccggatcctgcagtacgccctgccgagacaggagtcccagcggccattcttttggattttcatggacaacttgctgctgaccgaggatgaccaggaaactaccactcggttcctgcagaccgaagccgtgaccctgcaggacgtgagaggccgggactaccagaacgccatgcgggtgtggtccaacatccctggactgaaaagcaagcacgcacctctgacccctaaagaagaggagtacctgcaggcccaggtgcggagcagaagcaagctggacgcccctaaggtggatctgctggtgaagaattgcctcctgcccctgagagagtacttcaagtatttcagccagaatagtctgcccctgggcggcccaagcagcggcgcccctcctcccagcggcggcagcccagccggctccccaacctctaccgaggagggcacctctgagtccgccacccccgagagcggccctggcacctccaccgagcccagcgagggcagcgcacccggcagccctgccggcagccccacctccacagaggagggaaccagcaccgagcccagcgaaggcagcgccccaggcaccagcaccgagcctagtgagggcggctctggcggcggcagcgcccaggagattaaacggatcaacaagatcagaagaagacttgtgaaagacagcaacaccaagaaggccggcaagacaggccccatgaaaaccctgctggttagagtgatgacacccgatctgagagagcggctggaaaacctgagaaagaagcctgaaaatatcccccagcccatcagcaatacatctagagccaacctgaataagctgctgaccgattacaccgaaatgaagaaggcgatcctgcatgtgtactgggaagagttccagaaggaccctgtgggcctgatgagccgggtggcccagcctgccagcaagaagatcgatcagaacaagctgaaacctgagatggacgagaagggcaacctgaccaccgccggctttgcctgctctcagtgtggccagcccctgttcgtgtacaagctggagcaggtgtctgagaagggcaaggcttacaccaactacttcggacggtgcaatgtggccgagcacgaaaagctgatcctgctggcccagctgaagcccgagaaggatagcgacgaagccgtgacatatagcctgggaaagtttgggcagagggccctggatttctacagcattcatgtgaccaaggagtccacccaccccgtgaagcccctggcccagatcgccggaaacagatacgcctccggacctgtgggaaaggccctgagcgacgcatgtatgggcacaatcgcctccttcctgtctaagtaccaggacatcatcatcgaacaccagaaggtggtgaagggcaaccagaagagactggagagcctgcgggagctggccggcaaggaaaacctggaataccctagcgtgaccctgccacctcagcctcacaccaaggagggcgttgatgcctacaacgaagtgatcgcccgggtgcgaatgtgggtgaacctgaacctgtggcagaagctgaagctaagcagagatgatgccaagcctctgctgagactgaagggattcccttcctttcctctggtcgagagacaggccaacgaagtggactggtgggacatggtgtgtaacgtgaagaagctgatcaacgagaaaaaggaggatggcaaggtgttttggcagaatctggctggctacaagagacaggaagccctgagaccatacctgagcagcgaggaagatcggaagaagggaaagaaattcgctcggtaccagctgggcgacctgctgctgcacctggaaaagaagcacggcgaggactggggaaaggtgtacgacgaggcctgggagcggattgacaagaaagtggaaggcctgagcaagcacatcaagctggaagaggaacggagaagcgaggacgcccagagcaaggccgccctgaccgactggctgcgggctaaggccagcttcgtgatcgagggcctgaaggaggccgacaaggacgagttctgcagatgcgagctgaagctgcagaagtggtacggggacctgcggggaaagcccttcgccatcgaagccgagaacagcatcctggacatcagcggcttcagcaagcagtacaactgtgccttcatctggcagaaggacggcgtgaagaagctgaacctgtacctgatcatcaactacttcaagggcggcaagctgcggttcaagaagatcaaacctgaagccttcgaagccaacagattctacaccgtgatcaacaaaaagagcggcgagatcgtgcccatggaggtgaacttcaacttcgacgaccccaacctgatcatcctgcctctggcctttggcaagagacagggcagagaattcatctggaacgacctgctgtccctggaaaccggcagcctgaagctggccaacggaagagtgatcgagaagacactgtacaacagaagaacccggcaggatgagcctgccctgttcgtggccctgaccttcgagcggcgggaggtcctggactcctccaatatcaaaccaatgaacctgatcggcgtggcaagaggcgaaaacatccccgccgtgatcgccctgaccgaccccgagggctgcccactgagccggtttaaggatagcctgggaaacccaacccacatcctgagaatcggcgagagctataaggagaagcagcggaccatccaggccaagaaggaggtggagcagcggagagccggcggctacagccggaagtacgccagcaaagccaagaatctggcagacgatatggtgagaaacaccgctagagatctgctgtactacgccgtgacccaggatgccatgctgatcttcgccaacctgagccggggcttcggccggcagggcaagcggaccttcatggccgagagacagtacacacggatggaggactggctgaccgccaagctggcctacgagggcctgagcaagacctacctgtccaagacactggcccagtacacctccaagacatgcagcaactgtgggtttaccatcaccagcgccgactacgacagggtgctggagaagctgaagaagacagcaacaggctggatgaccacaattaacggcaaggagctgaaggtggagggccagattacctactacaacagatacaagagacagaacgtagtcaaggacctgtccgtcgagctggatagactgagcgaagaatctgtgaacaacgacatctcctcctggacaaagggcagaagcggagaagctctgagcctcctgaagaaaagattctcccatagacccgtgcaggagaagttcgtgtgcctgaactgcggcttcgagacacacgcagccgagcaagccgccctgaacatcgccagatcctggctgttcctgcggagccaggagtacaagaaataccagacaaacaagacaaccggcaacaccgataagagagccttcgtcgagacctggcagtccttttaccggaagaagcttaaggaggtgtggaaacctgccgtgcggtctggcggatctggcggaggctccacaagctgccaggccctggtgaccttcgaggacgtggccgtgaccttcaccgacgacgagtggaagaggctggtgcccgtgcagagggccctgtacaaggccgtgatgctggagaactacgagagcatcatcagcctgggcctgcccgtgcccaggcccgacctgatcctgcagttcaagaggaggggcgagccctggatgaggggcttccacggcagcgaggagaaggcctggcccgagagcgtgagcaccagccccaagaaaaagagaaaagtctaagctgccttctgcggggcttgccttctggccatgcccttcttctctcccttgcacctgtacctcttggtctttgaataaagcctgagtaggaaggctagcaaaaaaaaaaaaaaaaaaaaaaaaaaaaaaaaaaaaaaaaaaaaaaaaaaaaaaaaaaaaaaaaaaaaaaaaaaaaaaaa

SEQ ID NO: 5913 - RNA, 5797 nt, synthetic construct
  source 1..5797: mol_type = other RNA
aggaaataagagagaaaagaagagtaagaagaaatataagagccaccatggcccctaagaagaagcgtaaagtgagccggatggaacgcctcgtctacgaggtgcggcagaagtgcagaaacatcgaggacatctgcatctcctgcggatctctgaacgtgaccctggagcacccactgttcatcggcggcatgtgccagaactgtaaaaactgttttctggagtgtgcctatcaatacgacgatgacggctaccagagctactgcaccatctgttgcggcggaagagaggtgctgatgtgtggaaataacaactgctgccggtgcttctgcgtggaatgcgtggacctgctggtgggccccggcgccgcccaggccgctattaaggaagatccttggaactgctacatgtgcggccacaagggcacatacggcctgctgagacggagagaggactggcctagcagactgcagatgttcttcgccaataaccacgaccaggagttcgacccccctaaggtgtaccctcccgtccccgccgagaagagaaagcccatccgggtcctgagcctgttcgatggcatcgccaccggtctgctggtgctgaaggacctgggcatccaggtggataggtacattgcctccgaggtgtgcgaggactccatcaccgtgggaatggtgcgtcatcagggcaagatcatgtacgtgggcgacgtgcggagcgtgacacagaagcatatccaggagtggggccctttcgacctggtgatcggcggcagcccttgcaatgacctgagcatcgtgaacccagcccggaagggcctgtacgagggaaccggcagactgttcttcgagttttacagactgctgcacgacgcccggcctaaggaaggcgacgaccggcccttcttttggctgttcgagaatgtggtggccatgggagtcagcgacaagcgggatattagccggttcctggagagcaaccccgtgatgatcgatgccaaggaagtgagcgccgcccaccgggccagatacttctggggcaatctgcctggcatgaacagacccctggccagcaccgtgaacgacaagctggagctgcaggagtgcctggagcacggccggatcgccaagttcagcaaggtgagaaccatcaccacccgaagcaacagcatcaaacaaggcaaggaccagcactttcctgtgttcatgaacgagaaggaggacatcctgtggtgtaccgagatggagagagtgttcgggttcccagtccactacacagatgtcagcaacatgtctagactggccagacagagactgctgggaagaagctggtccgtccctgtgatcagacacctgttcgcccctctgaaggagtacttcgcctgcgtgagcagcggcaacagcaacgccaacagccggggccccagcttctctagcggcctggtgccactgtccctgagagggagccacatgggccccatggagatctacaaaaccgtgagcgcctggaagcggcagcctgtgcgcgtgctgagcctgtttcggaatatcgataaagtcctgaaaagcctgggattcctggagagcggctctggctccggcggtggcaccctgaagtacgtggaggatgtgacaaacgtggtcagacgggatgtggagaagtggggccccttcgatctggtgtacggcagcacccaacccctgggcagctcttgtgaccggtgccctggctggtacatgtttcagttccaccggatcctgcagtacgccctgccgagacaggagtcccagcggccattcttttggattttcatggacaacttgctgctgaccgaggatgaccaggaaactaccactcggttcctgcagaccgaagccgtgaccctgcaggacgtgagaggccgggactaccagaacgccatgcgggtgtggtccaacatccctggactgaaaagcaagcacgcacctctgacccctaaagaagaggagtacctgcaggcccaggtgcggagcagaagcaagctggacgcccctaaggtggatctgctggtgaagaattgcctcctgcccctgagagagtacttcaagtatttcagccagaatagtctgcccctgggcggcccaagcagcggcgcccctcctcccagcggcggcagcccagccggctccccaacctctaccgaggagggcacctctgagtccgccacccccgagagcggccctggcacctccaccgagcccagcgagggcagcgcacccggcagccctgccggcagccccacctccacagaggagggaaccagcaccgagcccagcgaaggcagcgccccaggcaccagcaccgagcctagtgagggcggctctggcggcggcagcgcccaggagattaaacggatcaacaagatcagaagaagacttgtgaaagacagcaacaccaagaaggccggcaagacaggccccatgaaaaccctgctggttagagtgatgacacccgatctgagagagcggctggaaaacctgagaaagaagcctgaaaatatcccccagcccatcagcaatacatctagagccaacctgaataagctgctgaccgattacaccgaaatgaagaaggcgatcctgcatgtgtactgggaagagttccagaaggaccctgtgggcctgatgagccgggtggcccagcctgccagcaagaagatcgatcagaacaagctgaaacctgagatggacgagaagggcaacctgaccaccgccggctttgcctgctctcagtgtggccagcccctgttcgtgtacaagctggagcaggtgtctgagaagggcaaggcttacaccaactacttcggacggtgcaatgtggccgagcacgaaaagctgatcctgctggcccagctgaagcccgagaaggatagcgacgaagccgtgacatatagcctgggaaagtttgggcagagggccctggatttctacagcattcatgtgaccaaggagtccacccaccccgtgaagcccctggcccagatcgccggaaacagatacgcctccggacctgtgggaaaggccctgagcgacgcatgtatgggcacaatcgcctccttcctgtctaagtaccaggacatcatcatcgaacaccagaaggtggtgaagggcaaccagaagagactggagagcctgcgggagctggccggcaaggaaaacctggaataccctagcgtgaccctgccacctcagcctcacaccaaggagggcgttgatgcctacaacgaagtgatcgcccgggtgcgaatgtgggtgaacctgaacctgtggcagaagctgaagctaagcagagatgatgccaagcctctgctgagactgaagggattcccttcctttcctctggtcgagagacaggccaacgaagtggactggtgggacatggtgtgtaacgtgaagaagctgatcaacgagaaaaaggaggatggcaaggtgttttggcagaatctggctggctacaagagacaggaagccctgagaccatacctgagcagcgaggaagatcggaagaagggaaagaaattcgctcggtaccagctgggcgacctgctgctgcacctggaaaagaagcacggcgaggactggggaaaggtgtacgacgaggcctgggagcggattgacaagaaagtggaaggcctgagcaagcacatcaagctggaagaggaacggagaagcgaggacgcccagagcaaggccgccctgaccgactggctgcgggctaaggccagcttcgtgatcgagggcctgaaggaggccgacaaggacgagttctgcagatgcgagctgaagctgcagaagtggtacggggacctgcggggaaagcccttcgccatcgaagccgagaacagcatcctggacatcagcggcttcagcaagcagtacaactgtgccttcatctggcagaaggacggcgtgaagaagctgaacctgtacctgatcatcaactacttcaagggcggcaagctgcggttcaagaagatcaaacctgaagccttcgaagccaacagattctacaccgtgatcaacaaaaagagcggcgagatcgtgcccatggaggtgaacttcaacttcgacgaccccaacctgatcatcctgcctctggcctttggcaagagacagggcagagaattcatctggaacgacctgctgtccctggaaaccggcagcctgaagctggccaacggaagagtgatcgagaagacactgtacaacagaagaacccggcaggatgagcctgccctgttcgtggccctgaccttcgagcggcgggaggtcctggactcctccaatatcaaaccaatgaacctgatcggcgtggcaagaggcgaaaacatccccgccgtgatcgccctgaccgaccccgagggctgcccactgagccggtttaaggatagcctgggaaacccaacccacatcctgagaatcggcgagagctataaggagaagcagcggaccatccaggccaagaaggaggtggagcagcggagagccggcggctacagccggaagtacgccagcaaagccaagaatctggcagacgatatggtgagaaacaccgctagagatctgctgtactacgccgtgacccaggatgccatgctgatcttcgccaacctgagccggggcttcggccggcagggcaagcggaccttcatggccgagagacagtacacacggatggaggactggctgaccgccaagctggcctacgagggcctgagcaagacctacctgtccaagacactggcccagtacacctccaagacatgcagcaactgtgggtttaccatcaccagcgccgactacgacagggtgctggagaagctgaagaagacagcaacaggctggatgaccacaattaacggcaaggagctgaaggtggagggccagattacctactacaacagatacaagagacagaacgtagtcaaggacctgtccgtcgagctggatagactgagcgaagaatctgtgaacaacgacatctcctcctggacaaagggcagaagcggagaagctctgagcctcctgaagaaaagattctcccatagacccgtgcaggagaagttcgtgtgcctgaactgcggcttcgagacacacgcagccgagcaagccgccctgaacatcgccagatcctggctgttcctgcggagccaggagtacaagaaataccagacaaacaagacaaccggcaacaccgataagagagccttcgtcgagacctggcagtccttttaccggaagaagcttaaggaggtgtggaaacctgccgtgcggtctggcggatctggcggaggctccacaagccaggccgaggtgaccttcgaggacgtggccgtgctgttcagcagggaggagtggggcaggctgggccccgcccagaggggcctgtacagggacgtgatgctggagacctacaggaacctggtgagcctgggcgccggccccgccggccccaagcccggcgtgatcacccagctggagaggggcgacgagccctgggtgctggacacccagggcgccaagggcaaggagaggctgagggtgagcaccagccccaagaaaaagagaaaagtctaagctgccttctgcggggcttgccttctggccatgcccttcttctctcccttgcacctgtacctcttggtctttgaataaagcctgagtaggaaggctagcaaaaaaaaaaaaaaaaaaaaaaaaaaaaaaaaaaaaaaaaaaaaaaaaaaaaaaaaaaaaaaaaaaaaaaaaaaaaaaaa

SEQ ID NO: 5914 - RNA, 5797 nt, synthetic construct
  source 1..5797: mol_type = other RNA
aggaaataagagagaaaagaagagtaagaagaaatataagagccaccatggcccctaagaagaagcgtaaagtgagccggatggaacgcctcgtctacgaggtgcggcagaagtgcagaaacatcgaggacatctgcatctcctgcggatctctgaacgtgaccctggagcacccactgttcatcggcggcatgtgccagaactgtaaaaactgttttctggagtgtgcctatcaatacgacgatgacggctaccagagctactgcaccatctgttgcggcggaagagaggtgctgatgtgtggaaataacaactgctgccggtgcttctgcgtggaatgcgtggacctgctggtgggccccggcgccgcccaggccgctattaaggaagatccttggaactgctacatgtgcggccacaagggcacatacggcctgctgagacggagagaggactggcctagcagactgcagatgttcttcgccaataaccacgaccaggagttcgacccccctaaggtgtaccctcccgtccccgccgagaagagaaagcccatccgggtcctgagcctgttcgatggcatcgccaccggtctgctggtgctgaaggacctgggcatccaggtggataggtacattgcctccgaggtgtgcgaggactccatcaccgtgggaatggtgcgtcatcagggcaagatcatgtacgtgggcgacgtgcggagcgtgacacagaagcatatccaggagtggggccctttcgacctggtgatcggcggcagcccttgcaatgacctgagcatcgtgaacccagcccggaagggcctgtacgagggaaccggcagactgttcttcgagttttacagactgctgcacgacgcccggcctaaggaaggcgacgaccggcccttcttttggctgttcgagaatgtggtggccatgggagtcagcgacaagcgggatattagccggttcctggagagcaaccccgtgatgatcgatgccaaggaagtgagcgccgcccaccgggccagatacttctggggcaatctgcctggcatgaacagacccctggccagcaccgtgaacgacaagctggagctgcaggagtgcctggagcacggccggatcgccaagttcagcaaggtgagaaccatcaccacccgaagcaacagcatcaaacaaggcaaggaccagcactttcctgtgttcatgaacgagaaggaggacatcctgtggtgtaccgagatggagagagtgttcgggttcccagtccactacacagatgtcagcaacatgtctagactggccagacagagactgctgggaagaagctggtccgtccctgtgatcagacacctgttcgcccctctgaaggagtacttcgcctgcgtgagcagcggcaacagcaacgccaacagccggggccccagcttctctagcggcctggtgccactgtccctgagagggagccacatgggccccatggagatctacaaaaccgtgagcgcctggaagcggcagcctgtgcgcgtgctgagcctgtttcggaatatcgataaagtcctgaaaagcctgggattcctggagagcggctctggctccggcggtggcaccctgaagtacgtggaggatgtgacaaacgtggtcagacgggatgtggagaagtggggccccttcgatctggtgtacggcagcacccaacccctgggcagctcttgtgaccggtgccctggctggtacatgtttcagttccaccggatcctgcagtacgccctgccgagacaggagtcccagcggccattcttttggattttcatggacaacttgctgctgaccgaggatgaccaggaaactaccactcggttcctgcagaccgaagccgtgaccctgcaggacgtgagaggccgggactaccagaacgccatgcgggtgtggtccaacatccctggactgaaaagcaagcacgcacctctgacccctaaagaagaggagtacctgcaggcccaggtgcggagcagaagcaagctggacgcccctaaggtggatctgctggtgaagaattgcctcctgcccctgagagagtacttcaagtatttcagccagaatagtctgcccctgggcggcccaagcagcggcgcccctcctcccagcggcggcagcccagccggctccccaacctctaccgaggagggcacctctgagtccgccacccccgagagcggccctggcacctccaccgagcccagcgagggcagcgcacccggcagccctgccggcagccccacctccacagaggagggaaccagcaccgagcccagcgaaggcagcgccccaggcaccagcaccgagcctagtgagggcggctctggcggcggcagcgcccaggagattaaacggatcaacaagatcagaagaagacttgtgaaagacagcaacaccaagaaggccggcaagacaggccccatgaaaaccctgctggttagagtgatgacacccgatctgagagagcggctggaaaacctgagaaagaagcctgaaaatatcccccagcccatcagcaatacatctagagccaacctgaataagctgctgaccgattacaccgaaatgaagaaggcgatcctgcatgtgtactgggaagagttccagaaggaccctgtgggcctgatgagccgggtggcccagcctgccagcaagaagatcgatcagaacaagctgaaacctgagatggacgagaagggcaacctgaccaccgccggctttgcctgctctcagtgtggccagcccctgttcgtgtacaagctggagcaggtgtctgagaagggcaaggcttacaccaactacttcggacggtgcaatgtggccgagcacgaaaagctgatcctgctggcccagctgaagcccgagaaggatagcgacgaagccgtgacatatagcctgggaaagtttgggcagagggccctggatttctacagcattcatgtgaccaaggagtccacccaccccgtgaagcccctggcccagatcgccggaaacagatacgcctccggacctgtgggaaaggccctgagcgacgcatgtatgggcacaatcgcctccttcctgtctaagtaccaggacatcatcatcgaacaccagaaggtggtgaagggcaaccagaagagactggagagcctgcgggagctggccggcaaggaaaacctggaataccctagcgtgaccctgccacctcagcctcacaccaaggagggcgttgatgcctacaacgaagtgatcgcccgggtgcgaatgtgggtgaacctgaacctgtggcagaagctgaagctaagcagagatgatgccaagcctctgctgagactgaagggattcccttcctttcctctggtcgagagacaggccaacgaagtggactggtgggacatggtgtgtaacgtgaagaagctgatcaacgagaaaaaggaggatggcaaggtgttttggcagaatctggctggctacaagagacaggaagccctgagaccatacctgagcagcgaggaagatcggaagaagggaaagaaattcgctcggtaccagctgggcgacctgctgctgcacctggaaaagaagcacggcgaggactggggaaaggtgtacgacgaggcctgggagcggattgacaagaaagtggaaggcctgagcaagcacatcaagctggaagaggaacggagaagcgaggacgcccagagcaaggccgccctgaccgactggctgcgggctaaggccagcttcgtgatcgagggcctgaaggaggccgacaaggacgagttctgcagatgcgagctgaagctgcagaagtggtacggggacctgcggggaaagcccttcgccatcgaagccgagaacagcatcctggacatcagcggcttcagcaagcagtacaactgtgccttcatctggcagaaggacggcgtgaagaagctgaacctgtacctgatcatcaactacttcaagggcggcaagctgcggttcaagaagatcaaacctgaagccttcgaagccaacagattctacaccgtgatcaacaaaaagagcggcgagatcgtgcccatggaggtgaacttcaacttcgacgaccccaacctgatcatcctgcctctggcctttggcaagagacagggcagagaattcatctggaacgacctgctgtccctggaaaccggcagcctgaagctggccaacggaagagtgatcgagaagacactgtacaacagaagaacccggcaggatgagcctgccctgttcgtggccctgaccttcgagcggcgggaggtcctggactcctccaatatcaaaccaatgaacctgatcggcgtggcaagaggcgaaaacatccccgccgtgatcgccctgaccgaccccgagggctgcccactgagccggtttaaggatagcctgggaaacccaacccacatcctgagaatcggcgagagctataaggagaagcagcggaccatccaggccaagaaggaggtggagcagcggagagccggcggctacagccggaagtacgccagcaaagccaagaatctggcagacgatatggtgagaaacaccgctagagatctgctgtactacgccgtgacccaggatgccatgctgatcttcgccaacctgagccggggcttcggccggcagggcaagcggaccttcatggccgagagacagtacacacggatggaggactggctgaccgccaagctggcctacgagggcctgagcaagacctacctgtccaagacactggcccagtacacctccaagacatgcagcaactgtgggtttaccatcaccagcgccgactacgacagggtgctggagaagctgaagaagacagcaacaggctggatgaccacaattaacggcaaggagctgaaggtggagggccagattacctactacaacagatacaagagacagaacgtagtcaaggacctgtccgtcgagctggatagactgagcgaagaatctgtgaacaacgacatctcctcctggacaaagggcagaagcggagaagctctgagcctcctgaagaaaagattctcccatagacccgtgcaggagaagttcgtgtgcctgaactgcggcttcgagacacacgcagccgagcaagccgccctgaacatcgccagatcctggctgttcctgcggagccaggagtacaagaaataccagacaaacaagacaaccggcaacaccgataagagagccttcgtcgagacctggcagtccttttaccggaagaagcttaaggaggtgtggaaacctgccgtgcggtctggcggatctggcggaggctccacaagcaagcccggcgccctgagcttcgccgacgtggccgtgtacttcagcagcgaggagtggggctgcctgaggcccgcccagagggccctgtacagggacgtgatgagggagacctacggccacctgggcgccctgggcttcgccggccccaagcccgccctgatcagctggatggagaggaagaaggaggcctggagccccgaggccgaggaccccgaggacagggccagcaggatcagggccaagaccagccccaagaaaaagagaaaagtctaagctgccttctgcggggcttgccttctggccatgcccttcttctctcccttgcacctgtacctcttggtctttgaataaagcctgagtaggaaggctagcaaaaaaaaaaaaaaaaaaaaaaaaaaaaaaaaaaaaaaaaaaaaaaaaaaaaaaaaaaaaaaaaaaaaaaaaaaaaaaaa

SEQ ID NO: 5915 - RNA, 5797 nt, synthetic construct
  source 1..5797: mol_type = other RNA
aggaaataagagagaaaagaagagtaagaagaaatataagagccaccatggcccctaagaagaagcgtaaagtgagccggatggaacgcctcgtctacgaggtgcggcagaagtgcagaaacatcgaggacatctgcatctcctgcggatctctgaacgtgaccctggagcacccactgttcatcggcggcatgtgccagaactgtaaaaactgttttctggagtgtgcctatcaatacgacgatgacggctaccagagctactgcaccatctgttgcggcggaagagaggtgctgatgtgtggaaataacaactgctgccggtgcttctgcgtggaatgcgtggacctgctggtgggccccggcgccgcccaggccgctattaaggaagatccttggaactgctacatgtgcggccacaagggcacatacggcctgctgagacggagagaggactggcctagcagactgcagatgttcttcgccaataaccacgaccaggagttcgacccccctaaggtgtaccctcccgtccccgccgagaagagaaagcccatccgggtcctgagcctgttcgatggcatcgccaccggtctgctggtgctgaaggacctgggcatccaggtggataggtacattgcctccgaggtgtgcgaggactccatcaccgtgggaatggtgcgtcatcagggcaagatcatgtacgtgggcgacgtgcggagcgtgacacagaagcatatccaggagtggggccctttcgacctggtgatcggcggcagcccttgcaatgacctgagcatcgtgaacccagcccggaagggcctgtacgagggaaccggcagactgttcttcgagttttacagactgctgcacgacgcccggcctaaggaaggcgacgaccggcccttcttttggctgttcgagaatgtggtggccatgggagtcagcgacaagcgggatattagccggttcctggagagcaaccccgtgatgatcgatgccaaggaagtgagcgccgcccaccgggccagatacttctggggcaatctgcctggcatgaacagacccctggccagcaccgtgaacgacaagctggagctgcaggagtgcctggagcacggccggatcgccaagttcagcaaggtgagaaccatcaccacccgaagcaacagcatcaaacaaggcaaggaccagcactttcctgtgttcatgaacgagaaggaggacatcctgtggtgtaccgagatggagagagtgttcgggttcccagtccactacacagatgtcagcaacatgtctagactggccagacagagactgctgggaagaagctggtccgtccctgtgatcagacacctgttcgcccctctgaaggagtacttcgcctgcgtgagcagcggcaacagcaacgccaacagccggggccccagcttctctagcggcctggtgccactgtccctgagagggagccacatgggccccatggagatctacaaaaccgtgagcgcctggaagcggcagcctgtgcgcgtgctgagcctgtttcggaatatcgataaagtcctgaaaagcctgggattcctggagagcggctctggctccggcggtggcaccctgaagtacgtggaggatgtgacaaacgtggtcagacgggatgtggagaagtggggccccttcgatctggtgtacggcagcacccaacccctgggcagctcttgtgaccggtgccctggctggtacatgtttcagttccaccggatcctgcagtacgccctgccgagacaggagtcccagcggccattcttttggattttcatggacaacttgctgctgaccgaggatgaccaggaaactaccactcggttcctgcagaccgaagccgtgaccctgcaggacgtgagaggccgggactaccagaacgccatgcgggtgtggtccaacatccctggactgaaaagcaagcacgcacctctgacccctaaagaagaggagtacctgcaggcccaggtgcggagcagaagcaagctggacgcccctaaggtggatctgctggtgaagaattgcctcctgcccctgagagagtacttcaagtatttcagccagaatagtctgcccctgggcggcccaagcagcggcgcccctcctcccagcggcggcagcccagccggctccccaacctctaccgaggagggcacctctgagtccgccacccccgagagcggccctggcacctccaccgagcccagcgagggcagcgcacccggcagccctgccggcagccccacctccacagaggagggaaccagcaccgagcccagcgaaggcagcgccccaggcaccagcaccgagcctagtgagggcggctctggcggcggcagcgcccaggagattaaacggatcaacaagatcagaagaagacttgtgaaagacagcaacaccaagaaggccggcaagacaggccccatgaaaaccctgctggttagagtgatgacacccgatctgagagagcggctggaaaacctgagaaagaagcctgaaaatatcccccagcccatcagcaatacatctagagccaacctgaataagctgctgaccgattacaccgaaatgaagaaggcgatcctgcatgtgtactgggaagagttccagaaggaccctgtgggcctgatgagccgggtggcccagcctgccagcaagaagatcgatcagaacaagctgaaacctgagatggacgagaagggcaacctgaccaccgccggctttgcctgctctcagtgtggccagcccctgttcgtgtacaagctggagcaggtgtctgagaagggcaaggcttacaccaactacttcggacggtgcaatgtggccgagcacgaaaagctgatcctgctggcccagctgaagcccgagaaggatagcgacgaagccgtgacatatagcctgggaaagtttgggcagagggccctggatttctacagcattcatgtgaccaaggagtccacccaccccgtgaagcccctggcccagatcgccggaaacagatacgcctccggacctgtgggaaaggccctgagcgacgcatgtatgggcacaatcgcctccttcctgtctaagtaccaggacatcatcatcgaacaccagaaggtggtgaagggcaaccagaagagactggagagcctgcgggagctggccggcaaggaaaacctggaataccctagcgtgaccctgccacctcagcctcacaccaaggagggcgttgatgcctacaacgaagtgatcgcccgggtgcgaatgtgggtgaacctgaacctgtggcagaagctgaagctaagcagagatgatgccaagcctctgctgagactgaagggattcccttcctttcctctggtcgagagacaggccaacgaagtggactggtgggacatggtgtgtaacgtgaagaagctgatcaacgagaaaaaggaggatggcaaggtgttttggcagaatctggctggctacaagagacaggaagccctgagaccatacctgagcagcgaggaagatcggaagaagggaaagaaattcgctcggtaccagctgggcgacctgctgctgcacctggaaaagaagcacggcgaggactggggaaaggtgtacgacgaggcctgggagcggattgacaagaaagtggaaggcctgagcaagcacatcaagctggaagaggaacggagaagcgaggacgcccagagcaaggccgccctgaccgactggctgcgggctaaggccagcttcgtgatcgagggcctgaaggaggccgacaaggacgagttctgcagatgcgagctgaagctgcagaagtggtacggggacctgcggggaaagcccttcgccatcgaagccgagaacagcatcctggacatcagcggcttcagcaagcagtacaactgtgccttcatctggcagaaggacggcgtgaagaagctgaacctgtacctgatcatcaactacttcaagggcggcaagctgcggttcaagaagatcaaacctgaagccttcgaagccaacagattctacaccgtgatcaacaaaaagagcggcgagatcgtgcccatggaggtgaacttcaacttcgacgaccccaacctgatcatcctgcctctggcctttggcaagagacagggcagagaattcatctggaacgacctgctgtccctggaaaccggcagcctgaagctggccaacggaagagtgatcgagaagacactgtacaacagaagaacccggcaggatgagcctgccctgttcgtggccctgaccttcgagcggcgggaggtcctggactcctccaatatcaaaccaatgaacctgatcggcgtggcaagaggcgaaaacatccccgccgtgatcgccctgaccgaccccgagggctgcccactgagccggtttaaggatagcctgggaaacccaacccacatcctgagaatcggcgagagctataaggagaagcagcggaccatccaggccaagaaggaggtggagcagcggagagccggcggctacagccggaagtacgccagcaaagccaagaatctggcagacgatatggtgagaaacaccgctagagatctgctgtactacgccgtgacccaggatgccatgctgatcttcgccaacctgagccggggcttcggccggcagggcaagcggaccttcatggccgagagacagtacacacggatggaggactggctgaccgccaagctggcctacgagggcctgagcaagacctacctgtccaagacactggcccagtacacctccaagacatgcagcaactgtgggtttaccatcaccagcgccgactacgacagggtgctggagaagctgaagaagacagcaacaggctggatgaccacaattaacggcaaggagctgaaggtggagggccagattacctactacaacagatacaagagacagaacgtagtcaaggacctgtccgtcgagctggatagactgagcgaagaatctgtgaacaacgacatctcctcctggacaaagggcagaagcggagaagctctgagcctcctgaagaaaagattctcccatagacccgtgcaggagaagttcgtgtgcctgaactgcggcttcgagacacacgcagccgagcaagccgccctgaacatcgccagatcctggctgttcctgcggagccaggagtacaagaaataccagacaaacaagacaaccggcaacaccgataagagagccttcgtcgagacctggcagtccttttaccggaagaagcttaaggaggtgtggaaacctgccgtgcggtctggcggatctggcggaggctccacaagcttccaggagagcgtgaccttcgaggacgtggccgtgtacttcacccagagccagtgggccagcctgggccccctgcagagggccctgtacagggaggtgatgctggagaactacgccaacgtggccagcctggccttccccttccccaagcccgtgctgatcagccagctggagagggaggaggcccccctgggccccgacccctgggagaccgaggtgctgagggacatctgccccggcggcaccagccccaagaaaaagagaaaagtctaagctgccttctgcggggcttgccttctggccatgcccttcttctctcccttgcacctgtacctcttggtctttgaataaagcctgagtaggaaggctagcaaaaaaaaaaaaaaaaaaaaaaaaaaaaaaaaaaaaaaaaaaaaaaaaaaaaaaaaaaaaaaaaaaaaaaaaaaaaaaaa

SEQ ID NO: 5916 - RNA, 5797 nt, synthetic construct
  source 1..5797: mol_type = other RNA
aggaaataagagagaaaagaagagtaagaagaaatataagagccaccatggcccctaagaagaagcgtaaagtgagccggatggaacgcctcgtctacgaggtgcggcagaagtgcagaaacatcgaggacatctgcatctcctgcggatctctgaacgtgaccctggagcacccactgttcatcggcggcatgtgccagaactgtaaaaactgttttctggagtgtgcctatcaatacgacgatgacggctaccagagctactgcaccatctgttgcggcggaagagaggtgctgatgtgtggaaataacaactgctgccggtgcttctgcgtggaatgcgtggacctgctggtgggccccggcgccgcccaggccgctattaaggaagatccttggaactgctacatgtgcggccacaagggcacatacggcctgctgagacggagagaggactggcctagcagactgcagatgttcttcgccaataaccacgaccaggagttcgacccccctaaggtgtaccctcccgtccccgccgagaagagaaagcccatccgggtcctgagcctgttcgatggcatcgccaccggtctgctggtgctgaaggacctgggcatccaggtggataggtacattgcctccgaggtgtgcgaggactccatcaccgtgggaatggtgcgtcatcagggcaagatcatgtacgtgggcgacgtgcggagcgtgacacagaagcatatccaggagtggggccctttcgacctggtgatcggcggcagcccttgcaatgacctgagcatcgtgaacccagcccggaagggcctgtacgagggaaccggcagactgttcttcgagttttacagactgctgcacgacgcccggcctaaggaaggcgacgaccggcccttcttttggctgttcgagaatgtggtggccatgggagtcagcgacaagcgggatattagccggttcctggagagcaaccccgtgatgatcgatgccaaggaagtgagcgccgcccaccgggccagatacttctggggcaatctgcctggcatgaacagacccctggccagcaccgtgaacgacaagctggagctgcaggagtgcctggagcacggccggatcgccaagttcagcaaggtgagaaccatcaccacccgaagcaacagcatcaaacaaggcaaggaccagcactttcctgtgttcatgaacgagaaggaggacatcctgtggtgtaccgagatggagagagtgttcgggttcccagtccactacacagatgtcagcaacatgtctagactggccagacagagactgctgggaagaagctggtccgtccctgtgatcagacacctgttcgcccctctgaaggagtacttcgcctgcgtgagcagcggcaacagcaacgccaacagccggggccccagcttctctagcggcctggtgccactgtccctgagagggagccacatgggccccatggagatctacaaaaccgtgagcgcctggaagcggcagcctgtgcgcgtgctgagcctgtttcggaatatcgataaagtcctgaaaagcctgggattcctggagagcggctctggctccggcggtggcaccctgaagtacgtggaggatgtgacaaacgtggtcagacgggatgtggagaagtggggccccttcgatctggtgtacggcagcacccaacccctgggcagctcttgtgaccggtgccctggctggtacatgtttcagttccaccggatcctgcagtacgccctgccgagacaggagtcccagcggccattcttttggattttcatggacaacttgctgctgaccgaggatgaccaggaaactaccactcggttcctgcagaccgaagccgtgaccctgcaggacgtgagaggccgggactaccagaacgccatgcgggtgtggtccaacatccctggactgaaaagcaagcacgcacctctgacccctaaagaagaggagtacctgcaggcccaggtgcggagcagaagcaagctggacgcccctaaggtggatctgctggtgaagaattgcctcctgcccctgagagagtacttcaagtatttcagccagaatagtctgcccctgggcggcccaagcagcggcgcccctcctcccagcggcggcagcccagccggctccccaacctctaccgaggagggcacctctgagtccgccacccccgagagcggccctggcacctccaccgagcccagcgagggcagcgcacccggcagccctgccggcagccccacctccacagaggagggaaccagcaccgagcccagcgaaggcagcgccccaggcaccagcaccgagcctagtgagggcggctctggcggcggcagcgcccaggagattaaacggatcaacaagatcagaagaagacttgtgaaagacagcaacaccaagaaggccggcaagacaggccccatgaaaaccctgctggttagagtgatgacacccgatctgagagagcggctggaaaacctgagaaagaagcctgaaaatatcccccagcccatcagcaatacatctagagccaacctgaataagctgctgaccgattacaccgaaatgaagaaggcgatcctgcatgtgtactgggaagagttccagaaggaccctgtgggcctgatgagccgggtggcccagcctgccagcaagaagatcgatcagaacaagctgaaacctgagatggacgagaagggcaacctgaccaccgccggctttgcctgctctcagtgtggccagcccctgttcgtgtacaagctggagcaggtgtctgagaagggcaaggcttacaccaactacttcggacggtgcaatgtggccgagcacgaaaagctgatcctgctggcccagctgaagcccgagaaggatagcgacgaagccgtgacatatagcctgggaaagtttgggcagagggccctggatttctacagcattcatgtgaccaaggagtccacccaccccgtgaagcccctggcccagatcgccggaaacagatacgcctccggacctgtgggaaaggccctgagcgacgcatgtatgggcacaatcgcctccttcctgtctaagtaccaggacatcatcatcgaacaccagaaggtggtgaagggcaaccagaagagactggagagcctgcgggagctggccggcaaggaaaacctggaataccctagcgtgaccctgccacctcagcctcacaccaaggagggcgttgatgcctacaacgaagtgatcgcccgggtgcgaatgtgggtgaacctgaacctgtggcagaagctgaagctaagcagagatgatgccaagcctctgctgagactgaagggattcccttcctttcctctggtcgagagacaggccaacgaagtggactggtgggacatggtgtgtaacgtgaagaagctgatcaacgagaaaaaggaggatggcaaggtgttttggcagaatctggctggctacaagagacaggaagccctgagaccatacctgagcagcgaggaagatcggaagaagggaaagaaattcgctcggtaccagctgggcgacctgctgctgcacctggaaaagaagcacggcgaggactggggaaaggtgtacgacgaggcctgggagcggattgacaagaaagtggaaggcctgagcaagcacatcaagctggaagaggaacggagaagcgaggacgcccagagcaaggccgccctgaccgactggctgcgggctaaggccagcttcgtgatcgagggcctgaaggaggccgacaaggacgagttctgcagatgcgagctgaagctgcagaagtggtacggggacctgcggggaaagcccttcgccatcgaagccgagaacagcatcctggacatcagcggcttcagcaagcagtacaactgtgccttcatctggcagaaggacggcgtgaagaagctgaacctgtacctgatcatcaactacttcaagggcggcaagctgcggttcaagaagatcaaacctgaagccttcgaagccaacagattctacaccgtgatcaacaaaaagagcggcgagatcgtgcccatggaggtgaacttcaacttcgacgaccccaacctgatcatcctgcctctggcctttggcaagagacagggcagagaattcatctggaacgacctgctgtccctggaaaccggcagcctgaagctggccaacggaagagtgatcgagaagacactgtacaacagaagaacccggcaggatgagcctgccctgttcgtggccctgaccttcgagcggcgggaggtcctggactcctccaatatcaaaccaatgaacctgatcggcgtggcaagaggcgaaaacatccccgccgtgatcgccctgaccgaccccgagggctgcccactgagccggtttaaggatagcctgggaaacccaacccacatcctgagaatcggcgagagctataaggagaagcagcggaccatccaggccaagaaggaggtggagcagcggagagccggcggctacagccggaagtacgccagcaaagccaagaatctggcagacgatatggtgagaaacaccgctagagatctgctgtactacgccgtgacccaggatgccatgctgatcttcgccaacctgagccggggcttcggccggcagggcaagcggaccttcatggccgagagacagtacacacggatggaggactggctgaccgccaagctggcctacgagggcctgagcaagacctacctgtccaagacactggcccagtacacctccaagacatgcagcaactgtgggtttaccatcaccagcgccgactacgacagggtgctggagaagctgaagaagacagcaacaggctggatgaccacaattaacggcaaggagctgaaggtggagggccagattacctactacaacagatacaagagacagaacgtagtcaaggacctgtccgtcgagctggatagactgagcgaagaatctgtgaacaacgacatctcctcctggacaaagggcagaagcggagaagctctgagcctcctgaagaaaagattctcccatagacccgtgcaggagaagttcgtgtgcctgaactgcggcttcgagacacacgcagccgagcaagccgccctgaacatcgccagatcctggctgttcctgcggagccaggagtacaagaaataccagacaaacaagacaaccggcaacaccgataagagagccttcgtcgagacctggcagtccttttaccggaagaagcttaaggaggtgtggaaacctgccgtgcggtctggcggatctggcggaggctccacaagcctgaacagcgccgtgacctacgacgacgtgaacgtgaacttcaccagggaggagtgggccctgctggacagcagccagaagagcctgtacaaggacgtgatgctggagacctacaggaacctgaccgccatcggctacaactgggagggccacaacatcgaggagcactgccagagcagcaggaggcacgccaggacccacaagaggacccacaccggcgagaagagctacgagtgcgaccagaccagccccaagaaaaagagaaaagtctaagctgccttctgcggggcttgccttctggccatgcccttcttctctcccttgcacctgtacctcttggtctttgaataaagcctgagtaggaaggctagcaaaaaaaaaaaaaaaaaaaaaaaaaaaaaaaaaaaaaaaaaaaaaaaaaaaaaaaaaaaaaaaaaaaaaaaaaaaaaaaa

SEQ ID NO: 5917 - RNA, 5794 nt, synthetic construct
  source 1..5794: mol_type = other RNA
aggaaataagagagaaaagaagagtaagaagaaatataagagccaccatggcccctaagaagaagcgtaaagtgagccggatggaacgcctcgtctacgaggtgcggcagaagtgcagaaacatcgaggacatctgcatctcctgcggatctctgaacgtgaccctggagcacccactgttcatcggcggcatgtgccagaactgtaaaaactgttttctggagtgtgcctatcaatacgacgatgacggctaccagagctactgcaccatctgttgcggcggaagagaggtgctgatgtgtggaaataacaactgctgccggtgcttctgcgtggaatgcgtggacctgctggtgggccccggcgccgcccaggccgctattaaggaagatccttggaactgctacatgtgcggccacaagggcacatacggcctgctgagacggagagaggactggcctagcagactgcagatgttcttcgccaataaccacgaccaggagttcgacccccctaaggtgtaccctcccgtccccgccgagaagagaaagcccatccgggtcctgagcctgttcgatggcatcgccaccggtctgctggtgctgaaggacctgggcatccaggtggataggtacattgcctccgaggtgtgcgaggactccatcaccgtgggaatggtgcgtcatcagggcaagatcatgtacgtgggcgacgtgcggagcgtgacacagaagcatatccaggagtggggccctttcgacctggtgatcggcggcagcccttgcaatgacctgagcatcgtgaacccagcccggaagggcctgtacgagggaaccggcagactgttcttcgagttttacagactgctgcacgacgcccggcctaaggaaggcgacgaccggcccttcttttggctgttcgagaatgtggtggccatgggagtcagcgacaagcgggatattagccggttcctggagagcaaccccgtgatgatcgatgccaaggaagtgagcgccgcccaccgggccagatacttctggggcaatctgcctggcatgaacagacccctggccagcaccgtgaacgacaagctggagctgcaggagtgcctggagcacggccggatcgccaagttcagcaaggtgagaaccatcaccacccgaagcaacagcatcaaacaaggcaaggaccagcactttcctgtgttcatgaacgagaaggaggacatcctgtggtgtaccgagatggagagagtgttcgggttcccagtccactacacagatgtcagcaacatgtctagactggccagacagagactgctgggaagaagctggtccgtccctgtgatcagacacctgttcgcccctctgaaggagtacttcgcctgcgtgagcagcggcaacagcaacgccaacagccggggccccagcttctctagcggcctggtgccactgtccctgagagggagccacatgggccccatggagatctacaaaaccgtgagcgcctggaagcggcagcctgtgcgcgtgctgagcctgtttcggaatatcgataaagtcctgaaaagcctgggattcctggagagcggctctggctccggcggtggcaccctgaagtacgtggaggatgtgacaaacgtggtcagacgggatgtggagaagtggggccccttcgatctggtgtacggcagcacccaacccctgggcagctcttgtgaccggtgccctggctggtacatgtttcagttccaccggatcctgcagtacgccctgccgagacaggagtcccagcggccattcttttggattttcatggacaacttgctgctgaccgaggatgaccaggaaactaccactcggttcctgcagaccgaagccgtgaccctgcaggacgtgagaggccgggactaccagaacgccatgcgggtgtggtccaacatccctggactgaaaagcaagcacgcacctctgacccctaaagaagaggagtacctgcaggcccaggtgcggagcagaagcaagctggacgcccctaaggtggatctgctggtgaagaattgcctcctgcccctgagagagtacttcaagtatttcagccagaatagtctgcccctgggcggcccaagcagcggcgcccctcctcccagcggcggcagcccagccggctccccaacctctaccgaggagggcacctctgagtccgccacccccgagagcggccctggcacctccaccgagcccagcgagggcagcgcacccggcagccctgccggcagccccacctccacagaggagggaaccagcaccgagcccagcgaaggcagcgccccaggcaccagcaccgagcctagtgagggcggctctggcggcggcagcgcccaggagattaaacggatcaacaagatcagaagaagacttgtgaaagacagcaacaccaagaaggccggcaagacaggccccatgaaaaccctgctggttagagtgatgacacccgatctgagagagcggctggaaaacctgagaaagaagcctgaaaatatcccccagcccatcagcaatacatctagagccaacctgaataagctgctgaccgattacaccgaaatgaagaaggcgatcctgcatgtgtactgggaagagttccagaaggaccctgtgggcctgatgagccgggtggcccagcctgccagcaagaagatcgatcagaacaagctgaaacctgagatggacgagaagggcaacctgaccaccgccggctttgcctgctctcagtgtggccagcccctgttcgtgtacaagctggagcaggtgtctgagaagggcaaggcttacaccaactacttcggacggtgcaatgtggccgagcacgaaaagctgatcctgctggcccagctgaagcccgagaaggatagcgacgaagccgtgacatatagcctgggaaagtttgggcagagggccctggatttctacagcattcatgtgaccaaggagtccacccaccccgtgaagcccctggcccagatcgccggaaacagatacgcctccggacctgtgggaaaggccctgagcgacgcatgtatgggcacaatcgcctccttcctgtctaagtaccaggacatcatcatcgaacaccagaaggtggtgaagggcaaccagaagagactggagagcctgcgggagctggccggcaaggaaaacctggaataccctagcgtgaccctgccacctcagcctcacaccaaggagggcgttgatgcctacaacgaagtgatcgcccgggtgcgaatgtgggtgaacctgaacctgtggcagaagctgaagctaagcagagatgatgccaagcctctgctgagactgaagggattcccttcctttcctctggtcgagagacaggccaacgaagtggactggtgggacatggtgtgtaacgtgaagaagctgatcaacgagaaaaaggaggatggcaaggtgttttggcagaatctggctggctacaagagacaggaagccctgagaccatacctgagcagcgaggaagatcggaagaagggaaagaaattcgctcggtaccagctgggcgacctgctgctgcacctggaaaagaagcacggcgaggactggggaaaggtgtacgacgaggcctgggagcggattgacaagaaagtggaaggcctgagcaagcacatcaagctggaagaggaacggagaagcgaggacgcccagagcaaggccgccctgaccgactggctgcgggctaaggccagcttcgtgatcgagggcctgaaggaggccgacaaggacgagttctgcagatgcgagctgaagctgcagaagtggtacggggacctgcggggaaagcccttcgccatcgaagccgagaacagcatcctggacatcagcggcttcagcaagcagtacaactgtgccttcatctggcagaaggacggcgtgaagaagctgaacctgtacctgatcatcaactacttcaagggcggcaagctgcggttcaagaagatcaaacctgaagccttcgaagccaacagattctacaccgtgatcaacaaaaagagcggcgagatcgtgcccatggaggtgaacttcaacttcgacgaccccaacctgatcatcctgcctctggcctttggcaagagacagggcagagaattcatctggaacgacctgctgtccctggaaaccggcagcctgaagctggccaacggaagagtgatcgagaagacactgtacaacagaagaacccggcaggatgagcctgccctgttcgtggccctgaccttcgagcggcgggaggtcctggactcctccaatatcaaaccaatgaacctgatcggcgtggcaagaggcgaaaacatccccgccgtgatcgccctgaccgaccccgagggctgcccactgagccggtttaaggatagcctgggaaacccaacccacatcctgagaatcggcgagagctataaggagaagcagcggaccatccaggccaagaaggaggtggagcagcggagagccggcggctacagccggaagtacgccagcaaagccaagaatctggcagacgatatggtgagaaacaccgctagagatctgctgtactacgccgtgacccaggatgccatgctgatcttcgccaacctgagccggggcttcggccggcagggcaagcggaccttcatggccgagagacagtacacacggatggaggactggctgaccgccaagctggcctacgagggcctgagcaagacctacctgtccaagacactggcccagtacacctccaagacatgcagcaactgtgggtttaccatcaccagcgccgactacgacagggtgctggagaagctgaagaagacagcaacaggctggatgaccacaattaacggcaaggagctgaaggtggagggccagattacctactacaacagatacaagagacagaacgtagtcaaggacctgtccgtcgagctggatagactgagcgaagaatctgtgaacaacgacatctcctcctggacaaagggcagaagcggagaagctctgagcctcctgaagaaaagattctcccatagacccgtgcaggagaagttcgtgtgcctgaactgcggcttcgagacacacgcagccgagcaagccgccctgaacatcgccagatcctggctgttcctgcggagccaggagtacaagaaataccagacaaacaagacaaccggcaacaccgataagagagccttcgtcgagacctggcagtccttttaccggaagaagcttaaggaggtgtggaaacctgccgtgcggtctggcggatctggcggaggctccacaagcgccttcgaggacgtggccgtgtacttcagccaggaggagtggggcctgctggacaccgcccagagagccctgtacagaagagtgatgctggacaacttcgccctggtggccagcctgggcctgagcaccagcagacccagagtggtgatccagctggagagaggcgaggagccctgggtgcccagcggcaccgacaccaccctgagcagaaccacctacagaagaagaaaccccggcagcaccagccccaagaaaaagagaaaagtctaagctgccttctgcggggcttgccttctggccatgcccttcttctctcccttgcacctgtacctcttggtctttgaataaagcctgagtaggaaggctagcaaaaaaaaaaaaaaaaaaaaaaaaaaaaaaaaaaaaaaaaaaaaaaaaaaaaaaaaaaaaaaaaaaaaaaaaaaaaaaaa

SEQ ID NO: 5918 - RNA, 5797 nt, synthetic construct
  source 1..5797: mol_type = other RNA
aggaaataagagagaaaagaagagtaagaagaaatataagagccaccatggcccctaagaagaagcgtaaagtgagccggatggaacgcctcgtctacgaggtgcggcagaagtgcagaaacatcgaggacatctgcatctcctgcggatctctgaacgtgaccctggagcacccactgttcatcggcggcatgtgccagaactgtaaaaactgttttctggagtgtgcctatcaatacgacgatgacggctaccagagctactgcaccatctgttgcggcggaagagaggtgctgatgtgtggaaataacaactgctgccggtgcttctgcgtggaatgcgtggacctgctggtgggccccggcgccgcccaggccgctattaaggaagatccttggaactgctacatgtgcggccacaagggcacatacggcctgctgagacggagagaggactggcctagcagactgcagatgttcttcgccaataaccacgaccaggagttcgacccccctaaggtgtaccctcccgtccccgccgagaagagaaagcccatccgggtcctgagcctgttcgatggcatcgccaccggtctgctggtgctgaaggacctgggcatccaggtggataggtacattgcctccgaggtgtgcgaggactccatcaccgtgggaatggtgcgtcatcagggcaagatcatgtacgtgggcgacgtgcggagcgtgacacagaagcatatccaggagtggggccctttcgacctggtgatcggcggcagcccttgcaatgacctgagcatcgtgaacccagcccggaagggcctgtacgagggaaccggcagactgttcttcgagttttacagactgctgcacgacgcccggcctaaggaaggcgacgaccggcccttcttttggctgttcgagaatgtggtggccatgggagtcagcgacaagcgggatattagccggttcctggagagcaaccccgtgatgatcgatgccaaggaagtgagcgccgcccaccgggccagatacttctggggcaatctgcctggcatgaacagacccctggccagcaccgtgaacgacaagctggagctgcaggagtgcctggagcacggccggatcgccaagttcagcaaggtgagaaccatcaccacccgaagcaacagcatcaaacaaggcaaggaccagcactttcctgtgttcatgaacgagaaggaggacatcctgtggtgtaccgagatggagagagtgttcgggttcccagtccactacacagatgtcagcaacatgtctagactggccagacagagactgctgggaagaagctggtccgtccctgtgatcagacacctgttcgcccctctgaaggagtacttcgcctgcgtgagcagcggcaacagcaacgccaacagccggggccccagcttctctagcggcctggtgccactgtccctgagagggagccacatgggccccatggagatctacaaaaccgtgagcgcctggaagcggcagcctgtgcgcgtgctgagcctgtttcggaatatcgataaagtcctgaaaagcctgggattcctggagagcggctctggctccggcggtggcaccctgaagtacgtggaggatgtgacaaacgtggtcagacgggatgtggagaagtggggccccttcgatctggtgtacggcagcacccaacccctgggcagctcttgtgaccggtgccctggctggtacatgtttcagttccaccggatcctgcagtacgccctgccgagacaggagtcccagcggccattcttttggattttcatggacaacttgctgctgaccgaggatgaccaggaaactaccactcggttcctgcagaccgaagccgtgaccctgcaggacgtgagaggccgggactaccagaacgccatgcgggtgtggtccaacatccctggactgaaaagcaagcacgcacctctgacccctaaagaagaggagtacctgcaggcccaggtgcggagcagaagcaagctggacgcccctaaggtggatctgctggtgaagaattgcctcctgcccctgagagagtacttcaagtatttcagccagaatagtctgcccctgggcggcccaagcagcggcgcccctcctcccagcggcggcagcccagccggctccccaacctctaccgaggagggcacctctgagtccgccacccccgagagcggccctggcacctccaccgagcccagcgagggcagcgcacccggcagccctgccggcagccccacctccacagaggagggaaccagcaccgagcccagcgaaggcagcgccccaggcaccagcaccgagcctagtgagggcggctctggcggcggcagcgcccaggagattaaacggatcaacaagatcagaagaagacttgtgaaagacagcaacaccaagaaggccggcaagacaggccccatgaaaaccctgctggttagagtgatgacacccgatctgagagagcggctggaaaacctgagaaagaagcctgaaaatatcccccagcccatcagcaatacatctagagccaacctgaataagctgctgaccgattacaccgaaatgaagaaggcgatcctgcatgtgtactgggaagagttccagaaggaccctgtgggcctgatgagccgggtggcccagcctgccagcaagaagatcgatcagaacaagctgaaacctgagatggacgagaagggcaacctgaccaccgccggctttgcctgctctcagtgtggccagcccctgttcgtgtacaagctggagcaggtgtctgagaagggcaaggcttacaccaactacttcggacggtgcaatgtggccgagcacgaaaagctgatcctgctggcccagctgaagcccgagaaggatagcgacgaagccgtgacatatagcctgggaaagtttgggcagagggccctggatttctacagcattcatgtgaccaaggagtccacccaccccgtgaagcccctggcccagatcgccggaaacagatacgcctccggacctgtgggaaaggccctgagcgacgcatgtatgggcacaatcgcctccttcctgtctaagtaccaggacatcatcatcgaacaccagaaggtggtgaagggcaaccagaagagactggagagcctgcgggagctggccggcaaggaaaacctggaataccctagcgtgaccctgccacctcagcctcacaccaaggagggcgttgatgcctacaacgaagtgatcgcccgggtgcgaatgtgggtgaacctgaacctgtggcagaagctgaagctaagcagagatgatgccaagcctctgctgagactgaagggattcccttcctttcctctggtcgagagacaggccaacgaagtggactggtgggacatggtgtgtaacgtgaagaagctgatcaacgagaaaaaggaggatggcaaggtgttttggcagaatctggctggctacaagagacaggaagccctgagaccatacctgagcagcgaggaagatcggaagaagggaaagaaattcgctcggtaccagctgggcgacctgctgctgcacctggaaaagaagcacggcgaggactggggaaaggtgtacgacgaggcctgggagcggattgacaagaaagtggaaggcctgagcaagcacatcaagctggaagaggaacggagaagcgaggacgcccagagcaaggccgccctgaccgactggctgcgggctaaggccagcttcgtgatcgagggcctgaaggaggccgacaaggacgagttctgcagatgcgagctgaagctgcagaagtggtacggggacctgcggggaaagcccttcgccatcgaagccgagaacagcatcctggacatcagcggcttcagcaagcagtacaactgtgccttcatctggcagaaggacggcgtgaagaagctgaacctgtacctgatcatcaactacttcaagggcggcaagctgcggttcaagaagatcaaacctgaagccttcgaagccaacagattctacaccgtgatcaacaaaaagagcggcgagatcgtgcccatggaggtgaacttcaacttcgacgaccccaacctgatcatcctgcctctggcctttggcaagagacagggcagagaattcatctggaacgacctgctgtccctggaaaccggcagcctgaagctggccaacggaagagtgatcgagaagacactgtacaacagaagaacccggcaggatgagcctgccctgttcgtggccctgaccttcgagcggcgggaggtcctggactcctccaatatcaaaccaatgaacctgatcggcgtggcaagaggcgaaaacatccccgccgtgatcgccctgaccgaccccgagggctgcccactgagccggtttaaggatagcctgggaaacccaacccacatcctgagaatcggcgagagctataaggagaagcagcggaccatccaggccaagaaggaggtggagcagcggagagccggcggctacagccggaagtacgccagcaaagccaagaatctggcagacgatatggtgagaaacaccgctagagatctgctgtactacgccgtgacccaggatgccatgctgatcttcgccaacctgagccggggcttcggccggcagggcaagcggaccttcatggccgagagacagtacacacggatggaggactggctgaccgccaagctggcctacgagggcctgagcaagacctacctgtccaagacactggcccagtacacctccaagacatgcagcaactgtgggtttaccatcaccagcgccgactacgacagggtgctggagaagctgaagaagacagcaacaggctggatgaccacaattaacggcaaggagctgaaggtggagggccagattacctactacaacagatacaagagacagaacgtagtcaaggacctgtccgtcgagctggatagactgagcgaagaatctgtgaacaacgacatctcctcctggacaaagggcagaagcggagaagctctgagcctcctgaagaaaagattctcccatagacccgtgcaggagaagttcgtgtgcctgaactgcggcttcgagacacacgcagccgagcaagccgccctgaacatcgccagatcctggctgttcctgcggagccaggagtacaagaaataccagacaaacaagacaaccggcaacaccgataagagagccttcgtcgagacctggcagtccttttaccggaagaagcttaaggaggtgtggaaacctgccgtgcggtctggcggatctggcggaggctccacaagcttccaggagagcgtgaccttcagggacgtggccatcgccttcagccagcaggagtggcagagcctggacagcagccagagggacctgtacagggacgtgatgctggagaactacaggaacctggtgagcctgggccacagcctgagcaagccccacgtgatcaccctgctggagcagtggaaggacccctgggagaccggcaggaaggacaagaggaggaggtgcgccgacctgcagctggagaccagccccaagaaaaagagaaaagtctaagctgccttctgcggggcttgccttctggccatgcccttcttctctcccttgcacctgtacctcttggtctttgaataaagcctgagtaggaaggctagcaaaaaaaaaaaaaaaaaaaaaaaaaaaaaaaaaaaaaaaaaaaaaaaaaaaaaaaaaaaaaaaaaaaaaaaaaaaaaaaa

SEQ ID NO: 5919 - RNA, 5797 nt, synthetic construct
  source 1..5797: mol_type = other RNA
aggaaataagagagaaaagaagagtaagaagaaatataagagccaccatggcccctaagaagaagcgtaaagtgagccggatggaacgcctcgtctacgaggtgcggcagaagtgcagaaacatcgaggacatctgcatctcctgcggatctctgaacgtgaccctggagcacccactgttcatcggcggcatgtgccagaactgtaaaaactgttttctggagtgtgcctatcaatacgacgatgacggctaccagagctactgcaccatctgttgcggcggaagagaggtgctgatgtgtggaaataacaactgctgccggtgcttctgcgtggaatgcgtggacctgctggtgggccccggcgccgcccaggccgctattaaggaagatccttggaactgctacatgtgcggccacaagggcacatacggcctgctgagacggagagaggactggcctagcagactgcagatgttcttcgccaataaccacgaccaggagttcgacccccctaaggtgtaccctcccgtccccgccgagaagagaaagcccatccgggtcctgagcctgttcgatggcatcgccaccggtctgctggtgctgaaggacctgggcatccaggtggataggtacattgcctccgaggtgtgcgaggactccatcaccgtgggaatggtgcgtcatcagggcaagatcatgtacgtgggcgacgtgcggagcgtgacacagaagcatatccaggagtggggccctttcgacctggtgatcggcggcagcccttgcaatgacctgagcatcgtgaacccagcccggaagggcctgtacgagggaaccggcagactgttcttcgagttttacagactgctgcacgacgcccggcctaaggaaggcgacgaccggcccttcttttggctgttcgagaatgtggtggccatgggagtcagcgacaagcgggatattagccggttcctggagagcaaccccgtgatgatcgatgccaaggaagtgagcgccgcccaccgggccagatacttctggggcaatctgcctggcatgaacagacccctggccagcaccgtgaacgacaagctggagctgcaggagtgcctggagcacggccggatcgccaagttcagcaaggtgagaaccatcaccacccgaagcaacagcatcaaacaaggcaaggaccagcactttcctgtgttcatgaacgagaaggaggacatcctgtggtgtaccgagatggagagagtgttcgggttcccagtccactacacagatgtcagcaacatgtctagactggccagacagagactgctgggaagaagctggtccgtccctgtgatcagacacctgttcgcccctctgaaggagtacttcgcctgcgtgagcagcggcaacagcaacgccaacagccggggccccagcttctctagcggcctggtgccactgtccctgagagggagccacatgggccccatggagatctacaaaaccgtgagcgcctggaagcggcagcctgtgcgcgtgctgagcctgtttcggaatatcgataaagtcctgaaaagcctgggattcctggagagcggctctggctccggcggtggcaccctgaagtacgtggaggatgtgacaaacgtggtcagacgggatgtggagaagtggggccccttcgatctggtgtacggcagcacccaacccctgggcagctcttgtgaccggtgccctggctggtacatgtttcagttccaccggatcctgcagtacgccctgccgagacaggagtcccagcggccattcttttggattttcatggacaacttgctgctgaccgaggatgaccaggaaactaccactcggttcctgcagaccgaagccgtgaccctgcaggacgtgagaggccgggactaccagaacgccatgcgggtgtggtccaacatccctggactgaaaagcaagcacgcacctctgacccctaaagaagaggagtacctgcaggcccaggtgcggagcagaagcaagctggacgcccctaaggtggatctgctggtgaagaattgcctcctgcccctgagagagtacttcaagtatttcagccagaatagtctgcccctgggcggcccaagcagcggcgcccctcctcccagcggcggcagcccagccggctccccaacctctaccgaggagggcacctctgagtccgccacccccgagagcggccctggcacctccaccgagcccagcgagggcagcgcacccggcagccctgccggcagccccacctccacagaggagggaaccagcaccgagcccagcgaaggcagcgccccaggcaccagcaccgagcctagtgagggcggctctggcggcggcagcgcccaggagattaaacggatcaacaagatcagaagaagacttgtgaaagacagcaacaccaagaaggccggcaagacaggccccatgaaaaccctgctggttagagtgatgacacccgatctgagagagcggctggaaaacctgagaaagaagcctgaaaatatcccccagcccatcagcaatacatctagagccaacctgaataagctgctgaccgattacaccgaaatgaagaaggcgatcctgcatgtgtactgggaagagttccagaaggaccctgtgggcctgatgagccgggtggcccagcctgccagcaagaagatcgatcagaacaagctgaaacctgagatggacgagaagggcaacctgaccaccgccggctttgcctgctctcagtgtggccagcccctgttcgtgtacaagctggagcaggtgtctgagaagggcaaggcttacaccaactacttcggacggtgcaatgtggccgagcacgaaaagctgatcctgctggcccagctgaagcccgagaaggatagcgacgaagccgtgacatatagcctgggaaagtttgggcagagggccctggatttctacagcattcatgtgaccaaggagtccacccaccccgtgaagcccctggcccagatcgccggaaacagatacgcctccggacctgtgggaaaggccctgagcgacgcatgtatgggcacaatcgcctccttcctgtctaagtaccaggacatcatcatcgaacaccagaaggtggtgaagggcaaccagaagagactggagagcctgcgggagctggccggcaaggaaaacctggaataccctagcgtgaccctgccacctcagcctcacaccaaggagggcgttgatgcctacaacgaagtgatcgcccgggtgcgaatgtgggtgaacctgaacctgtggcagaagctgaagctaagcagagatgatgccaagcctctgctgagactgaagggattcccttcctttcctctggtcgagagacaggccaacgaagtggactggtgggacatggtgtgtaacgtgaagaagctgatcaacgagaaaaaggaggatggcaaggtgttttggcagaatctggctggctacaagagacaggaagccctgagaccatacctgagcagcgaggaagatcggaagaagggaaagaaattcgctcggtaccagctgggcgacctgctgctgcacctggaaaagaagcacggcgaggactggggaaaggtgtacgacgaggcctgggagcggattgacaagaaagtggaaggcctgagcaagcacatcaagctggaagaggaacggagaagcgaggacgcccagagcaaggccgccctgaccgactggctgcgggctaaggccagcttcgtgatcgagggcctgaaggaggccgacaaggacgagttctgcagatgcgagctgaagctgcagaagtggtacggggacctgcggggaaagcccttcgccatcgaagccgagaacagcatcctggacatcagcggcttcagcaagcagtacaactgtgccttcatctggcagaaggacggcgtgaagaagctgaacctgtacctgatcatcaactacttcaagggcggcaagctgcggttcaagaagatcaaacctgaagccttcgaagccaacagattctacaccgtgatcaacaaaaagagcggcgagatcgtgcccatggaggtgaacttcaacttcgacgaccccaacctgatcatcctgcctctggcctttggcaagagacagggcagagaattcatctggaacgacctgctgtccctggaaaccggcagcctgaagctggccaacggaagagtgatcgagaagacactgtacaacagaagaacccggcaggatgagcctgccctgttcgtggccctgaccttcgagcggcgggaggtcctggactcctccaatatcaaaccaatgaacctgatcggcgtggcaagaggcgaaaacatccccgccgtgatcgccctgaccgaccccgagggctgcccactgagccggtttaaggatagcctgggaaacccaacccacatcctgagaatcggcgagagctataaggagaagcagcggaccatccaggccaagaaggaggtggagcagcggagagccggcggctacagccggaagtacgccagcaaagccaagaatctggcagacgatatggtgagaaacaccgctagagatctgctgtactacgccgtgacccaggatgccatgctgatcttcgccaacctgagccggggcttcggccggcagggcaagcggaccttcatggccgagagacagtacacacggatggaggactggctgaccgccaagctggcctacgagggcctgagcaagacctacctgtccaagacactggcccagtacacctccaagacatgcagcaactgtgggtttaccatcaccagcgccgactacgacagggtgctggagaagctgaagaagacagcaacaggctggatgaccacaattaacggcaaggagctgaaggtggagggccagattacctactacaacagatacaagagacagaacgtagtcaaggacctgtccgtcgagctggatagactgagcgaagaatctgtgaacaacgacatctcctcctggacaaagggcagaagcggagaagctctgagcctcctgaagaaaagattctcccatagacccgtgcaggagaagttcgtgtgcctgaactgcggcttcgagacacacgcagccgagcaagccgccctgaacatcgccagatcctggctgttcctgcggagccaggagtacaagaaataccagacaaacaagacaaccggcaacaccgataagagagccttcgtcgagacctggcagtccttttaccggaagaagcttaaggaggtgtggaaacctgccgtgcggtctggcggatctggcggaggctccacaagcttccaggagagcgtgaccttcgaggacgtggccgtgtacttcacccagaaccagtgggccagcctggaccccgtgcagagggccctgtacagggacgtgatgctggagaactacgccaacgtggccgccctggtggccttccccgcccccaagcccgacctgatcagccagctggagaggggcagcgccccctggaggcccgacccctgggaggccgaggtgctgaggggcatctgccccggcaccagccccaagaaaaagagaaaagtctaagctgccttctgcggggcttgccttctggccatgcccttcttctctcccttgcacctgtacctcttggtctttgaataaagcctgagtaggaaggctagcaaaaaaaaaaaaaaaaaaaaaaaaaaaaaaaaaaaaaaaaaaaaaaaaaaaaaaaaaaaaaaaaaaaaaaaaaaaaaaaa

SEQ ID NO: 5920 - RNA, 5797 nt, synthetic construct
  source 1..5797: mol_type = other RNA
aggaaataagagagaaaagaagagtaagaagaaatataagagccaccatggcccctaagaagaagcgtaaagtgagccggatggaacgcctcgtctacgaggtgcggcagaagtgcagaaacatcgaggacatctgcatctcctgcggatctctgaacgtgaccctggagcacccactgttcatcggcggcatgtgccagaactgtaaaaactgttttctggagtgtgcctatcaatacgacgatgacggctaccagagctactgcaccatctgttgcggcggaagagaggtgctgatgtgtggaaataacaactgctgccggtgcttctgcgtggaatgcgtggacctgctggtgggccccggcgccgcccaggccgctattaaggaagatccttggaactgctacatgtgcggccacaagggcacatacggcctgctgagacggagagaggactggcctagcagactgcagatgttcttcgccaataaccacgaccaggagttcgacccccctaaggtgtaccctcccgtccccgccgagaagagaaagcccatccgggtcctgagcctgttcgatggcatcgccaccggtctgctggtgctgaaggacctgggcatccaggtggataggtacattgcctccgaggtgtgcgaggactccatcaccgtgggaatggtgcgtcatcagggcaagatcatgtacgtgggcgacgtgcggagcgtgacacagaagcatatccaggagtggggccctttcgacctggtgatcggcggcagcccttgcaatgacctgagcatcgtgaacccagcccggaagggcctgtacgagggaaccggcagactgttcttcgagttttacagactgctgcacgacgcccggcctaaggaaggcgacgaccggcccttcttttggctgttcgagaatgtggtggccatgggagtcagcgacaagcgggatattagccggttcctggagagcaaccccgtgatgatcgatgccaaggaagtgagcgccgcccaccgggccagatacttctggggcaatctgcctggcatgaacagacccctggccagcaccgtgaacgacaagctggagctgcaggagtgcctggagcacggccggatcgccaagttcagcaaggtgagaaccatcaccacccgaagcaacagcatcaaacaaggcaaggaccagcactttcctgtgttcatgaacgagaaggaggacatcctgtggtgtaccgagatggagagagtgttcgggttcccagtccactacacagatgtcagcaacatgtctagactggccagacagagactgctgggaagaagctggtccgtccctgtgatcagacacctgttcgcccctctgaaggagtacttcgcctgcgtgagcagcggcaacagcaacgccaacagccggggccccagcttctctagcggcctggtgccactgtccctgagagggagccacatgggccccatggagatctacaaaaccgtgagcgcctggaagcggcagcctgtgcgcgtgctgagcctgtttcggaatatcgataaagtcctgaaaagcctgggattcctggagagcggctctggctccggcggtggcaccctgaagtacgtggaggatgtgacaaacgtggtcagacgggatgtggagaagtggggccccttcgatctggtgtacggcagcacccaacccctgggcagctcttgtgaccggtgccctggctggtacatgtttcagttccaccggatcctgcagtacgccctgccgagacaggagtcccagcggccattcttttggattttcatggacaacttgctgctgaccgaggatgaccaggaaactaccactcggttcctgcagaccgaagccgtgaccctgcaggacgtgagaggccgggactaccagaacgccatgcgggtgtggtccaacatccctggactgaaaagcaagcacgcacctctgacccctaaagaagaggagtacctgcaggcccaggtgcggagcagaagcaagctggacgcccctaaggtggatctgctggtgaagaattgcctcctgcccctgagagagtacttcaagtatttcagccagaatagtctgcccctgggcggcccaagcagcggcgcccctcctcccagcggcggcagcccagccggctccccaacctctaccgaggagggcacctctgagtccgccacccccgagagcggccctggcacctccaccgagcccagcgagggcagcgcacccggcagccctgccggcagccccacctccacagaggagggaaccagcaccgagcccagcgaaggcagcgccccaggcaccagcaccgagcctagtgagggcggctctggcggcggcagcgcccaggagattaaacggatcaacaagatcagaagaagacttgtgaaagacagcaacaccaagaaggccggcaagacaggccccatgaaaaccctgctggttagagtgatgacacccgatctgagagagcggctggaaaacctgagaaagaagcctgaaaatatcccccagcccatcagcaatacatctagagccaacctgaataagctgctgaccgattacaccgaaatgaagaaggcgatcctgcatgtgtactgggaagagttccagaaggaccctgtgggcctgatgagccgggtggcccagcctgccagcaagaagatcgatcagaacaagctgaaacctgagatggacgagaagggcaacctgaccaccgccggctttgcctgctctcagtgtggccagcccctgttcgtgtacaagctggagcaggtgtctgagaagggcaaggcttacaccaactacttcggacggtgcaatgtggccgagcacgaaaagctgatcctgctggcccagctgaagcccgagaaggatagcgacgaagccgtgacatatagcctgggaaagtttgggcagagggccctggatttctacagcattcatgtgaccaaggagtccacccaccccgtgaagcccctggcccagatcgccggaaacagatacgcctccggacctgtgggaaaggccctgagcgacgcatgtatgggcacaatcgcctccttcctgtctaagtaccaggacatcatcatcgaacaccagaaggtggtgaagggcaaccagaagagactggagagcctgcgggagctggccggcaaggaaaacctggaataccctagcgtgaccctgccacctcagcctcacaccaaggagggcgttgatgcctacaacgaagtgatcgcccgggtgcgaatgtgggtgaacctgaacctgtggcagaagctgaagctaagcagagatgatgccaagcctctgctgagactgaagggattcccttcctttcctctggtcgagagacaggccaacgaagtggactggtgggacatggtgtgtaacgtgaagaagctgatcaacgagaaaaaggaggatggcaaggtgttttggcagaatctggctggctacaagagacaggaagccctgagaccatacctgagcagcgaggaagatcggaagaagggaaagaaattcgctcggtaccagctgggcgacctgctgctgcacctggaaaagaagcacggcgaggactggggaaaggtgtacgacgaggcctgggagcggattgacaagaaagtggaaggcctgagcaagcacatcaagctggaagaggaacggagaagcgaggacgcccagagcaaggccgccctgaccgactggctgcgggctaaggccagcttcgtgatcgagggcctgaaggaggccgacaaggacgagttctgcagatgcgagctgaagctgcagaagtggtacggggacctgcggggaaagcccttcgccatcgaagccgagaacagcatcctggacatcagcggcttcagcaagcagtacaactgtgccttcatctggcagaaggacggcgtgaagaagctgaacctgtacctgatcatcaactacttcaagggcggcaagctgcggttcaagaagatcaaacctgaagccttcgaagccaacagattctacaccgtgatcaacaaaaagagcggcgagatcgtgcccatggaggtgaacttcaacttcgacgaccccaacctgatcatcctgcctctggcctttggcaagagacagggcagagaattcatctggaacgacctgctgtccctggaaaccggcagcctgaagctggccaacggaagagtgatcgagaagacactgtacaacagaagaacccggcaggatgagcctgccctgttcgtggccctgaccttcgagcggcgggaggtcctggactcctccaatatcaaaccaatgaacctgatcggcgtggcaagaggcgaaaacatccccgccgtgatcgccctgaccgaccccgagggctgcccactgagccggtttaaggatagcctgggaaacccaacccacatcctgagaatcggcgagagctataaggagaagcagcggaccatccaggccaagaaggaggtggagcagcggagagccggcggctacagccggaagtacgccagcaaagccaagaatctggcagacgatatggtgagaaacaccgctagagatctgctgtactacgccgtgacccaggatgccatgctgatcttcgccaacctgagccggggcttcggccggcagggcaagcggaccttcatggccgagagacagtacacacggatggaggactggctgaccgccaagctggcctacgagggcctgagcaagacctacctgtccaagacactggcccagtacacctccaagacatgcagcaactgtgggtttaccatcaccagcgccgactacgacagggtgctggagaagctgaagaagacagcaacaggctggatgaccacaattaacggcaaggagctgaaggtggagggccagattacctactacaacagatacaagagacagaacgtagtcaaggacctgtccgtcgagctggatagactgagcgaagaatctgtgaacaacgacatctcctcctggacaaagggcagaagcggagaagctctgagcctcctgaagaaaagattctcccatagacccgtgcaggagaagttcgtgtgcctgaactgcggcttcgagacacacgcagccgagcaagccgccctgaacatcgccagatcctggctgttcctgcggagccaggagtacaagaaataccagacaaacaagacaaccggcaacaccgataagagagccttcgtcgagacctggcagtccttttaccggaagaagcttaaggaggtgtggaaacctgccgtgcggtctggcggatctggcggaggctccacaagcctgctgaccttcgaggacgtggccgtgcacttcagcgaggaggagtggcagctgctggaccccaaccagaagaccctgtacaacgaggtgatgtgggacatctgcgaggccgccagcttcgtgggcctgaagttcaagaacgacaccggcaacgccgagcccagcagcgtgagcgccctggagatccaggccgccgagaggcagggcagcaagaccaggaagaacgtggccaggaagaggaagaccagccccaagaaaaagagaaaagtctaagctgccttctgcggggcttgccttctggccatgcccttcttctctcccttgcacctgtacctcttggtctttgaataaagcctgagtaggaaggctagcaaaaaaaaaaaaaaaaaaaaaaaaaaaaaaaaaaaaaaaaaaaaaaaaaaaaaaaaaaaaaaaaaaaaaaaaaaaaaaaa

SEQ ID NO: 5921 - RNA, 5797 nt, synthetic construct
  source 1..5797: mol_type = other RNA
aggaaataagagagaaaagaagagtaagaagaaatataagagccaccatggcccctaagaagaagcgtaaagtgagccggatggaacgcctcgtctacgaggtgcggcagaagtgcagaaacatcgaggacatctgcatctcctgcggatctctgaacgtgaccctggagcacccactgttcatcggcggcatgtgccagaactgtaaaaactgttttctggagtgtgcctatcaatacgacgatgacggctaccagagctactgcaccatctgttgcggcggaagagaggtgctgatgtgtggaaataacaactgctgccggtgcttctgcgtggaatgcgtggacctgctggtgggccccggcgccgcccaggccgctattaaggaagatccttggaactgctacatgtgcggccacaagggcacatacggcctgctgagacggagagaggactggcctagcagactgcagatgttcttcgccaataaccacgaccaggagttcgacccccctaaggtgtaccctcccgtccccgccgagaagagaaagcccatccgggtcctgagcctgttcgatggcatcgccaccggtctgctggtgctgaaggacctgggcatccaggtggataggtacattgcctccgaggtgtgcgaggactccatcaccgtgggaatggtgcgtcatcagggcaagatcatgtacgtgggcgacgtgcggagcgtgacacagaagcatatccaggagtggggccctttcgacctggtgatcggcggcagcccttgcaatgacctgagcatcgtgaacccagcccggaagggcctgtacgagggaaccggcagactgttcttcgagttttacagactgctgcacgacgcccggcctaaggaaggcgacgaccggcccttcttttggctgttcgagaatgtggtggccatgggagtcagcgacaagcgggatattagccggttcctggagagcaaccccgtgatgatcgatgccaaggaagtgagcgccgcccaccgggccagatacttctggggcaatctgcctggcatgaacagacccctggccagcaccgtgaacgacaagctggagctgcaggagtgcctggagcacggccggatcgccaagttcagcaaggtgagaaccatcaccacccgaagcaacagcatcaaacaaggcaaggaccagcactttcctgtgttcatgaacgagaaggaggacatcctgtggtgtaccgagatggagagagtgttcgggttcccagtccactacacagatgtcagcaacatgtctagactggccagacagagactgctgggaagaagctggtccgtccctgtgatcagacacctgttcgcccctctgaaggagtacttcgcctgcgtgagcagcggcaacagcaacgccaacagccggggccccagcttctctagcggcctggtgccactgtccctgagagggagccacatgggccccatggagatctacaaaaccgtgagcgcctggaagcggcagcctgtgcgcgtgctgagcctgtttcggaatatcgataaagtcctgaaaagcctgggattcctggagagcggctctggctccggcggtggcaccctgaagtacgtggaggatgtgacaaacgtggtcagacgggatgtggagaagtggggccccttcgatctggtgtacggcagcacccaacccctgggcagctcttgtgaccggtgccctggctggtacatgtttcagttccaccggatcctgcagtacgccctgccgagacaggagtcccagcggccattcttttggattttcatggacaacttgctgctgaccgaggatgaccaggaaactaccactcggttcctgcagaccgaagccgtgaccctgcaggacgtgagaggccgggactaccagaacgccatgcgggtgtggtccaacatccctggactgaaaagcaagcacgcacctctgacccctaaagaagaggagtacctgcaggcccaggtgcggagcagaagcaagctggacgcccctaaggtggatctgctggtgaagaattgcctcctgcccctgagagagtacttcaagtatttcagccagaatagtctgcccctgggcggcccaagcagcggcgcccctcctcccagcggcggcagcccagccggctccccaacctctaccgaggagggcacctctgagtccgccacccccgagagcggccctggcacctccaccgagcccagcgagggcagcgcacccggcagccctgccggcagccccacctccacagaggagggaaccagcaccgagcccagcgaaggcagcgccccaggcaccagcaccgagcctagtgagggcggctctggcggcggcagcgcccaggagattaaacggatcaacaagatcagaagaagacttgtgaaagacagcaacaccaagaaggccggcaagacaggccccatgaaaaccctgctggttagagtgatgacacccgatctgagagagcggctggaaaacctgagaaagaagcctgaaaatatcccccagcccatcagcaatacatctagagccaacctgaataagctgctgaccgattacaccgaaatgaagaaggcgatcctgcatgtgtactgggaagagttccagaaggaccctgtgggcctgatgagccgggtggcccagcctgccagcaagaagatcgatcagaacaagctgaaacctgagatggacgagaagggcaacctgaccaccgccggctttgcctgctctcagtgtggccagcccctgttcgtgtacaagctggagcaggtgtctgagaagggcaaggcttacaccaactacttcggacggtgcaatgtggccgagcacgaaaagctgatcctgctggcccagctgaagcccgagaaggatagcgacgaagccgtgacatatagcctgggaaagtttgggcagagggccctggatttctacagcattcatgtgaccaaggagtccacccaccccgtgaagcccctggcccagatcgccggaaacagatacgcctccggacctgtgggaaaggccctgagcgacgcatgtatgggcacaatcgcctccttcctgtctaagtaccaggacatcatcatcgaacaccagaaggtggtgaagggcaaccagaagagactggagagcctgcgggagctggccggcaaggaaaacctggaataccctagcgtgaccctgccacctcagcctcacaccaaggagggcgttgatgcctacaacgaagtgatcgcccgggtgcgaatgtgggtgaacctgaacctgtggcagaagctgaagctaagcagagatgatgccaagcctctgctgagactgaagggattcccttcctttcctctggtcgagagacaggccaacgaagtggactggtgggacatggtgtgtaacgtgaagaagctgatcaacgagaaaaaggaggatggcaaggtgttttggcagaatctggctggctacaagagacaggaagccctgagaccatacctgagcagcgaggaagatcggaagaagggaaagaaattcgctcggtaccagctgggcgacctgctgctgcacctggaaaagaagcacggcgaggactggggaaaggtgtacgacgaggcctgggagcggattgacaagaaagtggaaggcctgagcaagcacatcaagctggaagaggaacggagaagcgaggacgcccagagcaaggccgccctgaccgactggctgcgggctaaggccagcttcgtgatcgagggcctgaaggaggccgacaaggacgagttctgcagatgcgagctgaagctgcagaagtggtacggggacctgcggggaaagcccttcgccatcgaagccgagaacagcatcctggacatcagcggcttcagcaagcagtacaactgtgccttcatctggcagaaggacggcgtgaagaagctgaacctgtacctgatcatcaactacttcaagggcggcaagctgcggttcaagaagatcaaacctgaagccttcgaagccaacagattctacaccgtgatcaacaaaaagagcggcgagatcgtgcccatggaggtgaacttcaacttcgacgaccccaacctgatcatcctgcctctggcctttggcaagagacagggcagagaattcatctggaacgacctgctgtccctggaaaccggcagcctgaagctggccaacggaagagtgatcgagaagacactgtacaacagaagaacccggcaggatgagcctgccctgttcgtggccctgaccttcgagcggcgggaggtcctggactcctccaatatcaaaccaatgaacctgatcggcgtggcaagaggcgaaaacatccccgccgtgatcgccctgaccgaccccgagggctgcccactgagccggtttaaggatagcctgggaaacccaacccacatcctgagaatcggcgagagctataaggagaagcagcggaccatccaggccaagaaggaggtggagcagcggagagccggcggctacagccggaagtacgccagcaaagccaagaatctggcagacgatatggtgagaaacaccgctagagatctgctgtactacgccgtgacccaggatgccatgctgatcttcgccaacctgagccggggcttcggccggcagggcaagcggaccttcatggccgagagacagtacacacggatggaggactggctgaccgccaagctggcctacgagggcctgagcaagacctacctgtccaagacactggcccagtacacctccaagacatgcagcaactgtgggtttaccatcaccagcgccgactacgacagggtgctggagaagctgaagaagacagcaacaggctggatgaccacaattaacggcaaggagctgaaggtggagggccagattacctactacaacagatacaagagacagaacgtagtcaaggacctgtccgtcgagctggatagactgagcgaagaatctgtgaacaacgacatctcctcctggacaaagggcagaagcggagaagctctgagcctcctgaagaaaagattctcccatagacccgtgcaggagaagttcgtgtgcctgaactgcggcttcgagacacacgcagccgagcaagccgccctgaacatcgccagatcctggctgttcctgcggagccaggagtacaagaaataccagacaaacaagacaaccggcaacaccgataagagagccttcgtcgagacctggcagtccttttaccggaagaagcttaaggaggtgtggaaacctgccgtgcggtctggcggatctggcggaggctccacaagcatggccttcgaggacgtggccgtgcacttcagccaggaggagtggggcctgctggacaccgcccagaggagcctgtacaggagggtgatgctggagaacttcgccctgctggccagcctgggcctgagcgtgagcaggccccacgtggtgacccagctggagaggggcgaggagccctgggtgctgagcggcgtggacgtgaccctgcccagggacgcccagaggaggccccacaggggcagcaccagccccaagaaaaagagaaaagtctaagctgccttctgcggggcttgccttctggccatgcccttcttctctcccttgcacctgtacctcttggtctttgaataaagcctgagtaggaaggctagcaaaaaaaaaaaaaaaaaaaaaaaaaaaaaaaaaaaaaaaaaaaaaaaaaaaaaaaaaaaaaaaaaaaaaaaaaaaaaaaa

SEQ ID NO: 5922 - RNA, 5797 nt, synthetic construct
  source 1..5797: mol_type = other RNA
aggaaataagagagaaaagaagagtaagaagaaatataagagccaccatggcccctaagaagaagcgtaaagtgagccggatggaacgcctcgtctacgaggtgcggcagaagtgcagaaacatcgaggacatctgcatctcctgcggatctctgaacgtgaccctggagcacccactgttcatcggcggcatgtgccagaactgtaaaaactgttttctggagtgtgcctatcaatacgacgatgacggctaccagagctactgcaccatctgttgcggcggaagagaggtgctgatgtgtggaaataacaactgctgccggtgcttctgcgtggaatgcgtggacctgctggtgggccccggcgccgcccaggccgctattaaggaagatccttggaactgctacatgtgcggccacaagggcacatacggcctgctgagacggagagaggactggcctagcagactgcagatgttcttcgccaataaccacgaccaggagttcgacccccctaaggtgtaccctcccgtccccgccgagaagagaaagcccatccgggtcctgagcctgttcgatggcatcgccaccggtctgctggtgctgaaggacctgggcatccaggtggataggtacattgcctccgaggtgtgcgaggactccatcaccgtgggaatggtgcgtcatcagggcaagatcatgtacgtgggcgacgtgcggagcgtgacacagaagcatatccaggagtggggccctttcgacctggtgatcggcggcagcccttgcaatgacctgagcatcgtgaacccagcccggaagggcctgtacgagggaaccggcagactgttcttcgagttttacagactgctgcacgacgcccggcctaaggaaggcgacgaccggcccttcttttggctgttcgagaatgtggtggccatgggagtcagcgacaagcgggatattagccggttcctggagagcaaccccgtgatgatcgatgccaaggaagtgagcgccgcccaccgggccagatacttctggggcaatctgcctggcatgaacagacccctggccagcaccgtgaacgacaagctggagctgcaggagtgcctggagcacggccggatcgccaagttcagcaaggtgagaaccatcaccacccgaagcaacagcatcaaacaaggcaaggaccagcactttcctgtgttcatgaacgagaaggaggacatcctgtggtgtaccgagatggagagagtgttcgggttcccagtccactacacagatgtcagcaacatgtctagactggccagacagagactgctgggaagaagctggtccgtccctgtgatcagacacctgttcgcccctctgaaggagtacttcgcctgcgtgagcagcggcaacagcaacgccaacagccggggccccagcttctctagcggcctggtgccactgtccctgagagggagccacatgggccccatggagatctacaaaaccgtgagcgcctggaagcggcagcctgtgcgcgtgctgagcctgtttcggaatatcgataaagtcctgaaaagcctgggattcctggagagcggctctggctccggcggtggcaccctgaagtacgtggaggatgtgacaaacgtggtcagacgggatgtggagaagtggggccccttcgatctggtgtacggcagcacccaacccctgggcagctcttgtgaccggtgccctggctggtacatgtttcagttccaccggatcctgcagtacgccctgccgagacaggagtcccagcggccattcttttggattttcatggacaacttgctgctgaccgaggatgaccaggaaactaccactcggttcctgcagaccgaagccgtgaccctgcaggacgtgagaggccgggactaccagaacgccatgcgggtgtggtccaacatccctggactgaaaagcaagcacgcacctctgacccctaaagaagaggagtacctgcaggcccaggtgcggagcagaagcaagctggacgcccctaaggtggatctgctggtgaagaattgcctcctgcccctgagagagtacttcaagtatttcagccagaatagtctgcccctgggcggcccaagcagcggcgcccctcctcccagcggcggcagcccagccggctccccaacctctaccgaggagggcacctctgagtccgccacccccgagagcggccctggcacctccaccgagcccagcgagggcagcgcacccggcagccctgccggcagccccacctccacagaggagggaaccagcaccgagcccagcgaaggcagcgccccaggcaccagcaccgagcctagtgagggcggctctggcggcggcagcgcccaggagattaaacggatcaacaagatcagaagaagacttgtgaaagacagcaacaccaagaaggccggcaagacaggccccatgaaaaccctgctggttagagtgatgacacccgatctgagagagcggctggaaaacctgagaaagaagcctgaaaatatcccccagcccatcagcaatacatctagagccaacctgaataagctgctgaccgattacaccgaaatgaagaaggcgatcctgcatgtgtactgggaagagttccagaaggaccctgtgggcctgatgagccgggtggcccagcctgccagcaagaagatcgatcagaacaagctgaaacctgagatggacgagaagggcaacctgaccaccgccggctttgcctgctctcagtgtggccagcccctgttcgtgtacaagctggagcaggtgtctgagaagggcaaggcttacaccaactacttcggacggtgcaatgtggccgagcacgaaaagctgatcctgctggcccagctgaagcccgagaaggatagcgacgaagccgtgacatatagcctgggaaagtttgggcagagggccctggatttctacagcattcatgtgaccaaggagtccacccaccccgtgaagcccctggcccagatcgccggaaacagatacgcctccggacctgtgggaaaggccctgagcgacgcatgtatgggcacaatcgcctccttcctgtctaagtaccaggacatcatcatcgaacaccagaaggtggtgaagggcaaccagaagagactggagagcctgcgggagctggccggcaaggaaaacctggaataccctagcgtgaccctgccacctcagcctcacaccaaggagggcgttgatgcctacaacgaagtgatcgcccgggtgcgaatgtgggtgaacctgaacctgtggcagaagctgaagctaagcagagatgatgccaagcctctgctgagactgaagggattcccttcctttcctctggtcgagagacaggccaacgaagtggactggtgggacatggtgtgtaacgtgaagaagctgatcaacgagaaaaaggaggatggcaaggtgttttggcagaatctggctggctacaagagacaggaagccctgagaccatacctgagcagcgaggaagatcggaagaagggaaagaaattcgctcggtaccagctgggcgacctgctgctgcacctggaaaagaagcacggcgaggactggggaaaggtgtacgacgaggcctgggagcggattgacaagaaagtggaaggcctgagcaagcacatcaagctggaagaggaacggagaagcgaggacgcccagagcaaggccgccctgaccgactggctgcgggctaaggccagcttcgtgatcgagggcctgaaggaggccgacaaggacgagttctgcagatgcgagctgaagctgcagaagtggtacggggacctgcggggaaagcccttcgccatcgaagccgagaacagcatcctggacatcagcggcttcagcaagcagtacaactgtgccttcatctggcagaaggacggcgtgaagaagctgaacctgtacctgatcatcaactacttcaagggcggcaagctgcggttcaagaagatcaaacctgaagccttcgaagccaacagattctacaccgtgatcaacaaaaagagcggcgagatcgtgcccatggaggtgaacttcaacttcgacgaccccaacctgatcatcctgcctctggcctttggcaagagacagggcagagaattcatctggaacgacctgctgtccctggaaaccggcagcctgaagctggccaacggaagagtgatcgagaagacactgtacaacagaagaacccggcaggatgagcctgccctgttcgtggccctgaccttcgagcggcgggaggtcctggactcctccaatatcaaaccaatgaacctgatcggcgtggcaagaggcgaaaacatccccgccgtgatcgccctgaccgaccccgagggctgcccactgagccggtttaaggatagcctgggaaacccaacccacatcctgagaatcggcgagagctataaggagaagcagcggaccatccaggccaagaaggaggtggagcagcggagagccggcggctacagccggaagtacgccagcaaagccaagaatctggcagacgatatggtgagaaacaccgctagagatctgctgtactacgccgtgacccaggatgccatgctgatcttcgccaacctgagccggggcttcggccggcagggcaagcggaccttcatggccgagagacagtacacacggatggaggactggctgaccgccaagctggcctacgagggcctgagcaagacctacctgtccaagacactggcccagtacacctccaagacatgcagcaactgtgggtttaccatcaccagcgccgactacgacagggtgctggagaagctgaagaagacagcaacaggctggatgaccacaattaacggcaaggagctgaaggtggagggccagattacctactacaacagatacaagagacagaacgtagtcaaggacctgtccgtcgagctggatagactgagcgaagaatctgtgaacaacgacatctcctcctggacaaagggcagaagcggagaagctctgagcctcctgaagaaaagattctcccatagacccgtgcaggagaagttcgtgtgcctgaactgcggcttcgagacacacgcagccgagcaagccgccctgaacatcgccagatcctggctgttcctgcggagccaggagtacaagaaataccagacaaacaagacaaccggcaacaccgataagagagccttcgtcgagacctggcagtccttttaccggaagaagcttaaggaggtgtggaaacctgccgtgcggtctggcggatctggcggaggctccacaagcatgatcgagtaccagatccccgtgagcttcaaggacgtggtggtgggcttcacccaggaggagtggcaccagctgagccccgcccagagggccctgtacagggacgtgatgctggagacctacagcaacctggtgagcgtgggctacgagggcaccaagcccgacgtgatcctgaggctggagcaggaggaggccccctggatcggcgaggccgcctgcctgggctgccactgctgggaggacaccagccccaagaaaaagagaaaagtctaagctgccttctgcggggcttgccttctggccatgcccttcttctctcccttgcacctgtacctcttggtctttgaataaagcctgagtaggaaggctagcaaaaaaaaaaaaaaaaaaaaaaaaaaaaaaaaaaaaaaaaaaaaaaaaaaaaaaaaaaaaaaaaaaaaaaaaaaaaaaaa

SEQ ID NO: 5923 - RNA, 5797 nt, synthetic construct
  source 1..5797: mol_type = other RNA
aggaaataagagagaaaagaagagtaagaagaaatataagagccaccatggcccctaagaagaagcgtaaagtgagccggatggaacgcctcgtctacgaggtgcggcagaagtgcagaaacatcgaggacatctgcatctcctgcggatctctgaacgtgaccctggagcacccactgttcatcggcggcatgtgccagaactgtaaaaactgttttctggagtgtgcctatcaatacgacgatgacggctaccagagctactgcaccatctgttgcggcggaagagaggtgctgatgtgtggaaataacaactgctgccggtgcttctgcgtggaatgcgtggacctgctggtgggccccggcgccgcccaggccgctattaaggaagatccttggaactgctacatgtgcggccacaagggcacatacggcctgctgagacggagagaggactggcctagcagactgcagatgttcttcgccaataaccacgaccaggagttcgacccccctaaggtgtaccctcccgtccccgccgagaagagaaagcccatccgggtcctgagcctgttcgatggcatcgccaccggtctgctggtgctgaaggacctgggcatccaggtggataggtacattgcctccgaggtgtgcgaggactccatcaccgtgggaatggtgcgtcatcagggcaagatcatgtacgtgggcgacgtgcggagcgtgacacagaagcatatccaggagtggggccctttcgacctggtgatcggcggcagcccttgcaatgacctgagcatcgtgaacccagcccggaagggcctgtacgagggaaccggcagactgttcttcgagttttacagactgctgcacgacgcccggcctaaggaaggcgacgaccggcccttcttttggctgttcgagaatgtggtggccatgggagtcagcgacaagcgggatattagccggttcctggagagcaaccccgtgatgatcgatgccaaggaagtgagcgccgcccaccgggccagatacttctggggcaatctgcctggcatgaacagacccctggccagcaccgtgaacgacaagctggagctgcaggagtgcctggagcacggccggatcgccaagttcagcaaggtgagaaccatcaccacccgaagcaacagcatcaaacaaggcaaggaccagcactttcctgtgttcatgaacgagaaggaggacatcctgtggtgtaccgagatggagagagtgttcgggttcccagtccactacacagatgtcagcaacatgtctagactggccagacagagactgctgggaagaagctggtccgtccctgtgatcagacacctgttcgcccctctgaaggagtacttcgcctgcgtgagcagcggcaacagcaacgccaacagccggggccccagcttctctagcggcctggtgccactgtccctgagagggagccacatgggccccatggagatctacaaaaccgtgagcgcctggaagcggcagcctgtgcgcgtgctgagcctgtttcggaatatcgataaagtcctgaaaagcctgggattcctggagagcggctctggctccggcggtggcaccctgaagtacgtggaggatgtgacaaacgtggtcagacgggatgtggagaagtggggccccttcgatctggtgtacggcagcacccaacccctgggcagctcttgtgaccggtgccctggctggtacatgtttcagttccaccggatcctgcagtacgccctgccgagacaggagtcccagcggccattcttttggattttcatggacaacttgctgctgaccgaggatgaccaggaaactaccactcggttcctgcagaccgaagccgtgaccctgcaggacgtgagaggccgggactaccagaacgccatgcgggtgtggtccaacatccctggactgaaaagcaagcacgcacctctgacccctaaagaagaggagtacctgcaggcccaggtgcggagcagaagcaagctggacgcccctaaggtggatctgctggtgaagaattgcctcctgcccctgagagagtacttcaagtatttcagccagaatagtctgcccctgggcggcccaagcagcggcgcccctcctcccagcggcggcagcccagccggctccccaacctctaccgaggagggcacctctgagtccgccacccccgagagcggccctggcacctccaccgagcccagcgagggcagcgcacccggcagccctgccggcagccccacctccacagaggagggaaccagcaccgagcccagcgaaggcagcgccccaggcaccagcaccgagcctagtgagggcggctctggcggcggcagcgcccaggagattaaacggatcaacaagatcagaagaagacttgtgaaagacagcaacaccaagaaggccggcaagacaggccccatgaaaaccctgctggttagagtgatgacacccgatctgagagagcggctggaaaacctgagaaagaagcctgaaaatatcccccagcccatcagcaatacatctagagccaacctgaataagctgctgaccgattacaccgaaatgaagaaggcgatcctgcatgtgtactgggaagagttccagaaggaccctgtgggcctgatgagccgggtggcccagcctgccagcaagaagatcgatcagaacaagctgaaacctgagatggacgagaagggcaacctgaccaccgccggctttgcctgctctcagtgtggccagcccctgttcgtgtacaagctggagcaggtgtctgagaagggcaaggcttacaccaactacttcggacggtgcaatgtggccgagcacgaaaagctgatcctgctggcccagctgaagcccgagaaggatagcgacgaagccgtgacatatagcctgggaaagtttgggcagagggccctggatttctacagcattcatgtgaccaaggagtccacccaccccgtgaagcccctggcccagatcgccggaaacagatacgcctccggacctgtgggaaaggccctgagcgacgcatgtatgggcacaatcgcctccttcctgtctaagtaccaggacatcatcatcgaacaccagaaggtggtgaagggcaaccagaagagactggagagcctgcgggagctggccggcaaggaaaacctggaataccctagcgtgaccctgccacctcagcctcacaccaaggagggcgttgatgcctacaacgaagtgatcgcccgggtgcgaatgtgggtgaacctgaacctgtggcagaagctgaagctaagcagagatgatgccaagcctctgctgagactgaagggattcccttcctttcctctggtcgagagacaggccaacgaagtggactggtgggacatggtgtgtaacgtgaagaagctgatcaacgagaaaaaggaggatggcaaggtgttttggcagaatctggctggctacaagagacaggaagccctgagaccatacctgagcagcgaggaagatcggaagaagggaaagaaattcgctcggtaccagctgggcgacctgctgctgcacctggaaaagaagcacggcgaggactggggaaaggtgtacgacgaggcctgggagcggattgacaagaaagtggaaggcctgagcaagcacatcaagctggaagaggaacggagaagcgaggacgcccagagcaaggccgccctgaccgactggctgcgggctaaggccagcttcgtgatcgagggcctgaaggaggccgacaaggacgagttctgcagatgcgagctgaagctgcagaagtggtacggggacctgcggggaaagcccttcgccatcgaagccgagaacagcatcctggacatcagcggcttcagcaagcagtacaactgtgccttcatctggcagaaggacggcgtgaagaagctgaacctgtacctgatcatcaactacttcaagggcggcaagctgcggttcaagaagatcaaacctgaagccttcgaagccaacagattctacaccgtgatcaacaaaaagagcggcgagatcgtgcccatggaggtgaacttcaacttcgacgaccccaacctgatcatcctgcctctggcctttggcaagagacagggcagagaattcatctggaacgacctgctgtccctggaaaccggcagcctgaagctggccaacggaagagtgatcgagaagacactgtacaacagaagaacccggcaggatgagcctgccctgttcgtggccctgaccttcgagcggcgggaggtcctggactcctccaatatcaaaccaatgaacctgatcggcgtggcaagaggcgaaaacatccccgccgtgatcgccctgaccgaccccgagggctgcccactgagccggtttaaggatagcctgggaaacccaacccacatcctgagaatcggcgagagctataaggagaagcagcggaccatccaggccaagaaggaggtggagcagcggagagccggcggctacagccggaagtacgccagcaaagccaagaatctggcagacgatatggtgagaaacaccgctagagatctgctgtactacgccgtgacccaggatgccatgctgatcttcgccaacctgagccggggcttcggccggcagggcaagcggaccttcatggccgagagacagtacacacggatggaggactggctgaccgccaagctggcctacgagggcctgagcaagacctacctgtccaagacactggcccagtacacctccaagacatgcagcaactgtgggtttaccatcaccagcgccgactacgacagggtgctggagaagctgaagaagacagcaacaggctggatgaccacaattaacggcaaggagctgaaggtggagggccagattacctactacaacagatacaagagacagaacgtagtcaaggacctgtccgtcgagctggatagactgagcgaagaatctgtgaacaacgacatctcctcctggacaaagggcagaagcggagaagctctgagcctcctgaagaaaagattctcccatagacccgtgcaggagaagttcgtgtgcctgaactgcggcttcgagacacacgcagccgagcaagccgccctgaacatcgccagatcctggctgttcctgcggagccaggagtacaagaaataccagacaaacaagacaaccggcaacaccgataagagagccttcgtcgagacctggcagtccttttaccggaagaagcttaaggaggtgtggaaacctgccgtgcggtctggcggatctggcggaggctccacaagcatggcccaggtgaccttcagcgacgtggccatcgacttcagccacgaggagtgggcctggctggacagcgcccagagggacctgtacaaggacgtgatggtgcagaactacgagaacctggtgagcgtgggcctgagcgtgaccaagccctacgtgatcaccctgctggaggacggcaaggagccctggatggtggagaagaagctgagcaagggcatgatccccgactgggagagcaggtggaccagccccaagaaaaagagaaaagtctaagctgccttctgcggggcttgccttctggccatgcccttcttctctcccttgcacctgtacctcttggtctttgaataaagcctgagtaggaaggctagcaaaaaaaaaaaaaaaaaaaaaaaaaaaaaaaaaaaaaaaaaaaaaaaaaaaaaaaaaaaaaaaaaaaaaaaaaaaaaaaa

SEQ ID NO: 5924 - RNA, 5797 nt, synthetic construct
  source 1..5797: mol_type = other RNA
aggaaataagagagaaaagaagagtaagaagaaatataagagccaccatggcccctaagaagaagcgtaaagtgagccggatggaacgcctcgtctacgaggtgcggcagaagtgcagaaacatcgaggacatctgcatctcctgcggatctctgaacgtgaccctggagcacccactgttcatcggcggcatgtgccagaactgtaaaaactgttttctggagtgtgcctatcaatacgacgatgacggctaccagagctactgcaccatctgttgcggcggaagagaggtgctgatgtgtggaaataacaactgctgccggtgcttctgcgtggaatgcgtggacctgctggtgggccccggcgccgcccaggccgctattaaggaagatccttggaactgctacatgtgcggccacaagggcacatacggcctgctgagacggagagaggactggcctagcagactgcagatgttcttcgccaataaccacgaccaggagttcgacccccctaaggtgtaccctcccgtccccgccgagaagagaaagcccatccgggtcctgagcctgttcgatggcatcgccaccggtctgctggtgctgaaggacctgggcatccaggtggataggtacattgcctccgaggtgtgcgaggactccatcaccgtgggaatggtgcgtcatcagggcaagatcatgtacgtgggcgacgtgcggagcgtgacacagaagcatatccaggagtggggccctttcgacctggtgatcggcggcagcccttgcaatgacctgagcatcgtgaacccagcccggaagggcctgtacgagggaaccggcagactgttcttcgagttttacagactgctgcacgacgcccggcctaaggaaggcgacgaccggcccttcttttggctgttcgagaatgtggtggccatgggagtcagcgacaagcgggatattagccggttcctggagagcaaccccgtgatgatcgatgccaaggaagtgagcgccgcccaccgggccagatacttctggggcaatctgcctggcatgaacagacccctggccagcaccgtgaacgacaagctggagctgcaggagtgcctggagcacggccggatcgccaagttcagcaaggtgagaaccatcaccacccgaagcaacagcatcaaacaaggcaaggaccagcactttcctgtgttcatgaacgagaaggaggacatcctgtggtgtaccgagatggagagagtgttcgggttcccagtccactacacagatgtcagcaacatgtctagactggccagacagagactgctgggaagaagctggtccgtccctgtgatcagacacctgttcgcccctctgaaggagtacttcgcctgcgtgagcagcggcaacagcaacgccaacagccggggccccagcttctctagcggcctggtgccactgtccctgagagggagccacatgggccccatggagatctacaaaaccgtgagcgcctggaagcggcagcctgtgcgcgtgctgagcctgtttcggaatatcgataaagtcctgaaaagcctgggattcctggagagcggctctggctccggcggtggcaccctgaagtacgtggaggatgtgacaaacgtggtcagacgggatgtggagaagtggggccccttcgatctggtgtacggcagcacccaacccctgggcagctcttgtgaccggtgccctggctggtacatgtttcagttccaccggatcctgcagtacgccctgccgagacaggagtcccagcggccattcttttggattttcatggacaacttgctgctgaccgaggatgaccaggaaactaccactcggttcctgcagaccgaagccgtgaccctgcaggacgtgagaggccgggactaccagaacgccatgcgggtgtggtccaacatccctggactgaaaagcaagcacgcacctctgacccctaaagaagaggagtacctgcaggcccaggtgcggagcagaagcaagctggacgcccctaaggtggatctgctggtgaagaattgcctcctgcccctgagagagtacttcaagtatttcagccagaatagtctgcccctgggcggcccaagcagcggcgcccctcctcccagcggcggcagcccagccggctccccaacctctaccgaggagggcacctctgagtccgccacccccgagagcggccctggcacctccaccgagcccagcgagggcagcgcacccggcagccctgccggcagccccacctccacagaggagggaaccagcaccgagcccagcgaaggcagcgccccaggcaccagcaccgagcctagtgagggcggctctggcggcggcagcgcccaggagattaaacggatcaacaagatcagaagaagacttgtgaaagacagcaacaccaagaaggccggcaagacaggccccatgaaaaccctgctggttagagtgatgacacccgatctgagagagcggctggaaaacctgagaaagaagcctgaaaatatcccccagcccatcagcaatacatctagagccaacctgaataagctgctgaccgattacaccgaaatgaagaaggcgatcctgcatgtgtactgggaagagttccagaaggaccctgtgggcctgatgagccgggtggcccagcctgccagcaagaagatcgatcagaacaagctgaaacctgagatggacgagaagggcaacctgaccaccgccggctttgcctgctctcagtgtggccagcccctgttcgtgtacaagctggagcaggtgtctgagaagggcaaggcttacaccaactacttcggacggtgcaatgtggccgagcacgaaaagctgatcctgctggcccagctgaagcccgagaaggatagcgacgaagccgtgacatatagcctgggaaagtttgggcagagggccctggatttctacagcattcatgtgaccaaggagtccacccaccccgtgaagcccctggcccagatcgccggaaacagatacgcctccggacctgtgggaaaggccctgagcgacgcatgtatgggcacaatcgcctccttcctgtctaagtaccaggacatcatcatcgaacaccagaaggtggtgaagggcaaccagaagagactggagagcctgcgggagctggccggcaaggaaaacctggaataccctagcgtgaccctgccacctcagcctcacaccaaggagggcgttgatgcctacaacgaagtgatcgcccgggtgcgaatgtgggtgaacctgaacctgtggcagaagctgaagctaagcagagatgatgccaagcctctgctgagactgaagggattcccttcctttcctctggtcgagagacaggccaacgaagtggactggtgggacatggtgtgtaacgtgaagaagctgatcaacgagaaaaaggaggatggcaaggtgttttggcagaatctggctggctacaagagacaggaagccctgagaccatacctgagcagcgaggaagatcggaagaagggaaagaaattcgctcggtaccagctgggcgacctgctgctgcacctggaaaagaagcacggcgaggactggggaaaggtgtacgacgaggcctgggagcggattgacaagaaagtggaaggcctgagcaagcacatcaagctggaagaggaacggagaagcgaggacgcccagagcaaggccgccctgaccgactggctgcgggctaaggccagcttcgtgatcgagggcctgaaggaggccgacaaggacgagttctgcagatgcgagctgaagctgcagaagtggtacggggacctgcggggaaagcccttcgccatcgaagccgagaacagcatcctggacatcagcggcttcagcaagcagtacaactgtgccttcatctggcagaaggacggcgtgaagaagctgaacctgtacctgatcatcaactacttcaagggcggcaagctgcggttcaagaagatcaaacctgaagccttcgaagccaacagattctacaccgtgatcaacaaaaagagcggcgagatcgtgcccatggaggtgaacttcaacttcgacgaccccaacctgatcatcctgcctctggcctttggcaagagacagggcagagaattcatctggaacgacctgctgtccctggaaaccggcagcctgaagctggccaacggaagagtgatcgagaagacactgtacaacagaagaacccggcaggatgagcctgccctgttcgtggccctgaccttcgagcggcgggaggtcctggactcctccaatatcaaaccaatgaacctgatcggcgtggcaagaggcgaaaacatccccgccgtgatcgccctgaccgaccccgagggctgcccactgagccggtttaaggatagcctgggaaacccaacccacatcctgagaatcggcgagagctataaggagaagcagcggaccatccaggccaagaaggaggtggagcagcggagagccggcggctacagccggaagtacgccagcaaagccaagaatctggcagacgatatggtgagaaacaccgctagagatctgctgtactacgccgtgacccaggatgccatgctgatcttcgccaacctgagccggggcttcggccggcagggcaagcggaccttcatggccgagagacagtacacacggatggaggactggctgaccgccaagctggcctacgagggcctgagcaagacctacctgtccaagacactggcccagtacacctccaagacatgcagcaactgtgggtttaccatcaccagcgccgactacgacagggtgctggagaagctgaagaagacagcaacaggctggatgaccacaattaacggcaaggagctgaaggtggagggccagattacctactacaacagatacaagagacagaacgtagtcaaggacctgtccgtcgagctggatagactgagcgaagaatctgtgaacaacgacatctcctcctggacaaagggcagaagcggagaagctctgagcctcctgaagaaaagattctcccatagacccgtgcaggagaagttcgtgtgcctgaactgcggcttcgagacacacgcagccgagcaagccgccctgaacatcgccagatcctggctgttcctgcggagccaggagtacaagaaataccagacaaacaagacaaccggcaacaccgataagagagccttcgtcgagacctggcagtccttttaccggaagaagcttaaggaggtgtggaaacctgccgtgcggtctggcggatctggcggaggctccacaagcaggctggagagcgtgaccttcgaggacgtggccgtgtacttcacccagaaccagtgggccagcctggaccccgcccagagggccctgtacggcgaggtgatgctggagaactacgccaacgtggccagcctggtggccttccccttccccaagcccgccctgatcagccacctggagaggggcgaggccccctggggccccgacccctgggacaccaagatccccaggggcatcagccagggcaccagccccaagaaaaagagaaaagtctaagctgccttctgcggggcttgccttctggccatgcccttcttctctcccttgcacctgtacctcttggtctttgaataaagcctgagtaggaaggctagcaaaaaaaaaaaaaaaaaaaaaaaaaaaaaaaaaaaaaaaaaaaaaaaaaaaaaaaaaaaaaaaaaaaaaaaaaaaaaaaa

SEQ ID NO: 5925 - RNA, 5797 nt, synthetic construct
  source 1..5797: mol_type = other RNA
aggaaataagagagaaaagaagagtaagaagaaatataagagccaccatggcccctaagaagaagcgtaaagtgagccggatggaacgcctcgtctacgaggtgcggcagaagtgcagaaacatcgaggacatctgcatctcctgcggatctctgaacgtgaccctggagcacccactgttcatcggcggcatgtgccagaactgtaaaaactgttttctggagtgtgcctatcaatacgacgatgacggctaccagagctactgcaccatctgttgcggcggaagagaggtgctgatgtgtggaaataacaactgctgccggtgcttctgcgtggaatgcgtggacctgctggtgggccccggcgccgcccaggccgctattaaggaagatccttggaactgctacatgtgcggccacaagggcacatacggcctgctgagacggagagaggactggcctagcagactgcagatgttcttcgccaataaccacgaccaggagttcgacccccctaaggtgtaccctcccgtccccgccgagaagagaaagcccatccgggtcctgagcctgttcgatggcatcgccaccggtctgctggtgctgaaggacctgggcatccaggtggataggtacattgcctccgaggtgtgcgaggactccatcaccgtgggaatggtgcgtcatcagggcaagatcatgtacgtgggcgacgtgcggagcgtgacacagaagcatatccaggagtggggccctttcgacctggtgatcggcggcagcccttgcaatgacctgagcatcgtgaacccagcccggaagggcctgtacgagggaaccggcagactgttcttcgagttttacagactgctgcacgacgcccggcctaaggaaggcgacgaccggcccttcttttggctgttcgagaatgtggtggccatgggagtcagcgacaagcgggatattagccggttcctggagagcaaccccgtgatgatcgatgccaaggaagtgagcgccgcccaccgggccagatacttctggggcaatctgcctggcatgaacagacccctggccagcaccgtgaacgacaagctggagctgcaggagtgcctggagcacggccggatcgccaagttcagcaaggtgagaaccatcaccacccgaagcaacagcatcaaacaaggcaaggaccagcactttcctgtgttcatgaacgagaaggaggacatcctgtggtgtaccgagatggagagagtgttcgggttcccagtccactacacagatgtcagcaacatgtctagactggccagacagagactgctgggaagaagctggtccgtccctgtgatcagacacctgttcgcccctctgaaggagtacttcgcctgcgtgagcagcggcaacagcaacgccaacagccggggccccagcttctctagcggcctggtgccactgtccctgagagggagccacatgggccccatggagatctacaaaaccgtgagcgcctggaagcggcagcctgtgcgcgtgctgagcctgtttcggaatatcgataaagtcctgaaaagcctgggattcctggagagcggctctggctccggcggtggcaccctgaagtacgtggaggatgtgacaaacgtggtcagacgggatgtggagaagtggggccccttcgatctggtgtacggcagcacccaacccctgggcagctcttgtgaccggtgccctggctggtacatgtttcagttccaccggatcctgcagtacgccctgccgagacaggagtcccagcggccattcttttggattttcatggacaacttgctgctgaccgaggatgaccaggaaactaccactcggttcctgcagaccgaagccgtgaccctgcaggacgtgagaggccgggactaccagaacgccatgcgggtgtggtccaacatccctggactgaaaagcaagcacgcacctctgacccctaaagaagaggagtacctgcaggcccaggtgcggagcagaagcaagctggacgcccctaaggtggatctgctggtgaagaattgcctcctgcccctgagagagtacttcaagtatttcagccagaatagtctgcccctgggcggcccaagcagcggcgcccctcctcccagcggcggcagcccagccggctccccaacctctaccgaggagggcacctctgagtccgccacccccgagagcggccctggcacctccaccgagcccagcgagggcagcgcacccggcagccctgccggcagccccacctccacagaggagggaaccagcaccgagcccagcgaaggcagcgccccaggcaccagcaccgagcctagtgagggcggctctggcggcggcagcgcccaggagattaaacggatcaacaagatcagaagaagacttgtgaaagacagcaacaccaagaaggccggcaagacaggccccatgaaaaccctgctggttagagtgatgacacccgatctgagagagcggctggaaaacctgagaaagaagcctgaaaatatcccccagcccatcagcaatacatctagagccaacctgaataagctgctgaccgattacaccgaaatgaagaaggcgatcctgcatgtgtactgggaagagttccagaaggaccctgtgggcctgatgagccgggtggcccagcctgccagcaagaagatcgatcagaacaagctgaaacctgagatggacgagaagggcaacctgaccaccgccggctttgcctgctctcagtgtggccagcccctgttcgtgtacaagctggagcaggtgtctgagaagggcaaggcttacaccaactacttcggacggtgcaatgtggccgagcacgaaaagctgatcctgctggcccagctgaagcccgagaaggatagcgacgaagccgtgacatatagcctgggaaagtttgggcagagggccctggatttctacagcattcatgtgaccaaggagtccacccaccccgtgaagcccctggcccagatcgccggaaacagatacgcctccggacctgtgggaaaggccctgagcgacgcatgtatgggcacaatcgcctccttcctgtctaagtaccaggacatcatcatcgaacaccagaaggtggtgaagggcaaccagaagagactggagagcctgcgggagctggccggcaaggaaaacctggaataccctagcgtgaccctgccacctcagcctcacaccaaggagggcgttgatgcctacaacgaagtgatcgcccgggtgcgaatgtgggtgaacctgaacctgtggcagaagctgaagctaagcagagatgatgccaagcctctgctgagactgaagggattcccttcctttcctctggtcgagagacaggccaacgaagtggactggtgggacatggtgtgtaacgtgaagaagctgatcaacgagaaaaaggaggatggcaaggtgttttggcagaatctggctggctacaagagacaggaagccctgagaccatacctgagcagcgaggaagatcggaagaagggaaagaaattcgctcggtaccagctgggcgacctgctgctgcacctggaaaagaagcacggcgaggactggggaaaggtgtacgacgaggcctgggagcggattgacaagaaagtggaaggcctgagcaagcacatcaagctggaagaggaacggagaagcgaggacgcccagagcaaggccgccctgaccgactggctgcgggctaaggccagcttcgtgatcgagggcctgaaggaggccgacaaggacgagttctgcagatgcgagctgaagctgcagaagtggtacggggacctgcggggaaagcccttcgccatcgaagccgagaacagcatcctggacatcagcggcttcagcaagcagtacaactgtgccttcatctggcagaaggacggcgtgaagaagctgaacctgtacctgatcatcaactacttcaagggcggcaagctgcggttcaagaagatcaaacctgaagccttcgaagccaacagattctacaccgtgatcaacaaaaagagcggcgagatcgtgcccatggaggtgaacttcaacttcgacgaccccaacctgatcatcctgcctctggcctttggcaagagacagggcagagaattcatctggaacgacctgctgtccctggaaaccggcagcctgaagctggccaacggaagagtgatcgagaagacactgtacaacagaagaacccggcaggatgagcctgccctgttcgtggccctgaccttcgagcggcgggaggtcctggactcctccaatatcaaaccaatgaacctgatcggcgtggcaagaggcgaaaacatccccgccgtgatcgccctgaccgaccccgagggctgcccactgagccggtttaaggatagcctgggaaacccaacccacatcctgagaatcggcgagagctataaggagaagcagcggaccatccaggccaagaaggaggtggagcagcggagagccggcggctacagccggaagtacgccagcaaagccaagaatctggcagacgatatggtgagaaacaccgctagagatctgctgtactacgccgtgacccaggatgccatgctgatcttcgccaacctgagccggggcttcggccggcagggcaagcggaccttcatggccgagagacagtacacacggatggaggactggctgaccgccaagctggcctacgagggcctgagcaagacctacctgtccaagacactggcccagtacacctccaagacatgcagcaactgtgggtttaccatcaccagcgccgactacgacagggtgctggagaagctgaagaagacagcaacaggctggatgaccacaattaacggcaaggagctgaaggtggagggccagattacctactacaacagatacaagagacagaacgtagtcaaggacctgtccgtcgagctggatagactgagcgaagaatctgtgaacaacgacatctcctcctggacaaagggcagaagcggagaagctctgagcctcctgaagaaaagattctcccatagacccgtgcaggagaagttcgtgtgcctgaactgcggcttcgagacacacgcagccgagcaagccgccctgaacatcgccagatcctggctgttcctgcggagccaggagtacaagaaataccagacaaacaagacaaccggcaacaccgataagagagccttcgtcgagacctggcagtccttttaccggaagaagcttaaggaggtgtggaaacctgccgtgcggtctggcggatctggcggaggctccacaagctgccaggagaccctgaccttcaaggacgtggccgtggacttcaccagggaggagtggggccagctgggccccgcccagagggacctgtacaaggaggtgatgctggacaactacaggaacctgatcagcctgggcctgcagggcagcaagcccgacgtgatcttctggctggagaggggccagagcccctggaccctgaagaggaggaagagcagggactgctgccccgagttccacctgcacaccagccccaagaaaaagagaaaagtctaagctgccttctgcggggcttgccttctggccatgcccttcttctctcccttgcacctgtacctcttggtctttgaataaagcctgagtaggaaggctagcaaaaaaaaaaaaaaaaaaaaaaaaaaaaaaaaaaaaaaaaaaaaaaaaaaaaaaaaaaaaaaaaaaaaaaaaaaaaaaaa

SEQ ID NO: 5926 - RNA, 5797 nt, synthetic construct
  source 1..5797: mol_type = other RNA
aggaaataagagagaaaagaagagtaagaagaaatataagagccaccatggcccctaagaagaagcgtaaagtgagccggatggaacgcctcgtctacgaggtgcggcagaagtgcagaaacatcgaggacatctgcatctcctgcggatctctgaacgtgaccctggagcacccactgttcatcggcggcatgtgccagaactgtaaaaactgttttctggagtgtgcctatcaatacgacgatgacggctaccagagctactgcaccatctgttgcggcggaagagaggtgctgatgtgtggaaataacaactgctgccggtgcttctgcgtggaatgcgtggacctgctggtgggccccggcgccgcccaggccgctattaaggaagatccttggaactgctacatgtgcggccacaagggcacatacggcctgctgagacggagagaggactggcctagcagactgcagatgttcttcgccaataaccacgaccaggagttcgacccccctaaggtgtaccctcccgtccccgccgagaagagaaagcccatccgggtcctgagcctgttcgatggcatcgccaccggtctgctggtgctgaaggacctgggcatccaggtggataggtacattgcctccgaggtgtgcgaggactccatcaccgtgggaatggtgcgtcatcagggcaagatcatgtacgtgggcgacgtgcggagcgtgacacagaagcatatccaggagtggggccctttcgacctggtgatcggcggcagcccttgcaatgacctgagcatcgtgaacccagcccggaagggcctgtacgagggaaccggcagactgttcttcgagttttacagactgctgcacgacgcccggcctaaggaaggcgacgaccggcccttcttttggctgttcgagaatgtggtggccatgggagtcagcgacaagcgggatattagccggttcctggagagcaaccccgtgatgatcgatgccaaggaagtgagcgccgcccaccgggccagatacttctggggcaatctgcctggcatgaacagacccctggccagcaccgtgaacgacaagctggagctgcaggagtgcctggagcacggccggatcgccaagttcagcaaggtgagaaccatcaccacccgaagcaacagcatcaaacaaggcaaggaccagcactttcctgtgttcatgaacgagaaggaggacatcctgtggtgtaccgagatggagagagtgttcgggttcccagtccactacacagatgtcagcaacatgtctagactggccagacagagactgctgggaagaagctggtccgtccctgtgatcagacacctgttcgcccctctgaaggagtacttcgcctgcgtgagcagcggcaacagcaacgccaacagccggggccccagcttctctagcggcctggtgccactgtccctgagagggagccacatgggccccatggagatctacaaaaccgtgagcgcctggaagcggcagcctgtgcgcgtgctgagcctgtttcggaatatcgataaagtcctgaaaagcctgggattcctggagagcggctctggctccggcggtggcaccctgaagtacgtggaggatgtgacaaacgtggtcagacgggatgtggagaagtggggccccttcgatctggtgtacggcagcacccaacccctgggcagctcttgtgaccggtgccctggctggtacatgtttcagttccaccggatcctgcagtacgccctgccgagacaggagtcccagcggccattcttttggattttcatggacaacttgctgctgaccgaggatgaccaggaaactaccactcggttcctgcagaccgaagccgtgaccctgcaggacgtgagaggccgggactaccagaacgccatgcgggtgtggtccaacatccctggactgaaaagcaagcacgcacctctgacccctaaagaagaggagtacctgcaggcccaggtgcggagcagaagcaagctggacgcccctaaggtggatctgctggtgaagaattgcctcctgcccctgagagagtacttcaagtatttcagccagaatagtctgcccctgggcggcccaagcagcggcgcccctcctcccagcggcggcagcccagccggctccccaacctctaccgaggagggcacctctgagtccgccacccccgagagcggccctggcacctccaccgagcccagcgagggcagcgcacccggcagccctgccggcagccccacctccacagaggagggaaccagcaccgagcccagcgaaggcagcgccccaggcaccagcaccgagcctagtgagggcggctctggcggcggcagcgcccaggagattaaacggatcaacaagatcagaagaagacttgtgaaagacagcaacaccaagaaggccggcaagacaggccccatgaaaaccctgctggttagagtgatgacacccgatctgagagagcggctggaaaacctgagaaagaagcctgaaaatatcccccagcccatcagcaatacatctagagccaacctgaataagctgctgaccgattacaccgaaatgaagaaggcgatcctgcatgtgtactgggaagagttccagaaggaccctgtgggcctgatgagccgggtggcccagcctgccagcaagaagatcgatcagaacaagctgaaacctgagatggacgagaagggcaacctgaccaccgccggctttgcctgctctcagtgtggccagcccctgttcgtgtacaagctggagcaggtgtctgagaagggcaaggcttacaccaactacttcggacggtgcaatgtggccgagcacgaaaagctgatcctgctggcccagctgaagcccgagaaggatagcgacgaagccgtgacatatagcctgggaaagtttgggcagagggccctggatttctacagcattcatgtgaccaaggagtccacccaccccgtgaagcccctggcccagatcgccggaaacagatacgcctccggacctgtgggaaaggccctgagcgacgcatgtatgggcacaatcgcctccttcctgtctaagtaccaggacatcatcatcgaacaccagaaggtggtgaagggcaaccagaagagactggagagcctgcgggagctggccggcaaggaaaacctggaataccctagcgtgaccctgccacctcagcctcacaccaaggagggcgttgatgcctacaacgaagtgatcgcccgggtgcgaatgtgggtgaacctgaacctgtggcagaagctgaagctaagcagagatgatgccaagcctctgctgagactgaagggattcccttcctttcctctggtcgagagacaggccaacgaagtggactggtgggacatggtgtgtaacgtgaagaagctgatcaacgagaaaaaggaggatggcaaggtgttttggcagaatctggctggctacaagagacaggaagccctgagaccatacctgagcagcgaggaagatcggaagaagggaaagaaattcgctcggtaccagctgggcgacctgctgctgcacctggaaaagaagcacggcgaggactggggaaaggtgtacgacgaggcctgggagcggattgacaagaaagtggaaggcctgagcaagcacatcaagctggaagaggaacggagaagcgaggacgcccagagcaaggccgccctgaccgactggctgcgggctaaggccagcttcgtgatcgagggcctgaaggaggccgacaaggacgagttctgcagatgcgagctgaagctgcagaagtggtacggggacctgcggggaaagcccttcgccatcgaagccgagaacagcatcctggacatcagcggcttcagcaagcagtacaactgtgccttcatctggcagaaggacggcgtgaagaagctgaacctgtacctgatcatcaactacttcaagggcggcaagctgcggttcaagaagatcaaacctgaagccttcgaagccaacagattctacaccgtgatcaacaaaaagagcggcgagatcgtgcccatggaggtgaacttcaacttcgacgaccccaacctgatcatcctgcctctggcctttggcaagagacagggcagagaattcatctggaacgacctgctgtccctggaaaccggcagcctgaagctggccaacggaagagtgatcgagaagacactgtacaacagaagaacccggcaggatgagcctgccctgttcgtggccctgaccttcgagcggcgggaggtcctggactcctccaatatcaaaccaatgaacctgatcggcgtggcaagaggcgaaaacatccccgccgtgatcgccctgaccgaccccgagggctgcccactgagccggtttaaggatagcctgggaaacccaacccacatcctgagaatcggcgagagctataaggagaagcagcggaccatccaggccaagaaggaggtggagcagcggagagccggcggctacagccggaagtacgccagcaaagccaagaatctggcagacgatatggtgagaaacaccgctagagatctgctgtactacgccgtgacccaggatgccatgctgatcttcgccaacctgagccggggcttcggccggcagggcaagcggaccttcatggccgagagacagtacacacggatggaggactggctgaccgccaagctggcctacgagggcctgagcaagacctacctgtccaagacactggcccagtacacctccaagacatgcagcaactgtgggtttaccatcaccagcgccgactacgacagggtgctggagaagctgaagaagacagcaacaggctggatgaccacaattaacggcaaggagctgaaggtggagggccagattacctactacaacagatacaagagacagaacgtagtcaaggacctgtccgtcgagctggatagactgagcgaagaatctgtgaacaacgacatctcctcctggacaaagggcagaagcggagaagctctgagcctcctgaagaaaagattctcccatagacccgtgcaggagaagttcgtgtgcctgaactgcggcttcgagacacacgcagccgagcaagccgccctgaacatcgccagatcctggctgttcctgcggagccaggagtacaagaaataccagacaaacaagacaaccggcaacaccgataagagagccttcgtcgagacctggcagtccttttaccggaagaagcttaaggaggtgtggaaacctgccgtgcggtctggcggatctggcggaggctccacaagcgcccaggagagcgtgatgttcagcgacgtgagcatcgacttcagccaggaggagtgggagtgcctgaacgacgaccagagggacctgtacagggacgtgatgctggagaactacagccacctggtgagcatgggccacagcgtgagcaagcccgacgtgatcagcttcctggagcagggcaaggagccctggctggtggacagggagctgaccagggaccagtggcccgtgctggagagcaggaccagccccaagaaaaagagaaaagtctaagctgccttctgcggggcttgccttctggccatgcccttcttctctcccttgcacctgtacctcttggtctttgaataaagcctgagtaggaaggctagcaaaaaaaaaaaaaaaaaaaaaaaaaaaaaaaaaaaaaaaaaaaaaaaaaaaaaaaaaaaaaaaaaaaaaaaaaaaaaaaa

SEQ ID NO: 5927 - RNA, 5797 nt, synthetic construct
  source 1..5797: mol_type = other RNA
aggaaataagagagaaaagaagagtaagaagaaatataagagccaccatggcccctaagaagaagcgtaaagtgagccggatggaacgcctcgtctacgaggtgcggcagaagtgcagaaacatcgaggacatctgcatctcctgcggatctctgaacgtgaccctggagcacccactgttcatcggcggcatgtgccagaactgtaaaaactgttttctggagtgtgcctatcaatacgacgatgacggctaccagagctactgcaccatctgttgcggcggaagagaggtgctgatgtgtggaaataacaactgctgccggtgcttctgcgtggaatgcgtggacctgctggtgggccccggcgccgcccaggccgctattaaggaagatccttggaactgctacatgtgcggccacaagggcacatacggcctgctgagacggagagaggactggcctagcagactgcagatgttcttcgccaataaccacgaccaggagttcgacccccctaaggtgtaccctcccgtccccgccgagaagagaaagcccatccgggtcctgagcctgttcgatggcatcgccaccggtctgctggtgctgaaggacctgggcatccaggtggataggtacattgcctccgaggtgtgcgaggactccatcaccgtgggaatggtgcgtcatcagggcaagatcatgtacgtgggcgacgtgcggagcgtgacacagaagcatatccaggagtggggccctttcgacctggtgatcggcggcagcccttgcaatgacctgagcatcgtgaacccagcccggaagggcctgtacgagggaaccggcagactgttcttcgagttttacagactgctgcacgacgcccggcctaaggaaggcgacgaccggcccttcttttggctgttcgagaatgtggtggccatgggagtcagcgacaagcgggatattagccggttcctggagagcaaccccgtgatgatcgatgccaaggaagtgagcgccgcccaccgggccagatacttctggggcaatctgcctggcatgaacagacccctggccagcaccgtgaacgacaagctggagctgcaggagtgcctggagcacggccggatcgccaagttcagcaaggtgagaaccatcaccacccgaagcaacagcatcaaacaaggcaaggaccagcactttcctgtgttcatgaacgagaaggaggacatcctgtggtgtaccgagatggagagagtgttcgggttcccagtccactacacagatgtcagcaacatgtctagactggccagacagagactgctgggaagaagctggtccgtccctgtgatcagacacctgttcgcccctctgaaggagtacttcgcctgcgtgagcagcggcaacagcaacgccaacagccggggccccagcttctctagcggcctggtgccactgtccctgagagggagccacatgggccccatggagatctacaaaaccgtgagcgcctggaagcggcagcctgtgcgcgtgctgagcctgtttcggaatatcgataaagtcctgaaaagcctgggattcctggagagcggctctggctccggcggtggcaccctgaagtacgtggaggatgtgacaaacgtggtcagacgggatgtggagaagtggggccccttcgatctggtgtacggcagcacccaacccctgggcagctcttgtgaccggtgccctggctggtacatgtttcagttccaccggatcctgcagtacgccctgccgagacaggagtcccagcggccattcttttggattttcatggacaacttgctgctgaccgaggatgaccaggaaactaccactcggttcctgcagaccgaagccgtgaccctgcaggacgtgagaggccgggactaccagaacgccatgcgggtgtggtccaacatccctggactgaaaagcaagcacgcacctctgacccctaaagaagaggagtacctgcaggcccaggtgcggagcagaagcaagctggacgcccctaaggtggatctgctggtgaagaattgcctcctgcccctgagagagtacttcaagtatttcagccagaatagtctgcccctgggcggcccaagcagcggcgcccctcctcccagcggcggcagcccagccggctccccaacctctaccgaggagggcacctctgagtccgccacccccgagagcggccctggcacctccaccgagcccagcgagggcagcgcacccggcagccctgccggcagccccacctccacagaggagggaaccagcaccgagcccagcgaaggcagcgccccaggcaccagcaccgagcctagtgagggcggctctggcggcggcagcgcccaggagattaaacggatcaacaagatcagaagaagacttgtgaaagacagcaacaccaagaaggccggcaagacaggccccatgaaaaccctgctggttagagtgatgacacccgatctgagagagcggctggaaaacctgagaaagaagcctgaaaatatcccccagcccatcagcaatacatctagagccaacctgaataagctgctgaccgattacaccgaaatgaagaaggcgatcctgcatgtgtactgggaagagttccagaaggaccctgtgggcctgatgagccgggtggcccagcctgccagcaagaagatcgatcagaacaagctgaaacctgagatggacgagaagggcaacctgaccaccgccggctttgcctgctctcagtgtggccagcccctgttcgtgtacaagctggagcaggtgtctgagaagggcaaggcttacaccaactacttcggacggtgcaatgtggccgagcacgaaaagctgatcctgctggcccagctgaagcccgagaaggatagcgacgaagccgtgacatatagcctgggaaagtttgggcagagggccctggatttctacagcattcatgtgaccaaggagtccacccaccccgtgaagcccctggcccagatcgccggaaacagatacgcctccggacctgtgggaaaggccctgagcgacgcatgtatgggcacaatcgcctccttcctgtctaagtaccaggacatcatcatcgaacaccagaaggtggtgaagggcaaccagaagagactggagagcctgcgggagctggccggcaaggaaaacctggaataccctagcgtgaccctgccacctcagcctcacaccaaggagggcgttgatgcctacaacgaagtgatcgcccgggtgcgaatgtgggtgaacctgaacctgtggcagaagctgaagctaagcagagatgatgccaagcctctgctgagactgaagggattcccttcctttcctctggtcgagagacaggccaacgaagtggactggtgggacatggtgtgtaacgtgaagaagctgatcaacgagaaaaaggaggatggcaaggtgttttggcagaatctggctggctacaagagacaggaagccctgagaccatacctgagcagcgaggaagatcggaagaagggaaagaaattcgctcggtaccagctgggcgacctgctgctgcacctggaaaagaagcacggcgaggactggggaaaggtgtacgacgaggcctgggagcggattgacaagaaagtggaaggcctgagcaagcacatcaagctggaagaggaacggagaagcgaggacgcccagagcaaggccgccctgaccgactggctgcgggctaaggccagcttcgtgatcgagggcctgaaggaggccgacaaggacgagttctgcagatgcgagctgaagctgcagaagtggtacggggacctgcggggaaagcccttcgccatcgaagccgagaacagcatcctggacatcagcggcttcagcaagcagtacaactgtgccttcatctggcagaaggacggcgtgaagaagctgaacctgtacctgatcatcaactacttcaagggcggcaagctgcggttcaagaagatcaaacctgaagccttcgaagccaacagattctacaccgtgatcaacaaaaagagcggcgagatcgtgcccatggaggtgaacttcaacttcgacgaccccaacctgatcatcctgcctctggcctttggcaagagacagggcagagaattcatctggaacgacctgctgtccctggaaaccggcagcctgaagctggccaacggaagagtgatcgagaagacactgtacaacagaagaacccggcaggatgagcctgccctgttcgtggccctgaccttcgagcggcgggaggtcctggactcctccaatatcaaaccaatgaacctgatcggcgtggcaagaggcgaaaacatccccgccgtgatcgccctgaccgaccccgagggctgcccactgagccggtttaaggatagcctgggaaacccaacccacatcctgagaatcggcgagagctataaggagaagcagcggaccatccaggccaagaaggaggtggagcagcggagagccggcggctacagccggaagtacgccagcaaagccaagaatctggcagacgatatggtgagaaacaccgctagagatctgctgtactacgccgtgacccaggatgccatgctgatcttcgccaacctgagccggggcttcggccggcagggcaagcggaccttcatggccgagagacagtacacacggatggaggactggctgaccgccaagctggcctacgagggcctgagcaagacctacctgtccaagacactggcccagtacacctccaagacatgcagcaactgtgggtttaccatcaccagcgccgactacgacagggtgctggagaagctgaagaagacagcaacaggctggatgaccacaattaacggcaaggagctgaaggtggagggccagattacctactacaacagatacaagagacagaacgtagtcaaggacctgtccgtcgagctggatagactgagcgaagaatctgtgaacaacgacatctcctcctggacaaagggcagaagcggagaagctctgagcctcctgaagaaaagattctcccatagacccgtgcaggagaagttcgtgtgcctgaactgcggcttcgagacacacgcagccgagcaagccgccctgaacatcgccagatcctggctgttcctgcggagccaggagtacaagaaataccagacaaacaagacaaccggcaacaccgataagagagccttcgtcgagacctggcagtccttttaccggaagaagcttaaggaggtgtggaaacctgccgtgcggtctggcggatctggcggaggctccacaagcatgatcgagtaccagatccccgtgagcttcaaggacgtggtggtgggcttcacccaggaggagtggcaccagctgagccccgcccagagggccctgtacagggacgtgatgctggagacctacagcaacctggtgagcgtgggctacgagggcaccaagcccgacgtgatcctgaggctggagcaggaggaggccccctggatcggcgaggccgcctgcctgggctgccactgctggggcatcaccagccccaagaaaaagagaaaagtctaagctgccttctgcggggcttgccttctggccatgcccttcttctctcccttgcacctgtacctcttggtctttgaataaagcctgagtaggaaggctagcaaaaaaaaaaaaaaaaaaaaaaaaaaaaaaaaaaaaaaaaaaaaaaaaaaaaaaaaaaaaaaaaaaaaaaaaaaaaaaaa

SEQ ID NO: 5928 - RNA, 5797 nt, synthetic construct
  source 1..5797: mol_type = other RNA
aggaaataagagagaaaagaagagtaagaagaaatataagagccaccatggcccctaagaagaagcgtaaagtgagccggatggaacgcctcgtctacgaggtgcggcagaagtgcagaaacatcgaggacatctgcatctcctgcggatctctgaacgtgaccctggagcacccactgttcatcggcggcatgtgccagaactgtaaaaactgttttctggagtgtgcctatcaatacgacgatgacggctaccagagctactgcaccatctgttgcggcggaagagaggtgctgatgtgtggaaataacaactgctgccggtgcttctgcgtggaatgcgtggacctgctggtgggccccggcgccgcccaggccgctattaaggaagatccttggaactgctacatgtgcggccacaagggcacatacggcctgctgagacggagagaggactggcctagcagactgcagatgttcttcgccaataaccacgaccaggagttcgacccccctaaggtgtaccctcccgtccccgccgagaagagaaagcccatccgggtcctgagcctgttcgatggcatcgccaccggtctgctggtgctgaaggacctgggcatccaggtggataggtacattgcctccgaggtgtgcgaggactccatcaccgtgggaatggtgcgtcatcagggcaagatcatgtacgtgggcgacgtgcggagcgtgacacagaagcatatccaggagtggggccctttcgacctggtgatcggcggcagcccttgcaatgacctgagcatcgtgaacccagcccggaagggcctgtacgagggaaccggcagactgttcttcgagttttacagactgctgcacgacgcccggcctaaggaaggcgacgaccggcccttcttttggctgttcgagaatgtggtggccatgggagtcagcgacaagcgggatattagccggttcctggagagcaaccccgtgatgatcgatgccaaggaagtgagcgccgcccaccgggccagatacttctggggcaatctgcctggcatgaacagacccctggccagcaccgtgaacgacaagctggagctgcaggagtgcctggagcacggccggatcgccaagttcagcaaggtgagaaccatcaccacccgaagcaacagcatcaaacaaggcaaggaccagcactttcctgtgttcatgaacgagaaggaggacatcctgtggtgtaccgagatggagagagtgttcgggttcccagtccactacacagatgtcagcaacatgtctagactggccagacagagactgctgggaagaagctggtccgtccctgtgatcagacacctgttcgcccctctgaaggagtacttcgcctgcgtgagcagcggcaacagcaacgccaacagccggggccccagcttctctagcggcctggtgccactgtccctgagagggagccacatgggccccatggagatctacaaaaccgtgagcgcctggaagcggcagcctgtgcgcgtgctgagcctgtttcggaatatcgataaagtcctgaaaagcctgggattcctggagagcggctctggctccggcggtggcaccctgaagtacgtggaggatgtgacaaacgtggtcagacgggatgtggagaagtggggccccttcgatctggtgtacggcagcacccaacccctgggcagctcttgtgaccggtgccctggctggtacatgtttcagttccaccggatcctgcagtacgccctgccgagacaggagtcccagcggccattcttttggattttcatggacaacttgctgctgaccgaggatgaccaggaaactaccactcggttcctgcagaccgaagccgtgaccctgcaggacgtgagaggccgggactaccagaacgccatgcgggtgtggtccaacatccctggactgaaaagcaagcacgcacctctgacccctaaagaagaggagtacctgcaggcccaggtgcggagcagaagcaagctggacgcccctaaggtggatctgctggtgaagaattgcctcctgcccctgagagagtacttcaagtatttcagccagaatagtctgcccctgggcggcccaagcagcggcgcccctcctcccagcggcggcagcccagccggctccccaacctctaccgaggagggcacctctgagtccgccacccccgagagcggccctggcacctccaccgagcccagcgagggcagcgcacccggcagccctgccggcagccccacctccacagaggagggaaccagcaccgagcccagcgaaggcagcgccccaggcaccagcaccgagcctagtgagggcggctctggcggcggcagcgcccaggagattaaacggatcaacaagatcagaagaagacttgtgaaagacagcaacaccaagaaggccggcaagacaggccccatgaaaaccctgctggttagagtgatgacacccgatctgagagagcggctggaaaacctgagaaagaagcctgaaaatatcccccagcccatcagcaatacatctagagccaacctgaataagctgctgaccgattacaccgaaatgaagaaggcgatcctgcatgtgtactgggaagagttccagaaggaccctgtgggcctgatgagccgggtggcccagcctgccagcaagaagatcgatcagaacaagctgaaacctgagatggacgagaagggcaacctgaccaccgccggctttgcctgctctcagtgtggccagcccctgttcgtgtacaagctggagcaggtgtctgagaagggcaaggcttacaccaactacttcggacggtgcaatgtggccgagcacgaaaagctgatcctgctggcccagctgaagcccgagaaggatagcgacgaagccgtgacatatagcctgggaaagtttgggcagagggccctggatttctacagcattcatgtgaccaaggagtccacccaccccgtgaagcccctggcccagatcgccggaaacagatacgcctccggacctgtgggaaaggccctgagcgacgcatgtatgggcacaatcgcctccttcctgtctaagtaccaggacatcatcatcgaacaccagaaggtggtgaagggcaaccagaagagactggagagcctgcgggagctggccggcaaggaaaacctggaataccctagcgtgaccctgccacctcagcctcacaccaaggagggcgttgatgcctacaacgaagtgatcgcccgggtgcgaatgtgggtgaacctgaacctgtggcagaagctgaagctaagcagagatgatgccaagcctctgctgagactgaagggattcccttcctttcctctggtcgagagacaggccaacgaagtggactggtgggacatggtgtgtaacgtgaagaagctgatcaacgagaaaaaggaggatggcaaggtgttttggcagaatctggctggctacaagagacaggaagccctgagaccatacctgagcagcgaggaagatcggaagaagggaaagaaattcgctcggtaccagctgggcgacctgctgctgcacctggaaaagaagcacggcgaggactggggaaaggtgtacgacgaggcctgggagcggattgacaagaaagtggaaggcctgagcaagcacatcaagctggaagaggaacggagaagcgaggacgcccagagcaaggccgccctgaccgactggctgcgggctaaggccagcttcgtgatcgagggcctgaaggaggccgacaaggacgagttctgcagatgcgagctgaagctgcagaagtggtacggggacctgcggggaaagcccttcgccatcgaagccgagaacagcatcctggacatcagcggcttcagcaagcagtacaactgtgccttcatctggcagaaggacggcgtgaagaagctgaacctgtacctgatcatcaactacttcaagggcggcaagctgcggttcaagaagatcaaacctgaagccttcgaagccaacagattctacaccgtgatcaacaaaaagagcggcgagatcgtgcccatggaggtgaacttcaacttcgacgaccccaacctgatcatcctgcctctggcctttggcaagagacagggcagagaattcatctggaacgacctgctgtccctggaaaccggcagcctgaagctggccaacggaagagtgatcgagaagacactgtacaacagaagaacccggcaggatgagcctgccctgttcgtggccctgaccttcgagcggcgggaggtcctggactcctccaatatcaaaccaatgaacctgatcggcgtggcaagaggcgaaaacatccccgccgtgatcgccctgaccgaccccgagggctgcccactgagccggtttaaggatagcctgggaaacccaacccacatcctgagaatcggcgagagctataaggagaagcagcggaccatccaggccaagaaggaggtggagcagcggagagccggcggctacagccggaagtacgccagcaaagccaagaatctggcagacgatatggtgagaaacaccgctagagatctgctgtactacgccgtgacccaggatgccatgctgatcttcgccaacctgagccggggcttcggccggcagggcaagcggaccttcatggccgagagacagtacacacggatggaggactggctgaccgccaagctggcctacgagggcctgagcaagacctacctgtccaagacactggcccagtacacctccaagacatgcagcaactgtgggtttaccatcaccagcgccgactacgacagggtgctggagaagctgaagaagacagcaacaggctggatgaccacaattaacggcaaggagctgaaggtggagggccagattacctactacaacagatacaagagacagaacgtagtcaaggacctgtccgtcgagctggatagactgagcgaagaatctgtgaacaacgacatctcctcctggacaaagggcagaagcggagaagctctgagcctcctgaagaaaagattctcccatagacccgtgcaggagaagttcgtgtgcctgaactgcggcttcgagacacacgcagccgagcaagccgccctgaacatcgccagatcctggctgttcctgcggagccaggagtacaagaaataccagacaaacaagacaaccggcaacaccgataagagagccttcgtcgagacctggcagtccttttaccggaagaagcttaaggaggtgtggaaacctgccgtgcggtctggcggatctggcggaggctccacaagcgtgcaggagcccgtgaccttcaaggacgtggccgtggacttcacccaggaggagtggggccagctggacctggtgcagaggaccctgtacagggacgtgatgctggagacctacggccacctgctgagcgtgggcaaccagatcgccaagcccgaggtgatcagcctgctggagcagggcgaggagccctggagcgtggagcaggcctgcccccagaggacctgccccgagtgggtgaggaacaccagccccaagaaaaagagaaaagtctaagctgccttctgcggggcttgccttctggccatgcccttcttctctcccttgcacctgtacctcttggtctttgaataaagcctgagtaggaaggctagcaaaaaaaaaaaaaaaaaaaaaaaaaaaaaaaaaaaaaaaaaaaaaaaaaaaaaaaaaaaaaaaaaaaaaaaaaaaaaaaa

SEQ ID NO: 5929 - RNA, 5797 nt, synthetic construct
  source 1..5797: mol_type = other RNA
aggaaataagagagaaaagaagagtaagaagaaatataagagccaccatggcccctaagaagaagcgtaaagtgagccggatggaacgcctcgtctacgaggtgcggcagaagtgcagaaacatcgaggacatctgcatctcctgcggatctctgaacgtgaccctggagcacccactgttcatcggcggcatgtgccagaactgtaaaaactgttttctggagtgtgcctatcaatacgacgatgacggctaccagagctactgcaccatctgttgcggcggaagagaggtgctgatgtgtggaaataacaactgctgccggtgcttctgcgtggaatgcgtggacctgctggtgggccccggcgccgcccaggccgctattaaggaagatccttggaactgctacatgtgcggccacaagggcacatacggcctgctgagacggagagaggactggcctagcagactgcagatgttcttcgccaataaccacgaccaggagttcgacccccctaaggtgtaccctcccgtccccgccgagaagagaaagcccatccgggtcctgagcctgttcgatggcatcgccaccggtctgctggtgctgaaggacctgggcatccaggtggataggtacattgcctccgaggtgtgcgaggactccatcaccgtgggaatggtgcgtcatcagggcaagatcatgtacgtgggcgacgtgcggagcgtgacacagaagcatatccaggagtggggccctttcgacctggtgatcggcggcagcccttgcaatgacctgagcatcgtgaacccagcccggaagggcctgtacgagggaaccggcagactgttcttcgagttttacagactgctgcacgacgcccggcctaaggaaggcgacgaccggcccttcttttggctgttcgagaatgtggtggccatgggagtcagcgacaagcgggatattagccggttcctggagagcaaccccgtgatgatcgatgccaaggaagtgagcgccgcccaccgggccagatacttctggggcaatctgcctggcatgaacagacccctggccagcaccgtgaacgacaagctggagctgcaggagtgcctggagcacggccggatcgccaagttcagcaaggtgagaaccatcaccacccgaagcaacagcatcaaacaaggcaaggaccagcactttcctgtgttcatgaacgagaaggaggacatcctgtggtgtaccgagatggagagagtgttcgggttcccagtccactacacagatgtcagcaacatgtctagactggccagacagagactgctgggaagaagctggtccgtccctgtgatcagacacctgttcgcccctctgaaggagtacttcgcctgcgtgagcagcggcaacagcaacgccaacagccggggccccagcttctctagcggcctggtgccactgtccctgagagggagccacatgggccccatggagatctacaaaaccgtgagcgcctggaagcggcagcctgtgcgcgtgctgagcctgtttcggaatatcgataaagtcctgaaaagcctgggattcctggagagcggctctggctccggcggtggcaccctgaagtacgtggaggatgtgacaaacgtggtcagacgggatgtggagaagtggggccccttcgatctggtgtacggcagcacccaacccctgggcagctcttgtgaccggtgccctggctggtacatgtttcagttccaccggatcctgcagtacgccctgccgagacaggagtcccagcggccattcttttggattttcatggacaacttgctgctgaccgaggatgaccaggaaactaccactcggttcctgcagaccgaagccgtgaccctgcaggacgtgagaggccgggactaccagaacgccatgcgggtgtggtccaacatccctggactgaaaagcaagcacgcacctctgacccctaaagaagaggagtacctgcaggcccaggtgcggagcagaagcaagctggacgcccctaaggtggatctgctggtgaagaattgcctcctgcccctgagagagtacttcaagtatttcagccagaatagtctgcccctgggcggcccaagcagcggcgcccctcctcccagcggcggcagcccagccggctccccaacctctaccgaggagggcacctctgagtccgccacccccgagagcggccctggcacctccaccgagcccagcgagggcagcgcacccggcagccctgccggcagccccacctccacagaggagggaaccagcaccgagcccagcgaaggcagcgccccaggcaccagcaccgagcctagtgagggcggctctggcggcggcagcgcccaggagattaaacggatcaacaagatcagaagaagacttgtgaaagacagcaacaccaagaaggccggcaagacaggccccatgaaaaccctgctggttagagtgatgacacccgatctgagagagcggctggaaaacctgagaaagaagcctgaaaatatcccccagcccatcagcaatacatctagagccaacctgaataagctgctgaccgattacaccgaaatgaagaaggcgatcctgcatgtgtactgggaagagttccagaaggaccctgtgggcctgatgagccgggtggcccagcctgccagcaagaagatcgatcagaacaagctgaaacctgagatggacgagaagggcaacctgaccaccgccggctttgcctgctctcagtgtggccagcccctgttcgtgtacaagctggagcaggtgtctgagaagggcaaggcttacaccaactacttcggacggtgcaatgtggccgagcacgaaaagctgatcctgctggcccagctgaagcccgagaaggatagcgacgaagccgtgacatatagcctgggaaagtttgggcagagggccctggatttctacagcattcatgtgaccaaggagtccacccaccccgtgaagcccctggcccagatcgccggaaacagatacgcctccggacctgtgggaaaggccctgagcgacgcatgtatgggcacaatcgcctccttcctgtctaagtaccaggacatcatcatcgaacaccagaaggtggtgaagggcaaccagaagagactggagagcctgcgggagctggccggcaaggaaaacctggaataccctagcgtgaccctgccacctcagcctcacaccaaggagggcgttgatgcctacaacgaagtgatcgcccgggtgcgaatgtgggtgaacctgaacctgtggcagaagctgaagctaagcagagatgatgccaagcctctgctgagactgaagggattcccttcctttcctctggtcgagagacaggccaacgaagtggactggtgggacatggtgtgtaacgtgaagaagctgatcaacgagaaaaaggaggatggcaaggtgttttggcagaatctggctggctacaagagacaggaagccctgagaccatacctgagcagcgaggaagatcggaagaagggaaagaaattcgctcggtaccagctgggcgacctgctgctgcacctggaaaagaagcacggcgaggactggggaaaggtgtacgacgaggcctgggagcggattgacaagaaagtggaaggcctgagcaagcacatcaagctggaagaggaacggagaagcgaggacgcccagagcaaggccgccctgaccgactggctgcgggctaaggccagcttcgtgatcgagggcctgaaggaggccgacaaggacgagttctgcagatgcgagctgaagctgcagaagtggtacggggacctgcggggaaagcccttcgccatcgaagccgagaacagcatcctggacatcagcggcttcagcaagcagtacaactgtgccttcatctggcagaaggacggcgtgaagaagctgaacctgtacctgatcatcaactacttcaagggcggcaagctgcggttcaagaagatcaaacctgaagccttcgaagccaacagattctacaccgtgatcaacaaaaagagcggcgagatcgtgcccatggaggtgaacttcaacttcgacgaccccaacctgatcatcctgcctctggcctttggcaagagacagggcagagaattcatctggaacgacctgctgtccctggaaaccggcagcctgaagctggccaacggaagagtgatcgagaagacactgtacaacagaagaacccggcaggatgagcctgccctgttcgtggccctgaccttcgagcggcgggaggtcctggactcctccaatatcaaaccaatgaacctgatcggcgtggcaagaggcgaaaacatccccgccgtgatcgccctgaccgaccccgagggctgcccactgagccggtttaaggatagcctgggaaacccaacccacatcctgagaatcggcgagagctataaggagaagcagcggaccatccaggccaagaaggaggtggagcagcggagagccggcggctacagccggaagtacgccagcaaagccaagaatctggcagacgatatggtgagaaacaccgctagagatctgctgtactacgccgtgacccaggatgccatgctgatcttcgccaacctgagccggggcttcggccggcagggcaagcggaccttcatggccgagagacagtacacacggatggaggactggctgaccgccaagctggcctacgagggcctgagcaagacctacctgtccaagacactggcccagtacacctccaagacatgcagcaactgtgggtttaccatcaccagcgccgactacgacagggtgctggagaagctgaagaagacagcaacaggctggatgaccacaattaacggcaaggagctgaaggtggagggccagattacctactacaacagatacaagagacagaacgtagtcaaggacctgtccgtcgagctggatagactgagcgaagaatctgtgaacaacgacatctcctcctggacaaagggcagaagcggagaagctctgagcctcctgaagaaaagattctcccatagacccgtgcaggagaagttcgtgtgcctgaactgcggcttcgagacacacgcagccgagcaagccgccctgaacatcgccagatcctggctgttcctgcggagccaggagtacaagaaataccagacaaacaagacaaccggcaacaccgataagagagccttcgtcgagacctggcagtccttttaccggaagaagcttaaggaggtgtggaaacctgccgtgcggtctggcggatctggcggaggctccacaagcatgatcaactaccagacccccgtgagcttcagggacgtggtggtgggcttcacccaggaggagtggcacaggctgaaccccacccagagggccctgtacagggacgtgatgctggagacctacagcaacctggtgagcgtgggctacgagggcaccaagcccgacgtgatcctgaggctggagcaggaggaggccccctggatcggcgaggccgcctgcctgggctgccactgctggggcatcaccagccccaagaaaaagagaaaagtctaagctgccttctgcggggcttgccttctggccatgcccttcttctctcccttgcacctgtacctcttggtctttgaataaagcctgagtaggaaggctagcaaaaaaaaaaaaaaaaaaaaaaaaaaaaaaaaaaaaaaaaaaaaaaaaaaaaaaaaaaaaaaaaaaaaaaaaaaaaaaaa

SEQ ID NO: 5930 - RNA, 5797 nt, synthetic construct
  source 1..5797: mol_type = other RNA
aggaaataagagagaaaagaagagtaagaagaaatataagagccaccatggcccctaagaagaagcgtaaagtgagccggatggaacgcctcgtctacgaggtgcggcagaagtgcagaaacatcgaggacatctgcatctcctgcggatctctgaacgtgaccctggagcacccactgttcatcggcggcatgtgccagaactgtaaaaactgttttctggagtgtgcctatcaatacgacgatgacggctaccagagctactgcaccatctgttgcggcggaagagaggtgctgatgtgtggaaataacaactgctgccggtgcttctgcgtggaatgcgtggacctgctggtgggccccggcgccgcccaggccgctattaaggaagatccttggaactgctacatgtgcggccacaagggcacatacggcctgctgagacggagagaggactggcctagcagactgcagatgttcttcgccaataaccacgaccaggagttcgacccccctaaggtgtaccctcccgtccccgccgagaagagaaagcccatccgggtcctgagcctgttcgatggcatcgccaccggtctgctggtgctgaaggacctgggcatccaggtggataggtacattgcctccgaggtgtgcgaggactccatcaccgtgggaatggtgcgtcatcagggcaagatcatgtacgtgggcgacgtgcggagcgtgacacagaagcatatccaggagtggggccctttcgacctggtgatcggcggcagcccttgcaatgacctgagcatcgtgaacccagcccggaagggcctgtacgagggaaccggcagactgttcttcgagttttacagactgctgcacgacgcccggcctaaggaaggcgacgaccggcccttcttttggctgttcgagaatgtggtggccatgggagtcagcgacaagcgggatattagccggttcctggagagcaaccccgtgatgatcgatgccaaggaagtgagcgccgcccaccgggccagatacttctggggcaatctgcctggcatgaacagacccctggccagcaccgtgaacgacaagctggagctgcaggagtgcctggagcacggccggatcgccaagttcagcaaggtgagaaccatcaccacccgaagcaacagcatcaaacaaggcaaggaccagcactttcctgtgttcatgaacgagaaggaggacatcctgtggtgtaccgagatggagagagtgttcgggttcccagtccactacacagatgtcagcaacatgtctagactggccagacagagactgctgggaagaagctggtccgtccctgtgatcagacacctgttcgcccctctgaaggagtacttcgcctgcgtgagcagcggcaacagcaacgccaacagccggggccccagcttctctagcggcctggtgccactgtccctgagagggagccacatgggccccatggagatctacaaaaccgtgagcgcctggaagcggcagcctgtgcgcgtgctgagcctgtttcggaatatcgataaagtcctgaaaagcctgggattcctggagagcggctctggctccggcggtggcaccctgaagtacgtggaggatgtgacaaacgtggtcagacgggatgtggagaagtggggccccttcgatctggtgtacggcagcacccaacccctgggcagctcttgtgaccggtgccctggctggtacatgtttcagttccaccggatcctgcagtacgccctgccgagacaggagtcccagcggccattcttttggattttcatggacaacttgctgctgaccgaggatgaccaggaaactaccactcggttcctgcagaccgaagccgtgaccctgcaggacgtgagaggccgggactaccagaacgccatgcgggtgtggtccaacatccctggactgaaaagcaagcacgcacctctgacccctaaagaagaggagtacctgcaggcccaggtgcggagcagaagcaagctggacgcccctaaggtggatctgctggtgaagaattgcctcctgcccctgagagagtacttcaagtatttcagccagaatagtctgcccctgggcggcccaagcagcggcgcccctcctcccagcggcggcagcccagccggctccccaacctctaccgaggagggcacctctgagtccgccacccccgagagcggccctggcacctccaccgagcccagcgagggcagcgcacccggcagccctgccggcagccccacctccacagaggagggaaccagcaccgagcccagcgaaggcagcgccccaggcaccagcaccgagcctagtgagggcggctctggcggcggcagcgcccaggagattaaacggatcaacaagatcagaagaagacttgtgaaagacagcaacaccaagaaggccggcaagacaggccccatgaaaaccctgctggttagagtgatgacacccgatctgagagagcggctggaaaacctgagaaagaagcctgaaaatatcccccagcccatcagcaatacatctagagccaacctgaataagctgctgaccgattacaccgaaatgaagaaggcgatcctgcatgtgtactgggaagagttccagaaggaccctgtgggcctgatgagccgggtggcccagcctgccagcaagaagatcgatcagaacaagctgaaacctgagatggacgagaagggcaacctgaccaccgccggctttgcctgctctcagtgtggccagcccctgttcgtgtacaagctggagcaggtgtctgagaagggcaaggcttacaccaactacttcggacggtgcaatgtggccgagcacgaaaagctgatcctgctggcccagctgaagcccgagaaggatagcgacgaagccgtgacatatagcctgggaaagtttgggcagagggccctggatttctacagcattcatgtgaccaaggagtccacccaccccgtgaagcccctggcccagatcgccggaaacagatacgcctccggacctgtgggaaaggccctgagcgacgcatgtatgggcacaatcgcctccttcctgtctaagtaccaggacatcatcatcgaacaccagaaggtggtgaagggcaaccagaagagactggagagcctgcgggagctggccggcaaggaaaacctggaataccctagcgtgaccctgccacctcagcctcacaccaaggagggcgttgatgcctacaacgaagtgatcgcccgggtgcgaatgtgggtgaacctgaacctgtggcagaagctgaagctaagcagagatgatgccaagcctctgctgagactgaagggattcccttcctttcctctggtcgagagacaggccaacgaagtggactggtgggacatggtgtgtaacgtgaagaagctgatcaacgagaaaaaggaggatggcaaggtgttttggcagaatctggctggctacaagagacaggaagccctgagaccatacctgagcagcgaggaagatcggaagaagggaaagaaattcgctcggtaccagctgggcgacctgctgctgcacctggaaaagaagcacggcgaggactggggaaaggtgtacgacgaggcctgggagcggattgacaagaaagtggaaggcctgagcaagcacatcaagctggaagaggaacggagaagcgaggacgcccagagcaaggccgccctgaccgactggctgcgggctaaggccagcttcgtgatcgagggcctgaaggaggccgacaaggacgagttctgcagatgcgagctgaagctgcagaagtggtacggggacctgcggggaaagcccttcgccatcgaagccgagaacagcatcctggacatcagcggcttcagcaagcagtacaactgtgccttcatctggcagaaggacggcgtgaagaagctgaacctgtacctgatcatcaactacttcaagggcggcaagctgcggttcaagaagatcaaacctgaagccttcgaagccaacagattctacaccgtgatcaacaaaaagagcggcgagatcgtgcccatggaggtgaacttcaacttcgacgaccccaacctgatcatcctgcctctggcctttggcaagagacagggcagagaattcatctggaacgacctgctgtccctggaaaccggcagcctgaagctggccaacggaagagtgatcgagaagacactgtacaacagaagaacccggcaggatgagcctgccctgttcgtggccctgaccttcgagcggcgggaggtcctggactcctccaatatcaaaccaatgaacctgatcggcgtggcaagaggcgaaaacatccccgccgtgatcgccctgaccgaccccgagggctgcccactgagccggtttaaggatagcctgggaaacccaacccacatcctgagaatcggcgagagctataaggagaagcagcggaccatccaggccaagaaggaggtggagcagcggagagccggcggctacagccggaagtacgccagcaaagccaagaatctggcagacgatatggtgagaaacaccgctagagatctgctgtactacgccgtgacccaggatgccatgctgatcttcgccaacctgagccggggcttcggccggcagggcaagcggaccttcatggccgagagacagtacacacggatggaggactggctgaccgccaagctggcctacgagggcctgagcaagacctacctgtccaagacactggcccagtacacctccaagacatgcagcaactgtgggtttaccatcaccagcgccgactacgacagggtgctggagaagctgaagaagacagcaacaggctggatgaccacaattaacggcaaggagctgaaggtggagggccagattacctactacaacagatacaagagacagaacgtagtcaaggacctgtccgtcgagctggatagactgagcgaagaatctgtgaacaacgacatctcctcctggacaaagggcagaagcggagaagctctgagcctcctgaagaaaagattctcccatagacccgtgcaggagaagttcgtgtgcctgaactgcggcttcgagacacacgcagccgagcaagccgccctgaacatcgccagatcctggctgttcctgcggagccaggagtacaagaaataccagacaaacaagacaaccggcaacaccgataagagagccttcgtcgagacctggcagtccttttaccggaagaagcttaaggaggtgtggaaacctgccgtgcggtctggcggatctggcggaggctccacaagcagccaggagcccgtgaccttcgaggacgtggccgtgtacttcacccagaaccagtgggccagcctggaccccatgcagagggccctgtacctggaggtgatgctggagaactacgccaacatcaccagcctggccgccctgcccttccccaagcccgacctgatcctgcagctggagcagggcgaggccccctggggcctggacccctggacccccctggacggcgaggccctgggcggcgtgaccagccccaagaaaaagagaaaagtctaagctgccttctgcggggcttgccttctggccatgcccttcttctctcccttgcacctgtacctcttggtctttgaataaagcctgagtaggaaggctagcaaaaaaaaaaaaaaaaaaaaaaaaaaaaaaaaaaaaaaaaaaaaaaaaaaaaaaaaaaaaaaaaaaaaaaaaaaaaaaaa

SEQ ID NO: 5931 - RNA, 5797 nt, synthetic construct
  source 1..5797: mol_type = other RNA
aggaaataagagagaaaagaagagtaagaagaaatataagagccaccatggcccctaagaagaagcgtaaagtgagccggatggaacgcctcgtctacgaggtgcggcagaagtgcagaaacatcgaggacatctgcatctcctgcggatctctgaacgtgaccctggagcacccactgttcatcggcggcatgtgccagaactgtaaaaactgttttctggagtgtgcctatcaatacgacgatgacggctaccagagctactgcaccatctgttgcggcggaagagaggtgctgatgtgtggaaataacaactgctgccggtgcttctgcgtggaatgcgtggacctgctggtgggccccggcgccgcccaggccgctattaaggaagatccttggaactgctacatgtgcggccacaagggcacatacggcctgctgagacggagagaggactggcctagcagactgcagatgttcttcgccaataaccacgaccaggagttcgacccccctaaggtgtaccctcccgtccccgccgagaagagaaagcccatccgggtcctgagcctgttcgatggcatcgccaccggtctgctggtgctgaaggacctgggcatccaggtggataggtacattgcctccgaggtgtgcgaggactccatcaccgtgggaatggtgcgtcatcagggcaagatcatgtacgtgggcgacgtgcggagcgtgacacagaagcatatccaggagtggggccctttcgacctggtgatcggcggcagcccttgcaatgacctgagcatcgtgaacccagcccggaagggcctgtacgagggaaccggcagactgttcttcgagttttacagactgctgcacgacgcccggcctaaggaaggcgacgaccggcccttcttttggctgttcgagaatgtggtggccatgggagtcagcgacaagcgggatattagccggttcctggagagcaaccccgtgatgatcgatgccaaggaagtgagcgccgcccaccgggccagatacttctggggcaatctgcctggcatgaacagacccctggccagcaccgtgaacgacaagctggagctgcaggagtgcctggagcacggccggatcgccaagttcagcaaggtgagaaccatcaccacccgaagcaacagcatcaaacaaggcaaggaccagcactttcctgtgttcatgaacgagaaggaggacatcctgtggtgtaccgagatggagagagtgttcgggttcccagtccactacacagatgtcagcaacatgtctagactggccagacagagactgctgggaagaagctggtccgtccctgtgatcagacacctgttcgcccctctgaaggagtacttcgcctgcgtgagcagcggcaacagcaacgccaacagccggggccccagcttctctagcggcctggtgccactgtccctgagagggagccacatgggccccatggagatctacaaaaccgtgagcgcctggaagcggcagcctgtgcgcgtgctgagcctgtttcggaatatcgataaagtcctgaaaagcctgggattcctggagagcggctctggctccggcggtggcaccctgaagtacgtggaggatgtgacaaacgtggtcagacgggatgtggagaagtggggccccttcgatctggtgtacggcagcacccaacccctgggcagctcttgtgaccggtgccctggctggtacatgtttcagttccaccggatcctgcagtacgccctgccgagacaggagtcccagcggccattcttttggattttcatggacaacttgctgctgaccgaggatgaccaggaaactaccactcggttcctgcagaccgaagccgtgaccctgcaggacgtgagaggccgggactaccagaacgccatgcgggtgtggtccaacatccctggactgaaaagcaagcacgcacctctgacccctaaagaagaggagtacctgcaggcccaggtgcggagcagaagcaagctggacgcccctaaggtggatctgctggtgaagaattgcctcctgcccctgagagagtacttcaagtatttcagccagaatagtctgcccctgggcggcccaagcagcggcgcccctcctcccagcggcggcagcccagccggctccccaacctctaccgaggagggcacctctgagtccgccacccccgagagcggccctggcacctccaccgagcccagcgagggcagcgcacccggcagccctgccggcagccccacctccacagaggagggaaccagcaccgagcccagcgaaggcagcgccccaggcaccagcaccgagcctagtgagggcggctctggcggcggcagcgcccaggagattaaacggatcaacaagatcagaagaagacttgtgaaagacagcaacaccaagaaggccggcaagacaggccccatgaaaaccctgctggttagagtgatgacacccgatctgagagagcggctggaaaacctgagaaagaagcctgaaaatatcccccagcccatcagcaatacatctagagccaacctgaataagctgctgaccgattacaccgaaatgaagaaggcgatcctgcatgtgtactgggaagagttccagaaggaccctgtgggcctgatgagccgggtggcccagcctgccagcaagaagatcgatcagaacaagctgaaacctgagatggacgagaagggcaacctgaccaccgccggctttgcctgctctcagtgtggccagcccctgttcgtgtacaagctggagcaggtgtctgagaagggcaaggcttacaccaactacttcggacggtgcaatgtggccgagcacgaaaagctgatcctgctggcccagctgaagcccgagaaggatagcgacgaagccgtgacatatagcctgggaaagtttgggcagagggccctggatttctacagcattcatgtgaccaaggagtccacccaccccgtgaagcccctggcccagatcgccggaaacagatacgcctccggacctgtgggaaaggccctgagcgacgcatgtatgggcacaatcgcctccttcctgtctaagtaccaggacatcatcatcgaacaccagaaggtggtgaagggcaaccagaagagactggagagcctgcgggagctggccggcaaggaaaacctggaataccctagcgtgaccctgccacctcagcctcacaccaaggagggcgttgatgcctacaacgaagtgatcgcccgggtgcgaatgtgggtgaacctgaacctgtggcagaagctgaagctaagcagagatgatgccaagcctctgctgagactgaagggattcccttcctttcctctggtcgagagacaggccaacgaagtggactggtgggacatggtgtgtaacgtgaagaagctgatcaacgagaaaaaggaggatggcaaggtgttttggcagaatctggctggctacaagagacaggaagccctgagaccatacctgagcagcgaggaagatcggaagaagggaaagaaattcgctcggtaccagctgggcgacctgctgctgcacctggaaaagaagcacggcgaggactggggaaaggtgtacgacgaggcctgggagcggattgacaagaaagtggaaggcctgagcaagcacatcaagctggaagaggaacggagaagcgaggacgcccagagcaaggccgccctgaccgactggctgcgggctaaggccagcttcgtgatcgagggcctgaaggaggccgacaaggacgagttctgcagatgcgagctgaagctgcagaagtggtacggggacctgcggggaaagcccttcgccatcgaagccgagaacagcatcctggacatcagcggcttcagcaagcagtacaactgtgccttcatctggcagaaggacggcgtgaagaagctgaacctgtacctgatcatcaactacttcaagggcggcaagctgcggttcaagaagatcaaacctgaagccttcgaagccaacagattctacaccgtgatcaacaaaaagagcggcgagatcgtgcccatggaggtgaacttcaacttcgacgaccccaacctgatcatcctgcctctggcctttggcaagagacagggcagagaattcatctggaacgacctgctgtccctggaaaccggcagcctgaagctggccaacggaagagtgatcgagaagacactgtacaacagaagaacccggcaggatgagcctgccctgttcgtggccctgaccttcgagcggcgggaggtcctggactcctccaatatcaaaccaatgaacctgatcggcgtggcaagaggcgaaaacatccccgccgtgatcgccctgaccgaccccgagggctgcccactgagccggtttaaggatagcctgggaaacccaacccacatcctgagaatcggcgagagctataaggagaagcagcggaccatccaggccaagaaggaggtggagcagcggagagccggcggctacagccggaagtacgccagcaaagccaagaatctggcagacgatatggtgagaaacaccgctagagatctgctgtactacgccgtgacccaggatgccatgctgatcttcgccaacctgagccggggcttcggccggcagggcaagcggaccttcatggccgagagacagtacacacggatggaggactggctgaccgccaagctggcctacgagggcctgagcaagacctacctgtccaagacactggcccagtacacctccaagacatgcagcaactgtgggtttaccatcaccagcgccgactacgacagggtgctggagaagctgaagaagacagcaacaggctggatgaccacaattaacggcaaggagctgaaggtggagggccagattacctactacaacagatacaagagacagaacgtagtcaaggacctgtccgtcgagctggatagactgagcgaagaatctgtgaacaacgacatctcctcctggacaaagggcagaagcggagaagctctgagcctcctgaagaaaagattctcccatagacccgtgcaggagaagttcgtgtgcctgaactgcggcttcgagacacacgcagccgagcaagccgccctgaacatcgccagatcctggctgttcctgcggagccaggagtacaagaaataccagacaaacaagacaaccggcaacaccgataagagagccttcgtcgagacctggcagtccttttaccggaagaagcttaaggaggtgtggaaacctgccgtgcggtctggcggatctggcggaggctccacaagcaggcccagggccgtgaagttcgccgacgtggccgtgtacttcagccccgaggagtggggctgcctgaggcccgcccagagggccctgtacagggacgtgatgagggagacctacggccacctgggcgccctgggcttccccggccccaagcccgccctgatcagctggatggagcaggagagcgaggcctggagccccgacgcccaggaccccgaggagggcgagagcctgggcggcgccctgaccagccccaagaaaaagagaaaagtctaagctgccttctgcggggcttgccttctggccatgcccttcttctctcccttgcacctgtacctcttggtctttgaataaagcctgagtaggaaggctagcaaaaaaaaaaaaaaaaaaaaaaaaaaaaaaaaaaaaaaaaaaaaaaaaaaaaaaaaaaaaaaaaaaaaaaaaaaaaaaaa

SEQ ID NO: 5932 - RNA, 5797 nt, synthetic construct
  source 1..5797: mol_type = other RNA
aggaaataagagagaaaagaagagtaagaagaaatataagagccaccatggcccctaagaagaagcgtaaagtgagccggatggaacgcctcgtctacgaggtgcggcagaagtgcagaaacatcgaggacatctgcatctcctgcggatctctgaacgtgaccctggagcacccactgttcatcggcggcatgtgccagaactgtaaaaactgttttctggagtgtgcctatcaatacgacgatgacggctaccagagctactgcaccatctgttgcggcggaagagaggtgctgatgtgtggaaataacaactgctgccggtgcttctgcgtggaatgcgtggacctgctggtgggccccggcgccgcccaggccgctattaaggaagatccttggaactgctacatgtgcggccacaagggcacatacggcctgctgagacggagagaggactggcctagcagactgcagatgttcttcgccaataaccacgaccaggagttcgacccccctaaggtgtaccctcccgtccccgccgagaagagaaagcccatccgggtcctgagcctgttcgatggcatcgccaccggtctgctggtgctgaaggacctgggcatccaggtggataggtacattgcctccgaggtgtgcgaggactccatcaccgtgggaatggtgcgtcatcagggcaagatcatgtacgtgggcgacgtgcggagcgtgacacagaagcatatccaggagtggggccctttcgacctggtgatcggcggcagcccttgcaatgacctgagcatcgtgaacccagcccggaagggcctgtacgagggaaccggcagactgttcttcgagttttacagactgctgcacgacgcccggcctaaggaaggcgacgaccggcccttcttttggctgttcgagaatgtggtggccatgggagtcagcgacaagcgggatattagccggttcctggagagcaaccccgtgatgatcgatgccaaggaagtgagcgccgcccaccgggccagatacttctggggcaatctgcctggcatgaacagacccctggccagcaccgtgaacgacaagctggagctgcaggagtgcctggagcacggccggatcgccaagttcagcaaggtgagaaccatcaccacccgaagcaacagcatcaaacaaggcaaggaccagcactttcctgtgttcatgaacgagaaggaggacatcctgtggtgtaccgagatggagagagtgttcgggttcccagtccactacacagatgtcagcaacatgtctagactggccagacagagactgctgggaagaagctggtccgtccctgtgatcagacacctgttcgcccctctgaaggagtacttcgcctgcgtgagcagcggcaacagcaacgccaacagccggggccccagcttctctagcggcctggtgccactgtccctgagagggagccacatgggccccatggagatctacaaaaccgtgagcgcctggaagcggcagcctgtgcgcgtgctgagcctgtttcggaatatcgataaagtcctgaaaagcctgggattcctggagagcggctctggctccggcggtggcaccctgaagtacgtggaggatgtgacaaacgtggtcagacgggatgtggagaagtggggccccttcgatctggtgtacggcagcacccaacccctgggcagctcttgtgaccggtgccctggctggtacatgtttcagttccaccggatcctgcagtacgccctgccgagacaggagtcccagcggccattcttttggattttcatggacaacttgctgctgaccgaggatgaccaggaaactaccactcggttcctgcagaccgaagccgtgaccctgcaggacgtgagaggccgggactaccagaacgccatgcgggtgtggtccaacatccctggactgaaaagcaagcacgcacctctgacccctaaagaagaggagtacctgcaggcccaggtgcggagcagaagcaagctggacgcccctaaggtggatctgctggtgaagaattgcctcctgcccctgagagagtacttcaagtatttcagccagaatagtctgcccctgggcggcccaagcagcggcgcccctcctcccagcggcggcagcccagccggctccccaacctctaccgaggagggcacctctgagtccgccacccccgagagcggccctggcacctccaccgagcccagcgagggcagcgcacccggcagccctgccggcagccccacctccacagaggagggaaccagcaccgagcccagcgaaggcagcgccccaggcaccagcaccgagcctagtgagggcggctctggcggcggcagcgcccaggagattaaacggatcaacaagatcagaagaagacttgtgaaagacagcaacaccaagaaggccggcaagacaggccccatgaaaaccctgctggttagagtgatgacacccgatctgagagagcggctggaaaacctgagaaagaagcctgaaaatatcccccagcccatcagcaatacatctagagccaacctgaataagctgctgaccgattacaccgaaatgaagaaggcgatcctgcatgtgtactgggaagagttccagaaggaccctgtgggcctgatgagccgggtggcccagcctgccagcaagaagatcgatcagaacaagctgaaacctgagatggacgagaagggcaacctgaccaccgccggctttgcctgctctcagtgtggccagcccctgttcgtgtacaagctggagcaggtgtctgagaagggcaaggcttacaccaactacttcggacggtgcaatgtggccgagcacgaaaagctgatcctgctggcccagctgaagcccgagaaggatagcgacgaagccgtgacatatagcctgggaaagtttgggcagagggccctggatttctacagcattcatgtgaccaaggagtccacccaccccgtgaagcccctggcccagatcgccggaaacagatacgcctccggacctgtgggaaaggccctgagcgacgcatgtatgggcacaatcgcctccttcctgtctaagtaccaggacatcatcatcgaacaccagaaggtggtgaagggcaaccagaagagactggagagcctgcgggagctggccggcaaggaaaacctggaataccctagcgtgaccctgccacctcagcctcacaccaaggagggcgttgatgcctacaacgaagtgatcgcccgggtgcgaatgtgggtgaacctgaacctgtggcagaagctgaagctaagcagagatgatgccaagcctctgctgagactgaagggattcccttcctttcctctggtcgagagacaggccaacgaagtggactggtgggacatggtgtgtaacgtgaagaagctgatcaacgagaaaaaggaggatggcaaggtgttttggcagaatctggctggctacaagagacaggaagccctgagaccatacctgagcagcgaggaagatcggaagaagggaaagaaattcgctcggtaccagctgggcgacctgctgctgcacctggaaaagaagcacggcgaggactggggaaaggtgtacgacgaggcctgggagcggattgacaagaaagtggaaggcctgagcaagcacatcaagctggaagaggaacggagaagcgaggacgcccagagcaaggccgccctgaccgactggctgcgggctaaggccagcttcgtgatcgagggcctgaaggaggccgacaaggacgagttctgcagatgcgagctgaagctgcagaagtggtacggggacctgcggggaaagcccttcgccatcgaagccgagaacagcatcctggacatcagcggcttcagcaagcagtacaactgtgccttcatctggcagaaggacggcgtgaagaagctgaacctgtacctgatcatcaactacttcaagggcggcaagctgcggttcaagaagatcaaacctgaagccttcgaagccaacagattctacaccgtgatcaacaaaaagagcggcgagatcgtgcccatggaggtgaacttcaacttcgacgaccccaacctgatcatcctgcctctggcctttggcaagagacagggcagagaattcatctggaacgacctgctgtccctggaaaccggcagcctgaagctggccaacggaagagtgatcgagaagacactgtacaacagaagaacccggcaggatgagcctgccctgttcgtggccctgaccttcgagcggcgggaggtcctggactcctccaatatcaaaccaatgaacctgatcggcgtggcaagaggcgaaaacatccccgccgtgatcgccctgaccgaccccgagggctgcccactgagccggtttaaggatagcctgggaaacccaacccacatcctgagaatcggcgagagctataaggagaagcagcggaccatccaggccaagaaggaggtggagcagcggagagccggcggctacagccggaagtacgccagcaaagccaagaatctggcagacgatatggtgagaaacaccgctagagatctgctgtactacgccgtgacccaggatgccatgctgatcttcgccaacctgagccggggcttcggccggcagggcaagcggaccttcatggccgagagacagtacacacggatggaggactggctgaccgccaagctggcctacgagggcctgagcaagacctacctgtccaagacactggcccagtacacctccaagacatgcagcaactgtgggtttaccatcaccagcgccgactacgacagggtgctggagaagctgaagaagacagcaacaggctggatgaccacaattaacggcaaggagctgaaggtggagggccagattacctactacaacagatacaagagacagaacgtagtcaaggacctgtccgtcgagctggatagactgagcgaagaatctgtgaacaacgacatctcctcctggacaaagggcagaagcggagaagctctgagcctcctgaagaaaagattctcccatagacccgtgcaggagaagttcgtgtgcctgaactgcggcttcgagacacacgcagccgagcaagccgccctgaacatcgccagatcctggctgttcctgcggagccaggagtacaagaaataccagacaaacaagacaaccggcaacaccgataagagagccttcgtcgagacctggcagtccttttaccggaagaagcttaaggaggtgtggaaacctgccgtgcggtctggcggatctggcggaggctccacaagccagcccgacctggtgaccttcggcgacgtggccgtggacttcagccaggaggagtgggagtggctgaaccccgcccagaggagcctgtacaggaccgtgatgctggacaactacaggagcctggtgagcctgggcgtgagcgccagcaagcccgacgtgatcagcctgctggagcagggcaaggagccctggctggtgaaggaggagggccccaggggcgccaggcccgacagcagccccaccaccagccccaagaaaaagagaaaagtctaagctgccttctgcggggcttgccttctggccatgcccttcttctctcccttgcacctgtacctcttggtctttgaataaagcctgagtaggaaggctagcaaaaaaaaaaaaaaaaaaaaaaaaaaaaaaaaaaaaaaaaaaaaaaaaaaaaaaaaaaaaaaaaaaaaaaaaaaaaaaaa

SEQ ID NO: 5933 - RNA, 5797 nt, synthetic construct
  source 1..5797: mol_type = other RNA
aggaaataagagagaaaagaagagtaagaagaaatataagagccaccatggcccctaagaagaagcgtaaagtgagccggatggaacgcctcgtctacgaggtgcggcagaagtgcagaaacatcgaggacatctgcatctcctgcggatctctgaacgtgaccctggagcacccactgttcatcggcggcatgtgccagaactgtaaaaactgttttctggagtgtgcctatcaatacgacgatgacggctaccagagctactgcaccatctgttgcggcggaagagaggtgctgatgtgtggaaataacaactgctgccggtgcttctgcgtggaatgcgtggacctgctggtgggccccggcgccgcccaggccgctattaaggaagatccttggaactgctacatgtgcggccacaagggcacatacggcctgctgagacggagagaggactggcctagcagactgcagatgttcttcgccaataaccacgaccaggagttcgacccccctaaggtgtaccctcccgtccccgccgagaagagaaagcccatccgggtcctgagcctgttcgatggcatcgccaccggtctgctggtgctgaaggacctgggcatccaggtggataggtacattgcctccgaggtgtgcgaggactccatcaccgtgggaatggtgcgtcatcagggcaagatcatgtacgtgggcgacgtgcggagcgtgacacagaagcatatccaggagtggggccctttcgacctggtgatcggcggcagcccttgcaatgacctgagcatcgtgaacccagcccggaagggcctgtacgagggaaccggcagactgttcttcgagttttacagactgctgcacgacgcccggcctaaggaaggcgacgaccggcccttcttttggctgttcgagaatgtggtggccatgggagtcagcgacaagcgggatattagccggttcctggagagcaaccccgtgatgatcgatgccaaggaagtgagcgccgcccaccgggccagatacttctggggcaatctgcctggcatgaacagacccctggccagcaccgtgaacgacaagctggagctgcaggagtgcctggagcacggccggatcgccaagttcagcaaggtgagaaccatcaccacccgaagcaacagcatcaaacaaggcaaggaccagcactttcctgtgttcatgaacgagaaggaggacatcctgtggtgtaccgagatggagagagtgttcgggttcccagtccactacacagatgtcagcaacatgtctagactggccagacagagactgctgggaagaagctggtccgtccctgtgatcagacacctgttcgcccctctgaaggagtacttcgcctgcgtgagcagcggcaacagcaacgccaacagccggggccccagcttctctagcggcctggtgccactgtccctgagagggagccacatgggccccatggagatctacaaaaccgtgagcgcctggaagcggcagcctgtgcgcgtgctgagcctgtttcggaatatcgataaagtcctgaaaagcctgggattcctggagagcggctctggctccggcggtggcaccctgaagtacgtggaggatgtgacaaacgtggtcagacgggatgtggagaagtggggccccttcgatctggtgtacggcagcacccaacccctgggcagctcttgtgaccggtgccctggctggtacatgtttcagttccaccggatcctgcagtacgccctgccgagacaggagtcccagcggccattcttttggattttcatggacaacttgctgctgaccgaggatgaccaggaaactaccactcggttcctgcagaccgaagccgtgaccctgcaggacgtgagaggccgggactaccagaacgccatgcgggtgtggtccaacatccctggactgaaaagcaagcacgcacctctgacccctaaagaagaggagtacctgcaggcccaggtgcggagcagaagcaagctggacgcccctaaggtggatctgctggtgaagaattgcctcctgcccctgagagagtacttcaagtatttcagccagaatagtctgcccctgggcggcccaagcagcggcgcccctcctcccagcggcggcagcccagccggctccccaacctctaccgaggagggcacctctgagtccgccacccccgagagcggccctggcacctccaccgagcccagcgagggcagcgcacccggcagccctgccggcagccccacctccacagaggagggaaccagcaccgagcccagcgaaggcagcgccccaggcaccagcaccgagcctagtgagggcggctctggcggcggcagcgcccaggagattaaacggatcaacaagatcagaagaagacttgtgaaagacagcaacaccaagaaggccggcaagacaggccccatgaaaaccctgctggttagagtgatgacacccgatctgagagagcggctggaaaacctgagaaagaagcctgaaaatatcccccagcccatcagcaatacatctagagccaacctgaataagctgctgaccgattacaccgaaatgaagaaggcgatcctgcatgtgtactgggaagagttccagaaggaccctgtgggcctgatgagccgggtggcccagcctgccagcaagaagatcgatcagaacaagctgaaacctgagatggacgagaagggcaacctgaccaccgccggctttgcctgctctcagtgtggccagcccctgttcgtgtacaagctggagcaggtgtctgagaagggcaaggcttacaccaactacttcggacggtgcaatgtggccgagcacgaaaagctgatcctgctggcccagctgaagcccgagaaggatagcgacgaagccgtgacatatagcctgggaaagtttgggcagagggccctggatttctacagcattcatgtgaccaaggagtccacccaccccgtgaagcccctggcccagatcgccggaaacagatacgcctccggacctgtgggaaaggccctgagcgacgcatgtatgggcacaatcgcctccttcctgtctaagtaccaggacatcatcatcgaacaccagaaggtggtgaagggcaaccagaagagactggagagcctgcgggagctggccggcaaggaaaacctggaataccctagcgtgaccctgccacctcagcctcacaccaaggagggcgttgatgcctacaacgaagtgatcgcccgggtgcgaatgtgggtgaacctgaacctgtggcagaagctgaagctaagcagagatgatgccaagcctctgctgagactgaagggattcccttcctttcctctggtcgagagacaggccaacgaagtggactggtgggacatggtgtgtaacgtgaagaagctgatcaacgagaaaaaggaggatggcaaggtgttttggcagaatctggctggctacaagagacaggaagccctgagaccatacctgagcagcgaggaagatcggaagaagggaaagaaattcgctcggtaccagctgggcgacctgctgctgcacctggaaaagaagcacggcgaggactggggaaaggtgtacgacgaggcctgggagcggattgacaagaaagtggaaggcctgagcaagcacatcaagctggaagaggaacggagaagcgaggacgcccagagcaaggccgccctgaccgactggctgcgggctaaggccagcttcgtgatcgagggcctgaaggaggccgacaaggacgagttctgcagatgcgagctgaagctgcagaagtggtacggggacctgcggggaaagcccttcgccatcgaagccgagaacagcatcctggacatcagcggcttcagcaagcagtacaactgtgccttcatctggcagaaggacggcgtgaagaagctgaacctgtacctgatcatcaactacttcaagggcggcaagctgcggttcaagaagatcaaacctgaagccttcgaagccaacagattctacaccgtgatcaacaaaaagagcggcgagatcgtgcccatggaggtgaacttcaacttcgacgaccccaacctgatcatcctgcctctggcctttggcaagagacagggcagagaattcatctggaacgacctgctgtccctggaaaccggcagcctgaagctggccaacggaagagtgatcgagaagacactgtacaacagaagaacccggcaggatgagcctgccctgttcgtggccctgaccttcgagcggcgggaggtcctggactcctccaatatcaaaccaatgaacctgatcggcgtggcaagaggcgaaaacatccccgccgtgatcgccctgaccgaccccgagggctgcccactgagccggtttaaggatagcctgggaaacccaacccacatcctgagaatcggcgagagctataaggagaagcagcggaccatccaggccaagaaggaggtggagcagcggagagccggcggctacagccggaagtacgccagcaaagccaagaatctggcagacgatatggtgagaaacaccgctagagatctgctgtactacgccgtgacccaggatgccatgctgatcttcgccaacctgagccggggcttcggccggcagggcaagcggaccttcatggccgagagacagtacacacggatggaggactggctgaccgccaagctggcctacgagggcctgagcaagacctacctgtccaagacactggcccagtacacctccaagacatgcagcaactgtgggtttaccatcaccagcgccgactacgacagggtgctggagaagctgaagaagacagcaacaggctggatgaccacaattaacggcaaggagctgaaggtggagggccagattacctactacaacagatacaagagacagaacgtagtcaaggacctgtccgtcgagctggatagactgagcgaagaatctgtgaacaacgacatctcctcctggacaaagggcagaagcggagaagctctgagcctcctgaagaaaagattctcccatagacccgtgcaggagaagttcgtgtgcctgaactgcggcttcgagacacacgcagccgagcaagccgccctgaacatcgccagatcctggctgttcctgcggagccaggagtacaagaaataccagacaaacaagacaaccggcaacaccgataagagagccttcgtcgagacctggcagtccttttaccggaagaagcttaaggaggtgtggaaacctgccgtgcggtctggcggatctggcggaggctccacaagcagcaaggcccccgtgaccttcggcgacctggccgtgtacttcacccaggccgagtgggagtggctgagccccgtgcagaaggccctgtaccaggacgtgatgctggagaactaccaggtgctggtgagcctgggcctgtgcctgaggaggcccaacctgatcagcctgctggagaagggcaaggccccctgggtggccgagcccgtgaggaggaggaggggccccgacagcgccagcaagttcaccagccccaagaaaaagagaaaagtctaagctgccttctgcggggcttgccttctggccatgcccttcttctctcccttgcacctgtacctcttggtctttgaataaagcctgagtaggaaggctagcaaaaaaaaaaaaaaaaaaaaaaaaaaaaaaaaaaaaaaaaaaaaaaaaaaaaaaaaaaaaaaaaaaaaaaaaaaaaaaaa

SEQ ID NO: 5934 - RNA, 5797 nt, synthetic construct
  source 1..5797: mol_type = other RNA
aggaaataagagagaaaagaagagtaagaagaaatataagagccaccatggcccctaagaagaagcgtaaagtgagccggatggaacgcctcgtctacgaggtgcggcagaagtgcagaaacatcgaggacatctgcatctcctgcggatctctgaacgtgaccctggagcacccactgttcatcggcggcatgtgccagaactgtaaaaactgttttctggagtgtgcctatcaatacgacgatgacggctaccagagctactgcaccatctgttgcggcggaagagaggtgctgatgtgtggaaataacaactgctgccggtgcttctgcgtggaatgcgtggacctgctggtgggccccggcgccgcccaggccgctattaaggaagatccttggaactgctacatgtgcggccacaagggcacatacggcctgctgagacggagagaggactggcctagcagactgcagatgttcttcgccaataaccacgaccaggagttcgacccccctaaggtgtaccctcccgtccccgccgagaagagaaagcccatccgggtcctgagcctgttcgatggcatcgccaccggtctgctggtgctgaaggacctgggcatccaggtggataggtacattgcctccgaggtgtgcgaggactccatcaccgtgggaatggtgcgtcatcagggcaagatcatgtacgtgggcgacgtgcggagcgtgacacagaagcatatccaggagtggggccctttcgacctggtgatcggcggcagcccttgcaatgacctgagcatcgtgaacccagcccggaagggcctgtacgagggaaccggcagactgttcttcgagttttacagactgctgcacgacgcccggcctaaggaaggcgacgaccggcccttcttttggctgttcgagaatgtggtggccatgggagtcagcgacaagcgggatattagccggttcctggagagcaaccccgtgatgatcgatgccaaggaagtgagcgccgcccaccgggccagatacttctggggcaatctgcctggcatgaacagacccctggccagcaccgtgaacgacaagctggagctgcaggagtgcctggagcacggccggatcgccaagttcagcaaggtgagaaccatcaccacccgaagcaacagcatcaaacaaggcaaggaccagcactttcctgtgttcatgaacgagaaggaggacatcctgtggtgtaccgagatggagagagtgttcgggttcccagtccactacacagatgtcagcaacatgtctagactggccagacagagactgctgggaagaagctggtccgtccctgtgatcagacacctgttcgcccctctgaaggagtacttcgcctgcgtgagcagcggcaacagcaacgccaacagccggggccccagcttctctagcggcctggtgccactgtccctgagagggagccacatgggccccatggagatctacaaaaccgtgagcgcctggaagcggcagcctgtgcgcgtgctgagcctgtttcggaatatcgataaagtcctgaaaagcctgggattcctggagagcggctctggctccggcggtggcaccctgaagtacgtggaggatgtgacaaacgtggtcagacgggatgtggagaagtggggccccttcgatctggtgtacggcagcacccaacccctgggcagctcttgtgaccggtgccctggctggtacatgtttcagttccaccggatcctgcagtacgccctgccgagacaggagtcccagcggccattcttttggattttcatggacaacttgctgctgaccgaggatgaccaggaaactaccactcggttcctgcagaccgaagccgtgaccctgcaggacgtgagaggccgggactaccagaacgccatgcgggtgtggtccaacatccctggactgaaaagcaagcacgcacctctgacccctaaagaagaggagtacctgcaggcccaggtgcggagcagaagcaagctggacgcccctaaggtggatctgctggtgaagaattgcctcctgcccctgagagagtacttcaagtatttcagccagaatagtctgcccctgggcggcccaagcagcggcgcccctcctcccagcggcggcagcccagccggctccccaacctctaccgaggagggcacctctgagtccgccacccccgagagcggccctggcacctccaccgagcccagcgagggcagcgcacccggcagccctgccggcagccccacctccacagaggagggaaccagcaccgagcccagcgaaggcagcgccccaggcaccagcaccgagcctagtgagggcggctctggcggcggcagcgcccaggagattaaacggatcaacaagatcagaagaagacttgtgaaagacagcaacaccaagaaggccggcaagacaggccccatgaaaaccctgctggttagagtgatgacacccgatctgagagagcggctggaaaacctgagaaagaagcctgaaaatatcccccagcccatcagcaatacatctagagccaacctgaataagctgctgaccgattacaccgaaatgaagaaggcgatcctgcatgtgtactgggaagagttccagaaggaccctgtgggcctgatgagccgggtggcccagcctgccagcaagaagatcgatcagaacaagctgaaacctgagatggacgagaagggcaacctgaccaccgccggctttgcctgctctcagtgtggccagcccctgttcgtgtacaagctggagcaggtgtctgagaagggcaaggcttacaccaactacttcggacggtgcaatgtggccgagcacgaaaagctgatcctgctggcccagctgaagcccgagaaggatagcgacgaagccgtgacatatagcctgggaaagtttgggcagagggccctggatttctacagcattcatgtgaccaaggagtccacccaccccgtgaagcccctggcccagatcgccggaaacagatacgcctccggacctgtgggaaaggccctgagcgacgcatgtatgggcacaatcgcctccttcctgtctaagtaccaggacatcatcatcgaacaccagaaggtggtgaagggcaaccagaagagactggagagcctgcgggagctggccggcaaggaaaacctggaataccctagcgtgaccctgccacctcagcctcacaccaaggagggcgttgatgcctacaacgaagtgatcgcccgggtgcgaatgtgggtgaacctgaacctgtggcagaagctgaagctaagcagagatgatgccaagcctctgctgagactgaagggattcccttcctttcctctggtcgagagacaggccaacgaagtggactggtgggacatggtgtgtaacgtgaagaagctgatcaacgagaaaaaggaggatggcaaggtgttttggcagaatctggctggctacaagagacaggaagccctgagaccatacctgagcagcgaggaagatcggaagaagggaaagaaattcgctcggtaccagctgggcgacctgctgctgcacctggaaaagaagcacggcgaggactggggaaaggtgtacgacgaggcctgggagcggattgacaagaaagtggaaggcctgagcaagcacatcaagctggaagaggaacggagaagcgaggacgcccagagcaaggccgccctgaccgactggctgcgggctaaggccagcttcgtgatcgagggcctgaaggaggccgacaaggacgagttctgcagatgcgagctgaagctgcagaagtggtacggggacctgcggggaaagcccttcgccatcgaagccgagaacagcatcctggacatcagcggcttcagcaagcagtacaactgtgccttcatctggcagaaggacggcgtgaagaagctgaacctgtacctgatcatcaactacttcaagggcggcaagctgcggttcaagaagatcaaacctgaagccttcgaagccaacagattctacaccgtgatcaacaaaaagagcggcgagatcgtgcccatggaggtgaacttcaacttcgacgaccccaacctgatcatcctgcctctggcctttggcaagagacagggcagagaattcatctggaacgacctgctgtccctggaaaccggcagcctgaagctggccaacggaagagtgatcgagaagacactgtacaacagaagaacccggcaggatgagcctgccctgttcgtggccctgaccttcgagcggcgggaggtcctggactcctccaatatcaaaccaatgaacctgatcggcgtggcaagaggcgaaaacatccccgccgtgatcgccctgaccgaccccgagggctgcccactgagccggtttaaggatagcctgggaaacccaacccacatcctgagaatcggcgagagctataaggagaagcagcggaccatccaggccaagaaggaggtggagcagcggagagccggcggctacagccggaagtacgccagcaaagccaagaatctggcagacgatatggtgagaaacaccgctagagatctgctgtactacgccgtgacccaggatgccatgctgatcttcgccaacctgagccggggcttcggccggcagggcaagcggaccttcatggccgagagacagtacacacggatggaggactggctgaccgccaagctggcctacgagggcctgagcaagacctacctgtccaagacactggcccagtacacctccaagacatgcagcaactgtgggtttaccatcaccagcgccgactacgacagggtgctggagaagctgaagaagacagcaacaggctggatgaccacaattaacggcaaggagctgaaggtggagggccagattacctactacaacagatacaagagacagaacgtagtcaaggacctgtccgtcgagctggatagactgagcgaagaatctgtgaacaacgacatctcctcctggacaaagggcagaagcggagaagctctgagcctcctgaagaaaagattctcccatagacccgtgcaggagaagttcgtgtgcctgaactgcggcttcgagacacacgcagccgagcaagccgccctgaacatcgccagatcctggctgttcctgcggagccaggagtacaagaaataccagacaaacaagacaaccggcaacaccgataagagagccttcgtcgagacctggcagtccttttaccggaagaagcttaaggaggtgtggaaacctgccgtgcggtctggcggatctggcggaggctccacaagcttccaggagcccctgaagttcagggacgtggccgtggagttcagcctggaggagtggcagtgcctggacaccatccagcagaacctgtacaggaacgtgatgctggagaactacaggaacctggtgttcctgggcatcgccgtgagcaagcccgacctgatcacctgcctggagcaggagaaggagccctggaccaggaagaggcacaggatggtggccaagcccgtgacctgcagccacttcaccagccccaagaaaaagagaaaagtctaagctgccttctgcggggcttgccttctggccatgcccttcttctctcccttgcacctgtacctcttggtctttgaataaagcctgagtaggaaggctagcaaaaaaaaaaaaaaaaaaaaaaaaaaaaaaaaaaaaaaaaaaaaaaaaaaaaaaaaaaaaaaaaaaaaaaaaaaaaaaaa

SEQ ID NO: 5935 - RNA, 5797 nt, synthetic construct
  source 1..5797: mol_type = other RNA
aggaaataagagagaaaagaagagtaagaagaaatataagagccaccatggcccctaagaagaagcgtaaagtgagccggatggaacgcctcgtctacgaggtgcggcagaagtgcagaaacatcgaggacatctgcatctcctgcggatctctgaacgtgaccctggagcacccactgttcatcggcggcatgtgccagaactgtaaaaactgttttctggagtgtgcctatcaatacgacgatgacggctaccagagctactgcaccatctgttgcggcggaagagaggtgctgatgtgtggaaataacaactgctgccggtgcttctgcgtggaatgcgtggacctgctggtgggccccggcgccgcccaggccgctattaaggaagatccttggaactgctacatgtgcggccacaagggcacatacggcctgctgagacggagagaggactggcctagcagactgcagatgttcttcgccaataaccacgaccaggagttcgacccccctaaggtgtaccctcccgtccccgccgagaagagaaagcccatccgggtcctgagcctgttcgatggcatcgccaccggtctgctggtgctgaaggacctgggcatccaggtggataggtacattgcctccgaggtgtgcgaggactccatcaccgtgggaatggtgcgtcatcagggcaagatcatgtacgtgggcgacgtgcggagcgtgacacagaagcatatccaggagtggggccctttcgacctggtgatcggcggcagcccttgcaatgacctgagcatcgtgaacccagcccggaagggcctgtacgagggaaccggcagactgttcttcgagttttacagactgctgcacgacgcccggcctaaggaaggcgacgaccggcccttcttttggctgttcgagaatgtggtggccatgggagtcagcgacaagcgggatattagccggttcctggagagcaaccccgtgatgatcgatgccaaggaagtgagcgccgcccaccgggccagatacttctggggcaatctgcctggcatgaacagacccctggccagcaccgtgaacgacaagctggagctgcaggagtgcctggagcacggccggatcgccaagttcagcaaggtgagaaccatcaccacccgaagcaacagcatcaaacaaggcaaggaccagcactttcctgtgttcatgaacgagaaggaggacatcctgtggtgtaccgagatggagagagtgttcgggttcccagtccactacacagatgtcagcaacatgtctagactggccagacagagactgctgggaagaagctggtccgtccctgtgatcagacacctgttcgcccctctgaaggagtacttcgcctgcgtgagcagcggcaacagcaacgccaacagccggggccccagcttctctagcggcctggtgccactgtccctgagagggagccacatgggccccatggagatctacaaaaccgtgagcgcctggaagcggcagcctgtgcgcgtgctgagcctgtttcggaatatcgataaagtcctgaaaagcctgggattcctggagagcggctctggctccggcggtggcaccctgaagtacgtggaggatgtgacaaacgtggtcagacgggatgtggagaagtggggccccttcgatctggtgtacggcagcacccaacccctgggcagctcttgtgaccggtgccctggctggtacatgtttcagttccaccggatcctgcagtacgccctgccgagacaggagtcccagcggccattcttttggattttcatggacaacttgctgctgaccgaggatgaccaggaaactaccactcggttcctgcagaccgaagccgtgaccctgcaggacgtgagaggccgggactaccagaacgccatgcgggtgtggtccaacatccctggactgaaaagcaagcacgcacctctgacccctaaagaagaggagtacctgcaggcccaggtgcggagcagaagcaagctggacgcccctaaggtggatctgctggtgaagaattgcctcctgcccctgagagagtacttcaagtatttcagccagaatagtctgcccctgggcggcccaagcagcggcgcccctcctcccagcggcggcagcccagccggctccccaacctctaccgaggagggcacctctgagtccgccacccccgagagcggccctggcacctccaccgagcccagcgagggcagcgcacccggcagccctgccggcagccccacctccacagaggagggaaccagcaccgagcccagcgaaggcagcgccccaggcaccagcaccgagcctagtgagggcggctctggcggcggcagcgcccaggagattaaacggatcaacaagatcagaagaagacttgtgaaagacagcaacaccaagaaggccggcaagacaggccccatgaaaaccctgctggttagagtgatgacacccgatctgagagagcggctggaaaacctgagaaagaagcctgaaaatatcccccagcccatcagcaatacatctagagccaacctgaataagctgctgaccgattacaccgaaatgaagaaggcgatcctgcatgtgtactgggaagagttccagaaggaccctgtgggcctgatgagccgggtggcccagcctgccagcaagaagatcgatcagaacaagctgaaacctgagatggacgagaagggcaacctgaccaccgccggctttgcctgctctcagtgtggccagcccctgttcgtgtacaagctggagcaggtgtctgagaagggcaaggcttacaccaactacttcggacggtgcaatgtggccgagcacgaaaagctgatcctgctggcccagctgaagcccgagaaggatagcgacgaagccgtgacatatagcctgggaaagtttgggcagagggccctggatttctacagcattcatgtgaccaaggagtccacccaccccgtgaagcccctggcccagatcgccggaaacagatacgcctccggacctgtgggaaaggccctgagcgacgcatgtatgggcacaatcgcctccttcctgtctaagtaccaggacatcatcatcgaacaccagaaggtggtgaagggcaaccagaagagactggagagcctgcgggagctggccggcaaggaaaacctggaataccctagcgtgaccctgccacctcagcctcacaccaaggagggcgttgatgcctacaacgaagtgatcgcccgggtgcgaatgtgggtgaacctgaacctgtggcagaagctgaagctaagcagagatgatgccaagcctctgctgagactgaagggattcccttcctttcctctggtcgagagacaggccaacgaagtggactggtgggacatggtgtgtaacgtgaagaagctgatcaacgagaaaaaggaggatggcaaggtgttttggcagaatctggctggctacaagagacaggaagccctgagaccatacctgagcagcgaggaagatcggaagaagggaaagaaattcgctcggtaccagctgggcgacctgctgctgcacctggaaaagaagcacggcgaggactggggaaaggtgtacgacgaggcctgggagcggattgacaagaaagtggaaggcctgagcaagcacatcaagctggaagaggaacggagaagcgaggacgcccagagcaaggccgccctgaccgactggctgcgggctaaggccagcttcgtgatcgagggcctgaaggaggccgacaaggacgagttctgcagatgcgagctgaagctgcagaagtggtacggggacctgcggggaaagcccttcgccatcgaagccgagaacagcatcctggacatcagcggcttcagcaagcagtacaactgtgccttcatctggcagaaggacggcgtgaagaagctgaacctgtacctgatcatcaactacttcaagggcggcaagctgcggttcaagaagatcaaacctgaagccttcgaagccaacagattctacaccgtgatcaacaaaaagagcggcgagatcgtgcccatggaggtgaacttcaacttcgacgaccccaacctgatcatcctgcctctggcctttggcaagagacagggcagagaattcatctggaacgacctgctgtccctggaaaccggcagcctgaagctggccaacggaagagtgatcgagaagacactgtacaacagaagaacccggcaggatgagcctgccctgttcgtggccctgaccttcgagcggcgggaggtcctggactcctccaatatcaaaccaatgaacctgatcggcgtggcaagaggcgaaaacatccccgccgtgatcgccctgaccgaccccgagggctgcccactgagccggtttaaggatagcctgggaaacccaacccacatcctgagaatcggcgagagctataaggagaagcagcggaccatccaggccaagaaggaggtggagcagcggagagccggcggctacagccggaagtacgccagcaaagccaagaatctggcagacgatatggtgagaaacaccgctagagatctgctgtactacgccgtgacccaggatgccatgctgatcttcgccaacctgagccggggcttcggccggcagggcaagcggaccttcatggccgagagacagtacacacggatggaggactggctgaccgccaagctggcctacgagggcctgagcaagacctacctgtccaagacactggcccagtacacctccaagacatgcagcaactgtgggtttaccatcaccagcgccgactacgacagggtgctggagaagctgaagaagacagcaacaggctggatgaccacaattaacggcaaggagctgaaggtggagggccagattacctactacaacagatacaagagacagaacgtagtcaaggacctgtccgtcgagctggatagactgagcgaagaatctgtgaacaacgacatctcctcctggacaaagggcagaagcggagaagctctgagcctcctgaagaaaagattctcccatagacccgtgcaggagaagttcgtgtgcctgaactgcggcttcgagacacacgcagccgagcaagccgccctgaacatcgccagatcctggctgttcctgcggagccaggagtacaagaaataccagacaaacaagacaaccggcaacaccgataagagagccttcgtcgagacctggcagtccttttaccggaagaagcttaaggaggtgtggaaacctgccgtgcggtctggcggatctggcggaggctccacaagcgagcccggcgccgtgagcttcgccgacgtggccgtgtacttcagccccgaggagtgggagtgcctgaggcccgcccagagggccctgtacagggacgtgatgagggagacctacggccacctgggcgccctgggcttccccggccccaagcccgccctgatcagctggatggagcaggagagcgaggcctggagccccgccgcccaggaccccgagaagggcgagaggctgggcggcgccaggaccagccccaagaaaaagagaaaagtctaagctgccttctgcggggcttgccttctggccatgcccttcttctctcccttgcacctgtacctcttggtctttgaataaagcctgagtaggaaggctagcaaaaaaaaaaaaaaaaaaaaaaaaaaaaaaaaaaaaaaaaaaaaaaaaaaaaaaaaaaaaaaaaaaaaaaaaaaaaaaaa

SEQ ID NO: 5936 - RNA, 5797 nt, synthetic construct
  source 1..5797: mol_type = other RNA
aggaaataagagagaaaagaagagtaagaagaaatataagagccaccatggcccctaagaagaagcgtaaagtgagccggatggaacgcctcgtctacgaggtgcggcagaagtgcagaaacatcgaggacatctgcatctcctgcggatctctgaacgtgaccctggagcacccactgttcatcggcggcatgtgccagaactgtaaaaactgttttctggagtgtgcctatcaatacgacgatgacggctaccagagctactgcaccatctgttgcggcggaagagaggtgctgatgtgtggaaataacaactgctgccggtgcttctgcgtggaatgcgtggacctgctggtgggccccggcgccgcccaggccgctattaaggaagatccttggaactgctacatgtgcggccacaagggcacatacggcctgctgagacggagagaggactggcctagcagactgcagatgttcttcgccaataaccacgaccaggagttcgacccccctaaggtgtaccctcccgtccccgccgagaagagaaagcccatccgggtcctgagcctgttcgatggcatcgccaccggtctgctggtgctgaaggacctgggcatccaggtggataggtacattgcctccgaggtgtgcgaggactccatcaccgtgggaatggtgcgtcatcagggcaagatcatgtacgtgggcgacgtgcggagcgtgacacagaagcatatccaggagtggggccctttcgacctggtgatcggcggcagcccttgcaatgacctgagcatcgtgaacccagcccggaagggcctgtacgagggaaccggcagactgttcttcgagttttacagactgctgcacgacgcccggcctaaggaaggcgacgaccggcccttcttttggctgttcgagaatgtggtggccatgggagtcagcgacaagcgggatattagccggttcctggagagcaaccccgtgatgatcgatgccaaggaagtgagcgccgcccaccgggccagatacttctggggcaatctgcctggcatgaacagacccctggccagcaccgtgaacgacaagctggagctgcaggagtgcctggagcacggccggatcgccaagttcagcaaggtgagaaccatcaccacccgaagcaacagcatcaaacaaggcaaggaccagcactttcctgtgttcatgaacgagaaggaggacatcctgtggtgtaccgagatggagagagtgttcgggttcccagtccactacacagatgtcagcaacatgtctagactggccagacagagactgctgggaagaagctggtccgtccctgtgatcagacacctgttcgcccctctgaaggagtacttcgcctgcgtgagcagcggcaacagcaacgccaacagccggggccccagcttctctagcggcctggtgccactgtccctgagagggagccacatgggccccatggagatctacaaaaccgtgagcgcctggaagcggcagcctgtgcgcgtgctgagcctgtttcggaatatcgataaagtcctgaaaagcctgggattcctggagagcggctctggctccggcggtggcaccctgaagtacgtggaggatgtgacaaacgtggtcagacgggatgtggagaagtggggccccttcgatctggtgtacggcagcacccaacccctgggcagctcttgtgaccggtgccctggctggtacatgtttcagttccaccggatcctgcagtacgccctgccgagacaggagtcccagcggccattcttttggattttcatggacaacttgctgctgaccgaggatgaccaggaaactaccactcggttcctgcagaccgaagccgtgaccctgcaggacgtgagaggccgggactaccagaacgccatgcgggtgtggtccaacatccctggactgaaaagcaagcacgcacctctgacccctaaagaagaggagtacctgcaggcccaggtgcggagcagaagcaagctggacgcccctaaggtggatctgctggtgaagaattgcctcctgcccctgagagagtacttcaagtatttcagccagaatagtctgcccctgggcggcccaagcagcggcgcccctcctcccagcggcggcagcccagccggctccccaacctctaccgaggagggcacctctgagtccgccacccccgagagcggccctggcacctccaccgagcccagcgagggcagcgcacccggcagccctgccggcagccccacctccacagaggagggaaccagcaccgagcccagcgaaggcagcgccccaggcaccagcaccgagcctagtgagggcggctctggcggcggcagcgcccaggagattaaacggatcaacaagatcagaagaagacttgtgaaagacagcaacaccaagaaggccggcaagacaggccccatgaaaaccctgctggttagagtgatgacacccgatctgagagagcggctggaaaacctgagaaagaagcctgaaaatatcccccagcccatcagcaatacatctagagccaacctgaataagctgctgaccgattacaccgaaatgaagaaggcgatcctgcatgtgtactgggaagagttccagaaggaccctgtgggcctgatgagccgggtggcccagcctgccagcaagaagatcgatcagaacaagctgaaacctgagatggacgagaagggcaacctgaccaccgccggctttgcctgctctcagtgtggccagcccctgttcgtgtacaagctggagcaggtgtctgagaagggcaaggcttacaccaactacttcggacggtgcaatgtggccgagcacgaaaagctgatcctgctggcccagctgaagcccgagaaggatagcgacgaagccgtgacatatagcctgggaaagtttgggcagagggccctggatttctacagcattcatgtgaccaaggagtccacccaccccgtgaagcccctggcccagatcgccggaaacagatacgcctccggacctgtgggaaaggccctgagcgacgcatgtatgggcacaatcgcctccttcctgtctaagtaccaggacatcatcatcgaacaccagaaggtggtgaagggcaaccagaagagactggagagcctgcgggagctggccggcaaggaaaacctggaataccctagcgtgaccctgccacctcagcctcacaccaaggagggcgttgatgcctacaacgaagtgatcgcccgggtgcgaatgtgggtgaacctgaacctgtggcagaagctgaagctaagcagagatgatgccaagcctctgctgagactgaagggattcccttcctttcctctggtcgagagacaggccaacgaagtggactggtgggacatggtgtgtaacgtgaagaagctgatcaacgagaaaaaggaggatggcaaggtgttttggcagaatctggctggctacaagagacaggaagccctgagaccatacctgagcagcgaggaagatcggaagaagggaaagaaattcgctcggtaccagctgggcgacctgctgctgcacctggaaaagaagcacggcgaggactggggaaaggtgtacgacgaggcctgggagcggattgacaagaaagtggaaggcctgagcaagcacatcaagctggaagaggaacggagaagcgaggacgcccagagcaaggccgccctgaccgactggctgcgggctaaggccagcttcgtgatcgagggcctgaaggaggccgacaaggacgagttctgcagatgcgagctgaagctgcagaagtggtacggggacctgcggggaaagcccttcgccatcgaagccgagaacagcatcctggacatcagcggcttcagcaagcagtacaactgtgccttcatctggcagaaggacggcgtgaagaagctgaacctgtacctgatcatcaactacttcaagggcggcaagctgcggttcaagaagatcaaacctgaagccttcgaagccaacagattctacaccgtgatcaacaaaaagagcggcgagatcgtgcccatggaggtgaacttcaacttcgacgaccccaacctgatcatcctgcctctggcctttggcaagagacagggcagagaattcatctggaacgacctgctgtccctggaaaccggcagcctgaagctggccaacggaagagtgatcgagaagacactgtacaacagaagaacccggcaggatgagcctgccctgttcgtggccctgaccttcgagcggcgggaggtcctggactcctccaatatcaaaccaatgaacctgatcggcgtggcaagaggcgaaaacatccccgccgtgatcgccctgaccgaccccgagggctgcccactgagccggtttaaggatagcctgggaaacccaacccacatcctgagaatcggcgagagctataaggagaagcagcggaccatccaggccaagaaggaggtggagcagcggagagccggcggctacagccggaagtacgccagcaaagccaagaatctggcagacgatatggtgagaaacaccgctagagatctgctgtactacgccgtgacccaggatgccatgctgatcttcgccaacctgagccggggcttcggccggcagggcaagcggaccttcatggccgagagacagtacacacggatggaggactggctgaccgccaagctggcctacgagggcctgagcaagacctacctgtccaagacactggcccagtacacctccaagacatgcagcaactgtgggtttaccatcaccagcgccgactacgacagggtgctggagaagctgaagaagacagcaacaggctggatgaccacaattaacggcaaggagctgaaggtggagggccagattacctactacaacagatacaagagacagaacgtagtcaaggacctgtccgtcgagctggatagactgagcgaagaatctgtgaacaacgacatctcctcctggacaaagggcagaagcggagaagctctgagcctcctgaagaaaagattctcccatagacccgtgcaggagaagttcgtgtgcctgaactgcggcttcgagacacacgcagccgagcaagccgccctgaacatcgccagatcctggctgttcctgcggagccaggagtacaagaaataccagacaaacaagacaaccggcaacaccgataagagagccttcgtcgagacctggcagtccttttaccggaagaagcttaaggaggtgtggaaacctgccgtgcggtctggcggatctggcggaggctccacaagccaggccgaggtgaccttcgaggacgtggccgtgctgttcagcagggaggagtggggcaggctgggccccgcccagaggggcctgtacagggacgtgatgctggagacctacaggaacctggccagcctgggcgccggcagggccggcagcaagcccggcgtgatcacccagctggagaggggcgacgagccctgggtgctggacgcccagggcgccaagggcaagggccagcccagggtgagcaccagccccaagaaaaagagaaaagtctaagctgccttctgcggggcttgccttctggccatgcccttcttctctcccttgcacctgtacctcttggtctttgaataaagcctgagtaggaaggctagcaaaaaaaaaaaaaaaaaaaaaaaaaaaaaaaaaaaaaaaaaaaaaaaaaaaaaaaaaaaaaaaaaaaaaaaaaaaaaaaa

SEQ ID NO: 5937 - RNA, 5797 nt, synthetic construct
  source 1..5797: mol_type = other RNA
aggaaataagagagaaaagaagagtaagaagaaatataagagccaccatggcccctaagaagaagcgtaaagtgagccggatggaacgcctcgtctacgaggtgcggcagaagtgcagaaacatcgaggacatctgcatctcctgcggatctctgaacgtgaccctggagcacccactgttcatcggcggcatgtgccagaactgtaaaaactgttttctggagtgtgcctatcaatacgacgatgacggctaccagagctactgcaccatctgttgcggcggaagagaggtgctgatgtgtggaaataacaactgctgccggtgcttctgcgtggaatgcgtggacctgctggtgggccccggcgccgcccaggccgctattaaggaagatccttggaactgctacatgtgcggccacaagggcacatacggcctgctgagacggagagaggactggcctagcagactgcagatgttcttcgccaataaccacgaccaggagttcgacccccctaaggtgtaccctcccgtccccgccgagaagagaaagcccatccgggtcctgagcctgttcgatggcatcgccaccggtctgctggtgctgaaggacctgggcatccaggtggataggtacattgcctccgaggtgtgcgaggactccatcaccgtgggaatggtgcgtcatcagggcaagatcatgtacgtgggcgacgtgcggagcgtgacacagaagcatatccaggagtggggccctttcgacctggtgatcggcggcagcccttgcaatgacctgagcatcgtgaacccagcccggaagggcctgtacgagggaaccggcagactgttcttcgagttttacagactgctgcacgacgcccggcctaaggaaggcgacgaccggcccttcttttggctgttcgagaatgtggtggccatgggagtcagcgacaagcgggatattagccggttcctggagagcaaccccgtgatgatcgatgccaaggaagtgagcgccgcccaccgggccagatacttctggggcaatctgcctggcatgaacagacccctggccagcaccgtgaacgacaagctggagctgcaggagtgcctggagcacggccggatcgccaagttcagcaaggtgagaaccatcaccacccgaagcaacagcatcaaacaaggcaaggaccagcactttcctgtgttcatgaacgagaaggaggacatcctgtggtgtaccgagatggagagagtgttcgggttcccagtccactacacagatgtcagcaacatgtctagactggccagacagagactgctgggaagaagctggtccgtccctgtgatcagacacctgttcgcccctctgaaggagtacttcgcctgcgtgagcagcggcaacagcaacgccaacagccggggccccagcttctctagcggcctggtgccactgtccctgagagggagccacatgggccccatggagatctacaaaaccgtgagcgcctggaagcggcagcctgtgcgcgtgctgagcctgtttcggaatatcgataaagtcctgaaaagcctgggattcctggagagcggctctggctccggcggtggcaccctgaagtacgtggaggatgtgacaaacgtggtcagacgggatgtggagaagtggggccccttcgatctggtgtacggcagcacccaacccctgggcagctcttgtgaccggtgccctggctggtacatgtttcagttccaccggatcctgcagtacgccctgccgagacaggagtcccagcggccattcttttggattttcatggacaacttgctgctgaccgaggatgaccaggaaactaccactcggttcctgcagaccgaagccgtgaccctgcaggacgtgagaggccgggactaccagaacgccatgcgggtgtggtccaacatccctggactgaaaagcaagcacgcacctctgacccctaaagaagaggagtacctgcaggcccaggtgcggagcagaagcaagctggacgcccctaaggtggatctgctggtgaagaattgcctcctgcccctgagagagtacttcaagtatttcagccagaatagtctgcccctgggcggcccaagcagcggcgcccctcctcccagcggcggcagcccagccggctccccaacctctaccgaggagggcacctctgagtccgccacccccgagagcggccctggcacctccaccgagcccagcgagggcagcgcacccggcagccctgccggcagccccacctccacagaggagggaaccagcaccgagcccagcgaaggcagcgccccaggcaccagcaccgagcctagtgagggcggctctggcggcggcagcgcccaggagattaaacggatcaacaagatcagaagaagacttgtgaaagacagcaacaccaagaaggccggcaagacaggccccatgaaaaccctgctggttagagtgatgacacccgatctgagagagcggctggaaaacctgagaaagaagcctgaaaatatcccccagcccatcagcaatacatctagagccaacctgaataagctgctgaccgattacaccgaaatgaagaaggcgatcctgcatgtgtactgggaagagttccagaaggaccctgtgggcctgatgagccgggtggcccagcctgccagcaagaagatcgatcagaacaagctgaaacctgagatggacgagaagggcaacctgaccaccgccggctttgcctgctctcagtgtggccagcccctgttcgtgtacaagctggagcaggtgtctgagaagggcaaggcttacaccaactacttcggacggtgcaatgtggccgagcacgaaaagctgatcctgctggcccagctgaagcccgagaaggatagcgacgaagccgtgacatatagcctgggaaagtttgggcagagggccctggatttctacagcattcatgtgaccaaggagtccacccaccccgtgaagcccctggcccagatcgccggaaacagatacgcctccggacctgtgggaaaggccctgagcgacgcatgtatgggcacaatcgcctccttcctgtctaagtaccaggacatcatcatcgaacaccagaaggtggtgaagggcaaccagaagagactggagagcctgcgggagctggccggcaaggaaaacctggaataccctagcgtgaccctgccacctcagcctcacaccaaggagggcgttgatgcctacaacgaagtgatcgcccgggtgcgaatgtgggtgaacctgaacctgtggcagaagctgaagctaagcagagatgatgccaagcctctgctgagactgaagggattcccttcctttcctctggtcgagagacaggccaacgaagtggactggtgggacatggtgtgtaacgtgaagaagctgatcaacgagaaaaaggaggatggcaaggtgttttggcagaatctggctggctacaagagacaggaagccctgagaccatacctgagcagcgaggaagatcggaagaagggaaagaaattcgctcggtaccagctgggcgacctgctgctgcacctggaaaagaagcacggcgaggactggggaaaggtgtacgacgaggcctgggagcggattgacaagaaagtggaaggcctgagcaagcacatcaagctggaagaggaacggagaagcgaggacgcccagagcaaggccgccctgaccgactggctgcgggctaaggccagcttcgtgatcgagggcctgaaggaggccgacaaggacgagttctgcagatgcgagctgaagctgcagaagtggtacggggacctgcggggaaagcccttcgccatcgaagccgagaacagcatcctggacatcagcggcttcagcaagcagtacaactgtgccttcatctggcagaaggacggcgtgaagaagctgaacctgtacctgatcatcaactacttcaagggcggcaagctgcggttcaagaagatcaaacctgaagccttcgaagccaacagattctacaccgtgatcaacaaaaagagcggcgagatcgtgcccatggaggtgaacttcaacttcgacgaccccaacctgatcatcctgcctctggcctttggcaagagacagggcagagaattcatctggaacgacctgctgtccctggaaaccggcagcctgaagctggccaacggaagagtgatcgagaagacactgtacaacagaagaacccggcaggatgagcctgccctgttcgtggccctgaccttcgagcggcgggaggtcctggactcctccaatatcaaaccaatgaacctgatcggcgtggcaagaggcgaaaacatccccgccgtgatcgccctgaccgaccccgagggctgcccactgagccggtttaaggatagcctgggaaacccaacccacatcctgagaatcggcgagagctataaggagaagcagcggaccatccaggccaagaaggaggtggagcagcggagagccggcggctacagccggaagtacgccagcaaagccaagaatctggcagacgatatggtgagaaacaccgctagagatctgctgtactacgccgtgacccaggatgccatgctgatcttcgccaacctgagccggggcttcggccggcagggcaagcggaccttcatggccgagagacagtacacacggatggaggactggctgaccgccaagctggcctacgagggcctgagcaagacctacctgtccaagacactggcccagtacacctccaagacatgcagcaactgtgggtttaccatcaccagcgccgactacgacagggtgctggagaagctgaagaagacagcaacaggctggatgaccacaattaacggcaaggagctgaaggtggagggccagattacctactacaacagatacaagagacagaacgtagtcaaggacctgtccgtcgagctggatagactgagcgaagaatctgtgaacaacgacatctcctcctggacaaagggcagaagcggagaagctctgagcctcctgaagaaaagattctcccatagacccgtgcaggagaagttcgtgtgcctgaactgcggcttcgagacacacgcagccgagcaagccgccctgaacatcgccagatcctggctgttcctgcggagccaggagtacaagaaataccagacaaacaagacaaccggcaacaccgataagagagccttcgtcgagacctggcagtccttttaccggaagaagcttaaggaggtgtggaaacctgccgtgcggtctggcggatctggcggaggctccacaagcaagcccgccgccgtgagcttcgccgacgtggccgtgtacttcagcgtggaggagtggggctgcctgaggcccgcccagagggccctgtacagggacgtgatgagggagacctacggccacctgggcgccctgggcttccccggccccaagcccgccctgatcagctggatggagcaggagagcgaggcctggagccccgccgcccaggaccccgaggagggcgagagcctgggcggcgccctgaccagccccaagaaaaagagaaaagtctaagctgccttctgcggggcttgccttctggccatgcccttcttctctcccttgcacctgtacctcttggtctttgaataaagcctgagtaggaaggctagcaaaaaaaaaaaaaaaaaaaaaaaaaaaaaaaaaaaaaaaaaaaaaaaaaaaaaaaaaaaaaaaaaaaaaaaaaaaaaaaa

SEQ ID NO: 5938 - RNA, 5797 nt, synthetic construct
  source 1..5797: mol_type = other RNA
aggaaataagagagaaaagaagagtaagaagaaatataagagccaccatggcccctaagaagaagcgtaaagtgagccggatggaacgcctcgtctacgaggtgcggcagaagtgcagaaacatcgaggacatctgcatctcctgcggatctctgaacgtgaccctggagcacccactgttcatcggcggcatgtgccagaactgtaaaaactgttttctggagtgtgcctatcaatacgacgatgacggctaccagagctactgcaccatctgttgcggcggaagagaggtgctgatgtgtggaaataacaactgctgccggtgcttctgcgtggaatgcgtggacctgctggtgggccccggcgccgcccaggccgctattaaggaagatccttggaactgctacatgtgcggccacaagggcacatacggcctgctgagacggagagaggactggcctagcagactgcagatgttcttcgccaataaccacgaccaggagttcgacccccctaaggtgtaccctcccgtccccgccgagaagagaaagcccatccgggtcctgagcctgttcgatggcatcgccaccggtctgctggtgctgaaggacctgggcatccaggtggataggtacattgcctccgaggtgtgcgaggactccatcaccgtgggaatggtgcgtcatcagggcaagatcatgtacgtgggcgacgtgcggagcgtgacacagaagcatatccaggagtggggccctttcgacctggtgatcggcggcagcccttgcaatgacctgagcatcgtgaacccagcccggaagggcctgtacgagggaaccggcagactgttcttcgagttttacagactgctgcacgacgcccggcctaaggaaggcgacgaccggcccttcttttggctgttcgagaatgtggtggccatgggagtcagcgacaagcgggatattagccggttcctggagagcaaccccgtgatgatcgatgccaaggaagtgagcgccgcccaccgggccagatacttctggggcaatctgcctggcatgaacagacccctggccagcaccgtgaacgacaagctggagctgcaggagtgcctggagcacggccggatcgccaagttcagcaaggtgagaaccatcaccacccgaagcaacagcatcaaacaaggcaaggaccagcactttcctgtgttcatgaacgagaaggaggacatcctgtggtgtaccgagatggagagagtgttcgggttcccagtccactacacagatgtcagcaacatgtctagactggccagacagagactgctgggaagaagctggtccgtccctgtgatcagacacctgttcgcccctctgaaggagtacttcgcctgcgtgagcagcggcaacagcaacgccaacagccggggccccagcttctctagcggcctggtgccactgtccctgagagggagccacatgggccccatggagatctacaaaaccgtgagcgcctggaagcggcagcctgtgcgcgtgctgagcctgtttcggaatatcgataaagtcctgaaaagcctgggattcctggagagcggctctggctccggcggtggcaccctgaagtacgtggaggatgtgacaaacgtggtcagacgggatgtggagaagtggggccccttcgatctggtgtacggcagcacccaacccctgggcagctcttgtgaccggtgccctggctggtacatgtttcagttccaccggatcctgcagtacgccctgccgagacaggagtcccagcggccattcttttggattttcatggacaacttgctgctgaccgaggatgaccaggaaactaccactcggttcctgcagaccgaagccgtgaccctgcaggacgtgagaggccgggactaccagaacgccatgcgggtgtggtccaacatccctggactgaaaagcaagcacgcacctctgacccctaaagaagaggagtacctgcaggcccaggtgcggagcagaagcaagctggacgcccctaaggtggatctgctggtgaagaattgcctcctgcccctgagagagtacttcaagtatttcagccagaatagtctgcccctgggcggcccaagcagcggcgcccctcctcccagcggcggcagcccagccggctccccaacctctaccgaggagggcacctctgagtccgccacccccgagagcggccctggcacctccaccgagcccagcgagggcagcgcacccggcagccctgccggcagccccacctccacagaggagggaaccagcaccgagcccagcgaaggcagcgccccaggcaccagcaccgagcctagtgagggcggctctggcggcggcagcgcccaggagattaaacggatcaacaagatcagaagaagacttgtgaaagacagcaacaccaagaaggccggcaagacaggccccatgaaaaccctgctggttagagtgatgacacccgatctgagagagcggctggaaaacctgagaaagaagcctgaaaatatcccccagcccatcagcaatacatctagagccaacctgaataagctgctgaccgattacaccgaaatgaagaaggcgatcctgcatgtgtactgggaagagttccagaaggaccctgtgggcctgatgagccgggtggcccagcctgccagcaagaagatcgatcagaacaagctgaaacctgagatggacgagaagggcaacctgaccaccgccggctttgcctgctctcagtgtggccagcccctgttcgtgtacaagctggagcaggtgtctgagaagggcaaggcttacaccaactacttcggacggtgcaatgtggccgagcacgaaaagctgatcctgctggcccagctgaagcccgagaaggatagcgacgaagccgtgacatatagcctgggaaagtttgggcagagggccctggatttctacagcattcatgtgaccaaggagtccacccaccccgtgaagcccctggcccagatcgccggaaacagatacgcctccggacctgtgggaaaggccctgagcgacgcatgtatgggcacaatcgcctccttcctgtctaagtaccaggacatcatcatcgaacaccagaaggtggtgaagggcaaccagaagagactggagagcctgcgggagctggccggcaaggaaaacctggaataccctagcgtgaccctgccacctcagcctcacaccaaggagggcgttgatgcctacaacgaagtgatcgcccgggtgcgaatgtgggtgaacctgaacctgtggcagaagctgaagctaagcagagatgatgccaagcctctgctgagactgaagggattcccttcctttcctctggtcgagagacaggccaacgaagtggactggtgggacatggtgtgtaacgtgaagaagctgatcaacgagaaaaaggaggatggcaaggtgttttggcagaatctggctggctacaagagacaggaagccctgagaccatacctgagcagcgaggaagatcggaagaagggaaagaaattcgctcggtaccagctgggcgacctgctgctgcacctggaaaagaagcacggcgaggactggggaaaggtgtacgacgaggcctgggagcggattgacaagaaagtggaaggcctgagcaagcacatcaagctggaagaggaacggagaagcgaggacgcccagagcaaggccgccctgaccgactggctgcgggctaaggccagcttcgtgatcgagggcctgaaggaggccgacaaggacgagttctgcagatgcgagctgaagctgcagaagtggtacggggacctgcggggaaagcccttcgccatcgaagccgagaacagcatcctggacatcagcggcttcagcaagcagtacaactgtgccttcatctggcagaaggacggcgtgaagaagctgaacctgtacctgatcatcaactacttcaagggcggcaagctgcggttcaagaagatcaaacctgaagccttcgaagccaacagattctacaccgtgatcaacaaaaagagcggcgagatcgtgcccatggaggtgaacttcaacttcgacgaccccaacctgatcatcctgcctctggcctttggcaagagacagggcagagaattcatctggaacgacctgctgtccctggaaaccggcagcctgaagctggccaacggaagagtgatcgagaagacactgtacaacagaagaacccggcaggatgagcctgccctgttcgtggccctgaccttcgagcggcgggaggtcctggactcctccaatatcaaaccaatgaacctgatcggcgtggcaagaggcgaaaacatccccgccgtgatcgccctgaccgaccccgagggctgcccactgagccggtttaaggatagcctgggaaacccaacccacatcctgagaatcggcgagagctataaggagaagcagcggaccatccaggccaagaaggaggtggagcagcggagagccggcggctacagccggaagtacgccagcaaagccaagaatctggcagacgatatggtgagaaacaccgctagagatctgctgtactacgccgtgacccaggatgccatgctgatcttcgccaacctgagccggggcttcggccggcagggcaagcggaccttcatggccgagagacagtacacacggatggaggactggctgaccgccaagctggcctacgagggcctgagcaagacctacctgtccaagacactggcccagtacacctccaagacatgcagcaactgtgggtttaccatcaccagcgccgactacgacagggtgctggagaagctgaagaagacagcaacaggctggatgaccacaattaacggcaaggagctgaaggtggagggccagattacctactacaacagatacaagagacagaacgtagtcaaggacctgtccgtcgagctggatagactgagcgaagaatctgtgaacaacgacatctcctcctggacaaagggcagaagcggagaagctctgagcctcctgaagaaaagattctcccatagacccgtgcaggagaagttcgtgtgcctgaactgcggcttcgagacacacgcagccgagcaagccgccctgaacatcgccagatcctggctgttcctgcggagccaggagtacaagaaataccagacaaacaagacaaccggcaacaccgataagagagccttcgtcgagacctggcagtccttttaccggaagaagcttaaggaggtgtggaaacctgccgtgcggtctggcggatctggcggaggctccacaagcctgcagggcagcgtgaccttccaggacgtggccgtggacttcagctgggaggagtggggccacctgggccccgcccagaaggagctgtacagggaggtgatgctggagaactacggcaacctggtgtgcctgggcctggccgtgagcagccccgacgtggtgtgccagctggagaggggcgagggcccctggatgcccgagggcgacgtgcccggcagcagctgcgccggctgggagaccaagaccagccccaagaaaaagagaaaagtctaagctgccttctgcggggcttgccttctggccatgcccttcttctctcccttgcacctgtacctcttggtctttgaataaagcctgagtaggaaggctagcaaaaaaaaaaaaaaaaaaaaaaaaaaaaaaaaaaaaaaaaaaaaaaaaaaaaaaaaaaaaaaaaaaaaaaaaaaaaaaaa

SEQ ID NO: 5939 - RNA, 5797 nt, synthetic construct
  source 1..5797: mol_type = other RNA
aggaaataagagagaaaagaagagtaagaagaaatataagagccaccatggcccctaagaagaagcgtaaagtgagccggatggaacgcctcgtctacgaggtgcggcagaagtgcagaaacatcgaggacatctgcatctcctgcggatctctgaacgtgaccctggagcacccactgttcatcggcggcatgtgccagaactgtaaaaactgttttctggagtgtgcctatcaatacgacgatgacggctaccagagctactgcaccatctgttgcggcggaagagaggtgctgatgtgtggaaataacaactgctgccggtgcttctgcgtggaatgcgtggacctgctggtgggccccggcgccgcccaggccgctattaaggaagatccttggaactgctacatgtgcggccacaagggcacatacggcctgctgagacggagagaggactggcctagcagactgcagatgttcttcgccaataaccacgaccaggagttcgacccccctaaggtgtaccctcccgtccccgccgagaagagaaagcccatccgggtcctgagcctgttcgatggcatcgccaccggtctgctggtgctgaaggacctgggcatccaggtggataggtacattgcctccgaggtgtgcgaggactccatcaccgtgggaatggtgcgtcatcagggcaagatcatgtacgtgggcgacgtgcggagcgtgacacagaagcatatccaggagtggggccctttcgacctggtgatcggcggcagcccttgcaatgacctgagcatcgtgaacccagcccggaagggcctgtacgagggaaccggcagactgttcttcgagttttacagactgctgcacgacgcccggcctaaggaaggcgacgaccggcccttcttttggctgttcgagaatgtggtggccatgggagtcagcgacaagcgggatattagccggttcctggagagcaaccccgtgatgatcgatgccaaggaagtgagcgccgcccaccgggccagatacttctggggcaatctgcctggcatgaacagacccctggccagcaccgtgaacgacaagctggagctgcaggagtgcctggagcacggccggatcgccaagttcagcaaggtgagaaccatcaccacccgaagcaacagcatcaaacaaggcaaggaccagcactttcctgtgttcatgaacgagaaggaggacatcctgtggtgtaccgagatggagagagtgttcgggttcccagtccactacacagatgtcagcaacatgtctagactggccagacagagactgctgggaagaagctggtccgtccctgtgatcagacacctgttcgcccctctgaaggagtacttcgcctgcgtgagcagcggcaacagcaacgccaacagccggggccccagcttctctagcggcctggtgccactgtccctgagagggagccacatgggccccatggagatctacaaaaccgtgagcgcctggaagcggcagcctgtgcgcgtgctgagcctgtttcggaatatcgataaagtcctgaaaagcctgggattcctggagagcggctctggctccggcggtggcaccctgaagtacgtggaggatgtgacaaacgtggtcagacgggatgtggagaagtggggccccttcgatctggtgtacggcagcacccaacccctgggcagctcttgtgaccggtgccctggctggtacatgtttcagttccaccggatcctgcagtacgccctgccgagacaggagtcccagcggccattcttttggattttcatggacaacttgctgctgaccgaggatgaccaggaaactaccactcggttcctgcagaccgaagccgtgaccctgcaggacgtgagaggccgggactaccagaacgccatgcgggtgtggtccaacatccctggactgaaaagcaagcacgcacctctgacccctaaagaagaggagtacctgcaggcccaggtgcggagcagaagcaagctggacgcccctaaggtggatctgctggtgaagaattgcctcctgcccctgagagagtacttcaagtatttcagccagaatagtctgcccctgggcggcccaagcagcggcgcccctcctcccagcggcggcagcccagccggctccccaacctctaccgaggagggcacctctgagtccgccacccccgagagcggccctggcacctccaccgagcccagcgagggcagcgcacccggcagccctgccggcagccccacctccacagaggagggaaccagcaccgagcccagcgaaggcagcgccccaggcaccagcaccgagcctagtgagggcggctctggcggcggcagcgcccaggagattaaacggatcaacaagatcagaagaagacttgtgaaagacagcaacaccaagaaggccggcaagacaggccccatgaaaaccctgctggttagagtgatgacacccgatctgagagagcggctggaaaacctgagaaagaagcctgaaaatatcccccagcccatcagcaatacatctagagccaacctgaataagctgctgaccgattacaccgaaatgaagaaggcgatcctgcatgtgtactgggaagagttccagaaggaccctgtgggcctgatgagccgggtggcccagcctgccagcaagaagatcgatcagaacaagctgaaacctgagatggacgagaagggcaacctgaccaccgccggctttgcctgctctcagtgtggccagcccctgttcgtgtacaagctggagcaggtgtctgagaagggcaaggcttacaccaactacttcggacggtgcaatgtggccgagcacgaaaagctgatcctgctggcccagctgaagcccgagaaggatagcgacgaagccgtgacatatagcctgggaaagtttgggcagagggccctggatttctacagcattcatgtgaccaaggagtccacccaccccgtgaagcccctggcccagatcgccggaaacagatacgcctccggacctgtgggaaaggccctgagcgacgcatgtatgggcacaatcgcctccttcctgtctaagtaccaggacatcatcatcgaacaccagaaggtggtgaagggcaaccagaagagactggagagcctgcgggagctggccggcaaggaaaacctggaataccctagcgtgaccctgccacctcagcctcacaccaaggagggcgttgatgcctacaacgaagtgatcgcccgggtgcgaatgtgggtgaacctgaacctgtggcagaagctgaagctaagcagagatgatgccaagcctctgctgagactgaagggattcccttcctttcctctggtcgagagacaggccaacgaagtggactggtgggacatggtgtgtaacgtgaagaagctgatcaacgagaaaaaggaggatggcaaggtgttttggcagaatctggctggctacaagagacaggaagccctgagaccatacctgagcagcgaggaagatcggaagaagggaaagaaattcgctcggtaccagctgggcgacctgctgctgcacctggaaaagaagcacggcgaggactggggaaaggtgtacgacgaggcctgggagcggattgacaagaaagtggaaggcctgagcaagcacatcaagctggaagaggaacggagaagcgaggacgcccagagcaaggccgccctgaccgactggctgcgggctaaggccagcttcgtgatcgagggcctgaaggaggccgacaaggacgagttctgcagatgcgagctgaagctgcagaagtggtacggggacctgcggggaaagcccttcgccatcgaagccgagaacagcatcctggacatcagcggcttcagcaagcagtacaactgtgccttcatctggcagaaggacggcgtgaagaagctgaacctgtacctgatcatcaactacttcaagggcggcaagctgcggttcaagaagatcaaacctgaagccttcgaagccaacagattctacaccgtgatcaacaaaaagagcggcgagatcgtgcccatggaggtgaacttcaacttcgacgaccccaacctgatcatcctgcctctggcctttggcaagagacagggcagagaattcatctggaacgacctgctgtccctggaaaccggcagcctgaagctggccaacggaagagtgatcgagaagacactgtacaacagaagaacccggcaggatgagcctgccctgttcgtggccctgaccttcgagcggcgggaggtcctggactcctccaatatcaaaccaatgaacctgatcggcgtggcaagaggcgaaaacatccccgccgtgatcgccctgaccgaccccgagggctgcccactgagccggtttaaggatagcctgggaaacccaacccacatcctgagaatcggcgagagctataaggagaagcagcggaccatccaggccaagaaggaggtggagcagcggagagccggcggctacagccggaagtacgccagcaaagccaagaatctggcagacgatatggtgagaaacaccgctagagatctgctgtactacgccgtgacccaggatgccatgctgatcttcgccaacctgagccggggcttcggccggcagggcaagcggaccttcatggccgagagacagtacacacggatggaggactggctgaccgccaagctggcctacgagggcctgagcaagacctacctgtccaagacactggcccagtacacctccaagacatgcagcaactgtgggtttaccatcaccagcgccgactacgacagggtgctggagaagctgaagaagacagcaacaggctggatgaccacaattaacggcaaggagctgaaggtggagggccagattacctactacaacagatacaagagacagaacgtagtcaaggacctgtccgtcgagctggatagactgagcgaagaatctgtgaacaacgacatctcctcctggacaaagggcagaagcggagaagctctgagcctcctgaagaaaagattctcccatagacccgtgcaggagaagttcgtgtgcctgaactgcggcttcgagacacacgcagccgagcaagccgccctgaacatcgccagatcctggctgttcctgcggagccaggagtacaagaaataccagacaaacaagacaaccggcaacaccgataagagagccttcgtcgagacctggcagtccttttaccggaagaagcttaaggaggtgtggaaacctgccgtgcggtctggcggatctggcggaggctccacaagcaccctggagagcgtgaccttccaggacgtggccgtggacttcacccaggaggagtgggccctgctggacaccagccagaggaccctgttcagggaggtgatgctggagaacatcagccacctggtgagcgtgggcaaccagctgtacaagagcgacgtgatcagccacctggagcagggcgagcagctgagcagggagggcctgggcttcctgcagggccagagccccgtgatcagcgacaggaccagccccaagaaaaagagaaaagtctaagctgccttctgcggggcttgccttctggccatgcccttcttctctcccttgcacctgtacctcttggtctttgaataaagcctgagtaggaaggctagcaaaaaaaaaaaaaaaaaaaaaaaaaaaaaaaaaaaaaaaaaaaaaaaaaaaaaaaaaaaaaaaaaaaaaaaaaaaaaaaa

SEQ ID NO: 5940 - RNA, 5797 nt, synthetic construct
  source 1..5797: mol_type = other RNA
aggaaataagagagaaaagaagagtaagaagaaatataagagccaccatggcccctaagaagaagcgtaaagtgagccggatggaacgcctcgtctacgaggtgcggcagaagtgcagaaacatcgaggacatctgcatctcctgcggatctctgaacgtgaccctggagcacccactgttcatcggcggcatgtgccagaactgtaaaaactgttttctggagtgtgcctatcaatacgacgatgacggctaccagagctactgcaccatctgttgcggcggaagagaggtgctgatgtgtggaaataacaactgctgccggtgcttctgcgtggaatgcgtggacctgctggtgggccccggcgccgcccaggccgctattaaggaagatccttggaactgctacatgtgcggccacaagggcacatacggcctgctgagacggagagaggactggcctagcagactgcagatgttcttcgccaataaccacgaccaggagttcgacccccctaaggtgtaccctcccgtccccgccgagaagagaaagcccatccgggtcctgagcctgttcgatggcatcgccaccggtctgctggtgctgaaggacctgggcatccaggtggataggtacattgcctccgaggtgtgcgaggactccatcaccgtgggaatggtgcgtcatcagggcaagatcatgtacgtgggcgacgtgcggagcgtgacacagaagcatatccaggagtggggccctttcgacctggtgatcggcggcagcccttgcaatgacctgagcatcgtgaacccagcccggaagggcctgtacgagggaaccggcagactgttcttcgagttttacagactgctgcacgacgcccggcctaaggaaggcgacgaccggcccttcttttggctgttcgagaatgtggtggccatgggagtcagcgacaagcgggatattagccggttcctggagagcaaccccgtgatgatcgatgccaaggaagtgagcgccgcccaccgggccagatacttctggggcaatctgcctggcatgaacagacccctggccagcaccgtgaacgacaagctggagctgcaggagtgcctggagcacggccggatcgccaagttcagcaaggtgagaaccatcaccacccgaagcaacagcatcaaacaaggcaaggaccagcactttcctgtgttcatgaacgagaaggaggacatcctgtggtgtaccgagatggagagagtgttcgggttcccagtccactacacagatgtcagcaacatgtctagactggccagacagagactgctgggaagaagctggtccgtccctgtgatcagacacctgttcgcccctctgaaggagtacttcgcctgcgtgagcagcggcaacagcaacgccaacagccggggccccagcttctctagcggcctggtgccactgtccctgagagggagccacatgggccccatggagatctacaaaaccgtgagcgcctggaagcggcagcctgtgcgcgtgctgagcctgtttcggaatatcgataaagtcctgaaaagcctgggattcctggagagcggctctggctccggcggtggcaccctgaagtacgtggaggatgtgacaaacgtggtcagacgggatgtggagaagtggggccccttcgatctggtgtacggcagcacccaacccctgggcagctcttgtgaccggtgccctggctggtacatgtttcagttccaccggatcctgcagtacgccctgccgagacaggagtcccagcggccattcttttggattttcatggacaacttgctgctgaccgaggatgaccaggaaactaccactcggttcctgcagaccgaagccgtgaccctgcaggacgtgagaggccgggactaccagaacgccatgcgggtgtggtccaacatccctggactgaaaagcaagcacgcacctctgacccctaaagaagaggagtacctgcaggcccaggtgcggagcagaagcaagctggacgcccctaaggtggatctgctggtgaagaattgcctcctgcccctgagagagtacttcaagtatttcagccagaatagtctgcccctgggcggcccaagcagcggcgcccctcctcccagcggcggcagcccagccggctccccaacctctaccgaggagggcacctctgagtccgccacccccgagagcggccctggcacctccaccgagcccagcgagggcagcgcacccggcagccctgccggcagccccacctccacagaggagggaaccagcaccgagcccagcgaaggcagcgccccaggcaccagcaccgagcctagtgagggcggctctggcggcggcagcgcccaggagattaaacggatcaacaagatcagaagaagacttgtgaaagacagcaacaccaagaaggccggcaagacaggccccatgaaaaccctgctggttagagtgatgacacccgatctgagagagcggctggaaaacctgagaaagaagcctgaaaatatcccccagcccatcagcaatacatctagagccaacctgaataagctgctgaccgattacaccgaaatgaagaaggcgatcctgcatgtgtactgggaagagttccagaaggaccctgtgggcctgatgagccgggtggcccagcctgccagcaagaagatcgatcagaacaagctgaaacctgagatggacgagaagggcaacctgaccaccgccggctttgcctgctctcagtgtggccagcccctgttcgtgtacaagctggagcaggtgtctgagaagggcaaggcttacaccaactacttcggacggtgcaatgtggccgagcacgaaaagctgatcctgctggcccagctgaagcccgagaaggatagcgacgaagccgtgacatatagcctgggaaagtttgggcagagggccctggatttctacagcattcatgtgaccaaggagtccacccaccccgtgaagcccctggcccagatcgccggaaacagatacgcctccggacctgtgggaaaggccctgagcgacgcatgtatgggcacaatcgcctccttcctgtctaagtaccaggacatcatcatcgaacaccagaaggtggtgaagggcaaccagaagagactggagagcctgcgggagctggccggcaaggaaaacctggaataccctagcgtgaccctgccacctcagcctcacaccaaggagggcgttgatgcctacaacgaagtgatcgcccgggtgcgaatgtgggtgaacctgaacctgtggcagaagctgaagctaagcagagatgatgccaagcctctgctgagactgaagggattcccttcctttcctctggtcgagagacaggccaacgaagtggactggtgggacatggtgtgtaacgtgaagaagctgatcaacgagaaaaaggaggatggcaaggtgttttggcagaatctggctggctacaagagacaggaagccctgagaccatacctgagcagcgaggaagatcggaagaagggaaagaaattcgctcggtaccagctgggcgacctgctgctgcacctggaaaagaagcacggcgaggactggggaaaggtgtacgacgaggcctgggagcggattgacaagaaagtggaaggcctgagcaagcacatcaagctggaagaggaacggagaagcgaggacgcccagagcaaggccgccctgaccgactggctgcgggctaaggccagcttcgtgatcgagggcctgaaggaggccgacaaggacgagttctgcagatgcgagctgaagctgcagaagtggtacggggacctgcggggaaagcccttcgccatcgaagccgagaacagcatcctggacatcagcggcttcagcaagcagtacaactgtgccttcatctggcagaaggacggcgtgaagaagctgaacctgtacctgatcatcaactacttcaagggcggcaagctgcggttcaagaagatcaaacctgaagccttcgaagccaacagattctacaccgtgatcaacaaaaagagcggcgagatcgtgcccatggaggtgaacttcaacttcgacgaccccaacctgatcatcctgcctctggcctttggcaagagacagggcagagaattcatctggaacgacctgctgtccctggaaaccggcagcctgaagctggccaacggaagagtgatcgagaagacactgtacaacagaagaacccggcaggatgagcctgccctgttcgtggccctgaccttcgagcggcgggaggtcctggactcctccaatatcaaaccaatgaacctgatcggcgtggcaagaggcgaaaacatccccgccgtgatcgccctgaccgaccccgagggctgcccactgagccggtttaaggatagcctgggaaacccaacccacatcctgagaatcggcgagagctataaggagaagcagcggaccatccaggccaagaaggaggtggagcagcggagagccggcggctacagccggaagtacgccagcaaagccaagaatctggcagacgatatggtgagaaacaccgctagagatctgctgtactacgccgtgacccaggatgccatgctgatcttcgccaacctgagccggggcttcggccggcagggcaagcggaccttcatggccgagagacagtacacacggatggaggactggctgaccgccaagctggcctacgagggcctgagcaagacctacctgtccaagacactggcccagtacacctccaagacatgcagcaactgtgggtttaccatcaccagcgccgactacgacagggtgctggagaagctgaagaagacagcaacaggctggatgaccacaattaacggcaaggagctgaaggtggagggccagattacctactacaacagatacaagagacagaacgtagtcaaggacctgtccgtcgagctggatagactgagcgaagaatctgtgaacaacgacatctcctcctggacaaagggcagaagcggagaagctctgagcctcctgaagaaaagattctcccatagacccgtgcaggagaagttcgtgtgcctgaactgcggcttcgagacacacgcagccgagcaagccgccctgaacatcgccagatcctggctgttcctgcggagccaggagtacaagaaataccagacaaacaagacaaccggcaacaccgataagagagccttcgtcgagacctggcagtccttttaccggaagaagcttaaggaggtgtggaaacctgccgtgcggtctggcggatctggcggaggctccacaagccaccaggaggtggtgaccttcgaggacgtggccgtgtacttcacccagaccgagtgggccggcctgagccccgcccagagggccctgtacaggagcgtgatgctggagatctacggcaacctgaccagcctgggctaccccgtgcccaagcccgccctggtgagcctgctggagaggggcgacctgcccgtgggcctggagacccaggacaacccccccgcccagggcaccagggacatctacaccagccccaagaaaaagagaaaagtctaagctgccttctgcggggcttgccttctggccatgcccttcttctctcccttgcacctgtacctcttggtctttgaataaagcctgagtaggaaggctagcaaaaaaaaaaaaaaaaaaaaaaaaaaaaaaaaaaaaaaaaaaaaaaaaaaaaaaaaaaaaaaaaaaaaaaaaaaaaaaaa

SEQ ID NO: 5941 - RNA, 5797 nt, synthetic construct
  source 1..5797: mol_type = other RNA
aggaaataagagagaaaagaagagtaagaagaaatataagagccaccatggcccctaagaagaagcgtaaagtgagccggatggaacgcctcgtctacgaggtgcggcagaagtgcagaaacatcgaggacatctgcatctcctgcggatctctgaacgtgaccctggagcacccactgttcatcggcggcatgtgccagaactgtaaaaactgttttctggagtgtgcctatcaatacgacgatgacggctaccagagctactgcaccatctgttgcggcggaagagaggtgctgatgtgtggaaataacaactgctgccggtgcttctgcgtggaatgcgtggacctgctggtgggccccggcgccgcccaggccgctattaaggaagatccttggaactgctacatgtgcggccacaagggcacatacggcctgctgagacggagagaggactggcctagcagactgcagatgttcttcgccaataaccacgaccaggagttcgacccccctaaggtgtaccctcccgtccccgccgagaagagaaagcccatccgggtcctgagcctgttcgatggcatcgccaccggtctgctggtgctgaaggacctgggcatccaggtggataggtacattgcctccgaggtgtgcgaggactccatcaccgtgggaatggtgcgtcatcagggcaagatcatgtacgtgggcgacgtgcggagcgtgacacagaagcatatccaggagtggggccctttcgacctggtgatcggcggcagcccttgcaatgacctgagcatcgtgaacccagcccggaagggcctgtacgagggaaccggcagactgttcttcgagttttacagactgctgcacgacgcccggcctaaggaaggcgacgaccggcccttcttttggctgttcgagaatgtggtggccatgggagtcagcgacaagcgggatattagccggttcctggagagcaaccccgtgatgatcgatgccaaggaagtgagcgccgcccaccgggccagatacttctggggcaatctgcctggcatgaacagacccctggccagcaccgtgaacgacaagctggagctgcaggagtgcctggagcacggccggatcgccaagttcagcaaggtgagaaccatcaccacccgaagcaacagcatcaaacaaggcaaggaccagcactttcctgtgttcatgaacgagaaggaggacatcctgtggtgtaccgagatggagagagtgttcgggttcccagtccactacacagatgtcagcaacatgtctagactggccagacagagactgctgggaagaagctggtccgtccctgtgatcagacacctgttcgcccctctgaaggagtacttcgcctgcgtgagcagcggcaacagcaacgccaacagccggggccccagcttctctagcggcctggtgccactgtccctgagagggagccacatgggccccatggagatctacaaaaccgtgagcgcctggaagcggcagcctgtgcgcgtgctgagcctgtttcggaatatcgataaagtcctgaaaagcctgggattcctggagagcggctctggctccggcggtggcaccctgaagtacgtggaggatgtgacaaacgtggtcagacgggatgtggagaagtggggccccttcgatctggtgtacggcagcacccaacccctgggcagctcttgtgaccggtgccctggctggtacatgtttcagttccaccggatcctgcagtacgccctgccgagacaggagtcccagcggccattcttttggattttcatggacaacttgctgctgaccgaggatgaccaggaaactaccactcggttcctgcagaccgaagccgtgaccctgcaggacgtgagaggccgggactaccagaacgccatgcgggtgtggtccaacatccctggactgaaaagcaagcacgcacctctgacccctaaagaagaggagtacctgcaggcccaggtgcggagcagaagcaagctggacgcccctaaggtggatctgctggtgaagaattgcctcctgcccctgagagagtacttcaagtatttcagccagaatagtctgcccctgggcggcccaagcagcggcgcccctcctcccagcggcggcagcccagccggctccccaacctctaccgaggagggcacctctgagtccgccacccccgagagcggccctggcacctccaccgagcccagcgagggcagcgcacccggcagccctgccggcagccccacctccacagaggagggaaccagcaccgagcccagcgaaggcagcgccccaggcaccagcaccgagcctagtgagggcggctctggcggcggcagcgcccaggagattaaacggatcaacaagatcagaagaagacttgtgaaagacagcaacaccaagaaggccggcaagacaggccccatgaaaaccctgctggttagagtgatgacacccgatctgagagagcggctggaaaacctgagaaagaagcctgaaaatatcccccagcccatcagcaatacatctagagccaacctgaataagctgctgaccgattacaccgaaatgaagaaggcgatcctgcatgtgtactgggaagagttccagaaggaccctgtgggcctgatgagccgggtggcccagcctgccagcaagaagatcgatcagaacaagctgaaacctgagatggacgagaagggcaacctgaccaccgccggctttgcctgctctcagtgtggccagcccctgttcgtgtacaagctggagcaggtgtctgagaagggcaaggcttacaccaactacttcggacggtgcaatgtggccgagcacgaaaagctgatcctgctggcccagctgaagcccgagaaggatagcgacgaagccgtgacatatagcctgggaaagtttgggcagagggccctggatttctacagcattcatgtgaccaaggagtccacccaccccgtgaagcccctggcccagatcgccggaaacagatacgcctccggacctgtgggaaaggccctgagcgacgcatgtatgggcacaatcgcctccttcctgtctaagtaccaggacatcatcatcgaacaccagaaggtggtgaagggcaaccagaagagactggagagcctgcgggagctggccggcaaggaaaacctggaataccctagcgtgaccctgccacctcagcctcacaccaaggagggcgttgatgcctacaacgaagtgatcgcccgggtgcgaatgtgggtgaacctgaacctgtggcagaagctgaagctaagcagagatgatgccaagcctctgctgagactgaagggattcccttcctttcctctggtcgagagacaggccaacgaagtggactggtgggacatggtgtgtaacgtgaagaagctgatcaacgagaaaaaggaggatggcaaggtgttttggcagaatctggctggctacaagagacaggaagccctgagaccatacctgagcagcgaggaagatcggaagaagggaaagaaattcgctcggtaccagctgggcgacctgctgctgcacctggaaaagaagcacggcgaggactggggaaaggtgtacgacgaggcctgggagcggattgacaagaaagtggaaggcctgagcaagcacatcaagctggaagaggaacggagaagcgaggacgcccagagcaaggccgccctgaccgactggctgcgggctaaggccagcttcgtgatcgagggcctgaaggaggccgacaaggacgagttctgcagatgcgagctgaagctgcagaagtggtacggggacctgcggggaaagcccttcgccatcgaagccgagaacagcatcctggacatcagcggcttcagcaagcagtacaactgtgccttcatctggcagaaggacggcgtgaagaagctgaacctgtacctgatcatcaactacttcaagggcggcaagctgcggttcaagaagatcaaacctgaagccttcgaagccaacagattctacaccgtgatcaacaaaaagagcggcgagatcgtgcccatggaggtgaacttcaacttcgacgaccccaacctgatcatcctgcctctggcctttggcaagagacagggcagagaattcatctggaacgacctgctgtccctggaaaccggcagcctgaagctggccaacggaagagtgatcgagaagacactgtacaacagaagaacccggcaggatgagcctgccctgttcgtggccctgaccttcgagcggcgggaggtcctggactcctccaatatcaaaccaatgaacctgatcggcgtggcaagaggcgaaaacatccccgccgtgatcgccctgaccgaccccgagggctgcccactgagccggtttaaggatagcctgggaaacccaacccacatcctgagaatcggcgagagctataaggagaagcagcggaccatccaggccaagaaggaggtggagcagcggagagccggcggctacagccggaagtacgccagcaaagccaagaatctggcagacgatatggtgagaaacaccgctagagatctgctgtactacgccgtgacccaggatgccatgctgatcttcgccaacctgagccggggcttcggccggcagggcaagcggaccttcatggccgagagacagtacacacggatggaggactggctgaccgccaagctggcctacgagggcctgagcaagacctacctgtccaagacactggcccagtacacctccaagacatgcagcaactgtgggtttaccatcaccagcgccgactacgacagggtgctggagaagctgaagaagacagcaacaggctggatgaccacaattaacggcaaggagctgaaggtggagggccagattacctactacaacagatacaagagacagaacgtagtcaaggacctgtccgtcgagctggatagactgagcgaagaatctgtgaacaacgacatctcctcctggacaaagggcagaagcggagaagctctgagcctcctgaagaaaagattctcccatagacccgtgcaggagaagttcgtgtgcctgaactgcggcttcgagacacacgcagccgagcaagccgccctgaacatcgccagatcctggctgttcctgcggagccaggagtacaagaaataccagacaaacaagacaaccggcaacaccgataagagagccttcgtcgagacctggcagtccttttaccggaagaagcttaaggaggtgtggaaacctgccgtgcggtctggcggatctggcggaggctccacaagcctggacgcccccgtgaccttcgaggacgtggccgtgtacttcagcgagaacgagtggacctgcctgacctgcccccagagggccctgtacagggacgtgatgctggagaactacggcgccgtggccagcctggccttcctgttccccaagcccgccctgatcagcaggctggagaggggcgaggccccctggtgcagcgccccccagggcgccctggacggcgagggctggaagggcgtgagcaccagccccaagaaaaagagaaaagtctaagctgccttctgcggggcttgccttctggccatgcccttcttctctcccttgcacctgtacctcttggtctttgaataaagcctgagtaggaaggctagcaaaaaaaaaaaaaaaaaaaaaaaaaaaaaaaaaaaaaaaaaaaaaaaaaaaaaaaaaaaaaaaaaaaaaaaaaaaaaaaa

SEQ ID NO: 5942 - RNA, 5797 nt, synthetic construct
  source 1..5797: mol_type = other RNA
aggaaataagagagaaaagaagagtaagaagaaatataagagccaccatggcccctaagaagaagcgtaaagtgagccggatggaacgcctcgtctacgaggtgcggcagaagtgcagaaacatcgaggacatctgcatctcctgcggatctctgaacgtgaccctggagcacccactgttcatcggcggcatgtgccagaactgtaaaaactgttttctggagtgtgcctatcaatacgacgatgacggctaccagagctactgcaccatctgttgcggcggaagagaggtgctgatgtgtggaaataacaactgctgccggtgcttctgcgtggaatgcgtggacctgctggtgggccccggcgccgcccaggccgctattaaggaagatccttggaactgctacatgtgcggccacaagggcacatacggcctgctgagacggagagaggactggcctagcagactgcagatgttcttcgccaataaccacgaccaggagttcgacccccctaaggtgtaccctcccgtccccgccgagaagagaaagcccatccgggtcctgagcctgttcgatggcatcgccaccggtctgctggtgctgaaggacctgggcatccaggtggataggtacattgcctccgaggtgtgcgaggactccatcaccgtgggaatggtgcgtcatcagggcaagatcatgtacgtgggcgacgtgcggagcgtgacacagaagcatatccaggagtggggccctttcgacctggtgatcggcggcagcccttgcaatgacctgagcatcgtgaacccagcccggaagggcctgtacgagggaaccggcagactgttcttcgagttttacagactgctgcacgacgcccggcctaaggaaggcgacgaccggcccttcttttggctgttcgagaatgtggtggccatgggagtcagcgacaagcgggatattagccggttcctggagagcaaccccgtgatgatcgatgccaaggaagtgagcgccgcccaccgggccagatacttctggggcaatctgcctggcatgaacagacccctggccagcaccgtgaacgacaagctggagctgcaggagtgcctggagcacggccggatcgccaagttcagcaaggtgagaaccatcaccacccgaagcaacagcatcaaacaaggcaaggaccagcactttcctgtgttcatgaacgagaaggaggacatcctgtggtgtaccgagatggagagagtgttcgggttcccagtccactacacagatgtcagcaacatgtctagactggccagacagagactgctgggaagaagctggtccgtccctgtgatcagacacctgttcgcccctctgaaggagtacttcgcctgcgtgagcagcggcaacagcaacgccaacagccggggccccagcttctctagcggcctggtgccactgtccctgagagggagccacatgggccccatggagatctacaaaaccgtgagcgcctggaagcggcagcctgtgcgcgtgctgagcctgtttcggaatatcgataaagtcctgaaaagcctgggattcctggagagcggctctggctccggcggtggcaccctgaagtacgtggaggatgtgacaaacgtggtcagacgggatgtggagaagtggggccccttcgatctggtgtacggcagcacccaacccctgggcagctcttgtgaccggtgccctggctggtacatgtttcagttccaccggatcctgcagtacgccctgccgagacaggagtcccagcggccattcttttggattttcatggacaacttgctgctgaccgaggatgaccaggaaactaccactcggttcctgcagaccgaagccgtgaccctgcaggacgtgagaggccgggactaccagaacgccatgcgggtgtggtccaacatccctggactgaaaagcaagcacgcacctctgacccctaaagaagaggagtacctgcaggcccaggtgcggagcagaagcaagctggacgcccctaaggtggatctgctggtgaagaattgcctcctgcccctgagagagtacttcaagtatttcagccagaatagtctgcccctgggcggcccaagcagcggcgcccctcctcccagcggcggcagcccagccggctccccaacctctaccgaggagggcacctctgagtccgccacccccgagagcggccctggcacctccaccgagcccagcgagggcagcgcacccggcagccctgccggcagccccacctccacagaggagggaaccagcaccgagcccagcgaaggcagcgccccaggcaccagcaccgagcctagtgagggcggctctggcggcggcagcgcccaggagattaaacggatcaacaagatcagaagaagacttgtgaaagacagcaacaccaagaaggccggcaagacaggccccatgaaaaccctgctggttagagtgatgacacccgatctgagagagcggctggaaaacctgagaaagaagcctgaaaatatcccccagcccatcagcaatacatctagagccaacctgaataagctgctgaccgattacaccgaaatgaagaaggcgatcctgcatgtgtactgggaagagttccagaaggaccctgtgggcctgatgagccgggtggcccagcctgccagcaagaagatcgatcagaacaagctgaaacctgagatggacgagaagggcaacctgaccaccgccggctttgcctgctctcagtgtggccagcccctgttcgtgtacaagctggagcaggtgtctgagaagggcaaggcttacaccaactacttcggacggtgcaatgtggccgagcacgaaaagctgatcctgctggcccagctgaagcccgagaaggatagcgacgaagccgtgacatatagcctgggaaagtttgggcagagggccctggatttctacagcattcatgtgaccaaggagtccacccaccccgtgaagcccctggcccagatcgccggaaacagatacgcctccggacctgtgggaaaggccctgagcgacgcatgtatgggcacaatcgcctccttcctgtctaagtaccaggacatcatcatcgaacaccagaaggtggtgaagggcaaccagaagagactggagagcctgcgggagctggccggcaaggaaaacctggaataccctagcgtgaccctgccacctcagcctcacaccaaggagggcgttgatgcctacaacgaagtgatcgcccgggtgcgaatgtgggtgaacctgaacctgtggcagaagctgaagctaagcagagatgatgccaagcctctgctgagactgaagggattcccttcctttcctctggtcgagagacaggccaacgaagtggactggtgggacatggtgtgtaacgtgaagaagctgatcaacgagaaaaaggaggatggcaaggtgttttggcagaatctggctggctacaagagacaggaagccctgagaccatacctgagcagcgaggaagatcggaagaagggaaagaaattcgctcggtaccagctgggcgacctgctgctgcacctggaaaagaagcacggcgaggactggggaaaggtgtacgacgaggcctgggagcggattgacaagaaagtggaaggcctgagcaagcacatcaagctggaagaggaacggagaagcgaggacgcccagagcaaggccgccctgaccgactggctgcgggctaaggccagcttcgtgatcgagggcctgaaggaggccgacaaggacgagttctgcagatgcgagctgaagctgcagaagtggtacggggacctgcggggaaagcccttcgccatcgaagccgagaacagcatcctggacatcagcggcttcagcaagcagtacaactgtgccttcatctggcagaaggacggcgtgaagaagctgaacctgtacctgatcatcaactacttcaagggcggcaagctgcggttcaagaagatcaaacctgaagccttcgaagccaacagattctacaccgtgatcaacaaaaagagcggcgagatcgtgcccatggaggtgaacttcaacttcgacgaccccaacctgatcatcctgcctctggcctttggcaagagacagggcagagaattcatctggaacgacctgctgtccctggaaaccggcagcctgaagctggccaacggaagagtgatcgagaagacactgtacaacagaagaacccggcaggatgagcctgccctgttcgtggccctgaccttcgagcggcgggaggtcctggactcctccaatatcaaaccaatgaacctgatcggcgtggcaagaggcgaaaacatccccgccgtgatcgccctgaccgaccccgagggctgcccactgagccggtttaaggatagcctgggaaacccaacccacatcctgagaatcggcgagagctataaggagaagcagcggaccatccaggccaagaaggaggtggagcagcggagagccggcggctacagccggaagtacgccagcaaagccaagaatctggcagacgatatggtgagaaacaccgctagagatctgctgtactacgccgtgacccaggatgccatgctgatcttcgccaacctgagccggggcttcggccggcagggcaagcggaccttcatggccgagagacagtacacacggatggaggactggctgaccgccaagctggcctacgagggcctgagcaagacctacctgtccaagacactggcccagtacacctccaagacatgcagcaactgtgggtttaccatcaccagcgccgactacgacagggtgctggagaagctgaagaagacagcaacaggctggatgaccacaattaacggcaaggagctgaaggtggagggccagattacctactacaacagatacaagagacagaacgtagtcaaggacctgtccgtcgagctggatagactgagcgaagaatctgtgaacaacgacatctcctcctggacaaagggcagaagcggagaagctctgagcctcctgaagaaaagattctcccatagacccgtgcaggagaagttcgtgtgcctgaactgcggcttcgagacacacgcagccgagcaagccgccctgaacatcgccagatcctggctgttcctgcggagccaggagtacaagaaataccagacaaacaagacaaccggcaacaccgataagagagccttcgtcgagacctggcagtccttttaccggaagaagcttaaggaggtgtggaaacctgccgtgcggtctggcggatctggcggaggctccacaagcatggccgccatgcccctgaaggcccagtaccaggagatggtgaccttcgaggacgtggccgtgcacttcaccaagaccgagtggaccggcctgagccccgcccagagggccctgtacaggagcgtgatgctggagaacttcggcaacctgaccgccctgggctaccccgtgcccaagcccgccctgatcagcctgctggagggcggcgacatggcctggggcctggaggcccaggacgaccccaccagccccaagaaaaagagaaaagtctaagctgccttctgcggggcttgccttctggccatgcccttcttctctcccttgcacctgtacctcttggtctttgaataaagcctgagtaggaaggctagcaaaaaaaaaaaaaaaaaaaaaaaaaaaaaaaaaaaaaaaaaaaaaaaaaaaaaaaaaaaaaaaaaaaaaaaaaaaaaaaa

SEQ ID NO: 5943 - RNA, 5797 nt, synthetic construct
  source 1..5797: mol_type = other RNA
aggaaataagagagaaaagaagagtaagaagaaatataagagccaccatggcccctaagaagaagcgtaaagtgagccggatggaacgcctcgtctacgaggtgcggcagaagtgcagaaacatcgaggacatctgcatctcctgcggatctctgaacgtgaccctggagcacccactgttcatcggcggcatgtgccagaactgtaaaaactgttttctggagtgtgcctatcaatacgacgatgacggctaccagagctactgcaccatctgttgcggcggaagagaggtgctgatgtgtggaaataacaactgctgccggtgcttctgcgtggaatgcgtggacctgctggtgggccccggcgccgcccaggccgctattaaggaagatccttggaactgctacatgtgcggccacaagggcacatacggcctgctgagacggagagaggactggcctagcagactgcagatgttcttcgccaataaccacgaccaggagttcgacccccctaaggtgtaccctcccgtccccgccgagaagagaaagcccatccgggtcctgagcctgttcgatggcatcgccaccggtctgctggtgctgaaggacctgggcatccaggtggataggtacattgcctccgaggtgtgcgaggactccatcaccgtgggaatggtgcgtcatcagggcaagatcatgtacgtgggcgacgtgcggagcgtgacacagaagcatatccaggagtggggccctttcgacctggtgatcggcggcagcccttgcaatgacctgagcatcgtgaacccagcccggaagggcctgtacgagggaaccggcagactgttcttcgagttttacagactgctgcacgacgcccggcctaaggaaggcgacgaccggcccttcttttggctgttcgagaatgtggtggccatgggagtcagcgacaagcgggatattagccggttcctggagagcaaccccgtgatgatcgatgccaaggaagtgagcgccgcccaccgggccagatacttctggggcaatctgcctggcatgaacagacccctggccagcaccgtgaacgacaagctggagctgcaggagtgcctggagcacggccggatcgccaagttcagcaaggtgagaaccatcaccacccgaagcaacagcatcaaacaaggcaaggaccagcactttcctgtgttcatgaacgagaaggaggacatcctgtggtgtaccgagatggagagagtgttcgggttcccagtccactacacagatgtcagcaacatgtctagactggccagacagagactgctgggaagaagctggtccgtccctgtgatcagacacctgttcgcccctctgaaggagtacttcgcctgcgtgagcagcggcaacagcaacgccaacagccggggccccagcttctctagcggcctggtgccactgtccctgagagggagccacatgggccccatggagatctacaaaaccgtgagcgcctggaagcggcagcctgtgcgcgtgctgagcctgtttcggaatatcgataaagtcctgaaaagcctgggattcctggagagcggctctggctccggcggtggcaccctgaagtacgtggaggatgtgacaaacgtggtcagacgggatgtggagaagtggggccccttcgatctggtgtacggcagcacccaacccctgggcagctcttgtgaccggtgccctggctggtacatgtttcagttccaccggatcctgcagtacgccctgccgagacaggagtcccagcggccattcttttggattttcatggacaacttgctgctgaccgaggatgaccaggaaactaccactcggttcctgcagaccgaagccgtgaccctgcaggacgtgagaggccgggactaccagaacgccatgcgggtgtggtccaacatccctggactgaaaagcaagcacgcacctctgacccctaaagaagaggagtacctgcaggcccaggtgcggagcagaagcaagctggacgcccctaaggtggatctgctggtgaagaattgcctcctgcccctgagagagtacttcaagtatttcagccagaatagtctgcccctgggcggcccaagcagcggcgcccctcctcccagcggcggcagcccagccggctccccaacctctaccgaggagggcacctctgagtccgccacccccgagagcggccctggcacctccaccgagcccagcgagggcagcgcacccggcagccctgccggcagccccacctccacagaggagggaaccagcaccgagcccagcgaaggcagcgccccaggcaccagcaccgagcctagtgagggcggctctggcggcggcagcgcccaggagattaaacggatcaacaagatcagaagaagacttgtgaaagacagcaacaccaagaaggccggcaagacaggccccatgaaaaccctgctggttagagtgatgacacccgatctgagagagcggctggaaaacctgagaaagaagcctgaaaatatcccccagcccatcagcaatacatctagagccaacctgaataagctgctgaccgattacaccgaaatgaagaaggcgatcctgcatgtgtactgggaagagttccagaaggaccctgtgggcctgatgagccgggtggcccagcctgccagcaagaagatcgatcagaacaagctgaaacctgagatggacgagaagggcaacctgaccaccgccggctttgcctgctctcagtgtggccagcccctgttcgtgtacaagctggagcaggtgtctgagaagggcaaggcttacaccaactacttcggacggtgcaatgtggccgagcacgaaaagctgatcctgctggcccagctgaagcccgagaaggatagcgacgaagccgtgacatatagcctgggaaagtttgggcagagggccctggatttctacagcattcatgtgaccaaggagtccacccaccccgtgaagcccctggcccagatcgccggaaacagatacgcctccggacctgtgggaaaggccctgagcgacgcatgtatgggcacaatcgcctccttcctgtctaagtaccaggacatcatcatcgaacaccagaaggtggtgaagggcaaccagaagagactggagagcctgcgggagctggccggcaaggaaaacctggaataccctagcgtgaccctgccacctcagcctcacaccaaggagggcgttgatgcctacaacgaagtgatcgcccgggtgcgaatgtgggtgaacctgaacctgtggcagaagctgaagctaagcagagatgatgccaagcctctgctgagactgaagggattcccttcctttcctctggtcgagagacaggccaacgaagtggactggtgggacatggtgtgtaacgtgaagaagctgatcaacgagaaaaaggaggatggcaaggtgttttggcagaatctggctggctacaagagacaggaagccctgagaccatacctgagcagcgaggaagatcggaagaagggaaagaaattcgctcggtaccagctgggcgacctgctgctgcacctggaaaagaagcacggcgaggactggggaaaggtgtacgacgaggcctgggagcggattgacaagaaagtggaaggcctgagcaagcacatcaagctggaagaggaacggagaagcgaggacgcccagagcaaggccgccctgaccgactggctgcgggctaaggccagcttcgtgatcgagggcctgaaggaggccgacaaggacgagttctgcagatgcgagctgaagctgcagaagtggtacggggacctgcggggaaagcccttcgccatcgaagccgagaacagcatcctggacatcagcggcttcagcaagcagtacaactgtgccttcatctggcagaaggacggcgtgaagaagctgaacctgtacctgatcatcaactacttcaagggcggcaagctgcggttcaagaagatcaaacctgaagccttcgaagccaacagattctacaccgtgatcaacaaaaagagcggcgagatcgtgcccatggaggtgaacttcaacttcgacgaccccaacctgatcatcctgcctctggcctttggcaagagacagggcagagaattcatctggaacgacctgctgtccctggaaaccggcagcctgaagctggccaacggaagagtgatcgagaagacactgtacaacagaagaacccggcaggatgagcctgccctgttcgtggccctgaccttcgagcggcgggaggtcctggactcctccaatatcaaaccaatgaacctgatcggcgtggcaagaggcgaaaacatccccgccgtgatcgccctgaccgaccccgagggctgcccactgagccggtttaaggatagcctgggaaacccaacccacatcctgagaatcggcgagagctataaggagaagcagcggaccatccaggccaagaaggaggtggagcagcggagagccggcggctacagccggaagtacgccagcaaagccaagaatctggcagacgatatggtgagaaacaccgctagagatctgctgtactacgccgtgacccaggatgccatgctgatcttcgccaacctgagccggggcttcggccggcagggcaagcggaccttcatggccgagagacagtacacacggatggaggactggctgaccgccaagctggcctacgagggcctgagcaagacctacctgtccaagacactggcccagtacacctccaagacatgcagcaactgtgggtttaccatcaccagcgccgactacgacagggtgctggagaagctgaagaagacagcaacaggctggatgaccacaattaacggcaaggagctgaaggtggagggccagattacctactacaacagatacaagagacagaacgtagtcaaggacctgtccgtcgagctggatagactgagcgaagaatctgtgaacaacgacatctcctcctggacaaagggcagaagcggagaagctctgagcctcctgaagaaaagattctcccatagacccgtgcaggagaagttcgtgtgcctgaactgcggcttcgagacacacgcagccgagcaagccgccctgaacatcgccagatcctggctgttcctgcggagccaggagtacaagaaataccagacaaacaagacaaccggcaacaccgataagagagccttcgtcgagacctggcagtccttttaccggaagaagcttaaggaggtgtggaaacctgccgtgcggtctggcggatctggcggaggctccacaagcagcgtgaccttcagggacgtgatcgtggacttcacccaggaggagtggcagcagctgaagcccgcccagaaggacctgtacagggacgtgatgatggaggtgtactggaacctggtgagcctggacgtggagaccaggcccgacgccaaggagagcgacccccaggaggacgactgggaggacaggcccagcgtggtggtgatcgccgagggccccaccaggaacggcgccaggagctacaccaccagccccaagaaaaagagaaaagtctaagctgccttctgcggggcttgccttctggccatgcccttcttctctcccttgcacctgtacctcttggtctttgaataaagcctgagtaggaaggctagcaaaaaaaaaaaaaaaaaaaaaaaaaaaaaaaaaaaaaaaaaaaaaaaaaaaaaaaaaaaaaaaaaaaaaaaaaaaaaaaa

SEQ ID NO: 5944 - RNA, 5797 nt, synthetic construct
  source 1..5797: mol_type = other RNA
aggaaataagagagaaaagaagagtaagaagaaatataagagccaccatggcccctaagaagaagcgtaaagtgagccggatggaacgcctcgtctacgaggtgcggcagaagtgcagaaacatcgaggacatctgcatctcctgcggatctctgaacgtgaccctggagcacccactgttcatcggcggcatgtgccagaactgtaaaaactgttttctggagtgtgcctatcaatacgacgatgacggctaccagagctactgcaccatctgttgcggcggaagagaggtgctgatgtgtggaaataacaactgctgccggtgcttctgcgtggaatgcgtggacctgctggtgggccccggcgccgcccaggccgctattaaggaagatccttggaactgctacatgtgcggccacaagggcacatacggcctgctgagacggagagaggactggcctagcagactgcagatgttcttcgccaataaccacgaccaggagttcgacccccctaaggtgtaccctcccgtccccgccgagaagagaaagcccatccgggtcctgagcctgttcgatggcatcgccaccggtctgctggtgctgaaggacctgggcatccaggtggataggtacattgcctccgaggtgtgcgaggactccatcaccgtgggaatggtgcgtcatcagggcaagatcatgtacgtgggcgacgtgcggagcgtgacacagaagcatatccaggagtggggccctttcgacctggtgatcggcggcagcccttgcaatgacctgagcatcgtgaacccagcccggaagggcctgtacgagggaaccggcagactgttcttcgagttttacagactgctgcacgacgcccggcctaaggaaggcgacgaccggcccttcttttggctgttcgagaatgtggtggccatgggagtcagcgacaagcgggatattagccggttcctggagagcaaccccgtgatgatcgatgccaaggaagtgagcgccgcccaccgggccagatacttctggggcaatctgcctggcatgaacagacccctggccagcaccgtgaacgacaagctggagctgcaggagtgcctggagcacggccggatcgccaagttcagcaaggtgagaaccatcaccacccgaagcaacagcatcaaacaaggcaaggaccagcactttcctgtgttcatgaacgagaaggaggacatcctgtggtgtaccgagatggagagagtgttcgggttcccagtccactacacagatgtcagcaacatgtctagactggccagacagagactgctgggaagaagctggtccgtccctgtgatcagacacctgttcgcccctctgaaggagtacttcgcctgcgtgagcagcggcaacagcaacgccaacagccggggccccagcttctctagcggcctggtgccactgtccctgagagggagccacatgggccccatggagatctacaaaaccgtgagcgcctggaagcggcagcctgtgcgcgtgctgagcctgtttcggaatatcgataaagtcctgaaaagcctgggattcctggagagcggctctggctccggcggtggcaccctgaagtacgtggaggatgtgacaaacgtggtcagacgggatgtggagaagtggggccccttcgatctggtgtacggcagcacccaacccctgggcagctcttgtgaccggtgccctggctggtacatgtttcagttccaccggatcctgcagtacgccctgccgagacaggagtcccagcggccattcttttggattttcatggacaacttgctgctgaccgaggatgaccaggaaactaccactcggttcctgcagaccgaagccgtgaccctgcaggacgtgagaggccgggactaccagaacgccatgcgggtgtggtccaacatccctggactgaaaagcaagcacgcacctctgacccctaaagaagaggagtacctgcaggcccaggtgcggagcagaagcaagctggacgcccctaaggtggatctgctggtgaagaattgcctcctgcccctgagagagtacttcaagtatttcagccagaatagtctgcccctgggcggcccaagcagcggcgcccctcctcccagcggcggcagcccagccggctccccaacctctaccgaggagggcacctctgagtccgccacccccgagagcggccctggcacctccaccgagcccagcgagggcagcgcacccggcagccctgccggcagccccacctccacagaggagggaaccagcaccgagcccagcgaaggcagcgccccaggcaccagcaccgagcctagtgagggcggctctggcggcggcagcgcccaggagattaaacggatcaacaagatcagaagaagacttgtgaaagacagcaacaccaagaaggccggcaagacaggccccatgaaaaccctgctggttagagtgatgacacccgatctgagagagcggctggaaaacctgagaaagaagcctgaaaatatcccccagcccatcagcaatacatctagagccaacctgaataagctgctgaccgattacaccgaaatgaagaaggcgatcctgcatgtgtactgggaagagttccagaaggaccctgtgggcctgatgagccgggtggcccagcctgccagcaagaagatcgatcagaacaagctgaaacctgagatggacgagaagggcaacctgaccaccgccggctttgcctgctctcagtgtggccagcccctgttcgtgtacaagctggagcaggtgtctgagaagggcaaggcttacaccaactacttcggacggtgcaatgtggccgagcacgaaaagctgatcctgctggcccagctgaagcccgagaaggatagcgacgaagccgtgacatatagcctgggaaagtttgggcagagggccctggatttctacagcattcatgtgaccaaggagtccacccaccccgtgaagcccctggcccagatcgccggaaacagatacgcctccggacctgtgggaaaggccctgagcgacgcatgtatgggcacaatcgcctccttcctgtctaagtaccaggacatcatcatcgaacaccagaaggtggtgaagggcaaccagaagagactggagagcctgcgggagctggccggcaaggaaaacctggaataccctagcgtgaccctgccacctcagcctcacaccaaggagggcgttgatgcctacaacgaagtgatcgcccgggtgcgaatgtgggtgaacctgaacctgtggcagaagctgaagctaagcagagatgatgccaagcctctgctgagactgaagggattcccttcctttcctctggtcgagagacaggccaacgaagtggactggtgggacatggtgtgtaacgtgaagaagctgatcaacgagaaaaaggaggatggcaaggtgttttggcagaatctggctggctacaagagacaggaagccctgagaccatacctgagcagcgaggaagatcggaagaagggaaagaaattcgctcggtaccagctgggcgacctgctgctgcacctggaaaagaagcacggcgaggactggggaaaggtgtacgacgaggcctgggagcggattgacaagaaagtggaaggcctgagcaagcacatcaagctggaagaggaacggagaagcgaggacgcccagagcaaggccgccctgaccgactggctgcgggctaaggccagcttcgtgatcgagggcctgaaggaggccgacaaggacgagttctgcagatgcgagctgaagctgcagaagtggtacggggacctgcggggaaagcccttcgccatcgaagccgagaacagcatcctggacatcagcggcttcagcaagcagtacaactgtgccttcatctggcagaaggacggcgtgaagaagctgaacctgtacctgatcatcaactacttcaagggcggcaagctgcggttcaagaagatcaaacctgaagccttcgaagccaacagattctacaccgtgatcaacaaaaagagcggcgagatcgtgcccatggaggtgaacttcaacttcgacgaccccaacctgatcatcctgcctctggcctttggcaagagacagggcagagaattcatctggaacgacctgctgtccctggaaaccggcagcctgaagctggccaacggaagagtgatcgagaagacactgtacaacagaagaacccggcaggatgagcctgccctgttcgtggccctgaccttcgagcggcgggaggtcctggactcctccaatatcaaaccaatgaacctgatcggcgtggcaagaggcgaaaacatccccgccgtgatcgccctgaccgaccccgagggctgcccactgagccggtttaaggatagcctgggaaacccaacccacatcctgagaatcggcgagagctataaggagaagcagcggaccatccaggccaagaaggaggtggagcagcggagagccggcggctacagccggaagtacgccagcaaagccaagaatctggcagacgatatggtgagaaacaccgctagagatctgctgtactacgccgtgacccaggatgccatgctgatcttcgccaacctgagccggggcttcggccggcagggcaagcggaccttcatggccgagagacagtacacacggatggaggactggctgaccgccaagctggcctacgagggcctgagcaagacctacctgtccaagacactggcccagtacacctccaagacatgcagcaactgtgggtttaccatcaccagcgccgactacgacagggtgctggagaagctgaagaagacagcaacaggctggatgaccacaattaacggcaaggagctgaaggtggagggccagattacctactacaacagatacaagagacagaacgtagtcaaggacctgtccgtcgagctggatagactgagcgaagaatctgtgaacaacgacatctcctcctggacaaagggcagaagcggagaagctctgagcctcctgaagaaaagattctcccatagacccgtgcaggagaagttcgtgtgcctgaactgcggcttcgagacacacgcagccgagcaagccgccctgaacatcgccagatcctggctgttcctgcggagccaggagtacaagaaataccagacaaacaagacaaccggcaacaccgataagagagccttcgtcgagacctggcagtccttttaccggaagaagcttaaggaggtgtggaaacctgccgtgcggtctggcggatctggcggaggctccacaagcagccacgagctgctgaccttcaaggacatcagcgtggacttcacccaggaggagtggggccagctggcccccgcctaccagaacctgtacagggaggtgatgctggagaactacagcaacctggtgagcgtggccggctaccagctgagcaagcccagcgtgatcagccagctggagaagggcgaggagccctggatggccgagaaggagggccccggcgaccccagcagcgacctgaagagcaccagccccaagaaaaagagaaaagtctaagctgccttctgcggggcttgccttctggccatgcccttcttctctcccttgcacctgtacctcttggtctttgaataaagcctgagtaggaaggctagcaaaaaaaaaaaaaaaaaaaaaaaaaaaaaaaaaaaaaaaaaaaaaaaaaaaaaaaaaaaaaaaaaaaaaaaaaaaaaaaa

SEQ ID NO: 5945 - RNA, 5797 nt, synthetic construct
  source 1..5797: mol_type = other RNA
aggaaataagagagaaaagaagagtaagaagaaatataagagccaccatggcccctaagaagaagcgtaaagtgagccggatggaacgcctcgtctacgaggtgcggcagaagtgcagaaacatcgaggacatctgcatctcctgcggatctctgaacgtgaccctggagcacccactgttcatcggcggcatgtgccagaactgtaaaaactgttttctggagtgtgcctatcaatacgacgatgacggctaccagagctactgcaccatctgttgcggcggaagagaggtgctgatgtgtggaaataacaactgctgccggtgcttctgcgtggaatgcgtggacctgctggtgggccccggcgccgcccaggccgctattaaggaagatccttggaactgctacatgtgcggccacaagggcacatacggcctgctgagacggagagaggactggcctagcagactgcagatgttcttcgccaataaccacgaccaggagttcgacccccctaaggtgtaccctcccgtccccgccgagaagagaaagcccatccgggtcctgagcctgttcgatggcatcgccaccggtctgctggtgctgaaggacctgggcatccaggtggataggtacattgcctccgaggtgtgcgaggactccatcaccgtgggaatggtgcgtcatcagggcaagatcatgtacgtgggcgacgtgcggagcgtgacacagaagcatatccaggagtggggccctttcgacctggtgatcggcggcagcccttgcaatgacctgagcatcgtgaacccagcccggaagggcctgtacgagggaaccggcagactgttcttcgagttttacagactgctgcacgacgcccggcctaaggaaggcgacgaccggcccttcttttggctgttcgagaatgtggtggccatgggagtcagcgacaagcgggatattagccggttcctggagagcaaccccgtgatgatcgatgccaaggaagtgagcgccgcccaccgggccagatacttctggggcaatctgcctggcatgaacagacccctggccagcaccgtgaacgacaagctggagctgcaggagtgcctggagcacggccggatcgccaagttcagcaaggtgagaaccatcaccacccgaagcaacagcatcaaacaaggcaaggaccagcactttcctgtgttcatgaacgagaaggaggacatcctgtggtgtaccgagatggagagagtgttcgggttcccagtccactacacagatgtcagcaacatgtctagactggccagacagagactgctgggaagaagctggtccgtccctgtgatcagacacctgttcgcccctctgaaggagtacttcgcctgcgtgagcagcggcaacagcaacgccaacagccggggccccagcttctctagcggcctggtgccactgtccctgagagggagccacatgggccccatggagatctacaaaaccgtgagcgcctggaagcggcagcctgtgcgcgtgctgagcctgtttcggaatatcgataaagtcctgaaaagcctgggattcctggagagcggctctggctccggcggtggcaccctgaagtacgtggaggatgtgacaaacgtggtcagacgggatgtggagaagtggggccccttcgatctggtgtacggcagcacccaacccctgggcagctcttgtgaccggtgccctggctggtacatgtttcagttccaccggatcctgcagtacgccctgccgagacaggagtcccagcggccattcttttggattttcatggacaacttgctgctgaccgaggatgaccaggaaactaccactcggttcctgcagaccgaagccgtgaccctgcaggacgtgagaggccgggactaccagaacgccatgcgggtgtggtccaacatccctggactgaaaagcaagcacgcacctctgacccctaaagaagaggagtacctgcaggcccaggtgcggagcagaagcaagctggacgcccctaaggtggatctgctggtgaagaattgcctcctgcccctgagagagtacttcaagtatttcagccagaatagtctgcccctgggcggcccaagcagcggcgcccctcctcccagcggcggcagcccagccggctccccaacctctaccgaggagggcacctctgagtccgccacccccgagagcggccctggcacctccaccgagcccagcgagggcagcgcacccggcagccctgccggcagccccacctccacagaggagggaaccagcaccgagcccagcgaaggcagcgccccaggcaccagcaccgagcctagtgagggcggctctggcggcggcagcgcccaggagattaaacggatcaacaagatcagaagaagacttgtgaaagacagcaacaccaagaaggccggcaagacaggccccatgaaaaccctgctggttagagtgatgacacccgatctgagagagcggctggaaaacctgagaaagaagcctgaaaatatcccccagcccatcagcaatacatctagagccaacctgaataagctgctgaccgattacaccgaaatgaagaaggcgatcctgcatgtgtactgggaagagttccagaaggaccctgtgggcctgatgagccgggtggcccagcctgccagcaagaagatcgatcagaacaagctgaaacctgagatggacgagaagggcaacctgaccaccgccggctttgcctgctctcagtgtggccagcccctgttcgtgtacaagctggagcaggtgtctgagaagggcaaggcttacaccaactacttcggacggtgcaatgtggccgagcacgaaaagctgatcctgctggcccagctgaagcccgagaaggatagcgacgaagccgtgacatatagcctgggaaagtttgggcagagggccctggatttctacagcattcatgtgaccaaggagtccacccaccccgtgaagcccctggcccagatcgccggaaacagatacgcctccggacctgtgggaaaggccctgagcgacgcatgtatgggcacaatcgcctccttcctgtctaagtaccaggacatcatcatcgaacaccagaaggtggtgaagggcaaccagaagagactggagagcctgcgggagctggccggcaaggaaaacctggaataccctagcgtgaccctgccacctcagcctcacaccaaggagggcgttgatgcctacaacgaagtgatcgcccgggtgcgaatgtgggtgaacctgaacctgtggcagaagctgaagctaagcagagatgatgccaagcctctgctgagactgaagggattcccttcctttcctctggtcgagagacaggccaacgaagtggactggtgggacatggtgtgtaacgtgaagaagctgatcaacgagaaaaaggaggatggcaaggtgttttggcagaatctggctggctacaagagacaggaagccctgagaccatacctgagcagcgaggaagatcggaagaagggaaagaaattcgctcggtaccagctgggcgacctgctgctgcacctggaaaagaagcacggcgaggactggggaaaggtgtacgacgaggcctgggagcggattgacaagaaagtggaaggcctgagcaagcacatcaagctggaagaggaacggagaagcgaggacgcccagagcaaggccgccctgaccgactggctgcgggctaaggccagcttcgtgatcgagggcctgaaggaggccgacaaggacgagttctgcagatgcgagctgaagctgcagaagtggtacggggacctgcggggaaagcccttcgccatcgaagccgagaacagcatcctggacatcagcggcttcagcaagcagtacaactgtgccttcatctggcagaaggacggcgtgaagaagctgaacctgtacctgatcatcaactacttcaagggcggcaagctgcggttcaagaagatcaaacctgaagccttcgaagccaacagattctacaccgtgatcaacaaaaagagcggcgagatcgtgcccatggaggtgaacttcaacttcgacgaccccaacctgatcatcctgcctctggcctttggcaagagacagggcagagaattcatctggaacgacctgctgtccctggaaaccggcagcctgaagctggccaacggaagagtgatcgagaagacactgtacaacagaagaacccggcaggatgagcctgccctgttcgtggccctgaccttcgagcggcgggaggtcctggactcctccaatatcaaaccaatgaacctgatcggcgtggcaagaggcgaaaacatccccgccgtgatcgccctgaccgaccccgagggctgcccactgagccggtttaaggatagcctgggaaacccaacccacatcctgagaatcggcgagagctataaggagaagcagcggaccatccaggccaagaaggaggtggagcagcggagagccggcggctacagccggaagtacgccagcaaagccaagaatctggcagacgatatggtgagaaacaccgctagagatctgctgtactacgccgtgacccaggatgccatgctgatcttcgccaacctgagccggggcttcggccggcagggcaagcggaccttcatggccgagagacagtacacacggatggaggactggctgaccgccaagctggcctacgagggcctgagcaagacctacctgtccaagacactggcccagtacacctccaagacatgcagcaactgtgggtttaccatcaccagcgccgactacgacagggtgctggagaagctgaagaagacagcaacaggctggatgaccacaattaacggcaaggagctgaaggtggagggccagattacctactacaacagatacaagagacagaacgtagtcaaggacctgtccgtcgagctggatagactgagcgaagaatctgtgaacaacgacatctcctcctggacaaagggcagaagcggagaagctctgagcctcctgaagaaaagattctcccatagacccgtgcaggagaagttcgtgtgcctgaactgcggcttcgagacacacgcagccgagcaagccgccctgaacatcgccagatcctggctgttcctgcggagccaggagtacaagaaataccagacaaacaagacaaccggcaacaccgataagagagccttcgtcgagacctggcagtccttttaccggaagaagcttaaggaggtgtggaaacctgccgtgcggtctggcggatctggcggaggctccacaagcatggagctggtgaccttcgaggacgtggccgtgtacttcaccaggaaggagtggggctggctggaccccgcccagagggacctgtacagggacgtgatgctggagaactacggcaacttcgtgagcatgggcctgcccttcagcaagcccgacgtgatcagccagctggagcagggcgaggagagctgggtggaggacctgcaggagtgcgaggagggcgagttcagccccgtggtgcacagcaccagccccaagaaaaagagaaaagtctaagctgccttctgcggggcttgccttctggccatgcccttcttctctcccttgcacctgtacctcttggtctttgaataaagcctgagtaggaaggctagcaaaaaaaaaaaaaaaaaaaaaaaaaaaaaaaaaaaaaaaaaaaaaaaaaaaaaaaaaaaaaaaaaaaaaaaaaaaaaaaa

SEQ ID NO: 5946 - RNA, 5797 nt, synthetic construct
  source 1..5797: mol_type = other RNA
aggaaataagagagaaaagaagagtaagaagaaatataagagccaccatggcccctaagaagaagcgtaaagtgagccggatggaacgcctcgtctacgaggtgcggcagaagtgcagaaacatcgaggacatctgcatctcctgcggatctctgaacgtgaccctggagcacccactgttcatcggcggcatgtgccagaactgtaaaaactgttttctggagtgtgcctatcaatacgacgatgacggctaccagagctactgcaccatctgttgcggcggaagagaggtgctgatgtgtggaaataacaactgctgccggtgcttctgcgtggaatgcgtggacctgctggtgggccccggcgccgcccaggccgctattaaggaagatccttggaactgctacatgtgcggccacaagggcacatacggcctgctgagacggagagaggactggcctagcagactgcagatgttcttcgccaataaccacgaccaggagttcgacccccctaaggtgtaccctcccgtccccgccgagaagagaaagcccatccgggtcctgagcctgttcgatggcatcgccaccggtctgctggtgctgaaggacctgggcatccaggtggataggtacattgcctccgaggtgtgcgaggactccatcaccgtgggaatggtgcgtcatcagggcaagatcatgtacgtgggcgacgtgcggagcgtgacacagaagcatatccaggagtggggccctttcgacctggtgatcggcggcagcccttgcaatgacctgagcatcgtgaacccagcccggaagggcctgtacgagggaaccggcagactgttcttcgagttttacagactgctgcacgacgcccggcctaaggaaggcgacgaccggcccttcttttggctgttcgagaatgtggtggccatgggagtcagcgacaagcgggatattagccggttcctggagagcaaccccgtgatgatcgatgccaaggaagtgagcgccgcccaccgggccagatacttctggggcaatctgcctggcatgaacagacccctggccagcaccgtgaacgacaagctggagctgcaggagtgcctggagcacggccggatcgccaagttcagcaaggtgagaaccatcaccacccgaagcaacagcatcaaacaaggcaaggaccagcactttcctgtgttcatgaacgagaaggaggacatcctgtggtgtaccgagatggagagagtgttcgggttcccagtccactacacagatgtcagcaacatgtctagactggccagacagagactgctgggaagaagctggtccgtccctgtgatcagacacctgttcgcccctctgaaggagtacttcgcctgcgtgagcagcggcaacagcaacgccaacagccggggccccagcttctctagcggcctggtgccactgtccctgagagggagccacatgggccccatggagatctacaaaaccgtgagcgcctggaagcggcagcctgtgcgcgtgctgagcctgtttcggaatatcgataaagtcctgaaaagcctgggattcctggagagcggctctggctccggcggtggcaccctgaagtacgtggaggatgtgacaaacgtggtcagacgggatgtggagaagtggggccccttcgatctggtgtacggcagcacccaacccctgggcagctcttgtgaccggtgccctggctggtacatgtttcagttccaccggatcctgcagtacgccctgccgagacaggagtcccagcggccattcttttggattttcatggacaacttgctgctgaccgaggatgaccaggaaactaccactcggttcctgcagaccgaagccgtgaccctgcaggacgtgagaggccgggactaccagaacgccatgcgggtgtggtccaacatccctggactgaaaagcaagcacgcacctctgacccctaaagaagaggagtacctgcaggcccaggtgcggagcagaagcaagctggacgcccctaaggtggatctgctggtgaagaattgcctcctgcccctgagagagtacttcaagtatttcagccagaatagtctgcccctgggcggcccaagcagcggcgcccctcctcccagcggcggcagcccagccggctccccaacctctaccgaggagggcacctctgagtccgccacccccgagagcggccctggcacctccaccgagcccagcgagggcagcgcacccggcagccctgccggcagccccacctccacagaggagggaaccagcaccgagcccagcgaaggcagcgccccaggcaccagcaccgagcctagtgagggcggctctggcggcggcagcgcccaggagattaaacggatcaacaagatcagaagaagacttgtgaaagacagcaacaccaagaaggccggcaagacaggccccatgaaaaccctgctggttagagtgatgacacccgatctgagagagcggctggaaaacctgagaaagaagcctgaaaatatcccccagcccatcagcaatacatctagagccaacctgaataagctgctgaccgattacaccgaaatgaagaaggcgatcctgcatgtgtactgggaagagttccagaaggaccctgtgggcctgatgagccgggtggcccagcctgccagcaagaagatcgatcagaacaagctgaaacctgagatggacgagaagggcaacctgaccaccgccggctttgcctgctctcagtgtggccagcccctgttcgtgtacaagctggagcaggtgtctgagaagggcaaggcttacaccaactacttcggacggtgcaatgtggccgagcacgaaaagctgatcctgctggcccagctgaagcccgagaaggatagcgacgaagccgtgacatatagcctgggaaagtttgggcagagggccctggatttctacagcattcatgtgaccaaggagtccacccaccccgtgaagcccctggcccagatcgccggaaacagatacgcctccggacctgtgggaaaggccctgagcgacgcatgtatgggcacaatcgcctccttcctgtctaagtaccaggacatcatcatcgaacaccagaaggtggtgaagggcaaccagaagagactggagagcctgcgggagctggccggcaaggaaaacctggaataccctagcgtgaccctgccacctcagcctcacaccaaggagggcgttgatgcctacaacgaagtgatcgcccgggtgcgaatgtgggtgaacctgaacctgtggcagaagctgaagctaagcagagatgatgccaagcctctgctgagactgaagggattcccttcctttcctctggtcgagagacaggccaacgaagtggactggtgggacatggtgtgtaacgtgaagaagctgatcaacgagaaaaaggaggatggcaaggtgttttggcagaatctggctggctacaagagacaggaagccctgagaccatacctgagcagcgaggaagatcggaagaagggaaagaaattcgctcggtaccagctgggcgacctgctgctgcacctggaaaagaagcacggcgaggactggggaaaggtgtacgacgaggcctgggagcggattgacaagaaagtggaaggcctgagcaagcacatcaagctggaagaggaacggagaagcgaggacgcccagagcaaggccgccctgaccgactggctgcgggctaaggccagcttcgtgatcgagggcctgaaggaggccgacaaggacgagttctgcagatgcgagctgaagctgcagaagtggtacggggacctgcggggaaagcccttcgccatcgaagccgagaacagcatcctggacatcagcggcttcagcaagcagtacaactgtgccttcatctggcagaaggacggcgtgaagaagctgaacctgtacctgatcatcaactacttcaagggcggcaagctgcggttcaagaagatcaaacctgaagccttcgaagccaacagattctacaccgtgatcaacaaaaagagcggcgagatcgtgcccatggaggtgaacttcaacttcgacgaccccaacctgatcatcctgcctctggcctttggcaagagacagggcagagaattcatctggaacgacctgctgtccctggaaaccggcagcctgaagctggccaacggaagagtgatcgagaagacactgtacaacagaagaacccggcaggatgagcctgccctgttcgtggccctgaccttcgagcggcgggaggtcctggactcctccaatatcaaaccaatgaacctgatcggcgtggcaagaggcgaaaacatccccgccgtgatcgccctgaccgaccccgagggctgcccactgagccggtttaaggatagcctgggaaacccaacccacatcctgagaatcggcgagagctataaggagaagcagcggaccatccaggccaagaaggaggtggagcagcggagagccggcggctacagccggaagtacgccagcaaagccaagaatctggcagacgatatggtgagaaacaccgctagagatctgctgtactacgccgtgacccaggatgccatgctgatcttcgccaacctgagccggggcttcggccggcagggcaagcggaccttcatggccgagagacagtacacacggatggaggactggctgaccgccaagctggcctacgagggcctgagcaagacctacctgtccaagacactggcccagtacacctccaagacatgcagcaactgtgggtttaccatcaccagcgccgactacgacagggtgctggagaagctgaagaagacagcaacaggctggatgaccacaattaacggcaaggagctgaaggtggagggccagattacctactacaacagatacaagagacagaacgtagtcaaggacctgtccgtcgagctggatagactgagcgaagaatctgtgaacaacgacatctcctcctggacaaagggcagaagcggagaagctctgagcctcctgaagaaaagattctcccatagacccgtgcaggagaagttcgtgtgcctgaactgcggcttcgagacacacgcagccgagcaagccgccctgaacatcgccagatcctggctgttcctgcggagccaggagtacaagaaataccagacaaacaagacaaccggcaacaccgataagagagccttcgtcgagacctggcagtccttttaccggaagaagcttaaggaggtgtggaaacctgccgtgcggtctggcggatctggcggaggctccacaagcatggccgccatgcccctgaaggccaggtaccaggagatggtgaccttcgaggacgtggccgtgcacttcaccaagaccgagtggaccggcctgagccccgcccagagggccctgtacaggagcgtgatgctggagaacttcggcaacctgaccgccctgggctaccccgtgcccaagcccgccctgatcagcctgctggagggcggcgacatggcctggggcctggaggcccaggacgaccccaccagccccaagaaaaagagaaaagtctaagctgccttctgcggggcttgccttctggccatgcccttcttctctcccttgcacctgtacctcttggtctttgaataaagcctgagtaggaaggctagcaaaaaaaaaaaaaaaaaaaaaaaaaaaaaaaaaaaaaaaaaaaaaaaaaaaaaaaaaaaaaaaaaaaaaaaaaaaaaaaa

SEQ ID NO: 5947 - RNA, 5797 nt, synthetic construct
  source 1..5797: mol_type = other RNA
aggaaataagagagaaaagaagagtaagaagaaatataagagccaccatggcccctaagaagaagcgtaaagtgagccggatggaacgcctcgtctacgaggtgcggcagaagtgcagaaacatcgaggacatctgcatctcctgcggatctctgaacgtgaccctggagcacccactgttcatcggcggcatgtgccagaactgtaaaaactgttttctggagtgtgcctatcaatacgacgatgacggctaccagagctactgcaccatctgttgcggcggaagagaggtgctgatgtgtggaaataacaactgctgccggtgcttctgcgtggaatgcgtggacctgctggtgggccccggcgccgcccaggccgctattaaggaagatccttggaactgctacatgtgcggccacaagggcacatacggcctgctgagacggagagaggactggcctagcagactgcagatgttcttcgccaataaccacgaccaggagttcgacccccctaaggtgtaccctcccgtccccgccgagaagagaaagcccatccgggtcctgagcctgttcgatggcatcgccaccggtctgctggtgctgaaggacctgggcatccaggtggataggtacattgcctccgaggtgtgcgaggactccatcaccgtgggaatggtgcgtcatcagggcaagatcatgtacgtgggcgacgtgcggagcgtgacacagaagcatatccaggagtggggccctttcgacctggtgatcggcggcagcccttgcaatgacctgagcatcgtgaacccagcccggaagggcctgtacgagggaaccggcagactgttcttcgagttttacagactgctgcacgacgcccggcctaaggaaggcgacgaccggcccttcttttggctgttcgagaatgtggtggccatgggagtcagcgacaagcgggatattagccggttcctggagagcaaccccgtgatgatcgatgccaaggaagtgagcgccgcccaccgggccagatacttctggggcaatctgcctggcatgaacagacccctggccagcaccgtgaacgacaagctggagctgcaggagtgcctggagcacggccggatcgccaagttcagcaaggtgagaaccatcaccacccgaagcaacagcatcaaacaaggcaaggaccagcactttcctgtgttcatgaacgagaaggaggacatcctgtggtgtaccgagatggagagagtgttcgggttcccagtccactacacagatgtcagcaacatgtctagactggccagacagagactgctgggaagaagctggtccgtccctgtgatcagacacctgttcgcccctctgaaggagtacttcgcctgcgtgagcagcggcaacagcaacgccaacagccggggccccagcttctctagcggcctggtgccactgtccctgagagggagccacatgggccccatggagatctacaaaaccgtgagcgcctggaagcggcagcctgtgcgcgtgctgagcctgtttcggaatatcgataaagtcctgaaaagcctgggattcctggagagcggctctggctccggcggtggcaccctgaagtacgtggaggatgtgacaaacgtggtcagacgggatgtggagaagtggggccccttcgatctggtgtacggcagcacccaacccctgggcagctcttgtgaccggtgccctggctggtacatgtttcagttccaccggatcctgcagtacgccctgccgagacaggagtcccagcggccattcttttggattttcatggacaacttgctgctgaccgaggatgaccaggaaactaccactcggttcctgcagaccgaagccgtgaccctgcaggacgtgagaggccgggactaccagaacgccatgcgggtgtggtccaacatccctggactgaaaagcaagcacgcacctctgacccctaaagaagaggagtacctgcaggcccaggtgcggagcagaagcaagctggacgcccctaaggtggatctgctggtgaagaattgcctcctgcccctgagagagtacttcaagtatttcagccagaatagtctgcccctgggcggcccaagcagcggcgcccctcctcccagcggcggcagcccagccggctccccaacctctaccgaggagggcacctctgagtccgccacccccgagagcggccctggcacctccaccgagcccagcgagggcagcgcacccggcagccctgccggcagccccacctccacagaggagggaaccagcaccgagcccagcgaaggcagcgccccaggcaccagcaccgagcctagtgagggcggctctggcggcggcagcgcccaggagattaaacggatcaacaagatcagaagaagacttgtgaaagacagcaacaccaagaaggccggcaagacaggccccatgaaaaccctgctggttagagtgatgacacccgatctgagagagcggctggaaaacctgagaaagaagcctgaaaatatcccccagcccatcagcaatacatctagagccaacctgaataagctgctgaccgattacaccgaaatgaagaaggcgatcctgcatgtgtactgggaagagttccagaaggaccctgtgggcctgatgagccgggtggcccagcctgccagcaagaagatcgatcagaacaagctgaaacctgagatggacgagaagggcaacctgaccaccgccggctttgcctgctctcagtgtggccagcccctgttcgtgtacaagctggagcaggtgtctgagaagggcaaggcttacaccaactacttcggacggtgcaatgtggccgagcacgaaaagctgatcctgctggcccagctgaagcccgagaaggatagcgacgaagccgtgacatatagcctgggaaagtttgggcagagggccctggatttctacagcattcatgtgaccaaggagtccacccaccccgtgaagcccctggcccagatcgccggaaacagatacgcctccggacctgtgggaaaggccctgagcgacgcatgtatgggcacaatcgcctccttcctgtctaagtaccaggacatcatcatcgaacaccagaaggtggtgaagggcaaccagaagagactggagagcctgcgggagctggccggcaaggaaaacctggaataccctagcgtgaccctgccacctcagcctcacaccaaggagggcgttgatgcctacaacgaagtgatcgcccgggtgcgaatgtgggtgaacctgaacctgtggcagaagctgaagctaagcagagatgatgccaagcctctgctgagactgaagggattcccttcctttcctctggtcgagagacaggccaacgaagtggactggtgggacatggtgtgtaacgtgaagaagctgatcaacgagaaaaaggaggatggcaaggtgttttggcagaatctggctggctacaagagacaggaagccctgagaccatacctgagcagcgaggaagatcggaagaagggaaagaaattcgctcggtaccagctgggcgacctgctgctgcacctggaaaagaagcacggcgaggactggggaaaggtgtacgacgaggcctgggagcggattgacaagaaagtggaaggcctgagcaagcacatcaagctggaagaggaacggagaagcgaggacgcccagagcaaggccgccctgaccgactggctgcgggctaaggccagcttcgtgatcgagggcctgaaggaggccgacaaggacgagttctgcagatgcgagctgaagctgcagaagtggtacggggacctgcggggaaagcccttcgccatcgaagccgagaacagcatcctggacatcagcggcttcagcaagcagtacaactgtgccttcatctggcagaaggacggcgtgaagaagctgaacctgtacctgatcatcaactacttcaagggcggcaagctgcggttcaagaagatcaaacctgaagccttcgaagccaacagattctacaccgtgatcaacaaaaagagcggcgagatcgtgcccatggaggtgaacttcaacttcgacgaccccaacctgatcatcctgcctctggcctttggcaagagacagggcagagaattcatctggaacgacctgctgtccctggaaaccggcagcctgaagctggccaacggaagagtgatcgagaagacactgtacaacagaagaacccggcaggatgagcctgccctgttcgtggccctgaccttcgagcggcgggaggtcctggactcctccaatatcaaaccaatgaacctgatcggcgtggcaagaggcgaaaacatccccgccgtgatcgccctgaccgaccccgagggctgcccactgagccggtttaaggatagcctgggaaacccaacccacatcctgagaatcggcgagagctataaggagaagcagcggaccatccaggccaagaaggaggtggagcagcggagagccggcggctacagccggaagtacgccagcaaagccaagaatctggcagacgatatggtgagaaacaccgctagagatctgctgtactacgccgtgacccaggatgccatgctgatcttcgccaacctgagccggggcttcggccggcagggcaagcggaccttcatggccgagagacagtacacacggatggaggactggctgaccgccaagctggcctacgagggcctgagcaagacctacctgtccaagacactggcccagtacacctccaagacatgcagcaactgtgggtttaccatcaccagcgccgactacgacagggtgctggagaagctgaagaagacagcaacaggctggatgaccacaattaacggcaaggagctgaaggtggagggccagattacctactacaacagatacaagagacagaacgtagtcaaggacctgtccgtcgagctggatagactgagcgaagaatctgtgaacaacgacatctcctcctggacaaagggcagaagcggagaagctctgagcctcctgaagaaaagattctcccatagacccgtgcaggagaagttcgtgtgcctgaactgcggcttcgagacacacgcagccgagcaagccgccctgaacatcgccagatcctggctgttcctgcggagccaggagtacaagaaataccagacaaacaagacaaccggcaacaccgataagagagccttcgtcgagacctggcagtccttttaccggaagaagcttaaggaggtgtggaaacctgccgtgcggtctggcggatctggcggaggctccacaagcgcccaggagagcgtggtgttcagcgacgtgagcatcgacttcagccaggaggagtgggagtgcctgaacgacgaccagagggacctgtacagggacgtgatgctggagaactacagccacctggtgagcatggccggccacagcgtgagcaagcccgacgtgatcagcgtgctggagcagggcaaggagccctggctggtggacagggagctgaccagggagcagtggcccgtgctggagagcaccagccccaagaaaaagagaaaagtctaagctgccttctgcggggcttgccttctggccatgcccttcttctctcccttgcacctgtacctcttggtctttgaataaagcctgagtaggaaggctagcaaaaaaaaaaaaaaaaaaaaaaaaaaaaaaaaaaaaaaaaaaaaaaaaaaaaaaaaaaaaaaaaaaaaaaaaaaaaaaaa

SEQ ID NO: 5948 - RNA, 5797 nt, synthetic construct
  source 1..5797: mol_type = other RNA
aggaaataagagagaaaagaagagtaagaagaaatataagagccaccatggcccctaagaagaagcgtaaagtgagccggatggaacgcctcgtctacgaggtgcggcagaagtgcagaaacatcgaggacatctgcatctcctgcggatctctgaacgtgaccctggagcacccactgttcatcggcggcatgtgccagaactgtaaaaactgttttctggagtgtgcctatcaatacgacgatgacggctaccagagctactgcaccatctgttgcggcggaagagaggtgctgatgtgtggaaataacaactgctgccggtgcttctgcgtggaatgcgtggacctgctggtgggccccggcgccgcccaggccgctattaaggaagatccttggaactgctacatgtgcggccacaagggcacatacggcctgctgagacggagagaggactggcctagcagactgcagatgttcttcgccaataaccacgaccaggagttcgacccccctaaggtgtaccctcccgtccccgccgagaagagaaagcccatccgggtcctgagcctgttcgatggcatcgccaccggtctgctggtgctgaaggacctgggcatccaggtggataggtacattgcctccgaggtgtgcgaggactccatcaccgtgggaatggtgcgtcatcagggcaagatcatgtacgtgggcgacgtgcggagcgtgacacagaagcatatccaggagtggggccctttcgacctggtgatcggcggcagcccttgcaatgacctgagcatcgtgaacccagcccggaagggcctgtacgagggaaccggcagactgttcttcgagttttacagactgctgcacgacgcccggcctaaggaaggcgacgaccggcccttcttttggctgttcgagaatgtggtggccatgggagtcagcgacaagcgggatattagccggttcctggagagcaaccccgtgatgatcgatgccaaggaagtgagcgccgcccaccgggccagatacttctggggcaatctgcctggcatgaacagacccctggccagcaccgtgaacgacaagctggagctgcaggagtgcctggagcacggccggatcgccaagttcagcaaggtgagaaccatcaccacccgaagcaacagcatcaaacaaggcaaggaccagcactttcctgtgttcatgaacgagaaggaggacatcctgtggtgtaccgagatggagagagtgttcgggttcccagtccactacacagatgtcagcaacatgtctagactggccagacagagactgctgggaagaagctggtccgtccctgtgatcagacacctgttcgcccctctgaaggagtacttcgcctgcgtgagcagcggcaacagcaacgccaacagccggggccccagcttctctagcggcctggtgccactgtccctgagagggagccacatgggccccatggagatctacaaaaccgtgagcgcctggaagcggcagcctgtgcgcgtgctgagcctgtttcggaatatcgataaagtcctgaaaagcctgggattcctggagagcggctctggctccggcggtggcaccctgaagtacgtggaggatgtgacaaacgtggtcagacgggatgtggagaagtggggccccttcgatctggtgtacggcagcacccaacccctgggcagctcttgtgaccggtgccctggctggtacatgtttcagttccaccggatcctgcagtacgccctgccgagacaggagtcccagcggccattcttttggattttcatggacaacttgctgctgaccgaggatgaccaggaaactaccactcggttcctgcagaccgaagccgtgaccctgcaggacgtgagaggccgggactaccagaacgccatgcgggtgtggtccaacatccctggactgaaaagcaagcacgcacctctgacccctaaagaagaggagtacctgcaggcccaggtgcggagcagaagcaagctggacgcccctaaggtggatctgctggtgaagaattgcctcctgcccctgagagagtacttcaagtatttcagccagaatagtctgcccctgggcggcccaagcagcggcgcccctcctcccagcggcggcagcccagccggctccccaacctctaccgaggagggcacctctgagtccgccacccccgagagcggccctggcacctccaccgagcccagcgagggcagcgcacccggcagccctgccggcagccccacctccacagaggagggaaccagcaccgagcccagcgaaggcagcgccccaggcaccagcaccgagcctagtgagggcggctctggcggcggcagcgcccaggagattaaacggatcaacaagatcagaagaagacttgtgaaagacagcaacaccaagaaggccggcaagacaggccccatgaaaaccctgctggttagagtgatgacacccgatctgagagagcggctggaaaacctgagaaagaagcctgaaaatatcccccagcccatcagcaatacatctagagccaacctgaataagctgctgaccgattacaccgaaatgaagaaggcgatcctgcatgtgtactgggaagagttccagaaggaccctgtgggcctgatgagccgggtggcccagcctgccagcaagaagatcgatcagaacaagctgaaacctgagatggacgagaagggcaacctgaccaccgccggctttgcctgctctcagtgtggccagcccctgttcgtgtacaagctggagcaggtgtctgagaagggcaaggcttacaccaactacttcggacggtgcaatgtggccgagcacgaaaagctgatcctgctggcccagctgaagcccgagaaggatagcgacgaagccgtgacatatagcctgggaaagtttgggcagagggccctggatttctacagcattcatgtgaccaaggagtccacccaccccgtgaagcccctggcccagatcgccggaaacagatacgcctccggacctgtgggaaaggccctgagcgacgcatgtatgggcacaatcgcctccttcctgtctaagtaccaggacatcatcatcgaacaccagaaggtggtgaagggcaaccagaagagactggagagcctgcgggagctggccggcaaggaaaacctggaataccctagcgtgaccctgccacctcagcctcacaccaaggagggcgttgatgcctacaacgaagtgatcgcccgggtgcgaatgtgggtgaacctgaacctgtggcagaagctgaagctaagcagagatgatgccaagcctctgctgagactgaagggattcccttcctttcctctggtcgagagacaggccaacgaagtggactggtgggacatggtgtgtaacgtgaagaagctgatcaacgagaaaaaggaggatggcaaggtgttttggcagaatctggctggctacaagagacaggaagccctgagaccatacctgagcagcgaggaagatcggaagaagggaaagaaattcgctcggtaccagctgggcgacctgctgctgcacctggaaaagaagcacggcgaggactggggaaaggtgtacgacgaggcctgggagcggattgacaagaaagtggaaggcctgagcaagcacatcaagctggaagaggaacggagaagcgaggacgcccagagcaaggccgccctgaccgactggctgcgggctaaggccagcttcgtgatcgagggcctgaaggaggccgacaaggacgagttctgcagatgcgagctgaagctgcagaagtggtacggggacctgcggggaaagcccttcgccatcgaagccgagaacagcatcctggacatcagcggcttcagcaagcagtacaactgtgccttcatctggcagaaggacggcgtgaagaagctgaacctgtacctgatcatcaactacttcaagggcggcaagctgcggttcaagaagatcaaacctgaagccttcgaagccaacagattctacaccgtgatcaacaaaaagagcggcgagatcgtgcccatggaggtgaacttcaacttcgacgaccccaacctgatcatcctgcctctggcctttggcaagagacagggcagagaattcatctggaacgacctgctgtccctggaaaccggcagcctgaagctggccaacggaagagtgatcgagaagacactgtacaacagaagaacccggcaggatgagcctgccctgttcgtggccctgaccttcgagcggcgggaggtcctggactcctccaatatcaaaccaatgaacctgatcggcgtggcaagaggcgaaaacatccccgccgtgatcgccctgaccgaccccgagggctgcccactgagccggtttaaggatagcctgggaaacccaacccacatcctgagaatcggcgagagctataaggagaagcagcggaccatccaggccaagaaggaggtggagcagcggagagccggcggctacagccggaagtacgccagcaaagccaagaatctggcagacgatatggtgagaaacaccgctagagatctgctgtactacgccgtgacccaggatgccatgctgatcttcgccaacctgagccggggcttcggccggcagggcaagcggaccttcatggccgagagacagtacacacggatggaggactggctgaccgccaagctggcctacgagggcctgagcaagacctacctgtccaagacactggcccagtacacctccaagacatgcagcaactgtgggtttaccatcaccagcgccgactacgacagggtgctggagaagctgaagaagacagcaacaggctggatgaccacaattaacggcaaggagctgaaggtggagggccagattacctactacaacagatacaagagacagaacgtagtcaaggacctgtccgtcgagctggatagactgagcgaagaatctgtgaacaacgacatctcctcctggacaaagggcagaagcggagaagctctgagcctcctgaagaaaagattctcccatagacccgtgcaggagaagttcgtgtgcctgaactgcggcttcgagacacacgcagccgagcaagccgccctgaacatcgccagatcctggctgttcctgcggagccaggagtacaagaaataccagacaaacaagacaaccggcaacaccgataagagagccttcgtcgagacctggcagtccttttaccggaagaagcttaaggaggtgtggaaacctgccgtgcggtctggcggatctggcggaggctccacaagcatggagggcctggtgatgttccaggacctgttcatcgacttcagccaggaggagtgggagtgcctggacaccgcccagaaggacctgtacagggacgtgatgatggagaactacagcagcctggtgagcctgggcctgtgcatccccaagcccgacgtgatcagcctgctggagcagggcaaggagccctggatggtgagcagggacgtgctgggcggctggtgccccgacagcgagttcaggaccagccccaagaaaaagagaaaagtctaagctgccttctgcggggcttgccttctggccatgcccttcttctctcccttgcacctgtacctcttggtctttgaataaagcctgagtaggaaggctagcaaaaaaaaaaaaaaaaaaaaaaaaaaaaaaaaaaaaaaaaaaaaaaaaaaaaaaaaaaaaaaaaaaaaaaaaaaaaaaaa

SEQ ID NO: 5949 - RNA, 5797 nt, synthetic construct
  source 1..5797: mol_type = other RNA
aggaaataagagagaaaagaagagtaagaagaaatataagagccaccatggcccctaagaagaagcgtaaagtgagccggatggaacgcctcgtctacgaggtgcggcagaagtgcagaaacatcgaggacatctgcatctcctgcggatctctgaacgtgaccctggagcacccactgttcatcggcggcatgtgccagaactgtaaaaactgttttctggagtgtgcctatcaatacgacgatgacggctaccagagctactgcaccatctgttgcggcggaagagaggtgctgatgtgtggaaataacaactgctgccggtgcttctgcgtggaatgcgtggacctgctggtgggccccggcgccgcccaggccgctattaaggaagatccttggaactgctacatgtgcggccacaagggcacatacggcctgctgagacggagagaggactggcctagcagactgcagatgttcttcgccaataaccacgaccaggagttcgacccccctaaggtgtaccctcccgtccccgccgagaagagaaagcccatccgggtcctgagcctgttcgatggcatcgccaccggtctgctggtgctgaaggacctgggcatccaggtggataggtacattgcctccgaggtgtgcgaggactccatcaccgtgggaatggtgcgtcatcagggcaagatcatgtacgtgggcgacgtgcggagcgtgacacagaagcatatccaggagtggggccctttcgacctggtgatcggcggcagcccttgcaatgacctgagcatcgtgaacccagcccggaagggcctgtacgagggaaccggcagactgttcttcgagttttacagactgctgcacgacgcccggcctaaggaaggcgacgaccggcccttcttttggctgttcgagaatgtggtggccatgggagtcagcgacaagcgggatattagccggttcctggagagcaaccccgtgatgatcgatgccaaggaagtgagcgccgcccaccgggccagatacttctggggcaatctgcctggcatgaacagacccctggccagcaccgtgaacgacaagctggagctgcaggagtgcctggagcacggccggatcgccaagttcagcaaggtgagaaccatcaccacccgaagcaacagcatcaaacaaggcaaggaccagcactttcctgtgttcatgaacgagaaggaggacatcctgtggtgtaccgagatggagagagtgttcgggttcccagtccactacacagatgtcagcaacatgtctagactggccagacagagactgctgggaagaagctggtccgtccctgtgatcagacacctgttcgcccctctgaaggagtacttcgcctgcgtgagcagcggcaacagcaacgccaacagccggggccccagcttctctagcggcctggtgccactgtccctgagagggagccacatgggccccatggagatctacaaaaccgtgagcgcctggaagcggcagcctgtgcgcgtgctgagcctgtttcggaatatcgataaagtcctgaaaagcctgggattcctggagagcggctctggctccggcggtggcaccctgaagtacgtggaggatgtgacaaacgtggtcagacgggatgtggagaagtggggccccttcgatctggtgtacggcagcacccaacccctgggcagctcttgtgaccggtgccctggctggtacatgtttcagttccaccggatcctgcagtacgccctgccgagacaggagtcccagcggccattcttttggattttcatggacaacttgctgctgaccgaggatgaccaggaaactaccactcggttcctgcagaccgaagccgtgaccctgcaggacgtgagaggccgggactaccagaacgccatgcgggtgtggtccaacatccctggactgaaaagcaagcacgcacctctgacccctaaagaagaggagtacctgcaggcccaggtgcggagcagaagcaagctggacgcccctaaggtggatctgctggtgaagaattgcctcctgcccctgagagagtacttcaagtatttcagccagaatagtctgcccctgggcggcccaagcagcggcgcccctcctcccagcggcggcagcccagccggctccccaacctctaccgaggagggcacctctgagtccgccacccccgagagcggccctggcacctccaccgagcccagcgagggcagcgcacccggcagccctgccggcagccccacctccacagaggagggaaccagcaccgagcccagcgaaggcagcgccccaggcaccagcaccgagcctagtgagggcggctctggcggcggcagcgcccaggagattaaacggatcaacaagatcagaagaagacttgtgaaagacagcaacaccaagaaggccggcaagacaggccccatgaaaaccctgctggttagagtgatgacacccgatctgagagagcggctggaaaacctgagaaagaagcctgaaaatatcccccagcccatcagcaatacatctagagccaacctgaataagctgctgaccgattacaccgaaatgaagaaggcgatcctgcatgtgtactgggaagagttccagaaggaccctgtgggcctgatgagccgggtggcccagcctgccagcaagaagatcgatcagaacaagctgaaacctgagatggacgagaagggcaacctgaccaccgccggctttgcctgctctcagtgtggccagcccctgttcgtgtacaagctggagcaggtgtctgagaagggcaaggcttacaccaactacttcggacggtgcaatgtggccgagcacgaaaagctgatcctgctggcccagctgaagcccgagaaggatagcgacgaagccgtgacatatagcctgggaaagtttgggcagagggccctggatttctacagcattcatgtgaccaaggagtccacccaccccgtgaagcccctggcccagatcgccggaaacagatacgcctccggacctgtgggaaaggccctgagcgacgcatgtatgggcacaatcgcctccttcctgtctaagtaccaggacatcatcatcgaacaccagaaggtggtgaagggcaaccagaagagactggagagcctgcgggagctggccggcaaggaaaacctggaataccctagcgtgaccctgccacctcagcctcacaccaaggagggcgttgatgcctacaacgaagtgatcgcccgggtgcgaatgtgggtgaacctgaacctgtggcagaagctgaagctaagcagagatgatgccaagcctctgctgagactgaagggattcccttcctttcctctggtcgagagacaggccaacgaagtggactggtgggacatggtgtgtaacgtgaagaagctgatcaacgagaaaaaggaggatggcaaggtgttttggcagaatctggctggctacaagagacaggaagccctgagaccatacctgagcagcgaggaagatcggaagaagggaaagaaattcgctcggtaccagctgggcgacctgctgctgcacctggaaaagaagcacggcgaggactggggaaaggtgtacgacgaggcctgggagcggattgacaagaaagtggaaggcctgagcaagcacatcaagctggaagaggaacggagaagcgaggacgcccagagcaaggccgccctgaccgactggctgcgggctaaggccagcttcgtgatcgagggcctgaaggaggccgacaaggacgagttctgcagatgcgagctgaagctgcagaagtggtacggggacctgcggggaaagcccttcgccatcgaagccgagaacagcatcctggacatcagcggcttcagcaagcagtacaactgtgccttcatctggcagaaggacggcgtgaagaagctgaacctgtacctgatcatcaactacttcaagggcggcaagctgcggttcaagaagatcaaacctgaagccttcgaagccaacagattctacaccgtgatcaacaaaaagagcggcgagatcgtgcccatggaggtgaacttcaacttcgacgaccccaacctgatcatcctgcctctggcctttggcaagagacagggcagagaattcatctggaacgacctgctgtccctggaaaccggcagcctgaagctggccaacggaagagtgatcgagaagacactgtacaacagaagaacccggcaggatgagcctgccctgttcgtggccctgaccttcgagcggcgggaggtcctggactcctccaatatcaaaccaatgaacctgatcggcgtggcaagaggcgaaaacatccccgccgtgatcgccctgaccgaccccgagggctgcccactgagccggtttaaggatagcctgggaaacccaacccacatcctgagaatcggcgagagctataaggagaagcagcggaccatccaggccaagaaggaggtggagcagcggagagccggcggctacagccggaagtacgccagcaaagccaagaatctggcagacgatatggtgagaaacaccgctagagatctgctgtactacgccgtgacccaggatgccatgctgatcttcgccaacctgagccggggcttcggccggcagggcaagcggaccttcatggccgagagacagtacacacggatggaggactggctgaccgccaagctggcctacgagggcctgagcaagacctacctgtccaagacactggcccagtacacctccaagacatgcagcaactgtgggtttaccatcaccagcgccgactacgacagggtgctggagaagctgaagaagacagcaacaggctggatgaccacaattaacggcaaggagctgaaggtggagggccagattacctactacaacagatacaagagacagaacgtagtcaaggacctgtccgtcgagctggatagactgagcgaagaatctgtgaacaacgacatctcctcctggacaaagggcagaagcggagaagctctgagcctcctgaagaaaagattctcccatagacccgtgcaggagaagttcgtgtgcctgaactgcggcttcgagacacacgcagccgagcaagccgccctgaacatcgccagatcctggctgttcctgcggagccaggagtacaagaaataccagacaaacaagacaaccggcaacaccgataagagagccttcgtcgagacctggcagtccttttaccggaagaagcttaaggaggtgtggaaacctgccgtgcggtctggcggatctggcggaggctccacaagcaggaccagcgccttccccttccaggcccccgtgaccttcggcgacctggccatctacttcagccaggaggagtgggagtggctgagccccatccagaaggacctgtacgaggacgtgatgctggagaactaccagaacctggtgagcctgggcctgtgcttcaggaggcccaacgtgatcaccctgctggagaagggcaaggccccctggatggtggaccccgtgaagaggaggaggggcctgaccagccccaagaaaaagagaaaagtctaagctgccttctgcggggcttgccttctggccatgcccttcttctctcccttgcacctgtacctcttggtctttgaataaagcctgagtaggaaggctagcaaaaaaaaaaaaaaaaaaaaaaaaaaaaaaaaaaaaaaaaaaaaaaaaaaaaaaaaaaaaaaaaaaaaaaaaaaaaaaaa

SEQ ID NO: 5950 - RNA, 5797 nt, synthetic construct
  source 1..5797: mol_type = other RNA
aggaaataagagagaaaagaagagtaagaagaaatataagagccaccatggcccctaagaagaagcgtaaagtgagccggatggaacgcctcgtctacgaggtgcggcagaagtgcagaaacatcgaggacatctgcatctcctgcggatctctgaacgtgaccctggagcacccactgttcatcggcggcatgtgccagaactgtaaaaactgttttctggagtgtgcctatcaatacgacgatgacggctaccagagctactgcaccatctgttgcggcggaagagaggtgctgatgtgtggaaataacaactgctgccggtgcttctgcgtggaatgcgtggacctgctggtgggccccggcgccgcccaggccgctattaaggaagatccttggaactgctacatgtgcggccacaagggcacatacggcctgctgagacggagagaggactggcctagcagactgcagatgttcttcgccaataaccacgaccaggagttcgacccccctaaggtgtaccctcccgtccccgccgagaagagaaagcccatccgggtcctgagcctgttcgatggcatcgccaccggtctgctggtgctgaaggacctgggcatccaggtggataggtacattgcctccgaggtgtgcgaggactccatcaccgtgggaatggtgcgtcatcagggcaagatcatgtacgtgggcgacgtgcggagcgtgacacagaagcatatccaggagtggggccctttcgacctggtgatcggcggcagcccttgcaatgacctgagcatcgtgaacccagcccggaagggcctgtacgagggaaccggcagactgttcttcgagttttacagactgctgcacgacgcccggcctaaggaaggcgacgaccggcccttcttttggctgttcgagaatgtggtggccatgggagtcagcgacaagcgggatattagccggttcctggagagcaaccccgtgatgatcgatgccaaggaagtgagcgccgcccaccgggccagatacttctggggcaatctgcctggcatgaacagacccctggccagcaccgtgaacgacaagctggagctgcaggagtgcctggagcacggccggatcgccaagttcagcaaggtgagaaccatcaccacccgaagcaacagcatcaaacaaggcaaggaccagcactttcctgtgttcatgaacgagaaggaggacatcctgtggtgtaccgagatggagagagtgttcgggttcccagtccactacacagatgtcagcaacatgtctagactggccagacagagactgctgggaagaagctggtccgtccctgtgatcagacacctgttcgcccctctgaaggagtacttcgcctgcgtgagcagcggcaacagcaacgccaacagccggggccccagcttctctagcggcctggtgccactgtccctgagagggagccacatgggccccatggagatctacaaaaccgtgagcgcctggaagcggcagcctgtgcgcgtgctgagcctgtttcggaatatcgataaagtcctgaaaagcctgggattcctggagagcggctctggctccggcggtggcaccctgaagtacgtggaggatgtgacaaacgtggtcagacgggatgtggagaagtggggccccttcgatctggtgtacggcagcacccaacccctgggcagctcttgtgaccggtgccctggctggtacatgtttcagttccaccggatcctgcagtacgccctgccgagacaggagtcccagcggccattcttttggattttcatggacaacttgctgctgaccgaggatgaccaggaaactaccactcggttcctgcagaccgaagccgtgaccctgcaggacgtgagaggccgggactaccagaacgccatgcgggtgtggtccaacatccctggactgaaaagcaagcacgcacctctgacccctaaagaagaggagtacctgcaggcccaggtgcggagcagaagcaagctggacgcccctaaggtggatctgctggtgaagaattgcctcctgcccctgagagagtacttcaagtatttcagccagaatagtctgcccctgggcggcccaagcagcggcgcccctcctcccagcggcggcagcccagccggctccccaacctctaccgaggagggcacctctgagtccgccacccccgagagcggccctggcacctccaccgagcccagcgagggcagcgcacccggcagccctgccggcagccccacctccacagaggagggaaccagcaccgagcccagcgaaggcagcgccccaggcaccagcaccgagcctagtgagggcggctctggcggcggcagcgcccaggagattaaacggatcaacaagatcagaagaagacttgtgaaagacagcaacaccaagaaggccggcaagacaggccccatgaaaaccctgctggttagagtgatgacacccgatctgagagagcggctggaaaacctgagaaagaagcctgaaaatatcccccagcccatcagcaatacatctagagccaacctgaataagctgctgaccgattacaccgaaatgaagaaggcgatcctgcatgtgtactgggaagagttccagaaggaccctgtgggcctgatgagccgggtggcccagcctgccagcaagaagatcgatcagaacaagctgaaacctgagatggacgagaagggcaacctgaccaccgccggctttgcctgctctcagtgtggccagcccctgttcgtgtacaagctggagcaggtgtctgagaagggcaaggcttacaccaactacttcggacggtgcaatgtggccgagcacgaaaagctgatcctgctggcccagctgaagcccgagaaggatagcgacgaagccgtgacatatagcctgggaaagtttgggcagagggccctggatttctacagcattcatgtgaccaaggagtccacccaccccgtgaagcccctggcccagatcgccggaaacagatacgcctccggacctgtgggaaaggccctgagcgacgcatgtatgggcacaatcgcctccttcctgtctaagtaccaggacatcatcatcgaacaccagaaggtggtgaagggcaaccagaagagactggagagcctgcgggagctggccggcaaggaaaacctggaataccctagcgtgaccctgccacctcagcctcacaccaaggagggcgttgatgcctacaacgaagtgatcgcccgggtgcgaatgtgggtgaacctgaacctgtggcagaagctgaagctaagcagagatgatgccaagcctctgctgagactgaagggattcccttcctttcctctggtcgagagacaggccaacgaagtggactggtgggacatggtgtgtaacgtgaagaagctgatcaacgagaaaaaggaggatggcaaggtgttttggcagaatctggctggctacaagagacaggaagccctgagaccatacctgagcagcgaggaagatcggaagaagggaaagaaattcgctcggtaccagctgggcgacctgctgctgcacctggaaaagaagcacggcgaggactggggaaaggtgtacgacgaggcctgggagcggattgacaagaaagtggaaggcctgagcaagcacatcaagctggaagaggaacggagaagcgaggacgcccagagcaaggccgccctgaccgactggctgcgggctaaggccagcttcgtgatcgagggcctgaaggaggccgacaaggacgagttctgcagatgcgagctgaagctgcagaagtggtacggggacctgcggggaaagcccttcgccatcgaagccgagaacagcatcctggacatcagcggcttcagcaagcagtacaactgtgccttcatctggcagaaggacggcgtgaagaagctgaacctgtacctgatcatcaactacttcaagggcggcaagctgcggttcaagaagatcaaacctgaagccttcgaagccaacagattctacaccgtgatcaacaaaaagagcggcgagatcgtgcccatggaggtgaacttcaacttcgacgaccccaacctgatcatcctgcctctggcctttggcaagagacagggcagagaattcatctggaacgacctgctgtccctggaaaccggcagcctgaagctggccaacggaagagtgatcgagaagacactgtacaacagaagaacccggcaggatgagcctgccctgttcgtggccctgaccttcgagcggcgggaggtcctggactcctccaatatcaaaccaatgaacctgatcggcgtggcaagaggcgaaaacatccccgccgtgatcgccctgaccgaccccgagggctgcccactgagccggtttaaggatagcctgggaaacccaacccacatcctgagaatcggcgagagctataaggagaagcagcggaccatccaggccaagaaggaggtggagcagcggagagccggcggctacagccggaagtacgccagcaaagccaagaatctggcagacgatatggtgagaaacaccgctagagatctgctgtactacgccgtgacccaggatgccatgctgatcttcgccaacctgagccggggcttcggccggcagggcaagcggaccttcatggccgagagacagtacacacggatggaggactggctgaccgccaagctggcctacgagggcctgagcaagacctacctgtccaagacactggcccagtacacctccaagacatgcagcaactgtgggtttaccatcaccagcgccgactacgacagggtgctggagaagctgaagaagacagcaacaggctggatgaccacaattaacggcaaggagctgaaggtggagggccagattacctactacaacagatacaagagacagaacgtagtcaaggacctgtccgtcgagctggatagactgagcgaagaatctgtgaacaacgacatctcctcctggacaaagggcagaagcggagaagctctgagcctcctgaagaaaagattctcccatagacccgtgcaggagaagttcgtgtgcctgaactgcggcttcgagacacacgcagccgagcaagccgccctgaacatcgccagatcctggctgttcctgcggagccaggagtacaagaaataccagacaaacaagacaaccggcaacaccgataagagagccttcgtcgagacctggcagtccttttaccggaagaagcttaaggaggtgtggaaacctgccgtgcggtctggcggatctggcggaggctccacaagcgcccaggtgctggtgaccttccaggacgtggccgtggacttcacccaggaggagtggaggctgctggaccccggccagaaggagctgtacaaggaggtgatgctggagaacgtgcagaacgtgctgagcctgggcctgcccgtgcccagggaggactggatcagccacttcgaccagggcagggccccctggatgctggagggcgagggccccagcaacagctgcctgggcagggagaggaggaccagccccaagaaaaagagaaaagtctaagctgccttctgcggggcttgccttctggccatgcccttcttctctcccttgcacctgtacctcttggtctttgaataaagcctgagtaggaaggctagcaaaaaaaaaaaaaaaaaaaaaaaaaaaaaaaaaaaaaaaaaaaaaaaaaaaaaaaaaaaaaaaaaaaaaaaaaaaaaaaa

SEQ ID NO: 5951 - RNA, 5797 nt, synthetic construct
  source 1..5797: mol_type = other RNA
aggaaataagagagaaaagaagagtaagaagaaatataagagccaccatggcccctaagaagaagcgtaaagtgagccggatggaacgcctcgtctacgaggtgcggcagaagtgcagaaacatcgaggacatctgcatctcctgcggatctctgaacgtgaccctggagcacccactgttcatcggcggcatgtgccagaactgtaaaaactgttttctggagtgtgcctatcaatacgacgatgacggctaccagagctactgcaccatctgttgcggcggaagagaggtgctgatgtgtggaaataacaactgctgccggtgcttctgcgtggaatgcgtggacctgctggtgggccccggcgccgcccaggccgctattaaggaagatccttggaactgctacatgtgcggccacaagggcacatacggcctgctgagacggagagaggactggcctagcagactgcagatgttcttcgccaataaccacgaccaggagttcgacccccctaaggtgtaccctcccgtccccgccgagaagagaaagcccatccgggtcctgagcctgttcgatggcatcgccaccggtctgctggtgctgaaggacctgggcatccaggtggataggtacattgcctccgaggtgtgcgaggactccatcaccgtgggaatggtgcgtcatcagggcaagatcatgtacgtgggcgacgtgcggagcgtgacacagaagcatatccaggagtggggccctttcgacctggtgatcggcggcagcccttgcaatgacctgagcatcgtgaacccagcccggaagggcctgtacgagggaaccggcagactgttcttcgagttttacagactgctgcacgacgcccggcctaaggaaggcgacgaccggcccttcttttggctgttcgagaatgtggtggccatgggagtcagcgacaagcgggatattagccggttcctggagagcaaccccgtgatgatcgatgccaaggaagtgagcgccgcccaccgggccagatacttctggggcaatctgcctggcatgaacagacccctggccagcaccgtgaacgacaagctggagctgcaggagtgcctggagcacggccggatcgccaagttcagcaaggtgagaaccatcaccacccgaagcaacagcatcaaacaaggcaaggaccagcactttcctgtgttcatgaacgagaaggaggacatcctgtggtgtaccgagatggagagagtgttcgggttcccagtccactacacagatgtcagcaacatgtctagactggccagacagagactgctgggaagaagctggtccgtccctgtgatcagacacctgttcgcccctctgaaggagtacttcgcctgcgtgagcagcggcaacagcaacgccaacagccggggccccagcttctctagcggcctggtgccactgtccctgagagggagccacatgggccccatggagatctacaaaaccgtgagcgcctggaagcggcagcctgtgcgcgtgctgagcctgtttcggaatatcgataaagtcctgaaaagcctgggattcctggagagcggctctggctccggcggtggcaccctgaagtacgtggaggatgtgacaaacgtggtcagacgggatgtggagaagtggggccccttcgatctggtgtacggcagcacccaacccctgggcagctcttgtgaccggtgccctggctggtacatgtttcagttccaccggatcctgcagtacgccctgccgagacaggagtcccagcggccattcttttggattttcatggacaacttgctgctgaccgaggatgaccaggaaactaccactcggttcctgcagaccgaagccgtgaccctgcaggacgtgagaggccgggactaccagaacgccatgcgggtgtggtccaacatccctggactgaaaagcaagcacgcacctctgacccctaaagaagaggagtacctgcaggcccaggtgcggagcagaagcaagctggacgcccctaaggtggatctgctggtgaagaattgcctcctgcccctgagagagtacttcaagtatttcagccagaatagtctgcccctgggcggcccaagcagcggcgcccctcctcccagcggcggcagcccagccggctccccaacctctaccgaggagggcacctctgagtccgccacccccgagagcggccctggcacctccaccgagcccagcgagggcagcgcacccggcagccctgccggcagccccacctccacagaggagggaaccagcaccgagcccagcgaaggcagcgccccaggcaccagcaccgagcctagtgagggcggctctggcggcggcagcgcccaggagattaaacggatcaacaagatcagaagaagacttgtgaaagacagcaacaccaagaaggccggcaagacaggccccatgaaaaccctgctggttagagtgatgacacccgatctgagagagcggctggaaaacctgagaaagaagcctgaaaatatcccccagcccatcagcaatacatctagagccaacctgaataagctgctgaccgattacaccgaaatgaagaaggcgatcctgcatgtgtactgggaagagttccagaaggaccctgtgggcctgatgagccgggtggcccagcctgccagcaagaagatcgatcagaacaagctgaaacctgagatggacgagaagggcaacctgaccaccgccggctttgcctgctctcagtgtggccagcccctgttcgtgtacaagctggagcaggtgtctgagaagggcaaggcttacaccaactacttcggacggtgcaatgtggccgagcacgaaaagctgatcctgctggcccagctgaagcccgagaaggatagcgacgaagccgtgacatatagcctgggaaagtttgggcagagggccctggatttctacagcattcatgtgaccaaggagtccacccaccccgtgaagcccctggcccagatcgccggaaacagatacgcctccggacctgtgggaaaggccctgagcgacgcatgtatgggcacaatcgcctccttcctgtctaagtaccaggacatcatcatcgaacaccagaaggtggtgaagggcaaccagaagagactggagagcctgcgggagctggccggcaaggaaaacctggaataccctagcgtgaccctgccacctcagcctcacaccaaggagggcgttgatgcctacaacgaagtgatcgcccgggtgcgaatgtgggtgaacctgaacctgtggcagaagctgaagctaagcagagatgatgccaagcctctgctgagactgaagggattcccttcctttcctctggtcgagagacaggccaacgaagtggactggtgggacatggtgtgtaacgtgaagaagctgatcaacgagaaaaaggaggatggcaaggtgttttggcagaatctggctggctacaagagacaggaagccctgagaccatacctgagcagcgaggaagatcggaagaagggaaagaaattcgctcggtaccagctgggcgacctgctgctgcacctggaaaagaagcacggcgaggactggggaaaggtgtacgacgaggcctgggagcggattgacaagaaagtggaaggcctgagcaagcacatcaagctggaagaggaacggagaagcgaggacgcccagagcaaggccgccctgaccgactggctgcgggctaaggccagcttcgtgatcgagggcctgaaggaggccgacaaggacgagttctgcagatgcgagctgaagctgcagaagtggtacggggacctgcggggaaagcccttcgccatcgaagccgagaacagcatcctggacatcagcggcttcagcaagcagtacaactgtgccttcatctggcagaaggacggcgtgaagaagctgaacctgtacctgatcatcaactacttcaagggcggcaagctgcggttcaagaagatcaaacctgaagccttcgaagccaacagattctacaccgtgatcaacaaaaagagcggcgagatcgtgcccatggaggtgaacttcaacttcgacgaccccaacctgatcatcctgcctctggcctttggcaagagacagggcagagaattcatctggaacgacctgctgtccctggaaaccggcagcctgaagctggccaacggaagagtgatcgagaagacactgtacaacagaagaacccggcaggatgagcctgccctgttcgtggccctgaccttcgagcggcgggaggtcctggactcctccaatatcaaaccaatgaacctgatcggcgtggcaagaggcgaaaacatccccgccgtgatcgccctgaccgaccccgagggctgcccactgagccggtttaaggatagcctgggaaacccaacccacatcctgagaatcggcgagagctataaggagaagcagcggaccatccaggccaagaaggaggtggagcagcggagagccggcggctacagccggaagtacgccagcaaagccaagaatctggcagacgatatggtgagaaacaccgctagagatctgctgtactacgccgtgacccaggatgccatgctgatcttcgccaacctgagccggggcttcggccggcagggcaagcggaccttcatggccgagagacagtacacacggatggaggactggctgaccgccaagctggcctacgagggcctgagcaagacctacctgtccaagacactggcccagtacacctccaagacatgcagcaactgtgggtttaccatcaccagcgccgactacgacagggtgctggagaagctgaagaagacagcaacaggctggatgaccacaattaacggcaaggagctgaaggtggagggccagattacctactacaacagatacaagagacagaacgtagtcaaggacctgtccgtcgagctggatagactgagcgaagaatctgtgaacaacgacatctcctcctggacaaagggcagaagcggagaagctctgagcctcctgaagaaaagattctcccatagacccgtgcaggagaagttcgtgtgcctgaactgcggcttcgagacacacgcagccgagcaagccgccctgaacatcgccagatcctggctgttcctgcggagccaggagtacaagaaataccagacaaacaagacaaccggcaacaccgataagagagccttcgtcgagacctggcagtccttttaccggaagaagcttaaggaggtgtggaaacctgccgtgcggtctggcggatctggcggaggctccacaagcaggagggagcccgtgaccttcgaggacgtggccgtgtacttcagcgagaacgagtggagcagcctggcccccgcccagagggccctgtacagggacgtgatgctggagaactacggcgccgtggccagcctggccttcagcttccccaagcccgccctgatcagccagctggagaggggcgaggccccctggagcctggccccccagggcgccctggacggcgagggcagcaggggcatcagcaccagccccaagaaaaagagaaaagtctaagctgccttctgcggggcttgccttctggccatgcccttcttctctcccttgcacctgtacctcttggtctttgaataaagcctgagtaggaaggctagcaaaaaaaaaaaaaaaaaaaaaaaaaaaaaaaaaaaaaaaaaaaaaaaaaaaaaaaaaaaaaaaaaaaaaaaaaaaaaaaa

SEQ ID NO: 5952 - RNA, 5797 nt, synthetic construct
  source 1..5797: mol_type = other RNA
aggaaataagagagaaaagaagagtaagaagaaatataagagccaccatggcccctaagaagaagcgtaaagtgagccggatggaacgcctcgtctacgaggtgcggcagaagtgcagaaacatcgaggacatctgcatctcctgcggatctctgaacgtgaccctggagcacccactgttcatcggcggcatgtgccagaactgtaaaaactgttttctggagtgtgcctatcaatacgacgatgacggctaccagagctactgcaccatctgttgcggcggaagagaggtgctgatgtgtggaaataacaactgctgccggtgcttctgcgtggaatgcgtggacctgctggtgggccccggcgccgcccaggccgctattaaggaagatccttggaactgctacatgtgcggccacaagggcacatacggcctgctgagacggagagaggactggcctagcagactgcagatgttcttcgccaataaccacgaccaggagttcgacccccctaaggtgtaccctcccgtccccgccgagaagagaaagcccatccgggtcctgagcctgttcgatggcatcgccaccggtctgctggtgctgaaggacctgggcatccaggtggataggtacattgcctccgaggtgtgcgaggactccatcaccgtgggaatggtgcgtcatcagggcaagatcatgtacgtgggcgacgtgcggagcgtgacacagaagcatatccaggagtggggccctttcgacctggtgatcggcggcagcccttgcaatgacctgagcatcgtgaacccagcccggaagggcctgtacgagggaaccggcagactgttcttcgagttttacagactgctgcacgacgcccggcctaaggaaggcgacgaccggcccttcttttggctgttcgagaatgtggtggccatgggagtcagcgacaagcgggatattagccggttcctggagagcaaccccgtgatgatcgatgccaaggaagtgagcgccgcccaccgggccagatacttctggggcaatctgcctggcatgaacagacccctggccagcaccgtgaacgacaagctggagctgcaggagtgcctggagcacggccggatcgccaagttcagcaaggtgagaaccatcaccacccgaagcaacagcatcaaacaaggcaaggaccagcactttcctgtgttcatgaacgagaaggaggacatcctgtggtgtaccgagatggagagagtgttcgggttcccagtccactacacagatgtcagcaacatgtctagactggccagacagagactgctgggaagaagctggtccgtccctgtgatcagacacctgttcgcccctctgaaggagtacttcgcctgcgtgagcagcggcaacagcaacgccaacagccggggccccagcttctctagcggcctggtgccactgtccctgagagggagccacatgggccccatggagatctacaaaaccgtgagcgcctggaagcggcagcctgtgcgcgtgctgagcctgtttcggaatatcgataaagtcctgaaaagcctgggattcctggagagcggctctggctccggcggtggcaccctgaagtacgtggaggatgtgacaaacgtggtcagacgggatgtggagaagtggggccccttcgatctggtgtacggcagcacccaacccctgggcagctcttgtgaccggtgccctggctggtacatgtttcagttccaccggatcctgcagtacgccctgccgagacaggagtcccagcggccattcttttggattttcatggacaacttgctgctgaccgaggatgaccaggaaactaccactcggttcctgcagaccgaagccgtgaccctgcaggacgtgagaggccgggactaccagaacgccatgcgggtgtggtccaacatccctggactgaaaagcaagcacgcacctctgacccctaaagaagaggagtacctgcaggcccaggtgcggagcagaagcaagctggacgcccctaaggtggatctgctggtgaagaattgcctcctgcccctgagagagtacttcaagtatttcagccagaatagtctgcccctgggcggcccaagcagcggcgcccctcctcccagcggcggcagcccagccggctccccaacctctaccgaggagggcacctctgagtccgccacccccgagagcggccctggcacctccaccgagcccagcgagggcagcgcacccggcagccctgccggcagccccacctccacagaggagggaaccagcaccgagcccagcgaaggcagcgccccaggcaccagcaccgagcctagtgagggcggctctggcggcggcagcgcccaggagattaaacggatcaacaagatcagaagaagacttgtgaaagacagcaacaccaagaaggccggcaagacaggccccatgaaaaccctgctggttagagtgatgacacccgatctgagagagcggctggaaaacctgagaaagaagcctgaaaatatcccccagcccatcagcaatacatctagagccaacctgaataagctgctgaccgattacaccgaaatgaagaaggcgatcctgcatgtgtactgggaagagttccagaaggaccctgtgggcctgatgagccgggtggcccagcctgccagcaagaagatcgatcagaacaagctgaaacctgagatggacgagaagggcaacctgaccaccgccggctttgcctgctctcagtgtggccagcccctgttcgtgtacaagctggagcaggtgtctgagaagggcaaggcttacaccaactacttcggacggtgcaatgtggccgagcacgaaaagctgatcctgctggcccagctgaagcccgagaaggatagcgacgaagccgtgacatatagcctgggaaagtttgggcagagggccctggatttctacagcattcatgtgaccaaggagtccacccaccccgtgaagcccctggcccagatcgccggaaacagatacgcctccggacctgtgggaaaggccctgagcgacgcatgtatgggcacaatcgcctccttcctgtctaagtaccaggacatcatcatcgaacaccagaaggtggtgaagggcaaccagaagagactggagagcctgcgggagctggccggcaaggaaaacctggaataccctagcgtgaccctgccacctcagcctcacaccaaggagggcgttgatgcctacaacgaagtgatcgcccgggtgcgaatgtgggtgaacctgaacctgtggcagaagctgaagctaagcagagatgatgccaagcctctgctgagactgaagggattcccttcctttcctctggtcgagagacaggccaacgaagtggactggtgggacatggtgtgtaacgtgaagaagctgatcaacgagaaaaaggaggatggcaaggtgttttggcagaatctggctggctacaagagacaggaagccctgagaccatacctgagcagcgaggaagatcggaagaagggaaagaaattcgctcggtaccagctgggcgacctgctgctgcacctggaaaagaagcacggcgaggactggggaaaggtgtacgacgaggcctgggagcggattgacaagaaagtggaaggcctgagcaagcacatcaagctggaagaggaacggagaagcgaggacgcccagagcaaggccgccctgaccgactggctgcgggctaaggccagcttcgtgatcgagggcctgaaggaggccgacaaggacgagttctgcagatgcgagctgaagctgcagaagtggtacggggacctgcggggaaagcccttcgccatcgaagccgagaacagcatcctggacatcagcggcttcagcaagcagtacaactgtgccttcatctggcagaaggacggcgtgaagaagctgaacctgtacctgatcatcaactacttcaagggcggcaagctgcggttcaagaagatcaaacctgaagccttcgaagccaacagattctacaccgtgatcaacaaaaagagcggcgagatcgtgcccatggaggtgaacttcaacttcgacgaccccaacctgatcatcctgcctctggcctttggcaagagacagggcagagaattcatctggaacgacctgctgtccctggaaaccggcagcctgaagctggccaacggaagagtgatcgagaagacactgtacaacagaagaacccggcaggatgagcctgccctgttcgtggccctgaccttcgagcggcgggaggtcctggactcctccaatatcaaaccaatgaacctgatcggcgtggcaagaggcgaaaacatccccgccgtgatcgccctgaccgaccccgagggctgcccactgagccggtttaaggatagcctgggaaacccaacccacatcctgagaatcggcgagagctataaggagaagcagcggaccatccaggccaagaaggaggtggagcagcggagagccggcggctacagccggaagtacgccagcaaagccaagaatctggcagacgatatggtgagaaacaccgctagagatctgctgtactacgccgtgacccaggatgccatgctgatcttcgccaacctgagccggggcttcggccggcagggcaagcggaccttcatggccgagagacagtacacacggatggaggactggctgaccgccaagctggcctacgagggcctgagcaagacctacctgtccaagacactggcccagtacacctccaagacatgcagcaactgtgggtttaccatcaccagcgccgactacgacagggtgctggagaagctgaagaagacagcaacaggctggatgaccacaattaacggcaaggagctgaaggtggagggccagattacctactacaacagatacaagagacagaacgtagtcaaggacctgtccgtcgagctggatagactgagcgaagaatctgtgaacaacgacatctcctcctggacaaagggcagaagcggagaagctctgagcctcctgaagaaaagattctcccatagacccgtgcaggagaagttcgtgtgcctgaactgcggcttcgagacacacgcagccgagcaagccgccctgaacatcgccagatcctggctgttcctgcggagccaggagtacaagaaataccagacaaacaagacaaccggcaacaccgataagagagccttcgtcgagacctggcagtccttttaccggaagaagcttaaggaggtgtggaaacctgccgtgcggtctggcggatctggcggaggctccacaagcatgggcgccgtgacctacgacgacgtgcacatcaacttcacccaggaggagtgggccctgctgaaccccagccagaagaggctgtacaaggacgtgatgcacgacacctacagcaacctgaccgccaccggctacagcctggaggaccactacatcgaggagcactgccagagcagcaggaggtgcaggaggcacctgcagaggcacaagaaggtgcacatcggcgagaagccctacgagagcaccagccccaagaaaaagagaaaagtctaagctgccttctgcggggcttgccttctggccatgcccttcttctctcccttgcacctgtacctcttggtctttgaataaagcctgagtaggaaggctagcaaaaaaaaaaaaaaaaaaaaaaaaaaaaaaaaaaaaaaaaaaaaaaaaaaaaaaaaaaaaaaaaaaaaaaaaaaaaaaaa

SEQ ID NO: 5953 - RNA, 5797 nt, synthetic construct
  source 1..5797: mol_type = other RNA
aggaaataagagagaaaagaagagtaagaagaaatataagagccaccatggcccctaagaagaagcgtaaagtgagccggatggaacgcctcgtctacgaggtgcggcagaagtgcagaaacatcgaggacatctgcatctcctgcggatctctgaacgtgaccctggagcacccactgttcatcggcggcatgtgccagaactgtaaaaactgttttctggagtgtgcctatcaatacgacgatgacggctaccagagctactgcaccatctgttgcggcggaagagaggtgctgatgtgtggaaataacaactgctgccggtgcttctgcgtggaatgcgtggacctgctggtgggccccggcgccgcccaggccgctattaaggaagatccttggaactgctacatgtgcggccacaagggcacatacggcctgctgagacggagagaggactggcctagcagactgcagatgttcttcgccaataaccacgaccaggagttcgacccccctaaggtgtaccctcccgtccccgccgagaagagaaagcccatccgggtcctgagcctgttcgatggcatcgccaccggtctgctggtgctgaaggacctgggcatccaggtggataggtacattgcctccgaggtgtgcgaggactccatcaccgtgggaatggtgcgtcatcagggcaagatcatgtacgtgggcgacgtgcggagcgtgacacagaagcatatccaggagtggggccctttcgacctggtgatcggcggcagcccttgcaatgacctgagcatcgtgaacccagcccggaagggcctgtacgagggaaccggcagactgttcttcgagttttacagactgctgcacgacgcccggcctaaggaaggcgacgaccggcccttcttttggctgttcgagaatgtggtggccatgggagtcagcgacaagcgggatattagccggttcctggagagcaaccccgtgatgatcgatgccaaggaagtgagcgccgcccaccgggccagatacttctggggcaatctgcctggcatgaacagacccctggccagcaccgtgaacgacaagctggagctgcaggagtgcctggagcacggccggatcgccaagttcagcaaggtgagaaccatcaccacccgaagcaacagcatcaaacaaggcaaggaccagcactttcctgtgttcatgaacgagaaggaggacatcctgtggtgtaccgagatggagagagtgttcgggttcccagtccactacacagatgtcagcaacatgtctagactggccagacagagactgctgggaagaagctggtccgtccctgtgatcagacacctgttcgcccctctgaaggagtacttcgcctgcgtgagcagcggcaacagcaacgccaacagccggggccccagcttctctagcggcctggtgccactgtccctgagagggagccacatgggccccatggagatctacaaaaccgtgagcgcctggaagcggcagcctgtgcgcgtgctgagcctgtttcggaatatcgataaagtcctgaaaagcctgggattcctggagagcggctctggctccggcggtggcaccctgaagtacgtggaggatgtgacaaacgtggtcagacgggatgtggagaagtggggccccttcgatctggtgtacggcagcacccaacccctgggcagctcttgtgaccggtgccctggctggtacatgtttcagttccaccggatcctgcagtacgccctgccgagacaggagtcccagcggccattcttttggattttcatggacaacttgctgctgaccgaggatgaccaggaaactaccactcggttcctgcagaccgaagccgtgaccctgcaggacgtgagaggccgggactaccagaacgccatgcgggtgtggtccaacatccctggactgaaaagcaagcacgcacctctgacccctaaagaagaggagtacctgcaggcccaggtgcggagcagaagcaagctggacgcccctaaggtggatctgctggtgaagaattgcctcctgcccctgagagagtacttcaagtatttcagccagaatagtctgcccctgggcggcccaagcagcggcgcccctcctcccagcggcggcagcccagccggctccccaacctctaccgaggagggcacctctgagtccgccacccccgagagcggccctggcacctccaccgagcccagcgagggcagcgcacccggcagccctgccggcagccccacctccacagaggagggaaccagcaccgagcccagcgaaggcagcgccccaggcaccagcaccgagcctagtgagggcggctctggcggcggcagcgcccaggagattaaacggatcaacaagatcagaagaagacttgtgaaagacagcaacaccaagaaggccggcaagacaggccccatgaaaaccctgctggttagagtgatgacacccgatctgagagagcggctggaaaacctgagaaagaagcctgaaaatatcccccagcccatcagcaatacatctagagccaacctgaataagctgctgaccgattacaccgaaatgaagaaggcgatcctgcatgtgtactgggaagagttccagaaggaccctgtgggcctgatgagccgggtggcccagcctgccagcaagaagatcgatcagaacaagctgaaacctgagatggacgagaagggcaacctgaccaccgccggctttgcctgctctcagtgtggccagcccctgttcgtgtacaagctggagcaggtgtctgagaagggcaaggcttacaccaactacttcggacggtgcaatgtggccgagcacgaaaagctgatcctgctggcccagctgaagcccgagaaggatagcgacgaagccgtgacatatagcctgggaaagtttgggcagagggccctggatttctacagcattcatgtgaccaaggagtccacccaccccgtgaagcccctggcccagatcgccggaaacagatacgcctccggacctgtgggaaaggccctgagcgacgcatgtatgggcacaatcgcctccttcctgtctaagtaccaggacatcatcatcgaacaccagaaggtggtgaagggcaaccagaagagactggagagcctgcgggagctggccggcaaggaaaacctggaataccctagcgtgaccctgccacctcagcctcacaccaaggagggcgttgatgcctacaacgaagtgatcgcccgggtgcgaatgtgggtgaacctgaacctgtggcagaagctgaagctaagcagagatgatgccaagcctctgctgagactgaagggattcccttcctttcctctggtcgagagacaggccaacgaagtggactggtgggacatggtgtgtaacgtgaagaagctgatcaacgagaaaaaggaggatggcaaggtgttttggcagaatctggctggctacaagagacaggaagccctgagaccatacctgagcagcgaggaagatcggaagaagggaaagaaattcgctcggtaccagctgggcgacctgctgctgcacctggaaaagaagcacggcgaggactggggaaaggtgtacgacgaggcctgggagcggattgacaagaaagtggaaggcctgagcaagcacatcaagctggaagaggaacggagaagcgaggacgcccagagcaaggccgccctgaccgactggctgcgggctaaggccagcttcgtgatcgagggcctgaaggaggccgacaaggacgagttctgcagatgcgagctgaagctgcagaagtggtacggggacctgcggggaaagcccttcgccatcgaagccgagaacagcatcctggacatcagcggcttcagcaagcagtacaactgtgccttcatctggcagaaggacggcgtgaagaagctgaacctgtacctgatcatcaactacttcaagggcggcaagctgcggttcaagaagatcaaacctgaagccttcgaagccaacagattctacaccgtgatcaacaaaaagagcggcgagatcgtgcccatggaggtgaacttcaacttcgacgaccccaacctgatcatcctgcctctggcctttggcaagagacagggcagagaattcatctggaacgacctgctgtccctggaaaccggcagcctgaagctggccaacggaagagtgatcgagaagacactgtacaacagaagaacccggcaggatgagcctgccctgttcgtggccctgaccttcgagcggcgggaggtcctggactcctccaatatcaaaccaatgaacctgatcggcgtggcaagaggcgaaaacatccccgccgtgatcgccctgaccgaccccgagggctgcccactgagccggtttaaggatagcctgggaaacccaacccacatcctgagaatcggcgagagctataaggagaagcagcggaccatccaggccaagaaggaggtggagcagcggagagccggcggctacagccggaagtacgccagcaaagccaagaatctggcagacgatatggtgagaaacaccgctagagatctgctgtactacgccgtgacccaggatgccatgctgatcttcgccaacctgagccggggcttcggccggcagggcaagcggaccttcatggccgagagacagtacacacggatggaggactggctgaccgccaagctggcctacgagggcctgagcaagacctacctgtccaagacactggcccagtacacctccaagacatgcagcaactgtgggtttaccatcaccagcgccgactacgacagggtgctggagaagctgaagaagacagcaacaggctggatgaccacaattaacggcaaggagctgaaggtggagggccagattacctactacaacagatacaagagacagaacgtagtcaaggacctgtccgtcgagctggatagactgagcgaagaatctgtgaacaacgacatctcctcctggacaaagggcagaagcggagaagctctgagcctcctgaagaaaagattctcccatagacccgtgcaggagaagttcgtgtgcctgaactgcggcttcgagacacacgcagccgagcaagccgccctgaacatcgccagatcctggctgttcctgcggagccaggagtacaagaaataccagacaaacaagacaaccggcaacaccgataagagagccttcgtcgagacctggcagtccttttaccggaagaagcttaaggaggtgtggaaacctgccgtgcggtctggcggatctggcggaggctccacaagcagccaggagcccgtgaccttcgaggacgtggccgtgtacttcacccagaaccagtgggccagcctggaccccatgcagagggccctgtacctggaggtgatgctggagaactacgccaacatcaccagcctggccctgcccttccccaagcccgacctgatcctgcagctggagcagggcggcgccccctggggcctggacccctggacccccctggagggcgaggccctgggcggcgtgcacaccagccccaagaaaaagagaaaagtctaagctgccttctgcggggcttgccttctggccatgcccttcttctctcccttgcacctgtacctcttggtctttgaataaagcctgagtaggaaggctagcaaaaaaaaaaaaaaaaaaaaaaaaaaaaaaaaaaaaaaaaaaaaaaaaaaaaaaaaaaaaaaaaaaaaaaaaaaaaaaaa

SEQ ID NO: 5954 - RNA, 5797 nt, synthetic construct
  source 1..5797: mol_type = other RNA
aggaaataagagagaaaagaagagtaagaagaaatataagagccaccatggcccctaagaagaagcgtaaagtgagccggatggaacgcctcgtctacgaggtgcggcagaagtgcagaaacatcgaggacatctgcatctcctgcggatctctgaacgtgaccctggagcacccactgttcatcggcggcatgtgccagaactgtaaaaactgttttctggagtgtgcctatcaatacgacgatgacggctaccagagctactgcaccatctgttgcggcggaagagaggtgctgatgtgtggaaataacaactgctgccggtgcttctgcgtggaatgcgtggacctgctggtgggccccggcgccgcccaggccgctattaaggaagatccttggaactgctacatgtgcggccacaagggcacatacggcctgctgagacggagagaggactggcctagcagactgcagatgttcttcgccaataaccacgaccaggagttcgacccccctaaggtgtaccctcccgtccccgccgagaagagaaagcccatccgggtcctgagcctgttcgatggcatcgccaccggtctgctggtgctgaaggacctgggcatccaggtggataggtacattgcctccgaggtgtgcgaggactccatcaccgtgggaatggtgcgtcatcagggcaagatcatgtacgtgggcgacgtgcggagcgtgacacagaagcatatccaggagtggggccctttcgacctggtgatcggcggcagcccttgcaatgacctgagcatcgtgaacccagcccggaagggcctgtacgagggaaccggcagactgttcttcgagttttacagactgctgcacgacgcccggcctaaggaaggcgacgaccggcccttcttttggctgttcgagaatgtggtggccatgggagtcagcgacaagcgggatattagccggttcctggagagcaaccccgtgatgatcgatgccaaggaagtgagcgccgcccaccgggccagatacttctggggcaatctgcctggcatgaacagacccctggccagcaccgtgaacgacaagctggagctgcaggagtgcctggagcacggccggatcgccaagttcagcaaggtgagaaccatcaccacccgaagcaacagcatcaaacaaggcaaggaccagcactttcctgtgttcatgaacgagaaggaggacatcctgtggtgtaccgagatggagagagtgttcgggttcccagtccactacacagatgtcagcaacatgtctagactggccagacagagactgctgggaagaagctggtccgtccctgtgatcagacacctgttcgcccctctgaaggagtacttcgcctgcgtgagcagcggcaacagcaacgccaacagccggggccccagcttctctagcggcctggtgccactgtccctgagagggagccacatgggccccatggagatctacaaaaccgtgagcgcctggaagcggcagcctgtgcgcgtgctgagcctgtttcggaatatcgataaagtcctgaaaagcctgggattcctggagagcggctctggctccggcggtggcaccctgaagtacgtggaggatgtgacaaacgtggtcagacgggatgtggagaagtggggccccttcgatctggtgtacggcagcacccaacccctgggcagctcttgtgaccggtgccctggctggtacatgtttcagttccaccggatcctgcagtacgccctgccgagacaggagtcccagcggccattcttttggattttcatggacaacttgctgctgaccgaggatgaccaggaaactaccactcggttcctgcagaccgaagccgtgaccctgcaggacgtgagaggccgggactaccagaacgccatgcgggtgtggtccaacatccctggactgaaaagcaagcacgcacctctgacccctaaagaagaggagtacctgcaggcccaggtgcggagcagaagcaagctggacgcccctaaggtggatctgctggtgaagaattgcctcctgcccctgagagagtacttcaagtatttcagccagaatagtctgcccctgggcggcccaagcagcggcgcccctcctcccagcggcggcagcccagccggctccccaacctctaccgaggagggcacctctgagtccgccacccccgagagcggccctggcacctccaccgagcccagcgagggcagcgcacccggcagccctgccggcagccccacctccacagaggagggaaccagcaccgagcccagcgaaggcagcgccccaggcaccagcaccgagcctagtgagggcggctctggcggcggcagcgcccaggagattaaacggatcaacaagatcagaagaagacttgtgaaagacagcaacaccaagaaggccggcaagacaggccccatgaaaaccctgctggttagagtgatgacacccgatctgagagagcggctggaaaacctgagaaagaagcctgaaaatatcccccagcccatcagcaatacatctagagccaacctgaataagctgctgaccgattacaccgaaatgaagaaggcgatcctgcatgtgtactgggaagagttccagaaggaccctgtgggcctgatgagccgggtggcccagcctgccagcaagaagatcgatcagaacaagctgaaacctgagatggacgagaagggcaacctgaccaccgccggctttgcctgctctcagtgtggccagcccctgttcgtgtacaagctggagcaggtgtctgagaagggcaaggcttacaccaactacttcggacggtgcaatgtggccgagcacgaaaagctgatcctgctggcccagctgaagcccgagaaggatagcgacgaagccgtgacatatagcctgggaaagtttgggcagagggccctggatttctacagcattcatgtgaccaaggagtccacccaccccgtgaagcccctggcccagatcgccggaaacagatacgcctccggacctgtgggaaaggccctgagcgacgcatgtatgggcacaatcgcctccttcctgtctaagtaccaggacatcatcatcgaacaccagaaggtggtgaagggcaaccagaagagactggagagcctgcgggagctggccggcaaggaaaacctggaataccctagcgtgaccctgccacctcagcctcacaccaaggagggcgttgatgcctacaacgaagtgatcgcccgggtgcgaatgtgggtgaacctgaacctgtggcagaagctgaagctaagcagagatgatgccaagcctctgctgagactgaagggattcccttcctttcctctggtcgagagacaggccaacgaagtggactggtgggacatggtgtgtaacgtgaagaagctgatcaacgagaaaaaggaggatggcaaggtgttttggcagaatctggctggctacaagagacaggaagccctgagaccatacctgagcagcgaggaagatcggaagaagggaaagaaattcgctcggtaccagctgggcgacctgctgctgcacctggaaaagaagcacggcgaggactggggaaaggtgtacgacgaggcctgggagcggattgacaagaaagtggaaggcctgagcaagcacatcaagctggaagaggaacggagaagcgaggacgcccagagcaaggccgccctgaccgactggctgcgggctaaggccagcttcgtgatcgagggcctgaaggaggccgacaaggacgagttctgcagatgcgagctgaagctgcagaagtggtacggggacctgcggggaaagcccttcgccatcgaagccgagaacagcatcctggacatcagcggcttcagcaagcagtacaactgtgccttcatctggcagaaggacggcgtgaagaagctgaacctgtacctgatcatcaactacttcaagggcggcaagctgcggttcaagaagatcaaacctgaagccttcgaagccaacagattctacaccgtgatcaacaaaaagagcggcgagatcgtgcccatggaggtgaacttcaacttcgacgaccccaacctgatcatcctgcctctggcctttggcaagagacagggcagagaattcatctggaacgacctgctgtccctggaaaccggcagcctgaagctggccaacggaagagtgatcgagaagacactgtacaacagaagaacccggcaggatgagcctgccctgttcgtggccctgaccttcgagcggcgggaggtcctggactcctccaatatcaaaccaatgaacctgatcggcgtggcaagaggcgaaaacatccccgccgtgatcgccctgaccgaccccgagggctgcccactgagccggtttaaggatagcctgggaaacccaacccacatcctgagaatcggcgagagctataaggagaagcagcggaccatccaggccaagaaggaggtggagcagcggagagccggcggctacagccggaagtacgccagcaaagccaagaatctggcagacgatatggtgagaaacaccgctagagatctgctgtactacgccgtgacccaggatgccatgctgatcttcgccaacctgagccggggcttcggccggcagggcaagcggaccttcatggccgagagacagtacacacggatggaggactggctgaccgccaagctggcctacgagggcctgagcaagacctacctgtccaagacactggcccagtacacctccaagacatgcagcaactgtgggtttaccatcaccagcgccgactacgacagggtgctggagaagctgaagaagacagcaacaggctggatgaccacaattaacggcaaggagctgaaggtggagggccagattacctactacaacagatacaagagacagaacgtagtcaaggacctgtccgtcgagctggatagactgagcgaagaatctgtgaacaacgacatctcctcctggacaaagggcagaagcggagaagctctgagcctcctgaagaaaagattctcccatagacccgtgcaggagaagttcgtgtgcctgaactgcggcttcgagacacacgcagccgagcaagccgccctgaacatcgccagatcctggctgttcctgcggagccaggagtacaagaaataccagacaaacaagacaaccggcaacaccgataagagagccttcgtcgagacctggcagtccttttaccggaagaagcttaaggaggtgtggaaacctgccgtgcggtctggcggatctggcggaggctccacaagctaccaggagatggtgaccttcgaggacgtggccgtgcacttcaccaagaccgagtggaccggcctgagccccgcccagagggccctgtacaggagcgtgatgctggagaacttcggcaacctgaccgccctgggctaccccgtgcccaagcccgccctgatcagcctgctggagaggggcgacatggcctggggcctggaggcccaggacgacccccccgccgagaggaccaagaacgtgtgcaccagccccaagaaaaagagaaaagtctaagctgccttctgcggggcttgccttctggccatgcccttcttctctcccttgcacctgtacctcttggtctttgaataaagcctgagtaggaaggctagcaaaaaaaaaaaaaaaaaaaaaaaaaaaaaaaaaaaaaaaaaaaaaaaaaaaaaaaaaaaaaaaaaaaaaaaaaaaaaaaa

SEQ ID NO: 5955 - RNA, 5797 nt, synthetic construct
  source 1..5797: mol_type = other RNA
aggaaataagagagaaaagaagagtaagaagaaatataagagccaccatggcccctaagaagaagcgtaaagtgagccggatggaacgcctcgtctacgaggtgcggcagaagtgcagaaacatcgaggacatctgcatctcctgcggatctctgaacgtgaccctggagcacccactgttcatcggcggcatgtgccagaactgtaaaaactgttttctggagtgtgcctatcaatacgacgatgacggctaccagagctactgcaccatctgttgcggcggaagagaggtgctgatgtgtggaaataacaactgctgccggtgcttctgcgtggaatgcgtggacctgctggtgggccccggcgccgcccaggccgctattaaggaagatccttggaactgctacatgtgcggccacaagggcacatacggcctgctgagacggagagaggactggcctagcagactgcagatgttcttcgccaataaccacgaccaggagttcgacccccctaaggtgtaccctcccgtccccgccgagaagagaaagcccatccgggtcctgagcctgttcgatggcatcgccaccggtctgctggtgctgaaggacctgggcatccaggtggataggtacattgcctccgaggtgtgcgaggactccatcaccgtgggaatggtgcgtcatcagggcaagatcatgtacgtgggcgacgtgcggagcgtgacacagaagcatatccaggagtggggccctttcgacctggtgatcggcggcagcccttgcaatgacctgagcatcgtgaacccagcccggaagggcctgtacgagggaaccggcagactgttcttcgagttttacagactgctgcacgacgcccggcctaaggaaggcgacgaccggcccttcttttggctgttcgagaatgtggtggccatgggagtcagcgacaagcgggatattagccggttcctggagagcaaccccgtgatgatcgatgccaaggaagtgagcgccgcccaccgggccagatacttctggggcaatctgcctggcatgaacagacccctggccagcaccgtgaacgacaagctggagctgcaggagtgcctggagcacggccggatcgccaagttcagcaaggtgagaaccatcaccacccgaagcaacagcatcaaacaaggcaaggaccagcactttcctgtgttcatgaacgagaaggaggacatcctgtggtgtaccgagatggagagagtgttcgggttcccagtccactacacagatgtcagcaacatgtctagactggccagacagagactgctgggaagaagctggtccgtccctgtgatcagacacctgttcgcccctctgaaggagtacttcgcctgcgtgagcagcggcaacagcaacgccaacagccggggccccagcttctctagcggcctggtgccactgtccctgagagggagccacatgggccccatggagatctacaaaaccgtgagcgcctggaagcggcagcctgtgcgcgtgctgagcctgtttcggaatatcgataaagtcctgaaaagcctgggattcctggagagcggctctggctccggcggtggcaccctgaagtacgtggaggatgtgacaaacgtggtcagacgggatgtggagaagtggggccccttcgatctggtgtacggcagcacccaacccctgggcagctcttgtgaccggtgccctggctggtacatgtttcagttccaccggatcctgcagtacgccctgccgagacaggagtcccagcggccattcttttggattttcatggacaacttgctgctgaccgaggatgaccaggaaactaccactcggttcctgcagaccgaagccgtgaccctgcaggacgtgagaggccgggactaccagaacgccatgcgggtgtggtccaacatccctggactgaaaagcaagcacgcacctctgacccctaaagaagaggagtacctgcaggcccaggtgcggagcagaagcaagctggacgcccctaaggtggatctgctggtgaagaattgcctcctgcccctgagagagtacttcaagtatttcagccagaatagtctgcccctgggcggcccaagcagcggcgcccctcctcccagcggcggcagcccagccggctccccaacctctaccgaggagggcacctctgagtccgccacccccgagagcggccctggcacctccaccgagcccagcgagggcagcgcacccggcagccctgccggcagccccacctccacagaggagggaaccagcaccgagcccagcgaaggcagcgccccaggcaccagcaccgagcctagtgagggcggctctggcggcggcagcgcccaggagattaaacggatcaacaagatcagaagaagacttgtgaaagacagcaacaccaagaaggccggcaagacaggccccatgaaaaccctgctggttagagtgatgacacccgatctgagagagcggctggaaaacctgagaaagaagcctgaaaatatcccccagcccatcagcaatacatctagagccaacctgaataagctgctgaccgattacaccgaaatgaagaaggcgatcctgcatgtgtactgggaagagttccagaaggaccctgtgggcctgatgagccgggtggcccagcctgccagcaagaagatcgatcagaacaagctgaaacctgagatggacgagaagggcaacctgaccaccgccggctttgcctgctctcagtgtggccagcccctgttcgtgtacaagctggagcaggtgtctgagaagggcaaggcttacaccaactacttcggacggtgcaatgtggccgagcacgaaaagctgatcctgctggcccagctgaagcccgagaaggatagcgacgaagccgtgacatatagcctgggaaagtttgggcagagggccctggatttctacagcattcatgtgaccaaggagtccacccaccccgtgaagcccctggcccagatcgccggaaacagatacgcctccggacctgtgggaaaggccctgagcgacgcatgtatgggcacaatcgcctccttcctgtctaagtaccaggacatcatcatcgaacaccagaaggtggtgaagggcaaccagaagagactggagagcctgcgggagctggccggcaaggaaaacctggaataccctagcgtgaccctgccacctcagcctcacaccaaggagggcgttgatgcctacaacgaagtgatcgcccgggtgcgaatgtgggtgaacctgaacctgtggcagaagctgaagctaagcagagatgatgccaagcctctgctgagactgaagggattcccttcctttcctctggtcgagagacaggccaacgaagtggactggtgggacatggtgtgtaacgtgaagaagctgatcaacgagaaaaaggaggatggcaaggtgttttggcagaatctggctggctacaagagacaggaagccctgagaccatacctgagcagcgaggaagatcggaagaagggaaagaaattcgctcggtaccagctgggcgacctgctgctgcacctggaaaagaagcacggcgaggactggggaaaggtgtacgacgaggcctgggagcggattgacaagaaagtggaaggcctgagcaagcacatcaagctggaagaggaacggagaagcgaggacgcccagagcaaggccgccctgaccgactggctgcgggctaaggccagcttcgtgatcgagggcctgaaggaggccgacaaggacgagttctgcagatgcgagctgaagctgcagaagtggtacggggacctgcggggaaagcccttcgccatcgaagccgagaacagcatcctggacatcagcggcttcagcaagcagtacaactgtgccttcatctggcagaaggacggcgtgaagaagctgaacctgtacctgatcatcaactacttcaagggcggcaagctgcggttcaagaagatcaaacctgaagccttcgaagccaacagattctacaccgtgatcaacaaaaagagcggcgagatcgtgcccatggaggtgaacttcaacttcgacgaccccaacctgatcatcctgcctctggcctttggcaagagacagggcagagaattcatctggaacgacctgctgtccctggaaaccggcagcctgaagctggccaacggaagagtgatcgagaagacactgtacaacagaagaacccggcaggatgagcctgccctgttcgtggccctgaccttcgagcggcgggaggtcctggactcctccaatatcaaaccaatgaacctgatcggcgtggcaagaggcgaaaacatccccgccgtgatcgccctgaccgaccccgagggctgcccactgagccggtttaaggatagcctgggaaacccaacccacatcctgagaatcggcgagagctataaggagaagcagcggaccatccaggccaagaaggaggtggagcagcggagagccggcggctacagccggaagtacgccagcaaagccaagaatctggcagacgatatggtgagaaacaccgctagagatctgctgtactacgccgtgacccaggatgccatgctgatcttcgccaacctgagccggggcttcggccggcagggcaagcggaccttcatggccgagagacagtacacacggatggaggactggctgaccgccaagctggcctacgagggcctgagcaagacctacctgtccaagacactggcccagtacacctccaagacatgcagcaactgtgggtttaccatcaccagcgccgactacgacagggtgctggagaagctgaagaagacagcaacaggctggatgaccacaattaacggcaaggagctgaaggtggagggccagattacctactacaacagatacaagagacagaacgtagtcaaggacctgtccgtcgagctggatagactgagcgaagaatctgtgaacaacgacatctcctcctggacaaagggcagaagcggagaagctctgagcctcctgaagaaaagattctcccatagacccgtgcaggagaagttcgtgtgcctgaactgcggcttcgagacacacgcagccgagcaagccgccctgaacatcgccagatcctggctgttcctgcggagccaggagtacaagaaataccagacaaacaagacaaccggcaacaccgataagagagccttcgtcgagacctggcagtccttttaccggaagaagcttaaggaggtgtggaaacctgccgtgcggtctggcggatctggcggaggctccacaagcagccagagcctggtgaccttcggcgacgtggccgtggacttcagccaggaggagtgggagaggctgaacagcgcccagaggggcctgtacagggacgtgatgctggagaactacaggagcctggtgagcctgggcctgtgcttcagcaagcccgacatgatcagcagcctggagcagaggaaggagccctggatgcccaagaggaagctgatgaggggccagtgccccggctggaaggccgtgaccagccccaagaaaaagagaaaagtctaagctgccttctgcggggcttgccttctggccatgcccttcttctctcccttgcacctgtacctcttggtctttgaataaagcctgagtaggaaggctagcaaaaaaaaaaaaaaaaaaaaaaaaaaaaaaaaaaaaaaaaaaaaaaaaaaaaaaaaaaaaaaaaaaaaaaaaaaaaaaaa

SEQ ID NO: 5956 - RNA, 5797 nt, synthetic construct
  source 1..5797: mol_type = other RNA
aggaaataagagagaaaagaagagtaagaagaaatataagagccaccatggcccctaagaagaagcgtaaagtgagccggatggaacgcctcgtctacgaggtgcggcagaagtgcagaaacatcgaggacatctgcatctcctgcggatctctgaacgtgaccctggagcacccactgttcatcggcggcatgtgccagaactgtaaaaactgttttctggagtgtgcctatcaatacgacgatgacggctaccagagctactgcaccatctgttgcggcggaagagaggtgctgatgtgtggaaataacaactgctgccggtgcttctgcgtggaatgcgtggacctgctggtgggccccggcgccgcccaggccgctattaaggaagatccttggaactgctacatgtgcggccacaagggcacatacggcctgctgagacggagagaggactggcctagcagactgcagatgttcttcgccaataaccacgaccaggagttcgacccccctaaggtgtaccctcccgtccccgccgagaagagaaagcccatccgggtcctgagcctgttcgatggcatcgccaccggtctgctggtgctgaaggacctgggcatccaggtggataggtacattgcctccgaggtgtgcgaggactccatcaccgtgggaatggtgcgtcatcagggcaagatcatgtacgtgggcgacgtgcggagcgtgacacagaagcatatccaggagtggggccctttcgacctggtgatcggcggcagcccttgcaatgacctgagcatcgtgaacccagcccggaagggcctgtacgagggaaccggcagactgttcttcgagttttacagactgctgcacgacgcccggcctaaggaaggcgacgaccggcccttcttttggctgttcgagaatgtggtggccatgggagtcagcgacaagcgggatattagccggttcctggagagcaaccccgtgatgatcgatgccaaggaagtgagcgccgcccaccgggccagatacttctggggcaatctgcctggcatgaacagacccctggccagcaccgtgaacgacaagctggagctgcaggagtgcctggagcacggccggatcgccaagttcagcaaggtgagaaccatcaccacccgaagcaacagcatcaaacaaggcaaggaccagcactttcctgtgttcatgaacgagaaggaggacatcctgtggtgtaccgagatggagagagtgttcgggttcccagtccactacacagatgtcagcaacatgtctagactggccagacagagactgctgggaagaagctggtccgtccctgtgatcagacacctgttcgcccctctgaaggagtacttcgcctgcgtgagcagcggcaacagcaacgccaacagccggggccccagcttctctagcggcctggtgccactgtccctgagagggagccacatgggccccatggagatctacaaaaccgtgagcgcctggaagcggcagcctgtgcgcgtgctgagcctgtttcggaatatcgataaagtcctgaaaagcctgggattcctggagagcggctctggctccggcggtggcaccctgaagtacgtggaggatgtgacaaacgtggtcagacgggatgtggagaagtggggccccttcgatctggtgtacggcagcacccaacccctgggcagctcttgtgaccggtgccctggctggtacatgtttcagttccaccggatcctgcagtacgccctgccgagacaggagtcccagcggccattcttttggattttcatggacaacttgctgctgaccgaggatgaccaggaaactaccactcggttcctgcagaccgaagccgtgaccctgcaggacgtgagaggccgggactaccagaacgccatgcgggtgtggtccaacatccctggactgaaaagcaagcacgcacctctgacccctaaagaagaggagtacctgcaggcccaggtgcggagcagaagcaagctggacgcccctaaggtggatctgctggtgaagaattgcctcctgcccctgagagagtacttcaagtatttcagccagaatagtctgcccctgggcggcccaagcagcggcgcccctcctcccagcggcggcagcccagccggctccccaacctctaccgaggagggcacctctgagtccgccacccccgagagcggccctggcacctccaccgagcccagcgagggcagcgcacccggcagccctgccggcagccccacctccacagaggagggaaccagcaccgagcccagcgaaggcagcgccccaggcaccagcaccgagcctagtgagggcggctctggcggcggcagcgcccaggagattaaacggatcaacaagatcagaagaagacttgtgaaagacagcaacaccaagaaggccggcaagacaggccccatgaaaaccctgctggttagagtgatgacacccgatctgagagagcggctggaaaacctgagaaagaagcctgaaaatatcccccagcccatcagcaatacatctagagccaacctgaataagctgctgaccgattacaccgaaatgaagaaggcgatcctgcatgtgtactgggaagagttccagaaggaccctgtgggcctgatgagccgggtggcccagcctgccagcaagaagatcgatcagaacaagctgaaacctgagatggacgagaagggcaacctgaccaccgccggctttgcctgctctcagtgtggccagcccctgttcgtgtacaagctggagcaggtgtctgagaagggcaaggcttacaccaactacttcggacggtgcaatgtggccgagcacgaaaagctgatcctgctggcccagctgaagcccgagaaggatagcgacgaagccgtgacatatagcctgggaaagtttgggcagagggccctggatttctacagcattcatgtgaccaaggagtccacccaccccgtgaagcccctggcccagatcgccggaaacagatacgcctccggacctgtgggaaaggccctgagcgacgcatgtatgggcacaatcgcctccttcctgtctaagtaccaggacatcatcatcgaacaccagaaggtggtgaagggcaaccagaagagactggagagcctgcgggagctggccggcaaggaaaacctggaataccctagcgtgaccctgccacctcagcctcacaccaaggagggcgttgatgcctacaacgaagtgatcgcccgggtgcgaatgtgggtgaacctgaacctgtggcagaagctgaagctaagcagagatgatgccaagcctctgctgagactgaagggattcccttcctttcctctggtcgagagacaggccaacgaagtggactggtgggacatggtgtgtaacgtgaagaagctgatcaacgagaaaaaggaggatggcaaggtgttttggcagaatctggctggctacaagagacaggaagccctgagaccatacctgagcagcgaggaagatcggaagaagggaaagaaattcgctcggtaccagctgggcgacctgctgctgcacctggaaaagaagcacggcgaggactggggaaaggtgtacgacgaggcctgggagcggattgacaagaaagtggaaggcctgagcaagcacatcaagctggaagaggaacggagaagcgaggacgcccagagcaaggccgccctgaccgactggctgcgggctaaggccagcttcgtgatcgagggcctgaaggaggccgacaaggacgagttctgcagatgcgagctgaagctgcagaagtggtacggggacctgcggggaaagcccttcgccatcgaagccgagaacagcatcctggacatcagcggcttcagcaagcagtacaactgtgccttcatctggcagaaggacggcgtgaagaagctgaacctgtacctgatcatcaactacttcaagggcggcaagctgcggttcaagaagatcaaacctgaagccttcgaagccaacagattctacaccgtgatcaacaaaaagagcggcgagatcgtgcccatggaggtgaacttcaacttcgacgaccccaacctgatcatcctgcctctggcctttggcaagagacagggcagagaattcatctggaacgacctgctgtccctggaaaccggcagcctgaagctggccaacggaagagtgatcgagaagacactgtacaacagaagaacccggcaggatgagcctgccctgttcgtggccctgaccttcgagcggcgggaggtcctggactcctccaatatcaaaccaatgaacctgatcggcgtggcaagaggcgaaaacatccccgccgtgatcgccctgaccgaccccgagggctgcccactgagccggtttaaggatagcctgggaaacccaacccacatcctgagaatcggcgagagctataaggagaagcagcggaccatccaggccaagaaggaggtggagcagcggagagccggcggctacagccggaagtacgccagcaaagccaagaatctggcagacgatatggtgagaaacaccgctagagatctgctgtactacgccgtgacccaggatgccatgctgatcttcgccaacctgagccggggcttcggccggcagggcaagcggaccttcatggccgagagacagtacacacggatggaggactggctgaccgccaagctggcctacgagggcctgagcaagacctacctgtccaagacactggcccagtacacctccaagacatgcagcaactgtgggtttaccatcaccagcgccgactacgacagggtgctggagaagctgaagaagacagcaacaggctggatgaccacaattaacggcaaggagctgaaggtggagggccagattacctactacaacagatacaagagacagaacgtagtcaaggacctgtccgtcgagctggatagactgagcgaagaatctgtgaacaacgacatctcctcctggacaaagggcagaagcggagaagctctgagcctcctgaagaaaagattctcccatagacccgtgcaggagaagttcgtgtgcctgaactgcggcttcgagacacacgcagccgagcaagccgccctgaacatcgccagatcctggctgttcctgcggagccaggagtacaagaaataccagacaaacaagacaaccggcaacaccgataagagagccttcgtcgagacctggcagtccttttaccggaagaagcttaaggaggtgtggaaacctgccgtgcggtctggcggatctggcggaggctccacaagcggctgctgcagcctggagacccacagcatcagggacaagaacgccgtgacctacggcgacgtgcacgtgaacttcacccaggaggagtgggccctgctggaccccagccagaagaagctgtacaaggacgtgatgctggagacctacaggaacctgaacgccatcggcttcaactgggacgacaagaacaccgaggagcactgccccagcaccaggaggtggaggaggttctacaggatgcagaccagccccaagaaaaagagaaaagtctaagctgccttctgcggggcttgccttctggccatgcccttcttctctcccttgcacctgtacctcttggtctttgaataaagcctgagtaggaaggctagcaaaaaaaaaaaaaaaaaaaaaaaaaaaaaaaaaaaaaaaaaaaaaaaaaaaaaaaaaaaaaaaaaaaaaaaaaaaaaaaa

SEQ ID NO: 5957 - RNA, 5797 nt, synthetic construct
  source 1..5797: mol_type = other RNA
aggaaataagagagaaaagaagagtaagaagaaatataagagccaccatggcccctaagaagaagcgtaaagtgagccggatggaacgcctcgtctacgaggtgcggcagaagtgcagaaacatcgaggacatctgcatctcctgcggatctctgaacgtgaccctggagcacccactgttcatcggcggcatgtgccagaactgtaaaaactgttttctggagtgtgcctatcaatacgacgatgacggctaccagagctactgcaccatctgttgcggcggaagagaggtgctgatgtgtggaaataacaactgctgccggtgcttctgcgtggaatgcgtggacctgctggtgggccccggcgccgcccaggccgctattaaggaagatccttggaactgctacatgtgcggccacaagggcacatacggcctgctgagacggagagaggactggcctagcagactgcagatgttcttcgccaataaccacgaccaggagttcgacccccctaaggtgtaccctcccgtccccgccgagaagagaaagcccatccgggtcctgagcctgttcgatggcatcgccaccggtctgctggtgctgaaggacctgggcatccaggtggataggtacattgcctccgaggtgtgcgaggactccatcaccgtgggaatggtgcgtcatcagggcaagatcatgtacgtgggcgacgtgcggagcgtgacacagaagcatatccaggagtggggccctttcgacctggtgatcggcggcagcccttgcaatgacctgagcatcgtgaacccagcccggaagggcctgtacgagggaaccggcagactgttcttcgagttttacagactgctgcacgacgcccggcctaaggaaggcgacgaccggcccttcttttggctgttcgagaatgtggtggccatgggagtcagcgacaagcgggatattagccggttcctggagagcaaccccgtgatgatcgatgccaaggaagtgagcgccgcccaccgggccagatacttctggggcaatctgcctggcatgaacagacccctggccagcaccgtgaacgacaagctggagctgcaggagtgcctggagcacggccggatcgccaagttcagcaaggtgagaaccatcaccacccgaagcaacagcatcaaacaaggcaaggaccagcactttcctgtgttcatgaacgagaaggaggacatcctgtggtgtaccgagatggagagagtgttcgggttcccagtccactacacagatgtcagcaacatgtctagactggccagacagagactgctgggaagaagctggtccgtccctgtgatcagacacctgttcgcccctctgaaggagtacttcgcctgcgtgagcagcggcaacagcaacgccaacagccggggccccagcttctctagcggcctggtgccactgtccctgagagggagccacatgggccccatggagatctacaaaaccgtgagcgcctggaagcggcagcctgtgcgcgtgctgagcctgtttcggaatatcgataaagtcctgaaaagcctgggattcctggagagcggctctggctccggcggtggcaccctgaagtacgtggaggatgtgacaaacgtggtcagacgggatgtggagaagtggggccccttcgatctggtgtacggcagcacccaacccctgggcagctcttgtgaccggtgccctggctggtacatgtttcagttccaccggatcctgcagtacgccctgccgagacaggagtcccagcggccattcttttggattttcatggacaacttgctgctgaccgaggatgaccaggaaactaccactcggttcctgcagaccgaagccgtgaccctgcaggacgtgagaggccgggactaccagaacgccatgcgggtgtggtccaacatccctggactgaaaagcaagcacgcacctctgacccctaaagaagaggagtacctgcaggcccaggtgcggagcagaagcaagctggacgcccctaaggtggatctgctggtgaagaattgcctcctgcccctgagagagtacttcaagtatttcagccagaatagtctgcccctgggcggcccaagcagcggcgcccctcctcccagcggcggcagcccagccggctccccaacctctaccgaggagggcacctctgagtccgccacccccgagagcggccctggcacctccaccgagcccagcgagggcagcgcacccggcagccctgccggcagccccacctccacagaggagggaaccagcaccgagcccagcgaaggcagcgccccaggcaccagcaccgagcctagtgagggcggctctggcggcggcagcgcccaggagattaaacggatcaacaagatcagaagaagacttgtgaaagacagcaacaccaagaaggccggcaagacaggccccatgaaaaccctgctggttagagtgatgacacccgatctgagagagcggctggaaaacctgagaaagaagcctgaaaatatcccccagcccatcagcaatacatctagagccaacctgaataagctgctgaccgattacaccgaaatgaagaaggcgatcctgcatgtgtactgggaagagttccagaaggaccctgtgggcctgatgagccgggtggcccagcctgccagcaagaagatcgatcagaacaagctgaaacctgagatggacgagaagggcaacctgaccaccgccggctttgcctgctctcagtgtggccagcccctgttcgtgtacaagctggagcaggtgtctgagaagggcaaggcttacaccaactacttcggacggtgcaatgtggccgagcacgaaaagctgatcctgctggcccagctgaagcccgagaaggatagcgacgaagccgtgacatatagcctgggaaagtttgggcagagggccctggatttctacagcattcatgtgaccaaggagtccacccaccccgtgaagcccctggcccagatcgccggaaacagatacgcctccggacctgtgggaaaggccctgagcgacgcatgtatgggcacaatcgcctccttcctgtctaagtaccaggacatcatcatcgaacaccagaaggtggtgaagggcaaccagaagagactggagagcctgcgggagctggccggcaaggaaaacctggaataccctagcgtgaccctgccacctcagcctcacaccaaggagggcgttgatgcctacaacgaagtgatcgcccgggtgcgaatgtgggtgaacctgaacctgtggcagaagctgaagctaagcagagatgatgccaagcctctgctgagactgaagggattcccttcctttcctctggtcgagagacaggccaacgaagtggactggtgggacatggtgtgtaacgtgaagaagctgatcaacgagaaaaaggaggatggcaaggtgttttggcagaatctggctggctacaagagacaggaagccctgagaccatacctgagcagcgaggaagatcggaagaagggaaagaaattcgctcggtaccagctgggcgacctgctgctgcacctggaaaagaagcacggcgaggactggggaaaggtgtacgacgaggcctgggagcggattgacaagaaagtggaaggcctgagcaagcacatcaagctggaagaggaacggagaagcgaggacgcccagagcaaggccgccctgaccgactggctgcgggctaaggccagcttcgtgatcgagggcctgaaggaggccgacaaggacgagttctgcagatgcgagctgaagctgcagaagtggtacggggacctgcggggaaagcccttcgccatcgaagccgagaacagcatcctggacatcagcggcttcagcaagcagtacaactgtgccttcatctggcagaaggacggcgtgaagaagctgaacctgtacctgatcatcaactacttcaagggcggcaagctgcggttcaagaagatcaaacctgaagccttcgaagccaacagattctacaccgtgatcaacaaaaagagcggcgagatcgtgcccatggaggtgaacttcaacttcgacgaccccaacctgatcatcctgcctctggcctttggcaagagacagggcagagaattcatctggaacgacctgctgtccctggaaaccggcagcctgaagctggccaacggaagagtgatcgagaagacactgtacaacagaagaacccggcaggatgagcctgccctgttcgtggccctgaccttcgagcggcgggaggtcctggactcctccaatatcaaaccaatgaacctgatcggcgtggcaagaggcgaaaacatccccgccgtgatcgccctgaccgaccccgagggctgcccactgagccggtttaaggatagcctgggaaacccaacccacatcctgagaatcggcgagagctataaggagaagcagcggaccatccaggccaagaaggaggtggagcagcggagagccggcggctacagccggaagtacgccagcaaagccaagaatctggcagacgatatggtgagaaacaccgctagagatctgctgtactacgccgtgacccaggatgccatgctgatcttcgccaacctgagccggggcttcggccggcagggcaagcggaccttcatggccgagagacagtacacacggatggaggactggctgaccgccaagctggcctacgagggcctgagcaagacctacctgtccaagacactggcccagtacacctccaagacatgcagcaactgtgggtttaccatcaccagcgccgactacgacagggtgctggagaagctgaagaagacagcaacaggctggatgaccacaattaacggcaaggagctgaaggtggagggccagattacctactacaacagatacaagagacagaacgtagtcaaggacctgtccgtcgagctggatagactgagcgaagaatctgtgaacaacgacatctcctcctggacaaagggcagaagcggagaagctctgagcctcctgaagaaaagattctcccatagacccgtgcaggagaagttcgtgtgcctgaactgcggcttcgagacacacgcagccgagcaagccgccctgaacatcgccagatcctggctgttcctgcggagccaggagtacaagaaataccagacaaacaagacaaccggcaacaccgataagagagccttcgtcgagacctggcagtccttttaccggaagaagcttaaggaggtgtggaaacctgccgtgcggtctggcggatctggcggaggctccacaagcacctgcatggtgcacaggcagaccatgagctgcagcggcgccggcggcatcaccgccttcgtggccttcagggacgtggccgtggacttcacccaggaggagtggaggctgctgagccccgcccagaggaccctgcacagggaggtgatgctggagacctacaaccacctggtgagcctggagatccccagcagcaagcccaagctgatcgcccagctggagcagggcgaggagccctggaggaccagccccaagaaaaagagaaaagtctaagctgccttctgcggggcttgccttctggccatgcccttcttctctcccttgcacctgtacctcttggtctttgaataaagcctgagtaggaaggctagcaaaaaaaaaaaaaaaaaaaaaaaaaaaaaaaaaaaaaaaaaaaaaaaaaaaaaaaaaaaaaaaaaaaaaaaaaaaaaaaa

SEQ ID NO: 5958 - RNA, 5797 nt, synthetic construct
  source 1..5797: mol_type = other RNA
aggaaataagagagaaaagaagagtaagaagaaatataagagccaccatggcccctaagaagaagcgtaaagtgagccggatggaacgcctcgtctacgaggtgcggcagaagtgcagaaacatcgaggacatctgcatctcctgcggatctctgaacgtgaccctggagcacccactgttcatcggcggcatgtgccagaactgtaaaaactgttttctggagtgtgcctatcaatacgacgatgacggctaccagagctactgcaccatctgttgcggcggaagagaggtgctgatgtgtggaaataacaactgctgccggtgcttctgcgtggaatgcgtggacctgctggtgggccccggcgccgcccaggccgctattaaggaagatccttggaactgctacatgtgcggccacaagggcacatacggcctgctgagacggagagaggactggcctagcagactgcagatgttcttcgccaataaccacgaccaggagttcgacccccctaaggtgtaccctcccgtccccgccgagaagagaaagcccatccgggtcctgagcctgttcgatggcatcgccaccggtctgctggtgctgaaggacctgggcatccaggtggataggtacattgcctccgaggtgtgcgaggactccatcaccgtgggaatggtgcgtcatcagggcaagatcatgtacgtgggcgacgtgcggagcgtgacacagaagcatatccaggagtggggccctttcgacctggtgatcggcggcagcccttgcaatgacctgagcatcgtgaacccagcccggaagggcctgtacgagggaaccggcagactgttcttcgagttttacagactgctgcacgacgcccggcctaaggaaggcgacgaccggcccttcttttggctgttcgagaatgtggtggccatgggagtcagcgacaagcgggatattagccggttcctggagagcaaccccgtgatgatcgatgccaaggaagtgagcgccgcccaccgggccagatacttctggggcaatctgcctggcatgaacagacccctggccagcaccgtgaacgacaagctggagctgcaggagtgcctggagcacggccggatcgccaagttcagcaaggtgagaaccatcaccacccgaagcaacagcatcaaacaaggcaaggaccagcactttcctgtgttcatgaacgagaaggaggacatcctgtggtgtaccgagatggagagagtgttcgggttcccagtccactacacagatgtcagcaacatgtctagactggccagacagagactgctgggaagaagctggtccgtccctgtgatcagacacctgttcgcccctctgaaggagtacttcgcctgcgtgagcagcggcaacagcaacgccaacagccggggccccagcttctctagcggcctggtgccactgtccctgagagggagccacatgggccccatggagatctacaaaaccgtgagcgcctggaagcggcagcctgtgcgcgtgctgagcctgtttcggaatatcgataaagtcctgaaaagcctgggattcctggagagcggctctggctccggcggtggcaccctgaagtacgtggaggatgtgacaaacgtggtcagacgggatgtggagaagtggggccccttcgatctggtgtacggcagcacccaacccctgggcagctcttgtgaccggtgccctggctggtacatgtttcagttccaccggatcctgcagtacgccctgccgagacaggagtcccagcggccattcttttggattttcatggacaacttgctgctgaccgaggatgaccaggaaactaccactcggttcctgcagaccgaagccgtgaccctgcaggacgtgagaggccgggactaccagaacgccatgcgggtgtggtccaacatccctggactgaaaagcaagcacgcacctctgacccctaaagaagaggagtacctgcaggcccaggtgcggagcagaagcaagctggacgcccctaaggtggatctgctggtgaagaattgcctcctgcccctgagagagtacttcaagtatttcagccagaatagtctgcccctgggcggcccaagcagcggcgcccctcctcccagcggcggcagcccagccggctccccaacctctaccgaggagggcacctctgagtccgccacccccgagagcggccctggcacctccaccgagcccagcgagggcagcgcacccggcagccctgccggcagccccacctccacagaggagggaaccagcaccgagcccagcgaaggcagcgccccaggcaccagcaccgagcctagtgagggcggctctggcggcggcagcgcccaggagattaaacggatcaacaagatcagaagaagacttgtgaaagacagcaacaccaagaaggccggcaagacaggccccatgaaaaccctgctggttagagtgatgacacccgatctgagagagcggctggaaaacctgagaaagaagcctgaaaatatcccccagcccatcagcaatacatctagagccaacctgaataagctgctgaccgattacaccgaaatgaagaaggcgatcctgcatgtgtactgggaagagttccagaaggaccctgtgggcctgatgagccgggtggcccagcctgccagcaagaagatcgatcagaacaagctgaaacctgagatggacgagaagggcaacctgaccaccgccggctttgcctgctctcagtgtggccagcccctgttcgtgtacaagctggagcaggtgtctgagaagggcaaggcttacaccaactacttcggacggtgcaatgtggccgagcacgaaaagctgatcctgctggcccagctgaagcccgagaaggatagcgacgaagccgtgacatatagcctgggaaagtttgggcagagggccctggatttctacagcattcatgtgaccaaggagtccacccaccccgtgaagcccctggcccagatcgccggaaacagatacgcctccggacctgtgggaaaggccctgagcgacgcatgtatgggcacaatcgcctccttcctgtctaagtaccaggacatcatcatcgaacaccagaaggtggtgaagggcaaccagaagagactggagagcctgcgggagctggccggcaaggaaaacctggaataccctagcgtgaccctgccacctcagcctcacaccaaggagggcgttgatgcctacaacgaagtgatcgcccgggtgcgaatgtgggtgaacctgaacctgtggcagaagctgaagctaagcagagatgatgccaagcctctgctgagactgaagggattcccttcctttcctctggtcgagagacaggccaacgaagtggactggtgggacatggtgtgtaacgtgaagaagctgatcaacgagaaaaaggaggatggcaaggtgttttggcagaatctggctggctacaagagacaggaagccctgagaccatacctgagcagcgaggaagatcggaagaagggaaagaaattcgctcggtaccagctgggcgacctgctgctgcacctggaaaagaagcacggcgaggactggggaaaggtgtacgacgaggcctgggagcggattgacaagaaagtggaaggcctgagcaagcacatcaagctggaagaggaacggagaagcgaggacgcccagagcaaggccgccctgaccgactggctgcgggctaaggccagcttcgtgatcgagggcctgaaggaggccgacaaggacgagttctgcagatgcgagctgaagctgcagaagtggtacggggacctgcggggaaagcccttcgccatcgaagccgagaacagcatcctggacatcagcggcttcagcaagcagtacaactgtgccttcatctggcagaaggacggcgtgaagaagctgaacctgtacctgatcatcaactacttcaagggcggcaagctgcggttcaagaagatcaaacctgaagccttcgaagccaacagattctacaccgtgatcaacaaaaagagcggcgagatcgtgcccatggaggtgaacttcaacttcgacgaccccaacctgatcatcctgcctctggcctttggcaagagacagggcagagaattcatctggaacgacctgctgtccctggaaaccggcagcctgaagctggccaacggaagagtgatcgagaagacactgtacaacagaagaacccggcaggatgagcctgccctgttcgtggccctgaccttcgagcggcgggaggtcctggactcctccaatatcaaaccaatgaacctgatcggcgtggcaagaggcgaaaacatccccgccgtgatcgccctgaccgaccccgagggctgcccactgagccggtttaaggatagcctgggaaacccaacccacatcctgagaatcggcgagagctataaggagaagcagcggaccatccaggccaagaaggaggtggagcagcggagagccggcggctacagccggaagtacgccagcaaagccaagaatctggcagacgatatggtgagaaacaccgctagagatctgctgtactacgccgtgacccaggatgccatgctgatcttcgccaacctgagccggggcttcggccggcagggcaagcggaccttcatggccgagagacagtacacacggatggaggactggctgaccgccaagctggcctacgagggcctgagcaagacctacctgtccaagacactggcccagtacacctccaagacatgcagcaactgtgggtttaccatcaccagcgccgactacgacagggtgctggagaagctgaagaagacagcaacaggctggatgaccacaattaacggcaaggagctgaaggtggagggccagattacctactacaacagatacaagagacagaacgtagtcaaggacctgtccgtcgagctggatagactgagcgaagaatctgtgaacaacgacatctcctcctggacaaagggcagaagcggagaagctctgagcctcctgaagaaaagattctcccatagacccgtgcaggagaagttcgtgtgcctgaactgcggcttcgagacacacgcagccgagcaagccgccctgaacatcgccagatcctggctgttcctgcggagccaggagtacaagaaataccagacaaacaagacaaccggcaacaccgataagagagccttcgtcgagacctggcagtccttttaccggaagaagcttaaggaggtgtggaaacctgccgtgcggtctggcggatctggcggaggctccacaagcatggtgagcttcgaggacgtggccgtgctgctgagccaggaggagtgggactgcctgatccccgcccagaggggcctgtacagggacgtgatgctggagacctacggcaacctggtgagcctgggcctgcaggccagcaagcccgacgtgatcagcaggctggagcagggcgacaagccctggaccccccacatcctgaggacccagatcagctggagctggaggcacaagagggagtgctacaccagccccaagaaaaagagaaaagtctaagctgccttctgcggggcttgccttctggccatgcccttcttctctcccttgcacctgtacctcttggtctttgaataaagcctgagtaggaaggctagcaaaaaaaaaaaaaaaaaaaaaaaaaaaaaaaaaaaaaaaaaaaaaaaaaaaaaaaaaaaaaaaaaaaaaaaaaaaaaaaa

SEQ ID NO: 5959 - RNA, 5797 nt, synthetic construct
  source 1..5797: mol_type = other RNA
aggaaataagagagaaaagaagagtaagaagaaatataagagccaccatggcccctaagaagaagcgtaaagtgagccggatggaacgcctcgtctacgaggtgcggcagaagtgcagaaacatcgaggacatctgcatctcctgcggatctctgaacgtgaccctggagcacccactgttcatcggcggcatgtgccagaactgtaaaaactgttttctggagtgtgcctatcaatacgacgatgacggctaccagagctactgcaccatctgttgcggcggaagagaggtgctgatgtgtggaaataacaactgctgccggtgcttctgcgtggaatgcgtggacctgctggtgggccccggcgccgcccaggccgctattaaggaagatccttggaactgctacatgtgcggccacaagggcacatacggcctgctgagacggagagaggactggcctagcagactgcagatgttcttcgccaataaccacgaccaggagttcgacccccctaaggtgtaccctcccgtccccgccgagaagagaaagcccatccgggtcctgagcctgttcgatggcatcgccaccggtctgctggtgctgaaggacctgggcatccaggtggataggtacattgcctccgaggtgtgcgaggactccatcaccgtgggaatggtgcgtcatcagggcaagatcatgtacgtgggcgacgtgcggagcgtgacacagaagcatatccaggagtggggccctttcgacctggtgatcggcggcagcccttgcaatgacctgagcatcgtgaacccagcccggaagggcctgtacgagggaaccggcagactgttcttcgagttttacagactgctgcacgacgcccggcctaaggaaggcgacgaccggcccttcttttggctgttcgagaatgtggtggccatgggagtcagcgacaagcgggatattagccggttcctggagagcaaccccgtgatgatcgatgccaaggaagtgagcgccgcccaccgggccagatacttctggggcaatctgcctggcatgaacagacccctggccagcaccgtgaacgacaagctggagctgcaggagtgcctggagcacggccggatcgccaagttcagcaaggtgagaaccatcaccacccgaagcaacagcatcaaacaaggcaaggaccagcactttcctgtgttcatgaacgagaaggaggacatcctgtggtgtaccgagatggagagagtgttcgggttcccagtccactacacagatgtcagcaacatgtctagactggccagacagagactgctgggaagaagctggtccgtccctgtgatcagacacctgttcgcccctctgaaggagtacttcgcctgcgtgagcagcggcaacagcaacgccaacagccggggccccagcttctctagcggcctggtgccactgtccctgagagggagccacatgggccccatggagatctacaaaaccgtgagcgcctggaagcggcagcctgtgcgcgtgctgagcctgtttcggaatatcgataaagtcctgaaaagcctgggattcctggagagcggctctggctccggcggtggcaccctgaagtacgtggaggatgtgacaaacgtggtcagacgggatgtggagaagtggggccccttcgatctggtgtacggcagcacccaacccctgggcagctcttgtgaccggtgccctggctggtacatgtttcagttccaccggatcctgcagtacgccctgccgagacaggagtcccagcggccattcttttggattttcatggacaacttgctgctgaccgaggatgaccaggaaactaccactcggttcctgcagaccgaagccgtgaccctgcaggacgtgagaggccgggactaccagaacgccatgcgggtgtggtccaacatccctggactgaaaagcaagcacgcacctctgacccctaaagaagaggagtacctgcaggcccaggtgcggagcagaagcaagctggacgcccctaaggtggatctgctggtgaagaattgcctcctgcccctgagagagtacttcaagtatttcagccagaatagtctgcccctgggcggcccaagcagcggcgcccctcctcccagcggcggcagcccagccggctccccaacctctaccgaggagggcacctctgagtccgccacccccgagagcggccctggcacctccaccgagcccagcgagggcagcgcacccggcagccctgccggcagccccacctccacagaggagggaaccagcaccgagcccagcgaaggcagcgccccaggcaccagcaccgagcctagtgagggcggctctggcggcggcagcgcccaggagattaaacggatcaacaagatcagaagaagacttgtgaaagacagcaacaccaagaaggccggcaagacaggccccatgaaaaccctgctggttagagtgatgacacccgatctgagagagcggctggaaaacctgagaaagaagcctgaaaatatcccccagcccatcagcaatacatctagagccaacctgaataagctgctgaccgattacaccgaaatgaagaaggcgatcctgcatgtgtactgggaagagttccagaaggaccctgtgggcctgatgagccgggtggcccagcctgccagcaagaagatcgatcagaacaagctgaaacctgagatggacgagaagggcaacctgaccaccgccggctttgcctgctctcagtgtggccagcccctgttcgtgtacaagctggagcaggtgtctgagaagggcaaggcttacaccaactacttcggacggtgcaatgtggccgagcacgaaaagctgatcctgctggcccagctgaagcccgagaaggatagcgacgaagccgtgacatatagcctgggaaagtttgggcagagggccctggatttctacagcattcatgtgaccaaggagtccacccaccccgtgaagcccctggcccagatcgccggaaacagatacgcctccggacctgtgggaaaggccctgagcgacgcatgtatgggcacaatcgcctccttcctgtctaagtaccaggacatcatcatcgaacaccagaaggtggtgaagggcaaccagaagagactggagagcctgcgggagctggccggcaaggaaaacctggaataccctagcgtgaccctgccacctcagcctcacaccaaggagggcgttgatgcctacaacgaagtgatcgcccgggtgcgaatgtgggtgaacctgaacctgtggcagaagctgaagctaagcagagatgatgccaagcctctgctgagactgaagggattcccttcctttcctctggtcgagagacaggccaacgaagtggactggtgggacatggtgtgtaacgtgaagaagctgatcaacgagaaaaaggaggatggcaaggtgttttggcagaatctggctggctacaagagacaggaagccctgagaccatacctgagcagcgaggaagatcggaagaagggaaagaaattcgctcggtaccagctgggcgacctgctgctgcacctggaaaagaagcacggcgaggactggggaaaggtgtacgacgaggcctgggagcggattgacaagaaagtggaaggcctgagcaagcacatcaagctggaagaggaacggagaagcgaggacgcccagagcaaggccgccctgaccgactggctgcgggctaaggccagcttcgtgatcgagggcctgaaggaggccgacaaggacgagttctgcagatgcgagctgaagctgcagaagtggtacggggacctgcggggaaagcccttcgccatcgaagccgagaacagcatcctggacatcagcggcttcagcaagcagtacaactgtgccttcatctggcagaaggacggcgtgaagaagctgaacctgtacctgatcatcaactacttcaagggcggcaagctgcggttcaagaagatcaaacctgaagccttcgaagccaacagattctacaccgtgatcaacaaaaagagcggcgagatcgtgcccatggaggtgaacttcaacttcgacgaccccaacctgatcatcctgcctctggcctttggcaagagacagggcagagaattcatctggaacgacctgctgtccctggaaaccggcagcctgaagctggccaacggaagagtgatcgagaagacactgtacaacagaagaacccggcaggatgagcctgccctgttcgtggccctgaccttcgagcggcgggaggtcctggactcctccaatatcaaaccaatgaacctgatcggcgtggcaagaggcgaaaacatccccgccgtgatcgccctgaccgaccccgagggctgcccactgagccggtttaaggatagcctgggaaacccaacccacatcctgagaatcggcgagagctataaggagaagcagcggaccatccaggccaagaaggaggtggagcagcggagagccggcggctacagccggaagtacgccagcaaagccaagaatctggcagacgatatggtgagaaacaccgctagagatctgctgtactacgccgtgacccaggatgccatgctgatcttcgccaacctgagccggggcttcggccggcagggcaagcggaccttcatggccgagagacagtacacacggatggaggactggctgaccgccaagctggcctacgagggcctgagcaagacctacctgtccaagacactggcccagtacacctccaagacatgcagcaactgtgggtttaccatcaccagcgccgactacgacagggtgctggagaagctgaagaagacagcaacaggctggatgaccacaattaacggcaaggagctgaaggtggagggccagattacctactacaacagatacaagagacagaacgtagtcaaggacctgtccgtcgagctggatagactgagcgaagaatctgtgaacaacgacatctcctcctggacaaagggcagaagcggagaagctctgagcctcctgaagaaaagattctcccatagacccgtgcaggagaagttcgtgtgcctgaactgcggcttcgagacacacgcagccgagcaagccgccctgaacatcgccagatcctggctgttcctgcggagccaggagtacaagaaataccagacaaacaagacaaccggcaacaccgataagagagccttcgtcgagacctggcagtccttttaccggaagaagcttaaggaggtgtggaaacctgccgtgcggtctggcggatctggcggaggctccacaagcgcccagggcagcgtggtgttcagcgacgtgagcgtggacttcagccaggaggagtgggagtgcctggacagcggccagagggacctgtacagggacgtgatgctggagaactacagcaacctgctgagcatgggcttctacatccccaagccccccgtgatcagcctgctggagcagggcaaggagccctggatggtgggcagggagctgaccaagggcctgtgcagcgacctggagagcatgaccagccccaagaaaaagagaaaagtctaagctgccttctgcggggcttgccttctggccatgcccttcttctctcccttgcacctgtacctcttggtctttgaataaagcctgagtaggaaggctagcaaaaaaaaaaaaaaaaaaaaaaaaaaaaaaaaaaaaaaaaaaaaaaaaaaaaaaaaaaaaaaaaaaaaaaaaaaaaaaaa

SEQ ID NO: 5960 - RNA, 5797 nt, synthetic construct
  source 1..5797: mol_type = other RNA
aggaaataagagagaaaagaagagtaagaagaaatataagagccaccatggcccctaagaagaagcgtaaagtgagccggatggaacgcctcgtctacgaggtgcggcagaagtgcagaaacatcgaggacatctgcatctcctgcggatctctgaacgtgaccctggagcacccactgttcatcggcggcatgtgccagaactgtaaaaactgttttctggagtgtgcctatcaatacgacgatgacggctaccagagctactgcaccatctgttgcggcggaagagaggtgctgatgtgtggaaataacaactgctgccggtgcttctgcgtggaatgcgtggacctgctggtgggccccggcgccgcccaggccgctattaaggaagatccttggaactgctacatgtgcggccacaagggcacatacggcctgctgagacggagagaggactggcctagcagactgcagatgttcttcgccaataaccacgaccaggagttcgacccccctaaggtgtaccctcccgtccccgccgagaagagaaagcccatccgggtcctgagcctgttcgatggcatcgccaccggtctgctggtgctgaaggacctgggcatccaggtggataggtacattgcctccgaggtgtgcgaggactccatcaccgtgggaatggtgcgtcatcagggcaagatcatgtacgtgggcgacgtgcggagcgtgacacagaagcatatccaggagtggggccctttcgacctggtgatcggcggcagcccttgcaatgacctgagcatcgtgaacccagcccggaagggcctgtacgagggaaccggcagactgttcttcgagttttacagactgctgcacgacgcccggcctaaggaaggcgacgaccggcccttcttttggctgttcgagaatgtggtggccatgggagtcagcgacaagcgggatattagccggttcctggagagcaaccccgtgatgatcgatgccaaggaagtgagcgccgcccaccgggccagatacttctggggcaatctgcctggcatgaacagacccctggccagcaccgtgaacgacaagctggagctgcaggagtgcctggagcacggccggatcgccaagttcagcaaggtgagaaccatcaccacccgaagcaacagcatcaaacaaggcaaggaccagcactttcctgtgttcatgaacgagaaggaggacatcctgtggtgtaccgagatggagagagtgttcgggttcccagtccactacacagatgtcagcaacatgtctagactggccagacagagactgctgggaagaagctggtccgtccctgtgatcagacacctgttcgcccctctgaaggagtacttcgcctgcgtgagcagcggcaacagcaacgccaacagccggggccccagcttctctagcggcctggtgccactgtccctgagagggagccacatgggccccatggagatctacaaaaccgtgagcgcctggaagcggcagcctgtgcgcgtgctgagcctgtttcggaatatcgataaagtcctgaaaagcctgggattcctggagagcggctctggctccggcggtggcaccctgaagtacgtggaggatgtgacaaacgtggtcagacgggatgtggagaagtggggccccttcgatctggtgtacggcagcacccaacccctgggcagctcttgtgaccggtgccctggctggtacatgtttcagttccaccggatcctgcagtacgccctgccgagacaggagtcccagcggccattcttttggattttcatggacaacttgctgctgaccgaggatgaccaggaaactaccactcggttcctgcagaccgaagccgtgaccctgcaggacgtgagaggccgggactaccagaacgccatgcgggtgtggtccaacatccctggactgaaaagcaagcacgcacctctgacccctaaagaagaggagtacctgcaggcccaggtgcggagcagaagcaagctggacgcccctaaggtggatctgctggtgaagaattgcctcctgcccctgagagagtacttcaagtatttcagccagaatagtctgcccctgggcggcccaagcagcggcgcccctcctcccagcggcggcagcccagccggctccccaacctctaccgaggagggcacctctgagtccgccacccccgagagcggccctggcacctccaccgagcccagcgagggcagcgcacccggcagccctgccggcagccccacctccacagaggagggaaccagcaccgagcccagcgaaggcagcgccccaggcaccagcaccgagcctagtgagggcggctctggcggcggcagcgcccaggagattaaacggatcaacaagatcagaagaagacttgtgaaagacagcaacaccaagaaggccggcaagacaggccccatgaaaaccctgctggttagagtgatgacacccgatctgagagagcggctggaaaacctgagaaagaagcctgaaaatatcccccagcccatcagcaatacatctagagccaacctgaataagctgctgaccgattacaccgaaatgaagaaggcgatcctgcatgtgtactgggaagagttccagaaggaccctgtgggcctgatgagccgggtggcccagcctgccagcaagaagatcgatcagaacaagctgaaacctgagatggacgagaagggcaacctgaccaccgccggctttgcctgctctcagtgtggccagcccctgttcgtgtacaagctggagcaggtgtctgagaagggcaaggcttacaccaactacttcggacggtgcaatgtggccgagcacgaaaagctgatcctgctggcccagctgaagcccgagaaggatagcgacgaagccgtgacatatagcctgggaaagtttgggcagagggccctggatttctacagcattcatgtgaccaaggagtccacccaccccgtgaagcccctggcccagatcgccggaaacagatacgcctccggacctgtgggaaaggccctgagcgacgcatgtatgggcacaatcgcctccttcctgtctaagtaccaggacatcatcatcgaacaccagaaggtggtgaagggcaaccagaagagactggagagcctgcgggagctggccggcaaggaaaacctggaataccctagcgtgaccctgccacctcagcctcacaccaaggagggcgttgatgcctacaacgaagtgatcgcccgggtgcgaatgtgggtgaacctgaacctgtggcagaagctgaagctaagcagagatgatgccaagcctctgctgagactgaagggattcccttcctttcctctggtcgagagacaggccaacgaagtggactggtgggacatggtgtgtaacgtgaagaagctgatcaacgagaaaaaggaggatggcaaggtgttttggcagaatctggctggctacaagagacaggaagccctgagaccatacctgagcagcgaggaagatcggaagaagggaaagaaattcgctcggtaccagctgggcgacctgctgctgcacctggaaaagaagcacggcgaggactggggaaaggtgtacgacgaggcctgggagcggattgacaagaaagtggaaggcctgagcaagcacatcaagctggaagaggaacggagaagcgaggacgcccagagcaaggccgccctgaccgactggctgcgggctaaggccagcttcgtgatcgagggcctgaaggaggccgacaaggacgagttctgcagatgcgagctgaagctgcagaagtggtacggggacctgcggggaaagcccttcgccatcgaagccgagaacagcatcctggacatcagcggcttcagcaagcagtacaactgtgccttcatctggcagaaggacggcgtgaagaagctgaacctgtacctgatcatcaactacttcaagggcggcaagctgcggttcaagaagatcaaacctgaagccttcgaagccaacagattctacaccgtgatcaacaaaaagagcggcgagatcgtgcccatggaggtgaacttcaacttcgacgaccccaacctgatcatcctgcctctggcctttggcaagagacagggcagagaattcatctggaacgacctgctgtccctggaaaccggcagcctgaagctggccaacggaagagtgatcgagaagacactgtacaacagaagaacccggcaggatgagcctgccctgttcgtggccctgaccttcgagcggcgggaggtcctggactcctccaatatcaaaccaatgaacctgatcggcgtggcaagaggcgaaaacatccccgccgtgatcgccctgaccgaccccgagggctgcccactgagccggtttaaggatagcctgggaaacccaacccacatcctgagaatcggcgagagctataaggagaagcagcggaccatccaggccaagaaggaggtggagcagcggagagccggcggctacagccggaagtacgccagcaaagccaagaatctggcagacgatatggtgagaaacaccgctagagatctgctgtactacgccgtgacccaggatgccatgctgatcttcgccaacctgagccggggcttcggccggcagggcaagcggaccttcatggccgagagacagtacacacggatggaggactggctgaccgccaagctggcctacgagggcctgagcaagacctacctgtccaagacactggcccagtacacctccaagacatgcagcaactgtgggtttaccatcaccagcgccgactacgacagggtgctggagaagctgaagaagacagcaacaggctggatgaccacaattaacggcaaggagctgaaggtggagggccagattacctactacaacagatacaagagacagaacgtagtcaaggacctgtccgtcgagctggatagactgagcgaagaatctgtgaacaacgacatctcctcctggacaaagggcagaagcggagaagctctgagcctcctgaagaaaagattctcccatagacccgtgcaggagaagttcgtgtgcctgaactgcggcttcgagacacacgcagccgagcaagccgccctgaacatcgccagatcctggctgttcctgcggagccaggagtacaagaaataccagacaaacaagacaaccggcaacaccgataagagagccttcgtcgagacctggcagtccttttaccggaagaagcttaaggaggtgtggaaacctgccgtgcggtctggcggatctggcggaggctccacaagcagcaaggccagcgtgaccttcgccgacctggccgtgtacttcagccaggaggagtgggagggcctgagccccatccagaaggacctgtacgaggacgtgatgctggagacctaccagaacctggtgagcgtgggcctgagctgcaggaggcccagcgtgatcaccctgctggagaagggcaaggccccctggaccgtggagcccgccaggcagaggaggggccccgacagcggcgccaagtgcaccagccccaagaaaaagagaaaagtctaagctgccttctgcggggcttgccttctggccatgcccttcttctctcccttgcacctgtacctcttggtctttgaataaagcctgagtaggaaggctagcaaaaaaaaaaaaaaaaaaaaaaaaaaaaaaaaaaaaaaaaaaaaaaaaaaaaaaaaaaaaaaaaaaaaaaaaaaaaaaaa

SEQ ID NO: 5961 - RNA, 5797 nt, synthetic construct
  source 1..5797: mol_type = other RNA
aggaaataagagagaaaagaagagtaagaagaaatataagagccaccatggcccctaagaagaagcgtaaagtgagccggatggaacgcctcgtctacgaggtgcggcagaagtgcagaaacatcgaggacatctgcatctcctgcggatctctgaacgtgaccctggagcacccactgttcatcggcggcatgtgccagaactgtaaaaactgttttctggagtgtgcctatcaatacgacgatgacggctaccagagctactgcaccatctgttgcggcggaagagaggtgctgatgtgtggaaataacaactgctgccggtgcttctgcgtggaatgcgtggacctgctggtgggccccggcgccgcccaggccgctattaaggaagatccttggaactgctacatgtgcggccacaagggcacatacggcctgctgagacggagagaggactggcctagcagactgcagatgttcttcgccaataaccacgaccaggagttcgacccccctaaggtgtaccctcccgtccccgccgagaagagaaagcccatccgggtcctgagcctgttcgatggcatcgccaccggtctgctggtgctgaaggacctgggcatccaggtggataggtacattgcctccgaggtgtgcgaggactccatcaccgtgggaatggtgcgtcatcagggcaagatcatgtacgtgggcgacgtgcggagcgtgacacagaagcatatccaggagtggggccctttcgacctggtgatcggcggcagcccttgcaatgacctgagcatcgtgaacccagcccggaagggcctgtacgagggaaccggcagactgttcttcgagttttacagactgctgcacgacgcccggcctaaggaaggcgacgaccggcccttcttttggctgttcgagaatgtggtggccatgggagtcagcgacaagcgggatattagccggttcctggagagcaaccccgtgatgatcgatgccaaggaagtgagcgccgcccaccgggccagatacttctggggcaatctgcctggcatgaacagacccctggccagcaccgtgaacgacaagctggagctgcaggagtgcctggagcacggccggatcgccaagttcagcaaggtgagaaccatcaccacccgaagcaacagcatcaaacaaggcaaggaccagcactttcctgtgttcatgaacgagaaggaggacatcctgtggtgtaccgagatggagagagtgttcgggttcccagtccactacacagatgtcagcaacatgtctagactggccagacagagactgctgggaagaagctggtccgtccctgtgatcagacacctgttcgcccctctgaaggagtacttcgcctgcgtgagcagcggcaacagcaacgccaacagccggggccccagcttctctagcggcctggtgccactgtccctgagagggagccacatgggccccatggagatctacaaaaccgtgagcgcctggaagcggcagcctgtgcgcgtgctgagcctgtttcggaatatcgataaagtcctgaaaagcctgggattcctggagagcggctctggctccggcggtggcaccctgaagtacgtggaggatgtgacaaacgtggtcagacgggatgtggagaagtggggccccttcgatctggtgtacggcagcacccaacccctgggcagctcttgtgaccggtgccctggctggtacatgtttcagttccaccggatcctgcagtacgccctgccgagacaggagtcccagcggccattcttttggattttcatggacaacttgctgctgaccgaggatgaccaggaaactaccactcggttcctgcagaccgaagccgtgaccctgcaggacgtgagaggccgggactaccagaacgccatgcgggtgtggtccaacatccctggactgaaaagcaagcacgcacctctgacccctaaagaagaggagtacctgcaggcccaggtgcggagcagaagcaagctggacgcccctaaggtggatctgctggtgaagaattgcctcctgcccctgagagagtacttcaagtatttcagccagaatagtctgcccctgggcggcccaagcagcggcgcccctcctcccagcggcggcagcccagccggctccccaacctctaccgaggagggcacctctgagtccgccacccccgagagcggccctggcacctccaccgagcccagcgagggcagcgcacccggcagccctgccggcagccccacctccacagaggagggaaccagcaccgagcccagcgaaggcagcgccccaggcaccagcaccgagcctagtgagggcggctctggcggcggcagcgcccaggagattaaacggatcaacaagatcagaagaagacttgtgaaagacagcaacaccaagaaggccggcaagacaggccccatgaaaaccctgctggttagagtgatgacacccgatctgagagagcggctggaaaacctgagaaagaagcctgaaaatatcccccagcccatcagcaatacatctagagccaacctgaataagctgctgaccgattacaccgaaatgaagaaggcgatcctgcatgtgtactgggaagagttccagaaggaccctgtgggcctgatgagccgggtggcccagcctgccagcaagaagatcgatcagaacaagctgaaacctgagatggacgagaagggcaacctgaccaccgccggctttgcctgctctcagtgtggccagcccctgttcgtgtacaagctggagcaggtgtctgagaagggcaaggcttacaccaactacttcggacggtgcaatgtggccgagcacgaaaagctgatcctgctggcccagctgaagcccgagaaggatagcgacgaagccgtgacatatagcctgggaaagtttgggcagagggccctggatttctacagcattcatgtgaccaaggagtccacccaccccgtgaagcccctggcccagatcgccggaaacagatacgcctccggacctgtgggaaaggccctgagcgacgcatgtatgggcacaatcgcctccttcctgtctaagtaccaggacatcatcatcgaacaccagaaggtggtgaagggcaaccagaagagactggagagcctgcgggagctggccggcaaggaaaacctggaataccctagcgtgaccctgccacctcagcctcacaccaaggagggcgttgatgcctacaacgaagtgatcgcccgggtgcgaatgtgggtgaacctgaacctgtggcagaagctgaagctaagcagagatgatgccaagcctctgctgagactgaagggattcccttcctttcctctggtcgagagacaggccaacgaagtggactggtgggacatggtgtgtaacgtgaagaagctgatcaacgagaaaaaggaggatggcaaggtgttttggcagaatctggctggctacaagagacaggaagccctgagaccatacctgagcagcgaggaagatcggaagaagggaaagaaattcgctcggtaccagctgggcgacctgctgctgcacctggaaaagaagcacggcgaggactggggaaaggtgtacgacgaggcctgggagcggattgacaagaaagtggaaggcctgagcaagcacatcaagctggaagaggaacggagaagcgaggacgcccagagcaaggccgccctgaccgactggctgcgggctaaggccagcttcgtgatcgagggcctgaaggaggccgacaaggacgagttctgcagatgcgagctgaagctgcagaagtggtacggggacctgcggggaaagcccttcgccatcgaagccgagaacagcatcctggacatcagcggcttcagcaagcagtacaactgtgccttcatctggcagaaggacggcgtgaagaagctgaacctgtacctgatcatcaactacttcaagggcggcaagctgcggttcaagaagatcaaacctgaagccttcgaagccaacagattctacaccgtgatcaacaaaaagagcggcgagatcgtgcccatggaggtgaacttcaacttcgacgaccccaacctgatcatcctgcctctggcctttggcaagagacagggcagagaattcatctggaacgacctgctgtccctggaaaccggcagcctgaagctggccaacggaagagtgatcgagaagacactgtacaacagaagaacccggcaggatgagcctgccctgttcgtggccctgaccttcgagcggcgggaggtcctggactcctccaatatcaaaccaatgaacctgatcggcgtggcaagaggcgaaaacatccccgccgtgatcgccctgaccgaccccgagggctgcccactgagccggtttaaggatagcctgggaaacccaacccacatcctgagaatcggcgagagctataaggagaagcagcggaccatccaggccaagaaggaggtggagcagcggagagccggcggctacagccggaagtacgccagcaaagccaagaatctggcagacgatatggtgagaaacaccgctagagatctgctgtactacgccgtgacccaggatgccatgctgatcttcgccaacctgagccggggcttcggccggcagggcaagcggaccttcatggccgagagacagtacacacggatggaggactggctgaccgccaagctggcctacgagggcctgagcaagacctacctgtccaagacactggcccagtacacctccaagacatgcagcaactgtgggtttaccatcaccagcgccgactacgacagggtgctggagaagctgaagaagacagcaacaggctggatgaccacaattaacggcaaggagctgaaggtggagggccagattacctactacaacagatacaagagacagaacgtagtcaaggacctgtccgtcgagctggatagactgagcgaagaatctgtgaacaacgacatctcctcctggacaaagggcagaagcggagaagctctgagcctcctgaagaaaagattctcccatagacccgtgcaggagaagttcgtgtgcctgaactgcggcttcgagacacacgcagccgagcaagccgccctgaacatcgccagatcctggctgttcctgcggagccaggagtacaagaaataccagacaaacaagacaaccggcaacaccgataagagagccttcgtcgagacctggcagtccttttaccggaagaagcttaaggaggtgtggaaacctgccgtgcggtctggcggatctggcggaggctccacaagcgagagcgtggccttcgaggacgtggccgtgtacttcacccagaaccagtgggccagcctggaccccgcccagagggccctgtacagggaggtgatgctggagaactacgccaacgtggccagcctggtggccttccccttccccaagcccgccctgatcagccacctggagaagggcgaggccccctggggccccgacccctgggacgccgagatccccagcagcctgagccagggcgacgagaccagccccaagaaaaagagaaaagtctaagctgccttctgcggggcttgccttctggccatgcccttcttctctcccttgcacctgtacctcttggtctttgaataaagcctgagtaggaaggctagcaaaaaaaaaaaaaaaaaaaaaaaaaaaaaaaaaaaaaaaaaaaaaaaaaaaaaaaaaaaaaaaaaaaaaaaaaaaaaaaa

SEQ ID NO: 5962 - RNA, 5797 nt, synthetic construct
  source 1..5797: mol_type = other RNA
aggaaataagagagaaaagaagagtaagaagaaatataagagccaccatggcccctaagaagaagcgtaaagtgagccggatggaacgcctcgtctacgaggtgcggcagaagtgcagaaacatcgaggacatctgcatctcctgcggatctctgaacgtgaccctggagcacccactgttcatcggcggcatgtgccagaactgtaaaaactgttttctggagtgtgcctatcaatacgacgatgacggctaccagagctactgcaccatctgttgcggcggaagagaggtgctgatgtgtggaaataacaactgctgccggtgcttctgcgtggaatgcgtggacctgctggtgggccccggcgccgcccaggccgctattaaggaagatccttggaactgctacatgtgcggccacaagggcacatacggcctgctgagacggagagaggactggcctagcagactgcagatgttcttcgccaataaccacgaccaggagttcgacccccctaaggtgtaccctcccgtccccgccgagaagagaaagcccatccgggtcctgagcctgttcgatggcatcgccaccggtctgctggtgctgaaggacctgggcatccaggtggataggtacattgcctccgaggtgtgcgaggactccatcaccgtgggaatggtgcgtcatcagggcaagatcatgtacgtgggcgacgtgcggagcgtgacacagaagcatatccaggagtggggccctttcgacctggtgatcggcggcagcccttgcaatgacctgagcatcgtgaacccagcccggaagggcctgtacgagggaaccggcagactgttcttcgagttttacagactgctgcacgacgcccggcctaaggaaggcgacgaccggcccttcttttggctgttcgagaatgtggtggccatgggagtcagcgacaagcgggatattagccggttcctggagagcaaccccgtgatgatcgatgccaaggaagtgagcgccgcccaccgggccagatacttctggggcaatctgcctggcatgaacagacccctggccagcaccgtgaacgacaagctggagctgcaggagtgcctggagcacggccggatcgccaagttcagcaaggtgagaaccatcaccacccgaagcaacagcatcaaacaaggcaaggaccagcactttcctgtgttcatgaacgagaaggaggacatcctgtggtgtaccgagatggagagagtgttcgggttcccagtccactacacagatgtcagcaacatgtctagactggccagacagagactgctgggaagaagctggtccgtccctgtgatcagacacctgttcgcccctctgaaggagtacttcgcctgcgtgagcagcggcaacagcaacgccaacagccggggccccagcttctctagcggcctggtgccactgtccctgagagggagccacatgggccccatggagatctacaaaaccgtgagcgcctggaagcggcagcctgtgcgcgtgctgagcctgtttcggaatatcgataaagtcctgaaaagcctgggattcctggagagcggctctggctccggcggtggcaccctgaagtacgtggaggatgtgacaaacgtggtcagacgggatgtggagaagtggggccccttcgatctggtgtacggcagcacccaacccctgggcagctcttgtgaccggtgccctggctggtacatgtttcagttccaccggatcctgcagtacgccctgccgagacaggagtcccagcggccattcttttggattttcatggacaacttgctgctgaccgaggatgaccaggaaactaccactcggttcctgcagaccgaagccgtgaccctgcaggacgtgagaggccgggactaccagaacgccatgcgggtgtggtccaacatccctggactgaaaagcaagcacgcacctctgacccctaaagaagaggagtacctgcaggcccaggtgcggagcagaagcaagctggacgcccctaaggtggatctgctggtgaagaattgcctcctgcccctgagagagtacttcaagtatttcagccagaatagtctgcccctgggcggcccaagcagcggcgcccctcctcccagcggcggcagcccagccggctccccaacctctaccgaggagggcacctctgagtccgccacccccgagagcggccctggcacctccaccgagcccagcgagggcagcgcacccggcagccctgccggcagccccacctccacagaggagggaaccagcaccgagcccagcgaaggcagcgccccaggcaccagcaccgagcctagtgagggcggctctggcggcggcagcgcccaggagattaaacggatcaacaagatcagaagaagacttgtgaaagacagcaacaccaagaaggccggcaagacaggccccatgaaaaccctgctggttagagtgatgacacccgatctgagagagcggctggaaaacctgagaaagaagcctgaaaatatcccccagcccatcagcaatacatctagagccaacctgaataagctgctgaccgattacaccgaaatgaagaaggcgatcctgcatgtgtactgggaagagttccagaaggaccctgtgggcctgatgagccgggtggcccagcctgccagcaagaagatcgatcagaacaagctgaaacctgagatggacgagaagggcaacctgaccaccgccggctttgcctgctctcagtgtggccagcccctgttcgtgtacaagctggagcaggtgtctgagaagggcaaggcttacaccaactacttcggacggtgcaatgtggccgagcacgaaaagctgatcctgctggcccagctgaagcccgagaaggatagcgacgaagccgtgacatatagcctgggaaagtttgggcagagggccctggatttctacagcattcatgtgaccaaggagtccacccaccccgtgaagcccctggcccagatcgccggaaacagatacgcctccggacctgtgggaaaggccctgagcgacgcatgtatgggcacaatcgcctccttcctgtctaagtaccaggacatcatcatcgaacaccagaaggtggtgaagggcaaccagaagagactggagagcctgcgggagctggccggcaaggaaaacctggaataccctagcgtgaccctgccacctcagcctcacaccaaggagggcgttgatgcctacaacgaagtgatcgcccgggtgcgaatgtgggtgaacctgaacctgtggcagaagctgaagctaagcagagatgatgccaagcctctgctgagactgaagggattcccttcctttcctctggtcgagagacaggccaacgaagtggactggtgggacatggtgtgtaacgtgaagaagctgatcaacgagaaaaaggaggatggcaaggtgttttggcagaatctggctggctacaagagacaggaagccctgagaccatacctgagcagcgaggaagatcggaagaagggaaagaaattcgctcggtaccagctgggcgacctgctgctgcacctggaaaagaagcacggcgaggactggggaaaggtgtacgacgaggcctgggagcggattgacaagaaagtggaaggcctgagcaagcacatcaagctggaagaggaacggagaagcgaggacgcccagagcaaggccgccctgaccgactggctgcgggctaaggccagcttcgtgatcgagggcctgaaggaggccgacaaggacgagttctgcagatgcgagctgaagctgcagaagtggtacggggacctgcggggaaagcccttcgccatcgaagccgagaacagcatcctggacatcagcggcttcagcaagcagtacaactgtgccttcatctggcagaaggacggcgtgaagaagctgaacctgtacctgatcatcaactacttcaagggcggcaagctgcggttcaagaagatcaaacctgaagccttcgaagccaacagattctacaccgtgatcaacaaaaagagcggcgagatcgtgcccatggaggtgaacttcaacttcgacgaccccaacctgatcatcctgcctctggcctttggcaagagacagggcagagaattcatctggaacgacctgctgtccctggaaaccggcagcctgaagctggccaacggaagagtgatcgagaagacactgtacaacagaagaacccggcaggatgagcctgccctgttcgtggccctgaccttcgagcggcgggaggtcctggactcctccaatatcaaaccaatgaacctgatcggcgtggcaagaggcgaaaacatccccgccgtgatcgccctgaccgaccccgagggctgcccactgagccggtttaaggatagcctgggaaacccaacccacatcctgagaatcggcgagagctataaggagaagcagcggaccatccaggccaagaaggaggtggagcagcggagagccggcggctacagccggaagtacgccagcaaagccaagaatctggcagacgatatggtgagaaacaccgctagagatctgctgtactacgccgtgacccaggatgccatgctgatcttcgccaacctgagccggggcttcggccggcagggcaagcggaccttcatggccgagagacagtacacacggatggaggactggctgaccgccaagctggcctacgagggcctgagcaagacctacctgtccaagacactggcccagtacacctccaagacatgcagcaactgtgggtttaccatcaccagcgccgactacgacagggtgctggagaagctgaagaagacagcaacaggctggatgaccacaattaacggcaaggagctgaaggtggagggccagattacctactacaacagatacaagagacagaacgtagtcaaggacctgtccgtcgagctggatagactgagcgaagaatctgtgaacaacgacatctcctcctggacaaagggcagaagcggagaagctctgagcctcctgaagaaaagattctcccatagacccgtgcaggagaagttcgtgtgcctgaactgcggcttcgagacacacgcagccgagcaagccgccctgaacatcgccagatcctggctgttcctgcggagccaggagtacaagaaataccagacaaacaagacaaccggcaacaccgataagagagccttcgtcgagacctggcagtccttttaccggaagaagcttaaggaggtgtggaaacctgccgtgcggtctggcggatctggcggaggctccacaagccccgtgaggggccccggcgaggccaggcccagcaggaagaggggcaggaggcccagggccctgaagttcgtggacgtggccgtgtacttcagcagcgaggagtggggctgcctgaggcccgcccagagggccctgtacagggacgtgatgagggagacctacggccacctgggcgccctgggctgcgccggccccaagcccgccctgatcagctggctggagaggaacaccgacgactgggagaccagccccaagaaaaagagaaaagtctaagctgccttctgcggggcttgccttctggccatgcccttcttctctcccttgcacctgtacctcttggtctttgaataaagcctgagtaggaaggctagcaaaaaaaaaaaaaaaaaaaaaaaaaaaaaaaaaaaaaaaaaaaaaaaaaaaaaaaaaaaaaaaaaaaaaaaaaaaaaaaa

SEQ ID NO: 5963 - RNA, 5797 nt, synthetic construct
  source 1..5797: mol_type = other RNA
aggaaataagagagaaaagaagagtaagaagaaatataagagccaccatggcccctaagaagaagcgtaaagtgagccggatggaacgcctcgtctacgaggtgcggcagaagtgcagaaacatcgaggacatctgcatctcctgcggatctctgaacgtgaccctggagcacccactgttcatcggcggcatgtgccagaactgtaaaaactgttttctggagtgtgcctatcaatacgacgatgacggctaccagagctactgcaccatctgttgcggcggaagagaggtgctgatgtgtggaaataacaactgctgccggtgcttctgcgtggaatgcgtggacctgctggtgggccccggcgccgcccaggccgctattaaggaagatccttggaactgctacatgtgcggccacaagggcacatacggcctgctgagacggagagaggactggcctagcagactgcagatgttcttcgccaataaccacgaccaggagttcgacccccctaaggtgtaccctcccgtccccgccgagaagagaaagcccatccgggtcctgagcctgttcgatggcatcgccaccggtctgctggtgctgaaggacctgggcatccaggtggataggtacattgcctccgaggtgtgcgaggactccatcaccgtgggaatggtgcgtcatcagggcaagatcatgtacgtgggcgacgtgcggagcgtgacacagaagcatatccaggagtggggccctttcgacctggtgatcggcggcagcccttgcaatgacctgagcatcgtgaacccagcccggaagggcctgtacgagggaaccggcagactgttcttcgagttttacagactgctgcacgacgcccggcctaaggaaggcgacgaccggcccttcttttggctgttcgagaatgtggtggccatgggagtcagcgacaagcgggatattagccggttcctggagagcaaccccgtgatgatcgatgccaaggaagtgagcgccgcccaccgggccagatacttctggggcaatctgcctggcatgaacagacccctggccagcaccgtgaacgacaagctggagctgcaggagtgcctggagcacggccggatcgccaagttcagcaaggtgagaaccatcaccacccgaagcaacagcatcaaacaaggcaaggaccagcactttcctgtgttcatgaacgagaaggaggacatcctgtggtgtaccgagatggagagagtgttcgggttcccagtccactacacagatgtcagcaacatgtctagactggccagacagagactgctgggaagaagctggtccgtccctgtgatcagacacctgttcgcccctctgaaggagtacttcgcctgcgtgagcagcggcaacagcaacgccaacagccggggccccagcttctctagcggcctggtgccactgtccctgagagggagccacatgggccccatggagatctacaaaaccgtgagcgcctggaagcggcagcctgtgcgcgtgctgagcctgtttcggaatatcgataaagtcctgaaaagcctgggattcctggagagcggctctggctccggcggtggcaccctgaagtacgtggaggatgtgacaaacgtggtcagacgggatgtggagaagtggggccccttcgatctggtgtacggcagcacccaacccctgggcagctcttgtgaccggtgccctggctggtacatgtttcagttccaccggatcctgcagtacgccctgccgagacaggagtcccagcggccattcttttggattttcatggacaacttgctgctgaccgaggatgaccaggaaactaccactcggttcctgcagaccgaagccgtgaccctgcaggacgtgagaggccgggactaccagaacgccatgcgggtgtggtccaacatccctggactgaaaagcaagcacgcacctctgacccctaaagaagaggagtacctgcaggcccaggtgcggagcagaagcaagctggacgcccctaaggtggatctgctggtgaagaattgcctcctgcccctgagagagtacttcaagtatttcagccagaatagtctgcccctgggcggcccaagcagcggcgcccctcctcccagcggcggcagcccagccggctccccaacctctaccgaggagggcacctctgagtccgccacccccgagagcggccctggcacctccaccgagcccagcgagggcagcgcacccggcagccctgccggcagccccacctccacagaggagggaaccagcaccgagcccagcgaaggcagcgccccaggcaccagcaccgagcctagtgagggcggctctggcggcggcagcgcccaggagattaaacggatcaacaagatcagaagaagacttgtgaaagacagcaacaccaagaaggccggcaagacaggccccatgaaaaccctgctggttagagtgatgacacccgatctgagagagcggctggaaaacctgagaaagaagcctgaaaatatcccccagcccatcagcaatacatctagagccaacctgaataagctgctgaccgattacaccgaaatgaagaaggcgatcctgcatgtgtactgggaagagttccagaaggaccctgtgggcctgatgagccgggtggcccagcctgccagcaagaagatcgatcagaacaagctgaaacctgagatggacgagaagggcaacctgaccaccgccggctttgcctgctctcagtgtggccagcccctgttcgtgtacaagctggagcaggtgtctgagaagggcaaggcttacaccaactacttcggacggtgcaatgtggccgagcacgaaaagctgatcctgctggcccagctgaagcccgagaaggatagcgacgaagccgtgacatatagcctgggaaagtttgggcagagggccctggatttctacagcattcatgtgaccaaggagtccacccaccccgtgaagcccctggcccagatcgccggaaacagatacgcctccggacctgtgggaaaggccctgagcgacgcatgtatgggcacaatcgcctccttcctgtctaagtaccaggacatcatcatcgaacaccagaaggtggtgaagggcaaccagaagagactggagagcctgcgggagctggccggcaaggaaaacctggaataccctagcgtgaccctgccacctcagcctcacaccaaggagggcgttgatgcctacaacgaagtgatcgcccgggtgcgaatgtgggtgaacctgaacctgtggcagaagctgaagctaagcagagatgatgccaagcctctgctgagactgaagggattcccttcctttcctctggtcgagagacaggccaacgaagtggactggtgggacatggtgtgtaacgtgaagaagctgatcaacgagaaaaaggaggatggcaaggtgttttggcagaatctggctggctacaagagacaggaagccctgagaccatacctgagcagcgaggaagatcggaagaagggaaagaaattcgctcggtaccagctgggcgacctgctgctgcacctggaaaagaagcacggcgaggactggggaaaggtgtacgacgaggcctgggagcggattgacaagaaagtggaaggcctgagcaagcacatcaagctggaagaggaacggagaagcgaggacgcccagagcaaggccgccctgaccgactggctgcgggctaaggccagcttcgtgatcgagggcctgaaggaggccgacaaggacgagttctgcagatgcgagctgaagctgcagaagtggtacggggacctgcggggaaagcccttcgccatcgaagccgagaacagcatcctggacatcagcggcttcagcaagcagtacaactgtgccttcatctggcagaaggacggcgtgaagaagctgaacctgtacctgatcatcaactacttcaagggcggcaagctgcggttcaagaagatcaaacctgaagccttcgaagccaacagattctacaccgtgatcaacaaaaagagcggcgagatcgtgcccatggaggtgaacttcaacttcgacgaccccaacctgatcatcctgcctctggcctttggcaagagacagggcagagaattcatctggaacgacctgctgtccctggaaaccggcagcctgaagctggccaacggaagagtgatcgagaagacactgtacaacagaagaacccggcaggatgagcctgccctgttcgtggccctgaccttcgagcggcgggaggtcctggactcctccaatatcaaaccaatgaacctgatcggcgtggcaagaggcgaaaacatccccgccgtgatcgccctgaccgaccccgagggctgcccactgagccggtttaaggatagcctgggaaacccaacccacatcctgagaatcggcgagagctataaggagaagcagcggaccatccaggccaagaaggaggtggagcagcggagagccggcggctacagccggaagtacgccagcaaagccaagaatctggcagacgatatggtgagaaacaccgctagagatctgctgtactacgccgtgacccaggatgccatgctgatcttcgccaacctgagccggggcttcggccggcagggcaagcggaccttcatggccgagagacagtacacacggatggaggactggctgaccgccaagctggcctacgagggcctgagcaagacctacctgtccaagacactggcccagtacacctccaagacatgcagcaactgtgggtttaccatcaccagcgccgactacgacagggtgctggagaagctgaagaagacagcaacaggctggatgaccacaattaacggcaaggagctgaaggtggagggccagattacctactacaacagatacaagagacagaacgtagtcaaggacctgtccgtcgagctggatagactgagcgaagaatctgtgaacaacgacatctcctcctggacaaagggcagaagcggagaagctctgagcctcctgaagaaaagattctcccatagacccgtgcaggagaagttcgtgtgcctgaactgcggcttcgagacacacgcagccgagcaagccgccctgaacatcgccagatcctggctgttcctgcggagccaggagtacaagaaataccagacaaacaagacaaccggcaacaccgataagagagccttcgtcgagacctggcagtccttttaccggaagaagcttaaggaggtgtggaaacctgccgtgcggtctggcggatctggcggaggctccacaagcagcaaggcccccatcaccttcggcgacctggccatctacttcagccaggaggagtgggagtggctgagccccatccagaaggacctgtacgaggacgtgatgctggagaactacaggaacctggtgagcctgggcctgagcttcaggaggcccaacgtgatcaccctgctggagaagggcaaggccccctggatggtggagcccgccaggaggaggaggggccccgagctgaccgaggccagcaccagccccaagaaaaagagaaaagtctaagctgccttctgcggggcttgccttctggccatgcccttcttctctcccttgcacctgtacctcttggtctttgaataaagcctgagtaggaaggctagcaaaaaaaaaaaaaaaaaaaaaaaaaaaaaaaaaaaaaaaaaaaaaaaaaaaaaaaaaaaaaaaaaaaaaaaaaaaaaaaa

SEQ ID NO: 5964 - RNA, 5797 nt, synthetic construct
  source 1..5797: mol_type = other RNA
aggaaataagagagaaaagaagagtaagaagaaatataagagccaccatggcccctaagaagaagcgtaaagtgagccggatggaacgcctcgtctacgaggtgcggcagaagtgcagaaacatcgaggacatctgcatctcctgcggatctctgaacgtgaccctggagcacccactgttcatcggcggcatgtgccagaactgtaaaaactgttttctggagtgtgcctatcaatacgacgatgacggctaccagagctactgcaccatctgttgcggcggaagagaggtgctgatgtgtggaaataacaactgctgccggtgcttctgcgtggaatgcgtggacctgctggtgggccccggcgccgcccaggccgctattaaggaagatccttggaactgctacatgtgcggccacaagggcacatacggcctgctgagacggagagaggactggcctagcagactgcagatgttcttcgccaataaccacgaccaggagttcgacccccctaaggtgtaccctcccgtccccgccgagaagagaaagcccatccgggtcctgagcctgttcgatggcatcgccaccggtctgctggtgctgaaggacctgggcatccaggtggataggtacattgcctccgaggtgtgcgaggactccatcaccgtgggaatggtgcgtcatcagggcaagatcatgtacgtgggcgacgtgcggagcgtgacacagaagcatatccaggagtggggccctttcgacctggtgatcggcggcagcccttgcaatgacctgagcatcgtgaacccagcccggaagggcctgtacgagggaaccggcagactgttcttcgagttttacagactgctgcacgacgcccggcctaaggaaggcgacgaccggcccttcttttggctgttcgagaatgtggtggccatgggagtcagcgacaagcgggatattagccggttcctggagagcaaccccgtgatgatcgatgccaaggaagtgagcgccgcccaccgggccagatacttctggggcaatctgcctggcatgaacagacccctggccagcaccgtgaacgacaagctggagctgcaggagtgcctggagcacggccggatcgccaagttcagcaaggtgagaaccatcaccacccgaagcaacagcatcaaacaaggcaaggaccagcactttcctgtgttcatgaacgagaaggaggacatcctgtggtgtaccgagatggagagagtgttcgggttcccagtccactacacagatgtcagcaacatgtctagactggccagacagagactgctgggaagaagctggtccgtccctgtgatcagacacctgttcgcccctctgaaggagtacttcgcctgcgtgagcagcggcaacagcaacgccaacagccggggccccagcttctctagcggcctggtgccactgtccctgagagggagccacatgggccccatggagatctacaaaaccgtgagcgcctggaagcggcagcctgtgcgcgtgctgagcctgtttcggaatatcgataaagtcctgaaaagcctgggattcctggagagcggctctggctccggcggtggcaccctgaagtacgtggaggatgtgacaaacgtggtcagacgggatgtggagaagtggggccccttcgatctggtgtacggcagcacccaacccctgggcagctcttgtgaccggtgccctggctggtacatgtttcagttccaccggatcctgcagtacgccctgccgagacaggagtcccagcggccattcttttggattttcatggacaacttgctgctgaccgaggatgaccaggaaactaccactcggttcctgcagaccgaagccgtgaccctgcaggacgtgagaggccgggactaccagaacgccatgcgggtgtggtccaacatccctggactgaaaagcaagcacgcacctctgacccctaaagaagaggagtacctgcaggcccaggtgcggagcagaagcaagctggacgcccctaaggtggatctgctggtgaagaattgcctcctgcccctgagagagtacttcaagtatttcagccagaatagtctgcccctgggcggcccaagcagcggcgcccctcctcccagcggcggcagcccagccggctccccaacctctaccgaggagggcacctctgagtccgccacccccgagagcggccctggcacctccaccgagcccagcgagggcagcgcacccggcagccctgccggcagccccacctccacagaggagggaaccagcaccgagcccagcgaaggcagcgccccaggcaccagcaccgagcctagtgagggcggctctggcggcggcagcgcccaggagattaaacggatcaacaagatcagaagaagacttgtgaaagacagcaacaccaagaaggccggcaagacaggccccatgaaaaccctgctggttagagtgatgacacccgatctgagagagcggctggaaaacctgagaaagaagcctgaaaatatcccccagcccatcagcaatacatctagagccaacctgaataagctgctgaccgattacaccgaaatgaagaaggcgatcctgcatgtgtactgggaagagttccagaaggaccctgtgggcctgatgagccgggtggcccagcctgccagcaagaagatcgatcagaacaagctgaaacctgagatggacgagaagggcaacctgaccaccgccggctttgcctgctctcagtgtggccagcccctgttcgtgtacaagctggagcaggtgtctgagaagggcaaggcttacaccaactacttcggacggtgcaatgtggccgagcacgaaaagctgatcctgctggcccagctgaagcccgagaaggatagcgacgaagccgtgacatatagcctgggaaagtttgggcagagggccctggatttctacagcattcatgtgaccaaggagtccacccaccccgtgaagcccctggcccagatcgccggaaacagatacgcctccggacctgtgggaaaggccctgagcgacgcatgtatgggcacaatcgcctccttcctgtctaagtaccaggacatcatcatcgaacaccagaaggtggtgaagggcaaccagaagagactggagagcctgcgggagctggccggcaaggaaaacctggaataccctagcgtgaccctgccacctcagcctcacaccaaggagggcgttgatgcctacaacgaagtgatcgcccgggtgcgaatgtgggtgaacctgaacctgtggcagaagctgaagctaagcagagatgatgccaagcctctgctgagactgaagggattcccttcctttcctctggtcgagagacaggccaacgaagtggactggtgggacatggtgtgtaacgtgaagaagctgatcaacgagaaaaaggaggatggcaaggtgttttggcagaatctggctggctacaagagacaggaagccctgagaccatacctgagcagcgaggaagatcggaagaagggaaagaaattcgctcggtaccagctgggcgacctgctgctgcacctggaaaagaagcacggcgaggactggggaaaggtgtacgacgaggcctgggagcggattgacaagaaagtggaaggcctgagcaagcacatcaagctggaagaggaacggagaagcgaggacgcccagagcaaggccgccctgaccgactggctgcgggctaaggccagcttcgtgatcgagggcctgaaggaggccgacaaggacgagttctgcagatgcgagctgaagctgcagaagtggtacggggacctgcggggaaagcccttcgccatcgaagccgagaacagcatcctggacatcagcggcttcagcaagcagtacaactgtgccttcatctggcagaaggacggcgtgaagaagctgaacctgtacctgatcatcaactacttcaagggcggcaagctgcggttcaagaagatcaaacctgaagccttcgaagccaacagattctacaccgtgatcaacaaaaagagcggcgagatcgtgcccatggaggtgaacttcaacttcgacgaccccaacctgatcatcctgcctctggcctttggcaagagacagggcagagaattcatctggaacgacctgctgtccctggaaaccggcagcctgaagctggccaacggaagagtgatcgagaagacactgtacaacagaagaacccggcaggatgagcctgccctgttcgtggccctgaccttcgagcggcgggaggtcctggactcctccaatatcaaaccaatgaacctgatcggcgtggcaagaggcgaaaacatccccgccgtgatcgccctgaccgaccccgagggctgcccactgagccggtttaaggatagcctgggaaacccaacccacatcctgagaatcggcgagagctataaggagaagcagcggaccatccaggccaagaaggaggtggagcagcggagagccggcggctacagccggaagtacgccagcaaagccaagaatctggcagacgatatggtgagaaacaccgctagagatctgctgtactacgccgtgacccaggatgccatgctgatcttcgccaacctgagccggggcttcggccggcagggcaagcggaccttcatggccgagagacagtacacacggatggaggactggctgaccgccaagctggcctacgagggcctgagcaagacctacctgtccaagacactggcccagtacacctccaagacatgcagcaactgtgggtttaccatcaccagcgccgactacgacagggtgctggagaagctgaagaagacagcaacaggctggatgaccacaattaacggcaaggagctgaaggtggagggccagattacctactacaacagatacaagagacagaacgtagtcaaggacctgtccgtcgagctggatagactgagcgaagaatctgtgaacaacgacatctcctcctggacaaagggcagaagcggagaagctctgagcctcctgaagaaaagattctcccatagacccgtgcaggagaagttcgtgtgcctgaactgcggcttcgagacacacgcagccgagcaagccgccctgaacatcgccagatcctggctgttcctgcggagccaggagtacaagaaataccagacaaacaagacaaccggcaacaccgataagagagccttcgtcgagacctggcagtccttttaccggaagaagcttaaggaggtgtggaaacctgccgtgcggtctggcggatctggcggaggctccacaagcaggcccggcgccgtgagcttcgccgacgtggccgtgtacttcagccccgaggagtggggctgcctgaggcccgcccagagggccctgtacaggaacgtgatgagggagacctacggccacctgggcgccctgggcttcgccggccccaagcccgccctgatcagctggctggagaggaagaaggaggtgtggagccccgaggccgaggaccccgaggccggcgccaggcaccccggcagcggcaccagccccaagaaaaagagaaaagtctaagctgccttctgcggggcttgccttctggccatgcccttcttctctcccttgcacctgtacctcttggtctttgaataaagcctgagtaggaaggctagcaaaaaaaaaaaaaaaaaaaaaaaaaaaaaaaaaaaaaaaaaaaaaaaaaaaaaaaaaaaaaaaaaaaaaaaaaaaaaaaa

SEQ ID NO: 5965 - RNA, 5797 nt, synthetic construct
  source 1..5797: mol_type = other RNA
aggaaataagagagaaaagaagagtaagaagaaatataagagccaccatggcccctaagaagaagcgtaaagtgagccggatggaacgcctcgtctacgaggtgcggcagaagtgcagaaacatcgaggacatctgcatctcctgcggatctctgaacgtgaccctggagcacccactgttcatcggcggcatgtgccagaactgtaaaaactgttttctggagtgtgcctatcaatacgacgatgacggctaccagagctactgcaccatctgttgcggcggaagagaggtgctgatgtgtggaaataacaactgctgccggtgcttctgcgtggaatgcgtggacctgctggtgggccccggcgccgcccaggccgctattaaggaagatccttggaactgctacatgtgcggccacaagggcacatacggcctgctgagacggagagaggactggcctagcagactgcagatgttcttcgccaataaccacgaccaggagttcgacccccctaaggtgtaccctcccgtccccgccgagaagagaaagcccatccgggtcctgagcctgttcgatggcatcgccaccggtctgctggtgctgaaggacctgggcatccaggtggataggtacattgcctccgaggtgtgcgaggactccatcaccgtgggaatggtgcgtcatcagggcaagatcatgtacgtgggcgacgtgcggagcgtgacacagaagcatatccaggagtggggccctttcgacctggtgatcggcggcagcccttgcaatgacctgagcatcgtgaacccagcccggaagggcctgtacgagggaaccggcagactgttcttcgagttttacagactgctgcacgacgcccggcctaaggaaggcgacgaccggcccttcttttggctgttcgagaatgtggtggccatgggagtcagcgacaagcgggatattagccggttcctggagagcaaccccgtgatgatcgatgccaaggaagtgagcgccgcccaccgggccagatacttctggggcaatctgcctggcatgaacagacccctggccagcaccgtgaacgacaagctggagctgcaggagtgcctggagcacggccggatcgccaagttcagcaaggtgagaaccatcaccacccgaagcaacagcatcaaacaaggcaaggaccagcactttcctgtgttcatgaacgagaaggaggacatcctgtggtgtaccgagatggagagagtgttcgggttcccagtccactacacagatgtcagcaacatgtctagactggccagacagagactgctgggaagaagctggtccgtccctgtgatcagacacctgttcgcccctctgaaggagtacttcgcctgcgtgagcagcggcaacagcaacgccaacagccggggccccagcttctctagcggcctggtgccactgtccctgagagggagccacatgggccccatggagatctacaaaaccgtgagcgcctggaagcggcagcctgtgcgcgtgctgagcctgtttcggaatatcgataaagtcctgaaaagcctgggattcctggagagcggctctggctccggcggtggcaccctgaagtacgtggaggatgtgacaaacgtggtcagacgggatgtggagaagtggggccccttcgatctggtgtacggcagcacccaacccctgggcagctcttgtgaccggtgccctggctggtacatgtttcagttccaccggatcctgcagtacgccctgccgagacaggagtcccagcggccattcttttggattttcatggacaacttgctgctgaccgaggatgaccaggaaactaccactcggttcctgcagaccgaagccgtgaccctgcaggacgtgagaggccgggactaccagaacgccatgcgggtgtggtccaacatccctggactgaaaagcaagcacgcacctctgacccctaaagaagaggagtacctgcaggcccaggtgcggagcagaagcaagctggacgcccctaaggtggatctgctggtgaagaattgcctcctgcccctgagagagtacttcaagtatttcagccagaatagtctgcccctgggcggcccaagcagcggcgcccctcctcccagcggcggcagcccagccggctccccaacctctaccgaggagggcacctctgagtccgccacccccgagagcggccctggcacctccaccgagcccagcgagggcagcgcacccggcagccctgccggcagccccacctccacagaggagggaaccagcaccgagcccagcgaaggcagcgccccaggcaccagcaccgagcctagtgagggcggctctggcggcggcagcgcccaggagattaaacggatcaacaagatcagaagaagacttgtgaaagacagcaacaccaagaaggccggcaagacaggccccatgaaaaccctgctggttagagtgatgacacccgatctgagagagcggctggaaaacctgagaaagaagcctgaaaatatcccccagcccatcagcaatacatctagagccaacctgaataagctgctgaccgattacaccgaaatgaagaaggcgatcctgcatgtgtactgggaagagttccagaaggaccctgtgggcctgatgagccgggtggcccagcctgccagcaagaagatcgatcagaacaagctgaaacctgagatggacgagaagggcaacctgaccaccgccggctttgcctgctctcagtgtggccagcccctgttcgtgtacaagctggagcaggtgtctgagaagggcaaggcttacaccaactacttcggacggtgcaatgtggccgagcacgaaaagctgatcctgctggcccagctgaagcccgagaaggatagcgacgaagccgtgacatatagcctgggaaagtttgggcagagggccctggatttctacagcattcatgtgaccaaggagtccacccaccccgtgaagcccctggcccagatcgccggaaacagatacgcctccggacctgtgggaaaggccctgagcgacgcatgtatgggcacaatcgcctccttcctgtctaagtaccaggacatcatcatcgaacaccagaaggtggtgaagggcaaccagaagagactggagagcctgcgggagctggccggcaaggaaaacctggaataccctagcgtgaccctgccacctcagcctcacaccaaggagggcgttgatgcctacaacgaagtgatcgcccgggtgcgaatgtgggtgaacctgaacctgtggcagaagctgaagctaagcagagatgatgccaagcctctgctgagactgaagggattcccttcctttcctctggtcgagagacaggccaacgaagtggactggtgggacatggtgtgtaacgtgaagaagctgatcaacgagaaaaaggaggatggcaaggtgttttggcagaatctggctggctacaagagacaggaagccctgagaccatacctgagcagcgaggaagatcggaagaagggaaagaaattcgctcggtaccagctgggcgacctgctgctgcacctggaaaagaagcacggcgaggactggggaaaggtgtacgacgaggcctgggagcggattgacaagaaagtggaaggcctgagcaagcacatcaagctggaagaggaacggagaagcgaggacgcccagagcaaggccgccctgaccgactggctgcgggctaaggccagcttcgtgatcgagggcctgaaggaggccgacaaggacgagttctgcagatgcgagctgaagctgcagaagtggtacggggacctgcggggaaagcccttcgccatcgaagccgagaacagcatcctggacatcagcggcttcagcaagcagtacaactgtgccttcatctggcagaaggacggcgtgaagaagctgaacctgtacctgatcatcaactacttcaagggcggcaagctgcggttcaagaagatcaaacctgaagccttcgaagccaacagattctacaccgtgatcaacaaaaagagcggcgagatcgtgcccatggaggtgaacttcaacttcgacgaccccaacctgatcatcctgcctctggcctttggcaagagacagggcagagaattcatctggaacgacctgctgtccctggaaaccggcagcctgaagctggccaacggaagagtgatcgagaagacactgtacaacagaagaacccggcaggatgagcctgccctgttcgtggccctgaccttcgagcggcgggaggtcctggactcctccaatatcaaaccaatgaacctgatcggcgtggcaagaggcgaaaacatccccgccgtgatcgccctgaccgaccccgagggctgcccactgagccggtttaaggatagcctgggaaacccaacccacatcctgagaatcggcgagagctataaggagaagcagcggaccatccaggccaagaaggaggtggagcagcggagagccggcggctacagccggaagtacgccagcaaagccaagaatctggcagacgatatggtgagaaacaccgctagagatctgctgtactacgccgtgacccaggatgccatgctgatcttcgccaacctgagccggggcttcggccggcagggcaagcggaccttcatggccgagagacagtacacacggatggaggactggctgaccgccaagctggcctacgagggcctgagcaagacctacctgtccaagacactggcccagtacacctccaagacatgcagcaactgtgggtttaccatcaccagcgccgactacgacagggtgctggagaagctgaagaagacagcaacaggctggatgaccacaattaacggcaaggagctgaaggtggagggccagattacctactacaacagatacaagagacagaacgtagtcaaggacctgtccgtcgagctggatagactgagcgaagaatctgtgaacaacgacatctcctcctggacaaagggcagaagcggagaagctctgagcctcctgaagaaaagattctcccatagacccgtgcaggagaagttcgtgtgcctgaactgcggcttcgagacacacgcagccgagcaagccgccctgaacatcgccagatcctggctgttcctgcggagccaggagtacaagaaataccagacaaacaagacaaccggcaacaccgataagagagccttcgtcgagacctggcagtccttttaccggaagaagcttaaggaggtgtggaaacctgccgtgcggtctggcggatctggcggaggctccacaagcagcaaggcccccatcaccttcggcgacctggccatctacttcagccaggaggagtgggagtggctgagccccatccagaaggacctgtacgaggacgtgatgctggagaactacaggaacctggtgagcctgggcctgagcttcaggaggcccaacgtgatcaccctgctggagaagggcaaggccccctggatggtggagcccgtgaggaggaggcaggcccccgacagcggcagcaagtgcaccagccccaagaaaaagagaaaagtctaagctgccttctgcggggcttgccttctggccatgcccttcttctctcccttgcacctgtacctcttggtctttgaataaagcctgagtaggaaggctagcaaaaaaaaaaaaaaaaaaaaaaaaaaaaaaaaaaaaaaaaaaaaaaaaaaaaaaaaaaaaaaaaaaaaaaaaaaaaaaaa

SEQ ID NO: 5966 - RNA, 5797 nt, synthetic construct
  source 1..5797: mol_type = other RNA
aggaaataagagagaaaagaagagtaagaagaaatataagagccaccatggcccctaagaagaagcgtaaagtgagccggatggaacgcctcgtctacgaggtgcggcagaagtgcagaaacatcgaggacatctgcatctcctgcggatctctgaacgtgaccctggagcacccactgttcatcggcggcatgtgccagaactgtaaaaactgttttctggagtgtgcctatcaatacgacgatgacggctaccagagctactgcaccatctgttgcggcggaagagaggtgctgatgtgtggaaataacaactgctgccggtgcttctgcgtggaatgcgtggacctgctggtgggccccggcgccgcccaggccgctattaaggaagatccttggaactgctacatgtgcggccacaagggcacatacggcctgctgagacggagagaggactggcctagcagactgcagatgttcttcgccaataaccacgaccaggagttcgacccccctaaggtgtaccctcccgtccccgccgagaagagaaagcccatccgggtcctgagcctgttcgatggcatcgccaccggtctgctggtgctgaaggacctgggcatccaggtggataggtacattgcctccgaggtgtgcgaggactccatcaccgtgggaatggtgcgtcatcagggcaagatcatgtacgtgggcgacgtgcggagcgtgacacagaagcatatccaggagtggggccctttcgacctggtgatcggcggcagcccttgcaatgacctgagcatcgtgaacccagcccggaagggcctgtacgagggaaccggcagactgttcttcgagttttacagactgctgcacgacgcccggcctaaggaaggcgacgaccggcccttcttttggctgttcgagaatgtggtggccatgggagtcagcgacaagcgggatattagccggttcctggagagcaaccccgtgatgatcgatgccaaggaagtgagcgccgcccaccgggccagatacttctggggcaatctgcctggcatgaacagacccctggccagcaccgtgaacgacaagctggagctgcaggagtgcctggagcacggccggatcgccaagttcagcaaggtgagaaccatcaccacccgaagcaacagcatcaaacaaggcaaggaccagcactttcctgtgttcatgaacgagaaggaggacatcctgtggtgtaccgagatggagagagtgttcgggttcccagtccactacacagatgtcagcaacatgtctagactggccagacagagactgctgggaagaagctggtccgtccctgtgatcagacacctgttcgcccctctgaaggagtacttcgcctgcgtgagcagcggcaacagcaacgccaacagccggggccccagcttctctagcggcctggtgccactgtccctgagagggagccacatgggccccatggagatctacaaaaccgtgagcgcctggaagcggcagcctgtgcgcgtgctgagcctgtttcggaatatcgataaagtcctgaaaagcctgggattcctggagagcggctctggctccggcggtggcaccctgaagtacgtggaggatgtgacaaacgtggtcagacgggatgtggagaagtggggccccttcgatctggtgtacggcagcacccaacccctgggcagctcttgtgaccggtgccctggctggtacatgtttcagttccaccggatcctgcagtacgccctgccgagacaggagtcccagcggccattcttttggattttcatggacaacttgctgctgaccgaggatgaccaggaaactaccactcggttcctgcagaccgaagccgtgaccctgcaggacgtgagaggccgggactaccagaacgccatgcgggtgtggtccaacatccctggactgaaaagcaagcacgcacctctgacccctaaagaagaggagtacctgcaggcccaggtgcggagcagaagcaagctggacgcccctaaggtggatctgctggtgaagaattgcctcctgcccctgagagagtacttcaagtatttcagccagaatagtctgcccctgggcggcccaagcagcggcgcccctcctcccagcggcggcagcccagccggctccccaacctctaccgaggagggcacctctgagtccgccacccccgagagcggccctggcacctccaccgagcccagcgagggcagcgcacccggcagccctgccggcagccccacctccacagaggagggaaccagcaccgagcccagcgaaggcagcgccccaggcaccagcaccgagcctagtgagggcggctctggcggcggcagcgcccaggagattaaacggatcaacaagatcagaagaagacttgtgaaagacagcaacaccaagaaggccggcaagacaggccccatgaaaaccctgctggttagagtgatgacacccgatctgagagagcggctggaaaacctgagaaagaagcctgaaaatatcccccagcccatcagcaatacatctagagccaacctgaataagctgctgaccgattacaccgaaatgaagaaggcgatcctgcatgtgtactgggaagagttccagaaggaccctgtgggcctgatgagccgggtggcccagcctgccagcaagaagatcgatcagaacaagctgaaacctgagatggacgagaagggcaacctgaccaccgccggctttgcctgctctcagtgtggccagcccctgttcgtgtacaagctggagcaggtgtctgagaagggcaaggcttacaccaactacttcggacggtgcaatgtggccgagcacgaaaagctgatcctgctggcccagctgaagcccgagaaggatagcgacgaagccgtgacatatagcctgggaaagtttgggcagagggccctggatttctacagcattcatgtgaccaaggagtccacccaccccgtgaagcccctggcccagatcgccggaaacagatacgcctccggacctgtgggaaaggccctgagcgacgcatgtatgggcacaatcgcctccttcctgtctaagtaccaggacatcatcatcgaacaccagaaggtggtgaagggcaaccagaagagactggagagcctgcgggagctggccggcaaggaaaacctggaataccctagcgtgaccctgccacctcagcctcacaccaaggagggcgttgatgcctacaacgaagtgatcgcccgggtgcgaatgtgggtgaacctgaacctgtggcagaagctgaagctaagcagagatgatgccaagcctctgctgagactgaagggattcccttcctttcctctggtcgagagacaggccaacgaagtggactggtgggacatggtgtgtaacgtgaagaagctgatcaacgagaaaaaggaggatggcaaggtgttttggcagaatctggctggctacaagagacaggaagccctgagaccatacctgagcagcgaggaagatcggaagaagggaaagaaattcgctcggtaccagctgggcgacctgctgctgcacctggaaaagaagcacggcgaggactggggaaaggtgtacgacgaggcctgggagcggattgacaagaaagtggaaggcctgagcaagcacatcaagctggaagaggaacggagaagcgaggacgcccagagcaaggccgccctgaccgactggctgcgggctaaggccagcttcgtgatcgagggcctgaaggaggccgacaaggacgagttctgcagatgcgagctgaagctgcagaagtggtacggggacctgcggggaaagcccttcgccatcgaagccgagaacagcatcctggacatcagcggcttcagcaagcagtacaactgtgccttcatctggcagaaggacggcgtgaagaagctgaacctgtacctgatcatcaactacttcaagggcggcaagctgcggttcaagaagatcaaacctgaagccttcgaagccaacagattctacaccgtgatcaacaaaaagagcggcgagatcgtgcccatggaggtgaacttcaacttcgacgaccccaacctgatcatcctgcctctggcctttggcaagagacagggcagagaattcatctggaacgacctgctgtccctggaaaccggcagcctgaagctggccaacggaagagtgatcgagaagacactgtacaacagaagaacccggcaggatgagcctgccctgttcgtggccctgaccttcgagcggcgggaggtcctggactcctccaatatcaaaccaatgaacctgatcggcgtggcaagaggcgaaaacatccccgccgtgatcgccctgaccgaccccgagggctgcccactgagccggtttaaggatagcctgggaaacccaacccacatcctgagaatcggcgagagctataaggagaagcagcggaccatccaggccaagaaggaggtggagcagcggagagccggcggctacagccggaagtacgccagcaaagccaagaatctggcagacgatatggtgagaaacaccgctagagatctgctgtactacgccgtgacccaggatgccatgctgatcttcgccaacctgagccggggcttcggccggcagggcaagcggaccttcatggccgagagacagtacacacggatggaggactggctgaccgccaagctggcctacgagggcctgagcaagacctacctgtccaagacactggcccagtacacctccaagacatgcagcaactgtgggtttaccatcaccagcgccgactacgacagggtgctggagaagctgaagaagacagcaacaggctggatgaccacaattaacggcaaggagctgaaggtggagggccagattacctactacaacagatacaagagacagaacgtagtcaaggacctgtccgtcgagctggatagactgagcgaagaatctgtgaacaacgacatctcctcctggacaaagggcagaagcggagaagctctgagcctcctgaagaaaagattctcccatagacccgtgcaggagaagttcgtgtgcctgaactgcggcttcgagacacacgcagccgagcaagccgccctgaacatcgccagatcctggctgttcctgcggagccaggagtacaagaaataccagacaaacaagacaaccggcaacaccgataagagagccttcgtcgagacctggcagtccttttaccggaagaagcttaaggaggtgtggaaacctgccgtgcggtctggcggatctggcggaggctccacaagcatggtgaccttcgaggacgtggccgtgcacttcaccaagaccgagtggaccggcctgagccccgcccagagggccctgtacaggagcgtgatgctggagaacttcggcaacctgaccgccctgggctaccccgtgcccaagcccgccctgatcagcctgctggagggcggcgacatggcctggggcctggaggcccaggacgacccccccgccgagaggaccaagaacgtgtgcaaggtgatcaccagccccaagaaaaagagaaaagtctaagctgccttctgcggggcttgccttctggccatgcccttcttctctcccttgcacctgtacctcttggtctttgaataaagcctgagtaggaaggctagcaaaaaaaaaaaaaaaaaaaaaaaaaaaaaaaaaaaaaaaaaaaaaaaaaaaaaaaaaaaaaaaaaaaaaaaaaaaaaaaa

SEQ ID NO: 5967 - RNA, 5797 nt, synthetic construct
  source 1..5797: mol_type = other RNA
aggaaataagagagaaaagaagagtaagaagaaatataagagccaccatggcccctaagaagaagcgtaaagtgagccggatggaacgcctcgtctacgaggtgcggcagaagtgcagaaacatcgaggacatctgcatctcctgcggatctctgaacgtgaccctggagcacccactgttcatcggcggcatgtgccagaactgtaaaaactgttttctggagtgtgcctatcaatacgacgatgacggctaccagagctactgcaccatctgttgcggcggaagagaggtgctgatgtgtggaaataacaactgctgccggtgcttctgcgtggaatgcgtggacctgctggtgggccccggcgccgcccaggccgctattaaggaagatccttggaactgctacatgtgcggccacaagggcacatacggcctgctgagacggagagaggactggcctagcagactgcagatgttcttcgccaataaccacgaccaggagttcgacccccctaaggtgtaccctcccgtccccgccgagaagagaaagcccatccgggtcctgagcctgttcgatggcatcgccaccggtctgctggtgctgaaggacctgggcatccaggtggataggtacattgcctccgaggtgtgcgaggactccatcaccgtgggaatggtgcgtcatcagggcaagatcatgtacgtgggcgacgtgcggagcgtgacacagaagcatatccaggagtggggccctttcgacctggtgatcggcggcagcccttgcaatgacctgagcatcgtgaacccagcccggaagggcctgtacgagggaaccggcagactgttcttcgagttttacagactgctgcacgacgcccggcctaaggaaggcgacgaccggcccttcttttggctgttcgagaatgtggtggccatgggagtcagcgacaagcgggatattagccggttcctggagagcaaccccgtgatgatcgatgccaaggaagtgagcgccgcccaccgggccagatacttctggggcaatctgcctggcatgaacagacccctggccagcaccgtgaacgacaagctggagctgcaggagtgcctggagcacggccggatcgccaagttcagcaaggtgagaaccatcaccacccgaagcaacagcatcaaacaaggcaaggaccagcactttcctgtgttcatgaacgagaaggaggacatcctgtggtgtaccgagatggagagagtgttcgggttcccagtccactacacagatgtcagcaacatgtctagactggccagacagagactgctgggaagaagctggtccgtccctgtgatcagacacctgttcgcccctctgaaggagtacttcgcctgcgtgagcagcggcaacagcaacgccaacagccggggccccagcttctctagcggcctggtgccactgtccctgagagggagccacatgggccccatggagatctacaaaaccgtgagcgcctggaagcggcagcctgtgcgcgtgctgagcctgtttcggaatatcgataaagtcctgaaaagcctgggattcctggagagcggctctggctccggcggtggcaccctgaagtacgtggaggatgtgacaaacgtggtcagacgggatgtggagaagtggggccccttcgatctggtgtacggcagcacccaacccctgggcagctcttgtgaccggtgccctggctggtacatgtttcagttccaccggatcctgcagtacgccctgccgagacaggagtcccagcggccattcttttggattttcatggacaacttgctgctgaccgaggatgaccaggaaactaccactcggttcctgcagaccgaagccgtgaccctgcaggacgtgagaggccgggactaccagaacgccatgcgggtgtggtccaacatccctggactgaaaagcaagcacgcacctctgacccctaaagaagaggagtacctgcaggcccaggtgcggagcagaagcaagctggacgcccctaaggtggatctgctggtgaagaattgcctcctgcccctgagagagtacttcaagtatttcagccagaatagtctgcccctgggcggcccaagcagcggcgcccctcctcccagcggcggcagcccagccggctccccaacctctaccgaggagggcacctctgagtccgccacccccgagagcggccctggcacctccaccgagcccagcgagggcagcgcacccggcagccctgccggcagccccacctccacagaggagggaaccagcaccgagcccagcgaaggcagcgccccaggcaccagcaccgagcctagtgagggcggctctggcggcggcagcgcccaggagattaaacggatcaacaagatcagaagaagacttgtgaaagacagcaacaccaagaaggccggcaagacaggccccatgaaaaccctgctggttagagtgatgacacccgatctgagagagcggctggaaaacctgagaaagaagcctgaaaatatcccccagcccatcagcaatacatctagagccaacctgaataagctgctgaccgattacaccgaaatgaagaaggcgatcctgcatgtgtactgggaagagttccagaaggaccctgtgggcctgatgagccgggtggcccagcctgccagcaagaagatcgatcagaacaagctgaaacctgagatggacgagaagggcaacctgaccaccgccggctttgcctgctctcagtgtggccagcccctgttcgtgtacaagctggagcaggtgtctgagaagggcaaggcttacaccaactacttcggacggtgcaatgtggccgagcacgaaaagctgatcctgctggcccagctgaagcccgagaaggatagcgacgaagccgtgacatatagcctgggaaagtttgggcagagggccctggatttctacagcattcatgtgaccaaggagtccacccaccccgtgaagcccctggcccagatcgccggaaacagatacgcctccggacctgtgggaaaggccctgagcgacgcatgtatgggcacaatcgcctccttcctgtctaagtaccaggacatcatcatcgaacaccagaaggtggtgaagggcaaccagaagagactggagagcctgcgggagctggccggcaaggaaaacctggaataccctagcgtgaccctgccacctcagcctcacaccaaggagggcgttgatgcctacaacgaagtgatcgcccgggtgcgaatgtgggtgaacctgaacctgtggcagaagctgaagctaagcagagatgatgccaagcctctgctgagactgaagggattcccttcctttcctctggtcgagagacaggccaacgaagtggactggtgggacatggtgtgtaacgtgaagaagctgatcaacgagaaaaaggaggatggcaaggtgttttggcagaatctggctggctacaagagacaggaagccctgagaccatacctgagcagcgaggaagatcggaagaagggaaagaaattcgctcggtaccagctgggcgacctgctgctgcacctggaaaagaagcacggcgaggactggggaaaggtgtacgacgaggcctgggagcggattgacaagaaagtggaaggcctgagcaagcacatcaagctggaagaggaacggagaagcgaggacgcccagagcaaggccgccctgaccgactggctgcgggctaaggccagcttcgtgatcgagggcctgaaggaggccgacaaggacgagttctgcagatgcgagctgaagctgcagaagtggtacggggacctgcggggaaagcccttcgccatcgaagccgagaacagcatcctggacatcagcggcttcagcaagcagtacaactgtgccttcatctggcagaaggacggcgtgaagaagctgaacctgtacctgatcatcaactacttcaagggcggcaagctgcggttcaagaagatcaaacctgaagccttcgaagccaacagattctacaccgtgatcaacaaaaagagcggcgagatcgtgcccatggaggtgaacttcaacttcgacgaccccaacctgatcatcctgcctctggcctttggcaagagacagggcagagaattcatctggaacgacctgctgtccctggaaaccggcagcctgaagctggccaacggaagagtgatcgagaagacactgtacaacagaagaacccggcaggatgagcctgccctgttcgtggccctgaccttcgagcggcgggaggtcctggactcctccaatatcaaaccaatgaacctgatcggcgtggcaagaggcgaaaacatccccgccgtgatcgccctgaccgaccccgagggctgcccactgagccggtttaaggatagcctgggaaacccaacccacatcctgagaatcggcgagagctataaggagaagcagcggaccatccaggccaagaaggaggtggagcagcggagagccggcggctacagccggaagtacgccagcaaagccaagaatctggcagacgatatggtgagaaacaccgctagagatctgctgtactacgccgtgacccaggatgccatgctgatcttcgccaacctgagccggggcttcggccggcagggcaagcggaccttcatggccgagagacagtacacacggatggaggactggctgaccgccaagctggcctacgagggcctgagcaagacctacctgtccaagacactggcccagtacacctccaagacatgcagcaactgtgggtttaccatcaccagcgccgactacgacagggtgctggagaagctgaagaagacagcaacaggctggatgaccacaattaacggcaaggagctgaaggtggagggccagattacctactacaacagatacaagagacagaacgtagtcaaggacctgtccgtcgagctggatagactgagcgaagaatctgtgaacaacgacatctcctcctggacaaagggcagaagcggagaagctctgagcctcctgaagaaaagattctcccatagacccgtgcaggagaagttcgtgtgcctgaactgcggcttcgagacacacgcagccgagcaagccgccctgaacatcgccagatcctggctgttcctgcggagccaggagtacaagaaataccagacaaacaagacaaccggcaacaccgataagagagccttcgtcgagacctggcagtccttttaccggaagaagcttaaggaggtgtggaaacctgccgtgcggtctggcggatctggcggaggctccacaagcagcaaggcccccgtgaccttcggcgacctggccatctacttcagccaggaggagtgggagtggctgagccccatccagaaggacctgtacgaggacgtgatgctggagaactaccagaacctggtgagcctgggcctgagcttcaggaggcccaacgtgatcaccctgctggagaagggcaaggccccctggatggtggagcccgtgaagaggaggaggggcctggacctgggcagcaagtgcaccagccccaagaaaaagagaaaagtctaagctgccttctgcggggcttgccttctggccatgcccttcttctctcccttgcacctgtacctcttggtctttgaataaagcctgagtaggaaggctagcaaaaaaaaaaaaaaaaaaaaaaaaaaaaaaaaaaaaaaaaaaaaaaaaaaaaaaaaaaaaaaaaaaaaaaaaaaaaaaaa

SEQ ID NO: 5968 - RNA, 5797 nt, synthetic construct
  source 1..5797: mol_type = other RNA
aggaaataagagagaaaagaagagtaagaagaaatataagagccaccatggcccctaagaagaagcgtaaagtgagccggatggaacgcctcgtctacgaggtgcggcagaagtgcagaaacatcgaggacatctgcatctcctgcggatctctgaacgtgaccctggagcacccactgttcatcggcggcatgtgccagaactgtaaaaactgttttctggagtgtgcctatcaatacgacgatgacggctaccagagctactgcaccatctgttgcggcggaagagaggtgctgatgtgtggaaataacaactgctgccggtgcttctgcgtggaatgcgtggacctgctggtgggccccggcgccgcccaggccgctattaaggaagatccttggaactgctacatgtgcggccacaagggcacatacggcctgctgagacggagagaggactggcctagcagactgcagatgttcttcgccaataaccacgaccaggagttcgacccccctaaggtgtaccctcccgtccccgccgagaagagaaagcccatccgggtcctgagcctgttcgatggcatcgccaccggtctgctggtgctgaaggacctgggcatccaggtggataggtacattgcctccgaggtgtgcgaggactccatcaccgtgggaatggtgcgtcatcagggcaagatcatgtacgtgggcgacgtgcggagcgtgacacagaagcatatccaggagtggggccctttcgacctggtgatcggcggcagcccttgcaatgacctgagcatcgtgaacccagcccggaagggcctgtacgagggaaccggcagactgttcttcgagttttacagactgctgcacgacgcccggcctaaggaaggcgacgaccggcccttcttttggctgttcgagaatgtggtggccatgggagtcagcgacaagcgggatattagccggttcctggagagcaaccccgtgatgatcgatgccaaggaagtgagcgccgcccaccgggccagatacttctggggcaatctgcctggcatgaacagacccctggccagcaccgtgaacgacaagctggagctgcaggagtgcctggagcacggccggatcgccaagttcagcaaggtgagaaccatcaccacccgaagcaacagcatcaaacaaggcaaggaccagcactttcctgtgttcatgaacgagaaggaggacatcctgtggtgtaccgagatggagagagtgttcgggttcccagtccactacacagatgtcagcaacatgtctagactggccagacagagactgctgggaagaagctggtccgtccctgtgatcagacacctgttcgcccctctgaaggagtacttcgcctgcgtgagcagcggcaacagcaacgccaacagccggggccccagcttctctagcggcctggtgccactgtccctgagagggagccacatgggccccatggagatctacaaaaccgtgagcgcctggaagcggcagcctgtgcgcgtgctgagcctgtttcggaatatcgataaagtcctgaaaagcctgggattcctggagagcggctctggctccggcggtggcaccctgaagtacgtggaggatgtgacaaacgtggtcagacgggatgtggagaagtggggccccttcgatctggtgtacggcagcacccaacccctgggcagctcttgtgaccggtgccctggctggtacatgtttcagttccaccggatcctgcagtacgccctgccgagacaggagtcccagcggccattcttttggattttcatggacaacttgctgctgaccgaggatgaccaggaaactaccactcggttcctgcagaccgaagccgtgaccctgcaggacgtgagaggccgggactaccagaacgccatgcgggtgtggtccaacatccctggactgaaaagcaagcacgcacctctgacccctaaagaagaggagtacctgcaggcccaggtgcggagcagaagcaagctggacgcccctaaggtggatctgctggtgaagaattgcctcctgcccctgagagagtacttcaagtatttcagccagaatagtctgcccctgggcggcccaagcagcggcgcccctcctcccagcggcggcagcccagccggctccccaacctctaccgaggagggcacctctgagtccgccacccccgagagcggccctggcacctccaccgagcccagcgagggcagcgcacccggcagccctgccggcagccccacctccacagaggagggaaccagcaccgagcccagcgaaggcagcgccccaggcaccagcaccgagcctagtgagggcggctctggcggcggcagcgcccaggagattaaacggatcaacaagatcagaagaagacttgtgaaagacagcaacaccaagaaggccggcaagacaggccccatgaaaaccctgctggttagagtgatgacacccgatctgagagagcggctggaaaacctgagaaagaagcctgaaaatatcccccagcccatcagcaatacatctagagccaacctgaataagctgctgaccgattacaccgaaatgaagaaggcgatcctgcatgtgtactgggaagagttccagaaggaccctgtgggcctgatgagccgggtggcccagcctgccagcaagaagatcgatcagaacaagctgaaacctgagatggacgagaagggcaacctgaccaccgccggctttgcctgctctcagtgtggccagcccctgttcgtgtacaagctggagcaggtgtctgagaagggcaaggcttacaccaactacttcggacggtgcaatgtggccgagcacgaaaagctgatcctgctggcccagctgaagcccgagaaggatagcgacgaagccgtgacatatagcctgggaaagtttgggcagagggccctggatttctacagcattcatgtgaccaaggagtccacccaccccgtgaagcccctggcccagatcgccggaaacagatacgcctccggacctgtgggaaaggccctgagcgacgcatgtatgggcacaatcgcctccttcctgtctaagtaccaggacatcatcatcgaacaccagaaggtggtgaagggcaaccagaagagactggagagcctgcgggagctggccggcaaggaaaacctggaataccctagcgtgaccctgccacctcagcctcacaccaaggagggcgttgatgcctacaacgaagtgatcgcccgggtgcgaatgtgggtgaacctgaacctgtggcagaagctgaagctaagcagagatgatgccaagcctctgctgagactgaagggattcccttcctttcctctggtcgagagacaggccaacgaagtggactggtgggacatggtgtgtaacgtgaagaagctgatcaacgagaaaaaggaggatggcaaggtgttttggcagaatctggctggctacaagagacaggaagccctgagaccatacctgagcagcgaggaagatcggaagaagggaaagaaattcgctcggtaccagctgggcgacctgctgctgcacctggaaaagaagcacggcgaggactggggaaaggtgtacgacgaggcctgggagcggattgacaagaaagtggaaggcctgagcaagcacatcaagctggaagaggaacggagaagcgaggacgcccagagcaaggccgccctgaccgactggctgcgggctaaggccagcttcgtgatcgagggcctgaaggaggccgacaaggacgagttctgcagatgcgagctgaagctgcagaagtggtacggggacctgcggggaaagcccttcgccatcgaagccgagaacagcatcctggacatcagcggcttcagcaagcagtacaactgtgccttcatctggcagaaggacggcgtgaagaagctgaacctgtacctgatcatcaactacttcaagggcggcaagctgcggttcaagaagatcaaacctgaagccttcgaagccaacagattctacaccgtgatcaacaaaaagagcggcgagatcgtgcccatggaggtgaacttcaacttcgacgaccccaacctgatcatcctgcctctggcctttggcaagagacagggcagagaattcatctggaacgacctgctgtccctggaaaccggcagcctgaagctggccaacggaagagtgatcgagaagacactgtacaacagaagaacccggcaggatgagcctgccctgttcgtggccctgaccttcgagcggcgggaggtcctggactcctccaatatcaaaccaatgaacctgatcggcgtggcaagaggcgaaaacatccccgccgtgatcgccctgaccgaccccgagggctgcccactgagccggtttaaggatagcctgggaaacccaacccacatcctgagaatcggcgagagctataaggagaagcagcggaccatccaggccaagaaggaggtggagcagcggagagccggcggctacagccggaagtacgccagcaaagccaagaatctggcagacgatatggtgagaaacaccgctagagatctgctgtactacgccgtgacccaggatgccatgctgatcttcgccaacctgagccggggcttcggccggcagggcaagcggaccttcatggccgagagacagtacacacggatggaggactggctgaccgccaagctggcctacgagggcctgagcaagacctacctgtccaagacactggcccagtacacctccaagacatgcagcaactgtgggtttaccatcaccagcgccgactacgacagggtgctggagaagctgaagaagacagcaacaggctggatgaccacaattaacggcaaggagctgaaggtggagggccagattacctactacaacagatacaagagacagaacgtagtcaaggacctgtccgtcgagctggatagactgagcgaagaatctgtgaacaacgacatctcctcctggacaaagggcagaagcggagaagctctgagcctcctgaagaaaagattctcccatagacccgtgcaggagaagttcgtgtgcctgaactgcggcttcgagacacacgcagccgagcaagccgccctgaacatcgccagatcctggctgttcctgcggagccaggagtacaagaaataccagacaaacaagacaaccggcaacaccgataagagagccttcgtcgagacctggcagtccttttaccggaagaagcttaaggaggtgtggaaacctgccgtgcggtctggcggatctggcggaggctccacaagcagcaaggcccccgtgaccttcggcgacctggccatctacttcagccaggaggagtgggagtggctgagccccatccagaaggacctgtacgaggacgtgatgctggagaactaccagaacctggtgagcctgggcctgagcttcaggaggcccaacgtgatcgccctgctggagaagggcaaggccccctggatggtggagcccgtgaagaggaggaggggcctggacagcggcagcaagtgcaccagccccaagaaaaagagaaaagtctaagctgccttctgcggggcttgccttctggccatgcccttcttctctcccttgcacctgtacctcttggtctttgaataaagcctgagtaggaaggctagcaaaaaaaaaaaaaaaaaaaaaaaaaaaaaaaaaaaaaaaaaaaaaaaaaaaaaaaaaaaaaaaaaaaaaaaaaaaaaaaa

SEQ ID NO: 5969 - RNA, 5797 nt, synthetic construct
  source 1..5797: mol_type = other RNA
aggaaataagagagaaaagaagagtaagaagaaatataagagccaccatggcccctaagaagaagcgtaaagtgagccggatggaacgcctcgtctacgaggtgcggcagaagtgcagaaacatcgaggacatctgcatctcctgcggatctctgaacgtgaccctggagcacccactgttcatcggcggcatgtgccagaactgtaaaaactgttttctggagtgtgcctatcaatacgacgatgacggctaccagagctactgcaccatctgttgcggcggaagagaggtgctgatgtgtggaaataacaactgctgccggtgcttctgcgtggaatgcgtggacctgctggtgggccccggcgccgcccaggccgctattaaggaagatccttggaactgctacatgtgcggccacaagggcacatacggcctgctgagacggagagaggactggcctagcagactgcagatgttcttcgccaataaccacgaccaggagttcgacccccctaaggtgtaccctcccgtccccgccgagaagagaaagcccatccgggtcctgagcctgttcgatggcatcgccaccggtctgctggtgctgaaggacctgggcatccaggtggataggtacattgcctccgaggtgtgcgaggactccatcaccgtgggaatggtgcgtcatcagggcaagatcatgtacgtgggcgacgtgcggagcgtgacacagaagcatatccaggagtggggccctttcgacctggtgatcggcggcagcccttgcaatgacctgagcatcgtgaacccagcccggaagggcctgtacgagggaaccggcagactgttcttcgagttttacagactgctgcacgacgcccggcctaaggaaggcgacgaccggcccttcttttggctgttcgagaatgtggtggccatgggagtcagcgacaagcgggatattagccggttcctggagagcaaccccgtgatgatcgatgccaaggaagtgagcgccgcccaccgggccagatacttctggggcaatctgcctggcatgaacagacccctggccagcaccgtgaacgacaagctggagctgcaggagtgcctggagcacggccggatcgccaagttcagcaaggtgagaaccatcaccacccgaagcaacagcatcaaacaaggcaaggaccagcactttcctgtgttcatgaacgagaaggaggacatcctgtggtgtaccgagatggagagagtgttcgggttcccagtccactacacagatgtcagcaacatgtctagactggccagacagagactgctgggaagaagctggtccgtccctgtgatcagacacctgttcgcccctctgaaggagtacttcgcctgcgtgagcagcggcaacagcaacgccaacagccggggccccagcttctctagcggcctggtgccactgtccctgagagggagccacatgggccccatggagatctacaaaaccgtgagcgcctggaagcggcagcctgtgcgcgtgctgagcctgtttcggaatatcgataaagtcctgaaaagcctgggattcctggagagcggctctggctccggcggtggcaccctgaagtacgtggaggatgtgacaaacgtggtcagacgggatgtggagaagtggggccccttcgatctggtgtacggcagcacccaacccctgggcagctcttgtgaccggtgccctggctggtacatgtttcagttccaccggatcctgcagtacgccctgccgagacaggagtcccagcggccattcttttggattttcatggacaacttgctgctgaccgaggatgaccaggaaactaccactcggttcctgcagaccgaagccgtgaccctgcaggacgtgagaggccgggactaccagaacgccatgcgggtgtggtccaacatccctggactgaaaagcaagcacgcacctctgacccctaaagaagaggagtacctgcaggcccaggtgcggagcagaagcaagctggacgcccctaaggtggatctgctggtgaagaattgcctcctgcccctgagagagtacttcaagtatttcagccagaatagtctgcccctgggcggcccaagcagcggcgcccctcctcccagcggcggcagcccagccggctccccaacctctaccgaggagggcacctctgagtccgccacccccgagagcggccctggcacctccaccgagcccagcgagggcagcgcacccggcagccctgccggcagccccacctccacagaggagggaaccagcaccgagcccagcgaaggcagcgccccaggcaccagcaccgagcctagtgagggcggctctggcggcggcagcgcccaggagattaaacggatcaacaagatcagaagaagacttgtgaaagacagcaacaccaagaaggccggcaagacaggccccatgaaaaccctgctggttagagtgatgacacccgatctgagagagcggctggaaaacctgagaaagaagcctgaaaatatcccccagcccatcagcaatacatctagagccaacctgaataagctgctgaccgattacaccgaaatgaagaaggcgatcctgcatgtgtactgggaagagttccagaaggaccctgtgggcctgatgagccgggtggcccagcctgccagcaagaagatcgatcagaacaagctgaaacctgagatggacgagaagggcaacctgaccaccgccggctttgcctgctctcagtgtggccagcccctgttcgtgtacaagctggagcaggtgtctgagaagggcaaggcttacaccaactacttcggacggtgcaatgtggccgagcacgaaaagctgatcctgctggcccagctgaagcccgagaaggatagcgacgaagccgtgacatatagcctgggaaagtttgggcagagggccctggatttctacagcattcatgtgaccaaggagtccacccaccccgtgaagcccctggcccagatcgccggaaacagatacgcctccggacctgtgggaaaggccctgagcgacgcatgtatgggcacaatcgcctccttcctgtctaagtaccaggacatcatcatcgaacaccagaaggtggtgaagggcaaccagaagagactggagagcctgcgggagctggccggcaaggaaaacctggaataccctagcgtgaccctgccacctcagcctcacaccaaggagggcgttgatgcctacaacgaagtgatcgcccgggtgcgaatgtgggtgaacctgaacctgtggcagaagctgaagctaagcagagatgatgccaagcctctgctgagactgaagggattcccttcctttcctctggtcgagagacaggccaacgaagtggactggtgggacatggtgtgtaacgtgaagaagctgatcaacgagaaaaaggaggatggcaaggtgttttggcagaatctggctggctacaagagacaggaagccctgagaccatacctgagcagcgaggaagatcggaagaagggaaagaaattcgctcggtaccagctgggcgacctgctgctgcacctggaaaagaagcacggcgaggactggggaaaggtgtacgacgaggcctgggagcggattgacaagaaagtggaaggcctgagcaagcacatcaagctggaagaggaacggagaagcgaggacgcccagagcaaggccgccctgaccgactggctgcgggctaaggccagcttcgtgatcgagggcctgaaggaggccgacaaggacgagttctgcagatgcgagctgaagctgcagaagtggtacggggacctgcggggaaagcccttcgccatcgaagccgagaacagcatcctggacatcagcggcttcagcaagcagtacaactgtgccttcatctggcagaaggacggcgtgaagaagctgaacctgtacctgatcatcaactacttcaagggcggcaagctgcggttcaagaagatcaaacctgaagccttcgaagccaacagattctacaccgtgatcaacaaaaagagcggcgagatcgtgcccatggaggtgaacttcaacttcgacgaccccaacctgatcatcctgcctctggcctttggcaagagacagggcagagaattcatctggaacgacctgctgtccctggaaaccggcagcctgaagctggccaacggaagagtgatcgagaagacactgtacaacagaagaacccggcaggatgagcctgccctgttcgtggccctgaccttcgagcggcgggaggtcctggactcctccaatatcaaaccaatgaacctgatcggcgtggcaagaggcgaaaacatccccgccgtgatcgccctgaccgaccccgagggctgcccactgagccggtttaaggatagcctgggaaacccaacccacatcctgagaatcggcgagagctataaggagaagcagcggaccatccaggccaagaaggaggtggagcagcggagagccggcggctacagccggaagtacgccagcaaagccaagaatctggcagacgatatggtgagaaacaccgctagagatctgctgtactacgccgtgacccaggatgccatgctgatcttcgccaacctgagccggggcttcggccggcagggcaagcggaccttcatggccgagagacagtacacacggatggaggactggctgaccgccaagctggcctacgagggcctgagcaagacctacctgtccaagacactggcccagtacacctccaagacatgcagcaactgtgggtttaccatcaccagcgccgactacgacagggtgctggagaagctgaagaagacagcaacaggctggatgaccacaattaacggcaaggagctgaaggtggagggccagattacctactacaacagatacaagagacagaacgtagtcaaggacctgtccgtcgagctggatagactgagcgaagaatctgtgaacaacgacatctcctcctggacaaagggcagaagcggagaagctctgagcctcctgaagaaaagattctcccatagacccgtgcaggagaagttcgtgtgcctgaactgcggcttcgagacacacgcagccgagcaagccgccctgaacatcgccagatcctggctgttcctgcggagccaggagtacaagaaataccagacaaacaagacaaccggcaacaccgataagagagccttcgtcgagacctggcagtccttttaccggaagaagcttaaggaggtgtggaaacctgccgtgcggtctggcggatctggcggaggctccacaagcaggcccagggccctgaagttcgccgacgtggccgtgtacttcagcctggaggagtggggctgcctgaggcccgcccagaggaccctgtacaggaacgtgatgagggagacctacggccacctgggcgccctgggctgcgccggccccaagcccgccctgatcagctggctggagaggaacaccgacgactgggagcccgccgccctggacccccaggagtaccccaggggcgtgaccgtgcagaccagccccaagaaaaagagaaaagtctaagctgccttctgcggggcttgccttctggccatgcccttcttctctcccttgcacctgtacctcttggtctttgaataaagcctgagtaggaaggctagcaaaaaaaaaaaaaaaaaaaaaaaaaaaaaaaaaaaaaaaaaaaaaaaaaaaaaaaaaaaaaaaaaaaaaaaaaaaaaaaa

SEQ ID NO: 5970 - RNA, 5806 nt, synthetic construct
  source 1..5806: mol_type = other RNA
aggaaataagagagaaaagaagagtaagaagaaatataagagccaccatggcccctaagaagaagcgtaaagtgagccggatggaacgcctcgtctacgaggtgcggcagaagtgcagaaacatcgaggacatctgcatctcctgcggatctctgaacgtgaccctggagcacccactgttcatcggcggcatgtgccagaactgtaaaaactgttttctggagtgtgcctatcaatacgacgatgacggctaccagagctactgcaccatctgttgcggcggaagagaggtgctgatgtgtggaaataacaactgctgccggtgcttctgcgtggaatgcgtggacctgctggtgggccccggcgccgcccaggccgctattaaggaagatccttggaactgctacatgtgcggccacaagggcacatacggcctgctgagacggagagaggactggcctagcagactgcagatgttcttcgccaataaccacgaccaggagttcgacccccctaaggtgtaccctcccgtccccgccgagaagagaaagcccatccgggtcctgagcctgttcgatggcatcgccaccggtctgctggtgctgaaggacctgggcatccaggtggataggtacattgcctccgaggtgtgcgaggactccatcaccgtgggaatggtgcgtcatcagggcaagatcatgtacgtgggcgacgtgcggagcgtgacacagaagcatatccaggagtggggccctttcgacctggtgatcggcggcagcccttgcaatgacctgagcatcgtgaacccagcccggaagggcctgtacgagggaaccggcagactgttcttcgagttttacagactgctgcacgacgcccggcctaaggaaggcgacgaccggcccttcttttggctgttcgagaatgtggtggccatgggagtcagcgacaagcgggatattagccggttcctggagagcaaccccgtgatgatcgatgccaaggaagtgagcgccgcccaccgggccagatacttctggggcaatctgcctggcatgaacagacccctggccagcaccgtgaacgacaagctggagctgcaggagtgcctggagcacggccggatcgccaagttcagcaaggtgagaaccatcaccacccgaagcaacagcatcaaacaaggcaaggaccagcactttcctgtgttcatgaacgagaaggaggacatcctgtggtgtaccgagatggagagagtgttcgggttcccagtccactacacagatgtcagcaacatgtctagactggccagacagagactgctgggaagaagctggtccgtccctgtgatcagacacctgttcgcccctctgaaggagtacttcgcctgcgtgagcagcggcaacagcaacgccaacagccggggccccagcttctctagcggcctggtgccactgtccctgagagggagccacatgggccccatggagatctacaaaaccgtgagcgcctggaagcggcagcctgtgcgcgtgctgagcctgtttcggaatatcgataaagtcctgaaaagcctgggattcctggagagcggctctggctccggcggtggcaccctgaagtacgtggaggatgtgacaaacgtggtcagacgggatgtggagaagtggggccccttcgatctggtgtacggcagcacccaacccctgggcagctcttgtgaccggtgccctggctggtacatgtttcagttccaccggatcctgcagtacgccctgccgagacaggagtcccagcggccattcttttggattttcatggacaacttgctgctgaccgaggatgaccaggaaactaccactcggttcctgcagaccgaagccgtgaccctgcaggacgtgagaggccgggactaccagaacgccatgcgggtgtggtccaacatccctggactgaaaagcaagcacgcacctctgacccctaaagaagaggagtacctgcaggcccaggtgcggagcagaagcaagctggacgcccctaaggtggatctgctggtgaagaattgcctcctgcccctgagagagtacttcaagtatttcagccagaatagtctgcccctgggcggcccaagcagcggcgcccctcctcccagcggcggcagcccagccggctccccaacctctaccgaggagggcacctctgagtccgccacccccgagagcggccctggcacctccaccgagcccagcgagggcagcgcacccggcagccctgccggcagccccacctccacagaggagggaaccagcaccgagcccagcgaaggcagcgccccaggcaccagcaccgagcctagtgagggcggctctggcggcggcagcgcccaggagattaaacggatcaacaagatcagaagaagacttgtgaaagacagcaacaccaagaaggccggcaagacaggccccatgaaaaccctgctggttagagtgatgacacccgatctgagagagcggctggaaaacctgagaaagaagcctgaaaatatcccccagcccatcagcaatacatctagagccaacctgaataagctgctgaccgattacaccgaaatgaagaaggcgatcctgcatgtgtactgggaagagttccagaaggaccctgtgggcctgatgagccgggtggcccagcctgccagcaagaagatcgatcagaacaagctgaaacctgagatggacgagaagggcaacctgaccaccgccggctttgcctgctctcagtgtggccagcccctgttcgtgtacaagctggagcaggtgtctgagaagggcaaggcttacaccaactacttcggacggtgcaatgtggccgagcacgaaaagctgatcctgctggcccagctgaagcccgagaaggatagcgacgaagccgtgacatatagcctgggaaagtttgggcagagggccctggatttctacagcattcatgtgaccaaggagtccacccaccccgtgaagcccctggcccagatcgccggaaacagatacgcctccggacctgtgggaaaggccctgagcgacgcatgtatgggcacaatcgcctccttcctgtctaagtaccaggacatcatcatcgaacaccagaaggtggtgaagggcaaccagaagagactggagagcctgcgggagctggccggcaaggaaaacctggaataccctagcgtgaccctgccacctcagcctcacaccaaggagggcgttgatgcctacaacgaagtgatcgcccgggtgcgaatgtgggtgaacctgaacctgtggcagaagctgaagctaagcagagatgatgccaagcctctgctgagactgaagggattcccttcctttcctctggtcgagagacaggccaacgaagtggactggtgggacatggtgtgtaacgtgaagaagctgatcaacgagaaaaaggaggatggcaaggtgttttggcagaatctggctggctacaagagacaggaagccctgagaccatacctgagcagcgaggaagatcggaagaagggaaagaaattcgctcggtaccagctgggcgacctgctgctgcacctggaaaagaagcacggcgaggactggggaaaggtgtacgacgaggcctgggagcggattgacaagaaagtggaaggcctgagcaagcacatcaagctggaagaggaacggagaagcgaggacgcccagagcaaggccgccctgaccgactggctgcgggctaaggccagcttcgtgatcgagggcctgaaggaggccgacaaggacgagttctgcagatgcgagctgaagctgcagaagtggtacggggacctgcggggaaagcccttcgccatcgaagccgagaacagcatcctggacatcagcggcttcagcaagcagtacaactgtgccttcatctggcagaaggacggcgtgaagaagctgaacctgtacctgatcatcaactacttcaagggcggcaagctgcggttcaagaagatcaaacctgaagccttcgaagccaacagattctacaccgtgatcaacaaaaagagcggcgagatcgtgcccatggaggtgaacttcaacttcgacgaccccaacctgatcatcctgcctctggcctttggcaagagacagggcagagaattcatctggaacgacctgctgtccctggaaaccggcagcctgaagctggccaacggaagagtgatcgagaagacactgtacaacagaagaacccggcaggatgagcctgccctgttcgtggccctgaccttcgagcggcgggaggtcctggactcctccaatatcaaaccaatgaacctgatcggcgtggcaagaggcgaaaacatccccgccgtgatcgccctgaccgaccccgagggctgcccactgagccggtttaaggatagcctgggaaacccaacccacatcctgagaatcggcgagagctataaggagaagcagcggaccatccaggccaagaaggaggtggagcagcggagagccggcggctacagccggaagtacgccagcaaagccaagaatctggcagacgatatggtgagaaacaccgctagagatctgctgtactacgccgtgacccaggatgccatgctgatcttcgccaacctgagccggggcttcggccggcagggcaagcggaccttcatggccgagagacagtacacacggatggaggactggctgaccgccaagctggcctacgagggcctgagcaagacctacctgtccaagacactggcccagtacacctccaagacatgcagcaactgtgggtttaccatcaccagcgccgactacgacagggtgctggagaagctgaagaagacagcaacaggctggatgaccacaattaacggcaaggagctgaaggtggagggccagattacctactacaacagatacaagagacagaacgtagtcaaggacctgtccgtcgagctggatagactgagcgaagaatctgtgaacaacgacatctcctcctggacaaagggcagaagcggagaagctctgagcctcctgaagaaaagattctcccatagacccgtgcaggagaagttcgtgtgcctgaactgcggcttcgagacacacgcagccgagcaagccgccctgaacatcgccagatcctggctgttcctgcggagccaggagtacaagaaataccagacaaacaagacaaccggcaacaccgataagagagccttcgtcgagacctggcagtccttttaccggaagaagcttaaggaggtgtggaaacctgccgtgcggtctggcggatctggcggaggctccacaagcctgacctacgacgacgtgcagatcaacttcaccagcgaggagtggagcctgctggacaccagccagaagaacctgtacaaggacgtgatgctggagacctacaagaacctgaccgacatcggctacacctgggaggactgcagcatcgaggagcactgcgccagcagcaagaggaaggagaggcccaagaggagccagaccggcgagaagcccagcgcctacacccagtgcgccaaggacttcgcctacagcaccagccccaagaaaaagagaaaagtctaagctgccttctgcggggcttgccttctggccatgcccttcttctctcccttgcacctgtacctcttggtctttgaataaagcctgagtaggaaggctagcaaaaaaaaaaaaaaaaaaaaaaaaaaaaaaaaaaaaaaaaaaaaaaaaaaaaaaaaaaaaaaaaaaaaaaaaaaaaaaaa

SEQ ID NO: 5971 - RNA, 5797 nt, synthetic construct
  source 1..5797: mol_type = other RNA
aggaaataagagagaaaagaagagtaagaagaaatataagagccaccatggcccctaagaagaagcgtaaagtgagccggatggaacgcctcgtctacgaggtgcggcagaagtgcagaaacatcgaggacatctgcatctcctgcggatctctgaacgtgaccctggagcacccactgttcatcggcggcatgtgccagaactgtaaaaactgttttctggagtgtgcctatcaatacgacgatgacggctaccagagctactgcaccatctgttgcggcggaagagaggtgctgatgtgtggaaataacaactgctgccggtgcttctgcgtggaatgcgtggacctgctggtgggccccggcgccgcccaggccgctattaaggaagatccttggaactgctacatgtgcggccacaagggcacatacggcctgctgagacggagagaggactggcctagcagactgcagatgttcttcgccaataaccacgaccaggagttcgacccccctaaggtgtaccctcccgtccccgccgagaagagaaagcccatccgggtcctgagcctgttcgatggcatcgccaccggtctgctggtgctgaaggacctgggcatccaggtggataggtacattgcctccgaggtgtgcgaggactccatcaccgtgggaatggtgcgtcatcagggcaagatcatgtacgtgggcgacgtgcggagcgtgacacagaagcatatccaggagtggggccctttcgacctggtgatcggcggcagcccttgcaatgacctgagcatcgtgaacccagcccggaagggcctgtacgagggaaccggcagactgttcttcgagttttacagactgctgcacgacgcccggcctaaggaaggcgacgaccggcccttcttttggctgttcgagaatgtggtggccatgggagtcagcgacaagcgggatattagccggttcctggagagcaaccccgtgatgatcgatgccaaggaagtgagcgccgcccaccgggccagatacttctggggcaatctgcctggcatgaacagacccctggccagcaccgtgaacgacaagctggagctgcaggagtgcctggagcacggccggatcgccaagttcagcaaggtgagaaccatcaccacccgaagcaacagcatcaaacaaggcaaggaccagcactttcctgtgttcatgaacgagaaggaggacatcctgtggtgtaccgagatggagagagtgttcgggttcccagtccactacacagatgtcagcaacatgtctagactggccagacagagactgctgggaagaagctggtccgtccctgtgatcagacacctgttcgcccctctgaaggagtacttcgcctgcgtgagcagcggcaacagcaacgccaacagccggggccccagcttctctagcggcctggtgccactgtccctgagagggagccacatgggccccatggagatctacaaaaccgtgagcgcctggaagcggcagcctgtgcgcgtgctgagcctgtttcggaatatcgataaagtcctgaaaagcctgggattcctggagagcggctctggctccggcggtggcaccctgaagtacgtggaggatgtgacaaacgtggtcagacgggatgtggagaagtggggccccttcgatctggtgtacggcagcacccaacccctgggcagctcttgtgaccggtgccctggctggtacatgtttcagttccaccggatcctgcagtacgccctgccgagacaggagtcccagcggccattcttttggattttcatggacaacttgctgctgaccgaggatgaccaggaaactaccactcggttcctgcagaccgaagccgtgaccctgcaggacgtgagaggccgggactaccagaacgccatgcgggtgtggtccaacatccctggactgaaaagcaagcacgcacctctgacccctaaagaagaggagtacctgcaggcccaggtgcggagcagaagcaagctggacgcccctaaggtggatctgctggtgaagaattgcctcctgcccctgagagagtacttcaagtatttcagccagaatagtctgcccctgggcggcccaagcagcggcgcccctcctcccagcggcggcagcccagccggctccccaacctctaccgaggagggcacctctgagtccgccacccccgagagcggccctggcacctccaccgagcccagcgagggcagcgcacccggcagccctgccggcagccccacctccacagaggagggaaccagcaccgagcccagcgaaggcagcgccccaggcaccagcaccgagcctagtgagggcggctctggcggcggcagcgcccaggagattaaacggatcaacaagatcagaagaagacttgtgaaagacagcaacaccaagaaggccggcaagacaggccccatgaaaaccctgctggttagagtgatgacacccgatctgagagagcggctggaaaacctgagaaagaagcctgaaaatatcccccagcccatcagcaatacatctagagccaacctgaataagctgctgaccgattacaccgaaatgaagaaggcgatcctgcatgtgtactgggaagagttccagaaggaccctgtgggcctgatgagccgggtggcccagcctgccagcaagaagatcgatcagaacaagctgaaacctgagatggacgagaagggcaacctgaccaccgccggctttgcctgctctcagtgtggccagcccctgttcgtgtacaagctggagcaggtgtctgagaagggcaaggcttacaccaactacttcggacggtgcaatgtggccgagcacgaaaagctgatcctgctggcccagctgaagcccgagaaggatagcgacgaagccgtgacatatagcctgggaaagtttgggcagagggccctggatttctacagcattcatgtgaccaaggagtccacccaccccgtgaagcccctggcccagatcgccggaaacagatacgcctccggacctgtgggaaaggccctgagcgacgcatgtatgggcacaatcgcctccttcctgtctaagtaccaggacatcatcatcgaacaccagaaggtggtgaagggcaaccagaagagactggagagcctgcgggagctggccggcaaggaaaacctggaataccctagcgtgaccctgccacctcagcctcacaccaaggagggcgttgatgcctacaacgaagtgatcgcccgggtgcgaatgtgggtgaacctgaacctgtggcagaagctgaagctaagcagagatgatgccaagcctctgctgagactgaagggattcccttcctttcctctggtcgagagacaggccaacgaagtggactggtgggacatggtgtgtaacgtgaagaagctgatcaacgagaaaaaggaggatggcaaggtgttttggcagaatctggctggctacaagagacaggaagccctgagaccatacctgagcagcgaggaagatcggaagaagggaaagaaattcgctcggtaccagctgggcgacctgctgctgcacctggaaaagaagcacggcgaggactggggaaaggtgtacgacgaggcctgggagcggattgacaagaaagtggaaggcctgagcaagcacatcaagctggaagaggaacggagaagcgaggacgcccagagcaaggccgccctgaccgactggctgcgggctaaggccagcttcgtgatcgagggcctgaaggaggccgacaaggacgagttctgcagatgcgagctgaagctgcagaagtggtacggggacctgcggggaaagcccttcgccatcgaagccgagaacagcatcctggacatcagcggcttcagcaagcagtacaactgtgccttcatctggcagaaggacggcgtgaagaagctgaacctgtacctgatcatcaactacttcaagggcggcaagctgcggttcaagaagatcaaacctgaagccttcgaagccaacagattctacaccgtgatcaacaaaaagagcggcgagatcgtgcccatggaggtgaacttcaacttcgacgaccccaacctgatcatcctgcctctggcctttggcaagagacagggcagagaattcatctggaacgacctgctgtccctggaaaccggcagcctgaagctggccaacggaagagtgatcgagaagacactgtacaacagaagaacccggcaggatgagcctgccctgttcgtggccctgaccttcgagcggcgggaggtcctggactcctccaatatcaaaccaatgaacctgatcggcgtggcaagaggcgaaaacatccccgccgtgatcgccctgaccgaccccgagggctgcccactgagccggtttaaggatagcctgggaaacccaacccacatcctgagaatcggcgagagctataaggagaagcagcggaccatccaggccaagaaggaggtggagcagcggagagccggcggctacagccggaagtacgccagcaaagccaagaatctggcagacgatatggtgagaaacaccgctagagatctgctgtactacgccgtgacccaggatgccatgctgatcttcgccaacctgagccggggcttcggccggcagggcaagcggaccttcatggccgagagacagtacacacggatggaggactggctgaccgccaagctggcctacgagggcctgagcaagacctacctgtccaagacactggcccagtacacctccaagacatgcagcaactgtgggtttaccatcaccagcgccgactacgacagggtgctggagaagctgaagaagacagcaacaggctggatgaccacaattaacggcaaggagctgaaggtggagggccagattacctactacaacagatacaagagacagaacgtagtcaaggacctgtccgtcgagctggatagactgagcgaagaatctgtgaacaacgacatctcctcctggacaaagggcagaagcggagaagctctgagcctcctgaagaaaagattctcccatagacccgtgcaggagaagttcgtgtgcctgaactgcggcttcgagacacacgcagccgagcaagccgccctgaacatcgccagatcctggctgttcctgcggagccaggagtacaagaaataccagacaaacaagacaaccggcaacaccgataagagagccttcgtcgagacctggcagtccttttaccggaagaagcttaaggaggtgtggaaacctgccgtgcggtctggcggatctggcggaggctccacaagcaggcaggccttcctggccttcggcgacgtgaccgtggacttcacccagaaggagtggaggctgctgagccccgcccagagggccctgtacagggaggtgaccctggagaactacagccacctggtgagcctgggcatcctgcacagcaagcccgagctgatcaggaggctggagcagggcgaggccccctggggcgaggagaggaggaggaggcccggcccctgcgccggcatctacgccgagaccagccccaagaaaaagagaaaagtctaagctgccttctgcggggcttgccttctggccatgcccttcttctctcccttgcacctgtacctcttggtctttgaataaagcctgagtaggaaggctagcaaaaaaaaaaaaaaaaaaaaaaaaaaaaaaaaaaaaaaaaaaaaaaaaaaaaaaaaaaaaaaaaaaaaaaaaaaaaaaaa

SEQ ID NO: 5972 - RNA, 5797 nt, synthetic construct
  source 1..5797: mol_type = other RNA
aggaaataagagagaaaagaagagtaagaagaaatataagagccaccatggcccctaagaagaagcgtaaagtgagccggatggaacgcctcgtctacgaggtgcggcagaagtgcagaaacatcgaggacatctgcatctcctgcggatctctgaacgtgaccctggagcacccactgttcatcggcggcatgtgccagaactgtaaaaactgttttctggagtgtgcctatcaatacgacgatgacggctaccagagctactgcaccatctgttgcggcggaagagaggtgctgatgtgtggaaataacaactgctgccggtgcttctgcgtggaatgcgtggacctgctggtgggccccggcgccgcccaggccgctattaaggaagatccttggaactgctacatgtgcggccacaagggcacatacggcctgctgagacggagagaggactggcctagcagactgcagatgttcttcgccaataaccacgaccaggagttcgacccccctaaggtgtaccctcccgtccccgccgagaagagaaagcccatccgggtcctgagcctgttcgatggcatcgccaccggtctgctggtgctgaaggacctgggcatccaggtggataggtacattgcctccgaggtgtgcgaggactccatcaccgtgggaatggtgcgtcatcagggcaagatcatgtacgtgggcgacgtgcggagcgtgacacagaagcatatccaggagtggggccctttcgacctggtgatcggcggcagcccttgcaatgacctgagcatcgtgaacccagcccggaagggcctgtacgagggaaccggcagactgttcttcgagttttacagactgctgcacgacgcccggcctaaggaaggcgacgaccggcccttcttttggctgttcgagaatgtggtggccatgggagtcagcgacaagcgggatattagccggttcctggagagcaaccccgtgatgatcgatgccaaggaagtgagcgccgcccaccgggccagatacttctggggcaatctgcctggcatgaacagacccctggccagcaccgtgaacgacaagctggagctgcaggagtgcctggagcacggccggatcgccaagttcagcaaggtgagaaccatcaccacccgaagcaacagcatcaaacaaggcaaggaccagcactttcctgtgttcatgaacgagaaggaggacatcctgtggtgtaccgagatggagagagtgttcgggttcccagtccactacacagatgtcagcaacatgtctagactggccagacagagactgctgggaagaagctggtccgtccctgtgatcagacacctgttcgcccctctgaaggagtacttcgcctgcgtgagcagcggcaacagcaacgccaacagccggggccccagcttctctagcggcctggtgccactgtccctgagagggagccacatgggccccatggagatctacaaaaccgtgagcgcctggaagcggcagcctgtgcgcgtgctgagcctgtttcggaatatcgataaagtcctgaaaagcctgggattcctggagagcggctctggctccggcggtggcaccctgaagtacgtggaggatgtgacaaacgtggtcagacgggatgtggagaagtggggccccttcgatctggtgtacggcagcacccaacccctgggcagctcttgtgaccggtgccctggctggtacatgtttcagttccaccggatcctgcagtacgccctgccgagacaggagtcccagcggccattcttttggattttcatggacaacttgctgctgaccgaggatgaccaggaaactaccactcggttcctgcagaccgaagccgtgaccctgcaggacgtgagaggccgggactaccagaacgccatgcgggtgtggtccaacatccctggactgaaaagcaagcacgcacctctgacccctaaagaagaggagtacctgcaggcccaggtgcggagcagaagcaagctggacgcccctaaggtggatctgctggtgaagaattgcctcctgcccctgagagagtacttcaagtatttcagccagaatagtctgcccctgggcggcccaagcagcggcgcccctcctcccagcggcggcagcccagccggctccccaacctctaccgaggagggcacctctgagtccgccacccccgagagcggccctggcacctccaccgagcccagcgagggcagcgcacccggcagccctgccggcagccccacctccacagaggagggaaccagcaccgagcccagcgaaggcagcgccccaggcaccagcaccgagcctagtgagggcggctctggcggcggcagcgcccaggagattaaacggatcaacaagatcagaagaagacttgtgaaagacagcaacaccaagaaggccggcaagacaggccccatgaaaaccctgctggttagagtgatgacacccgatctgagagagcggctggaaaacctgagaaagaagcctgaaaatatcccccagcccatcagcaatacatctagagccaacctgaataagctgctgaccgattacaccgaaatgaagaaggcgatcctgcatgtgtactgggaagagttccagaaggaccctgtgggcctgatgagccgggtggcccagcctgccagcaagaagatcgatcagaacaagctgaaacctgagatggacgagaagggcaacctgaccaccgccggctttgcctgctctcagtgtggccagcccctgttcgtgtacaagctggagcaggtgtctgagaagggcaaggcttacaccaactacttcggacggtgcaatgtggccgagcacgaaaagctgatcctgctggcccagctgaagcccgagaaggatagcgacgaagccgtgacatatagcctgggaaagtttgggcagagggccctggatttctacagcattcatgtgaccaaggagtccacccaccccgtgaagcccctggcccagatcgccggaaacagatacgcctccggacctgtgggaaaggccctgagcgacgcatgtatgggcacaatcgcctccttcctgtctaagtaccaggacatcatcatcgaacaccagaaggtggtgaagggcaaccagaagagactggagagcctgcgggagctggccggcaaggaaaacctggaataccctagcgtgaccctgccacctcagcctcacaccaaggagggcgttgatgcctacaacgaagtgatcgcccgggtgcgaatgtgggtgaacctgaacctgtggcagaagctgaagctaagcagagatgatgccaagcctctgctgagactgaagggattcccttcctttcctctggtcgagagacaggccaacgaagtggactggtgggacatggtgtgtaacgtgaagaagctgatcaacgagaaaaaggaggatggcaaggtgttttggcagaatctggctggctacaagagacaggaagccctgagaccatacctgagcagcgaggaagatcggaagaagggaaagaaattcgctcggtaccagctgggcgacctgctgctgcacctggaaaagaagcacggcgaggactggggaaaggtgtacgacgaggcctgggagcggattgacaagaaagtggaaggcctgagcaagcacatcaagctggaagaggaacggagaagcgaggacgcccagagcaaggccgccctgaccgactggctgcgggctaaggccagcttcgtgatcgagggcctgaaggaggccgacaaggacgagttctgcagatgcgagctgaagctgcagaagtggtacggggacctgcggggaaagcccttcgccatcgaagccgagaacagcatcctggacatcagcggcttcagcaagcagtacaactgtgccttcatctggcagaaggacggcgtgaagaagctgaacctgtacctgatcatcaactacttcaagggcggcaagctgcggttcaagaagatcaaacctgaagccttcgaagccaacagattctacaccgtgatcaacaaaaagagcggcgagatcgtgcccatggaggtgaacttcaacttcgacgaccccaacctgatcatcctgcctctggcctttggcaagagacagggcagagaattcatctggaacgacctgctgtccctggaaaccggcagcctgaagctggccaacggaagagtgatcgagaagacactgtacaacagaagaacccggcaggatgagcctgccctgttcgtggccctgaccttcgagcggcgggaggtcctggactcctccaatatcaaaccaatgaacctgatcggcgtggcaagaggcgaaaacatccccgccgtgatcgccctgaccgaccccgagggctgcccactgagccggtttaaggatagcctgggaaacccaacccacatcctgagaatcggcgagagctataaggagaagcagcggaccatccaggccaagaaggaggtggagcagcggagagccggcggctacagccggaagtacgccagcaaagccaagaatctggcagacgatatggtgagaaacaccgctagagatctgctgtactacgccgtgacccaggatgccatgctgatcttcgccaacctgagccggggcttcggccggcagggcaagcggaccttcatggccgagagacagtacacacggatggaggactggctgaccgccaagctggcctacgagggcctgagcaagacctacctgtccaagacactggcccagtacacctccaagacatgcagcaactgtgggtttaccatcaccagcgccgactacgacagggtgctggagaagctgaagaagacagcaacaggctggatgaccacaattaacggcaaggagctgaaggtggagggccagattacctactacaacagatacaagagacagaacgtagtcaaggacctgtccgtcgagctggatagactgagcgaagaatctgtgaacaacgacatctcctcctggacaaagggcagaagcggagaagctctgagcctcctgaagaaaagattctcccatagacccgtgcaggagaagttcgtgtgcctgaactgcggcttcgagacacacgcagccgagcaagccgccctgaacatcgccagatcctggctgttcctgcggagccaggagtacaagaaataccagacaaacaagacaaccggcaacaccgataagagagccttcgtcgagacctggcagtccttttaccggaagaagcttaaggaggtgtggaaacctgccgtgcggtctggcggatctggcggaggctccacaagcaggcccagggccctgaagttcgtggacgtggccgtgtacttcagcagcgaggagtggggctgcctgaggcccgcccagagggccctgtacagggacgtgatgagggagacctacggccacctgggcgccctgggcttccccggccccaagcccgccctgatcagctggatggagcaggagagcgaggcctggagcagcgccgcccaggaccccgagaagggcgagaacctgggcggcgccaggaccagccccaagaaaaagagaaaagtctaagctgccttctgcggggcttgccttctggccatgcccttcttctctcccttgcacctgtacctcttggtctttgaataaagcctgagtaggaaggctagcaaaaaaaaaaaaaaaaaaaaaaaaaaaaaaaaaaaaaaaaaaaaaaaaaaaaaaaaaaaaaaaaaaaaaaaaaaaaaaaa

SEQ ID NO: 5973 - RNA, 5797 nt, synthetic construct
  source 1..5797: mol_type = other RNA
aggaaataagagagaaaagaagagtaagaagaaatataagagccaccatggcccctaagaagaagcgtaaagtgagccggatggaacgcctcgtctacgaggtgcggcagaagtgcagaaacatcgaggacatctgcatctcctgcggatctctgaacgtgaccctggagcacccactgttcatcggcggcatgtgccagaactgtaaaaactgttttctggagtgtgcctatcaatacgacgatgacggctaccagagctactgcaccatctgttgcggcggaagagaggtgctgatgtgtggaaataacaactgctgccggtgcttctgcgtggaatgcgtggacctgctggtgggccccggcgccgcccaggccgctattaaggaagatccttggaactgctacatgtgcggccacaagggcacatacggcctgctgagacggagagaggactggcctagcagactgcagatgttcttcgccaataaccacgaccaggagttcgacccccctaaggtgtaccctcccgtccccgccgagaagagaaagcccatccgggtcctgagcctgttcgatggcatcgccaccggtctgctggtgctgaaggacctgggcatccaggtggataggtacattgcctccgaggtgtgcgaggactccatcaccgtgggaatggtgcgtcatcagggcaagatcatgtacgtgggcgacgtgcggagcgtgacacagaagcatatccaggagtggggccctttcgacctggtgatcggcggcagcccttgcaatgacctgagcatcgtgaacccagcccggaagggcctgtacgagggaaccggcagactgttcttcgagttttacagactgctgcacgacgcccggcctaaggaaggcgacgaccggcccttcttttggctgttcgagaatgtggtggccatgggagtcagcgacaagcgggatattagccggttcctggagagcaaccccgtgatgatcgatgccaaggaagtgagcgccgcccaccgggccagatacttctggggcaatctgcctggcatgaacagacccctggccagcaccgtgaacgacaagctggagctgcaggagtgcctggagcacggccggatcgccaagttcagcaaggtgagaaccatcaccacccgaagcaacagcatcaaacaaggcaaggaccagcactttcctgtgttcatgaacgagaaggaggacatcctgtggtgtaccgagatggagagagtgttcgggttcccagtccactacacagatgtcagcaacatgtctagactggccagacagagactgctgggaagaagctggtccgtccctgtgatcagacacctgttcgcccctctgaaggagtacttcgcctgcgtgagcagcggcaacagcaacgccaacagccggggccccagcttctctagcggcctggtgccactgtccctgagagggagccacatgggccccatggagatctacaaaaccgtgagcgcctggaagcggcagcctgtgcgcgtgctgagcctgtttcggaatatcgataaagtcctgaaaagcctgggattcctggagagcggctctggctccggcggtggcaccctgaagtacgtggaggatgtgacaaacgtggtcagacgggatgtggagaagtggggccccttcgatctggtgtacggcagcacccaacccctgggcagctcttgtgaccggtgccctggctggtacatgtttcagttccaccggatcctgcagtacgccctgccgagacaggagtcccagcggccattcttttggattttcatggacaacttgctgctgaccgaggatgaccaggaaactaccactcggttcctgcagaccgaagccgtgaccctgcaggacgtgagaggccgggactaccagaacgccatgcgggtgtggtccaacatccctggactgaaaagcaagcacgcacctctgacccctaaagaagaggagtacctgcaggcccaggtgcggagcagaagcaagctggacgcccctaaggtggatctgctggtgaagaattgcctcctgcccctgagagagtacttcaagtatttcagccagaatagtctgcccctgggcggcccaagcagcggcgcccctcctcccagcggcggcagcccagccggctccccaacctctaccgaggagggcacctctgagtccgccacccccgagagcggccctggcacctccaccgagcccagcgagggcagcgcacccggcagccctgccggcagccccacctccacagaggagggaaccagcaccgagcccagcgaaggcagcgccccaggcaccagcaccgagcctagtgagggcggctctggcggcggcagcgcccaggagattaaacggatcaacaagatcagaagaagacttgtgaaagacagcaacaccaagaaggccggcaagacaggccccatgaaaaccctgctggttagagtgatgacacccgatctgagagagcggctggaaaacctgagaaagaagcctgaaaatatcccccagcccatcagcaatacatctagagccaacctgaataagctgctgaccgattacaccgaaatgaagaaggcgatcctgcatgtgtactgggaagagttccagaaggaccctgtgggcctgatgagccgggtggcccagcctgccagcaagaagatcgatcagaacaagctgaaacctgagatggacgagaagggcaacctgaccaccgccggctttgcctgctctcagtgtggccagcccctgttcgtgtacaagctggagcaggtgtctgagaagggcaaggcttacaccaactacttcggacggtgcaatgtggccgagcacgaaaagctgatcctgctggcccagctgaagcccgagaaggatagcgacgaagccgtgacatatagcctgggaaagtttgggcagagggccctggatttctacagcattcatgtgaccaaggagtccacccaccccgtgaagcccctggcccagatcgccggaaacagatacgcctccggacctgtgggaaaggccctgagcgacgcatgtatgggcacaatcgcctccttcctgtctaagtaccaggacatcatcatcgaacaccagaaggtggtgaagggcaaccagaagagactggagagcctgcgggagctggccggcaaggaaaacctggaataccctagcgtgaccctgccacctcagcctcacaccaaggagggcgttgatgcctacaacgaagtgatcgcccgggtgcgaatgtgggtgaacctgaacctgtggcagaagctgaagctaagcagagatgatgccaagcctctgctgagactgaagggattcccttcctttcctctggtcgagagacaggccaacgaagtggactggtgggacatggtgtgtaacgtgaagaagctgatcaacgagaaaaaggaggatggcaaggtgttttggcagaatctggctggctacaagagacaggaagccctgagaccatacctgagcagcgaggaagatcggaagaagggaaagaaattcgctcggtaccagctgggcgacctgctgctgcacctggaaaagaagcacggcgaggactggggaaaggtgtacgacgaggcctgggagcggattgacaagaaagtggaaggcctgagcaagcacatcaagctggaagaggaacggagaagcgaggacgcccagagcaaggccgccctgaccgactggctgcgggctaaggccagcttcgtgatcgagggcctgaaggaggccgacaaggacgagttctgcagatgcgagctgaagctgcagaagtggtacggggacctgcggggaaagcccttcgccatcgaagccgagaacagcatcctggacatcagcggcttcagcaagcagtacaactgtgccttcatctggcagaaggacggcgtgaagaagctgaacctgtacctgatcatcaactacttcaagggcggcaagctgcggttcaagaagatcaaacctgaagccttcgaagccaacagattctacaccgtgatcaacaaaaagagcggcgagatcgtgcccatggaggtgaacttcaacttcgacgaccccaacctgatcatcctgcctctggcctttggcaagagacagggcagagaattcatctggaacgacctgctgtccctggaaaccggcagcctgaagctggccaacggaagagtgatcgagaagacactgtacaacagaagaacccggcaggatgagcctgccctgttcgtggccctgaccttcgagcggcgggaggtcctggactcctccaatatcaaaccaatgaacctgatcggcgtggcaagaggcgaaaacatccccgccgtgatcgccctgaccgaccccgagggctgcccactgagccggtttaaggatagcctgggaaacccaacccacatcctgagaatcggcgagagctataaggagaagcagcggaccatccaggccaagaaggaggtggagcagcggagagccggcggctacagccggaagtacgccagcaaagccaagaatctggcagacgatatggtgagaaacaccgctagagatctgctgtactacgccgtgacccaggatgccatgctgatcttcgccaacctgagccggggcttcggccggcagggcaagcggaccttcatggccgagagacagtacacacggatggaggactggctgaccgccaagctggcctacgagggcctgagcaagacctacctgtccaagacactggcccagtacacctccaagacatgcagcaactgtgggtttaccatcaccagcgccgactacgacagggtgctggagaagctgaagaagacagcaacaggctggatgaccacaattaacggcaaggagctgaaggtggagggccagattacctactacaacagatacaagagacagaacgtagtcaaggacctgtccgtcgagctggatagactgagcgaagaatctgtgaacaacgacatctcctcctggacaaagggcagaagcggagaagctctgagcctcctgaagaaaagattctcccatagacccgtgcaggagaagttcgtgtgcctgaactgcggcttcgagacacacgcagccgagcaagccgccctgaacatcgccagatcctggctgttcctgcggagccaggagtacaagaaataccagacaaacaagacaaccggcaacaccgataagagagccttcgtcgagacctggcagtccttttaccggaagaagcttaaggaggtgtggaaacctgccgtgcggtctggcggatctggcggaggctccacaagcgagcccgtgaccttcgaggacgtggccgtgtacttcagccagaaccagtgggccagcctggacagcgcccagagggccctgtacagggaggtgatgctggagaactacgccaacgtggccagcctggtgagccccttccccaggcccgacctgatcagccagctggagaggggcgaggccccctgggaccccaacccctgggaggccgaggacctgaggggcatctgccccggcggcgagaggaccagccccaagaaaaagagaaaagtctaagctgccttctgcggggcttgccttctggccatgcccttcttctctcccttgcacctgtacctcttggtctttgaataaagcctgagtaggaaggctagcaaaaaaaaaaaaaaaaaaaaaaaaaaaaaaaaaaaaaaaaaaaaaaaaaaaaaaaaaaaaaaaaaaaaaaaaaaaaaaaa

SEQ ID NO: 5974 - RNA, 5797 nt, synthetic construct
  source 1..5797: mol_type = other RNA
aggaaataagagagaaaagaagagtaagaagaaatataagagccaccatggcccctaagaagaagcgtaaagtgagccggatggaacgcctcgtctacgaggtgcggcagaagtgcagaaacatcgaggacatctgcatctcctgcggatctctgaacgtgaccctggagcacccactgttcatcggcggcatgtgccagaactgtaaaaactgttttctggagtgtgcctatcaatacgacgatgacggctaccagagctactgcaccatctgttgcggcggaagagaggtgctgatgtgtggaaataacaactgctgccggtgcttctgcgtggaatgcgtggacctgctggtgggccccggcgccgcccaggccgctattaaggaagatccttggaactgctacatgtgcggccacaagggcacatacggcctgctgagacggagagaggactggcctagcagactgcagatgttcttcgccaataaccacgaccaggagttcgacccccctaaggtgtaccctcccgtccccgccgagaagagaaagcccatccgggtcctgagcctgttcgatggcatcgccaccggtctgctggtgctgaaggacctgggcatccaggtggataggtacattgcctccgaggtgtgcgaggactccatcaccgtgggaatggtgcgtcatcagggcaagatcatgtacgtgggcgacgtgcggagcgtgacacagaagcatatccaggagtggggccctttcgacctggtgatcggcggcagcccttgcaatgacctgagcatcgtgaacccagcccggaagggcctgtacgagggaaccggcagactgttcttcgagttttacagactgctgcacgacgcccggcctaaggaaggcgacgaccggcccttcttttggctgttcgagaatgtggtggccatgggagtcagcgacaagcgggatattagccggttcctggagagcaaccccgtgatgatcgatgccaaggaagtgagcgccgcccaccgggccagatacttctggggcaatctgcctggcatgaacagacccctggccagcaccgtgaacgacaagctggagctgcaggagtgcctggagcacggccggatcgccaagttcagcaaggtgagaaccatcaccacccgaagcaacagcatcaaacaaggcaaggaccagcactttcctgtgttcatgaacgagaaggaggacatcctgtggtgtaccgagatggagagagtgttcgggttcccagtccactacacagatgtcagcaacatgtctagactggccagacagagactgctgggaagaagctggtccgtccctgtgatcagacacctgttcgcccctctgaaggagtacttcgcctgcgtgagcagcggcaacagcaacgccaacagccggggccccagcttctctagcggcctggtgccactgtccctgagagggagccacatgggccccatggagatctacaaaaccgtgagcgcctggaagcggcagcctgtgcgcgtgctgagcctgtttcggaatatcgataaagtcctgaaaagcctgggattcctggagagcggctctggctccggcggtggcaccctgaagtacgtggaggatgtgacaaacgtggtcagacgggatgtggagaagtggggccccttcgatctggtgtacggcagcacccaacccctgggcagctcttgtgaccggtgccctggctggtacatgtttcagttccaccggatcctgcagtacgccctgccgagacaggagtcccagcggccattcttttggattttcatggacaacttgctgctgaccgaggatgaccaggaaactaccactcggttcctgcagaccgaagccgtgaccctgcaggacgtgagaggccgggactaccagaacgccatgcgggtgtggtccaacatccctggactgaaaagcaagcacgcacctctgacccctaaagaagaggagtacctgcaggcccaggtgcggagcagaagcaagctggacgcccctaaggtggatctgctggtgaagaattgcctcctgcccctgagagagtacttcaagtatttcagccagaatagtctgcccctgggcggcccaagcagcggcgcccctcctcccagcggcggcagcccagccggctccccaacctctaccgaggagggcacctctgagtccgccacccccgagagcggccctggcacctccaccgagcccagcgagggcagcgcacccggcagccctgccggcagccccacctccacagaggagggaaccagcaccgagcccagcgaaggcagcgccccaggcaccagcaccgagcctagtgagggcggctctggcggcggcagcgcccaggagattaaacggatcaacaagatcagaagaagacttgtgaaagacagcaacaccaagaaggccggcaagacaggccccatgaaaaccctgctggttagagtgatgacacccgatctgagagagcggctggaaaacctgagaaagaagcctgaaaatatcccccagcccatcagcaatacatctagagccaacctgaataagctgctgaccgattacaccgaaatgaagaaggcgatcctgcatgtgtactgggaagagttccagaaggaccctgtgggcctgatgagccgggtggcccagcctgccagcaagaagatcgatcagaacaagctgaaacctgagatggacgagaagggcaacctgaccaccgccggctttgcctgctctcagtgtggccagcccctgttcgtgtacaagctggagcaggtgtctgagaagggcaaggcttacaccaactacttcggacggtgcaatgtggccgagcacgaaaagctgatcctgctggcccagctgaagcccgagaaggatagcgacgaagccgtgacatatagcctgggaaagtttgggcagagggccctggatttctacagcattcatgtgaccaaggagtccacccaccccgtgaagcccctggcccagatcgccggaaacagatacgcctccggacctgtgggaaaggccctgagcgacgcatgtatgggcacaatcgcctccttcctgtctaagtaccaggacatcatcatcgaacaccagaaggtggtgaagggcaaccagaagagactggagagcctgcgggagctggccggcaaggaaaacctggaataccctagcgtgaccctgccacctcagcctcacaccaaggagggcgttgatgcctacaacgaagtgatcgcccgggtgcgaatgtgggtgaacctgaacctgtggcagaagctgaagctaagcagagatgatgccaagcctctgctgagactgaagggattcccttcctttcctctggtcgagagacaggccaacgaagtggactggtgggacatggtgtgtaacgtgaagaagctgatcaacgagaaaaaggaggatggcaaggtgttttggcagaatctggctggctacaagagacaggaagccctgagaccatacctgagcagcgaggaagatcggaagaagggaaagaaattcgctcggtaccagctgggcgacctgctgctgcacctggaaaagaagcacggcgaggactggggaaaggtgtacgacgaggcctgggagcggattgacaagaaagtggaaggcctgagcaagcacatcaagctggaagaggaacggagaagcgaggacgcccagagcaaggccgccctgaccgactggctgcgggctaaggccagcttcgtgatcgagggcctgaaggaggccgacaaggacgagttctgcagatgcgagctgaagctgcagaagtggtacggggacctgcggggaaagcccttcgccatcgaagccgagaacagcatcctggacatcagcggcttcagcaagcagtacaactgtgccttcatctggcagaaggacggcgtgaagaagctgaacctgtacctgatcatcaactacttcaagggcggcaagctgcggttcaagaagatcaaacctgaagccttcgaagccaacagattctacaccgtgatcaacaaaaagagcggcgagatcgtgcccatggaggtgaacttcaacttcgacgaccccaacctgatcatcctgcctctggcctttggcaagagacagggcagagaattcatctggaacgacctgctgtccctggaaaccggcagcctgaagctggccaacggaagagtgatcgagaagacactgtacaacagaagaacccggcaggatgagcctgccctgttcgtggccctgaccttcgagcggcgggaggtcctggactcctccaatatcaaaccaatgaacctgatcggcgtggcaagaggcgaaaacatccccgccgtgatcgccctgaccgaccccgagggctgcccactgagccggtttaaggatagcctgggaaacccaacccacatcctgagaatcggcgagagctataaggagaagcagcggaccatccaggccaagaaggaggtggagcagcggagagccggcggctacagccggaagtacgccagcaaagccaagaatctggcagacgatatggtgagaaacaccgctagagatctgctgtactacgccgtgacccaggatgccatgctgatcttcgccaacctgagccggggcttcggccggcagggcaagcggaccttcatggccgagagacagtacacacggatggaggactggctgaccgccaagctggcctacgagggcctgagcaagacctacctgtccaagacactggcccagtacacctccaagacatgcagcaactgtgggtttaccatcaccagcgccgactacgacagggtgctggagaagctgaagaagacagcaacaggctggatgaccacaattaacggcaaggagctgaaggtggagggccagattacctactacaacagatacaagagacagaacgtagtcaaggacctgtccgtcgagctggatagactgagcgaagaatctgtgaacaacgacatctcctcctggacaaagggcagaagcggagaagctctgagcctcctgaagaaaagattctcccatagacccgtgcaggagaagttcgtgtgcctgaactgcggcttcgagacacacgcagccgagcaagccgccctgaacatcgccagatcctggctgttcctgcggagccaggagtacaagaaataccagacaaacaagacaaccggcaacaccgataagagagccttcgtcgagacctggcagtccttttaccggaagaagcttaaggaggtgtggaaacctgccgtgcggtctggcggatctggcggaggctccacaagcatccacgagagcgtgaccttcgaggacgtggccgtgaacttcaccgacagggagtggcagtgcctgacccacgcccagaggcacctgtacaaggacgtgatgctggagaactacggcaacatggtgagcctgggcttccccttccccaagccccccctgatcagccacctggagagggagaccgagccctgggtgcaggacctgcaggacagggagagcctgagcagcttctaccccgtgagcaccagccccaagaaaaagagaaaagtctaagctgccttctgcggggcttgccttctggccatgcccttcttctctcccttgcacctgtacctcttggtctttgaataaagcctgagtaggaaggctagcaaaaaaaaaaaaaaaaaaaaaaaaaaaaaaaaaaaaaaaaaaaaaaaaaaaaaaaaaaaaaaaaaaaaaaaaaaaaaaaa

SEQ ID NO: 5975 - RNA, 5797 nt, synthetic construct
  source 1..5797: mol_type = other RNA
aggaaataagagagaaaagaagagtaagaagaaatataagagccaccatggcccctaagaagaagcgtaaagtgagccggatggaacgcctcgtctacgaggtgcggcagaagtgcagaaacatcgaggacatctgcatctcctgcggatctctgaacgtgaccctggagcacccactgttcatcggcggcatgtgccagaactgtaaaaactgttttctggagtgtgcctatcaatacgacgatgacggctaccagagctactgcaccatctgttgcggcggaagagaggtgctgatgtgtggaaataacaactgctgccggtgcttctgcgtggaatgcgtggacctgctggtgggccccggcgccgcccaggccgctattaaggaagatccttggaactgctacatgtgcggccacaagggcacatacggcctgctgagacggagagaggactggcctagcagactgcagatgttcttcgccaataaccacgaccaggagttcgacccccctaaggtgtaccctcccgtccccgccgagaagagaaagcccatccgggtcctgagcctgttcgatggcatcgccaccggtctgctggtgctgaaggacctgggcatccaggtggataggtacattgcctccgaggtgtgcgaggactccatcaccgtgggaatggtgcgtcatcagggcaagatcatgtacgtgggcgacgtgcggagcgtgacacagaagcatatccaggagtggggccctttcgacctggtgatcggcggcagcccttgcaatgacctgagcatcgtgaacccagcccggaagggcctgtacgagggaaccggcagactgttcttcgagttttacagactgctgcacgacgcccggcctaaggaaggcgacgaccggcccttcttttggctgttcgagaatgtggtggccatgggagtcagcgacaagcgggatattagccggttcctggagagcaaccccgtgatgatcgatgccaaggaagtgagcgccgcccaccgggccagatacttctggggcaatctgcctggcatgaacagacccctggccagcaccgtgaacgacaagctggagctgcaggagtgcctggagcacggccggatcgccaagttcagcaaggtgagaaccatcaccacccgaagcaacagcatcaaacaaggcaaggaccagcactttcctgtgttcatgaacgagaaggaggacatcctgtggtgtaccgagatggagagagtgttcgggttcccagtccactacacagatgtcagcaacatgtctagactggccagacagagactgctgggaagaagctggtccgtccctgtgatcagacacctgttcgcccctctgaaggagtacttcgcctgcgtgagcagcggcaacagcaacgccaacagccggggccccagcttctctagcggcctggtgccactgtccctgagagggagccacatgggccccatggagatctacaaaaccgtgagcgcctggaagcggcagcctgtgcgcgtgctgagcctgtttcggaatatcgataaagtcctgaaaagcctgggattcctggagagcggctctggctccggcggtggcaccctgaagtacgtggaggatgtgacaaacgtggtcagacgggatgtggagaagtggggccccttcgatctggtgtacggcagcacccaacccctgggcagctcttgtgaccggtgccctggctggtacatgtttcagttccaccggatcctgcagtacgccctgccgagacaggagtcccagcggccattcttttggattttcatggacaacttgctgctgaccgaggatgaccaggaaactaccactcggttcctgcagaccgaagccgtgaccctgcaggacgtgagaggccgggactaccagaacgccatgcgggtgtggtccaacatccctggactgaaaagcaagcacgcacctctgacccctaaagaagaggagtacctgcaggcccaggtgcggagcagaagcaagctggacgcccctaaggtggatctgctggtgaagaattgcctcctgcccctgagagagtacttcaagtatttcagccagaatagtctgcccctgggcggcccaagcagcggcgcccctcctcccagcggcggcagcccagccggctccccaacctctaccgaggagggcacctctgagtccgccacccccgagagcggccctggcacctccaccgagcccagcgagggcagcgcacccggcagccctgccggcagccccacctccacagaggagggaaccagcaccgagcccagcgaaggcagcgccccaggcaccagcaccgagcctagtgagggcggctctggcggcggcagcgcccaggagattaaacggatcaacaagatcagaagaagacttgtgaaagacagcaacaccaagaaggccggcaagacaggccccatgaaaaccctgctggttagagtgatgacacccgatctgagagagcggctggaaaacctgagaaagaagcctgaaaatatcccccagcccatcagcaatacatctagagccaacctgaataagctgctgaccgattacaccgaaatgaagaaggcgatcctgcatgtgtactgggaagagttccagaaggaccctgtgggcctgatgagccgggtggcccagcctgccagcaagaagatcgatcagaacaagctgaaacctgagatggacgagaagggcaacctgaccaccgccggctttgcctgctctcagtgtggccagcccctgttcgtgtacaagctggagcaggtgtctgagaagggcaaggcttacaccaactacttcggacggtgcaatgtggccgagcacgaaaagctgatcctgctggcccagctgaagcccgagaaggatagcgacgaagccgtgacatatagcctgggaaagtttgggcagagggccctggatttctacagcattcatgtgaccaaggagtccacccaccccgtgaagcccctggcccagatcgccggaaacagatacgcctccggacctgtgggaaaggccctgagcgacgcatgtatgggcacaatcgcctccttcctgtctaagtaccaggacatcatcatcgaacaccagaaggtggtgaagggcaaccagaagagactggagagcctgcgggagctggccggcaaggaaaacctggaataccctagcgtgaccctgccacctcagcctcacaccaaggagggcgttgatgcctacaacgaagtgatcgcccgggtgcgaatgtgggtgaacctgaacctgtggcagaagctgaagctaagcagagatgatgccaagcctctgctgagactgaagggattcccttcctttcctctggtcgagagacaggccaacgaagtggactggtgggacatggtgtgtaacgtgaagaagctgatcaacgagaaaaaggaggatggcaaggtgttttggcagaatctggctggctacaagagacaggaagccctgagaccatacctgagcagcgaggaagatcggaagaagggaaagaaattcgctcggtaccagctgggcgacctgctgctgcacctggaaaagaagcacggcgaggactggggaaaggtgtacgacgaggcctgggagcggattgacaagaaagtggaaggcctgagcaagcacatcaagctggaagaggaacggagaagcgaggacgcccagagcaaggccgccctgaccgactggctgcgggctaaggccagcttcgtgatcgagggcctgaaggaggccgacaaggacgagttctgcagatgcgagctgaagctgcagaagtggtacggggacctgcggggaaagcccttcgccatcgaagccgagaacagcatcctggacatcagcggcttcagcaagcagtacaactgtgccttcatctggcagaaggacggcgtgaagaagctgaacctgtacctgatcatcaactacttcaagggcggcaagctgcggttcaagaagatcaaacctgaagccttcgaagccaacagattctacaccgtgatcaacaaaaagagcggcgagatcgtgcccatggaggtgaacttcaacttcgacgaccccaacctgatcatcctgcctctggcctttggcaagagacagggcagagaattcatctggaacgacctgctgtccctggaaaccggcagcctgaagctggccaacggaagagtgatcgagaagacactgtacaacagaagaacccggcaggatgagcctgccctgttcgtggccctgaccttcgagcggcgggaggtcctggactcctccaatatcaaaccaatgaacctgatcggcgtggcaagaggcgaaaacatccccgccgtgatcgccctgaccgaccccgagggctgcccactgagccggtttaaggatagcctgggaaacccaacccacatcctgagaatcggcgagagctataaggagaagcagcggaccatccaggccaagaaggaggtggagcagcggagagccggcggctacagccggaagtacgccagcaaagccaagaatctggcagacgatatggtgagaaacaccgctagagatctgctgtactacgccgtgacccaggatgccatgctgatcttcgccaacctgagccggggcttcggccggcagggcaagcggaccttcatggccgagagacagtacacacggatggaggactggctgaccgccaagctggcctacgagggcctgagcaagacctacctgtccaagacactggcccagtacacctccaagacatgcagcaactgtgggtttaccatcaccagcgccgactacgacagggtgctggagaagctgaagaagacagcaacaggctggatgaccacaattaacggcaaggagctgaaggtggagggccagattacctactacaacagatacaagagacagaacgtagtcaaggacctgtccgtcgagctggatagactgagcgaagaatctgtgaacaacgacatctcctcctggacaaagggcagaagcggagaagctctgagcctcctgaagaaaagattctcccatagacccgtgcaggagaagttcgtgtgcctgaactgcggcttcgagacacacgcagccgagcaagccgccctgaacatcgccagatcctggctgttcctgcggagccaggagtacaagaaataccagacaaacaagacaaccggcaacaccgataagagagccttcgtcgagacctggcagtccttttaccggaagaagcttaaggaggtgtggaaacctgccgtgcggtctggcggatctggcggaggctccacaagcagccaggagcaggtgagcttcaaggacgtgtgcgtggacttcaccagggaggagtggtacctgctggaccccgcccagaagatcctgtacagggacgtgatcctggagaactacagccacctggtgagcgtgggcaactgcatcaccaagcccgaggtgatcttcaagatcgagcagggcgaggagccctggatcctggaggagaggttccccaagcagtgctgcagcgagaggaactggaagaccagccccaagaaaaagagaaaagtctaagctgccttctgcggggcttgccttctggccatgcccttcttctctcccttgcacctgtacctcttggtctttgaataaagcctgagtaggaaggctagcaaaaaaaaaaaaaaaaaaaaaaaaaaaaaaaaaaaaaaaaaaaaaaaaaaaaaaaaaaaaaaaaaaaaaaaaaaaaaaaa

SEQ ID NO: 5976 - RNA, 5794 nt, synthetic construct
  source 1..5794: mol_type = other RNA
aggaaataagagagaaaagaagagtaagaagaaatataagagccaccatggcccctaagaagaagcgtaaagtgagccggatggaacgcctcgtctacgaggtgcggcagaagtgcagaaacatcgaggacatctgcatctcctgcggatctctgaacgtgaccctggagcacccactgttcatcggcggcatgtgccagaactgtaaaaactgttttctggagtgtgcctatcaatacgacgatgacggctaccagagctactgcaccatctgttgcggcggaagagaggtgctgatgtgtggaaataacaactgctgccggtgcttctgcgtggaatgcgtggacctgctggtgggccccggcgccgcccaggccgctattaaggaagatccttggaactgctacatgtgcggccacaagggcacatacggcctgctgagacggagagaggactggcctagcagactgcagatgttcttcgccaataaccacgaccaggagttcgacccccctaaggtgtaccctcccgtccccgccgagaagagaaagcccatccgggtcctgagcctgttcgatggcatcgccaccggtctgctggtgctgaaggacctgggcatccaggtggataggtacattgcctccgaggtgtgcgaggactccatcaccgtgggaatggtgcgtcatcagggcaagatcatgtacgtgggcgacgtgcggagcgtgacacagaagcatatccaggagtggggccctttcgacctggtgatcggcggcagcccttgcaatgacctgagcatcgtgaacccagcccggaagggcctgtacgagggaaccggcagactgttcttcgagttttacagactgctgcacgacgcccggcctaaggaaggcgacgaccggcccttcttttggctgttcgagaatgtggtggccatgggagtcagcgacaagcgggatattagccggttcctggagagcaaccccgtgatgatcgatgccaaggaagtgagcgccgcccaccgggccagatacttctggggcaatctgcctggcatgaacagacccctggccagcaccgtgaacgacaagctggagctgcaggagtgcctggagcacggccggatcgccaagttcagcaaggtgagaaccatcaccacccgaagcaacagcatcaaacaaggcaaggaccagcactttcctgtgttcatgaacgagaaggaggacatcctgtggtgtaccgagatggagagagtgttcgggttcccagtccactacacagatgtcagcaacatgtctagactggccagacagagactgctgggaagaagctggtccgtccctgtgatcagacacctgttcgcccctctgaaggagtacttcgcctgcgtgagcagcggcaacagcaacgccaacagccggggccccagcttctctagcggcctggtgccactgtccctgagagggagccacatgggccccatggagatctacaaaaccgtgagcgcctggaagcggcagcctgtgcgcgtgctgagcctgtttcggaatatcgataaagtcctgaaaagcctgggattcctggagagcggctctggctccggcggtggcaccctgaagtacgtggaggatgtgacaaacgtggtcagacgggatgtggagaagtggggccccttcgatctggtgtacggcagcacccaacccctgggcagctcttgtgaccggtgccctggctggtacatgtttcagttccaccggatcctgcagtacgccctgccgagacaggagtcccagcggccattcttttggattttcatggacaacttgctgctgaccgaggatgaccaggaaactaccactcggttcctgcagaccgaagccgtgaccctgcaggacgtgagaggccgggactaccagaacgccatgcgggtgtggtccaacatccctggactgaaaagcaagcacgcacctctgacccctaaagaagaggagtacctgcaggcccaggtgcggagcagaagcaagctggacgcccctaaggtggatctgctggtgaagaattgcctcctgcccctgagagagtacttcaagtatttcagccagaatagtctgcccctgggcggcccaagcagcggcgcccctcctcccagcggcggcagcccagccggctccccaacctctaccgaggagggcacctctgagtccgccacccccgagagcggccctggcacctccaccgagcccagcgagggcagcgcacccggcagccctgccggcagccccacctccacagaggagggaaccagcaccgagcccagcgaaggcagcgccccaggcaccagcaccgagcctagtgagggcggctctggcggcggcagcgcccaggagattaaacggatcaacaagatcagaagaagacttgtgaaagacagcaacaccaagaaggccggcaagacaggccccatgaaaaccctgctggttagagtgatgacacccgatctgagagagcggctggaaaacctgagaaagaagcctgaaaatatcccccagcccatcagcaatacatctagagccaacctgaataagctgctgaccgattacaccgaaatgaagaaggcgatcctgcatgtgtactgggaagagttccagaaggaccctgtgggcctgatgagccgggtggcccagcctgccagcaagaagatcgatcagaacaagctgaaacctgagatggacgagaagggcaacctgaccaccgccggctttgcctgctctcagtgtggccagcccctgttcgtgtacaagctggagcaggtgtctgagaagggcaaggcttacaccaactacttcggacggtgcaatgtggccgagcacgaaaagctgatcctgctggcccagctgaagcccgagaaggatagcgacgaagccgtgacatatagcctgggaaagtttgggcagagggccctggatttctacagcattcatgtgaccaaggagtccacccaccccgtgaagcccctggcccagatcgccggaaacagatacgcctccggacctgtgggaaaggccctgagcgacgcatgtatgggcacaatcgcctccttcctgtctaagtaccaggacatcatcatcgaacaccagaaggtggtgaagggcaaccagaagagactggagagcctgcgggagctggccggcaaggaaaacctggaataccctagcgtgaccctgccacctcagcctcacaccaaggagggcgttgatgcctacaacgaagtgatcgcccgggtgcgaatgtgggtgaacctgaacctgtggcagaagctgaagctaagcagagatgatgccaagcctctgctgagactgaagggattcccttcctttcctctggtcgagagacaggccaacgaagtggactggtgggacatggtgtgtaacgtgaagaagctgatcaacgagaaaaaggaggatggcaaggtgttttggcagaatctggctggctacaagagacaggaagccctgagaccatacctgagcagcgaggaagatcggaagaagggaaagaaattcgctcggtaccagctgggcgacctgctgctgcacctggaaaagaagcacggcgaggactggggaaaggtgtacgacgaggcctgggagcggattgacaagaaagtggaaggcctgagcaagcacatcaagctggaagaggaacggagaagcgaggacgcccagagcaaggccgccctgaccgactggctgcgggctaaggccagcttcgtgatcgagggcctgaaggaggccgacaaggacgagttctgcagatgcgagctgaagctgcagaagtggtacggggacctgcggggaaagcccttcgccatcgaagccgagaacagcatcctggacatcagcggcttcagcaagcagtacaactgtgccttcatctggcagaaggacggcgtgaagaagctgaacctgtacctgatcatcaactacttcaagggcggcaagctgcggttcaagaagatcaaacctgaagccttcgaagccaacagattctacaccgtgatcaacaaaaagagcggcgagatcgtgcccatggaggtgaacttcaacttcgacgaccccaacctgatcatcctgcctctggcctttggcaagagacagggcagagaattcatctggaacgacctgctgtccctggaaaccggcagcctgaagctggccaacggaagagtgatcgagaagacactgtacaacagaagaacccggcaggatgagcctgccctgttcgtggccctgaccttcgagcggcgggaggtcctggactcctccaatatcaaaccaatgaacctgatcggcgtggcaagaggcgaaaacatccccgccgtgatcgccctgaccgaccccgagggctgcccactgagccggtttaaggatagcctgggaaacccaacccacatcctgagaatcggcgagagctataaggagaagcagcggaccatccaggccaagaaggaggtggagcagcggagagccggcggctacagccggaagtacgccagcaaagccaagaatctggcagacgatatggtgagaaacaccgctagagatctgctgtactacgccgtgacccaggatgccatgctgatcttcgccaacctgagccggggcttcggccggcagggcaagcggaccttcatggccgagagacagtacacacggatggaggactggctgaccgccaagctggcctacgagggcctgagcaagacctacctgtccaagacactggcccagtacacctccaagacatgcagcaactgtgggtttaccatcaccagcgccgactacgacagggtgctggagaagctgaagaagacagcaacaggctggatgaccacaattaacggcaaggagctgaaggtggagggccagattacctactacaacagatacaagagacagaacgtagtcaaggacctgtccgtcgagctggatagactgagcgaagaatctgtgaacaacgacatctcctcctggacaaagggcagaagcggagaagctctgagcctcctgaagaaaagattctcccatagacccgtgcaggagaagttcgtgtgcctgaactgcggcttcgagacacacgcagccgagcaagccgccctgaacatcgccagatcctggctgttcctgcggagccaggagtacaagaaataccagacaaacaagacaaccggcaacaccgataagagagccttcgtcgagacctggcagtccttttaccggaagaagcttaaggaggtgtggaaacctgccgtgcggtctggcggatctggcggaggctccacaagccaggaccccagcgccgagggcctgagcgaggaggtgcccgtggtgttcgaggagctgcccgtggtgttcgaggacgtggccgtgtacttcaccagagaggagtggggcatgctggacaagagacagaaggagctgtacagagacgtgatgagaatgaactacgagctgctggccagcctgggccccgccgccgccaagcccgacctgatcagcaagctggagagaagagccgccccctggaccagccccaagaaaaagagaaaagtctaagctgccttctgcggggcttgccttctggccatgcccttcttctctcccttgcacctgtacctcttggtctttgaataaagcctgagtaggaaggctagcaaaaaaaaaaaaaaaaaaaaaaaaaaaaaaaaaaaaaaaaaaaaaaaaaaaaaaaaaaaaaaaaaaaaaaaaaaaaaaaa

SEQ ID NO: 5977 - RNA, 5797 nt, synthetic construct
  source 1..5797: mol_type = other RNA
aggaaataagagagaaaagaagagtaagaagaaatataagagccaccatggcccctaagaagaagcgtaaagtgagccggatggaacgcctcgtctacgaggtgcggcagaagtgcagaaacatcgaggacatctgcatctcctgcggatctctgaacgtgaccctggagcacccactgttcatcggcggcatgtgccagaactgtaaaaactgttttctggagtgtgcctatcaatacgacgatgacggctaccagagctactgcaccatctgttgcggcggaagagaggtgctgatgtgtggaaataacaactgctgccggtgcttctgcgtggaatgcgtggacctgctggtgggccccggcgccgcccaggccgctattaaggaagatccttggaactgctacatgtgcggccacaagggcacatacggcctgctgagacggagagaggactggcctagcagactgcagatgttcttcgccaataaccacgaccaggagttcgacccccctaaggtgtaccctcccgtccccgccgagaagagaaagcccatccgggtcctgagcctgttcgatggcatcgccaccggtctgctggtgctgaaggacctgggcatccaggtggataggtacattgcctccgaggtgtgcgaggactccatcaccgtgggaatggtgcgtcatcagggcaagatcatgtacgtgggcgacgtgcggagcgtgacacagaagcatatccaggagtggggccctttcgacctggtgatcggcggcagcccttgcaatgacctgagcatcgtgaacccagcccggaagggcctgtacgagggaaccggcagactgttcttcgagttttacagactgctgcacgacgcccggcctaaggaaggcgacgaccggcccttcttttggctgttcgagaatgtggtggccatgggagtcagcgacaagcgggatattagccggttcctggagagcaaccccgtgatgatcgatgccaaggaagtgagcgccgcccaccgggccagatacttctggggcaatctgcctggcatgaacagacccctggccagcaccgtgaacgacaagctggagctgcaggagtgcctggagcacggccggatcgccaagttcagcaaggtgagaaccatcaccacccgaagcaacagcatcaaacaaggcaaggaccagcactttcctgtgttcatgaacgagaaggaggacatcctgtggtgtaccgagatggagagagtgttcgggttcccagtccactacacagatgtcagcaacatgtctagactggccagacagagactgctgggaagaagctggtccgtccctgtgatcagacacctgttcgcccctctgaaggagtacttcgcctgcgtgagcagcggcaacagcaacgccaacagccggggccccagcttctctagcggcctggtgccactgtccctgagagggagccacatgggccccatggagatctacaaaaccgtgagcgcctggaagcggcagcctgtgcgcgtgctgagcctgtttcggaatatcgataaagtcctgaaaagcctgggattcctggagagcggctctggctccggcggtggcaccctgaagtacgtggaggatgtgacaaacgtggtcagacgggatgtggagaagtggggccccttcgatctggtgtacggcagcacccaacccctgggcagctcttgtgaccggtgccctggctggtacatgtttcagttccaccggatcctgcagtacgccctgccgagacaggagtcccagcggccattcttttggattttcatggacaacttgctgctgaccgaggatgaccaggaaactaccactcggttcctgcagaccgaagccgtgaccctgcaggacgtgagaggccgggactaccagaacgccatgcgggtgtggtccaacatccctggactgaaaagcaagcacgcacctctgacccctaaagaagaggagtacctgcaggcccaggtgcggagcagaagcaagctggacgcccctaaggtggatctgctggtgaagaattgcctcctgcccctgagagagtacttcaagtatttcagccagaatagtctgcccctgggcggcccaagcagcggcgcccctcctcccagcggcggcagcccagccggctccccaacctctaccgaggagggcacctctgagtccgccacccccgagagcggccctggcacctccaccgagcccagcgagggcagcgcacccggcagccctgccggcagccccacctccacagaggagggaaccagcaccgagcccagcgaaggcagcgccccaggcaccagcaccgagcctagtgagggcggctctggcggcggcagcgcccaggagattaaacggatcaacaagatcagaagaagacttgtgaaagacagcaacaccaagaaggccggcaagacaggccccatgaaaaccctgctggttagagtgatgacacccgatctgagagagcggctggaaaacctgagaaagaagcctgaaaatatcccccagcccatcagcaatacatctagagccaacctgaataagctgctgaccgattacaccgaaatgaagaaggcgatcctgcatgtgtactgggaagagttccagaaggaccctgtgggcctgatgagccgggtggcccagcctgccagcaagaagatcgatcagaacaagctgaaacctgagatggacgagaagggcaacctgaccaccgccggctttgcctgctctcagtgtggccagcccctgttcgtgtacaagctggagcaggtgtctgagaagggcaaggcttacaccaactacttcggacggtgcaatgtggccgagcacgaaaagctgatcctgctggcccagctgaagcccgagaaggatagcgacgaagccgtgacatatagcctgggaaagtttgggcagagggccctggatttctacagcattcatgtgaccaaggagtccacccaccccgtgaagcccctggcccagatcgccggaaacagatacgcctccggacctgtgggaaaggccctgagcgacgcatgtatgggcacaatcgcctccttcctgtctaagtaccaggacatcatcatcgaacaccagaaggtggtgaagggcaaccagaagagactggagagcctgcgggagctggccggcaaggaaaacctggaataccctagcgtgaccctgccacctcagcctcacaccaaggagggcgttgatgcctacaacgaagtgatcgcccgggtgcgaatgtgggtgaacctgaacctgtggcagaagctgaagctaagcagagatgatgccaagcctctgctgagactgaagggattcccttcctttcctctggtcgagagacaggccaacgaagtggactggtgggacatggtgtgtaacgtgaagaagctgatcaacgagaaaaaggaggatggcaaggtgttttggcagaatctggctggctacaagagacaggaagccctgagaccatacctgagcagcgaggaagatcggaagaagggaaagaaattcgctcggtaccagctgggcgacctgctgctgcacctggaaaagaagcacggcgaggactggggaaaggtgtacgacgaggcctgggagcggattgacaagaaagtggaaggcctgagcaagcacatcaagctggaagaggaacggagaagcgaggacgcccagagcaaggccgccctgaccgactggctgcgggctaaggccagcttcgtgatcgagggcctgaaggaggccgacaaggacgagttctgcagatgcgagctgaagctgcagaagtggtacggggacctgcggggaaagcccttcgccatcgaagccgagaacagcatcctggacatcagcggcttcagcaagcagtacaactgtgccttcatctggcagaaggacggcgtgaagaagctgaacctgtacctgatcatcaactacttcaagggcggcaagctgcggttcaagaagatcaaacctgaagccttcgaagccaacagattctacaccgtgatcaacaaaaagagcggcgagatcgtgcccatggaggtgaacttcaacttcgacgaccccaacctgatcatcctgcctctggcctttggcaagagacagggcagagaattcatctggaacgacctgctgtccctggaaaccggcagcctgaagctggccaacggaagagtgatcgagaagacactgtacaacagaagaacccggcaggatgagcctgccctgttcgtggccctgaccttcgagcggcgggaggtcctggactcctccaatatcaaaccaatgaacctgatcggcgtggcaagaggcgaaaacatccccgccgtgatcgccctgaccgaccccgagggctgcccactgagccggtttaaggatagcctgggaaacccaacccacatcctgagaatcggcgagagctataaggagaagcagcggaccatccaggccaagaaggaggtggagcagcggagagccggcggctacagccggaagtacgccagcaaagccaagaatctggcagacgatatggtgagaaacaccgctagagatctgctgtactacgccgtgacccaggatgccatgctgatcttcgccaacctgagccggggcttcggccggcagggcaagcggaccttcatggccgagagacagtacacacggatggaggactggctgaccgccaagctggcctacgagggcctgagcaagacctacctgtccaagacactggcccagtacacctccaagacatgcagcaactgtgggtttaccatcaccagcgccgactacgacagggtgctggagaagctgaagaagacagcaacaggctggatgaccacaattaacggcaaggagctgaaggtggagggccagattacctactacaacagatacaagagacagaacgtagtcaaggacctgtccgtcgagctggatagactgagcgaagaatctgtgaacaacgacatctcctcctggacaaagggcagaagcggagaagctctgagcctcctgaagaaaagattctcccatagacccgtgcaggagaagttcgtgtgcctgaactgcggcttcgagacacacgcagccgagcaagccgccctgaacatcgccagatcctggctgttcctgcggagccaggagtacaagaaataccagacaaacaagacaaccggcaacaccgataagagagccttcgtcgagacctggcagtccttttaccggaagaagcttaaggaggtgtggaaacctgccgtgcggtctggcggatctggcggaggctccacaagcgtggtggagcccgtgagcttcgaggaggtggccgtgtacttcagcgaggaggagtgggccctgctggaccccggccagagggccctgtactgggccgtgatgcaggagaactacgaggccgtgagctggctgggcttcagcatccccaagcccgacctgatcacccagctggacaggggcgaggagccctgggtgcccgacctgcagcccagcaagaagctggagatcctgaggggcaccaggaccagccccaagaaaaagagaaaagtctaagctgccttctgcggggcttgccttctggccatgcccttcttctctcccttgcacctgtacctcttggtctttgaataaagcctgagtaggaaggctagcaaaaaaaaaaaaaaaaaaaaaaaaaaaaaaaaaaaaaaaaaaaaaaaaaaaaaaaaaaaaaaaaaaaaaaaaaaaaaaaa

SEQ ID NO: 5978 - RNA, 5797 nt, synthetic construct
  source 1..5797: mol_type = other RNA
aggaaataagagagaaaagaagagtaagaagaaatataagagccaccatggcccctaagaagaagcgtaaagtgagccggatggaacgcctcgtctacgaggtgcggcagaagtgcagaaacatcgaggacatctgcatctcctgcggatctctgaacgtgaccctggagcacccactgttcatcggcggcatgtgccagaactgtaaaaactgttttctggagtgtgcctatcaatacgacgatgacggctaccagagctactgcaccatctgttgcggcggaagagaggtgctgatgtgtggaaataacaactgctgccggtgcttctgcgtggaatgcgtggacctgctggtgggccccggcgccgcccaggccgctattaaggaagatccttggaactgctacatgtgcggccacaagggcacatacggcctgctgagacggagagaggactggcctagcagactgcagatgttcttcgccaataaccacgaccaggagttcgacccccctaaggtgtaccctcccgtccccgccgagaagagaaagcccatccgggtcctgagcctgttcgatggcatcgccaccggtctgctggtgctgaaggacctgggcatccaggtggataggtacattgcctccgaggtgtgcgaggactccatcaccgtgggaatggtgcgtcatcagggcaagatcatgtacgtgggcgacgtgcggagcgtgacacagaagcatatccaggagtggggccctttcgacctggtgatcggcggcagcccttgcaatgacctgagcatcgtgaacccagcccggaagggcctgtacgagggaaccggcagactgttcttcgagttttacagactgctgcacgacgcccggcctaaggaaggcgacgaccggcccttcttttggctgttcgagaatgtggtggccatgggagtcagcgacaagcgggatattagccggttcctggagagcaaccccgtgatgatcgatgccaaggaagtgagcgccgcccaccgggccagatacttctggggcaatctgcctggcatgaacagacccctggccagcaccgtgaacgacaagctggagctgcaggagtgcctggagcacggccggatcgccaagttcagcaaggtgagaaccatcaccacccgaagcaacagcatcaaacaaggcaaggaccagcactttcctgtgttcatgaacgagaaggaggacatcctgtggtgtaccgagatggagagagtgttcgggttcccagtccactacacagatgtcagcaacatgtctagactggccagacagagactgctgggaagaagctggtccgtccctgtgatcagacacctgttcgcccctctgaaggagtacttcgcctgcgtgagcagcggcaacagcaacgccaacagccggggccccagcttctctagcggcctggtgccactgtccctgagagggagccacatgggccccatggagatctacaaaaccgtgagcgcctggaagcggcagcctgtgcgcgtgctgagcctgtttcggaatatcgataaagtcctgaaaagcctgggattcctggagagcggctctggctccggcggtggcaccctgaagtacgtggaggatgtgacaaacgtggtcagacgggatgtggagaagtggggccccttcgatctggtgtacggcagcacccaacccctgggcagctcttgtgaccggtgccctggctggtacatgtttcagttccaccggatcctgcagtacgccctgccgagacaggagtcccagcggccattcttttggattttcatggacaacttgctgctgaccgaggatgaccaggaaactaccactcggttcctgcagaccgaagccgtgaccctgcaggacgtgagaggccgggactaccagaacgccatgcgggtgtggtccaacatccctggactgaaaagcaagcacgcacctctgacccctaaagaagaggagtacctgcaggcccaggtgcggagcagaagcaagctggacgcccctaaggtggatctgctggtgaagaattgcctcctgcccctgagagagtacttcaagtatttcagccagaatagtctgcccctgggcggcccaagcagcggcgcccctcctcccagcggcggcagcccagccggctccccaacctctaccgaggagggcacctctgagtccgccacccccgagagcggccctggcacctccaccgagcccagcgagggcagcgcacccggcagccctgccggcagccccacctccacagaggagggaaccagcaccgagcccagcgaaggcagcgccccaggcaccagcaccgagcctagtgagggcggctctggcggcggcagcgcccaggagattaaacggatcaacaagatcagaagaagacttgtgaaagacagcaacaccaagaaggccggcaagacaggccccatgaaaaccctgctggttagagtgatgacacccgatctgagagagcggctggaaaacctgagaaagaagcctgaaaatatcccccagcccatcagcaatacatctagagccaacctgaataagctgctgaccgattacaccgaaatgaagaaggcgatcctgcatgtgtactgggaagagttccagaaggaccctgtgggcctgatgagccgggtggcccagcctgccagcaagaagatcgatcagaacaagctgaaacctgagatggacgagaagggcaacctgaccaccgccggctttgcctgctctcagtgtggccagcccctgttcgtgtacaagctggagcaggtgtctgagaagggcaaggcttacaccaactacttcggacggtgcaatgtggccgagcacgaaaagctgatcctgctggcccagctgaagcccgagaaggatagcgacgaagccgtgacatatagcctgggaaagtttgggcagagggccctggatttctacagcattcatgtgaccaaggagtccacccaccccgtgaagcccctggcccagatcgccggaaacagatacgcctccggacctgtgggaaaggccctgagcgacgcatgtatgggcacaatcgcctccttcctgtctaagtaccaggacatcatcatcgaacaccagaaggtggtgaagggcaaccagaagagactggagagcctgcgggagctggccggcaaggaaaacctggaataccctagcgtgaccctgccacctcagcctcacaccaaggagggcgttgatgcctacaacgaagtgatcgcccgggtgcgaatgtgggtgaacctgaacctgtggcagaagctgaagctaagcagagatgatgccaagcctctgctgagactgaagggattcccttcctttcctctggtcgagagacaggccaacgaagtggactggtgggacatggtgtgtaacgtgaagaagctgatcaacgagaaaaaggaggatggcaaggtgttttggcagaatctggctggctacaagagacaggaagccctgagaccatacctgagcagcgaggaagatcggaagaagggaaagaaattcgctcggtaccagctgggcgacctgctgctgcacctggaaaagaagcacggcgaggactggggaaaggtgtacgacgaggcctgggagcggattgacaagaaagtggaaggcctgagcaagcacatcaagctggaagaggaacggagaagcgaggacgcccagagcaaggccgccctgaccgactggctgcgggctaaggccagcttcgtgatcgagggcctgaaggaggccgacaaggacgagttctgcagatgcgagctgaagctgcagaagtggtacggggacctgcggggaaagcccttcgccatcgaagccgagaacagcatcctggacatcagcggcttcagcaagcagtacaactgtgccttcatctggcagaaggacggcgtgaagaagctgaacctgtacctgatcatcaactacttcaagggcggcaagctgcggttcaagaagatcaaacctgaagccttcgaagccaacagattctacaccgtgatcaacaaaaagagcggcgagatcgtgcccatggaggtgaacttcaacttcgacgaccccaacctgatcatcctgcctctggcctttggcaagagacagggcagagaattcatctggaacgacctgctgtccctggaaaccggcagcctgaagctggccaacggaagagtgatcgagaagacactgtacaacagaagaacccggcaggatgagcctgccctgttcgtggccctgaccttcgagcggcgggaggtcctggactcctccaatatcaaaccaatgaacctgatcggcgtggcaagaggcgaaaacatccccgccgtgatcgccctgaccgaccccgagggctgcccactgagccggtttaaggatagcctgggaaacccaacccacatcctgagaatcggcgagagctataaggagaagcagcggaccatccaggccaagaaggaggtggagcagcggagagccggcggctacagccggaagtacgccagcaaagccaagaatctggcagacgatatggtgagaaacaccgctagagatctgctgtactacgccgtgacccaggatgccatgctgatcttcgccaacctgagccggggcttcggccggcagggcaagcggaccttcatggccgagagacagtacacacggatggaggactggctgaccgccaagctggcctacgagggcctgagcaagacctacctgtccaagacactggcccagtacacctccaagacatgcagcaactgtgggtttaccatcaccagcgccgactacgacagggtgctggagaagctgaagaagacagcaacaggctggatgaccacaattaacggcaaggagctgaaggtggagggccagattacctactacaacagatacaagagacagaacgtagtcaaggacctgtccgtcgagctggatagactgagcgaagaatctgtgaacaacgacatctcctcctggacaaagggcagaagcggagaagctctgagcctcctgaagaaaagattctcccatagacccgtgcaggagaagttcgtgtgcctgaactgcggcttcgagacacacgcagccgagcaagccgccctgaacatcgccagatcctggctgttcctgcggagccaggagtacaagaaataccagacaaacaagacaaccggcaacaccgataagagagccttcgtcgagacctggcagtccttttaccggaagaagcttaaggaggtgtggaaacctgccgtgcggtctggcggatctggcggaggctccacaagcgcccaggtgcccgtgaccttcgaggaggtggccgtgtacttcacccagggccagggcgccctgctgggccccgcccagagggccctgtacagggacgtgatgagggagaactacgagatggtgaccagcctgggcttccccgtgcccaagcccgacctggtggccaggctggagaggggcgaggagccctgggtgagcgactgcctggccagcgaggagggcggcaccaggaggggcaggggcaccagccccaagaaaaagagaaaagtctaagctgccttctgcggggcttgccttctggccatgcccttcttctctcccttgcacctgtacctcttggtctttgaataaagcctgagtaggaaggctagcaaaaaaaaaaaaaaaaaaaaaaaaaaaaaaaaaaaaaaaaaaaaaaaaaaaaaaaaaaaaaaaaaaaaaaaaaaaaaaaa

SEQ ID NO: 5979 - RNA, 5797 nt, synthetic construct
  source 1..5797: mol_type = other RNA
aggaaataagagagaaaagaagagtaagaagaaatataagagccaccatggcccctaagaagaagcgtaaagtgagccggatggaacgcctcgtctacgaggtgcggcagaagtgcagaaacatcgaggacatctgcatctcctgcggatctctgaacgtgaccctggagcacccactgttcatcggcggcatgtgccagaactgtaaaaactgttttctggagtgtgcctatcaatacgacgatgacggctaccagagctactgcaccatctgttgcggcggaagagaggtgctgatgtgtggaaataacaactgctgccggtgcttctgcgtggaatgcgtggacctgctggtgggccccggcgccgcccaggccgctattaaggaagatccttggaactgctacatgtgcggccacaagggcacatacggcctgctgagacggagagaggactggcctagcagactgcagatgttcttcgccaataaccacgaccaggagttcgacccccctaaggtgtaccctcccgtccccgccgagaagagaaagcccatccgggtcctgagcctgttcgatggcatcgccaccggtctgctggtgctgaaggacctgggcatccaggtggataggtacattgcctccgaggtgtgcgaggactccatcaccgtgggaatggtgcgtcatcagggcaagatcatgtacgtgggcgacgtgcggagcgtgacacagaagcatatccaggagtggggccctttcgacctggtgatcggcggcagcccttgcaatgacctgagcatcgtgaacccagcccggaagggcctgtacgagggaaccggcagactgttcttcgagttttacagactgctgcacgacgcccggcctaaggaaggcgacgaccggcccttcttttggctgttcgagaatgtggtggccatgggagtcagcgacaagcgggatattagccggttcctggagagcaaccccgtgatgatcgatgccaaggaagtgagcgccgcccaccgggccagatacttctggggcaatctgcctggcatgaacagacccctggccagcaccgtgaacgacaagctggagctgcaggagtgcctggagcacggccggatcgccaagttcagcaaggtgagaaccatcaccacccgaagcaacagcatcaaacaaggcaaggaccagcactttcctgtgttcatgaacgagaaggaggacatcctgtggtgtaccgagatggagagagtgttcgggttcccagtccactacacagatgtcagcaacatgtctagactggccagacagagactgctgggaagaagctggtccgtccctgtgatcagacacctgttcgcccctctgaaggagtacttcgcctgcgtgagcagcggcaacagcaacgccaacagccggggccccagcttctctagcggcctggtgccactgtccctgagagggagccacatgggccccatggagatctacaaaaccgtgagcgcctggaagcggcagcctgtgcgcgtgctgagcctgtttcggaatatcgataaagtcctgaaaagcctgggattcctggagagcggctctggctccggcggtggcaccctgaagtacgtggaggatgtgacaaacgtggtcagacgggatgtggagaagtggggccccttcgatctggtgtacggcagcacccaacccctgggcagctcttgtgaccggtgccctggctggtacatgtttcagttccaccggatcctgcagtacgccctgccgagacaggagtcccagcggccattcttttggattttcatggacaacttgctgctgaccgaggatgaccaggaaactaccactcggttcctgcagaccgaagccgtgaccctgcaggacgtgagaggccgggactaccagaacgccatgcgggtgtggtccaacatccctggactgaaaagcaagcacgcacctctgacccctaaagaagaggagtacctgcaggcccaggtgcggagcagaagcaagctggacgcccctaaggtggatctgctggtgaagaattgcctcctgcccctgagagagtacttcaagtatttcagccagaatagtctgcccctgggcggcccaagcagcggcgcccctcctcccagcggcggcagcccagccggctccccaacctctaccgaggagggcacctctgagtccgccacccccgagagcggccctggcacctccaccgagcccagcgagggcagcgcacccggcagccctgccggcagccccacctccacagaggagggaaccagcaccgagcccagcgaaggcagcgccccaggcaccagcaccgagcctagtgagggcggctctggcggcggcagcgcccaggagattaaacggatcaacaagatcagaagaagacttgtgaaagacagcaacaccaagaaggccggcaagacaggccccatgaaaaccctgctggttagagtgatgacacccgatctgagagagcggctggaaaacctgagaaagaagcctgaaaatatcccccagcccatcagcaatacatctagagccaacctgaataagctgctgaccgattacaccgaaatgaagaaggcgatcctgcatgtgtactgggaagagttccagaaggaccctgtgggcctgatgagccgggtggcccagcctgccagcaagaagatcgatcagaacaagctgaaacctgagatggacgagaagggcaacctgaccaccgccggctttgcctgctctcagtgtggccagcccctgttcgtgtacaagctggagcaggtgtctgagaagggcaaggcttacaccaactacttcggacggtgcaatgtggccgagcacgaaaagctgatcctgctggcccagctgaagcccgagaaggatagcgacgaagccgtgacatatagcctgggaaagtttgggcagagggccctggatttctacagcattcatgtgaccaaggagtccacccaccccgtgaagcccctggcccagatcgccggaaacagatacgcctccggacctgtgggaaaggccctgagcgacgcatgtatgggcacaatcgcctccttcctgtctaagtaccaggacatcatcatcgaacaccagaaggtggtgaagggcaaccagaagagactggagagcctgcgggagctggccggcaaggaaaacctggaataccctagcgtgaccctgccacctcagcctcacaccaaggagggcgttgatgcctacaacgaagtgatcgcccgggtgcgaatgtgggtgaacctgaacctgtggcagaagctgaagctaagcagagatgatgccaagcctctgctgagactgaagggattcccttcctttcctctggtcgagagacaggccaacgaagtggactggtgggacatggtgtgtaacgtgaagaagctgatcaacgagaaaaaggaggatggcaaggtgttttggcagaatctggctggctacaagagacaggaagccctgagaccatacctgagcagcgaggaagatcggaagaagggaaagaaattcgctcggtaccagctgggcgacctgctgctgcacctggaaaagaagcacggcgaggactggggaaaggtgtacgacgaggcctgggagcggattgacaagaaagtggaaggcctgagcaagcacatcaagctggaagaggaacggagaagcgaggacgcccagagcaaggccgccctgaccgactggctgcgggctaaggccagcttcgtgatcgagggcctgaaggaggccgacaaggacgagttctgcagatgcgagctgaagctgcagaagtggtacggggacctgcggggaaagcccttcgccatcgaagccgagaacagcatcctggacatcagcggcttcagcaagcagtacaactgtgccttcatctggcagaaggacggcgtgaagaagctgaacctgtacctgatcatcaactacttcaagggcggcaagctgcggttcaagaagatcaaacctgaagccttcgaagccaacagattctacaccgtgatcaacaaaaagagcggcgagatcgtgcccatggaggtgaacttcaacttcgacgaccccaacctgatcatcctgcctctggcctttggcaagagacagggcagagaattcatctggaacgacctgctgtccctggaaaccggcagcctgaagctggccaacggaagagtgatcgagaagacactgtacaacagaagaacccggcaggatgagcctgccctgttcgtggccctgaccttcgagcggcgggaggtcctggactcctccaatatcaaaccaatgaacctgatcggcgtggcaagaggcgaaaacatccccgccgtgatcgccctgaccgaccccgagggctgcccactgagccggtttaaggatagcctgggaaacccaacccacatcctgagaatcggcgagagctataaggagaagcagcggaccatccaggccaagaaggaggtggagcagcggagagccggcggctacagccggaagtacgccagcaaagccaagaatctggcagacgatatggtgagaaacaccgctagagatctgctgtactacgccgtgacccaggatgccatgctgatcttcgccaacctgagccggggcttcggccggcagggcaagcggaccttcatggccgagagacagtacacacggatggaggactggctgaccgccaagctggcctacgagggcctgagcaagacctacctgtccaagacactggcccagtacacctccaagacatgcagcaactgtgggtttaccatcaccagcgccgactacgacagggtgctggagaagctgaagaagacagcaacaggctggatgaccacaattaacggcaaggagctgaaggtggagggccagattacctactacaacagatacaagagacagaacgtagtcaaggacctgtccgtcgagctggatagactgagcgaagaatctgtgaacaacgacatctcctcctggacaaagggcagaagcggagaagctctgagcctcctgaagaaaagattctcccatagacccgtgcaggagaagttcgtgtgcctgaactgcggcttcgagacacacgcagccgagcaagccgccctgaacatcgccagatcctggctgttcctgcggagccaggagtacaagaaataccagacaaacaagacaaccggcaacaccgataagagagccttcgtcgagacctggcagtccttttaccggaagaagcttaaggaggtgtggaaacctgccgtgcggtctggcggatctggcggaggctccacaagcttccagatgcccgtgaccttcgaggaggtggccgtgtacttcacccagggccagggcgccctgctggaccccgcccagagggccctgtacagggacgtgatgcaggacaactacgagatggtgaccagcctgggcttccccatccccaagcccgagctgatcgccaggctggagaggggcgaggagccctgggtgcccgacctgcaggcctgcgaggagaggaggctgcccaggtgcaccaggaccagccccaagaaaaagagaaaagtctaagctgccttctgcggggcttgccttctggccatgcccttcttctctcccttgcacctgtacctcttggtctttgaataaagcctgagtaggaaggctagcaaaaaaaaaaaaaaaaaaaaaaaaaaaaaaaaaaaaaaaaaaaaaaaaaaaaaaaaaaaaaaaaaaaaaaaaaaaaaaaa

SEQ ID NO: 5980 - RNA, 5797 nt, synthetic construct
  source 1..5797: mol_type = other RNA
aggaaataagagagaaaagaagagtaagaagaaatataagagccaccatggcccctaagaagaagcgtaaagtgagccggatggaacgcctcgtctacgaggtgcggcagaagtgcagaaacatcgaggacatctgcatctcctgcggatctctgaacgtgaccctggagcacccactgttcatcggcggcatgtgccagaactgtaaaaactgttttctggagtgtgcctatcaatacgacgatgacggctaccagagctactgcaccatctgttgcggcggaagagaggtgctgatgtgtggaaataacaactgctgccggtgcttctgcgtggaatgcgtggacctgctggtgggccccggcgccgcccaggccgctattaaggaagatccttggaactgctacatgtgcggccacaagggcacatacggcctgctgagacggagagaggactggcctagcagactgcagatgttcttcgccaataaccacgaccaggagttcgacccccctaaggtgtaccctcccgtccccgccgagaagagaaagcccatccgggtcctgagcctgttcgatggcatcgccaccggtctgctggtgctgaaggacctgggcatccaggtggataggtacattgcctccgaggtgtgcgaggactccatcaccgtgggaatggtgcgtcatcagggcaagatcatgtacgtgggcgacgtgcggagcgtgacacagaagcatatccaggagtggggccctttcgacctggtgatcggcggcagcccttgcaatgacctgagcatcgtgaacccagcccggaagggcctgtacgagggaaccggcagactgttcttcgagttttacagactgctgcacgacgcccggcctaaggaaggcgacgaccggcccttcttttggctgttcgagaatgtggtggccatgggagtcagcgacaagcgggatattagccggttcctggagagcaaccccgtgatgatcgatgccaaggaagtgagcgccgcccaccgggccagatacttctggggcaatctgcctggcatgaacagacccctggccagcaccgtgaacgacaagctggagctgcaggagtgcctggagcacggccggatcgccaagttcagcaaggtgagaaccatcaccacccgaagcaacagcatcaaacaaggcaaggaccagcactttcctgtgttcatgaacgagaaggaggacatcctgtggtgtaccgagatggagagagtgttcgggttcccagtccactacacagatgtcagcaacatgtctagactggccagacagagactgctgggaagaagctggtccgtccctgtgatcagacacctgttcgcccctctgaaggagtacttcgcctgcgtgagcagcggcaacagcaacgccaacagccggggccccagcttctctagcggcctggtgccactgtccctgagagggagccacatgggccccatggagatctacaaaaccgtgagcgcctggaagcggcagcctgtgcgcgtgctgagcctgtttcggaatatcgataaagtcctgaaaagcctgggattcctggagagcggctctggctccggcggtggcaccctgaagtacgtggaggatgtgacaaacgtggtcagacgggatgtggagaagtggggccccttcgatctggtgtacggcagcacccaacccctgggcagctcttgtgaccggtgccctggctggtacatgtttcagttccaccggatcctgcagtacgccctgccgagacaggagtcccagcggccattcttttggattttcatggacaacttgctgctgaccgaggatgaccaggaaactaccactcggttcctgcagaccgaagccgtgaccctgcaggacgtgagaggccgggactaccagaacgccatgcgggtgtggtccaacatccctggactgaaaagcaagcacgcacctctgacccctaaagaagaggagtacctgcaggcccaggtgcggagcagaagcaagctggacgcccctaaggtggatctgctggtgaagaattgcctcctgcccctgagagagtacttcaagtatttcagccagaatagtctgcccctgggcggcccaagcagcggcgcccctcctcccagcggcggcagcccagccggctccccaacctctaccgaggagggcacctctgagtccgccacccccgagagcggccctggcacctccaccgagcccagcgagggcagcgcacccggcagccctgccggcagccccacctccacagaggagggaaccagcaccgagcccagcgaaggcagcgccccaggcaccagcaccgagcctagtgagggcggctctggcggcggcagcgcccaggagattaaacggatcaacaagatcagaagaagacttgtgaaagacagcaacaccaagaaggccggcaagacaggccccatgaaaaccctgctggttagagtgatgacacccgatctgagagagcggctggaaaacctgagaaagaagcctgaaaatatcccccagcccatcagcaatacatctagagccaacctgaataagctgctgaccgattacaccgaaatgaagaaggcgatcctgcatgtgtactgggaagagttccagaaggaccctgtgggcctgatgagccgggtggcccagcctgccagcaagaagatcgatcagaacaagctgaaacctgagatggacgagaagggcaacctgaccaccgccggctttgcctgctctcagtgtggccagcccctgttcgtgtacaagctggagcaggtgtctgagaagggcaaggcttacaccaactacttcggacggtgcaatgtggccgagcacgaaaagctgatcctgctggcccagctgaagcccgagaaggatagcgacgaagccgtgacatatagcctgggaaagtttgggcagagggccctggatttctacagcattcatgtgaccaaggagtccacccaccccgtgaagcccctggcccagatcgccggaaacagatacgcctccggacctgtgggaaaggccctgagcgacgcatgtatgggcacaatcgcctccttcctgtctaagtaccaggacatcatcatcgaacaccagaaggtggtgaagggcaaccagaagagactggagagcctgcgggagctggccggcaaggaaaacctggaataccctagcgtgaccctgccacctcagcctcacaccaaggagggcgttgatgcctacaacgaagtgatcgcccgggtgcgaatgtgggtgaacctgaacctgtggcagaagctgaagctaagcagagatgatgccaagcctctgctgagactgaagggattcccttcctttcctctggtcgagagacaggccaacgaagtggactggtgggacatggtgtgtaacgtgaagaagctgatcaacgagaaaaaggaggatggcaaggtgttttggcagaatctggctggctacaagagacaggaagccctgagaccatacctgagcagcgaggaagatcggaagaagggaaagaaattcgctcggtaccagctgggcgacctgctgctgcacctggaaaagaagcacggcgaggactggggaaaggtgtacgacgaggcctgggagcggattgacaagaaagtggaaggcctgagcaagcacatcaagctggaagaggaacggagaagcgaggacgcccagagcaaggccgccctgaccgactggctgcgggctaaggccagcttcgtgatcgagggcctgaaggaggccgacaaggacgagttctgcagatgcgagctgaagctgcagaagtggtacggggacctgcggggaaagcccttcgccatcgaagccgagaacagcatcctggacatcagcggcttcagcaagcagtacaactgtgccttcatctggcagaaggacggcgtgaagaagctgaacctgtacctgatcatcaactacttcaagggcggcaagctgcggttcaagaagatcaaacctgaagccttcgaagccaacagattctacaccgtgatcaacaaaaagagcggcgagatcgtgcccatggaggtgaacttcaacttcgacgaccccaacctgatcatcctgcctctggcctttggcaagagacagggcagagaattcatctggaacgacctgctgtccctggaaaccggcagcctgaagctggccaacggaagagtgatcgagaagacactgtacaacagaagaacccggcaggatgagcctgccctgttcgtggccctgaccttcgagcggcgggaggtcctggactcctccaatatcaaaccaatgaacctgatcggcgtggcaagaggcgaaaacatccccgccgtgatcgccctgaccgaccccgagggctgcccactgagccggtttaaggatagcctgggaaacccaacccacatcctgagaatcggcgagagctataaggagaagcagcggaccatccaggccaagaaggaggtggagcagcggagagccggcggctacagccggaagtacgccagcaaagccaagaatctggcagacgatatggtgagaaacaccgctagagatctgctgtactacgccgtgacccaggatgccatgctgatcttcgccaacctgagccggggcttcggccggcagggcaagcggaccttcatggccgagagacagtacacacggatggaggactggctgaccgccaagctggcctacgagggcctgagcaagacctacctgtccaagacactggcccagtacacctccaagacatgcagcaactgtgggtttaccatcaccagcgccgactacgacagggtgctggagaagctgaagaagacagcaacaggctggatgaccacaattaacggcaaggagctgaaggtggagggccagattacctactacaacagatacaagagacagaacgtagtcaaggacctgtccgtcgagctggatagactgagcgaagaatctgtgaacaacgacatctcctcctggacaaagggcagaagcggagaagctctgagcctcctgaagaaaagattctcccatagacccgtgcaggagaagttcgtgtgcctgaactgcggcttcgagacacacgcagccgagcaagccgccctgaacatcgccagatcctggctgttcctgcggagccaggagtacaagaaataccagacaaacaagacaaccggcaacaccgataagagagccttcgtcgagacctggcagtccttttaccggaagaagcttaaggaggtgtggaaacctgccgtgcggtctggcggatctggcggaggctccacaagctgcggcatgttccaggtgagcgtggccttcgaggacgtggccgtgaccttcacccaggaggagtgggccctgctggaccccagccagaagaccctgtacagggacgtgatgcaggagaacttcaggaacctggccagcgtgggcaagaagtggaaggcccagaacatctacgtggagtacaagaacctgaggaggaacctgaggaacctgaggggcaagaggctgttcgagagcaaggaggacaccagccccaagaaaaagagaaaagtctaagctgccttctgcggggcttgccttctggccatgcccttcttctctcccttgcacctgtacctcttggtctttgaataaagcctgagtaggaaggctagcaaaaaaaaaaaaaaaaaaaaaaaaaaaaaaaaaaaaaaaaaaaaaaaaaaaaaaaaaaaaaaaaaaaaaaaaaaaaaaaa

SEQ ID NO: 5981 - RNA, 5797 nt, synthetic construct
  source 1..5797: mol_type = other RNA
aggaaataagagagaaaagaagagtaagaagaaatataagagccaccatggcccctaagaagaagcgtaaagtgagccggatggaacgcctcgtctacgaggtgcggcagaagtgcagaaacatcgaggacatctgcatctcctgcggatctctgaacgtgaccctggagcacccactgttcatcggcggcatgtgccagaactgtaaaaactgttttctggagtgtgcctatcaatacgacgatgacggctaccagagctactgcaccatctgttgcggcggaagagaggtgctgatgtgtggaaataacaactgctgccggtgcttctgcgtggaatgcgtggacctgctggtgggccccggcgccgcccaggccgctattaaggaagatccttggaactgctacatgtgcggccacaagggcacatacggcctgctgagacggagagaggactggcctagcagactgcagatgttcttcgccaataaccacgaccaggagttcgacccccctaaggtgtaccctcccgtccccgccgagaagagaaagcccatccgggtcctgagcctgttcgatggcatcgccaccggtctgctggtgctgaaggacctgggcatccaggtggataggtacattgcctccgaggtgtgcgaggactccatcaccgtgggaatggtgcgtcatcagggcaagatcatgtacgtgggcgacgtgcggagcgtgacacagaagcatatccaggagtggggccctttcgacctggtgatcggcggcagcccttgcaatgacctgagcatcgtgaacccagcccggaagggcctgtacgagggaaccggcagactgttcttcgagttttacagactgctgcacgacgcccggcctaaggaaggcgacgaccggcccttcttttggctgttcgagaatgtggtggccatgggagtcagcgacaagcgggatattagccggttcctggagagcaaccccgtgatgatcgatgccaaggaagtgagcgccgcccaccgggccagatacttctggggcaatctgcctggcatgaacagacccctggccagcaccgtgaacgacaagctggagctgcaggagtgcctggagcacggccggatcgccaagttcagcaaggtgagaaccatcaccacccgaagcaacagcatcaaacaaggcaaggaccagcactttcctgtgttcatgaacgagaaggaggacatcctgtggtgtaccgagatggagagagtgttcgggttcccagtccactacacagatgtcagcaacatgtctagactggccagacagagactgctgggaagaagctggtccgtccctgtgatcagacacctgttcgcccctctgaaggagtacttcgcctgcgtgagcagcggcaacagcaacgccaacagccggggccccagcttctctagcggcctggtgccactgtccctgagagggagccacatgggccccatggagatctacaaaaccgtgagcgcctggaagcggcagcctgtgcgcgtgctgagcctgtttcggaatatcgataaagtcctgaaaagcctgggattcctggagagcggctctggctccggcggtggcaccctgaagtacgtggaggatgtgacaaacgtggtcagacgggatgtggagaagtggggccccttcgatctggtgtacggcagcacccaacccctgggcagctcttgtgaccggtgccctggctggtacatgtttcagttccaccggatcctgcagtacgccctgccgagacaggagtcccagcggccattcttttggattttcatggacaacttgctgctgaccgaggatgaccaggaaactaccactcggttcctgcagaccgaagccgtgaccctgcaggacgtgagaggccgggactaccagaacgccatgcgggtgtggtccaacatccctggactgaaaagcaagcacgcacctctgacccctaaagaagaggagtacctgcaggcccaggtgcggagcagaagcaagctggacgcccctaaggtggatctgctggtgaagaattgcctcctgcccctgagagagtacttcaagtatttcagccagaatagtctgcccctgggcggcccaagcagcggcgcccctcctcccagcggcggcagcccagccggctccccaacctctaccgaggagggcacctctgagtccgccacccccgagagcggccctggcacctccaccgagcccagcgagggcagcgcacccggcagccctgccggcagccccacctccacagaggagggaaccagcaccgagcccagcgaaggcagcgccccaggcaccagcaccgagcctagtgagggcggctctggcggcggcagcgcccaggagattaaacggatcaacaagatcagaagaagacttgtgaaagacagcaacaccaagaaggccggcaagacaggccccatgaaaaccctgctggttagagtgatgacacccgatctgagagagcggctggaaaacctgagaaagaagcctgaaaatatcccccagcccatcagcaatacatctagagccaacctgaataagctgctgaccgattacaccgaaatgaagaaggcgatcctgcatgtgtactgggaagagttccagaaggaccctgtgggcctgatgagccgggtggcccagcctgccagcaagaagatcgatcagaacaagctgaaacctgagatggacgagaagggcaacctgaccaccgccggctttgcctgctctcagtgtggccagcccctgttcgtgtacaagctggagcaggtgtctgagaagggcaaggcttacaccaactacttcggacggtgcaatgtggccgagcacgaaaagctgatcctgctggcccagctgaagcccgagaaggatagcgacgaagccgtgacatatagcctgggaaagtttgggcagagggccctggatttctacagcattcatgtgaccaaggagtccacccaccccgtgaagcccctggcccagatcgccggaaacagatacgcctccggacctgtgggaaaggccctgagcgacgcatgtatgggcacaatcgcctccttcctgtctaagtaccaggacatcatcatcgaacaccagaaggtggtgaagggcaaccagaagagactggagagcctgcgggagctggccggcaaggaaaacctggaataccctagcgtgaccctgccacctcagcctcacaccaaggagggcgttgatgcctacaacgaagtgatcgcccgggtgcgaatgtgggtgaacctgaacctgtggcagaagctgaagctaagcagagatgatgccaagcctctgctgagactgaagggattcccttcctttcctctggtcgagagacaggccaacgaagtggactggtgggacatggtgtgtaacgtgaagaagctgatcaacgagaaaaaggaggatggcaaggtgttttggcagaatctggctggctacaagagacaggaagccctgagaccatacctgagcagcgaggaagatcggaagaagggaaagaaattcgctcggtaccagctgggcgacctgctgctgcacctggaaaagaagcacggcgaggactggggaaaggtgtacgacgaggcctgggagcggattgacaagaaagtggaaggcctgagcaagcacatcaagctggaagaggaacggagaagcgaggacgcccagagcaaggccgccctgaccgactggctgcgggctaaggccagcttcgtgatcgagggcctgaaggaggccgacaaggacgagttctgcagatgcgagctgaagctgcagaagtggtacggggacctgcggggaaagcccttcgccatcgaagccgagaacagcatcctggacatcagcggcttcagcaagcagtacaactgtgccttcatctggcagaaggacggcgtgaagaagctgaacctgtacctgatcatcaactacttcaagggcggcaagctgcggttcaagaagatcaaacctgaagccttcgaagccaacagattctacaccgtgatcaacaaaaagagcggcgagatcgtgcccatggaggtgaacttcaacttcgacgaccccaacctgatcatcctgcctctggcctttggcaagagacagggcagagaattcatctggaacgacctgctgtccctggaaaccggcagcctgaagctggccaacggaagagtgatcgagaagacactgtacaacagaagaacccggcaggatgagcctgccctgttcgtggccctgaccttcgagcggcgggaggtcctggactcctccaatatcaaaccaatgaacctgatcggcgtggcaagaggcgaaaacatccccgccgtgatcgccctgaccgaccccgagggctgcccactgagccggtttaaggatagcctgggaaacccaacccacatcctgagaatcggcgagagctataaggagaagcagcggaccatccaggccaagaaggaggtggagcagcggagagccggcggctacagccggaagtacgccagcaaagccaagaatctggcagacgatatggtgagaaacaccgctagagatctgctgtactacgccgtgacccaggatgccatgctgatcttcgccaacctgagccggggcttcggccggcagggcaagcggaccttcatggccgagagacagtacacacggatggaggactggctgaccgccaagctggcctacgagggcctgagcaagacctacctgtccaagacactggcccagtacacctccaagacatgcagcaactgtgggtttaccatcaccagcgccgactacgacagggtgctggagaagctgaagaagacagcaacaggctggatgaccacaattaacggcaaggagctgaaggtggagggccagattacctactacaacagatacaagagacagaacgtagtcaaggacctgtccgtcgagctggatagactgagcgaagaatctgtgaacaacgacatctcctcctggacaaagggcagaagcggagaagctctgagcctcctgaagaaaagattctcccatagacccgtgcaggagaagttcgtgtgcctgaactgcggcttcgagacacacgcagccgagcaagccgccctgaacatcgccagatcctggctgttcctgcggagccaggagtacaagaaataccagacaaacaagacaaccggcaacaccgataagagagccttcgtcgagacctggcagtccttttaccggaagaagcttaaggaggtgtggaaacctgccgtgcggtctggcggatctggcggaggctccacaagcatggccttcgaggacgtggccgtgtacttcagccaggaggagtggggcctgctggacaccgcccagagggccctgtacaggcacgtgatgctggagaacttcaccctggtgaccagcctgggcctgagcaccagcaggccccacgtggtgatccagctggagaggggcgaggagccctgggtgcccagcggcaaggacatgaccctggccaggaacacctacaggaggctgaacgccggcagcaccagccccaagaaaaagagaaaagtctaagctgccttctgcggggcttgccttctggccatgcccttcttctctcccttgcacctgtacctcttggtctttgaataaagcctgagtaggaaggctagcaaaaaaaaaaaaaaaaaaaaaaaaaaaaaaaaaaaaaaaaaaaaaaaaaaaaaaaaaaaaaaaaaaaaaaaaaaaaaaaa

SEQ ID NO: 5982 - RNA, 5797 nt, synthetic construct
  source 1..5797: mol_type = other RNA
aggaaataagagagaaaagaagagtaagaagaaatataagagccaccatggcccctaagaagaagcgtaaagtgagccggatggaacgcctcgtctacgaggtgcggcagaagtgcagaaacatcgaggacatctgcatctcctgcggatctctgaacgtgaccctggagcacccactgttcatcggcggcatgtgccagaactgtaaaaactgttttctggagtgtgcctatcaatacgacgatgacggctaccagagctactgcaccatctgttgcggcggaagagaggtgctgatgtgtggaaataacaactgctgccggtgcttctgcgtggaatgcgtggacctgctggtgggccccggcgccgcccaggccgctattaaggaagatccttggaactgctacatgtgcggccacaagggcacatacggcctgctgagacggagagaggactggcctagcagactgcagatgttcttcgccaataaccacgaccaggagttcgacccccctaaggtgtaccctcccgtccccgccgagaagagaaagcccatccgggtcctgagcctgttcgatggcatcgccaccggtctgctggtgctgaaggacctgggcatccaggtggataggtacattgcctccgaggtgtgcgaggactccatcaccgtgggaatggtgcgtcatcagggcaagatcatgtacgtgggcgacgtgcggagcgtgacacagaagcatatccaggagtggggccctttcgacctggtgatcggcggcagcccttgcaatgacctgagcatcgtgaacccagcccggaagggcctgtacgagggaaccggcagactgttcttcgagttttacagactgctgcacgacgcccggcctaaggaaggcgacgaccggcccttcttttggctgttcgagaatgtggtggccatgggagtcagcgacaagcgggatattagccggttcctggagagcaaccccgtgatgatcgatgccaaggaagtgagcgccgcccaccgggccagatacttctggggcaatctgcctggcatgaacagacccctggccagcaccgtgaacgacaagctggagctgcaggagtgcctggagcacggccggatcgccaagttcagcaaggtgagaaccatcaccacccgaagcaacagcatcaaacaaggcaaggaccagcactttcctgtgttcatgaacgagaaggaggacatcctgtggtgtaccgagatggagagagtgttcgggttcccagtccactacacagatgtcagcaacatgtctagactggccagacagagactgctgggaagaagctggtccgtccctgtgatcagacacctgttcgcccctctgaaggagtacttcgcctgcgtgagcagcggcaacagcaacgccaacagccggggccccagcttctctagcggcctggtgccactgtccctgagagggagccacatgggccccatggagatctacaaaaccgtgagcgcctggaagcggcagcctgtgcgcgtgctgagcctgtttcggaatatcgataaagtcctgaaaagcctgggattcctggagagcggctctggctccggcggtggcaccctgaagtacgtggaggatgtgacaaacgtggtcagacgggatgtggagaagtggggccccttcgatctggtgtacggcagcacccaacccctgggcagctcttgtgaccggtgccctggctggtacatgtttcagttccaccggatcctgcagtacgccctgccgagacaggagtcccagcggccattcttttggattttcatggacaacttgctgctgaccgaggatgaccaggaaactaccactcggttcctgcagaccgaagccgtgaccctgcaggacgtgagaggccgggactaccagaacgccatgcgggtgtggtccaacatccctggactgaaaagcaagcacgcacctctgacccctaaagaagaggagtacctgcaggcccaggtgcggagcagaagcaagctggacgcccctaaggtggatctgctggtgaagaattgcctcctgcccctgagagagtacttcaagtatttcagccagaatagtctgcccctgggcggcccaagcagcggcgcccctcctcccagcggcggcagcccagccggctccccaacctctaccgaggagggcacctctgagtccgccacccccgagagcggccctggcacctccaccgagcccagcgagggcagcgcacccggcagccctgccggcagccccacctccacagaggagggaaccagcaccgagcccagcgaaggcagcgccccaggcaccagcaccgagcctagtgagggcggctctggcggcggcagcgcccaggagattaaacggatcaacaagatcagaagaagacttgtgaaagacagcaacaccaagaaggccggcaagacaggccccatgaaaaccctgctggttagagtgatgacacccgatctgagagagcggctggaaaacctgagaaagaagcctgaaaatatcccccagcccatcagcaatacatctagagccaacctgaataagctgctgaccgattacaccgaaatgaagaaggcgatcctgcatgtgtactgggaagagttccagaaggaccctgtgggcctgatgagccgggtggcccagcctgccagcaagaagatcgatcagaacaagctgaaacctgagatggacgagaagggcaacctgaccaccgccggctttgcctgctctcagtgtggccagcccctgttcgtgtacaagctggagcaggtgtctgagaagggcaaggcttacaccaactacttcggacggtgcaatgtggccgagcacgaaaagctgatcctgctggcccagctgaagcccgagaaggatagcgacgaagccgtgacatatagcctgggaaagtttgggcagagggccctggatttctacagcattcatgtgaccaaggagtccacccaccccgtgaagcccctggcccagatcgccggaaacagatacgcctccggacctgtgggaaaggccctgagcgacgcatgtatgggcacaatcgcctccttcctgtctaagtaccaggacatcatcatcgaacaccagaaggtggtgaagggcaaccagaagagactggagagcctgcgggagctggccggcaaggaaaacctggaataccctagcgtgaccctgccacctcagcctcacaccaaggagggcgttgatgcctacaacgaagtgatcgcccgggtgcgaatgtgggtgaacctgaacctgtggcagaagctgaagctaagcagagatgatgccaagcctctgctgagactgaagggattcccttcctttcctctggtcgagagacaggccaacgaagtggactggtgggacatggtgtgtaacgtgaagaagctgatcaacgagaaaaaggaggatggcaaggtgttttggcagaatctggctggctacaagagacaggaagccctgagaccatacctgagcagcgaggaagatcggaagaagggaaagaaattcgctcggtaccagctgggcgacctgctgctgcacctggaaaagaagcacggcgaggactggggaaaggtgtacgacgaggcctgggagcggattgacaagaaagtggaaggcctgagcaagcacatcaagctggaagaggaacggagaagcgaggacgcccagagcaaggccgccctgaccgactggctgcgggctaaggccagcttcgtgatcgagggcctgaaggaggccgacaaggacgagttctgcagatgcgagctgaagctgcagaagtggtacggggacctgcggggaaagcccttcgccatcgaagccgagaacagcatcctggacatcagcggcttcagcaagcagtacaactgtgccttcatctggcagaaggacggcgtgaagaagctgaacctgtacctgatcatcaactacttcaagggcggcaagctgcggttcaagaagatcaaacctgaagccttcgaagccaacagattctacaccgtgatcaacaaaaagagcggcgagatcgtgcccatggaggtgaacttcaacttcgacgaccccaacctgatcatcctgcctctggcctttggcaagagacagggcagagaattcatctggaacgacctgctgtccctggaaaccggcagcctgaagctggccaacggaagagtgatcgagaagacactgtacaacagaagaacccggcaggatgagcctgccctgttcgtggccctgaccttcgagcggcgggaggtcctggactcctccaatatcaaaccaatgaacctgatcggcgtggcaagaggcgaaaacatccccgccgtgatcgccctgaccgaccccgagggctgcccactgagccggtttaaggatagcctgggaaacccaacccacatcctgagaatcggcgagagctataaggagaagcagcggaccatccaggccaagaaggaggtggagcagcggagagccggcggctacagccggaagtacgccagcaaagccaagaatctggcagacgatatggtgagaaacaccgctagagatctgctgtactacgccgtgacccaggatgccatgctgatcttcgccaacctgagccggggcttcggccggcagggcaagcggaccttcatggccgagagacagtacacacggatggaggactggctgaccgccaagctggcctacgagggcctgagcaagacctacctgtccaagacactggcccagtacacctccaagacatgcagcaactgtgggtttaccatcaccagcgccgactacgacagggtgctggagaagctgaagaagacagcaacaggctggatgaccacaattaacggcaaggagctgaaggtggagggccagattacctactacaacagatacaagagacagaacgtagtcaaggacctgtccgtcgagctggatagactgagcgaagaatctgtgaacaacgacatctcctcctggacaaagggcagaagcggagaagctctgagcctcctgaagaaaagattctcccatagacccgtgcaggagaagttcgtgtgcctgaactgcggcttcgagacacacgcagccgagcaagccgccctgaacatcgccagatcctggctgttcctgcggagccaggagtacaagaaataccagacaaacaagacaaccggcaacaccgataagagagccttcgtcgagacctggcagtccttttaccggaagaagcttaaggaggtgtggaaacctgccgtgcggtctggcggatctggcggaggctccacaagcaggagcgaggccctgagcttcgccgacgtgagcgtgagcttcagcagggaggagtggggctgcctgaggcccgcccagaaggccctgtacagggacgtgatgagggagacctgcggcctgctgggcgccctgggcctgagcggccccaagcccgccttcatcagctggctggagggcgagatggaggcctggagccccgaggcccacgagcccgagagggagagcagggccgccgacgccaggaccagccccaagaaaaagagaaaagtctaagctgccttctgcggggcttgccttctggccatgcccttcttctctcccttgcacctgtacctcttggtctttgaataaagcctgagtaggaaggctagcaaaaaaaaaaaaaaaaaaaaaaaaaaaaaaaaaaaaaaaaaaaaaaaaaaaaaaaaaaaaaaaaaaaaaaaaaaaaaaaa

SEQ ID NO: 5983 - RNA, 5815 nt, synthetic construct
  source 1..5815: mol_type = other RNA
aggaaataagagagaaaagaagagtaagaagaaatataagagccaccatggcccctaagaagaagcgtaaagtgagccggatggaacgcctcgtctacgaggtgcggcagaagtgcagaaacatcgaggacatctgcatctcctgcggatctctgaacgtgaccctggagcacccactgttcatcggcggcatgtgccagaactgtaaaaactgttttctggagtgtgcctatcaatacgacgatgacggctaccagagctactgcaccatctgttgcggcggaagagaggtgctgatgtgtggaaataacaactgctgccggtgcttctgcgtggaatgcgtggacctgctggtgggccccggcgccgcccaggccgctattaaggaagatccttggaactgctacatgtgcggccacaagggcacatacggcctgctgagacggagagaggactggcctagcagactgcagatgttcttcgccaataaccacgaccaggagttcgacccccctaaggtgtaccctcccgtccccgccgagaagagaaagcccatccgggtcctgagcctgttcgatggcatcgccaccggtctgctggtgctgaaggacctgggcatccaggtggataggtacattgcctccgaggtgtgcgaggactccatcaccgtgggaatggtgcgtcatcagggcaagatcatgtacgtgggcgacgtgcggagcgtgacacagaagcatatccaggagtggggccctttcgacctggtgatcggcggcagcccttgcaatgacctgagcatcgtgaacccagcccggaagggcctgtacgagggaaccggcagactgttcttcgagttttacagactgctgcacgacgcccggcctaaggaaggcgacgaccggcccttcttttggctgttcgagaatgtggtggccatgggagtcagcgacaagcgggatattagccggttcctggagagcaaccccgtgatgatcgatgccaaggaagtgagcgccgcccaccgggccagatacttctggggcaatctgcctggcatgaacagacccctggccagcaccgtgaacgacaagctggagctgcaggagtgcctggagcacggccggatcgccaagttcagcaaggtgagaaccatcaccacccgaagcaacagcatcaaacaaggcaaggaccagcactttcctgtgttcatgaacgagaaggaggacatcctgtggtgtaccgagatggagagagtgttcgggttcccagtccactacacagatgtcagcaacatgtctagactggccagacagagactgctgggaagaagctggtccgtccctgtgatcagacacctgttcgcccctctgaaggagtacttcgcctgcgtgagcagcggcaacagcaacgccaacagccggggccccagcttctctagcggcctggtgccactgtccctgagagggagccacatgggccccatggagatctacaaaaccgtgagcgcctggaagcggcagcctgtgcgcgtgctgagcctgtttcggaatatcgataaagtcctgaaaagcctgggattcctggagagcggctctggctccggcggtggcaccctgaagtacgtggaggatgtgacaaacgtggtcagacgggatgtggagaagtggggccccttcgatctggtgtacggcagcacccaacccctgggcagctcttgtgaccggtgccctggctggtacatgtttcagttccaccggatcctgcagtacgccctgccgagacaggagtcccagcggccattcttttggattttcatggacaacttgctgctgaccgaggatgaccaggaaactaccactcggttcctgcagaccgaagccgtgaccctgcaggacgtgagaggccgggactaccagaacgccatgcgggtgtggtccaacatccctggactgaaaagcaagcacgcacctctgacccctaaagaagaggagtacctgcaggcccaggtgcggagcagaagcaagctggacgcccctaaggtggatctgctggtgaagaattgcctcctgcccctgagagagtacttcaagtatttcagccagaatagtctgcccctgggcggcccaagcagcggcgcccctcctcccagcggcggcagcccagccggctccccaacctctaccgaggagggcacctctgagtccgccacccccgagagcggccctggcacctccaccgagcccagcgagggcagcgcacccggcagccctgccggcagccccacctccacagaggagggaaccagcaccgagcccagcgaaggcagcgccccaggcaccagcaccgagcctagtgagggcggctctggcggcggcagcgcccaggagattaaacggatcaacaagatcagaagaagacttgtgaaagacagcaacaccaagaaggccggcaagacaggccccatgaaaaccctgctggttagagtgatgacacccgatctgagagagcggctggaaaacctgagaaagaagcctgaaaatatcccccagcccatcagcaatacatctagagccaacctgaataagctgctgaccgattacaccgaaatgaagaaggcgatcctgcatgtgtactgggaagagttccagaaggaccctgtgggcctgatgagccgggtggcccagcctgccagcaagaagatcgatcagaacaagctgaaacctgagatggacgagaagggcaacctgaccaccgccggctttgcctgctctcagtgtggccagcccctgttcgtgtacaagctggagcaggtgtctgagaagggcaaggcttacaccaactacttcggacggtgcaatgtggccgagcacgaaaagctgatcctgctggcccagctgaagcccgagaaggatagcgacgaagccgtgacatatagcctgggaaagtttgggcagagggccctggatttctacagcattcatgtgaccaaggagtccacccaccccgtgaagcccctggcccagatcgccggaaacagatacgcctccggacctgtgggaaaggccctgagcgacgcatgtatgggcacaatcgcctccttcctgtctaagtaccaggacatcatcatcgaacaccagaaggtggtgaagggcaaccagaagagactggagagcctgcgggagctggccggcaaggaaaacctggaataccctagcgtgaccctgccacctcagcctcacaccaaggagggcgttgatgcctacaacgaagtgatcgcccgggtgcgaatgtgggtgaacctgaacctgtggcagaagctgaagctaagcagagatgatgccaagcctctgctgagactgaagggattcccttcctttcctctggtcgagagacaggccaacgaagtggactggtgggacatggtgtgtaacgtgaagaagctgatcaacgagaaaaaggaggatggcaaggtgttttggcagaatctggctggctacaagagacaggaagccctgagaccatacctgagcagcgaggaagatcggaagaagggaaagaaattcgctcggtaccagctgggcgacctgctgctgcacctggaaaagaagcacggcgaggactggggaaaggtgtacgacgaggcctgggagcggattgacaagaaagtggaaggcctgagcaagcacatcaagctggaagaggaacggagaagcgaggacgcccagagcaaggccgccctgaccgactggctgcgggctaaggccagcttcgtgatcgagggcctgaaggaggccgacaaggacgagttctgcagatgcgagctgaagctgcagaagtggtacggggacctgcggggaaagcccttcgccatcgaagccgagaacagcatcctggacatcagcggcttcagcaagcagtacaactgtgccttcatctggcagaaggacggcgtgaagaagctgaacctgtacctgatcatcaactacttcaagggcggcaagctgcggttcaagaagatcaaacctgaagccttcgaagccaacagattctacaccgtgatcaacaaaaagagcggcgagatcgtgcccatggaggtgaacttcaacttcgacgaccccaacctgatcatcctgcctctggcctttggcaagagacagggcagagaattcatctggaacgacctgctgtccctggaaaccggcagcctgaagctggccaacggaagagtgatcgagaagacactgtacaacagaagaacccggcaggatgagcctgccctgttcgtggccctgaccttcgagcggcgggaggtcctggactcctccaatatcaaaccaatgaacctgatcggcgtggcaagaggcgaaaacatccccgccgtgatcgccctgaccgaccccgagggctgcccactgagccggtttaaggatagcctgggaaacccaacccacatcctgagaatcggcgagagctataaggagaagcagcggaccatccaggccaagaaggaggtggagcagcggagagccggcggctacagccggaagtacgccagcaaagccaagaatctggcagacgatatggtgagaaacaccgctagagatctgctgtactacgccgtgacccaggatgccatgctgatcttcgccaacctgagccggggcttcggccggcagggcaagcggaccttcatggccgagagacagtacacacggatggaggactggctgaccgccaagctggcctacgagggcctgagcaagacctacctgtccaagacactggcccagtacacctccaagacatgcagcaactgtgggtttaccatcaccagcgccgactacgacagggtgctggagaagctgaagaagacagcaacaggctggatgaccacaattaacggcaaggagctgaaggtggagggccagattacctactacaacagatacaagagacagaacgtagtcaaggacctgtccgtcgagctggatagactgagcgaagaatctgtgaacaacgacatctcctcctggacaaagggcagaagcggagaagctctgagcctcctgaagaaaagattctcccatagacccgtgcaggagaagttcgtgtgcctgaactgcggcttcgagacacacgcagccgagcaagccgccctgaacatcgccagatcctggctgttcctgcggagccaggagtacaagaaataccagacaaacaagacaaccggcaacaccgataagagagccttcgtcgagacctggcagtccttttaccggaagaagcttaaggaggtgtggaaacctgccgtgcggtctggcggatctggcggaggctccacaagcgtgaccttcgaggacgtggccgtgaacttcaccctggaggagtgggccctgctggaccccagccagaagaagctgtacagggacgtgatgagggagaccctgaggaacctggccagcgtgggcgagaagtgggaggaccacgacatcgaggaccagtacaagaaccagggcaggaagctgaggagccacgtgctggagaggctgtgcgagagcaaggagggcagccagtgcggcgagaacttcagcctgatccccaacctgaccagccccaagaaaaagagaaaagtctaagctgccttctgcggggcttgccttctggccatgcccttcttctctcccttgcacctgtacctcttggtctttgaataaagcctgagtaggaaggctagcaaaaaaaaaaaaaaaaaaaaaaaaaaaaaaaaaaaaaaaaaaaaaaaaaaaaaaaaaaaaaaaaaaaaaaaaaaaaaaaa

SEQ ID NO: 5984 - RNA, 5797 nt, synthetic construct
  source 1..5797: mol_type = other RNA
aggaaataagagagaaaagaagagtaagaagaaatataagagccaccatggcccctaagaagaagcgtaaagtgagccggatggaacgcctcgtctacgaggtgcggcagaagtgcagaaacatcgaggacatctgcatctcctgcggatctctgaacgtgaccctggagcacccactgttcatcggcggcatgtgccagaactgtaaaaactgttttctggagtgtgcctatcaatacgacgatgacggctaccagagctactgcaccatctgttgcggcggaagagaggtgctgatgtgtggaaataacaactgctgccggtgcttctgcgtggaatgcgtggacctgctggtgggccccggcgccgcccaggccgctattaaggaagatccttggaactgctacatgtgcggccacaagggcacatacggcctgctgagacggagagaggactggcctagcagactgcagatgttcttcgccaataaccacgaccaggagttcgacccccctaaggtgtaccctcccgtccccgccgagaagagaaagcccatccgggtcctgagcctgttcgatggcatcgccaccggtctgctggtgctgaaggacctgggcatccaggtggataggtacattgcctccgaggtgtgcgaggactccatcaccgtgggaatggtgcgtcatcagggcaagatcatgtacgtgggcgacgtgcggagcgtgacacagaagcatatccaggagtggggccctttcgacctggtgatcggcggcagcccttgcaatgacctgagcatcgtgaacccagcccggaagggcctgtacgagggaaccggcagactgttcttcgagttttacagactgctgcacgacgcccggcctaaggaaggcgacgaccggcccttcttttggctgttcgagaatgtggtggccatgggagtcagcgacaagcgggatattagccggttcctggagagcaaccccgtgatgatcgatgccaaggaagtgagcgccgcccaccgggccagatacttctggggcaatctgcctggcatgaacagacccctggccagcaccgtgaacgacaagctggagctgcaggagtgcctggagcacggccggatcgccaagttcagcaaggtgagaaccatcaccacccgaagcaacagcatcaaacaaggcaaggaccagcactttcctgtgttcatgaacgagaaggaggacatcctgtggtgtaccgagatggagagagtgttcgggttcccagtccactacacagatgtcagcaacatgtctagactggccagacagagactgctgggaagaagctggtccgtccctgtgatcagacacctgttcgcccctctgaaggagtacttcgcctgcgtgagcagcggcaacagcaacgccaacagccggggccccagcttctctagcggcctggtgccactgtccctgagagggagccacatgggccccatggagatctacaaaaccgtgagcgcctggaagcggcagcctgtgcgcgtgctgagcctgtttcggaatatcgataaagtcctgaaaagcctgggattcctggagagcggctctggctccggcggtggcaccctgaagtacgtggaggatgtgacaaacgtggtcagacgggatgtggagaagtggggccccttcgatctggtgtacggcagcacccaacccctgggcagctcttgtgaccggtgccctggctggtacatgtttcagttccaccggatcctgcagtacgccctgccgagacaggagtcccagcggccattcttttggattttcatggacaacttgctgctgaccgaggatgaccaggaaactaccactcggttcctgcagaccgaagccgtgaccctgcaggacgtgagaggccgggactaccagaacgccatgcgggtgtggtccaacatccctggactgaaaagcaagcacgcacctctgacccctaaagaagaggagtacctgcaggcccaggtgcggagcagaagcaagctggacgcccctaaggtggatctgctggtgaagaattgcctcctgcccctgagagagtacttcaagtatttcagccagaatagtctgcccctgggcggcccaagcagcggcgcccctcctcccagcggcggcagcccagccggctccccaacctctaccgaggagggcacctctgagtccgccacccccgagagcggccctggcacctccaccgagcccagcgagggcagcgcacccggcagccctgccggcagccccacctccacagaggagggaaccagcaccgagcccagcgaaggcagcgccccaggcaccagcaccgagcctagtgagggcggctctggcggcggcagcgcccaggagattaaacggatcaacaagatcagaagaagacttgtgaaagacagcaacaccaagaaggccggcaagacaggccccatgaaaaccctgctggttagagtgatgacacccgatctgagagagcggctggaaaacctgagaaagaagcctgaaaatatcccccagcccatcagcaatacatctagagccaacctgaataagctgctgaccgattacaccgaaatgaagaaggcgatcctgcatgtgtactgggaagagttccagaaggaccctgtgggcctgatgagccgggtggcccagcctgccagcaagaagatcgatcagaacaagctgaaacctgagatggacgagaagggcaacctgaccaccgccggctttgcctgctctcagtgtggccagcccctgttcgtgtacaagctggagcaggtgtctgagaagggcaaggcttacaccaactacttcggacggtgcaatgtggccgagcacgaaaagctgatcctgctggcccagctgaagcccgagaaggatagcgacgaagccgtgacatatagcctgggaaagtttgggcagagggccctggatttctacagcattcatgtgaccaaggagtccacccaccccgtgaagcccctggcccagatcgccggaaacagatacgcctccggacctgtgggaaaggccctgagcgacgcatgtatgggcacaatcgcctccttcctgtctaagtaccaggacatcatcatcgaacaccagaaggtggtgaagggcaaccagaagagactggagagcctgcgggagctggccggcaaggaaaacctggaataccctagcgtgaccctgccacctcagcctcacaccaaggagggcgttgatgcctacaacgaagtgatcgcccgggtgcgaatgtgggtgaacctgaacctgtggcagaagctgaagctaagcagagatgatgccaagcctctgctgagactgaagggattcccttcctttcctctggtcgagagacaggccaacgaagtggactggtgggacatggtgtgtaacgtgaagaagctgatcaacgagaaaaaggaggatggcaaggtgttttggcagaatctggctggctacaagagacaggaagccctgagaccatacctgagcagcgaggaagatcggaagaagggaaagaaattcgctcggtaccagctgggcgacctgctgctgcacctggaaaagaagcacggcgaggactggggaaaggtgtacgacgaggcctgggagcggattgacaagaaagtggaaggcctgagcaagcacatcaagctggaagaggaacggagaagcgaggacgcccagagcaaggccgccctgaccgactggctgcgggctaaggccagcttcgtgatcgagggcctgaaggaggccgacaaggacgagttctgcagatgcgagctgaagctgcagaagtggtacggggacctgcggggaaagcccttcgccatcgaagccgagaacagcatcctggacatcagcggcttcagcaagcagtacaactgtgccttcatctggcagaaggacggcgtgaagaagctgaacctgtacctgatcatcaactacttcaagggcggcaagctgcggttcaagaagatcaaacctgaagccttcgaagccaacagattctacaccgtgatcaacaaaaagagcggcgagatcgtgcccatggaggtgaacttcaacttcgacgaccccaacctgatcatcctgcctctggcctttggcaagagacagggcagagaattcatctggaacgacctgctgtccctggaaaccggcagcctgaagctggccaacggaagagtgatcgagaagacactgtacaacagaagaacccggcaggatgagcctgccctgttcgtggccctgaccttcgagcggcgggaggtcctggactcctccaatatcaaaccaatgaacctgatcggcgtggcaagaggcgaaaacatccccgccgtgatcgccctgaccgaccccgagggctgcccactgagccggtttaaggatagcctgggaaacccaacccacatcctgagaatcggcgagagctataaggagaagcagcggaccatccaggccaagaaggaggtggagcagcggagagccggcggctacagccggaagtacgccagcaaagccaagaatctggcagacgatatggtgagaaacaccgctagagatctgctgtactacgccgtgacccaggatgccatgctgatcttcgccaacctgagccggggcttcggccggcagggcaagcggaccttcatggccgagagacagtacacacggatggaggactggctgaccgccaagctggcctacgagggcctgagcaagacctacctgtccaagacactggcccagtacacctccaagacatgcagcaactgtgggtttaccatcaccagcgccgactacgacagggtgctggagaagctgaagaagacagcaacaggctggatgaccacaattaacggcaaggagctgaaggtggagggccagattacctactacaacagatacaagagacagaacgtagtcaaggacctgtccgtcgagctggatagactgagcgaagaatctgtgaacaacgacatctcctcctggacaaagggcagaagcggagaagctctgagcctcctgaagaaaagattctcccatagacccgtgcaggagaagttcgtgtgcctgaactgcggcttcgagacacacgcagccgagcaagccgccctgaacatcgccagatcctggctgttcctgcggagccaggagtacaagaaataccagacaaacaagacaaccggcaacaccgataagagagccttcgtcgagacctggcagtccttttaccggaagaagcttaaggaggtgtggaaacctgccgtgcggtctggcggatctggcggaggctccacaagcaagcccgagctggtgagcttcgaggacgtggccgtgtacttcagcccccacgagtggggctgcctgaggcccgcccagagggccctgtacagggaggtgatgagggagacctacggcctgctgggcgccctgggcttccccggccccaagcccgccctgatcagctggatggagcaggagagcgaggcctggagccccgccgcccaggaccccgccgagggcgagagcctgggcggcgccctgaccagccccaagaaaaagagaaaagtctaagctgccttctgcggggcttgccttctggccatgcccttcttctctcccttgcacctgtacctcttggtctttgaataaagcctgagtaggaaggctagcaaaaaaaaaaaaaaaaaaaaaaaaaaaaaaaaaaaaaaaaaaaaaaaaaaaaaaaaaaaaaaaaaaaaaaaaaaaaaaaa

SEQ ID NO: 5985 - RNA, 5797 nt, synthetic construct
  source 1..5797: mol_type = other RNA
aggaaataagagagaaaagaagagtaagaagaaatataagagccaccatggcccctaagaagaagcgtaaagtgagccggatggaacgcctcgtctacgaggtgcggcagaagtgcagaaacatcgaggacatctgcatctcctgcggatctctgaacgtgaccctggagcacccactgttcatcggcggcatgtgccagaactgtaaaaactgttttctggagtgtgcctatcaatacgacgatgacggctaccagagctactgcaccatctgttgcggcggaagagaggtgctgatgtgtggaaataacaactgctgccggtgcttctgcgtggaatgcgtggacctgctggtgggccccggcgccgcccaggccgctattaaggaagatccttggaactgctacatgtgcggccacaagggcacatacggcctgctgagacggagagaggactggcctagcagactgcagatgttcttcgccaataaccacgaccaggagttcgacccccctaaggtgtaccctcccgtccccgccgagaagagaaagcccatccgggtcctgagcctgttcgatggcatcgccaccggtctgctggtgctgaaggacctgggcatccaggtggataggtacattgcctccgaggtgtgcgaggactccatcaccgtgggaatggtgcgtcatcagggcaagatcatgtacgtgggcgacgtgcggagcgtgacacagaagcatatccaggagtggggccctttcgacctggtgatcggcggcagcccttgcaatgacctgagcatcgtgaacccagcccggaagggcctgtacgagggaaccggcagactgttcttcgagttttacagactgctgcacgacgcccggcctaaggaaggcgacgaccggcccttcttttggctgttcgagaatgtggtggccatgggagtcagcgacaagcgggatattagccggttcctggagagcaaccccgtgatgatcgatgccaaggaagtgagcgccgcccaccgggccagatacttctggggcaatctgcctggcatgaacagacccctggccagcaccgtgaacgacaagctggagctgcaggagtgcctggagcacggccggatcgccaagttcagcaaggtgagaaccatcaccacccgaagcaacagcatcaaacaaggcaaggaccagcactttcctgtgttcatgaacgagaaggaggacatcctgtggtgtaccgagatggagagagtgttcgggttcccagtccactacacagatgtcagcaacatgtctagactggccagacagagactgctgggaagaagctggtccgtccctgtgatcagacacctgttcgcccctctgaaggagtacttcgcctgcgtgagcagcggcaacagcaacgccaacagccggggccccagcttctctagcggcctggtgccactgtccctgagagggagccacatgggccccatggagatctacaaaaccgtgagcgcctggaagcggcagcctgtgcgcgtgctgagcctgtttcggaatatcgataaagtcctgaaaagcctgggattcctggagagcggctctggctccggcggtggcaccctgaagtacgtggaggatgtgacaaacgtggtcagacgggatgtggagaagtggggccccttcgatctggtgtacggcagcacccaacccctgggcagctcttgtgaccggtgccctggctggtacatgtttcagttccaccggatcctgcagtacgccctgccgagacaggagtcccagcggccattcttttggattttcatggacaacttgctgctgaccgaggatgaccaggaaactaccactcggttcctgcagaccgaagccgtgaccctgcaggacgtgagaggccgggactaccagaacgccatgcgggtgtggtccaacatccctggactgaaaagcaagcacgcacctctgacccctaaagaagaggagtacctgcaggcccaggtgcggagcagaagcaagctggacgcccctaaggtggatctgctggtgaagaattgcctcctgcccctgagagagtacttcaagtatttcagccagaatagtctgcccctgggcggcccaagcagcggcgcccctcctcccagcggcggcagcccagccggctccccaacctctaccgaggagggcacctctgagtccgccacccccgagagcggccctggcacctccaccgagcccagcgagggcagcgcacccggcagccctgccggcagccccacctccacagaggagggaaccagcaccgagcccagcgaaggcagcgccccaggcaccagcaccgagcctagtgagggcggctctggcggcggcagcgcccaggagattaaacggatcaacaagatcagaagaagacttgtgaaagacagcaacaccaagaaggccggcaagacaggccccatgaaaaccctgctggttagagtgatgacacccgatctgagagagcggctggaaaacctgagaaagaagcctgaaaatatcccccagcccatcagcaatacatctagagccaacctgaataagctgctgaccgattacaccgaaatgaagaaggcgatcctgcatgtgtactgggaagagttccagaaggaccctgtgggcctgatgagccgggtggcccagcctgccagcaagaagatcgatcagaacaagctgaaacctgagatggacgagaagggcaacctgaccaccgccggctttgcctgctctcagtgtggccagcccctgttcgtgtacaagctggagcaggtgtctgagaagggcaaggcttacaccaactacttcggacggtgcaatgtggccgagcacgaaaagctgatcctgctggcccagctgaagcccgagaaggatagcgacgaagccgtgacatatagcctgggaaagtttgggcagagggccctggatttctacagcattcatgtgaccaaggagtccacccaccccgtgaagcccctggcccagatcgccggaaacagatacgcctccggacctgtgggaaaggccctgagcgacgcatgtatgggcacaatcgcctccttcctgtctaagtaccaggacatcatcatcgaacaccagaaggtggtgaagggcaaccagaagagactggagagcctgcgggagctggccggcaaggaaaacctggaataccctagcgtgaccctgccacctcagcctcacaccaaggagggcgttgatgcctacaacgaagtgatcgcccgggtgcgaatgtgggtgaacctgaacctgtggcagaagctgaagctaagcagagatgatgccaagcctctgctgagactgaagggattcccttcctttcctctggtcgagagacaggccaacgaagtggactggtgggacatggtgtgtaacgtgaagaagctgatcaacgagaaaaaggaggatggcaaggtgttttggcagaatctggctggctacaagagacaggaagccctgagaccatacctgagcagcgaggaagatcggaagaagggaaagaaattcgctcggtaccagctgggcgacctgctgctgcacctggaaaagaagcacggcgaggactggggaaaggtgtacgacgaggcctgggagcggattgacaagaaagtggaaggcctgagcaagcacatcaagctggaagaggaacggagaagcgaggacgcccagagcaaggccgccctgaccgactggctgcgggctaaggccagcttcgtgatcgagggcctgaaggaggccgacaaggacgagttctgcagatgcgagctgaagctgcagaagtggtacggggacctgcggggaaagcccttcgccatcgaagccgagaacagcatcctggacatcagcggcttcagcaagcagtacaactgtgccttcatctggcagaaggacggcgtgaagaagctgaacctgtacctgatcatcaactacttcaagggcggcaagctgcggttcaagaagatcaaacctgaagccttcgaagccaacagattctacaccgtgatcaacaaaaagagcggcgagatcgtgcccatggaggtgaacttcaacttcgacgaccccaacctgatcatcctgcctctggcctttggcaagagacagggcagagaattcatctggaacgacctgctgtccctggaaaccggcagcctgaagctggccaacggaagagtgatcgagaagacactgtacaacagaagaacccggcaggatgagcctgccctgttcgtggccctgaccttcgagcggcgggaggtcctggactcctccaatatcaaaccaatgaacctgatcggcgtggcaagaggcgaaaacatccccgccgtgatcgccctgaccgaccccgagggctgcccactgagccggtttaaggatagcctgggaaacccaacccacatcctgagaatcggcgagagctataaggagaagcagcggaccatccaggccaagaaggaggtggagcagcggagagccggcggctacagccggaagtacgccagcaaagccaagaatctggcagacgatatggtgagaaacaccgctagagatctgctgtactacgccgtgacccaggatgccatgctgatcttcgccaacctgagccggggcttcggccggcagggcaagcggaccttcatggccgagagacagtacacacggatggaggactggctgaccgccaagctggcctacgagggcctgagcaagacctacctgtccaagacactggcccagtacacctccaagacatgcagcaactgtgggtttaccatcaccagcgccgactacgacagggtgctggagaagctgaagaagacagcaacaggctggatgaccacaattaacggcaaggagctgaaggtggagggccagattacctactacaacagatacaagagacagaacgtagtcaaggacctgtccgtcgagctggatagactgagcgaagaatctgtgaacaacgacatctcctcctggacaaagggcagaagcggagaagctctgagcctcctgaagaaaagattctcccatagacccgtgcaggagaagttcgtgtgcctgaactgcggcttcgagacacacgcagccgagcaagccgccctgaacatcgccagatcctggctgttcctgcggagccaggagtacaagaaataccagacaaacaagacaaccggcaacaccgataagagagccttcgtcgagacctggcagtccttttaccggaagaagcttaaggaggtgtggaaacctgccgtgcggtctggcggatctggcggaggctccacaagcgcccccgcccccgtgagcttcagggacgtggccgtggacttcaccaggcaggagtggcagctgctggcccccgcccagagggccctgtacagggaggtgatgctggagaactacaggaacgtggccagcctgggccaccccgtgagcaagcccaacgtgatcttccagctggagcagagcgaggccccctggatgcccgagggcgaggccgccaggagcctgccccccgactgggaggccaggaccagccccaagaaaaagagaaaagtctaagctgccttctgcggggcttgccttctggccatgcccttcttctctcccttgcacctgtacctcttggtctttgaataaagcctgagtaggaaggctagcaaaaaaaaaaaaaaaaaaaaaaaaaaaaaaaaaaaaaaaaaaaaaaaaaaaaaaaaaaaaaaaaaaaaaaaaaaaaaaaa
